United States Patent Application Publication US 2018/0126003 A1 - sequence listing, part 142

SEQ ID NO: 249235 - DNA, 3549 bp, Artificial Sequence
  derived and/or modified sequence
atgtgctcgactaacccaggaaaatgggtcaccttcgatgatgatcccgctgttcagtcctctcagaaatcgaagaattttcccctggagaaccagggggtctgtcggcctaatggcctgaaactgaatcttccgggactgcgggagttcccctcaggctcaagctctactagctccactcctcttagttcacctattgtggacttctactttagccctggacccccttcaaattcgccgctgtctactccaaccaaggacttccctggattcccgggtattcccaaagcaggaacccatgtgctttatccgattcctgagagttcttccgattctcctctcgcaattagtggaggggaatcatctttgctccccacgaggccgacgtgtttatcacatgcactgctccctagtgatcacagttgtacccacccaactcccaaagtcgggctgcccgacgaggttaacccacagcaggccgagtctttaggctttcagtccgatgatctgccacagttccagtattttagagaggactgtgccttcagctctcccttttggaaagacgaggggtccgacagtcatttcacgttagacccaccaggatcgaaaaagatgtttagctcacggaataaagagatgccgatcgatcagaaatctctcaataaatgcagtcttaattacatctgcgaaaaactggagcacctgcaaagcgctgaaaaccaggacagtctgcgtagcctaagcatgcactgcctgtgtgcagaagagaatgcatcttctttcgtccctcacacacttttcaggagccagccgaaatctggatggagctttatgctgagaattcccgaaaaaaagaatatgatgtctagcagacagtgggggccaatcttcctcaaggtccttccgggaggtatactgcagatgtattatgagcaaggactcgagaaaccttttaaggagatccaactggatccttattgtcggctgtcagagcctaaggttgagaatttcagcgtcgctggcaaaatccataccgtgaagatagagcatgttagttatacagaaaaacgaaagtatcacagtaaaaccgaagtcgtgcatgagccagacatcgaacagatgctcaagctaggttccacatcctaccatgactttctagatttcttaacgactgttgaagaggaactcatgaaactccctgcggtctctaagccaaaaaagaattacgaggagcaggagatatccctagagattgtggacaatttttggggcaaggtgactaaagagggaaagtttgtcgagagtgctgttattacccagatctactgtctgtgttttgtcaacggcaacctagagtgctttctcactctgaatgaccttgagctccccaaacgcgacgaatcctattacgaaaaagattccgaaaaaaagggtatcgacatactagactaccacttccataaatgcgtgaatgttcaggaattcgaacagtccaggattattaagtttgtgccccttgacgcatgccggtttgaactcatgagattcaagaccttatacaacggggataacctgcccttttctctgaaatctgtggtggtggtgcagggagcttatgtggaactgcaagcctttgtgaatatggccagtctggcccaacgcagttcctatgcagggagtttgcgttcttgcgataacatccggattcatttccccgtaccctcacagtggatcaaggccctgtggaccatgaatctgcagcggcaaaagtcactgaaggctaaaatgaaccgtcgtgcctgccttggttcactgcaggagttagagtccgagccagtgatccaggtaaccgtcgggtctgccaagtatgagagtgcataccaagccgtcgtttggaagattgaccggctccctgacaaaaattctagcttagaccacccacactgcttatcctataaactggagctgggctctgatcaggaaatcccctcagattggtatccattcgccaccgtacagttcagtgtacccgacacctgcgcttcacggaccgaggtgcgatccttgggagtggagtcagatgtgcagcctcagaaacacgtgcagcagcgggcttgctacaacattcaaccaaagctgtaccggtccgtgatcgaggatgtcatcgaaggggtgcggaacctgttcgccgaagaagggatcgaagagcaggttctgaaggacttaaagcagttgtgggaaaccaaggtgctgcagtcgaaggccaccgaggatttttttcggaattctattcagtctcctctcttcacactacagctaccccactctctgcaccagactttacagagttctacagcctccctggtgatcccagccggtcggaccttaccctctttcaccaccgcggagcttgggacctcaaatagcagcgccaactttaccttccccggatatcctattcatgtgcccgcaggagtgactcttcagaccgtttccggccacttgtataaagttaatgtaccaataatggtaaccgagacaagcggcagggccggaattctccagcaccccatacagcaagtctttcaacagttgggtcagccttctgtgatccaaacctccgtaccacaactcaacccctggagcctgcaggcaacgacagaaaaatcccaaagaattgaaactgttctgcagcaaccagctattctaccatccggccctgtggaccgcaaacacttagagaatgcaactagcgatatcctcgtgagtccaggaaacgagcacaaaatcgtgcccgaggccttgctttgtcaccaggagtcgagccactatatctctctccctggggtcgtctttagtcctcaggtttctcagacaaactccaacgttgaatctgtattatccggatctgctagcatggcacagaatctgcacgacgagagtctctccacctctccacatggcgctttacaccagcatgtgaccgatatccaactgcacattctgaagaatcggatgtatggatgtgactctgtcaaacaacctcggaatatagaggagccaagcaacatcccagtctccgaaaaggactcaaacagtcaagtcgacctgtcaattcgggtgacagatgatgatataggagagatcatccaggtggacggctccggggacacatccagcaatgaagagattgggtctacgcgggatgccgatgagaatgaatttcttggaaacattgacggcggtgatctgaaggttccagaagaagaagccgacagcatctccaacgaagacagcgccactaatagcagcgacaacgaggacccccaagtgaacattgtcgaggaggaccccttgaactctggagacgacgtttctgagcaggatgtgccagatctcttcgatactgacaacgtgatcgtttgccagtatgacaaaattcatcggtccaagaataagtggaaattttatctgaaagatggagttatgtgtttcggaggacgggattacgtttttgctaaggccattggcgacgcggaatggtag

SEQ ID NO: 249236 - DNA, 3759 bp, Artificial Sequence
  derived and/or modified sequence
agagtcaacctatttgatttcttgacaagaccacaatctgatcccaaagatgtgctccacaaatccaggcaaatgggtcacctttgatgatgatcctgctgttcaatcttctcaaaagtcaaagaattttcctctggagaatcaaggtgtctgtagaccaaatggactgaagctgaaccttcctggcctcagggaatttcccagtggatcttcctccaccagcagcactcctctctcctcccccattgtagatttttatttcagtccaggacctccaagtaactctcctctttctacacctaccaaagacttcccaggttttcctggcatccccaaagcagggactcatgtgctttatcctattccagaatcatcttcagacagcccactcgcaatatcaggaggagaatcttccttactgcctaccagaccaacatgtttatcccatgccttgttacccagtgaccactcatgtacacatccaactcccaaagtaggtcttccagatgaagttaatcctcaacaggctgaaagcctaggattccaaagtgatgatctcccccagtttcagtattttcgagaggactgtgctttttcaagtccattttggaaagatgaaggcagtgattcccatttcacccttgacccaccaggaagcaaaaagatgttctcatcaagaaacaaggagatgcctattgaccaaaaaagcctaaataagtgttcactcaactatatctgtgagaagcttgaacatctccagtcagctgagaaccaagactcacttagaagtttgtctatgcactgtctatgtgctgaagaaaatgcctcttcctttgtcccccacacactcttcaggagtcagccaaaatccggatggtctttcatgctgagaattcctgagaagaagaatatgatgtcttcccggcaatggggaccaatttttctgaaagttttgcctggaggaattttgcagatgtattatgaacagggattagaaaaaccatttaaagagatacagcttgatccatattgtaggctttctgaacccaaggttgagaacttcagtgtagcaggaaaaatccacactgtgaagattgaacatgtgtcttacacagaaaaaaggaaataccattctaagacagaagtagttcatgaacctgacatagagcagatgctgaagttggggtccacatcgtaccatgacttccttgactttctgactactgtggaggaggagctgatgaagttgccagctgtttcaaaaccaaaaaagaactacgaggagcaagaaatttccttggaaattgtggacaacttttggggtaaagtcacaaaagaaggaaaatttgttgaaagtgctgtgataactcaaatttattgcctctgctttgtgaatgggaacctggaatgctttttaaccttgaatgaccttgagttgccgaagcgagatgaatcctattatgagaaggactcagaaaaaaaggggattgatattcttgactaccattttcataagtgtgtgaatgtacaagaatttgagcaatcaagaatcattaagtttgtacctctggatgcctgccggtttgagctgatgcgtttcaagactttgtataatggggataatcttcccttttccttgaagtctgtagtggttgtccagggagcatacgtggaacttcaggcttttgtcaacatggcctcattggcgcagaggtcatcctatgctggttccttaaggtcctgtgacaatataaggatacactttcctgtcccatcgcagtggatcaaggccctttggaccatgaacctccagaggcagaagtctctgaaagctaaaatgaaccgccgagcatgtctggggagtttacaggaacttgaatctgaacctgtcattcaagtcactgtggggtcagcaaaatatgagagtgcctaccaggcagtggtatggaagatagatcggcttccagacaaaaattcaagtctagatcatccccattgtctgtcatacaaattagagcttggatcagaccaagaaattccctctgattggtatccatttgctactgttcagttttccgtgcctgacacctgtgcctcaaggacagaggtcaggtctctgggagtggagagtgatgtccagccacagaaacatgttcagcagcgagcttgctacaacatccagcctaaactctacagatctgtaattgaagatgtaattgaaggagttcggaatctatttgctgaagaaggtatagaggaacaagttttaaaagacttgaagcagctctgggaaaccaaggttttgcagtctaaagcaacagaagacttcttcagaaatagcatccaatcacctctgtttactcttcagttgccgcacagcttgcaccaaacattgcaatcgtcaacagcatcattagttattcctgctggtagaactcttccaagttttaccacagcagaactgggcacttcaaactccagtgcaaactttacttttcctggttatcccattcatgtaccagcaggtgtgacactacagactgtatctggtcacctttataaagtcaatgtaccaattatggtgacagagacttctggaagagcaggtattcttcagcatccaattcagcaagtatttcaacagcttggccagccttcagtaatacaaactagtgttccacaattgaatccatggtctcttcaagcaactactgaaaaatcacagagaattgaaaccgtgctacagcaacccgcaattctaccttctgggccagtagataggaaacacttagaaaatgccaccagtgatatacttgtatctcctggaaatgagcataaaatcgtgcctgaagctttgttgtgtcatcaggaaagttctcactatatcagtcttccaggtgttgtattttctccacaggtctctcaaacaaattctaatgtggagtcagtgctcagtggttcagctagcatggctcaaaatctgcatgatgagtccctctccacaagccctcatggggctctccaccagcacgtgactgatattcagcttcatattcttaaaaataggatgtatggatgtgattctgtaaagcaaccaagaaatatagaggaacccagcaacatacctgtatcagagaaggattctaattctcaggtggatttaagcattcgggttactgatgatgatattggtgaaataattcaagtagatggaagcggtgatacatcttccaatgaagaaataggaagtacaagagatgcagatgagaatgaatttctagggaatattgacgggggagatctgaaggtacctgaagaagaagctgacagtatttcaaatgaggattcagccacaaacagtagtgataatgaagaccctcaagtaaacattgtagaagaggaccctttaaattctggagatgatgttagtgaacaggatgtgccagacctgtttgacacggataatgttattgtctgtcagtatgataagattcatcgaagcaagaacaaatggaaattctatttgaaagatggtgttatgtgttttggagggagagactatgtatttgcaaaagccattggtgatgcagagtggtaaaccttgtgagctcagtacatctattttgtgaacatcagttggattatattgcatattgtgaattcatttttattttgaatatagtccagcacagagctgttcaaatttttagttcactgtatggaatttaataaaattataattcagatgcagatacaatt

SEQ ID NO: 249237 - DNA, 3824 bp, Artificial Sequence
  derived and/or modified sequence
ggactttgggactggacagacctggtcacagtctaggttctacatcttactggtcgagcaactttagagtcaacctatttgatttcttgacaagaccacaatctgatcccaaagatgtgctccacaaatccaggcaaatgggtcacctttgatgatgatcctgctgttcaatcttctcaaaagtcaaagaattttcctctggagaatcaaggtgtctgtagaccaaatggactgaagctgaaccttcctggcctcagggaatttcccagtggatcttcctccaccagcagcactcctctctcctcccccattgtagatttttatttcagtccaggacctccaagtaactctcctctttctacacctaccaaagacttcccaggttttcctggcatccccaaagcagggactcatgtgctttatcctattccagaatcatcttcagacagcccactcgcaatatcaggaggagaatcttccttactgcctaccagaccaacatgtttatcccatgccttgttacccagtgaccactcatgtacacatccaactcccaaagtaggtcttccagatgaagttaatcctcaacaggctgaaagcctaggattccaaagtgatgatctcccccagtttcagtattttcgagaggactgtgctttttcaagtccattttggaaagatgaaggcagtgattcccatttcacccttgacccaccaggaagcaaaaagatgttctcatcaagaaacaaggagatgcctattgaccaaaaaagcctaaataagtgttcactcaactatatctgtgagaagcttgaacatctccagtcagctgagaaccaagactcacttagaagtttgtctatgcactgtctatgtgctgaagaaaatgcctcttcctttgtcccccacacactcttcaggagtcagccaaaatccggatggtctttcatgctgagaattcctgagaagaagaatatgatgtcttcccggcaatggggaccaatttttctgaaagttttgcctggaggaattttgcagatgtattatgaacagggattagaaaaaccatttaaagagatacagcttgatccatattgtaggctttctgaacccaaggttgagaacttcagtgtagcaggaaaaatccacactgtgaagattgaacatgtgtcttacacagaaaaaaggaaataccattctaagacagaagtagttcatgaacctgacatagagcagatgctgaagttggggtccacatcgtaccatgacttccttgactttctgactactgtggaggaggagctgatgaagttgccagctgtttcaaaaccaaaaaagaactacgaggagcaagaaatttccttggaaattgtggacaacttttggggtaaagtcacaaaagaaggaaaatttgttgaaagtgctgtgataactcaaatttattgcctctgctttgtgaatgggaacctggaatgctttttaaccttgaatgaccttgagttgccgaagcgagatgaatcctattatgagaaggactcagaaaaaaaggggattgatattcttgactaccattttcataagtgtgtgaatgtacaagaatttgagcaatcaagaatcattaagtttgtacctctggatgcctgccggtttgagctgatgcgtttcaagactttgtataatggggataatcttcccttttccttgaagtctgtagtggttgtccagggagcatacgtggaacttcaggcttttgtcaacatggcctcattggcgcagaggtcatcctatgctggttccttaaggtcctgtgacaatataaggatacactttcctgtcccatcgcagtggatcaaggccctttggaccatgaacctccagaggcagaagtctctgaaagctaaaatgaaccgccgagcatgtctggggagtttacaggaacttgaatctgaacctgtcattcaagtcactgtggggtcagcaaaatatgagagtgcctaccaggcagtggtatggaagatagatcggcttccagacaaaaattcaagtctagatcatccccattgtctgtcatacaaattagagcttggatcagaccaagaaattccctctgattggtatccatttgctactgttcagttttccgtgcctgacacctgtgcctcaaggacagaggtcaggtctctgggagtggagagtgatgtccagccacagaaacatgttcagcagcgagcttgctacaacatccagcctaaactctacagatctgtaattgaagatgtaattgaaggagttcggaatctatttgctgaagaaggtatagaggaacaagttttaaaagacttgaagcagctctgggaaaccaaggttttgcagtctaaagcaacagaagacttcttcagaaatagcatccaatcacctctgtttactcttcagttgccgcacagcttgcaccaaacattgcaatcgtcaacagcatcattagttattcctgctggtagaactcttccaagttttaccacagcagaactgggcacttcaaactccagtgcaaactttacttttcctggttatcccattcatgtaccagcaggtgtgacactacagactgtatctggtcacctttataaagtcaatgtaccaattatggtgacagagacttctggaagagcaggtattcttcagcatccaattcagcaagtatttcaacagcttggccagccttcagtaatacaaactagtgttccacaattgaatccatggtctcttcaagcaactactgaaaaatcacagagaattgaaaccgtgctacagcaacccgcaattctaccttctgggccagtagataggaaacacttagaaaatgccaccagtgatatacttgtatctcctggaaatgagcataaaatcgtgcctgaagctttgttgtgtcatcaggaaagttctcactatatcagtcttccaggtgttgtattttctccacaggtctctcaaacaaattctaatgtggagtcagtgctcagtggttcagctagcatggctcaaaatctgcatgatgagtccctctccacaagccctcatggggctctccaccagcacgtgactgatattcagcttcatattcttaaaaataggatgtatggatgtgattctgtaaagcaaccaagaaatatagaggaacccagcaacatacctgtatcagagaaggattctaattctcaggtggatttaagcattcgggttactgatgatgatattggtgaaataattcaagtagatggaagcggtgatacatcttccaatgaagaaataggaagtacaagagatgcagatgagaatgaatttctagggaatattgacgggggagatctgaaggtacctgaagaagaagctgacagtatttcaaatgaggattcagccacaaacagtagtgataatgaagaccctcaagtaaacattgtagaagaggaccctttaaattctggagatgatgttagtgaacaggatgtgccagacctgtttgacacggataatgttattgtctgtcagtatgataagattcatcgaagcaagaacaaatggaaattctatttgaaagatggtgttatgtgttttggagggagagactatgtatttgcaaaagccattggtgatgcagagtggtaaaccttgtgagctcagtacatctattttgtgaacatcagttggattatattgcatattgtgaattcatttttattttgaatatagtccagcacagagctgttcaaatttttagttcactgtatggaatttaataaaattataattcagatgcagatacaatt

SEQ ID NO: 249238 - DNA, 3821 bp, Artificial Sequence
  derived and/or modified sequence
agaagatgcgctggagggaagagaacggagcgtcggacaccagaaaaactttgggggattcgggagtcaacctatttgatttcttgacaagaccacaatctgatcccaaagatgtgctccacaaatccaggcaaatgggtcacctttgatgatgatcctgctgttcaatcttctcaaaagtcaaagaattttcctctggagaatcaaggtgtctgtagaccaaatggactgaagctgaaccttcctggcctcagggaatttcccagtggatcttcctccaccagcagcactcctctctcctcccccattgtagatttttatttcagtccaggacctccaagtaactctcctctttctacacctaccaaagacttcccaggttttcctggcatccccaaagcagggactcatgtgctttatcctattccagaatcatcttcagacagcccactcgcaatatcaggaggagaatcttccttactgcctaccagaccaacatgtttatcccatgccttgttacccagtgaccactcatgtacacatccaactcccaaagtaggtcttccagatgaagttaatcctcaacaggctgaaagcctaggattccaaagtgatgatctcccccagtttcagtattttcgagaggactgtgctttttcaagtccattttggaaagatgaaggcagtgattcccatttcacccttgacccaccaggaagcaaaaagatgttctcatcaagaaacaaggagatgcctattgaccaaaaaagcctaaataagtgttcactcaactatatctgtgagaagcttgaacatctccagtcagctgagaaccaagactcacttagaagtttgtctatgcactgtctatgtgctgaagaaaatgcctcttcctttgtcccccacacactcttcaggagtcagccaaaatccggatggtctttcatgctgagaattcctgagaagaagaatatgatgtcttcccggcaatggggaccaatttttctgaaagttttgcctggaggaattttgcagatgtattatgaacagggattagaaaaaccatttaaagagatacagcttgatccatattgtaggctttctgaacccaaggttgagaacttcagtgtagcaggaaaaatccacactgtgaagattgaacatgtgtcttacacagaaaaaaggaaataccattctaagacagaagtagttcatgaacctgacatagagcagatgctgaagttggggtccacatcgtaccatgacttccttgactttctgactactgtggaggaggagctgatgaagttgccagctgtttcaaaaccaaaaaagaactacgaggagcaagaaatttccttggaaattgtggacaacttttggggtaaagtcacaaaagaaggaaaatttgttgaaagtgctgtgataactcaaatttattgcctctgctttgtgaatgggaacctggaatgctttttaaccttgaatgaccttgagttgccgaagcgagatgaatcctattatgagaaggactcagaaaaaaaggggattgatattcttgactaccattttcataagtgtgtgaatgtacaagaatttgagcaatcaagaatcattaagtttgtacctctggatgcctgccggtttgagctgatgcgtttcaagactttgtataatggggataatcttcccttttccttgaagtctgtagtggttgtccagggagcatacgtggaacttcaggcttttgtcaacatggcctcattggcgcagaggtcatcctatgctggttccttaaggtcctgtgacaatataaggatacactttcctgtcccatcgcagtggatcaaggccctttggaccatgaacctccagaggcagaagtctctgaaagctaaaatgaaccgccgagcatgtctggggagtttacaggaacttgaatctgaacctgtcattcaagtcactgtggggtcagcaaaatatgagagtgcctaccaggcagtggtatggaagatagatcggcttccagacaaaaattcaagtctagatcatccccattgtctgtcatacaaattagagcttggatcagaccaagaaattccctctgattggtatccatttgctactgttcagttttccgtgcctgacacctgtgcctcaaggacagaggtcaggtctctgggagtggagagtgatgtccagccacagaaacatgttcagcagcgagcttgctacaacatccagcctaaactctacagatctgtaattgaagatgtaattgaaggagttcggaatctatttgctgaagaaggtatagaggaacaagttttaaaagacttgaagcagctctgggaaaccaaggttttgcagtctaaagcaacagaagacttcttcagaaatagcatccaatcacctctgtttactcttcagttgccgcacagcttgcaccaaacattgcaatcgtcaacagcatcattagttattcctgctggtagaactcttccaagttttaccacagcagaactgggcacttcaaactccagtgcaaactttacttttcctggttatcccattcatgtaccagcaggtgtgacactacagactgtatctggtcacctttataaagtcaatgtaccaattatggtgacagagacttctggaagagcaggtattcttcagcatccaattcagcaagtatttcaacagcttggccagccttcagtaatacaaactagtgttccacaattgaatccatggtctcttcaagcaactactgaaaaatcacagagaattgaaaccgtgctacagcaacccgcaattctaccttctgggccagtagataggaaacacttagaaaatgccaccagtgatatacttgtatctcctggaaatgagcataaaatcgtgcctgaagctttgttgtgtcatcaggaaagttctcactatatcagtcttccaggtgttgtattttctccacaggtctctcaaacaaattctaatgtggagtcagtgctcagtggttcagctagcatggctcaaaatctgcatgatgagtccctctccacaagccctcatggggctctccaccagcacgtgactgatattcagcttcatattcttaaaaataggatgtatggatgtgattctgtaaagcaaccaagaaatatagaggaacccagcaacatacctgtatcagagaaggattctaattctcaggtggatttaagcattcgggttactgatgatgatattggtgaaataattcaagtagatggaagcggtgatacatcttccaatgaagaaataggaagtacaagagatgcagatgagaatgaatttctagggaatattgacgggggagatctgaaggtacctgaagaagaagctgacagtatttcaaatgaggattcagccacaaacagtagtgataatgaagaccctcaagtaaacattgtagaagaggaccctttaaattctggagatgatgttagtgaacaggatgtgccagacctgtttgacacggataatgttattgtctgtcagtatgataagattcatcgaagcaagaacaaatggaaattctatttgaaagatggtgttatgtgttttggagggagagactatgtatttgcaaaagccattggtgatgcagagtggtaaaccttgtgagctcagtacatctattttgtgaacatcagttggattatattgcatattgtgaattcatttttattttgaatatagtccagcacagagctgttcaaatttttagttcactgtatggaatttaataaaattataattcagatgcagatacaatt

SEQ ID NO: 249239 - protein, 501 aa, Artificial Sequence
  derived and/or modified sequence
METNESTEGSRSRSRSLDIQPSSEGLGPTSEPFPSSDDSPRSALAAATAAAAAAASAAAATAAFTTAKAAALSTKTPAPCSEFMEPSSDPSLLGEPCAGPGFTHNIAHGSLGFEPVYVSCIAQDTCTTTDHSSNPGPVPGSSSGPVLGSSSGAGHGSGSGSGPGCGSVPGSGSGPGPGSGPGSGPGHGSGSHPGPASGPGPDTGPDSELSPCIPPGFRNLVADRVPNYTSWSQHCPWEPQKQPPWEFLQVLEPGARGLWKPPDIKGKLMVCYETLPRGQCLLYNWEEERATNHLDQVPSMQDGSESFFFRHGHRGLLTMQLKSPMPSSTTQKDSYQPPGNVYWPLRGKREAMLEMLLQHQICKEVQAEQEPTRKLFEVESVTHHDYRMELAQAGTPAPTKPHDYRQEQPETFWIQRAPQLPTWWPLPTQVPAAEDYLTWKEWGFTGVQEVLSALLRATPGEYSVNICGMNEHPVCSRTWTNRLCHQEMGSKKTVTQEDRGW

SEQ ID NO: 249240 - DNA, 1506 bp, Artificial Sequence
  derived and/or modified sequence
atggagaccaacgagagcaccgagggcagcagaagcagaagcagaagcctggacatccagcccagcagcgagggcctgggccccaccagcgagcccttccccagcagcgacgacagccccagaagcgccctggccgccgccaccgccgccgccgccgccgccgccagcgccgccgccgccaccgccgccttcaccaccgccaaggccgccgccctgagcaccaagacccccgccccctgcagcgagttcatggagcccagcagcgaccccagcctgctgggcgagccctgcgccggccccggcttcacccacaacatcgcccacggcagcctgggcttcgagcccgtgtacgtgagctgcatcgcccaggacacctgcaccaccaccgaccacagcagcaaccccggccccgtgcccggcagcagcagcggccccgtgctgggcagcagcagcggcgccggccacggcagcggcagcggcagcggccccggctgcggcagcgtgcccggcagcggcagcggccccggccccggcagcggccccggcagcggccccggccacggcagcggcagccaccccggccccgccagcggccccggccccgacaccggccccgacagcgagctgagcccctgcatcccccccggcttcagaaacctggtggccgacagagtgcccaactacaccagctggagccagcactgcccctgggagccccagaagcagcccccctgggagttcctgcaggtgctggagcccggcgccagaggcctgtggaagccccccgacatcaagggcaagctgatggtgtgctacgagaccctgcccagaggccagtgcctgctgtacaactgggaggaggagagagccaccaaccacctggaccaggtgcccagcatgcaggacggcagcgagagcttcttcttcagacacggccacagaggcctgctgaccatgcagctgaagagccccatgcccagcagcaccacccagaaggacagctaccagccccccggcaacgtgtactggcccctgagaggcaagagagaggccatgctggagatgctgctgcagcaccagatctgcaaggaggtgcaggccgagcaggagcccaccagaaagctgttcgaggtggagagcgtgacccaccacgactacagaatggagctggcccaggccggcacccccgcccccaccaagccccacgactacagacaggagcagcccgagaccttctggatccagagagccccccagctgcccacctggtggcccctgcccacccaggtgcccgccgccgaggactacctgacctggaaggagtggggcttcaccggcgtgcaggaggtgctgagcgccctgctgagagccacccccggcgagtacagcgtgaacatctgcggcatgaacgagcaccccgtgtgcagcagaacctggaccaacagactgtgccaccaggagatgggcagcaagaagaccgtgacccaggaggacagaggctggtag

SEQ ID NO: 249241 - DNA, 1506 bp, Artificial Sequence
  derived and/or modified sequence
atggagacaaatgagagtacggagggctcccgttcacgtagcaggtctctcgacattcaaccctcttctgaaggcctcggcccgacctcagagccgttcccttcatcagatgattctccacgtagtgccctcgccgccgctacagccgcggctgcagccgcggcgtcagccgcagctgccacagccgcctttactaccgccaaagccgccgccctgtctacaaaaacacctgcaccgtgcagtgagttcatggagccctcttctgacccttcactattgggggagccgtgcgccgggccaggcttcacccataacatagcccacgggtccctgggctttgagcctgtttacgtaagctgcatcgctcaggatacctgtactaccactgatcactcttccaatcccgggcctgtgcctggttcttccagcggaccagtcctaggatccagcagcggcgcgggccacgggtctggcagcggcagtggtcccgggtgcggatcagtgcctggatctgggagtggccccggacctggctctggacccggcagtgggccaggtcacgggtctggctcccaccccggaccagcgtccggacccggccccgacaccggaccagactctgaactctccccttgtatccccccaggctttcggaatctggtggcagatcgcgtgcctaattacaccagctggtctcagcattgtccctgggagcctcagaagcagcccccatgggagtttctgcaagttctcgaaccaggggcgcgaggcctttggaaaccaccggatatcaaaggcaaactgatggtgtgctacgaaacgttgccccggggccagtgtctcctatacaattgggaggaagagagagcaacaaatcatctggaccaggtcccttctatgcaggacggatccgaatctttcttctttagacacggacaccgcggtcttctgacgatgcaattgaagtctcctatgccaagctccacgacccaaaaggattcatatcagcccccgggtaatgtttactggcccttacgcggaaagcgcgaagcgatgctggaaatgctgctacagcatcaaatctgtaaagaggtgcaggctgagcaggaacccactaggaagctgttcgaagtagagagcgtcacccaccacgactaccgcatggagcttgcccaggcggggactcctgccccaaccaagcctcacgactatagacaagaacagccagagaccttttggattcagcgcgccccacaactgcctacgtggtggccgctccccacacaggttccagcagcggaagactatttaacgtggaaggagtggggttttaccggtgtgcaagaggtgttaagtgccctgctccgggcaacgccaggagaatattccgtcaatatctgcggaatgaatgaacacccggtgtgctctcgtacatggacaaatcgcctatgccatcaggagatgggttctaagaagaccgtcacccaggaggatagaggttggtag

SEQ ID NO: 249242 - DNA, 1506 bp, Artificial Sequence
  derived and/or modified sequence
atggagaccaatgaaagcacagagggcagccgcagccgcagccgcagcctggacatccagcccagcagcgagggcctgggccccaccagcgagcccttccccagcagtgatgacagccccaggtctgccctggccgccgccacagctgctgctgctgctgctgccagcgctgctgctgccacagctgccttcaccacagccaaggccgccgccctgagcaccaagaccccagccccctgcagcgagttcatggagcccagcagtgaccccagcctgctgggggagccctgtgccggccctggcttcacccacaacatcgcccacggcagcctgggctttgagcctgtgtatgtgtcctgcatcgcccaggacacctgcaccaccacagaccacagcagcaaccctggccctgtgcccggcagcagcagcggccctgtgctgggcagcagcagtggagctggccacggcagcggcagcggcagcggccctggctgcggctctgtgcccggcagcggcagcggccctggccctggcagcggccctggcagcggccctggccacggcagcggcagccaccctggccctgccagcggccctggccctgacaccggcccagattctgagctgagcccctgcatccccccaggcttcaggaacctggtggccgacagagtgcccaactacacctcctggagccagcactgcccctgggagccccagaagcagcccccctgggagttcctgcaggtgctggagcccggggcccggggcctgtggaagcccccagacatcaagggcaagctgatggtgtgctatgagaccctgccccggggccagtgcctgctgtacaactgggaggaggagcgggccaccaaccacctggaccaggtgcccagcatgcaggacggcagcgagagcttcttcttcagacatggccaccggggcctgctgaccatgcagctgaagagccccatgcccagcagcaccacccagaaggacagctaccagcccccaggaaatgtgtactggcccctgcggggcaagcgggaggccatgctggagatgctgctgcagcaccagatctgcaaggaggtgcaggccgagcaggagcccaccaggaagctgtttgaggtggagagcgtgacccaccacgactacaggatggagctggcccaggccggcaccccagcccccaccaagccccatgactaccggcaggagcagcctgagaccttctggatccagagggccccccagctgcccacctggtggcccctgcccacccaggtgcctgctgctgaggactacctgacctggaaggagtggggcttcaccggggtgcaggaggtgctgagcgccctgctgcgggccaccccaggagagtacagcgtgaacatctgtggcatgaatgagcaccctgtgtgcagcaggacctggaccaaccggctgtgccaccaggagatgggcagcaagaagacagtgacccaggaggaccggggctggtag

SEQ ID NO: 249243 - DNA, 1506 bp, Artificial Sequence
  derived and/or modified sequence
atggagaccaacgagagcaccgagggcagccggagccggagccggtcattagacatccagcccagtagtgaaggtttggggcccacctccgagcctttcccatctagtgacgatagccctcgatccgccctagcagcagcaacagccgccgcggcagctgcggcttcagccgcagccgctacagccgctttcaccactgccaaagccgccgccctgtccacaaagacacccgctccttgtagcgagtttatggagcctagtagcgatccctccttacttggcgagccgtgtgctggtccaggcttcacacacaatatcgcccacgggtccctgggttttgagccggtttatgttagttgtattgctcaggacacatgcacaactaccgatcactcgagtaaccccggcccagtgcccggatcatctagtggcccggtcctgggttcttccagtggcgcgggacacggcagcggtagtggcagcggaccaggctgcggtagtgtgccagggtcggggtccggtcctgggccaggatcaggacccggaagtgggcctggacacgggtccgggtcacaccccggaccagctagcggtcccgggcctgacactggaccagacagtgagctatccccctgtatcccacctgggttccgtaacctcgtagccgacagggtacctaactatacatcctggagtcagcactgcccatgggaaccccagaaacagcccccctgggagttcttgcaggttcttgagcccggagctcgaggtctttggaagcctcctgatatcaaagggaaattgatggtgtgctacgaaaccctccccaggggccagtgccttctctataattgggaagaggaacgggcaaccaatcatctggatcaggtgccgagcatgcaggacgggtccgagagcttttttttccgccatgggcacagaggactgctaacaatgcagctgaagagtcccatgccttccagtacgacccagaaggattcatatcaacctccaggaaatgtctattggccgctcagaggtaaaagagaggccatgctcgaaatgctactgcagcaccagatctgtaaggaagtgcaggccgagcaggaacccacacgcaaactgtttgaagtggagtctgtaactcaccacgactatcgcatggagttagctcaggcaggaaccccagccccaactaagcctcatgactaccgacaggagcagccagaaactttctggattcagcgcgctccccagttgccaacctggtggcccttaccaactcaagtcccagcagctgaggactacctgacctggaaagagtggggttttaccggcgtccaggaggtcctgtctgcactcctgagagccacacccggcgaatactctgtgaatatctgcggtatgaacgaacatcctgtatgtagtaggacctggaccaatagattatgtcatcaagagatggggagcaaaaaaaccgttacccaggaagatagggggtggtag

SEQ ID NO: 249244 - DNA, 1506 bp, Artificial Sequence
  derived and/or modified sequence
atggagacaaatgaatcgacagagggctctagatctcgatccagaagtctggatatccaaccttcgtccgagggcctaggaccaacaagcgagccatttccgagtagcgacgactccccaagaagcgccctcgcagcagctacagcagcggctgcagccgcagctagcgcagccgcagccaccgccgctttcacaactgccaaggctgccgcactaagcaccaaaaccccagcaccgtgtagtgagttcatggaacctagcagtgatcccagtcttctgggcgagccctgcgcgggacccggtttcactcataatattgcccacggctcactgggttttgagcctgtgtacgtgtcttgcatagcccaggacacttgcactaccacagatcactcctcaaatccaggtccagtccccggttcttcttcggggcctgttcttgggtcttcctcaggggcagggcatggctctggcagcggttctggccctgggtgcggaagcgtcccaggtagtgggtcaggcccaggccctgggtccgggcctggcagtggtccgggacatggaagcgggtctcatcctggtcccgcaagcggacccggtcccgatactggcccagatagcgaattaagcccatgtatcccacctggctttaggaatctggtggctgacagggtgcctaattatacaagttggagccagcattgcccctgggagccacaaaaacaacccccatgggaatttctccaggttctggaacctggggcacgtggcttatggaagcccccagacatcaagggcaaattgatggtgtgctacgaaacgctccctcgtggtcaatgtttactgtataactgggaggaagagcgagcgactaatcacctggatcaagtcccaagcatgcaagacggctcagagtcctttttctttcgccacgggcatagaggcctcttaaccatgcagctgaaatcacctatgccatcctccactactcagaaagattcctaccagcctcctggaaatgtctactggccgcttagaggcaagcgcgaggctatgttggagatgctgttacagcaccagatctgtaaagaggttcaagctgagcaggaacctactcgcaagctgttcgaggtggaatcggtgacacaccacgactaccgtatggagctggcacaagcagggaccccagctcctactaagccacatgattacaggcaggagcagccagaaacattctggatccagagagcaccccaactgcccacctggtggcctctgcctacccaagtgcctgcggctgaagattacttgacatggaaagagtgggggttcactggcgtccaggaagtcctgtctgccctgctgcgggctactccgggtgaatatagtgtcaacatatgcggcatgaacgagcacccagtatgcagccggacctggactaacagactctgccaccaagagatgggctctaagaaaactgtgacacaggaggaccgagggtggtag

SEQ ID NO: 249245 - DNA, 1759 bp, Artificial Sequence
  derived and/or modified sequence
gaagacttccgccccgcagaggacttgcctccaccgccacctgcaagtccgcccagctgtacttctgcgcaggctccaggagttgtttgctgtctctatggcaacccagtagctggagtctgaagatggagaccaacgagtctacggagggatcgcggtcgcggtcgcgatctttagacatacagcccagctccgaaggactggggcccacttcggaaccgtttccttcttcagatgacagtcccaggtcggccctggcagctgcaaccgcagcagctgcagcggctgcatcagctgctgcagctactgcagccttcaccactgccaaagcagctgcattatctacaaagaccccagcgccctgttctgagttcatggagccgtcctctgaccccagccttcttggggagccctgtgcgggacccggctttacccacaatatagcccatgggagtcttggctttgagcccgtctatgtttcctgtattgctcaggacacttgcactacaactgaccatagttctaatcctggccctgttccaggctctagctctgggcctgttcttggttccagctcaggtgctggccatggctctggctctggctctggtcctggctgtggctctgtccctggctctggctctggtcctggtcctggctctggtcctggctctggtcctggtcatggctctggctctcatcctggtcctgcctctgggcctggtccagacactggccctgactctgagctcagcccctgtattcctccagggttcagaaacctggtggcagatcgggtccctaactatacctcctggagtcagcactgcccctgggagccccagaaacaaccaccttgggaatttttgcaagtcttagaaccgggtgcccgaggactatggaaacccccagacattaaagggaagcttatggtttgctatgaaactttgccgcggggccagtgcctcctctacaactgggaggaagagagagccaccaaccacctggatcaagtcccaagcatgcaggatggctctgagagttttttcttccgacacggacaccggggactgctgactatgcaactaaagtcacccatgccctccagcaccacccagaaagactcgtaccagccaccaggaaacgtctattggccacttcgagggaagcgtgaagccatgctggagatgctcctgcagcatcagatctgtaaagaggtgcaggcagaacaggaacccacaaggaagctcttcgaggttgagtctgtgacacaccatgactaccgaatggagctggcacaagcagggactcctgccccaacaaagcctcacgactaccgccaggagcaacctgagaccttctggatacagagggcaccacagctgccgacatggtggccattgcccacccaggtaccagcagcagaagactatctgacttggaaagaatgggggtttacaggagtccaggaggtcctttccgctctcctaagagccacacctggtgaatactcagtaaacatttgcggaatgaatgaacaccctgtctgcagcaggacatggacaaataggctctgccatcaggaaatgggaagcaagaaaacggtaactcaagaggacagaggctggtgaggaggtaaagcaggcccagtgaaatggacctgacagcccaaactgtcagagaggaggaaagcaggcatttgattttggtaattgtgccaaagctatgtaagagaataaatgccattgttttaaggaaa

SEQ ID NO: 249246 - protein, 161 aa, Artificial Sequence
  derived and/or modified sequence
MYQVVAFLAMVMGTHTYSHWPSCCPSKGQDTSEELLRWSTVPVPPLEPARPNRHPESCRASEDGPLNSRAISPWRYELDRDLNRLPQDLYHARCLCPHCVSLQTGSHMDPRGNSELLYHNQTVFYRRPCHGEKGTHKGYCLERRLYRVSLACVCVRPRVMG

SEQ ID NO: 249247 - DNA, 486 bp, Artificial Sequence
  derived and/or modified sequence
atgtaccaggtggtggccttcctggccatggtgatgggcacccacacctacagccactggcccagctgctgccccagcaagggccaggacaccagcgaggagctgctgagatggagcaccgtgcccgtgccccccctggagcccgccagacccaacagacaccccgagagctgcagagccagcgaggacggccccctgaacagcagagccatcagcccctggagatacgagctggacagagacctgaacagactgccccaggacctgtaccacgccagatgcctgtgcccccactgcgtgagcctgcagaccggcagccacatggaccccagaggcaacagcgagctgctgtaccacaaccagaccgtgttctacagaagaccctgccacggcgagaagggcacccacaagggctactgcctggagagaagactgtacagagtgagcctggcctgcgtgtgcgtgagacccagagtgatgggctag

SEQ ID NO: 249248 - DNA, 486 bp, Artificial Sequence
  derived and/or modified sequence
atgtatcaggtggtggcttttctcgcaatggtgatgggaactcatacgtatagccattggcctagttgttgcccaagtaagggtcaagacactagcgaggagttgctcaggtggtccaccgtgcctgtgccgccacttgagccggcccgtcctaatcggcaccccgagtcctgccgggccagtgaggacggacctctaaattcgagggcgatttccccttggaggtatgagctcgaccgagatttgaaccgtctgccccaggacctgtaccacgcccgctgcttatgtcctcactgcgtgtccttgcaaactggcagtcatatggatccgaggggcaactcagagctgctgtaccataaccaaacagtcttttacaggagaccatgtcacggggagaagggaactcacaaaggctactgcctggaacgcagactctaccgggtgagtctggcatgcgtgtgcgtccgcccccgtgtgatgggctag

SEQ ID NO: 249249 - DNA, 486 bp, Artificial Sequence
  derived and/or modified sequence
atgtaccaggtggtggccttcctggccatggtgatgggcacccacacctacagccactggcccagctgctgccccagcaagggccaggacaccagcgaggagctgctgcgctggagcacagtgcctgtgccccccctggagcccgcccggcccaacagacaccctgagagctgccgggcctctgaagatggccccctgaacagccgggccatcagcccctggaggtatgagctggaccgggacctgaaccggctgccccaggacctgtaccacgcccgctgcctgtgcccccactgtgtgtccctgcagacaggcagccacatggacccccggggcaacagcgagctgctgtaccacaaccagaccgtcttctaccgccggccctgccacggggagaagggcacccacaagggctactgcctggagcggcggctgtacagagtgtccctggcctgtgtgtgtgtgcggccccgggtgatgggctag

SEQ ID NO: 249250 - DNA, 486 bp, Artificial Sequence
  derived and/or modified sequence
atgtaccaggtggtggccttcctggccatggtgatgggcacccacacttactcccactggccatcctgttgcccttccaaaggacaggacacctcggaagagctcttaaggtggtcaacagttccagtccctccactggagcctgcgaggcccaaccggcacccagagagttgcagggcatcagaagacggtcctctcaactcacgagccatctcgccctggcgctacgagctggaccgtgacctcaacaggctcccgcaagacctgtaccatgctcggtgtctgtgcccacattgtgtgagtcttcagacaggcagccacatggatcccagagggaactccgagctgctgtaccacaatcagaccgtcttctataggagaccctgccacggtgagaagggaacccataagggttactgtctcgagagacgtctgtatcgcgtctctctggcctgcgtgtgcgtcagacctcgggtaatgggctag

SEQ ID NO: 249251 - DNA, 486 bp, Artificial Sequence
  derived and/or modified sequence
atgtaccaggtcgtcgcatttcttgcgatggtcatgggcactcatacctattcccattggccctcttgctgtccaagcaaaggtcaggacacaagcgaggagcttttgcggtggagcacggtgcctgttccacctcttgagccggcacgtcccaatcgccatcccgagtcttgccgcgctagcgaggacggtcctctgaactctagggccatcagcccttggcggtacgaactcgatagagatttgaatagactcccacaggatctgtaccacgcaagatgtctctgtccccactgcgtaagcctccagaccggttcgcacatggacccccgagggaactccgagctgctttatcacaaccagacagtattctataggaggccatgtcatggggaaaaggggactcataaaggatactgtctggaacggaggctgtacagggtttctctcgcatgtgtctgcgtccggccacgagtaatgggttag

SEQ ID NO: 249252 - DNA, 744 bp, Artificial Sequence
  derived and/or modified sequence
ctcaagtcactccctaaaaagacagtggaaataaatttgaataaacaaaacaggcttgctgaaaataaaatcaggactcctaacctgctccagtcagcctgcttccacgaggcctgtcagtcagtgccccacttgtgactgagtgtgcagtgcccagcatgtaccaggtggttgcattcttggcaatggtcatgggaacccacacctacagccactggcccagctgctgccccagcaaagggcaggacacctctgaggagctgctgaggtggagcactgtgcctgtgcctcccctagagcctgctaggcccaaccgccacccagagtcctgtagggccagtgaagatggacccctcaacagcagggccatctccccctggagatatgagttggacagagacttgaaccggctcccccaggacctgtaccacgcccgttgcctgtgcccgcactgcgtcagcctacagacaggctcccacatggacccccggggcaactcggagctgctctaccacaaccagactgtcttctaccggcggccatgccatggcgagaagggcacccacaagggctactgcctggagcgcaggctgtaccgtgtttccttagcttgtgtgtgtgtgcggccccgtgtgatgggctagccggacctgctggaggctggtccctttttgggaaacctggagccaggtgtacaaccacttgccatgaagggccaggatgcccagatgcttggcccctgtg

SEQ ID NO: 249253 - DNA, 1167 bp, Artificial Sequence
  derived and/or modified sequence
atggacggagtgggagttcccgcatctatgtacggcgatccgcatgcccctagacccatccccccagttcaccatttgaatcacggcccccctctgcacgcaactcaacattacggcgcccacgctccccaccccaatgtgatgcccgctagcatgggtagcgccgtaaacgatgcacttaagagagataaagacgcaatttatggacatccgctattccctttactcgcactggtattcgaaaaatgtgagctagccacttgcaccccacgtgagcctggagtggccggcggcgatgtatgcagcagcgacagcttcaatgaggatatcgccgtattcgctaaacaggtccgtgccgagaagcctctcttcagcagtaatcctgaactggataatttaatgatccaggcaattcaggtcctgagatttcatctactggaactggagaaggtccacgagttatgtgacaatttctgccacagatacatctcttgcctcaaaggtaagatgcctatcgatttggtgatcgatgagagagacggctcaagtaaatctgaccacgaggaactttctgggtccagcactaacctagccgatcacaacccttcatcttggagggaccacgacgatgcgacctcaacgcattcagcgggcacacctgggccctcctccggagggcacgcaagtcaaagcggcgacaactccagtgagcagggtgacgggctcgataactctgtagctagccccgggaccggagacgacgacgacccagataaggataagaagcgtcagaagaaaagaggaatttttcctaaggtcgctaccaacattatgcgtgcctggctattccaacaccttacccacccctatccctccgaggagcaaaagaagcaacttgctcaagacactgggttgacgattctccaagtcaacaactggtttatcaacgctagacgccgtattgtgcagcccatgattgaccagtctaaccgtgcaggtttcctcttagaccctagcgtgtcacagggagccgcgtatagtcccgaaggccagcccatggggtcctttgtccttgacggtcaacagcacatgggtattagacccgcaggccctatgagtggcatgggcatgaacatgggtatggacggccagtggcactacatgtag

SEQ ID NO: 249254 - DNA, 1167 bp, Artificial Sequence
  derived and/or modified sequence
atggatggagtgggcgtgcctgcctccatgtatggagacccccacgccccccggcccatcccccctgtgcaccacctgaaccacggcccccccctgcacgccacccagcactacggggcccacgccccccaccccaacgtgatgcctgcctccatgggcagcgctgtgaatgatgccctgaagagggacaaggatgccatctacggccaccccctcttccccctgctggccctggtgtttgagaagtgtgagctggccacctgcaccccccgggagcccggggtggccggaggagatgtgtgcagcagtgacagcttcaatgaagatattgctgtgtttgccaagcaggtgcgggcagagaagcccctcttcagcagcaaccctgagctggacaacctgatgatccaggccatccaggtgctgcgcttccacctgctggagctggagaaggtgcatgagctgtgtgacaacttctgccaccgctacatcagctgcctgaagggcaagatgcccatcgacctggtgattgatgaaagagatggcagcagcaagagtgaccacgaggagctgagcggcagcagcaccaacctggccgaccacaaccccagctcctggagggaccatgatgatgccaccagcacccacagcgctggcaccccaggccccagcagcggcggccacgccagccagagcggggacaacagcagcgagcagggagatggcctggacaacagcgtggccagccctggcactggagatgatgatgatcctgacaaggacaagaagaggcagaagaagaggggcatcttccccaaggtggccaccaacatcatgagggcctggctgttccagcacctgacccacccctaccccagcgaggagcagaagaagcagctggcccaggacaccggcctgaccatcctgcaggtgaacaactggttcatcaatgccaggagaagaattgtgcagcccatgattgaccagagcaacagagctggcttcctgctggaccccagcgtgtcccagggcgccgcctacagccctgagggccagcccatgggcagctttgtgctggatggccagcagcacatgggcatccggcctgctggccccatgagcggcatgggcatgaacatgggcatggatggccagtggcactacatgtag

SEQ ID NO: 249255 - DNA, 1167 bp, Artificial Sequence
  derived and/or modified sequence
atggacggcgtgggcgtgcccgccagcatgtacggcgacccccacgcaccccgccctatcccccccgttcaccatctgaaccacggacctccccttcatgctactcagcactatggcgcacacgccccccaccccaacgtgatgcctgcgtcgatggggagcgccgtgaatgacgcgctgaaacgcgataaggacgcaatttatggacatccgctgttccctctgttagcactggtgttcgagaagtgcgagctggctacctgtactccccgcgagcctggagtggctgggggcgatgtgtgtagctccgattcatttaatgaggacattgccgtcttcgccaaacaggtgcgtgctgaaaaacccttgttctcttctaacccagaactggacaatctgatgatacaggcaattcaggtactgcggtttcacctgttagagttggagaaggtacacgagctttgtgacaatttctgtcataggtatattagttgtctcaaagggaagatgcctattgaccttgttattgacgagcgggatggcagttccaaatcggaccatgaagaactctccggaagctctacgaatttggccgatcacaatccgagcagttggagagaccacgacgacgctacttcgacccactcagcaggcacacccggaccttcctccggcgggcatgcatcgcagtctggcgacaacagctcagagcagggcgacgggctggacaactcggtcgccagccctggtactggtgatgatgatgaccccgacaaagataagaagaggcagaaaaaaaggggaatcttcccaaaggtggctacaaatattatgagggcctggctgttccagcacctcactcatccctacccttccgaggaacaaaaaaagcaactggctcaggatacaggactcaccatcctgcaggtgaataattggtttattaatgcccggcgaaggatagtgcaaccgatgatagatcagtccaaccgggccgggttcctgctggacccttctgtctcccagggcgccgcatacagcccagagggacaacctatgggatcctttgtgctggacggccaacagcatatgggaattaggccagccggccccatgagcgggatgggcatgaacatgggtatggatggccagtggcattacatgtag

SEQ ID NO: 249256 - DNA, 1167 bp, Artificial Sequence
  derived and/or modified sequence
atggatggagtaggagtcccggcaagcatgtacggagaccctcacgcgcctaggccgataccccctgtccaccatctaaatcatgggcctccactgcatgcgacccaacactatggggcacatgcccctcatccaaacgtaatgccagcaagtatgggttccgctgtgaacgatgccctgaaacgtgacaaagatgcgatttacggtcaccctctgtttccactattggccctggtcttcgaaaagtgcgaactagccacttgcactcctcgtgaacctggggtagctggcggagatgtctgctccagcgacagcttcaacgaagatatcgccgtgtttgcaaaacaagtaagagcggagaagcccttgttcagctctaaccctgaactcgataatctaatgattcaggccattcaggtgctgaggttccacctcctcgaactggaaaaggttcacgaactctgtgataacttctgccatcgctatattagctgcctgaaaggcaagatgccaatagatctggtgatcgacgaacgcgatggatcttctaagtctgaccatgaggaactgagtggaagctcaaccaacttggccgatcataacccctcaagctggagagatcatgatgatgccactagcacacactcagccggaacacctggcccaagttccggcggacacgcctctcagagtggagataactcctctgaacagggtgacggactggataactctgtcgcctcaccagggacaggagacgacgacgaccccgataaagataagaagagacaaaaaaagcggggtatctttccaaaagtggcaaccaatatcatgagagcttggctgttccagcatctaacacatccttatccatccgaggaacagaaaaaacagttagctcaggataccgggctcaccatacttcaggttaataattggtttatcaatgcccgtcgcaggatcgtgcaaccaatgatcgatcagtcaaatcgggcagggttcttactggacccatcagtctcacagggtgctgcttacagccccgagggccagccaatgggcagtttcgtgctggatgggcagcagcacatgggtattcgccctgccggacccatgtcaggcatgggaatgaacatgggaatggatggacagtggcactatatgtag

SEQ ID NO: 249257 - DNA, 1167 bp, Artificial Sequence
  derived and/or modified sequence
atggacggcgtgggcgtgcccgccagcatgtacggcgacccccacgcccccagacccatcccccccgtgcaccacctgaaccacggcccccccctgcacgccacccagcactacggcgcccacgccccccaccccaacgtgatgcccgccagcatgggcagcgccgtgaacgacgccctgaagagagacaaggacgccatctacggccaccccctgttccccctgctggccctggtgttcgagaagtgcgagctggccacctgcacccccagagagcccggcgtggccggcggcgacgtgtgcagcagcgacagcttcaacgaggacatcgccgtgttcgccaagcaggtgagagccgagaagcccctgttcagcagcaaccccgagctggacaacctgatgatccaggccatccaggtgctgagattccacctgctggagctggagaaggtgcacgagctgtgcgacaacttctgccacagatacatcagctgcctgaagggcaagatgcccatcgacctggtgatcgacgagagagacggcagcagcaagagcgaccacgaggagctgagcggcagcagcaccaacctggccgaccacaaccccagcagctggagagaccacgacgacgccaccagcacccacagcgccggcacccccggccccagcagcggcggccacgccagccagagcggcgacaacagcagcgagcagggcgacggcctggacaacagcgtggccagccccggcaccggcgacgacgacgaccccgacaaggacaagaagagacagaagaagagaggcatcttccccaaggtggccaccaacatcatgagagcctggctgttccagcacctgacccacccctaccccagcgaggagcagaagaagcagctggcccaggacaccggcctgaccatcctgcaggtgaacaactggttcatcaacgccagaagaagaatcgtgcagcccatgatcgaccagagcaacagagccggcttcctgctggaccccagcgtgagccagggcgccgcctacagccccgagggccagcccatgggcagcttcgtgctggacggccagcagcacatgggcatcagacccgccggccccatgagcggcatgggcatgaacatgggcatggacggccagtggcactacatgtag

SEQ ID NO: 249258 - protein, 306 aa, Artificial Sequence
  derived and/or modified sequence
MALVFEKCELATCTPREPGVAGGDVCSSDSFNEDIAVFAKQVRAEKPLFSSNPELDNLMIQAIQVLRFHLLELEKVHELCDNFCHRYISCLKGKMPIDLVIDERDGSSKSDHEELSGSSTNLADHNPSSWRDHDDATSTHSAGTPGPSSGGHASQSGDNSSEQGDGLDNSVASPGTGDDDDPDKDKKRQKKRGIFPKVATNIMRAWLFQHLTHPYPSEEQKKQLAQDTGLTILQVNNWFINARRRIVQPMIDQSNRAVSQGAAYSPEGQPMGSFVLDGQQHMGIRPAGPMSGMGMNMGMDGQWHYM

SEQ ID NO: 249259 - DNA, 921 bp, Artificial Sequence
  derived and/or modified sequence
atggctctagttttcgaaaagtgtgagctggccacttgtacacccagggaacctggtgtagctggtggcgatgtctgcagctctgatagctttaacgaagatatcgcggtctttgcaaagcaggtgcgagccgaaaagcctctgttcagctctaatccagaactggataacctcatgattcaagctatacaagtgctgcggttccatctgttagagctagagaaggtgcatgaactgtgtgacaacttctgccatcgctacattagctgtctcaagggcaagatgcccattgacctggtgatcgacgaacgagacggcagctctaagtctgatcacgaggagctctccggcagttcgaccaacctcgccgaccacaatcccagcagttggagagatcatgacgatgccactagcacacactcagccgggactcctggcccgtcttccggcgggcacgccagccagtcaggggataactcctcagaacagggcgacggcctcgacaatagcgtggcgagcccgggaaccggtgatgacgatgatccagacaaagacaagaaaagacagaaaaaacgcggtattttcccaaaggtagcaacgaatattatgagagcctggttattccaacacctaacccacccatacccttcagaggaacagaagaaacagctagcccaggacactggtttgactatcctgcaggtgaacaactggttcatcaacgctcgccgacgaatagttcagccgatgatcgaccagagcaacagagcagtatcccagggggctgcctacagtccagaaggtcaacccatgggcagtttcgtgctagacggtcagcaacatatgggaattagaccagccggacccatgtccggaatggggatgaacatgggcatggatggtcagtggcactacatgtag

SEQ ID NO: 249260 - DNA, 921 bp, Artificial Sequence
  derived and/or modified sequence
atggccctcgtgttcgaaaagtgtgagctggcgacctgtactccccgagagcccggtgtcgctgggggggatgtgtgcagctctgactccttcaatgaagatatcgccgtgtttgcgaagcaagttcgcgccgaaaaacctttgttcagctccaaccctgagctggacaatctgatgatacaggccatccaggttctgcgtttccatttgctggagctggaaaaagttcatgagctttgcgataatttctgccatcgatacatttcctgtctcaaaggcaagatgccaatcgacctggtcatcgacgagcgggatggaagcagcaaatctgaccacgaagagctgagcggcagctcaacaaatctcgcggaccacaacccgtccagctggcgcgaccatgatgatgcaacctcaacccactcagccggcaccccaggtccaagcagtggaggccatgcctcacagtctggggataatagctctgaacagggggatgggctagataactcagtggcaagccctgggactggcgacgatgacgatcctgataaggacaagaagcgccagaagaagagaggtatttttccaaaagtcgccacaaatatcatgagagcttggctgttccaacatctcactcatccatatccctccgaagaacagaagaagcagttagcacaggacaccggcctcaccatacttcaagtcaataattggtttatcaatgcccggaggcgaatagtgcagcctatgattgaccagtctaacagagctgtctcgcaaggagccgcgtacagtccagaaggacaaccgatgggctccttcgtgctggacggacagcagcatatggggatacgccccgccggaccgatgagcgggatgggaatgaatatgggaatggacgggcagtggcactacatgtag

SEQ ID NO: 249261 - DNA, 240 bp, Artificial Sequence
  derived and/or modified sequence
atggctctggtctttgaaaagtgtgagctagccacttgtacaccacgggagcctggggtagcaggcggcgatgtatgcagctccgattcgttcaacgaggatatcgcagtgttcgccaagcaggtaagggccgagaagcccttgttcagttccaatccggagctagacaacctgatgatccaggcaatccaggtgctgcggtttcatcttttagagctagagaaagtgagcaggaagtag

SEQ ID NO: 249262 - DNA, 921 bp, Artificial Sequence
  derived and/or modified sequence
atggccctggtgtttgagaagtgtgagctggccacctgcaccccccgggagcccggggtggccggaggagatgtgtgcagcagtgacagcttcaatgaagatattgctgtgtttgccaagcaggtgcgggcagagaagcccctcttcagcagcaaccctgagctggacaacctgatgatccaggccatccaggtgctgcgcttccacctgctggagctggagaaggtgcatgagctgtgtgacaacttctgccaccgctacatcagctgcctgaagggcaagatgcccatcgacctggtgattgatgaaagagatggcagcagcaagagtgaccacgaggagctgagcggcagcagcaccaacctggccgaccacaaccccagctcctggagggaccatgatgatgccaccagcacccacagcgctggcaccccaggccccagcagcggcggccacgccagccagagcggggacaacagcagcgagcagggagatggcctggacaacagcgtggccagccctggcactggagatgatgatgatcctgacaaggacaagaagaggcagaagaagaggggcatcttccccaaggtggccaccaacatcatgagggcctggctgttccagcacctgacccacccctaccccagcgaggagcagaagaagcagctggcccaggacaccggcctgaccatcctgcaggtgaacaactggttcatcaatgcccggcggcgcatcgtgcagcccatgattgaccagagcaacagagctgtgtcccagggcgccgcctacagccctgagggccagcccatgggcagctttgtgctggatggccagcagcacatgggcatccggcctgctggccccatgagcggcatgggcatgaacatgggcatggatggccagtggcactacatgtag

SEQ ID NO: 249263 - DNA, 240 bp, Artificial Sequence
  derived and/or modified sequence
atggccctggtgtttgagaagtgtgagctggccacctgcaccccccgggagcccggggtggccggaggagatgtgtgcagcagtgacagcttcaatgaagatattgctgtgtttgccaagcaggtgcgggcagagaagcccctcttcagcagcaaccctgagctggacaacctgatgatccaggccatccaggtgctgcgcttccacctgctggagctggagaaggtgtccaggaagtag

SEQ ID NO: 249264 - DNA, 921 bp, Artificial Sequence
  derived and/or modified sequence
atggccctggtgttcgagaagtgcgagctggccacctgcacccccagggagccaggggtcgccggcggagacgtgtgcagctcggactcattcaatgaagacatcgcagtttttgcaaagcaggtgagggcggaaaaaccgctttttagttccaaccccgagctggataatctcatgattcaggccatccaagtgctcaggttccacttactggaactagaaaaagtgcatgaattatgcgataacttctgtcaccgatacatcagctgcctgaaagggaaaatgcctatcgacctggtgattgatgagagagacggttcgtcaaagagcgaccatgaagagttgtcaggctccagcaccaaccttgctgatcataatccgtcctcctggcgggatcatgacgacgctactagtacccacagcgcaggtacgcccgggccatcttcaggcggacacgcatctcaatccggggataactccagcgaacagggtgatggcctggacaactccgtggcttcacccggaacaggcgacgatgatgatcccgataaagataagaagaggcagaagaagcggggcatcttccctaaagttgcgactaatatcatgcgcgcctggttgttccagcatttaacacacccctatccttccgaagagcaaaagaaacagttggctcaggacaccggtctgaccattctccaggtcaacaattggtttatcaatgcgcgtaggcgaatcgtccagcctatgatcgaccagagtaatagagccgttagccaaggcgctgcttattcgccagaagggcagcctatgggatctttcgtgttggacggacagcaacatatgggtattaggcccgcaggccctatgtccggcatgggtatgaatatgggcatggacgggcaatggcactatatgtag

SEQ ID NO: 249265 - DNA, 921 bp, Artificial Sequence
  derived and/or modified sequence
atggccctggtgttcgagaagtgcgagctggccacctgcaccccccgggaaccaggcgtggccggaggcgacgtctgttctagtgactcttttaatgaggatattgcagtttttgccaaacaggttcgtgctgagaagcctcttttcagttctaaccctgaattagataatttgatgatccaggctatacaggtgctgagattccacttgttagaacttgagaaagtgcatgaactctgtgacaacttctgccatcggtacatctcgtgcctgaaaggtaaaatgccaatagatctggttatagacgaaagagatgggtctagcaaatctgatcacgaggaattaagcggaagttctacaaatctcgcggaccacaatcccagctcttggcgcgatcacgatgacgccacaagcacccattccgctggcacccccggccctagctccggagggcacgcctcccaatccggagacaatagctccgagcagggcgacggcctagacaatagcgtcgcctccccgggaacaggcgatgacgatgaccccgataaagataagaagcgacagaaaaagcgtgggatttttcctaaagtcgctacaaatatcatgcgggcatggctgtttcagcacctgactcatccctatccctccgaagaacagaagaagcagctagctcaagacactggtctgaccatacttcaggtgaataactggttcatcaacgctagaagacggattgtgcagccaatgattgaccagagcaaccgagccgtatcccagggggccgcctacagcccagaaggacagcccatgggtagttttgttctcgacggccagcagcatatggggattcgtcccgccggccctatgtccgggatgggcatgaatatgggaatggacggtcaatggcactatatgtag

SEQ ID NO: 249266 - DNA, 240 bp, Artificial Sequence
  derived and/or modified sequence
atggccctggtgttcgagaagtgcgagctggccacctgcacccccagagagcccggcgtcgcaggtggcgacgtctgtagttctgatagttttaatgaagacatcgctgtgtttgccaagcaggttagagctgaaaagcctctattcagctccaaccctgagctggacaacttaatgatccaggcgatccaggttctgcgcttccatctcctagaactggaaaaggtgtcacggaagtag

SEQ ID NO: 249267 - DNA, 921 bp, Artificial Sequence
  derived and/or modified sequence
atggctttggtatttgagaaatgcgaactggctacttgcacacctcgggagcctggcgtcgccggaggagatgtttgcagcagtgattctttcaacgaggatatcgccgtcttcgctaagcaggtgcgcgcagagaaacctctgttttctagcaatccagagctggacaatctgatgatccaagccattcaggttctccggtttcacctcttggagctggaaaaggtgcacgaactgtgtgataacttttgccaccgctacatctcctgcctcaaaggcaaaatgcccatcgatttggttatcgatgagcgagacggatcaagtaaatctgatcacgaagagctgagtggctcctcaaccaatctggctgaccataacccatcttcttggagagatcatgacgatgcgacatcaacccacagcgccggtactcccggaccttctagtggtggtcacgcctcccaatccggcgacaattcatctgagcaaggagatgggctcgacaattccgtggcatcacccggaacaggcgacgatgacgatccagataaagataagaaacgccagaaaaagcgaggtatctttccaaaggtcgcaactaatataatgagagcttggttgttccagcacctgactcatccatacccttcagaagagcaaaagaagcagctggctcaggataccggccttacaatcctgcaggtaaacaactggtttataaatgctcggaggcggatagttcagcctatgattgaccaaagcaaccgcgcagtaagccagggtgccgcatacagtcctgagggccaaccaatgggttcttttgtgctggacgggcagcagcacatgggcattaggccagccggacctatgtctgggatgggaatgaatatgggaatggatggacagtggcactacatgtag

SEQ ID NO: 249268 - DNA, 921 bp, Artificial Sequence
  derived and/or modified sequence
atggctctcgttttcgaaaagtgtgaactggcaacctgcactcctagagagccaggagtagctgggggtgacgtgtgctcaagtgactcttttaacgaggatatagcggttttcgctaagcaggtacgcgctgagaaaccacttttcagttcaaaccccgaactggacaatctcatgatacaggcgattcaggttctcagatttcaccttctagaactcgaaaaggtccacgaactctgtgataacttctgtcacagatacatatcatgtctaaaagggaagatgcctatcgatctggtgattgatgaacgggacggcagctccaagagcgatcacgaggagctgtcgggctcatccacgaacctcgcagaccacaacccttcttcatggagagatcacgacgatgcaacctccacccacagtgccggaactcccggtccttccagcggcggacacgcgtcccagtcaggagataactctagcgaacagggagacgggctcgataattcagttgccagcccgggtacaggagatgacgacgatcctgataaagataaaaagcggcagaagaagcgtggcattttccctaaagttgcaacaaacattatgcgggcttggctttttcagcacctgacccacccctatcctagcgaggagcaaaaaaagcagctcgctcaggacacagggctgacaatcctgcaggtgaataattggtttattaatgcccgacggagaatcgtccagccaatgattgaccagtcaaatcgggctgtttcccagggggcagcttacagccccgaggggcagccaatgggttcctttgtgctggacgggcaacagcatatgggcatccgacccgctggaccaatgagcggaatgggcatgaatatggggatggacggacagtggcactacatgtag

SEQ ID NO: 249269 - DNA, 240 bp, Artificial Sequence
  derived and/or modified sequence
atggctctagtctttgagaaatgcgaactggctacatgtacccccagggaacctggagtggctggcggagatgtgtgttcttccgatagctttaacgaggacatcgccgtctttgcgaaacaggtgcgcgctgagaagcccctattttcaagtaacccagaactagataatcttatgatacaggccattcaggtgctccgcttccacttactcgaacttgagaaagtctcaaggaagtag

SEQ ID NO: 249270 - DNA, 921 bp, Artificial Sequence
  derived and/or modified sequence
atggccctggtgttcgagaagtgcgagctggccacctgcacccccagagagcccggcgtggccggcggcgacgtgtgcagcagcgacagcttcaacgaggacatcgccgtgttcgccaagcaggtgagagccgagaagcccctgttcagcagcaaccccgagctggacaacctgatgatccaggccatccaggtgctgagattccacctgctggagctggagaaggtgcacgagctgtgcgacaacttctgccacagatacatcagctgcctgaagggcaagatgcccatcgacctggtgatcgacgagagagacggcagcagcaagagcgaccacgaggagctgagcggcagcagcaccaacctggccgaccacaaccccagcagctggagagaccacgacgacgccaccagcacccacagcgccggcacccccggccccagcagcggcggccacgccagccagagcggcgacaacagcagcgagcagggcgacggcctggacaacagcgtggccagccccggcaccggcgacgacgacgaccccgacaaggacaagaagagacagaagaagagaggcatcttccccaaggtggccaccaacatcatgagagcctggctgttccagcacctgacccacccctaccccagcgaggagcagaagaagcagctggcccaggacaccggcctgaccatcctgcaggtgaacaactggttcatcaacgccagaagaagaatcgtgcagcccatgatcgaccagagcaacagagccgtgagccagggcgccgcctacagccccgagggccagcccatgggcagcttcgtgctggacggccagcagcacatgggcatcagacccgccggccccatgagcggcatgggcatgaacatgggcatggacggccagtggcactacatgtag

SEQ ID NO: 249271 - DNA, 240 bp, Artificial Sequence
  derived and/or modified sequence
atggccctggtgttcgagaagtgcgagctggccacctgcacccccagagagcccggcgtggccggcggcgacgtgtgcagcagcgacagcttcaacgaggacatcgccgtgttcgccaagcaggtgagagccgagaagcccctgttcagcagcaaccccgagctggacaacctgatgatccaggccatccaggtgctgagattccacctgctggagctggagaaggtgagcagaaagtag

SEQ ID NO: 249272 - protein, 425 aa, Artificial Sequence
  derived and/or modified sequence
MTFGRSGAASVVLNVGGARYSLSRELLKDFPLRRVSRLHGCRSERDVLEVCDDYDRERNEYFFDRHSEAFGFILLYVRGHGKLRFAPRMCELSFYNEMIYWGLEGAHLEYCCQRRLDDRMSDTYTFYSADEPGVLGRDEARPGGAEAAPSRRWLERMRRTFEEPTSSLAAQILASVSVVFVIVSMVVLCASTLPDWRNAAADNRSLDDRSRIIEAICIGWFTAECIVRFIVSKNKCEFVKRPLNIIDLLAITPYYISVLMTVFTGENSQLQRAGVTLRVLRMMRIFWVIKLARHFIGLQTLGLTLKRCYREMVMLLVFICVAMAIFSALSQLLEHGLDLETSNKDFTSIPAACWWVIISMTTVGYGDMYPITVPGRILGGVCVVSGIVLLALPITFIYHSFVQCYHELKFRSARYSRSLSTEFLN

SEQ ID NO: 249273 - DNA, 1278 bp, Artificial Sequence
  derived and/or modified sequence
atgacattcggtcgcagtggcgctgctagtgtcgtcctgaacgttggaggcgcgagatattctctgtcaagagagctgctgaaggatttcccgcttagaagagtgtctcgactacacgggtgccgaagcgaacgggacgtgctggaggtgtgtgacgactatgaccgggagcggaatgaatattttttcgatcggcacagcgaagctttcgggttcatcctgctgtatgtccgaggtcacggcaaactacgattcgcaccccgtatgtgcgaactctcattctataatgagatgatttactgggggctggagggcgcccacttggagtattgctgtcaacgccggttggacgacaggatgtcggacacatatactttttactcggctgatgagccgggcgtactcgggagagacgaggcccgcccagggggagccgaagccgccccgtcgagaaggtggcttgagagaatgcgccgcactttcgaggaaccaacaagttcactcgcggctcagatcttagcctctgtcagcgttgtgttcgtgattgtcagtatggtggtgctctgtgccagtacgcttcccgattggcggaacgccgcagctgacaaccgatcattagacgatcgatccagaatcatcgaagccatttgtatcggctggtttaccgcggagtgtatcgtccggtttattgtttcaaaaaacaagtgtgagtttgtgaagcgccccctgaacataatcgacctcctagccatcaccccatattatatcagtgtgctcatgaccgtgttcacaggcgaaaactctcagctgcaacgtgccggcgtcacacttagggtcctacgcatgatgcgtattttttgggtgatcaaactcgcccgccactttattggcctgcagactctcggcttaacgctgaagaggtgctatcgtgagatggtaatgctgctagtgttcatttgtgtcgctatggccattttttccgcgctgtctcagttgctggagcacggactggacctggaaacatcgaacaaggactttaccagcattccggctgcatgctggtgggtgatcatcagcatgactactgtgggatacggagacatgtatccgatcacagtgccaggaaggatactcggcggagtgtgcgttgtttcagggattgtgctgttggcacttcccataacatttatctatcactcatttgttcagtgttaccacgaattaaagttccgaagtgccaggtactcccggtctttatccaccgagttcctcaattag

SEQ ID NO: 249274 - DNA, 1278 bp, Artificial Sequence
  derived and/or modified sequence
atgaccttcggccgcagcggggccgcctctgtggtgctgaatgtgggcggggcccgctacagcctgagccgggagctgctgaaggacttccccctgcggcgggtgtcccggctgcacggctgccgctcagaaagagatgtgctggaggtgtgtgatgattatgaccgggagagaaatgagtacttctttgacagacattctgaggccttcggcttcatcctgctgtatgtgcggggccacggcaagctgcgctttgcccccaggatgtgtgagctgtccttctacaatgagatgatctactggggcctggagggcgcccacctggagtactgctgccagaggcggctggatgacaggatgtctgacacctacaccttctacagcgcagatgagcccggggtgctgggcagagatgaggcccggcctgggggcgctgaggccgcccccagccgccgctggctggagaggatgaggaggacctttgaggagcccaccagcagcctggccgcccagatcctggcctctgtgtctgtggtgtttgtgattgtgtccatggtggtgctgtgtgccagcaccctgcctgactggagaaatgctgctgctgacaacagaagcctggatgacaggagccgcatcatcgaggccatctgcatcggctggttcaccgctgagtgcatcgtgcgcttcatcgtgtccaagaacaagtgtgaatttgtgaagaggcccctgaacatcatcgacctgctggccatcaccccctactacatctctgtgctgatgacagtgttcaccggggagaacagccagctgcagagagctggggtgaccctgcgggtgctgaggatgatgaggatcttctgggtgatcaagctggcccggcacttcatcggcctgcagaccctgggcctgaccctgaagcgctgctaccgggagatggtgatgctgctggtgttcatctgtgtggccatggccatcttcagcgccctgagccagctgctggagcacggcctggacctggagaccagcaacaaggacttcaccagcatcccagctgcctgctggtgggtgatcatctccatgaccaccgtgggctatggagacatgtaccccatcaccgtgcccggccgcatcctgggcggcgtgtgtgtggtgtctggaattgtgctgctggccctgcccatcaccttcatctaccacagctttgtgcagtgctaccacgagctgaagttccgcagcgcccgctacagccgcagcctgagcacagagttcctgaactag

SEQ ID NO: 249275 - DNA, 1278 bp, Artificial Sequence
  derived and/or modified sequence
atgaccttcggccggagcggcgccgccagcgtggtgctgaacgtgggaggggcccgttattctctgtcccgcgagttgctcaaggactttcccctgcgaagagtgtctaggctgcacggctgtaggagcgagcgtgacgtgctcgaggtgtgtgatgattatgatagagagcggaatgagtacttcttcgaccgccacagtgaggcatttggctttatcctcctgtatgtgcgcggccacggaaaactgcgttttgccccacggatgtgcgaactctctttttacaatgaaatgatatactggggtcttgaaggagcccacctggagtattgctgtcagaggagactcgacgacagaatgtcagatacttatacgttctattccgccgacgaacccggcgttttagggcgtgacgaggcgaggccaggcggcgccgaagctgctccttccaggcggtggcttgagcgcatgagaaggaccttcgaagaaccaacttcatccttggcagcccaaattttggcctcagtttcagtggtatttgtcattgtgtccatggtcgtgctgtgcgcaagcactctgcccgattggagaaatgcagccgctgacaatcgctcgttagatgaccggagtcgaatcatcgaggccatttgcattgggtggttcactgctgagtgtatcgtgcgcttcattgtttctaagaataagtgcgagtttgtgaagagaccattaaatatcatcgacctgctggctattactccatactatattagcgtgctgatgaccgtttttacaggcgagaattcgcagctgcaacgcgcaggagttaccctcagggtgctacgaatgatgcgcatcttctgggtgataaagctagcaagacattttatcggcctgcagacacttgggttgactttgaaaaggtgttatcgagaaatggtgatgctactggtctttatttgtgtggctatggccatcttttctgccctcagtcagctgcttgaacacggactcgacctggaaacctccaataaagattttacctctatccctgccgcttgctggtgggtgattatcagcatgactactgttggctatggagacatgtaccctattaccgtgcctgggcgcattctggggggtgtatgcgtggtgtccggtatcgtacttctggcgttacccatcacttttatctaccacagcttcgttcagtgttaccatgaattgaagtttaggtctgccaggtacagtagatccctgtccacggagttcctaaactag

SEQ ID NO: 249276 - DNA, 3656 bp, Artificial Sequence
  derived and/or modified sequence
gcctctcgcctctggacggcggcggggcggccgccggattcgcggccgcagggagcgccggagacggggagctattccgccccggcggctccattcggcgcccgcagccctcagggggtcggccccgcggcttgggagagggcaccgcggcctcggtgtgcgcagccctcgggcgcgagggtcggcggcgcggacacagccgcgttcccagccggtggggctcagcgctggcgccggcgaggactccccggccacccgcaggtaccgccgggcggagggcgcgctactagcagcgccggagatactcgagcccagggacccccgggccagcggagggcaggagcggagccccgagggagcgcgggccccgacggcgcgctcccccgtcagccacgggcaggcaggccccgcgtggcggcttggggtggggggctgcagcggggccctcgggccgaaagtcccccgggcggccagccatgaccttcgggcgcagcggggcggcctcggtggtgctgaacgtgggcggcgcccggtattcgctgtcccgggagctgctgaaggacttcccgctgcgccgcgtgagccggctgcacggctgccgctccgagcgcgacgtgctcgaggtgtgcgacgactacgaccgcgagcgcaacgagtacttcttcgaccggcactcggaggccttcggcttcatcctgctctacgtgcgcggccacggcaagctgcgcttcgcgccgcggatgtgcgagctctccttctacaacgagatgatctactggggcctggagggcgcgcacctcgagtactgctgccagcgccgcctcgacgaccgcatgtccgacacctacaccttctactcggccgacgagccgggcgtgctgggccgcgacgaggcgcgccccggcggggccgaggcggctccctccaggcgctggctggagcgcatgcggcggaccttcgaggagcccacgtcgtcgctggccgcgcagatcctggctagcgtgtcggtggtgttcgtgatcgtgtccatggtggtgctgtgcgccagcacgttgcccgactggcgcaacgcagccgccgacaaccgcagcctggatgaccggagcaggataattgaagctatctgcataggttggttcactgccgagtgcatcgtgaggttcattgtctccaaaaacaagtgtgagtttgtcaagagacccctgaacatcattgatttactggcaatcacgccgtattacatctctgtgttgatgacagtgtttacaggcgagaactctcaactccagagggctggagtcaccttgagggtacttagaatgatgaggattttttgggtgattaagcttgcccgtcacttcattggtcttcagacactcggtttgactctcaaacgttgctaccgagagatggttatgttacttgtcttcatttgtgttgccatggcaatctttagtgcactttctcagcttcttgaacatgggctggacctggaaacatccaacaaggactttaccagcattcctgctgcctgctggtgggtgattatctctatgactacagttggctatggagatatgtatcctatcacagtgcctggaagaattcttggaggagtttgtgttgtcagtggaattgttctattggcattacctatcacttttatctaccatagctttgtgcagtgttatcatgagctcaagtttagatctgctaggtatagtaggagcctctccactgaattcctgaattaatgcattgcaaatcaattcttgcatacacttcatagaaagactttgatgctgcttcatatttatgtgtttcttgctgggtgagcactgcagtggcattgtcatcatcttggtagggtaaaaattatccttcccagccgaagggataaaacagtttacttgttatggagtaaatagaattgagactgcaaaggaagaataatgactcctagagtaaactttaggacccggttttatttagacttgttttcccgtttccttgaatgattacacatttttaaaaaatacattatttgaacattttaaaacagaaaggtactattttccaaatgtttttccatcttatgaattcagaagaagcttggaacttatagtgttttttgtttgagagtaacattttcatttctaaatgttttataatttctcatatcaatgtcagaagtatcctggaaacatatgtcacatgcgggaactgtttaacaaatactttaaaaatttggccaaaatttaaactgtataatggagctagatacaagcaagaatagtatttgaaagacttttccagcatacttctcaattctttgctttatttttgtgccaattattcaccttatcgtgccgcttcatggaagcttgagtatgttctcccttttccattttggatttatctctttactgtaatgactcaaaaggtatttaagaattgacgagagcttgtgttgtttagcatcttactggataatatttgaattcattgctgttcctaggtgataactgtcctaatatttagatgtccaaacaagaatacttccaacataaaaattataataggaataatttgagatgactcaatattacaacctcttcttctcttaacctcctcccccaaacactagaggtttaataagacttatcagatgaaaggatatttatatagccttttagtagcaaagtcatacttacgtgttgtcactggattatcataaaagggagaaattaaatattactgtactcttagttgctgtgtagctaagtcaattttaagccagtaaaagcgatggatacataatgatttgatctgatctttaactattgtgaatcacagctacaccaaaactcttcttgtaagaatactgactaatatgccatgttaatctggctagattattaggactagataatgtaaaagtgatgattgtttagtaactaaattttagcaacagaaattagaattttgctttttcaaccagttaccataaagaagttagtgtatatataaacacaaataattagtgacagattcataaaaaattgaatgttgtacacagtaattttgtcagaggtagagaagacagggattgggaagtggtgggtgatggaggacctggatatatttatcaaataaagggttaccagaagtgttcattaaaggaattttagccatcatctagttcaaacctcaactattacaggtagaaaatcagggcaggagagaatataattgtgaaggagtcagggctaacacctggatctccagaaacctagcccagcaggttaatcttcacacatctctgggttctgagaaaagcctggaaaaatcacacttctttgtcattgtcatgctgaggtaataatagcaaaactgttttctttcccttaatttcctttcctaagcttatgtaatagtttggccattaaatatcttgccctattttccctattactgctagtatgctacttcttacatacccaaaagaaattcagttatttattgtatatttattgtattctaatataattgaaataaatggcatggatttattttttcttaactatttggattaaagctttgtggttcatgcaaacaatgtgcagatgatagcacctccatattactaataaaaa

SEQ ID NO: 249277 - DNA, 1278 bp, Artificial Sequence
  derived and/or modified sequence
atgacattcggaaggagcggagccgcaagcgtggtattgaatgtggggggagcgagatatagcttgtcacgggaactgctgaaggattttccattaagaagagtgagtcgcttgcacggttgcaggtctgaacgggatgttctagaagtctgtgatgattacgacagggagaggaacgaatacttcttcgacagacactcagaggccttcgggttcattctgctgtacgtgagaggacacgggaaactgcgatttgcaccgaggatgtgcgaactgtcattttacaacgaaatgatttactggggactggagggcgctcacctcgagtactgctgtcagcggcgtcttgatgatcggatgagtgatacttatactttctactctgctgatgagcctggggtattgggcagggatgaagccaggcccggaggtgccgaagccgctccctcccgacgatggctcgaaaggatgaggcggacctttgaagagcccaccagttccctcgccgcacagattctggccagcgtcagcgtcgtattcgtaatcgtatccatggtggttctctgcgcgtcaacgctgccggattggagaaatgccgcagctgacaataggtctctggatgatcggagcaggatcattgaggctatctgcatcgggtggttcacagcagaatgcattgtccgatttatcgtcagcaaaaataaatgcgagttcgtcaagagaccgttgaatattatcgacttgctggcaatcaccccgtactacatttcagtcttaatgacagtgtttacaggagaaaactcccaattgcagcgggcaggtgtgacactcagggtcttgaggatgatgagaattttctgggttatcaaactggcaagacatttcatcggtctgcaaactctgggactcaccctgaagaggtgctatagagagatggtgatgctactggtcttcatctgcgtcgcaatggctatttttagtgccctgagtcaactgctggaacatggcctcgacctggagaccagcaacaaagatttcacctctatacccgcagcctgttggtgggtgattatctcaatgactactgtgggctacggtgacatgtaccctattactgtcccgggacggatactgggcggagtctgtgtggtctcaggtatcgtgctcctggcactccccattacgttcatctatcactccttcgttcaatgctaccatgagctaaaattcaggagcgccagatacagccgcagcctgtcaaccgagttcctcaattag

SEQ ID NO: 249278 - DNA, 1278 bp, Artificial Sequence
  derived and/or modified sequence
atgaccttcggcagaagcggcgccgccagcgtggtgctgaacgtgggcggcgccagatacagcctgagcagagagctgctgaaggacttccccctgagaagagtgagcagactgcacggctgcagaagcgagagagacgtgctggaggtgtgcgacgactacgacagagagagaaacgagtacttcttcgacagacacagcgaggccttcggcttcatcctgctgtacgtgagaggccacggcaagctgagattcgcccccagaatgtgcgagctgagcttctacaacgagatgatctactggggcctggagggcgcccacctggagtactgctgccagagaagactggacgacagaatgagcgacacctacaccttctacagcgccgacgagcccggcgtgctgggcagagacgaggccagacccggcggcgccgaggccgcccccagcagaagatggctggagagaatgagaagaaccttcgaggagcccaccagcagcctggccgcccagatcctggccagcgtgagcgtggtgttcgtgatcgtgagcatggtggtgctgtgcgccagcaccctgcccgactggagaaacgccgccgccgacaacagaagcctggacgacagaagcagaatcatcgaggccatctgcatcggctggttcaccgccgagtgcatcgtgagattcatcgtgagcaagaacaagtgcgagttcgtgaagagacccctgaacatcatcgacctgctggccatcaccccctactacatcagcgtgctgatgaccgtgttcaccggcgagaacagccagctgcagagagccggcgtgaccctgagagtgctgagaatgatgagaatcttctgggtgatcaagctggccagacacttcatcggcctgcagaccctgggcctgaccctgaagagatgctacagagagatggtgatgctgctggtgttcatctgcgtggccatggccatcttcagcgccctgagccagctgctggagcacggcctggacctggagaccagcaacaaggacttcaccagcatccccgccgcctgctggtgggtgatcatcagcatgaccaccgtgggctacggcgacatgtaccccatcaccgtgcccggcagaatcctgggcggcgtgtgcgtggtgagcggcatcgtgctgctggccctgcccatcaccttcatctaccacagcttcgtgcagtgctaccacgagctgaagttcagaagcgccagatacagcagaagcctgagcaccgagttcctgaactag

SEQ ID NO: 249279 - protein, 519 aa, Artificial Sequence
  derived and/or modified sequence
MPMPSRDGGLHPRHHHYGSHSPWSQLLSSPMETPSIKGLYYRRVRKVGALDASPVDLKKEILINVGGRRYLLPWSTLDRFPLSRLSKLRLCRSYEEIVQLCDDYDEDSQEFFFDRSPSAFGVIVSFLAAGKLVLLQEMCALSFQEELAYWGIEEAHLERCCLRKLLRKLEELEELAKLHREDVLRQQRETRRPASHSSRWGLCMNRLREMVENPQSGLPGKVFACLSILFVATTAVSLCVSTMPDLRAEEDQGECSRKCYYIFIVETICVAWFSLEFCLRFVQAQDKCQFFQGPLNIIDILAISPYYVSLAVSEEPPEDGERPSGSSYLEKVGLVLRVLRALRILYVMRLARHSLGLQTLGLTVRRCTREFGLLLLFLAVAITLFSPLVYVAEKESGRVLEFTSIPASYWWAIISMTTVGYGDMVPRSVPGQMVALSSILSGILIMAFPATSIFHTFSHSYLELKKEQEQLQARLRHLQNTGPASECELLDPHVASEHELMNDVNDLILEGPALPIMHM

SEQ ID NO: 249280 - DNA, 1560 bp, Artificial Sequence
  derived and/or modified sequence
atgccaatgccaagtagagacgggggcctgcacccacgtcatcatcattacggcagtcactcgccgtggagtcaattactgagctcaccgatggaaacgccctctattaaggggctttactatagaagggtccgaaaggtcggcgccctggacgcctctcctgtggatctgaagaaagaaatcctgattaacgtggggggaagaagatacttactcccttggagcacgctggatcgctttcctctctctagactgagcaagctgaggttatgtcgaagctacgaggagatcgttcagctgtgcgacgattacgatgaggactcgcaagagtttttctttgatcgcagcccgagtgcttttggggtgatcgtcagcttcctagccgccgggaaactcgtccttttgcaggagatgtgcgcattgtcctttcaggaggaactcgcttattggggaatcgaggaggcgcatctggaaaggtgctgtctgcggaaattgctgcgtaagttggaagagctagaagagttggccaaactgcaccgagaggatgtcctgcggcagcaacgcgaaacgagacggcccgccagccatagctccagatggggattatgtatgaaccgtctgagagagatggttgaaaatccacagagcggattacctggtaaagtttttgcctgtttgtcaattttgtttgtggccactactgcagtctccctctgcgtgagtacaatgccagatttgagagctgaagaagaccaaggggaatgctctagaaaatgctactacatttttatagtggagaccatctgcgttgcatggttctcacttgagttctgcctgcgattcgttcaagcacaagataaatgtcaattttttcaaggccctcttaatataatcgacattctggcaattagcccatactatgttagccttgctgtgagtgaggagccccccgaggacggcgagaggccgtcagggtctagttacctggagaaagtcggactggtgttaagggtcctcagggccctcagaatcctttacgtcatgcgactggcgagacactcgctaggcttgcaaaccctgggcctgacggtgagacgctgtacccgggaatttgggcttcttctgctgtttctggctgtcgccataacactgttttcccccctggtgtatgtggctgagaaagagtcaggcagagtgctggagtttacctccataccagcatcttactggtgggccattatatccatgacgactgtgggatatggagacatggttcctcgatccgtccctgggcagatggtggcgctgtcctctattctcagcggtatattgatcatggcctttcccgccacttccatcttccatactttttcacattcctacctcgaactgaagaaagagcaggaacagctgcaggccagactgaggcaccttcagaatactggtcccgctagcgaatgtgaactgctggacccccatgttgcgtcagaacacgaactgatgaacgacgtcaatgatctcatactggagggacccgctttgcctatcatgcacatgtag

SEQ ID NO: 249281 - DNA, 1560 bp, Artificial Sequence
  derived and/or modified sequence
atgcccatgcccagcagagatggcggcctgcaccccaggcaccaccactacggcagccacagcccctggagccagctgctgagcagccccatggagacccccagcatcaagggcctgtactaccgccgggtgaggaaggtgggcgccctggatgccagccctgtggacctgaagaaggagatcctgatcaacgtgggcggccgccgctacctgctgccctggagcaccctggaccgcttccccctgagccggctgagcaagctgcggctgtgccgctcctatgaggagatcgtgcagctgtgtgatgattatgatgaggacagccaggagttcttctttgacaggagccccagcgccttcggcgtgattgtgtccttcctggccgccggcaagctggtgctgctgcaggagatgtgtgccctgtccttccaggaggagctggcctactggggcatcgaggaggcccacctggagcgctgctgcctgaggaagctgctgaggaagctggaggagctggaggagctggccaagctgcacagagaagatgtgctgcggcagcagcgggagaccaggaggcctgccagccacagcagccgctggggcctgtgcatgaaccggctgcgggagatggtggagaacccccagagcggcctgcccgggaaggtgtttgcctgcctgagcatcctgtttgtggccaccacagctgtgtccctgtgtgtgtccaccatgccagacctgcgggcagaggaggaccagggcgagtgcagcaggaagtgctactacatcttcatcgtggagaccatctgtgtggcctggttcagcctggagttctgcctgcgctttgtgcaggcccaggacaagtgccagttcttccagggccccctgaacatcatcgacatcctggccatcagcccctactacgtgtccctggccgtgtctgaggagcccccagaagatggagagcggcccagcggcagcagctacctggagaaggtgggcctggtgctgcgggtgctgcgggccctgcgcatcctgtatgtgatgaggctggcccggcacagcctgggcctgcagaccctgggcctgactgtgcggcgctgcacccgggagtttggcctgctgctgctcttcctggccgtggccatcaccctcttcagccccctggtgtatgtggccgagaaggagagcggccgggtgctggagttcaccagcatcccagccagctactggtgggccatcatctccatgaccaccgtgggctatggagacatggtgcccaggtctgtgcccggccagatggtggccctgagcagcatcctgagcggcatcctgatcatggccttccctgccaccagcatcttccacaccttcagccacagctacctggagctgaagaaggagcaggagcagctgcaggcccggctgcggcacctgcagaacacaggccctgcctctgaatgtgagctgctggacccccacgtggccagcgagcacgagctgatgaatgatgtgaatgacctgatcctggagggccctgccctgcccatcatgcacatgtag

SEQ ID NO: 249282 - DNA, 1560 bp, Artificial Sequence
  derived and/or modified sequence
atgcccatgcccagccgggacggcggcctgcacccccggcaccaccactatggttcccatagcccatggtcccaacttctgagttcccccatggaaaccccttccatcaaaggcttgtattaccgaagggtgcgcaaggtgggtgcacttgacgcctcccctgtggatctaaagaaagaaatattaattaacgtgggcgggcggaggtatctgctcccgtggtctaccctggatcgctttcctcttagcaggctgtccaaattacggctctgcaggtcttacgaagagatcgttcagctgtgcgacgattacgatgaggatagtcaggaatttttctttgatcggagcccatccgcgttcggcgtgatcgtaagcttcctggccgcagggaagctcgtactgttacaggagatgtgtgctctcagtttccaagaagagcttgcctattggggcattgaagaggctcatctcgaacgctgttgcctccggaaactgctccgaaagctggaagagctcgaggaactggctaagcttcaccgcgaagatgtcctcaggcagcagcgggaaacccgccggcccgcatcccattcaagccgatggggtctgtgtatgaaccggttgagggagatggtcgaaaacccccagagtggactgcccggcaaggtgtttgcatgtctgagcatcttgttcgtagcaacaacagccgttagtctatgtgtttccacaatgcccgatttgagggctgaagaggaccaaggagaatgctcccgcaaatgttactacatctttatagtagagacaatctgtgtcgcgtggttctctctggagttttgtcttcgctttgtgcaggctcaagacaaatgccaatttttccagggacctcttaatattatagatattctcgcaataagtccctactacgtcagcctggccgtctctgaggaaccccccgaagacggagagagaccttcaggttcaagttacctcgaaaaggtgggattggtgcttagggtgctacgcgctcttcgcatattgtacgtaatgaggctcgctagacattctctcgggctgcagactcttggtttgactgtgaggagatgtaccagagagttcggcctattactcttatttctcgcagtggcaatcaccctgtttagtcctctggtgtacgtggccgagaaggaatccggtcgagtgctcgagttcacctcaatccccgcttcctattggtgggccatcatcagtatgactacagtcggctacggcgacatggtacctagatctgtgcccggacagatggtcgctctgtccagcatcctgtccggcattctcattatggcatttccagccacttcaattttccacacttttagtcattcttatctcgaactgaagaaagagcaggaacagctgcaggcgaggctgcgccacttacagaatacaggacccgcatcagagtgtgaacttttggatcctcacgtggcctcagagcacgaacttatgaacgacgttaacgacttaatcttggaggggccagcacttcctattatgcatatgtag

SEQ ID NO: 249283 - DNA, 1636 bp, Artificial Sequence
  derived and/or modified sequence
gctggaaactggctccctgagacaagaagactggtaaacccagcgcttcctacctggtggtcttcagcaatgcccatgccttccagagacgggggcctgcatcccagacaccaccactatggttcccacagcccttggagtcagctcctgtccagccccatggagacgccgtccatcaagggcctttactaccggagggtgcggaaggtgggtgccctggacgcctccccagtggacctgaagaaggagatcctgatcaacgtggggggcaggaggtatctcctcccctggagcacactggaccggttcccgctgagccgcctgagcaaactcaggctctgtcggagctacgaggagatcgtgcagctctgcgatgattacgacgaggacagccaggagttcttcttcgacaggagccccagcgccttcggggtgatcgtgagcttcctggcggccgggaagctggtgcttctgcaggagatgtgcgcgctgtccttccaggaggagctggcctactggggcatcgaggaggcccacctggagaggtgctgcctgcggaagctgctgaggaagctggaggagctggaggagctggccaagctgcacagggaggacgtactgaggcagcagagggagacccgccgccccgcctcgcactcctcgcgctggggcctgtgcatgaaccggctgcgcgagatggtggaaaacccgcagtccgggctgcccgggaaggtcttcgcttgcctctccatcctcttcgtggccaccacagccgtcagcctgtgtgtcagcaccatgcccgacctcagggcagaggaggaccagggcgaatgctctcggaagtgctactatattttcatcgtggagaccatctgcgtggcctggttctccctggagttctgcctgcggtttgtccaggcccaagacaagtgtcagttcttccaggggcccctgaacatcatcgacatcctggccatctccccatactacgtgtcgctggcggtgtctgaggagcccccggaggacggcgagaggccgagcgggagctcctacctggagaaggtggggctggtcctgcgtgtgctgcgagcgctgcgcatcctctacgtgatgcgcctggctcgccactcgctggggctgcagacgctggggctcaccgtgcgccgttgcacacgtgagttcggcctgctccttctcttcctggccgtggccatcaccctcttctcccctttggtctacgtggccgagaaggagtccgggcgggtgctggagttcaccagcatccccgcctcctattggtgggccatcatctccatgacaacggtgggctacggggacatggtgccccgcagtgtgccaggccagatggtggccctcagcagcatcctgagcgggatcctcatcatggccttcccggccacgtctatcttccacaccttctcccactcctacctggagctcaagaaggagcaggagcagcttcaggcccgcctccgccacctccaaaacaccggtccagccagtgaatgtgaactcctggacccccatgtggccagtgaacatgagctcatgaacgatgtcaatgacctaatcctggagggcccagccttgcctatcatgcacatgtaactcagca

SEQ ID NO: 249284 - DNA, 1560 bp, Artificial Sequence
  derived and/or modified sequence
atgcctatgccatctagggatggcggattgcatcccagacatcaccactacggctcccattctccatggtcacaactcctctcatcacctatggagacgccgagtattaaaggcctttattatcgaagggtacgcaaggtaggtgccttggatgcttccccagtcgacctgaaaaaggaaattctgattaacgtgggcggtaggcggtatctgctcccttggtccacattggacagattcccgctcagccgcctgtcgaagctacgattatgccgcagctacgaagaaatcgtgcaattgtgtgatgactacgacgaggatagtcaggagttctttttcgatcgcagccccagcgcattcggcgtaatcgtgtcttttctcgctgcaggaaagttagttttactccaggaaatgtgtgctctctccttccaggaggagctggcctactgggggatcgaagaggcccatttggagcgttgctgcctcagaaaacttttaagaaaactcgaggagctagaagaactggcaaaactgcacagggaagatgtgttgcggcagcagagggagacccgaaggcccgctagccactcatccaggtggggactttgtatgaaccggttgagagagatggtggagaatccacaatcaggactgcctggcaaggtctttgcctgtctatccatcctgttcgtggctacgactgcagtctccctttgtgtatctacaatgcccgacctgagagccgaggaagaccagggcgagtgttctaggaaatgttactatatattcatagtcgagactatttgtgtcgcctggttttctttggaattttgcctgcggttcgttcaggcccaggacaagtgtcagttctttcagggccctttgaacatcattgacatcctcgcaattagcccatattacgtatctctcgccgtgtccgaagagcctccagaggacggagaacgacctagcgggtcctcttacctggagaaggtgggcttggtgcttagggtgctacgagccctgagaatcctttatgtcatgaggttggctagacatagtctggggctgcaaaccctggggcttacagtaagacgatgcacgcgtgagttcggtctcctgctcctgttcctagccgtggctataactttgtttagcccgctggtgtacgtggcagagaaggagtctgggagagtcctggagttcaccagcattccagcttcgtactggtgggcaatcatcagcatgaccactgtgggctacggggacatggttccaaggtccgtgcctggtcagatggtggcccttagctcaatcctgtcaggaatactcatcatggcttttcccgcaaccagcatttttcacaccttcagtcacagttacttggagctgaagaaagaacaagagcagttgcaggcacggctgcgccacctgcagaacacaggacccgcatcagaatgtgaacttctggacccacatgtggcatcagaacatgagctcatgaacgacgttaacgatttaattttagaggggccagcccttcctataatgcatatgtag

SEQ ID NO: 249285 - DNA, 1560 bp, Artificial Sequence
  derived and/or modified sequence
atgcccatgcccagcagagacggcggcctgcaccccagacaccaccactacggcagccacagcccctggagccagctgctgagcagccccatggagacccccagcatcaagggcctgtactacagaagagtgagaaaggtgggcgccctggacgccagccccgtggacctgaagaaggagatcctgatcaacgtgggcggcagaagatacctgctgccctggagcaccctggacagattccccctgagcagactgagcaagctgagactgtgcagaagctacgaggagatcgtgcagctgtgcgacgactacgacgaggacagccaggagttcttcttcgacagaagccccagcgccttcggcgtgatcgtgagcttcctggccgccggcaagctggtgctgctgcaggagatgtgcgccctgagcttccaggaggagctggcctactggggcatcgaggaggcccacctggagagatgctgcctgagaaagctgctgagaaagctggaggagctggaggagctggccaagctgcacagagaggacgtgctgagacagcagagagagaccagaagacccgccagccacagcagcagatggggcctgtgcatgaacagactgagagagatggtggagaacccccagagcggcctgcccggcaaggtgttcgcctgcctgagcatcctgttcgtggccaccaccgccgtgagcctgtgcgtgagcaccatgcccgacctgagagccgaggaggaccagggcgagtgcagcagaaagtgctactacatcttcatcgtggagaccatctgcgtggcctggttcagcctggagttctgcctgagattcgtgcaggcccaggacaagtgccagttcttccagggccccctgaacatcatcgacatcctggccatcagcccctactacgtgagcctggccgtgagcgaggagccccccgaggacggcgagagacccagcggcagcagctacctggagaaggtgggcctggtgctgagagtgctgagagccctgagaatcctgtacgtgatgagactggccagacacagcctgggcctgcagaccctgggcctgaccgtgagaagatgcaccagagagttcggcctgctgctgctgttcctggccgtggccatcaccctgttcagccccctggtgtacgtggccgagaaggagagcggcagagtgctggagttcaccagcatccccgccagctactggtgggccatcatcagcatgaccaccgtgggctacggcgacatggtgcccagaagcgtgcccggccagatggtggccctgagcagcatcctgagcggcatcctgatcatggccttccccgccaccagcatcttccacaccttcagccacagctacctggagctgaagaaggagcaggagcagctgcaggccagactgagacacctgcagaacaccggccccgccagcgagtgcgagctgctggacccccacgtggccagcgagcacgagctgatgaacgacgtgaacgacctgatcctggagggccccgccctgcccatcatgcacatgtag

SEQ ID NO: 249286 - protein, 137 aa, Artificial Sequence
  derived and/or modified sequence
MGLTSQLLPPLFFLLACAGNFVHGHKCDITLQEIIKTLNSLTEQKNTTEKETFCRAATVLRQFYSHHEKDTRCLGATAQQFHRHKQLIRFLKRLDRNLWGLAGLNSCPVKEANQSTLENFLERLKTIMREKYSKCSS

SEQ ID NO: 249287 - DNA, 414 bp, Artificial Sequence
  derived and/or modified sequence
atgggcctgaccagccagctgctgccccccctgttcttcctgctggcctgcgccggcaacttcgtgcacggccacaagtgcgacatcaccctgcaggagatcatcaagaccctgaacagcctgaccgagcagaagaacaccaccgagaaggagaccttctgcagagccgccaccgtgctgagacagttctacagccaccacgagaaggacaccagatgcctgggcgccaccgcccagcagttccacagacacaagcagctgatcagattcctgaagagactggacagaaacctgtggggcctggccggcctgaacagctgccccgtgaaggaggccaaccagagcaccctggagaacttcctggagagactgaagaccatcatgagagagaagtacagcaagtgcagcagctag

SEQ ID NO: 249288 - DNA, 414 bp, Artificial Sequence
  derived and/or modified sequence
atggggctgacctcccagttgctaccccctttgttctttctactagcttgtgccggaaacttcgtccacggtcacaaatgtgacatcacactgcaagagattatcaagaccttgaattccctgactgagcaaaagaacaccacagagaaggagaccttttgtagagcggccaccgttctgcgtcagttttactcgcaccacgagaaggacacacgctgcttgggcgcaactgcgcagcagttccaccggcacaaacagcttatccggttccttaagcggctcgaccgaaacctgtggggattagcaggcctgaattcctgtcccgttaaggaagccaaccaaagcaccctggaaaacttcctcgaaaggctgaagacgattatgcgagagaaatattccaagtgttcttcatag

SEQ ID NO: 249289 - DNA, 414 bp, Artificial Sequence
  derived and/or modified sequence
atgggcctgaccagccagctgctgcccccactcttcttcctgctggcctgtgccggcaactttgtgcacggccacaagtgtgacatcaccctgcaggagatcatcaagaccctgaacagcctgacagagcagaagaacaccacagagaaggagaccttctgccgggccgccaccgtgctgcggcagttctacagccaccacgagaaggacacccgctgcctgggcgccacagcccagcagttccaccgccacaagcagctgatccgcttcctgaagaggctggacaggaacctgtggggcctggccggcctgaacagctgccctgtgaaggaggccaaccagagcaccctggagaacttcctggagcggctgaagaccatcatgagggagaagtacagcaagtgcagcagctag

SEQ ID NO: 249290 - DNA, 414 bp, Artificial Sequence
  derived and/or modified sequence
atgggtctcacctcccaactgcttccccctctgttcttcctgctagcatgtgccggcaactttgtccacggacacaagtgcgatatcaccttacaggagatcatcaaaactttgaacagcctcacagagcagaagaacacaactgagaaggaaaccttctgcagggctgcgactgtgctccggcagttctacagccaccatgagaaggacactcgctgcctgggtgcgactgcacagcagttccacaggcacaagcagctgatccgattcctgaaacggctcgacaggaacctctggggcctggcgggcttgaattcctgtcctgtgaaggaagccaaccagagtacgttggaaaacttcttggaaaggctaaagacgatcatgagagagaaatattcaaagtgttcgagctga

SEQ ID NO: 249291 - DNA, 414 bp, Artificial Sequence
  derived and/or modified sequence
atgggcctgaccagccagctgctgccccccctgttcttcctgctggcttgcgccgggaattttgtgcacgggcataaatgcgatataacattacaagagatcatcaagaccttaaactcacttaccgaacaaaaaaatactaccgagaaggaaacattctgtcgcgctgccacagtactgaggcagttctactcacaccatgaaaaggacacccgctgtctgggcgctacagctcaacagttccacagacacaaacagctaatcagatttttgaagagactggatcgtaacctctggggattggccggcctcaattcttgcccagttaaggaagcaaaccagagtactctcgagaacttcctggaaaggctgaagaccatcatgagagagaagtacagcaaatgttcctcctag

SEQ ID NO: 249292 - DNA, 414 bp, Artificial Sequence
  derived and/or modified sequence
atgggcctgacgagccagctcctaccaccccttttttttctgcttgcctgtgccggaaattttgtgcatgggcacaagtgtgacatcactctgcaggagattatcaaaactctgaactctctgacagaacagaagaatactaccgaaaaggaaacattttgtcgtgcagccacagtgctacgacagttctacagccaccacgagaaggacactcggtgcctgggcgctactgctcagcaattccataggcacaagcagctgatcaggtttctcaaaaggctggataggaacctgtggggtttagctggactgaattcatgccccgtcaaggaagccaaccagtcaaccttggaaaacttcctggagagattgaagacaatcatgagggagaagtactccaaatgttctagctag

SEQ ID NO: 249293 - DNA, 594 bp, Artificial Sequence
  derived and/or modified sequence
tgcatcgttagcttctcctgataaactaattgcctcacattgtcactgcaaatcgacacctattaatgggtctcacctcccaactgcttccccctctgttcttcctgctagcatgtgccggcaactttgtccacggacacaagtgcgatatcaccttacaggagatcatcaaaactttgaacagcctcacagagcagaagaacacaactgagaaggaaaccttctgcagggctgcgactgtgctccggcagttctacagccaccatgagaaggacactcgctgcctgggtgcgactgcacagcagttccacaggcacaagcagctgatccgattcctgaaacggctcgacaggaacctctggggcctggcgggcttgaattcctgtcctgtgaaggaagccaaccagagtacgttggaaaacttcttggaaaggctaaagacgatcatgagagagaaatattcaaagtgttcgagctgaatattttaatttatgagtttttgatagctttattttttaagtatttatatatttataactcatcataaaataaagtatatatagaatctaaaaaaaaaaaaaaaaaaaaaaaaaa

SEQ ID NO: 249294 - protein, 349 aa, Artificial Sequence
  derived and/or modified sequence
MEPPGRRECPFPSWRFPGLLLAAMVLLLYSFSDACEEPPTFEAMELIGKPKPYYEIGERVDYKCKKGYFYIPPLATHTICDRNHTWLPVSDDACYRETCPYIRDPLNGQAVPANGTYEFGYQMHFICNEGYYLIGEEILYCELKGSVAIWSGKPPICEKVLCTPPPKIKNGKHTFSEVEVFEYLDAVTYSCDPAPGPDPFSLIGESTIYCGDNSVWSRAAPECKVVKCRFPVVENGKQISGFGKKFYYKATVMFECDKGFYLDGSDTIVCDSNSTWDPPVPKCLKGPRPTYKPPVSNYPGYPKPEEGILDSLDVWVIAVIVIAIGKQMVELNMPLTRLNQPLQQSREAE

SEQ ID NO: 249295 - DNA, 1050 bp, Artificial Sequence
  derived and/or modified sequence
atggagccccccggacggagagagtgtccattccctagctggcgattcccaggcctcctccttgcagcgatggtgctgttgctgtactccttttccgatgcatgcgaagagcccccaacatttgaggcgatggaattgatcgggaagcccaaaccatactacgaaatcggagaaagagtggattacaagtgtaaaaaggggtatttctatatcccccctctcgcgacccacaccatttgtgaccgtaaccatacttggcttcccgtaagcgatgacgcatgttaccgcgagacctgcccctacatccgcgaccccctcaacgggcaagcggtcccagctaacggcacgtatgaatttggataccaaatgcatttcatttgtaatgagggctactacctaatcggggaagagatactctactgcgaactgaaggggagcgtagcaatttggtcagggaaaccgcccatatgtgagaaagtgttatgcactccgcctcccaaaatcaagaacggcaagcatactttctccgaggtcgaggtttttgagtacctcgatgccgtgacatacagttgcgaccccgctccgggccctgaccccttctctctgatcggggagagcaccatttattgtggcgacaattccgtctggtcccgggccgctcccgagtgtaaggttgtcaaatgccggttcccggtagtagagaatggaaagcaaatcagtggtttcgggaagaaattttactacaaggccaccgtcatgttcgagtgtgacaaaggcttttatctggatggatctgatacaatagtatgcgactcaaactctacgtgggatccaccagtgcctaagtgtttgaaggggcctagaccaacatataagcctcctgtgtctaactatcctggatatcccaagcccgaggaggggatcctggactccctagacgtgtgggtgatcgctgtgattgtcatcgctatcggcaaacaaatggtggagcttaacatgcccttgacacgcttaaaccagcccttgcagcaaagcagagaagcagaatag

SEQ ID NO: 249296 - DNA, 1095 bp, Artificial Sequence
  derived and/or modified sequence
atggagccgccaggcaggagggaatgcccctttccttcttggcgctttccaggtctcctgttggcagctatggttctgctgctctacagcttctcggatgcatgcgaagaacctcctacatttgaggctatggagctgattggcaaaccaaaaccctattatgaaataggcgaaagagtggactataagtgtaagaagggatacttctacatcccacctctagccacccacacaatttgcgatcggaaccacacctggctgcctgtctctgatgacgcctgttacagagaaacatgcccatacatccgggacccgttgaacgggcaggctgtccccgctaacggaacgtacgaattcggctaccagatgcacttcatttgtaatgagggctactatctgatcggcgaagagatcctctactgtgagcttaagggttctgtggccatctggtcaggcaagcctccaatctgcgaaaaagtcttgtgtacacctcctccaaagatcaagaatggtaagcatacattcagtgaggttgaggtttttgagtatctagacgcggtaacctactcctgcgaccccgcacccgggccggatcccttcagcctgatcggcgagagcacaatctactgcggagataactccgtatggtcaagagccgctcctgaatgcaaggttgttaagtgccgttttccagttgtggagaacggtaaacaaatttcagggttcgggaagaagttctattataaagctactgtcatgtttgaatgcgacaaggggttctatctcgacggatccgataccatcgtctgtgatagcaattccacatgggacccaccagtgcccaaatgtctgaaggtcagcacatcctcaaccaccaaaagtcccgcctcttcggcctccggccccagaccaacctacaaaccccccgtctcaaactaccctggctatcctaagcccgaagagggcatactcgactcactggatgtctgggtcatcgcagtcattgtaatagctatcggaaaacaaatggtcgagcttaatatgccactgacacgtttaaaccagcccctgcagcagtccagggaggcggaatag

SEQ ID NO: 249297 - DNA, 1050 bp, Artificial Sequence
  derived and/or modified sequence
atggagcccccaggccggcgggagtgccccttccccagctggaggtttcctggcctgctgctggccgccatggtgctgctgctgtacagcttcagtgatgcctgtgaggagccccccacctttgaggccatggagctgattggcaagcccaagccctactatgagatcggggagcgggtggactacaagtgcaagaagggctacttctacatcccccccctggccacccacaccatctgtgacaggaaccacacctggctgcctgtgtctgatgatgcctgctaccgggagacctgcccctacatccgggaccccctgaatggccaggccgtgcctgccaacggcacctatgaatttggctaccagatgcacttcatctgcaatgaaggctactacctgattggagaggagatcctgtactgtgagctgaagggctctgtggccatctggagcggcaagccacccatctgtgagaaggtgctgtgcaccccaccacccaagatcaagaatggcaagcacaccttcagcgaggtggaggtgtttgagtacctggatgctgtgacctacagctgtgaccctgcccctggccctgaccccttcagcctgattggagagagcaccatctactgtggggacaacagcgtgtggagcagagctgcccctgagtgcaaggtggtgaagtgccgcttccctgtggtggagaatggcaagcagatcagcggctttgggaagaagttctactacaaggccaccgtgatgtttgaatgtgacaagggcttctacctggatggcagtgacaccatcgtgtgtgacagcaacagcacctgggacccccctgtgcccaagtgcctgaagggcccccggcccacctacaagccccctgtgagcaactacccaggctaccccaagccagaggagggcatcctggacagcctggatgtgtgggtgattgctgtgattgtcatcgccatcggcaagcagatggtggagctgaacatgcccctgacccggctgaaccagcccctgcagcagagccgggaggccgagtag

SEQ ID NO: 249298 - DNA, 1095 bp, Artificial Sequence
  derived and/or modified sequence
atggagcccccaggccggcgggagtgccccttccccagctggaggtttcctggcctgctgctggccgccatggtgctgctgctgtacagcttcagtgatgcctgtgaggagccccccacctttgaggccatggagctgattggcaagcccaagccctactatgagatcggggagcgggtggactacaagtgcaagaagggctacttctacatcccccccctggccacccacaccatctgtgacaggaaccacacctggctgcctgtgtctgatgatgcctgctaccgggagacctgcccctacatccgggaccccctgaatggccaggccgtgcctgccaacggcacctatgaatttggctaccagatgcacttcatctgcaatgaaggctactacctgattggagaggagatcctgtactgtgagctgaagggctctgtggccatctggagcggcaagccacccatctgtgagaaggtgctgtgcaccccaccacccaagatcaagaatggcaagcacaccttcagcgaggtggaggtgtttgagtacctggatgctgtgacctacagctgtgaccctgcccctggccctgaccccttcagcctgattggagagagcaccatctactgtggggacaacagcgtgtggagcagagctgcccctgagtgcaaggtggtgaagtgccgcttccctgtggtggagaatggcaagcagatcagcggctttgggaagaagttctactacaaggccaccgtgatgtttgaatgtgacaagggcttctacctggatggcagtgacaccatcgtgtgtgacagcaacagcacctgggacccccctgtgcccaagtgcctgaaggtgtccaccagcagcaccaccaagagccctgccagcagcgccagcggcccccggcccacctacaagccccctgtgagcaactacccaggctaccccaagccagaggagggcatcctggacagcctggatgtgtgggtgattgctgtgattgtgattgccatcggcaagcagatggtggagctgaacatgcccctgacccggctgaaccagcccctgcagcagagccgggaggccgagtag

SEQ ID NO: 249299 - DNA, 1050 bp, Artificial Sequence
  derived and/or modified sequence
atggagccccccggccggcgggagtgccccttccccagctggcggtttcctggactcctgttggcagccatggtcctcctgctgtattctttctcagacgcctgtgaggaaccccctaccttcgaggcaatggaactgatcggcaagcccaagccatattacgaaattggggagcgcgtggattataagtgcaagaagggctacttctatattcccccactagccactcataccatctgcgacagaaaccacacttggcttcctgtgtcagacgacgcgtgttatcgcgaaacctgtccatacataagggatcctttaaatggacaggctgtgcctgccaacggtacctacgagttcggttaccagatgcactttatctgtaacgagggctactacctcattggcgaggaaattctctactgcgagctcaaggggtctgtggcaatctggagcggcaagcctcctatatgtgagaaggtgctgtgcacaccccctcctaagataaaaaatggaaaacataccttttctgaagtagaggttttcgagtatctggacgcagtcacgtattcatgcgaccctgcaccaggaccagaccccttctctctgattggggagtctactatctattgtggcgacaatagcgtgtggtctagagctgcgcctgagtgcaaggttgtgaaatgccgttttcctgttgtggaaaacggtaagcagatcagcggatttgggaagaagttttattacaaggccactgtgatgtttgaatgtgacaaagggttttacctcgatggctccgacacaattgtgtgtgattctaatagcacctgggacccacctgtgccaaagtgtctgaaaggaccacgaccaacgtacaagccacccgtgtctaattatcccggttaccccaaacccgaagaaggcattttagacagcctggatgtgtgggtaatagctgtgattgttattgctatcgggaagcagatggttgagttgaacatgccgctgactaggctgaatcaaccactgcagcagagccgggaggcagagtag

SEQ ID NO: 249300 - DNA, 1095 bp, Artificial Sequence
  derived and/or modified sequence
atggagccccccggccggcgggagtgccccttccccagctggcggttcccaggcctccttctggcagccatggtactcctgttatattcatttagcgatgcatgcgaggagcctccaacttttgaagccatggagctgattggcaagccaaagccttactatgagattggcgaacgtgttgattataagtgcaagaaagggtacttctacattccacctctggcgacacacactatctgcgaccggaatcatacatggttaccggtgagcgatgacgcttgttaccgcgaaacctgtccatacattcgggatcccttaaacgggcaggcggttccagccaacggtacttatgagttcgggtatcagatgcactttatttgtaacgagggctactatttgatcggagaagaaatactgtactgcgaattgaaggggtctgtggctatctggtccggaaagccccctatttgtgagaaagtgctctgcacaccccctcctaagattaagaacggaaaacacacatttagcgaagtggaagtgtttgagtacctcgacgccgtgacttactcatgcgatccagcccccggcccggacccgttctctctgatcggcgaaagcacaatctattgcggcgacaacagcgtgtggtcacgggcagcacccgagtgcaaggtcgtgaaatgccgtttcccagttgtcgagaacgggaaacaaattagcggtttcggcaaaaaattctactacaaggcaacagtgatgttcgagtgtgacaagggattctatctggatgggtcagacactattgtttgcgattccaatagcacttgggatcctcccgtgcctaagtgcctaaaagtctctacttcctccacaactaaaagtccggctagctcagcatccggccccaggcctacatataaaccgccagtgtcaaattacccaggctatccaaaacctgaagaaggcatccttgactccctggacgtgtgggtgattgcagtcattgttattgctatcggaaaacagatggttgagttaaacatgcctctgaccaggctgaaccaacccttacaacagtcacgggaggcggaatag

SEQ ID NO: 249301 - DNA, 1050 bp, Artificial Sequence
  derived and/or modified sequence
atggagcccccaggtcgtagggaatgcccgttcccgtcttggcgttttccgggactgctgcttgcggctatggtcttgcttctttactcctttagcgacgcttgtgaggagcccccaactttcgaagcaatggagttaatcgggaagcctaagccttattatgaaattggagaacgcgtggactacaaatgcaagaagggatatttctacattcctccactggcaacacacacaatttgcgatcggaatcacacttggcttccagtgtcagatgacgcatgctatcgcgaaacgtgtccctatatacgggatccactgaatgggcaggcagtgcctgctaatgggacgtatgagttcggctatcagatgcattttatctgcaatgagggctactatctgattggggaggaaatcctgtactgcgaactcaaaggcagcgtggccatatggtccggcaaaccgcctatctgtgaaaaggtcctgtgtacaccacctcccaaaatcaaaaatgggaagcacacattctcagaagttgaagtattcgagtatctggacgctgtcacttatagctgtgacccagcaccaggccctgacccctttagtctgatcggcgagtccactatttactgcggtgacaactctgtgtggtctagagccgctccggagtgtaaagtggtcaagtgcagatttccagtcgtagaaaacggaaagcaaatatctgggtttgggaagaagttctattataaagctactgtgatgttcgaatgcgataaaggattttatctcgacgggtcggacactatcgtgtgcgatagcaactctacatgggaccccccagtccccaagtgtctgaagggccctcgcccaacttataagcctcccgtgtccaactaccctggttaccccaaaccggaggaggggattctggacagccttgatgtgtgggtgatcgctgtcatagtgatcgccatcgggaagcagatggttgagctaaatatgccactcactaggctgaaccagcccctccagcaaagccgggaagcagagtag

SEQ ID NO: 249302 - DNA, 1095 bp, Artificial Sequence
  derived and/or modified sequence
atggaaccgccagggaggagagaatgcccattcccatcttggcggtttcctggcctgttgctcgcggctatggttttgttgctctactcattctccgatgcctgtgaggagcctcccacattcgaagctatggagttgattgggaagcccaagccctattatgaaatcggcgaacgtgttgactacaagtgtaagaaggggtacttttatataccacccctggcaacacataccatatgtgatcgtaatcatacatggctcccagtgtcggacgatgcatgttacagagagacctgcccctatattcgcgatccccttaacggacaggccgtgcccgcaaacggaacctacgagttcggctaccaaatgcacttcatctgcaacgagggatattacctgatcggagaggagatattatattgtgaactgaaagggagtgtggcaatctggtccggaaagcctccgatctgcgagaaggtgctgtgtaccccaccaccaaagatcaagaatggcaagcacaccttctctgaggtggaggttttcgagtacctagatgctgtgacatactcctgcgaccccgcacctggacctgacccgttcagcctaataggggaatccactatctactgcggcgataactccgtgtggagcagggcagcccctgagtgtaaggtggtgaagtgtcgctttcccgtggttgagaatggaaagcagattagcggctttgggaaaaagttttattataaagccaccgtgatgttcgaatgcgacaagggattttatcttgacggctctgataccatcgtctgtgattccaatagcacctgggatccgcctgttcccaagtgcctgaaagtatcaacgtcctcaaccacgaagtctccggcatcttctgcatctggacctcgacccacgtacaagccacccgtcagcaattatcccggataccctaaacccgaggagggcatcctagactctctggacgtgtgggtgatcgcagtgattgtcattgcgatcgggaagcagatggtagagctgaacatgccactgacaagactgaatcagccactccaacagtcaagggaggcagagtag

SEQ ID NO: 249303 - DNA, 3124 bp, Artificial Sequence
  derived and/or modified sequence
gctcgggccacgcccacctgtcctgcagcactggatgctttgtgagttggggattgttgcgtcccatatctggacccagaagggacttccctgctcggctggctctcggtttctctgctttcctccggagaaataacagcgtcttccgcgccgcgcatggagcctcccggccgccgcgagtgtccctttccttcctggcgctttcctgggttgcttctggcggccatggtgttgctgctgtactccttctccgatgcctgtgaggagccaccaacatttgaagctatggagctcattggtaaaccaaaaccctactatgagattggtgaacgagtagattataagtgtaaaaaaggatacttctatatacctcctcttgccacccatactatttgtgatcggaatcatacatggctacctgtctcagatgacgcctgttatagagaaacatgtccatatatacgggatcctttaaatggccaagcagtccctgcaaatgggacttacgagtttggttatcagatgcactttatttgtaatgagggttattacttaattggtgaagaaattctatattgtgaacttaaaggatcagtagcaatttggagcggtaagcccccaatatgtgaaaaggttttgtgtacaccacctccaaaaataaaaaatggaaaacacacctttagtgaagtagaagtatttgagtatcttgatgcagtaacttatagttgtgatcctgcacctggaccagatccattttcacttattggagagagcacgatttattgtggtgacaattcagtgtggagtcgtgctgctccagagtgtaaagtggtcaaatgtcgatttccagtagtcgaaaatggaaaacagatatcaggatttggaaaaaaattttactacaaagcaacagttatgtttgaatgcgataagggtttttacctcgatggcagcgacacaattgtctgtgacagtaacagtacttgggatcccccagttccaaagtgtcttaaaggtcctaggcctacttacaagcctccagtctcaaattatccaggatatcctaaacctgaggaaggaatacttgacagtttggatgtttgggtcattgctgtgattgttattgccataggaaagcagatggtggagctgaatatgccacttaccagactaaatcaaccactccagcagagcagagaggctgaatagattccacaacctggtttgccagttcatcttttgactctattaaaatcttcaatagttgttattctgtagtttcactctcatgagtgcaactgtggcttagctaatattgcaatgtggcttgaatgtaggtagcatcctttgatgcttctttgaaacttgtatgaatttgggtatgaacagattgcctgctttcccttaaataacacttagatttattggaccagtcagcacagcatgcctggttgtattaaagcagggatatgctgtattttataaaattggcaaaattagagaaatatagttcacaatgaaattatattttctttgtaaagaaagtggcttgaaatcttttttgttcaaagattaatgccaactcttaagattattctttcaccaactatagaatgtattttatatatcgttcattgtaaaaagcccttaaaaatatgtgtatactactttggctcttgtgcataaaaacaagaacactgaaaattgggaatatgcacaaacttggcttctttaaccaagaatattattggaaaattctctaaaagttaatagggtaaattctctattttttgtaatgtgttcggtgatttcagaaagctagaaagtgtatgtgtggcatttgttttcactttttaaaacatccctaactgatcgaatatatcagtaatttcagaatcagatgcatcctttcataagaagtgagaggactctgacagccataacaggagtgccacttcatggtgcgaagtgaacactgtagtcttgttgttttcccaaagagaactccgtatgttctcttaggttgagtaacccactctgaattctggttacatgtgtttttctctccctccttaaataaagagaggggttaaacatgccctctaaaagtaggtggttttgaagagaataaattcatcagataacctcaagtcacatgagaatcttagtccatttacattgccttggctagtaaaagccatctatgtatatgtcttacctcatctcctaaaaggcagagtacaaagtaagccatgtatctcaggaaggtaacttcattttgtctatttgctgttgattgtaccaagggatggaagaagtaaatatagctcaggtagcactttatactcaggcagatctcagccctctactgagtcccttagccaagcagtttctttcaaagaagccagcaggcgaaaagcagggactgccactgcatttcatatcacactgttaaaagttgtgttttgaaattttatgtttagttgcacaaattgggccaaagaaacattgccttgaggaagatatgattggaaaatcaagagtgtagaagaataaatactgttttactgtccaaagacatgtttatagtgctctgtaaatgttcctttcctttgtagtctctggcaagatgctttaggaagataaaagtttgaggagaacaaacaggaattctgaattaagcacagagttgaagtttatacccgtttcacatgcttttcaagaatgtcgcaattactaagaagcagataatggtgttttttagaaacctaattgaagtatattcaaccaaatactttaatgtataaaataaatattatacaatatacttgtatagcagtttctgcttcacatttgattttttcaaatttaatatttatattagagatctatatatgtataaatatgtattttgtcaaatttgttacttaaatatatagagaccagttttctctggaagtttgtttaaatgacagaagcgtatatgaattcaagaaaatttaagctgcaaaaatgtatttgctataaaatgagaagtctcactgatagaggttctttattgctcattttttaaaaaatggactcttgaaatctgttaaaataaaattgtacatttggagatgtttca

SEQ ID NO: 249304 - DNA, 3169 bp, Artificial Sequence
  derived and/or modified sequence
gctcgggccacgcccacctgtcctgcagcactggatgctttgtgagttggggattgttgcgtcccatatctggacccagaagggacttccctgctcggctggctctcggtttctctgctttcctccggagaaataacagcgtcttccgcgccgcgcatggagcctcccggccgccgcgagtgtccctttccttcctggcgctttcctgggttgcttctggcggccatggtgttgctgctgtactccttctccgatgcctgtgaggagccaccaacatttgaagctatggagctcattggtaaaccaaaaccctactatgagattggtgaacgagtagattataagtgtaaaaaaggatacttctatatacctcctcttgccacccatactatttgtgatcggaatcatacatggctacctgtctcagatgacgcctgttatagagaaacatgtccatatatacgggatcctttaaatggccaagcagtccctgcaaatgggacttacgagtttggttatcagatgcactttatttgtaatgagggttattacttaattggtgaagaaattctatattgtgaacttaaaggatcagtagcaatttggagcggtaagcccccaatatgtgaaaaggttttgtgtacaccacctccaaaaataaaaaatggaaaacacacctttagtgaagtagaagtatttgagtatcttgatgcagtaacttatagttgtgatcctgcacctggaccagatccattttcacttattggagagagcacgatttattgtggtgacaattcagtgtggagtcgtgctgctccagagtgtaaagtggtcaaatgtcgatttccagtagtcgaaaatggaaaacagatatcaggatttggaaaaaaattttactacaaagcaacagttatgtttgaatgcgataagggtttttacctcgatggcagcgacacaattgtctgtgacagtaacagtacttgggatcccccagttccaaagtgtcttaaagtgtcgacttcttccactacaaaatctccagcgtccagtgcctcaggtcctaggcctacttacaagcctccagtctcaaattatccaggatatcctaaacctgaggaaggaatacttgacagtttggatgtttgggtcattgctgtgattgttattgccataggaaagcagatggtggagctgaatatgccacttaccagactaaatcaaccactccagcagagcagagaggctgaatagattccacaacctggtttgccagttcatcttttgactctattaaaatcttcaatagttgttattctgtagtttcactctcatgagtgcaactgtggcttagctaatattgcaatgtggcttgaatgtaggtagcatcctttgatgcttctttgaaacttgtatgaatttgggtatgaacagattgcctgctttcccttaaataacacttagatttattggaccagtcagcacagcatgcctggttgtattaaagcagggatatgctgtattttataaaattggcaaaattagagaaatatagttcacaatgaaattatattttctttgtaaagaaagtggcttgaaatcttttttgttcaaagattaatgccaactcttaagattattctttcaccaactatagaatgtattttatatatcgttcattgtaaaaagcccttaaaaatatgtgtatactactttggctcttgtgcataaaaacaagaacactgaaaattgggaatatgcacaaacttggcttctttaaccaagaatattattggaaaattctctaaaagttaatagggtaaattctctattttttgtaatgtgttcggtgatttcagaaagctagaaagtgtatgtgtggcatttgttttcactttttaaaacatccctaactgatcgaatatatcagtaatttcagaatcagatgcatcctttcataagaagtgagaggactctgacagccataacaggagtgccacttcatggtgcgaagtgaacactgtagtcttgttgttttcccaaagagaactccgtatgttctcttaggttgagtaacccactctgaattctggttacatgtgtttttctctccctccttaaataaagagaggggttaaacatgccctctaaaagtaggtggttttgaagagaataaattcatcagataacctcaagtcacatgagaatcttagtccatttacattgccttggctagtaaaagccatctatgtatatgtcttacctcatctcctaaaaggcagagtacaaagtaagccatgtatctcaggaaggtaacttcattttgtctatttgctgttgattgtaccaagggatggaagaagtaaatatagctcaggtagcactttatactcaggcagatctcagccctctactgagtcccttagccaagcagtttctttcaaagaagccagcaggcgaaaagcagggactgccactgcatttcatatcacactgttaaaagttgtgttttgaaattttatgtttagttgcacaaattgggccaaagaaacattgccttgaggaagatatgattggaaaatcaagagtgtagaagaataaatactgttttactgtccaaagacatgtttatagtgctctgtaaatgttcctttcctttgtagtctctggcaagatgctttaggaagataaaagtttgaggagaacaaacaggaattctgaattaagcacagagttgaagtttatacccgtttcacatgcttttcaagaatgtcgcaattactaagaagcagataatggtgttttttagaaacctaattgaagtatattcaaccaaatactttaatgtataaaataaatattatacaatatacttgtatagcagtttctgcttcacatttgattttttcaaatttaatatttatattagagatctatatatgtataaatatgtattttgtcaaatttgttacttaaatatatagagaccagttttctctggaagtttgtttaaatgacagaagcgtatatgaattcaagaaaatttaagctgcaaaaatgtatttgctataaaatgagaagtctcactgatagaggttctttattgctcattttttaaaaaatggactcttgaaatctgttaaaataaaattgtacatttggagatgtttca

SEQ ID NO: 249305 - DNA, 1050 bp, Artificial Sequence
  derived and/or modified sequence
atggagccccccggcagaagagagtgccccttccccagctggagattccccggcctgctgctggccgccatggtgctgctgctgtacagcttcagcgacgcctgcgaggagccccccaccttcgaggccatggagctgatcggcaagcccaagccctactacgagatcggcgagagagtggactacaagtgcaagaagggctacttctacatcccccccctggccacccacaccatctgcgacagaaaccacacctggctgcccgtgagcgacgacgcctgctacagagagacctgcccctacatcagagaccccctgaacggccaggccgtgcccgccaacggcacctacgagttcggctaccagatgcacttcatctgcaacgagggctactacctgatcggcgaggagatcctgtactgcgagctgaagggcagcgtggccatctggagcggcaagccccccatctgcgagaaggtgctgtgcacccccccccccaagatcaagaacggcaagcacaccttcagcgaggtggaggtgttcgagtacctggacgccgtgacctacagctgcgaccccgcccccggccccgaccccttcagcctgatcggcgagagcaccatctactgcggcgacaacagcgtgtggagcagagccgcccccgagtgcaaggtggtgaagtgcagattccccgtggtggagaacggcaagcagatcagcggcttcggcaagaagttctactacaaggccaccgtgatgttcgagtgcgacaagggcttctacctggacggcagcgacaccatcgtgtgcgacagcaacagcacctgggacccccccgtgcccaagtgcctgaagggccccagacccacctacaagccccccgtgagcaactaccccggctaccccaagcccgaggagggcatcctggacagcctggacgtgtgggtgatcgccgtgatcgtgatcgccatcggcaagcagatggtggagctgaacatgcccctgaccagactgaaccagcccctgcagcagagcagagaggccgagtag

SEQ ID NO: 249306 - DNA, 1095 bp, Artificial Sequence
  derived and/or modified sequence
atggagccccccggcagaagagagtgccccttccccagctggagattccccggcctgctgctggccgccatggtgctgctgctgtacagcttcagcgacgcctgcgaggagccccccaccttcgaggccatggagctgatcggcaagcccaagccctactacgagatcggcgagagagtggactacaagtgcaagaagggctacttctacatcccccccctggccacccacaccatctgcgacagaaaccacacctggctgcccgtgagcgacgacgcctgctacagagagacctgcccctacatcagagaccccctgaacggccaggccgtgcccgccaacggcacctacgagttcggctaccagatgcacttcatctgcaacgagggctactacctgatcggcgaggagatcctgtactgcgagctgaagggcagcgtggccatctggagcggcaagccccccatctgcgagaaggtgctgtgcacccccccccccaagatcaagaacggcaagcacaccttcagcgaggtggaggtgttcgagtacctggacgccgtgacctacagctgcgaccccgcccccggccccgaccccttcagcctgatcggcgagagcaccatctactgcggcgacaacagcgtgtggagcagagccgcccccgagtgcaaggtggtgaagtgcagattccccgtggtggagaacggcaagcagatcagcggcttcggcaagaagttctactacaaggccaccgtgatgttcgagtgcgacaagggcttctacctggacggcagcgacaccatcgtgtgcgacagcaacagcacctgggacccccccgtgcccaagtgcctgaaggtgagcaccagcagcaccaccaagagccccgccagcagcgccagcggccccagacccacctacaagccccccgtgagcaactaccccggctaccccaagcccgaggagggcatcctggacagcctggacgtgtgggtgatcgccgtgatcgtgatcgccatcggcaagcagatggtggagctgaacatgcccctgaccagactgaaccagcccctgcagcagagcagagaggccgagtag

SEQ ID NO: 249307 - protein, 377 aa, Artificial Sequence
  derived and/or modified sequence
MEPPGRRECPFPSWRFPGLLLAAMVLLLYSFSDACEEPPTFEAMELIGKPKPYYEIGERVDYKCKKGYFYIPPLATHTICDRNHTWLPVSDDACYRETCPYIRDPLNGQAVPANGTYEFGYQMHFICNEGYYLIGEEILYCELKGSVAIWSGKPPICEKVLCTPPPKIKNGKHTFSEVEVFEYLDAVTYSCDPAPGPDPFSLIGESTIYCGDNSVWSRAAPECKVVKCRFPVVENGKQISGFGKKFYYKATVMFECDKGFYLDGSDTIVCDSNSTWDPPVPKCLKVSTSSTTKSPASSASGPRPTYKPPVSNYPGYPKPEEGILDSLDVWVIAVIVIAIVVGVAVICVVPYRYLQRRKKKGTYLTDETHREVKFTSL

SEQ ID NO: 249308 - DNA, 1134 bp, Artificial Sequence
  derived and/or modified sequence
atggagccccctggccgcagagagtgtccgtttccctcgtggagatttcctggccttctcttggcagcaatggtcttgctgttatatagcttcagcgatgcgtgcgaggagccaccaacatttgaggctatggaactgataggaaagcccaaaccatactatgagatcggtgaacgcgtggactacaagtgtaagaaagggtatttttacatacctcccctcgcaacccatacaatttgcgacagaaaccatacctggctgccggtcagcgacgacgcgtgctaccgagaaacctgtccctacatccgagacccgctcaacggccaggcggtacctgccaatggaacgtatgaattcggttaccagatgcacttcatttgcaacgaggggtattatttgataggggaagagattctgtactgtgagctgaagggtagtgtcgcgatttggtccgggaagcctcccatctgtgaaaaagtcctatgcacccctccccctaagatcaagaacggaaagcataccttcagtgaggtcgaggtgtttgaatatctggatgctgtgacttattcctgcgatcctgcccctggacccgaccccttcagtcttatcggagaatcaacaatttattgtggtgacaacagtgtgtggagcagagccgctccagaatgcaaagtcgtaaagtgccgatttccggtagtggagaatggcaagcagatctcgggatttgggaagaagttctattacaaggctactgtcatgttcgagtgcgacaagggattctatctcgatggctccgacactatcgtttgtgattcaaactctacctgggacccgcccgtgcctaaatgcctaaaagtgtcaaccagctctaccaccaagtcccccgccagctcagccagcggccctagaccgacctacaaaccgcccgtctctaattacccagggtacccaaagcccgaggaagggatactcgatagcttggacgtctgggttattgccgtgattgtgattgcaattgtagttggcgtggccgtgatttgcgtggtcccttataggtacctgcaaagacggaaaaaaaaggggacatatctcaccgatgagactcacagggaagtgaagttcacaagtttatag

SEQ ID NO: 249309 - DNA, 1134 bp, Artificial Sequence
  derived and/or modified sequence
atggagcccccaggccggcgggagtgccccttccccagctggaggtttcctggcctgctgctggccgccatggtgctgctgctgtacagcttcagtgatgcctgtgaggagccccccacctttgaggccatggagctgattggcaagcccaagccctactatgagatcggggagcgggtggactacaagtgcaagaagggctacttctacatcccccccctggccacccacaccatctgtgacaggaaccacacctggctgcctgtgtctgatgatgcctgctaccgggagacctgcccctacatccgggaccccctgaatggccaggccgtgcctgccaacggcacctatgaatttggctaccagatgcacttcatctgcaatgaaggctactacctgattggagaggagatcctgtactgtgagctgaagggctctgtggccatctggagcggcaagccacccatctgtgagaaggtgctgtgcaccccaccacccaagatcaagaatggcaagcacaccttcagcgaggtggaggtgtttgagtacctggatgctgtgacctacagctgtgaccctgcccctggccctgaccccttcagcctgattggagagagcaccatctactgtggggacaacagcgtgtggagcagagctgcccctgagtgcaaggtggtgaagtgccgcttccctgtggtggagaatggcaagcagatcagcggctttgggaagaagttctactacaaggccaccgtgatgtttgaatgtgacaagggcttctacctggatggcagtgacaccatcgtgtgtgacagcaacagcacctgggacccccctgtgcccaagtgcctgaaggtgtccaccagcagcaccaccaagagccctgccagcagcgccagcggcccccggcccacctacaagccccctgtgagcaactacccaggctaccccaagccagaggagggcatcctggacagcctggatgtgtgggtgattgctgtgattgtgattgccatcgtggtgggcgtggccgtcatctgtgtggtgccctaccgctacctgcagaggaggaagaagaagggcacctacctgacagatgagacccaccgggaggtgaagttcaccagcctgtag

SEQ ID NO: 249310 - DNA, 1134 bp, Artificial Sequence
  derived and/or modified sequence
atggagccccccggccggcgggagtgccccttccccagctggcggttcccagggctcctgttggctgcaatggtgttactcttgtactccttcagcgacgcatgcgaagaacccccgacctttgaagccatggagctgatcgggaagcctaagccctactacgagattggagaaagagtagactacaagtgcaagaagggatacttttacattccacctttggctacccataccatctgtgacaggaatcacacatggctgcccgtttccgacgacgcatgttacagagaaacttgcccatatatccgggatccacttaacgggcaagccgtcccagccaatggcacctatgagtttggctatcagatgcattttatctgtaacgaaggctactatcttatcggcgaggaaatcttatactgtgaactaaagggcagcgtggctatctggagtggcaagcctccaatatgtgagaaggtgttgtgtactccccctcctaagatcaaaaacgggaagcatacattctccgaagtagaagtctttgagtatcttgatgcagtgacatatagctgtgaccctgctccgggacctgaccctttctccctgatcggcgaaagcactatctactgcggtgacaactccgtctggtccagagccgcgccggaatgtaaagttgttaaatgtagattccctgtggtggagaacgggaaacagatctctggatttggaaagaagttctactataaggctactgtcatgtttgagtgcgacaagggattctacctagatggtagtgacactattgtctgtgacagtaactccacctgggatccaccagttcccaagtgcctcaaagtgagcacctcctcaactaccaaatcccccgcctccagcgcaagcggacctagaccaacatataagccacccgtgagtaactaccccggctatcctaagcccgaagaggggatccttgatagccttgacgtgtgggtcattgctgtaattgttatcgctattgttgttggtgttgcagtgatatgcgtggtgccttacagatacctgcagagaagaaaaaagaaggggacgtaccttactgacgagacgcaccgcgaggtgaagttcacctctctgtag

SEQ ID NO: 249311 - DNA, 1134 bp, Artificial Sequence
  derived and/or modified sequence
atggagccgccaggaaggcgggagtgtcccttcccttcttggcgattccctgggctgctgttggccgctatggtcctcctcctctattccttttcagatgcgtgtgaagaacccccaacctttgaggccatggaactgatcggaaagcctaagccctattatgagataggagagagggtcgattataaatgcaagaaagggtatttctacatccccccactggccacccacaccatctgcgatcgcaaccatacctggcttcctgtgtcagatgacgcctgctacagggagacctgcccctacatcagagaccctctcaacggacaagcggttccagcaaatgggacctacgaatttgggtaccagatgcactttatctgtaatgaaggatactatctgataggcgaggagatcctgtattgtgaattgaagggatcagtggcaatctggtctggtaagccaccaatctgcgagaaggtgctctgcacacccccacccaagataaaaaacggcaaacatactttctccgaggttgaggttttcgaatatctggacgcagtaacttattcatgcgatcctgcccctgggcctgacccatttagcctgattggtgagtctaccatctactgtggagataactctgtctggagtagggctgctccggagtgcaaagttgtgaagtgccggtttcctgtggtagaaaacggcaagcagatctcagggtttggcaaaaagttctactacaaggccacagtgatgtttgagtgtgataaaggcttttacctcgacgggtctgacaccatagtgtgtgattccaacagtacgtgggaccccccagtgcctaaatgcttaaaagtgtccactagctctactacaaaatcacctgcctcgagcgctagtggccctaggcccacatacaaaccacccgtgtcaaactatcctggatatcctaagcccgaagagggcatcctcgattcattagacgtctgggtcatcgcagtgattgtgatcgccatcgtggtcggcgttgccgtgatctgcgttgtgccgtataggtacctgcagaggcgaaagaagaaaggtacatacctcactgatgaaacccatcgagaagtaaagttcacatcactctag

SEQ ID NO: 249312 - DNA, 3326 bp, Artificial Sequence
  derived and/or modified sequence
gctcgggccacgcccacctgtcctgcagcactggatgctttgtgagttggggattgttgcgtcccatatctggacccagaagggacttccctgctcggctggctctcggtttctctgctttcctccggagaaataacagcgtcttccgcgccgcgcatggagcctcccggccgccgcgagtgtccctttccttcctggcgctttcctgggttgcttctggcggccatggtgttgctgctgtactccttctccgatgcctgtgaggagccaccaacatttgaagctatggagctcattggtaaaccaaaaccctactatgagattggtgaacgagtagattataagtgtaaaaaaggatacttctatatacctcctcttgccacccatactatttgtgatcggaatcatacatggctacctgtctcagatgacgcctgttatagagaaacatgtccatatatacgggatcctttaaatggccaagcagtccctgcaaatgggacttacgagtttggttatcagatgcactttatttgtaatgagggttattacttaattggtgaagaaattctatattgtgaacttaaaggatcagtagcaatttggagcggtaagcccccaatatgtgaaaaggttttgtgtacaccacctccaaaaataaaaaatggaaaacacacctttagtgaagtagaagtatttgagtatcttgatgcagtaacttatagttgtgatcctgcacctggaccagatccattttcacttattggagagagcacgatttattgtggtgacaattcagtgtggagtcgtgctgctccagagtgtaaagtggtcaaatgtcgatttccagtagtcgaaaatggaaaacagatatcaggatttggaaaaaaattttactacaaagcaacagttatgtttgaatgcgataagggtttttacctcgatggcagcgacacaattgtctgtgacagtaacagtacttgggatcccccagttccaaagtgtcttaaagtgtcgacttcttccactacaaaatctccagcgtccagtgcctcaggtcctaggcctacttacaagcctccagtctcaaattatccaggatatcctaaacctgaggaaggaatacttgacagtttggatgtttgggtcattgctgtgattgttattgccatagttgttggagttgcagtaatttgtgttgtcccgtacagatatcttcaaaggaggaagaagaaaggcacatacctaactgatgagacccacagagaagtaaaatttacttctctctgagaaggagagatgagagaaaggtttgcttttatcattaaaaggaaagcagatggtggagctgaatatgccacttaccagactaaatcaaccactccagcagagcagagaggctgaatagattccacaacctggtttgccagttcatcttttgactctattaaaatcttcaatagttgttattctgtagtttcactctcatgagtgcaactgtggcttagctaatattgcaatgtggcttgaatgtaggtagcatcctttgatgcttctttgaaacttgtatgaatttgggtatgaacagattgcctgctttcccttaaataacacttagatttattggaccagtcagcacagcatgcctggttgtattaaagcagggatatgctgtattttataaaattggcaaaattagagaaatatagttcacaatgaaattatattttctttgtaaagaaagtggcttgaaatcttttttgttcaaagattaatgccaactcttaagattattctttcaccaactatagaatgtattttatatatcgttcattgtaaaaagcccttaaaaatatgtgtatactactttggctcttgtgcataaaaacaagaacactgaaaattgggaatatgcacaaacttggcttctttaaccaagaatattattggaaaattctctaaaagttaatagggtaaattctctattttttgtaatgtgttcggtgatttcagaaagctagaaagtgtatgtgtggcatttgttttcactttttaaaacatccctaactgatcgaatatatcagtaatttcagaatcagatgcatcctttcataagaagtgagaggactctgacagccataacaggagtgccacttcatggtgcgaagtgaacactgtagtcttgttgttttcccaaagagaactccgtatgttctcttaggttgagtaacccactctgaattctggttacatgtgtttttctctccctccttaaataaagagaggggttaaacatgccctctaaaagtaggtggttttgaagagaataaattcatcagataacctcaagtcacatgagaatcttagtccatttacattgccttggctagtaaaagccatctatgtatatgtcttacctcatctcctaaaaggcagagtacaaagtaagccatgtatctcaggaaggtaacttcattttgtctatttgctgttgattgtaccaagggatggaagaagtaaatatagctcaggtagcactttatactcaggcagatctcagccctctactgagtcccttagccaagcagtttctttcaaagaagccagcaggcgaaaagcagggactgccactgcatttcatatcacactgttaaaagttgtgttttgaaattttatgtttagttgcacaaattgggccaaagaaacattgccttgaggaagatatgattggaaaatcaagagtgtagaagaataaatactgttttactgtccaaagacatgtttatagtgctctgtaaatgttcctttcctttgtagtctctggcaagatgctttaggaagataaaagtttgaggagaacaaacaggaattctgaattaagcacagagttgaagtttatacccgtttcacatgcttttcaagaatgtcgcaattactaagaagcagataatggtgttttttagaaacctaattgaagtatattcaaccaaatactttaatgtataaaataaatattatacaatatacttgtatagcagtttctgcttcacatttgattttttcaaatttaatatttatattagagatctatatatgtataaatatgtattttgtcaaatttgttacttaaatatatagagaccagttttctctggaagtttgtttaaatgacagaagcgtatatgaattcaagaaaatttaagctgcaaaaatgtatttgctataaaatgagaagtctcactgatagaggttctttattgctcattttttaaaaaatggactcttgaaatctgttaaaataaaattgtacatttggagatgtttca

SEQ ID NO: 249313 - DNA, 1134 bp, Artificial Sequence
  derived and/or modified sequence
atggagccccccggcagaagagagtgccccttccccagctggagattccccggcctgctgctggccgccatggtgctgctgctgtacagcttcagcgacgcctgcgaggagccccccaccttcgaggccatggagctgatcggcaagcccaagccctactacgagatcggcgagagagtggactacaagtgcaagaagggctacttctacatcccccccctggccacccacaccatctgcgacagaaaccacacctggctgcccgtgagcgacgacgcctgctacagagagacctgcccctacatcagagaccccctgaacggccaggccgtgcccgccaacggcacctacgagttcggctaccagatgcacttcatctgcaacgagggctactacctgatcggcgaggagatcctgtactgcgagctgaagggcagcgtggccatctggagcggcaagccccccatctgcgagaaggtgctgtgcacccccccccccaagatcaagaacggcaagcacaccttcagcgaggtggaggtgttcgagtacctggacgccgtgacctacagctgcgaccccgcccccggccccgaccccttcagcctgatcggcgagagcaccatctactgcggcgacaacagcgtgtggagcagagccgcccccgagtgcaaggtggtgaagtgcagattccccgtggtggagaacggcaagcagatcagcggcttcggcaagaagttctactacaaggccaccgtgatgttcgagtgcgacaagggcttctacctggacggcagcgacaccatcgtgtgcgacagcaacagcacctgggacccccccgtgcccaagtgcctgaaggtgagcaccagcagcaccaccaagagccccgccagcagcgccagcggccccagacccacctacaagccccccgtgagcaactaccccggctaccccaagcccgaggagggcatcctggacagcctggacgtgtgggtgatcgccgtgatcgtgatcgccatcgtggtgggcgtggccgtgatctgcgtggtgccctacagatacctgcagagaagaaagaagaagggcacctacctgaccgacgagacccacagagaggtgaagttcaccagcctgtag

SEQ ID NO: 249314 - protein, 362 aa, Artificial Sequence
  derived and/or modified sequence
MEPPGRRECPFPSWRFPGLLLAAMVLLLYSFSDACEEPPTFEAMELIGKPKPYYEIGERVDYKCKKGYFYIPPLATHTICDRNHTWLPVSDDACYRETCPYIRDPLNGQAVPANGTYEFGYQMHFICNEGYYLIGEEILYCELKGSVAIWSGKPPICEKVLCTPPPKIKNGKHTFSEVEVFEYLDAVTYSCDPAPGPDPFSLIGESTIYCGDNSVWSRAAPECKVVKCRFPVVENGKQISGFGKKFYYKATVMFECDKGFYLDGSDTIVCDSNSTWDPPVPKCLKGPRPTYKPPVSNYPGYPKPEEGILDSLDVWVIAVIVIAIVVGVAVICVVPYRYLQRRKKKGTYLTDETHREVKFTSL

SEQ ID NO: 249315 - DNA, 1089 bp, Artificial Sequence
  derived and/or modified sequence
atggagcctcccgggcggcgcgagtgccctttcccaagctggcggttcccaggattgcttctggcggccatggtgctcttactgtatagttttagtgatgcctgcgaggaaccccccacattcgaggccatggaattgatcgggaaacccaagccttactatgaaattggcgagcgggttgactataagtgtaagaaaggatacttttacattcctcctctggctacacacacgatctgcgacagaaaccacacgtggctgccagtctccgatgatgcatgttaccgtgaaacctgcccctacattcgggatccattgaatggacaggctgttccggctaacggcacttacgagttcgggtaccagatgcacttcatttgcaatgagggctactaccttattggggaggaaattctgtactgcgagctgaaaggaagcgtggccatctggagcggtaaaccaccgatttgcgaaaaggttttatgtaccccaccgcctaaaataaagaacgggaaacatactttctccgaagttgaagttttcgaatacctggacgcagtcacatacagctgcgatccggcaccaggccccgatccattttctctgattggggaatcaacgatctattgcggcgataacagcgtctggtcccgggctgctcctgagtgcaaagtcgtaaaatgccgattccctgtggtggagaacggcaaacagattagtggctttgggaaaaaattctattacaaggcgactgtgatgttcgagtgtgataaaggattctacttggacgggagcgacactatcgtgtgcgattccaacagcacctgggacccaccagtgcctaagtgcctcaagggacctagaccgacttacaagccccctgtcagcaattaccccgggtacccaaaacctgaggaaggcatcctcgacagcctggatgtctgggtaatcgccgtgattgtgattgcaatcgtggtgggtgttgctgttatttgcgtggtcccttaccgctatttacagcgcagaaagaaaaagggtacatatcttacggatgagacacaccgagaggtcaagtttaccagtctttag

SEQ ID NO: 249316 - DNA, 1089 bp, Artificial Sequence
  derived and/or modified sequence
atggagcccccaggccggcgggagtgccccttccccagctggaggtttcctggcctgctgctggccgccatggtgctgctgctgtacagcttcagtgatgcctgtgaggagccccccacctttgaggccatggagctgattggcaagcccaagccctactatgagatcggggagcgggtggactacaagtgcaagaagggctacttctacatcccccccctggccacccacaccatctgtgacaggaaccacacctggctgcctgtgtctgatgatgcctgctaccgggagacctgcccctacatccgggaccccctgaatggccaggccgtgcctgccaacggcacctatgaatttggctaccagatgcacttcatctgcaatgaaggctactacctgattggagaggagatcctgtactgtgagctgaagggctctgtggccatctggagcggcaagccacccatctgtgagaaggtgctgtgcaccccaccacccaagatcaagaatggcaagcacaccttcagcgaggtggaggtgtttgagtacctggatgctgtgacctacagctgtgaccctgcccctggccctgaccccttcagcctgattggagagagcaccatctactgtggggacaacagcgtgtggagcagagctgcccctgagtgcaaggtggtgaagtgccgcttccctgtggtggagaatggcaagcagatcagcggctttgggaagaagttctactacaaggccaccgtgatgtttgaatgtgacaagggcttctacctggatggcagtgacaccatcgtgtgtgacagcaacagcacctgggacccccctgtgcccaagtgcctgaagggcccccggcccacctacaagccccctgtgagcaactacccaggctaccccaagccagaggagggcatcctggacagcctggatgtgtgggtgattgctgtgattgtcatcgccatcgtggtgggcgtggccgtcatctgtgtggtgccctaccgctacctgcagaggaggaagaagaagggcacctacctgacagatgagacccaccgggaggtgaagttcaccagcctgtag

SEQ ID NO: 249317 - DNA, 1089 bp, Artificial Sequence
  derived and/or modified sequence
atggagccccccggccggcgggagtgccccttccccagctggcggttcccaggcctgctgttagccgcgatggtcctgcttctatattcctttagcgatgcctgtgaggaacccccaacgttcgaagctatggagttgatcggcaaaccgaaaccttattacgagattggtgagcgcgtggactataaatgtaaaaaaggatatttctacatacctccccttgcaacgcacacgatttgtgaccggaaccacacctggttgcctgtgtcagatgacgcatgttatcgtgaaacttgcccatatatcagagatccactcaatggacaagccgtacctgcaaacggcacctacgagttcggataccagatgcacttcatttgtaacgaaggctattacttgattggcgaagagatcttgtactgcgagttaaagggcagtgtggccatctggagcggaaagcctcctatttgcgagaaggtcttatgcacaccccctccgaaaattaaaaacggcaagcatacgttcagtgaagtcgaagtcttcgaatatctcgatgcagtgacatactcttgtgacccggcgccaggcccagaccccttctcactaatcggagaatcgacaatttactgcggtgataatagcgtgtggagcagagccgctccagaatgtaaggtagtaaagtgtaggtttccagtcgtggagaacggcaagcagatttcaggtttcggcaaaaaattctattacaaagcaactgttatgttcgaatgtgataagggcttctatctggacggtagtgatacgattgtgtgcgactcaaatagcacgtgggaccctcccgtgcctaagtgcctcaaggggcctcggcccacttacaagcctcccgtcagcaattatccagggtatcctaaacccgaggagggcattctggactcactggacgtgtgggtgattgccgtcattgtgatcgcaatcgtggtcggtgtcgctgtcatatgcgtggtgccatacaggtatctgcaaaggagaaaaaagaagggaacataccttaccgacgagacccatcgagaggtcaaatttacaagcctgtag

SEQ ID NO: 249318 - DNA, 1089 bp, Artificial Sequence
  derived and/or modified sequence
atggaaccacccggacgacgggagtgtcctttcccgtcctggagattcccaggcctgctcttagccgctatggtcctgttgctatactccttcagtgatgcctgcgaagagccacctacctttgaggcgatggagctcatcgggaaacccaagccttattacgagataggagagcgggttgattacaaatgtaagaagggctacttctatatccctcctttggctacgcacaccatctgcgatcgcaatcacacctggctgcctgtcagcgacgacgcatgttatagggaaacgtgcccatatatccgagacccccttaacggccaggcggtgccagccaatgggacatacgaattcggctaccagatgcatttcatttgtaacgagggatactatctgatcggggaggagatactctactgcgaactgaagggttctgtcgcaatctggtctggtaagcctccaatctgcgagaaagtgctctgtacaccccctcctaagatcaagaacggtaagcacacattcagcgaagttgaagttttcgaatatctcgacgctgttacttactcatgcgatcccgctccgggacctgacccttttagtcttattggcgagtcaaccatctattgcggggataacagtgtgtggtcccgcgctgccccagagtgtaaggtggttaagtgtagatttcccgtggttgagaatggcaagcaaatcagtgggtttggcaaaaaattctactacaaggctacggtaatgttcgagtgcgacaaaggtttttacctggacggatctgacaccattgtttgcgactcaaattcaacgtgggacccaccggtccccaaatgtttgaagggtcccagacctacctataaaccacctgtgtcaaactatccgggataccctaagccagaagaaggaatcttggactccttagacgtctgggtaattgcagtgattgtcatagccatagtcgtgggagtggccgtgatttgtgttgttccctatcgctacctgcagcgacgcaaaaagaaaggtacgtacctgactgacgagactcatcgcgaagtcaaattcaccagcctctag

SEQ ID NO: 249319 - DNA, 3281 bp, Artificial Sequence
  derived and/or modified sequence
gctcgggccacgcccacctgtcctgcagcactggatgctttgtgagttggggattgttgcgtcccatatctggacccagaagggacttccctgctcggctggctctcggtttctctgctttcctccggagaaataacagcgtcttccgcgccgcgcatggagcctcccggccgccgcgagtgtccctttccttcctggcgctttcctgggttgcttctggcggccatggtgttgctgctgtactccttctccgatgcctgtgaggagccaccaacatttgaagctatggagctcattggtaaaccaaaaccctactatgagattggtgaacgagtagattataagtgtaaaaaaggatacttctatatacctcctcttgccacccatactatttgtgatcggaatcatacatggctacctgtctcagatgacgcctgttatagagaaacatgtccatatatacgggatcctttaaatggccaagcagtccctgcaaatgggacttacgagtttggttatcagatgcactttatttgtaatgagggttattacttaattggtgaagaaattctatattgtgaacttaaaggatcagtagcaatttggagcggtaagcccccaatatgtgaaaaggttttgtgtacaccacctccaaaaataaaaaatggaaaacacacctttagtgaagtagaagtatttgagtatcttgatgcagtaacttatagttgtgatcctgcacctggaccagatccattttcacttattggagagagcacgatttattgtggtgacaattcagtgtggagtcgtgctgctccagagtgtaaagtggtcaaatgtcgatttccagtagtcgaaaatggaaaacagatatcaggatttggaaaaaaattttactacaaagcaacagttatgtttgaatgcgataagggtttttacctcgatggcagcgacacaattgtctgtgacagtaacagtacttgggatcccccagttccaaagtgtcttaaaggtcctaggcctacttacaagcctccagtctcaaattatccaggatatcctaaacctgaggaaggaatacttgacagtttggatgtttgggtcattgctgtgattgttattgccatagttgttggagttgcagtaatttgtgttgtcccgtacagatatcttcaaaggaggaagaagaaaggcacatacctaactgatgagacccacagagaagtaaaatttacttctctctgagaaggagagatgagagaaaggtttgcttttatcattaaaaggaaagcagatggtggagctgaatatgccacttaccagactaaatcaaccactccagcagagcagagaggctgaatagattccacaacctggtttgccagttcatcttttgactctattaaaatcttcaatagttgttattctgtagtttcactctcatgagtgcaactgtggcttagctaatattgcaatgtggcttgaatgtaggtagcatcctttgatgcttctttgaaacttgtatgaatttgggtatgaacagattgcctgctttcccttaaataacacttagatttattggaccagtcagcacagcatgcctggttgtattaaagcagggatatgctgtattttataaaattggcaaaattagagaaatatagttcacaatgaaattatattttctttgtaaagaaagtggcttgaaatcttttttgttcaaagattaatgccaactcttaagattattctttcaccaactatagaatgtattttatatatcgttcattgtaaaaagcccttaaaaatatgtgtatactactttggctcttgtgcataaaaacaagaacactgaaaattgggaatatgcacaaacttggcttctttaaccaagaatattattggaaaattctctaaaagttaatagggtaaattctctattttttgtaatgtgttcggtgatttcagaaagctagaaagtgtatgtgtggcatttgttttcactttttaaaacatccctaactgatcgaatatatcagtaatttcagaatcagatgcatcctttcataagaagtgagaggactctgacagccataacaggagtgccacttcatggtgcgaagtgaacactgtagtcttgttgttttcccaaagagaactccgtatgttctcttaggttgagtaacccactctgaattctggttacatgtgtttttctctccctccttaaataaagagaggggttaaacatgccctctaaaagtaggtggttttgaagagaataaattcatcagataacctcaagtcacatgagaatcttagtccatttacattgccttggctagtaaaagccatctatgtatatgtcttacctcatctcctaaaaggcagagtacaaagtaagccatgtatctcaggaaggtaacttcattttgtctatttgctgttgattgtaccaagggatggaagaagtaaatatagctcaggtagcactttatactcaggcagatctcagccctctactgagtcccttagccaagcagtttctttcaaagaagccagcaggcgaaaagcagggactgccactgcatttcatatcacactgttaaaagttgtgttttgaaattttatgtttagttgcacaaattgggccaaagaaacattgccttgaggaagatatgattggaaaatcaagagtgtagaagaataaatactgttttactgtccaaagacatgtttatagtgctctgtaaatgttcctttcctttgtagtctctggcaagatgctttaggaagataaaagtttgaggagaacaaacaggaattctgaattaagcacagagttgaagtttatacccgtttcacatgcttttcaagaatgtcgcaattactaagaagcagataatggtgttttttagaaacctaattgaagtatattcaaccaaatactttaatgtataaaataaatattatacaatatacttgtatagcagtttctgcttcacatttgattttttcaaatttaatatttatattagagatctatatatgtataaatatgtattttgtcaaatttgttacttaaatatatagagaccagttttctctggaagtttgtttaaatgacagaagcgtatatgaattcaagaaaatttaagctgcaaaaatgtatttgctataaaatgagaagtctcactgatagaggttctttattgctcattttttaaaaaatggactcttgaaatctgttaaaataaaattgtacatttggagatgtttca

SEQ ID NO: 249320 - DNA, 1089 bp, Artificial Sequence
  derived and/or modified sequence
atggagccccccggcagaagagagtgccccttccccagctggagattccccggcctgctgctggccgccatggtgctgctgctgtacagcttcagcgacgcctgcgaggagccccccaccttcgaggccatggagctgatcggcaagcccaagccctactacgagatcggcgagagagtggactacaagtgcaagaagggctacttctacatcccccccctggccacccacaccatctgcgacagaaaccacacctggctgcccgtgagcgacgacgcctgctacagagagacctgcccctacatcagagaccccctgaacggccaggccgtgcccgccaacggcacctacgagttcggctaccagatgcacttcatctgcaacgagggctactacctgatcggcgaggagatcctgtactgcgagctgaagggcagcgtggccatctggagcggcaagccccccatctgcgagaaggtgctgtgcacccccccccccaagatcaagaacggcaagcacaccttcagcgaggtggaggtgttcgagtacctggacgccgtgacctacagctgcgaccccgcccccggccccgaccccttcagcctgatcggcgagagcaccatctactgcggcgacaacagcgtgtggagcagagccgcccccgagtgcaaggtggtgaagtgcagattccccgtggtggagaacggcaagcagatcagcggcttcggcaagaagttctactacaaggccaccgtgatgttcgagtgcgacaagggcttctacctggacggcagcgacaccatcgtgtgcgacagcaacagcacctgggacccccccgtgcccaagtgcctgaagggccccagacccacctacaagccccccgtgagcaactaccccggctaccccaagcccgaggagggcatcctggacagcctggacgtgtgggtgatcgccgtgatcgtgatcgccatcgtggtgggcgtggccgtgatctgcgtggtgccctacagatacctgcagagaagaaagaagaagggcacctacctgaccgacgagacccacagagaggtgaagttcaccagcctgtag

SEQ ID NO: 249321 - protein, 369 aa, Artificial Sequence
  derived and/or modified sequence
MEPPGRRECPFPSWRFPGLLLAAMVLLLYSFSDACEEPPTFEAMELIGKPKPYYEIGERVDYKCKKGYFYIPPLATHTICDRNHTWLPVSDDACYRETCPYIRDPLNGQAVPANGTYEFGYQMHFICNEGYYLIGEEILYCELKGSVAIWSGKPPICEKVLCTPPPKIKNGKHTFSEVEVFEYLDAVTYSCDPAPGPDPFSLIGESTIYCGDNSVWSRAAPECKVVKCRFPVVENGKQISGFGKKFYYKATVMFECDKGFYLDGSDTIVCDSNSTWDPPVPKCLKGPRPTYKPPVSNYPGYPKPEEGILDSLDVWVIAVIVIAIVVGVAVICVVPYRYLQRRKKKGKADGGAEYATYQTKSTTPAEQRG

SEQ ID NO: 249322 - DNA, 1110 bp, Artificial Sequence
  derived and/or modified sequence
atggagcctccaggaaggagagaatgtcctttcccttcttggcgctttccgggcttgctgttggccgcaatggttctgctcttgtattctttttctgacgcttgcgaggaaccaccaacgttcgaagccatggagcttattgggaaacccaagccatattatgagatcggcgaacgtgtagactacaagtgcaaaaaggggtacttttacatcccaccgctcgctactcacacaatctgtgatcgcaaccacacttggctgcctgtcagcgacgatgcttgttacagggagacatgcccatatattagagatccactgaatggtcaagccgttccagcaaacggtacttatgagttcggatatcaaatgcatttcatctgtaacgaggggtactacctcatcggcgaggagattctctactgcgagcttaagggctctgtggcaatatggtcaggcaaacctcccatttgcgagaaggtactgtgtactccaccacctaagattaagaatggcaaacacaccttttccgaggtcgaggtgtttgaatacctggatgccgtcacctactcctgcgatcccgcaccaggcccagaccccttttctctgatcggagagtcaactatctattgtggcgataactctgtttggtcccgtgccgcgccggagtgtaaggttgttaagtgtagatttcctgtcgtcgaaaatggcaagcagatcagcggctttggaaaaaagttctattataaagcgaccgttatgtttgagtgcgataaaggcttctacttagacggcagcgacaccatcgtgtgcgactcaaactctacctgggatccgcccgtacccaaatgtctgaaaggcccccgccccacctacaagccccctgtgtccaattatcctggctaccccaagccagaggaaggaatactcgacagccttgatgtatgggtaatcgctgttatcgttattgccatcgtcgtaggcgtggctgttatctgcgtcgtgccttatagatatctgcaaagacgtaaaaagaagggcaaagcggatggcggtgccgaatacgcgacatatcagacaaagtccactacacccgccgaacaacggggatag

SEQ ID NO: 249323 - DNA, 1110 bp, Artificial Sequence
  derived and/or modified sequence
atggagcccccaggccggcgggagtgccccttccccagctggaggtttcctggcctgctgctggccgccatggtgctgctgctgtacagcttcagtgatgcctgtgaggagccccccacctttgaggccatggagctgattggcaagcccaagccctactatgagatcggggagcgggtggactacaagtgcaagaagggctacttctacatcccccccctggccacccacaccatctgtgacaggaaccacacctggctgcctgtgtctgatgatgcctgctaccgggagacctgcccctacatccgggaccccctgaatggccaggccgtgcctgccaacggcacctatgaatttggctaccagatgcacttcatctgcaatgaaggctactacctgattggagaggagatcctgtactgtgagctgaagggctctgtggccatctggagcggcaagccacccatctgtgagaaggtgctgtgcaccccaccacccaagatcaagaatggcaagcacaccttcagcgaggtggaggtgtttgagtacctggatgctgtgacctacagctgtgaccctgcccctggccctgaccccttcagcctgattggagagagcaccatctactgtggggacaacagcgtgtggagcagagctgcccctgagtgcaaggtggtgaagtgccgcttccctgtggtggagaatggcaagcagatcagcggctttgggaagaagttctactacaaggccaccgtgatgtttgaatgtgacaagggcttctacctggatggcagtgacaccatcgtgtgtgacagcaacagcacctgggacccccctgtgcccaagtgcctgaagggcccccggcccacctacaagccccctgtgagcaactacccaggctaccccaagccagaggagggcatcctggacagcctggatgtgtgggtgattgctgtgattgtcatcgccatcgtggtgggcgtggccgtcatctgtgtggtgccctaccgctacctgcagaggaggaagaagaagggcaaggcagatggaggagcagaatatgccacctaccagaccaagagcaccaccccagctgagcagaggggctag

SEQ ID NO: 249324 - DNA, 1110 bp, Artificial Sequence
  derived and/or modified sequence
atggagccccccggccggcgggagtgccccttccccagctggcggttccctggcctgctcctggccgccatggtacttctcctctattctttttccgatgcgtgcgaggaaccccccacatttgaggccatggaactgatcggcaagcctaaaccttactacgaaatcggagagagagtggactataagtgcaaaaaagggtatttttacattcctccactcgctacccatacaatttgcgacaggaaccacacctggctgcctgtttcagatgatgcctgttatcgcgaaacttgtccctacatccgtgacccgctgaatggccaggccgtcccagcaaatggcacctacgaatttggatatcagatgcactttatctgcaacgaggggtactatcttatcggcgaggaaatcctgtactgcgaactcaaggggtcagtggcaatttggagtggcaagccgcctatatgtgagaaggtgctttgcactccaccacctaaaataaagaatggtaagcataccttctccgaagtggaggtcttcgagtacctagatgcggttacctattcctgtgaccctgccccaggtcccgatccttttagtctgatcggggaatccaccatatattgcggtgataatagcgtgtggtccagggcagcacccgagtgtaaagtggtaaaatgtagatttcccgtcgtcgaaaatggtaagcagatctccggcttcgggaagaaattctattacaaggcaacagtcatgtttgagtgcgacaagggattttatctggacggcagtgatacaattgtgtgcgactccaatagcacctgggatccacccgtgccaaagtgccttaaaggacctcgacccacatacaaaccgcccgtgtcaaattaccctggctacccaaagccagaagaaggaatcctcgactctctggacgtctgggtgattgccgtaatcgtaatagctattgtggtgggcgtggcggtaatatgcgtggtaccctacagatacctacagcgccgcaaaaagaagggcaaggccgatgggggcgccgagtacgctacctatcagacaaagtccaccacccctgccgagcagagaggatag

SEQ ID NO: 249325 - DNA, 1110 bp, Artificial Sequence
  derived and/or modified sequence
atggaaccaccgggacgacgcgaatgcccatttccatcttggcggtttcctggactgttgttggcagctatggtactgttactgtactctttcagtgacgcctgcgaagagcccccaacgttcgaggccatggaactgatcggtaaaccaaaaccctattatgaaattggcgaaagagtggactacaagtgcaagaaaggctacttctacatccctcccctggccactcacacgatttgcgaccgtaaccatacatggttgccagtgtcggacgacgcctgctaccgagaaacctgtccatatatcagggatcctctgaacgggcaggccgttccagcgaatggtacttatgagttcggttaccagatgcactttatttgcaacgaggggtactatcttattggcgaggagatcttgtactgcgagctgaaaggatctgtggccatctggagtggcaaaccaccaatctgcgagaaggtgctctgtaccccacccccaaagattaaaaatggaaagcacaccttcagcgaggtcgaggtgttcgaatacctcgacgcggttacctactcttgcgaccccgcacctggcccagatccttttagcctgattggagagagtactatctactgtggggacaacagtgtgtggtcacgcgcagcaccagagtgtaaagtcgtaaagtgtcggttccccgtggtggaaaatggtaagcagatcagcggctttgggaaaaaattttattacaaagccacagtgatgttcgagtgcgataagggtttttacctcgatggatccgataccattgtctgcgacagcaattctacctgggaccctccagtccctaagtgtctaaaggggcctcgaccgacttacaaacccccagtgtccaactatcccggataccctaagccagaagaaggaattctggactctctggatgtctgggtgattgctgtaatcgtgatagccatcgtagtcggtgtagcggttatctgtgttgttccttatagatatctccaaagaagaaagaagaagggtaaagccgacgggggagccgaatatgcaacataccagacaaagtcgacaacccccgcagagcagaggggttag

SEQ ID NO: 249326 - DNA, 3188 bp, Artificial Sequence
  derived and/or modified sequence
gctcgggccacgcccacctgtcctgcagcactggatgctttgtgagttggggattgttgcgtcccatatctggacccagaagggacttccctgctcggctggctctcggtttctctgctttcctccggagaaataacagcgtcttccgcgccgcgcatggagcctcccggccgccgcgagtgtccctttccttcctggcgctttcctgggttgcttctggcggccatggtgttgctgctgtactccttctccgatgcctgtgaggagccaccaacatttgaagctatggagctcattggtaaaccaaaaccctactatgagattggtgaacgagtagattataagtgtaaaaaaggatacttctatatacctcctcttgccacccatactatttgtgatcggaatcatacatggctacctgtctcagatgacgcctgttatagagaaacatgtccatatatacgggatcctttaaatggccaagcagtccctgcaaatgggacttacgagtttggttatcagatgcactttatttgtaatgagggttattacttaattggtgaagaaattctatattgtgaacttaaaggatcagtagcaatttggagcggtaagcccccaatatgtgaaaaggttttgtgtacaccacctccaaaaataaaaaatggaaaacacacctttagtgaagtagaagtatttgagtatcttgatgcagtaacttatagttgtgatcctgcacctggaccagatccattttcacttattggagagagcacgatttattgtggtgacaattcagtgtggagtcgtgctgctccagagtgtaaagtggtcaaatgtcgatttccagtagtcgaaaatggaaaacagatatcaggatttggaaaaaaattttactacaaagcaacagttatgtttgaatgcgataagggtttttacctcgatggcagcgacacaattgtctgtgacagtaacagtacttgggatcccccagttccaaagtgtcttaaaggtcctaggcctacttacaagcctccagtctcaaattatccaggatatcctaaacctgaggaaggaatacttgacagtttggatgtttgggtcattgctgtgattgttattgccatagttgttggagttgcagtaatttgtgttgtcccgtacagatatcttcaaaggaggaagaagaaagggaaagcagatggtggagctgaatatgccacttaccagactaaatcaaccactccagcagagcagagaggctgaatagattccacaacctggtttgccagttcatcttttgactctattaaaatcttcaatagttgttattctgtagtttcactctcatgagtgcaactgtggcttagctaatattgcaatgtggcttgaatgtaggtagcatcctttgatgcttctttgaaacttgtatgaatttgggtatgaacagattgcctgctttcccttaaataacacttagatttattggaccagtcagcacagcatgcctggttgtattaaagcagggatatgctgtattttataaaattggcaaaattagagaaatatagttcacaatgaaattatattttctttgtaaagaaagtggcttgaaatcttttttgttcaaagattaatgccaactcttaagattattctttcaccaactatagaatgtattttatatatcgttcattgtaaaaagcccttaaaaatatgtgtatactactttggctcttgtgcataaaaacaagaacactgaaaattgggaatatgcacaaacttggcttctttaaccaagaatattattggaaaattctctaaaagttaatagggtaaattctctattttttgtaatgtgttcggtgatttcagaaagctagaaagtgtatgtgtggcatttgttttcactttttaaaacatccctaactgatcgaatatatcagtaatttcagaatcagatgcatcctttcataagaagtgagaggactctgacagccataacaggagtgccacttcatggtgcgaagtgaacactgtagtcttgttgttttcccaaagagaactccgtatgttctcttaggttgagtaacccactctgaattctggttacatgtgtttttctctccctccttaaataaagagaggggttaaacatgccctctaaaagtaggtggttttgaagagaataaattcatcagataacctcaagtcacatgagaatcttagtccatttacattgccttggctagtaaaagccatctatgtatatgtcttacctcatctcctaaaaggcagagtacaaagtaagccatgtatctcaggaaggtaacttcattttgtctatttgctgttgattgtaccaagggatggaagaagtaaatatagctcaggtagcactttatactcaggcagatctcagccctctactgagtcccttagccaagcagtttctttcaaagaagccagcaggcgaaaagcagggactgccactgcatttcatatcacactgttaaaagttgtgttttgaaattttatgtttagttgcacaaattgggccaaagaaacattgccttgaggaagatatgattggaaaatcaagagtgtagaagaataaatactgttttactgtccaaagacatgtttatagtgctctgtaaatgttcctttcctttgtagtctctggcaagatgctttaggaagataaaagtttgaggagaacaaacaggaattctgaattaagcacagagttgaagtttatacccgtttcacatgcttttcaagaatgtcgcaattactaagaagcagataatggtgttttttagaaacctaattgaagtatattcaaccaaatactttaatgtataaaataaatattatacaatatacttgtatagcagtttctgcttcacatttgattttttcaaatttaatatttatattagagatctatatatgtataaatatgtattttgtcaaatttgttacttaaatatatagagaccagttttctctggaagtttgtttaaatgacagaagcgtatatgaattcaagaaaatttaagctgcaaaaatgtatttgctataaaatgagaagtctcactgatagaggttctttattgctcattttttaaaaaatggactcttgaaatctgttaaaataaaattgtacatttggagatgtttca

SEQ ID NO: 249327 - DNA, 1110 bp, Artificial Sequence
  derived and/or modified sequence
atggagccccccggcagaagagagtgccccttccccagctggagattccccggcctgctgctggccgccatggtgctgctgctgtacagcttcagcgacgcctgcgaggagccccccaccttcgaggccatggagctgatcggcaagcccaagccctactacgagatcggcgagagagtggactacaagtgcaagaagggctacttctacatcccccccctggccacccacaccatctgcgacagaaaccacacctggctgcccgtgagcgacgacgcctgctacagagagacctgcccctacatcagagaccccctgaacggccaggccgtgcccgccaacggcacctacgagttcggctaccagatgcacttcatctgcaacgagggctactacctgatcggcgaggagatcctgtactgcgagctgaagggcagcgtggccatctggagcggcaagccccccatctgcgagaaggtgctgtgcacccccccccccaagatcaagaacggcaagcacaccttcagcgaggtggaggtgttcgagtacctggacgccgtgacctacagctgcgaccccgcccccggccccgaccccttcagcctgatcggcgagagcaccatctactgcggcgacaacagcgtgtggagcagagccgcccccgagtgcaaggtggtgaagtgcagattccccgtggtggagaacggcaagcagatcagcggcttcggcaagaagttctactacaaggccaccgtgatgttcgagtgcgacaagggcttctacctggacggcagcgacaccatcgtgtgcgacagcaacagcacctgggacccccccgtgcccaagtgcctgaagggccccagacccacctacaagccccccgtgagcaactaccccggctaccccaagcccgaggagggcatcctggacagcctggacgtgtgggtgatcgccgtgatcgtgatcgccatcgtggtgggcgtggccgtgatctgcgtggtgccctacagatacctgcagagaagaaagaagaagggcaaggccgacggcggcgccgagtacgccacctaccagaccaagagcaccacccccgccgagcagagaggctag

SEQ ID NO: 249328 - protein, 399 aa, Artificial Sequence
  derived and/or modified sequence
MEPPGRRECPFPSWRFPGLLLAAMVLLLYSFSDACEEPPTFEAMELIGKPKPYYEIGERVDYKCKKGYFYIPPLATHTICDRNHTWLPVSDDACYRETCPYIRDPLNGQAVPANGTYEFGYQMHFICNEGYYLIGEEILYCELKGSVAIWSGKPPICEKVLCTPPPKIKNGKHTFSEVEVFEYLDAVTYSCDPAPGPDPFSLIGESTIYCGDNSVWSRAAPECKVVKCRFPVVENGKQISGFGKKFYYKATVMFECDKGFYLDGSDTIVCDSNSTWDPPVPKCLKVLPPSSTKPPALSHSVSTSSTTKSPASSASGPRPTYKPPVSNYPGYPKPEEGILDSLDVWVIAVIVIAIVVGVAVICVVPYRYLQRRKKKGKADGGAEYATYQTKSTTPAEQRG

SEQ ID NO: 249329 - protein, 336 aa, Artificial Sequence
  derived and/or modified sequence
MEPPGRRECPFPSWRFPGLLLAAMVLLLYSFSGETCPYIRDPLNGQAVPANGTYEFGYQMHFICNEGYYLIGEEILYCELKGSVAIWSGKPPICEKVLCTPPPKIKNGKHTFSEVEVFEYLDAVTYSCDPAPGPDPFSLIGESTIYCGDNSVWSRAAPECKVVKCRFPVVENGKQISGFGKKFYYKATVMFECDKGFYLDGSDTIVCDSNSTWDPPVPKCLKVLPPSSTKPPALSHSVSTSSTTKSPASSASGPRPTYKPPVSNYPGYPKPEEGILDSLDVWVIAVIVIAIVVGVAVICVVPYRYLQRRKKKGKADGGAEYATYQTKSTTPAEQRG

SEQ ID NO: 249330 - DNA, 1200 bp, Artificial Sequence
  derived and/or modified sequence
atggaaccacccggtcgtagagagtgcccattcccaagctggaggttcccaggactgttactcgctgccatggtcctgctcctgtacagcttcagcgacgcctgcgaggaacctcccacttttgaggcgatggagctcatcggcaagcccaaaccatattatgagattggcgaacgagtcgactataagtgtaaaaaaggatacttctacattcctccactggccacacacacaatttgcgaccggaaccatacctggctgccagtgtctgatgacgcctgctaccgcgagacctgcccttacattcgagacccactcaatgggcaggctgtccccgctaatgggacctatgagtttggttaccagatgcacttcatctgtaacgaggggtactatctcataggcgaagaaatcctttattgcgagctgaaaggctccgttgcaatttggtctggtaagccaccaatttgtgaaaaggttttatgcacgcctccgcccaaaataaaaaatgggaagcatacattctcagaagttgaggtcttcgagtatttggacgctgtgacgtattcatgtgaccctgcacccgggccagacccatttagcctgattggagagagtacaatctactgcggcgacaacagcgtgtggagtagagccgctccggagtgcaaagtcgtgaaatgtagattccccgtagtggagaatggcaaacaaatcagcgggttcggtaaaaagttttactataaagcaactgttatgtttgagtgtgacaaagggttttatctggacggcagtgacactatcgtgtgtgacagtaattctacatgggaccccccggtacctaagtgccttaaagtcctccccccctcatctaccaagccccccgccctaagtcactccgtctcaacatcctcaaccaccaaatcacctgccagtagcgcatctggccctagaccgacttacaagccgccagttagcaattaccctggataccctaagcctgaggagggaattttagactccctcgatgtatgggtgattgctgtgatcgttatcgcgatcgtagtgggtgtggccgttatctgcgtggtgccgtaccgctacctacagagacgaaagaagaagggcaaggcggatggaggggcggaatacgccacttaccagacaaagtcgacaactcccgccgaacaacgcggttag

SEQ ID NO: 249331 - DNA, 1011 bp, Artificial Sequence
  derived and/or modified sequence
atggagccacctggacggagggaatgtccctttccgagctggaggtttcctggcttattgcttgcagccatggtcctgctcttgtactcatttagcggagagacatgcccctatatccgtgatccactgaacggccaggccgttcctgcgaacggcacttacgagtttggatatcaaatgcacttcatctgtaatgagggatactacttaattggagaggaaatcctctactgcgagttgaagggctcggtggcaatctggtccggcaagccacctatctgtgaaaaagtgctgtgcacaccccccccaaagatcaagaacgggaagcacactttctcggaggttgaggtatttgagtacttagacgcagtgacctactcgtgcgaccccgcccctggacccgaccccttttctctcatcggcgagtctactatctactgcggtgacaactctgtatggagcagagccgccccggaatgcaaagtcgttaaatgtaggttccctgtggtggagaacggaaaacagatttctggattcgggaaaaaattttattataaggcaacggtgatgttcgagtgtgataaaggattttatttagacggatcggatactattgtatgcgacagcaattcaacttgggatcctccggtcccgaaatgcctgaaggtgttgccgcctagctcgaccaaaccacccgctctgagtcactctgtgagcacaagcagcactaccaaaagcccagccagctccgctagcgggcctaggccaacttataagccccctgtgtccaattatcccgggtaccctaaacccgaagagggtattctcgactcgctggatgtgtgggtgatcgctgttatcgtcatagccatcgtggtgggagtggcggtgatttgcgtggtcccctaccgctacttgcagaggagaaagaaaaagggaaaagctgatggcggcgcggaatacgcgacgtatcaaaccaaaagtacaacaccagctgagcagcgggggtag

SEQ ID NO: 249332 - DNA, 1200 bp, Artificial Sequence
  derived and/or modified sequence
atggagcccccaggccggcgggagtgccccttccccagctggaggtttcctggcctgctgctggccgccatggtgctgctgctgtacagcttcagtgatgcctgtgaggagccccccacctttgaggccatggagctgattggcaagcccaagccctactatgagatcggggagcgggtggactacaagtgcaagaagggctacttctacatcccccccctggccacccacaccatctgtgacaggaaccacacctggctgcctgtgtctgatgatgcctgctaccgggagacctgcccctacatccgggaccccctgaatggccaggccgtgcctgccaacggcacctatgaatttggctaccagatgcacttcatctgcaatgaaggctactacctgattggagaggagatcctgtactgtgagctgaagggctctgtggccatctggagcggcaagccacccatctgtgagaaggtgctgtgcaccccaccacccaagatcaagaatggcaagcacaccttcagcgaggtggaggtgtttgagtacctggatgctgtgacctacagctgtgaccctgcccctggccctgaccccttcagcctgattggagagagcaccatctactgtggggacaacagcgtgtggagcagagctgcccctgagtgcaaggtggtgaagtgccgcttccctgtggtggagaatggcaagcagatcagcggctttgggaagaagttctactacaaggccaccgtgatgtttgaatgtgacaagggcttctacctggatggcagtgacaccatcgtgtgtgacagcaacagcacctgggacccccctgtgcccaagtgcctgaaggtgctgccccccagcagcaccaagcccccagccctgagccacagcgtgtccaccagcagcaccaccaagagccctgccagcagcgccagcggcccccggcccacctacaagccccctgtgagcaactacccaggctaccccaagccagaggagggcatcctggacagcctggatgtgtgggtgattgctgtgattgtcatcgccatcgtggtgggcgtggccgtcatctgtgtggtgccctaccgctacctgcagaggaggaagaagaagggcaaggcagatggaggagcagaatatgccacctaccagaccaagagcaccaccccagctgagcagaggggctag

SEQ ID NO: 249333 - DNA, 1011 bp, Artificial Sequence
  derived and/or modified sequence
atggagcccccaggccggcgggagtgccccttccccagctggaggtttcctggcctgctgctggccgccatggtgctgctgctgtacagcttcagcggggagacctgcccctacatccgggaccccctgaatggccaggccgtgcctgccaacggcacctatgaatttggctaccagatgcacttcatctgcaatgaaggctactacctgattggagaggagatcctgtactgtgagctgaagggctctgtggccatctggagcggcaagccacccatctgtgagaaggtgctgtgcaccccaccacccaagatcaagaatggcaagcacaccttcagcgaggtggaggtgtttgagtacctggatgctgtgacctacagctgtgaccctgcccctggccctgaccccttcagcctcatcggggagagcaccatctactgtggggacaacagcgtgtggagccgggccgcccctgagtgcaaggtggtgaagtgccgcttccctgtggtggagaatggcaagcagatcagcggctttgggaagaagttctactacaaggccaccgtgatgtttgaatgtgacaagggcttctacctggatggcagtgacaccatcgtgtgtgacagcaacagcacctgggacccccctgtgcccaagtgcctgaaggtgctgccccccagcagcaccaagcccccagccctgagccacagcgtgtccaccagcagcaccaccaagagccctgccagcagcgccagcggcccccggcccacctacaagccccctgtgagcaactacccaggctaccccaagccagaggagggcatcctggacagcctggatgtgtgggtgattgctgtgattgtgattgccatcgtggtgggcgtggccgtcatctgtgtggtgccctaccgctacctgcagaggaggaagaagaagggcaaggcagatggcggcgcagaatatgccacctaccagaccaagagcaccaccccagctgagcagaggggctag

SEQ ID NO: 249334 - DNA, 1200 bp, Artificial Sequence
  derived and/or modified sequence
atggagccccccggccggcgggagtgccccttccccagctggcggttccccgggctgctgctggcggcaatggtattgctgctttactcattttccgatgcgtgcgaggagccaccaacctttgaggctatggaactgataggcaaaccgaagccgtactatgaaattggggaacgcgtagactataaatgtaaaaaggggtatttctatatcccgcctctggctacacacacaatttgtgaccgcaatcatacatggcttcccgttagtgacgacgcgtgttaccgcgaaacgtgcccttatatccgtgaccccctgaatgggcaagctgtccccgcgaacggcacttatgagttcggctaccaaatgcattttatttgtaacgaggggtactacttaatcggagaagagatcctgtactgcgaacttaaggggagtgtggccatttggagtggcaagccgcccatctgcgaaaaagtcctttgcacgcccccccctaagatcaagaatggtaaacataccttttcagaagtggaggtcttcgagtatctggacgccgttacgtattcttgtgaccctgctcctggtcccgaccccttcagcctaattggcgagtcaacaatttactgtggagacaacagtgtctggagccgggccgccccagaatgcaaggtggtgaagtgccggttccccgttgtcgaaaacggtaaacagatttcaggctttgggaagaaattttattacaaggccactgtgatgtttgaatgcgataaaggtttctaccttgatgggtccgacactatcgtgtgcgactccaacagcacctgggatccgcctgtgccaaagtgtctgaaggtgctgcccccaagctcaacgaagccccccgctctcagccactccgtgtccacatcctccaccacaaaaagccccgcctcctcagcttctgggcctagacctacctataaaccaccagtgagcaactacccaggttacccgaaaccagaggagggcatcctggactcactcgacgtgtgggtgatcgcggtgatcgtgattgctatcgttgtcggcgtggccgtcatatgcgtggtgccatatcgttatctgcagagaagaaaaaaaaaaggcaaggctgacggaggtgcggagtacgccacataccagactaaaagcaccacaccagctgaacagcgaggttag

SEQ ID NO: 249335 - DNA, 1011 bp, Artificial Sequence
  derived and/or modified sequence
atggagccccccggccggcgggagtgccccttccccagctggcggtttcctgggctgctcctggccgcgatggtactgctgttgtattcattcagcggcgaaacatgtccttacatccgagaccctcttaatgggcaagccgtcccagccaacgggacctacgaattcggctaccaaatgcacttcatctgcaacgaggggtattacctaatcggagaagaaatactgtactgtgaacttaaaggtagcgtggccatctggtccggtaagccacccatttgtgaaaaggttttgtgcactccaccacccaaaatcaagaatggaaaacacacattctccgaggtcgaagtgtttgagtacctggacgccgtcacttattcttgcgatcccgcccccgggcctgatcctttctccctcattggcgaatccacaatttactgtggggacaatagcgtctggtcacgagctgccccagaatgcaaggtcgttaagtgtcgatttccagtcgtggaaaatggcaaacaaatatccggcttcggtaaaaaattctattataaagccacggtaatgtttgagtgtgataaaggattctacctcgacggatccgacaccatcgtatgcgactcgaattccacttgggacccacccgttccaaaatgcctcaaagtgctaccaccctcctctaccaagccaccggccttatcacactcggtgtcaactagtagcacgaccaaaagcccagctagcagtgcgagcggtcctcggccaacgtataagcccccagtaagtaattatccaggctatcctaaacccgaggaaggaatcctggattctctcgacgtgtgggtgatcgcagtgatcgtgatcgctatcgtggttggtgttgcggtgatttgcgtggtgccttaccgttatctgcagaggcggaagaaaaaaggtaaggctgacgggggcgccgagtatgcaacctatcagactaagtccacaactcccgcagaacaacggggctag

SEQ ID NO: 249336 - DNA, 1200 bp, Artificial Sequence
  derived and/or modified sequence
atggagcccccaggtagacgggaatgtccgtttccttcctggaggttccctggccttctgctcgctgccatggtgctgttactgtatagcttcagcgatgcttgtgaagagcccccaacattcgaggcaatggagcttataggtaaacccaagccctattacgagattggcgaacgtgtcgactataagtgcaaaaagggttacttttacatccctcctttagccacccacacaatctgtgataggaatcacacttggctgccggtatctgatgatgcttgttatcgagagacctgcccttacattcgcgatccgctgaatggtcaggctgtcccagccaatggcacttatgagttcggctatcagatgcacttcatctgtaacgaaggttattacctgataggggaagagattctctattgtgagctcaagggctcagtcgccatatggagtgggaaacccccaatctgcgagaaggtcttgtgcaccccccctccaaagatcaagaatgggaagcacactttctccgaggtggaggtgttcgaatacctggacgcggtgacctactcttgcgatcccgctcctggccctgaccccttttctctgattggtgaatctacaatctattgtggcgataattcagtgtggagccgagcagccccagagtgtaaggttgtgaagtgtcgattccccgttgtggagaatggaaagcagattagtggcttcgggaaaaagttctactacaaagctacagttatgttcgagtgcgacaaggggttctacttggacgggagtgataccattgtttgcgacagcaatagtacttgggatcctcccgtgccgaaatgcctaaaagttctcccccctagcagtacaaaaccccctgcgctgtcacatagtgtctcaacatcaagtaccaccaagagtcctgcctcatctgcatctggtccgagaccaacctacaaaccccctgtgagtaactaccccggttaccctaaacccgaggaggggatcctcgacagtcttgacgtgtgggtgattgccgtgattgttatcgctattgttgttggggtggccgtcatttgcgtggtgccttacaggtacctgcaaagaaggaagaagaagggaaaagcagacggcggagccgaatatgcaacttatcaaactaagagcacaactccagccgagcagcggggatag

SEQ ID NO: 249337 - DNA, 1011 bp, Artificial Sequence
  derived and/or modified sequence
atggagccacctgggagaagggagtgccctttcccctcatggcgatttcctgggttgctcctggccgctatggttcttctattatattcatttagcggagaaacatgcccatatatccgggatccactgaatggacaagctgtgcctgcaaatggaacatacgaattcggctaccagatgcatttcatctgtaacgaagggtactacttaatcggcgaggaaatcctttactgcgagctcaagggtagcgtcgcaatctggtcaggtaagcctcccatctgtgaaaaggtcctgtgtactccgccaccgaaaataaagaacgggaagcataccttctcggaggtggaggtgtttgagtatttggatgccgttacctactcctgcgatcccgcaccgggtccagaccccttttcactgattggggaaagtactatttactgcggggataacagtgtttggtcacgagccgcacctgagtgcaaagtcgtcaaatgccgattccctgtggtcgaaaatgggaaacagatatcggggtttggaaaaaaattctactataaagccacggtgatgttcgagtgcgataagggattctacctggacggttcagataccattgtatgtgattctaactccacatgggatccgcctgtccccaagtgcctgaaagtcttaccaccatcaagcaccaaaccaccagccctgtctcactcagtgtctacgagctccaccactaagtcgcctgcttcctcggctagcgggccaaggcctacctataagcctcctgtaagcaactaccccggatatcctaagccagaggaggggattctggactctctcgacgtctgggtaatcgccgtgatcgtcatcgcaatcgtcgtgggcgtcgccgtcatctgtgttgtgccctacaggtatctgcagcgcagaaagaaaaaaggcaaagccgatggtggagcagagtacgcaacctaccagacaaaatctactacccccgctgaacagagaggctag

SEQ ID NO: 249338 - DNA, 3278 bp, Artificial Sequence
  derived and/or modified sequence
gctcgggccacgcccacctgtcctgcagcactggatgctttgtgagttggggattgttgcgtcccatatctggacccagaagggacttccctgctcggctggctctcggtttctctgctttcctccggagaaataacagcgtcttccgcgccgcgcatggagcctcccggccgccgcgagtgtccctttccttcctggcgctttcctgggttgcttctggcggccatggtgttgctgctgtactccttctccgatgcctgtgaggagccaccaacatttgaagctatggagctcattggtaaaccaaaaccctactatgagattggtgaacgagtagattataagtgtaaaaaaggatacttctatatacctcctcttgccacccatactatttgtgatcggaatcatacatggctacctgtctcagatgacgcctgttatagagaaacatgtccatatatacgggatcctttaaatggccaagcagtccctgcaaatgggacttacgagtttggttatcagatgcactttatttgtaatgagggttattacttaattggtgaagaaattctatattgtgaacttaaaggatcagtagcaatttggagcggtaagcccccaatatgtgaaaaggttttgtgtacaccacctccaaaaataaaaaatggaaaacacacctttagtgaagtagaagtatttgagtatcttgatgcagtaacttatagttgtgatcctgcacctggaccagatccattttcacttattggagagagcacgatttattgtggtgacaattcagtgtggagtcgtgctgctccagagtgtaaagtggtcaaatgtcgatttccagtagtcgaaaatggaaaacagatatcaggatttggaaaaaaattttactacaaagcaacagttatgtttgaatgcgataagggtttttacctcgatggcagcgacacaattgtctgtgacagtaacagtacttgggatcccccagttccaaagtgtcttaaagtgctgcctccatctagtacaaaacctccagctttgagtcattcagtgtcgacttcttccactacaaaatctccagcgtccagtgcctcaggtcctaggcctacttacaagcctccagtctcaaattatccaggatatcctaaacctgaggaaggaatacttgacagtttggatgtttgggtcattgctgtgattgttattgccatagttgttggagttgcagtaatttgtgttgtcccgtacagatatcttcaaaggaggaagaagaaagggaaagcagatggtggagctgaatatgccacttaccagactaaatcaaccactccagcagagcagagaggctgaatagattccacaacctggtttgccagttcatcttttgactctattaaaatcttcaatagttgttattctgtagtttcactctcatgagtgcaactgtggcttagctaatattgcaatgtggcttgaatgtaggtagcatcctttgatgcttctttgaaacttgtatgaatttgggtatgaacagattgcctgctttcccttaaataacacttagatttattggaccagtcagcacagcatgcctggttgtattaaagcagggatatgctgtattttataaaattggcaaaattagagaaatatagttcacaatgaaattatattttctttgtaaagaaagtggcttgaaatcttttttgttcaaagattaatgccaactcttaagattattctttcaccaactatagaatgtattttatatatcgttcattgtaaaaagcccttaaaaatatgtgtatactactttggctcttgtgcataaaaacaagaacactgaaaattgggaatatgcacaaacttggcttctttaaccaagaatattattggaaaattctctaaaagttaatagggtaaattctctattttttgtaatgtgttcggtgatttcagaaagctagaaagtgtatgtgtggcatttgttttcactttttaaaacatccctaactgatcgaatatatcagtaatttcagaatcagatgcatcctttcataagaagtgagaggactctgacagccataacaggagtgccacttcatggtgcgaagtgaacactgtagtcttgttgttttcccaaagagaactccgtatgttctcttaggttgagtaacccactctgaattctggttacatgtgtttttctctccctccttaaataaagagaggggttaaacatgccctctaaaagtaggtggttttgaagagaataaattcatcagataacctcaagtcacatgagaatcttagtccatttacattgccttggctagtaaaagccatctatgtatatgtcttacctcatctcctaaaaggcagagtacaaagtaagccatgtatctcaggaaggtaacttcattttgtctatttgctgttgattgtaccaagggatggaagaagtaaatatagctcaggtagcactttatactcaggcagatctcagccctctactgagtcccttagccaagcagtttctttcaaagaagccagcaggcgaaaagcagggactgccactgcatttcatatcacactgttaaaagttgtgttttgaaattttatgtttagttgcacaaattgggccaaagaaacattgccttgaggaagatatgattggaaaatcaagagtgtagaagaataaatactgttttactgtccaaagacatgtttatagtgctctgtaaatgttcctttcctttgtagtctctggcaagatgctttaggaagataaaagtttgaggagaacaaacaggaattctgaattaagcacagagttgaagtttatacccgtttcacatgcttttcaagaatgtcgcaattactaagaagcagataatggtgttttttagaaacctaattgaagtatattcaaccaaatactttaatgtataaaataaatattatacaatatacttgtatagcagtttctgcttcacatttgattttttcaaatttaatatttatattagagatctatatatgtataaatatgtattttgtcaaatttgttacttaaatatatagagaccagttttctctggaagtttgtttaaatgacagaagcgtatatgaattcaagaaaatttaagctgcaaaaatgtatttgctataaaatgagaagtctcactgatagaggttctttattgctcattttttaaaaaatggactcttgaaatctgttaaaataaaattgtacatttggagatgtttca

SEQ ID NO: 249339 - DNA, 3089 bp, Artificial Sequence
  derived and/or modified sequence
gctcgggccacgcccacctgtcctgcagcactggatgctttgtgagttggggattgttgcgtcccatatctggacccagaagggacttccctgctcggctggctctcggtttctctgctttcctccggagaaataacagcgtcttccgcgccgcgcatggagcctcccggccgccgcgagtgtccctttccttcctggcgctttcctgggttgcttctggcggccatggtgttgctgctgtactccttctccggagaaacatgtccatatatacgggatcctttaaatggccaagcagtccctgcaaatgggacttacgagtttggttatcagatgcactttatttgtaatgagggttattacttaattggtgaagaaattctatattgtgaacttaaaggatcagtagcaatttggagcggtaagcccccaatatgtgaaaaggttttgtgtacaccacctccaaaaataaaaaatggaaaacacacctttagtgaagtagaagtatttgagtatcttgatgcagtaacttatagttgtgatcctgcacctggaccagatccattttcacttattggagagagcacgatttattgtggtgacaattcagtgtggagtcgtgctgctccagagtgtaaagtggtcaaatgtcgatttccagtagtcgaaaatggaaaacagatatcaggatttggaaaaaaattttactacaaagcaacagttatgtttgaatgcgataagggtttttacctcgatggcagcgacacaattgtctgtgacagtaacagtacttgggatcccccagttccaaagtgtcttaaagtgctgcctccatctagtacaaaacctccagctttgagtcattcagtgtcgacttcttccactacaaaatctccagcgtccagtgcctcaggtcctaggcctacttacaagcctccagtctcaaattatccaggatatcctaaacctgaggaaggaatacttgacagtttggatgtttgggtcattgctgtgattgttattgccatagttgttggagttgcagtaatttgtgttgtcccgtacagatatcttcaaaggaggaagaagaaagggaaagcagatggtggagctgaatatgccacttaccagactaaatcaaccactccagcagagcagagaggctgaatagattccacaacctggtttgccagttcatcttttgactctattaaaatcttcaatagttgttattctgtagtttcactctcatgagtgcaactgtggcttagctaatattgcaatgtggcttgaatgtaggtagcatcctttgatgcttctttgaaacttgtatgaatttgggtatgaacagattgcctgctttcccttaaataacacttagatttattggaccagtcagcacagcatgcctggttgtattaaagcagggatatgctgtattttataaaattggcaaaattagagaaatatagttcacaatgaaattatattttctttgtaaagaaagtggcttgaaatcttttttgttcaaagattaatgccaactcttaagattattctttcaccaactatagaatgtattttatatatcgttcattgtaaaaagcccttaaaaatatgtgtatactactttggctcttgtgcataaaaacaagaacactgaaaattgggaatatgcacaaacttggcttctttaaccaagaatattattggaaaattctctaaaagttaatagggtaaattctctattttttgtaatgtgttcggtgatttcagaaagctagaaagtgtatgtgtggcatttgttttcactttttaaaacatccctaactgatcgaatatatcagtaatttcagaatcagatgcatcctttcataagaagtgagaggactctgacagccataacaggagtgccacttcatggtgcgaagtgaacactgtagtcttgttgttttcccaaagagaactccgtatgttctcttaggttgagtaacccactctgaattctggttacatgtgtttttctctccctccttaaataaagagaggggttaaacatgccctctaaaagtaggtggttttgaagagaataaattcatcagataacctcaagtcacatgagaatcttagtccatttacattgccttggctagtaaaagccatctatgtatatgtcttacctcatctcctaaaaggcagagtacaaagtaagccatgtatctcaggaaggtaacttcattttgtctatttgctgttgattgtaccaagggatggaagaagtaaatatagctcaggtagcactttatactcaggcagatctcagccctctactgagtcccttagccaagcagtttctttcaaagaagccagcaggcgaaaagcagggactgccactgcatttcatatcacactgttaaaagttgtgttttgaaattttatgtttagttgcacaaattgggccaaagaaacattgccttgaggaagatatgattggaaaatcaagagtgtagaagaataaatactgttttactgtccaaagacatgtttatagtgctctgtaaatgttcctttcctttgtagtctctggcaagatgctttaggaagataaaagtttgaggagaacaaacaggaattctgaattaagcacagagttgaagtttatacccgtttcacatgcttttcaagaatgtcgcaattactaagaagcagataatggtgttttttagaaacctaattgaagtatattcaaccaaatactttaatgtataaaataaatattatacaatatacttgtatagcagtttctgcttcacatttgattttttcaaatttaatatttatattagagatctatatatgtataaatatgtattttgtcaaatttgttacttaaatatatagagaccagttttctctggaagtttgtttaaatgacagaagcgtatatgaattcaagaaaatttaagctgcaaaaatgtatttgctataaaatgagaagtctcactgatagaggttctttattgctcattttttaaaaaatggactcttgaaatctgttaaaataaaattgtacatttggagatgtttca

SEQ ID NO: 249340 - DNA, 1200 bp, Artificial Sequence
  derived and/or modified sequence
atggagccccccggcagaagagagtgccccttccccagctggagattccccggcctgctgctggccgccatggtgctgctgctgtacagcttcagcgacgcctgcgaggagccccccaccttcgaggccatggagctgatcggcaagcccaagccctactacgagatcggcgagagagtggactacaagtgcaagaagggctacttctacatcccccccctggccacccacaccatctgcgacagaaaccacacctggctgcccgtgagcgacgacgcctgctacagagagacctgcccctacatcagagaccccctgaacggccaggccgtgcccgccaacggcacctacgagttcggctaccagatgcacttcatctgcaacgagggctactacctgatcggcgaggagatcctgtactgcgagctgaagggcagcgtggccatctggagcggcaagccccccatctgcgagaaggtgctgtgcacccccccccccaagatcaagaacggcaagcacaccttcagcgaggtggaggtgttcgagtacctggacgccgtgacctacagctgcgaccccgcccccggccccgaccccttcagcctgatcggcgagagcaccatctactgcggcgacaacagcgtgtggagcagagccgcccccgagtgcaaggtggtgaagtgcagattccccgtggtggagaacggcaagcagatcagcggcttcggcaagaagttctactacaaggccaccgtgatgttcgagtgcgacaagggcttctacctggacggcagcgacaccatcgtgtgcgacagcaacagcacctgggacccccccgtgcccaagtgcctgaaggtgctgccccccagcagcaccaagccccccgccctgagccacagcgtgagcaccagcagcaccaccaagagccccgccagcagcgccagcggccccagacccacctacaagccccccgtgagcaactaccccggctaccccaagcccgaggagggcatcctggacagcctggacgtgtgggtgatcgccgtgatcgtgatcgccatcgtggtgggcgtggccgtgatctgcgtggtgccctacagatacctgcagagaagaaagaagaagggcaaggccgacggcggcgccgagtacgccacctaccagaccaagagcaccacccccgccgagcagagaggctag

SEQ ID NO: 249341 - DNA, 1011 bp, Artificial Sequence
  derived and/or modified sequence
atggagccccccggcagaagagagtgccccttccccagctggagattccccggcctgctgctggccgccatggtgctgctgctgtacagcttcagcggcgagacctgcccctacatcagagaccccctgaacggccaggccgtgcccgccaacggcacctacgagttcggctaccagatgcacttcatctgcaacgagggctactacctgatcggcgaggagatcctgtactgcgagctgaagggcagcgtggccatctggagcggcaagccccccatctgcgagaaggtgctgtgcacccccccccccaagatcaagaacggcaagcacaccttcagcgaggtggaggtgttcgagtacctggacgccgtgacctacagctgcgaccccgcccccggccccgaccccttcagcctgatcggcgagagcaccatctactgcggcgacaacagcgtgtggagcagagccgcccccgagtgcaaggtggtgaagtgcagattccccgtggtggagaacggcaagcagatcagcggcttcggcaagaagttctactacaaggccaccgtgatgttcgagtgcgacaagggcttctacctggacggcagcgacaccatcgtgtgcgacagcaacagcacctgggacccccccgtgcccaagtgcctgaaggtgctgccccccagcagcaccaagccccccgccctgagccacagcgtgagcaccagcagcaccaccaagagccccgccagcagcgccagcggccccagacccacctacaagccccccgtgagcaactaccccggctaccccaagcccgaggagggcatcctggacagcctggacgtgtgggtgatcgccgtgatcgtgatcgccatcgtggtgggcgtggccgtgatctgcgtggtgccctacagatacctgcagagaagaaagaagaagggcaaggccgacggcggcgccgagtacgccacctaccagaccaagagcaccacccccgccgagcagagaggctag

SEQ ID NO: 249342 - protein, 355 aa, Artificial Sequence
  derived and/or modified sequence
MEPPGRRECPFPSWRFPGLLLAAMVLLLYSFSDACEEPPTFEAMELIGKPKPYYEIGERVDYKCKKGYFYIPPLATHTICDRNHTWLPVSDDACYRETCPYIRDPLNGQAVPANGTYEFGYQMHFICNEGYYLIGEEILYCELKGSVAIWSGKPPICEKVLCTPPPKIKNGKHTFSEVEVFEYLDAVTYSCDPAPGPDPFSLIGESTIYCGDNSVWSRAAPECKVVKCRFPVVENGKQISGFGKKFYYKATVMFECDKGFYLDGSDTIVCDSNSTWDPPVPKCLKGYPKPEEGILDSLDVWVIAVIVIAIVVGVAVICVVPYRYLQRRKKKGKADGGAEYATYQTKSTTPAEQRG

SEQ ID NO: 249343 - DNA, 1068 bp, Artificial Sequence
  derived and/or modified sequence
atggaacctcctgggcgccgtgaatgtccattcccatcctggcgctttcccggcctccttctggccgccatggtgttactgctgtactctttcagcgacgcctgcgaagaacctcctacctttgaagcaatggaacttattggaaagcccaaaccgtattacgagatcggtgagagagtcgattataagtgcaagaagggttatttttacatcccccctctggcaacccacaccatctgtgatcgtaaccacacctggttacccgtgtcagacgatgcctgttatagggaaacgtgcccatatattcgggatccactcaatggacaagctgttcctgccaatggaacctatgagttcggctaccagatgcactttatctgcaatgaaggctactatctgataggtgaagaaatcttgtattgcgagcttaagggcagcgtcgcaatttggtccggcaagcctcctatctgtgagaaagtgctgtgcacaccaccccccaagataaaaaacggcaagcacaccttttctgaggtggaggtgttcgagtacctagatgccgttacttacagctgtgatccagcacccggtccagatcccttctcactcatcggagagtccaccatttattgtggagataacagcgtgtggagtcgggctgcacctgaatgtaaggtggtgaaatgcaggtttccagtcgtagagaatggcaagcagatatctggatttggaaaaaagttttattataaagcaaccgtaatgttcgaatgcgacaaaggtttttatctcgatggcagcgataccatagtgtgtgatagcaattcaacctgggatccccctgttccaaaatgcctgaaggggtaccctaaacccgaagaaggcatcctggactcccttgacgtgtgggttatcgctgtgattgtcatcgcaatagtggtaggagtggcggtcatttgtgtggtcccctatcggtacctacaacgtcgaaaaaaaaaaggcaaggccgatggaggcgccgagtatgcaacctaccagacaaagagtaccacccccgcggagcaaaggggatag

SEQ ID NO: 249344 - DNA, 1068 bp, Artificial Sequence
  derived and/or modified sequence
atggagcccccaggccggcgggagtgccccttccccagctggaggtttcctggcctgctgctggccgccatggtgctgctgctgtacagcttcagtgatgcctgtgaggagccccccacctttgaggccatggagctgattggcaagcccaagccctactatgagatcggggagcgggtggactacaagtgcaagaagggctacttctacatcccccccctggccacccacaccatctgtgacaggaaccacacctggctgcctgtgtctgatgatgcctgctaccgggagacctgcccctacatccgggaccccctgaatggccaggccgtgcctgccaacggcacctatgaatttggctaccagatgcacttcatctgcaatgaaggctactacctgattggagaggagatcctgtactgtgagctgaagggctctgtggccatctggagcggcaagccacccatctgtgagaaggtgctgtgcaccccaccacccaagatcaagaatggcaagcacaccttcagcgaggtggaggtgtttgagtacctggatgctgtgacctacagctgtgaccctgcccctggccctgaccccttcagcctgattggagagagcaccatctactgtggggacaacagcgtgtggagcagagctgcccctgagtgcaaggtggtgaagtgccgcttccctgtggtggagaatggcaagcagatcagcggctttgggaagaagttctactacaaggccaccgtgatgtttgaatgtgacaagggcttctacctggatggcagtgacaccatcgtgtgtgacagcaacagcacctgggacccccctgtgcccaagtgcctgaagggctaccccaagccagaggagggcatcctggacagcctggatgtgtgggtgattgctgtgattgtcatcgccatcgtggtgggcgtggccgtcatctgtgtggtgccctaccgctacctgcagaggaggaagaagaagggcaaggcagatggaggagcagaatatgccacctaccagaccaagagcaccaccccagctgagcagaggggctag

SEQ ID NO: 249345 - DNA, 1068 bp, Artificial Sequence
  derived and/or modified sequence
atggagccccccggccggcgggagtgccccttccccagctggcggtttcccggcctcttgttggccgccatggtcctattactgtattccttctcagacgcttgtgaagaacccccgacatttgaggcaatggaactgatcggaaaacccaagccttactatgagatcggtgaacgtgttgattacaagtgcaaaaagggatacttttacatcccacctctggcaactcataccatttgtgaccgtaaccatacatggctcccagtaagcgatgacgcttgctatagggagacttgcccctacataagagatccactgaatggacaggccgtcccagccaacggaacttacgagttcggataccagatgcacttcatttgcaacgagggatactatctcatcggcgaggagattctgtactgcgaattgaaaggttctgttgccatttggtccgggaagccgcctatctgcgagaaggtcctgtgcacccccccccccaagatcaaaaatggaaagcacacattttctgaagtggaagtgtttgaatatctggacgcagtgacatatagttgtgaccctgcacccggtccagatcccttctctctgattggtgaatctactatttattgtggcgacaacagtgtgtggtctcgcgctgcacccgaatgtaaagtggtgaagtgtaggtttccagtggtggaaaacggaaagcaaatttctgggttcggaaaaaagttctactataaggcgacagttatgttcgagtgcgataaaggattttacttggatggaagtgacactatcgtgtgtgactccaatagcacgtgggatcccccggtgcccaaatgtctgaaaggttaccccaagcccgaggaaggaattctggacagcctggacgtttgggtcatcgccgtcatcgtgatcgctatcgtggtgggtgtggctgtgatctgtgtcgtgccctatcgctacctccagcgcagaaagaaaaaagggaaagccgacggcggcgccgaatatgctacataccagacgaagagtacgacccccgccgagcagagaggttag

SEQ ID NO: 249346 - DNA, 1068 bp, Artificial Sequence
  derived and/or modified sequence
atggaaccaccgggacgtcgcgagtgcccttttccttcttggcgcttccccggtctattgttggccgctatggtcctgcttttgtacagcttttccgacgcttgcgaggagcctccaaccttcgaggccatggagctgattggaaaacccaagccttactacgaaattggtgaaagagtcgactataagtgcaaaaaaggatacttttacatccctcctttagctacacacactatctgcgaccgaaaccatacttggctgcccgtcagcgatgacgcctgttatagagaaacctgcccatatattcgcgatccgctcaatggtcaggcggtgccagcaaacgggacatacgagttcggataccagatgcactttatctgcaatgaaggttattatctgattggcgaggagattctgtactgtgaactgaagggaagcgtcgctatctggtcagggaaacctcctatctgcgagaaggtcctatgtacaccacccccaaagatcaaaaacggcaagcacaccttctctgaggtagaggtgttcgagtatcttgatgccgtcacatatagttgcgatcctgcgcctggacctgacccatttagcctcatcggcgagtcaaccatttactgcggagataactcagtgtggtcacgcgctgctcccgagtgtaaggtggtcaagtgcaggttccccgtggtcgaaaacggtaagcagatctctgggttcgggaaaaaattctactacaaggcaactgtgatgttcgagtgcgataaaggcttttacttggatggttccgataccatagtgtgtgattctaattccacctgggaccctccggtgccaaagtgcctgaagggctaccctaagcctgaagaaggcattctggatagtctggatgtttgggtgatcgccgtgattgttatagctatcgttgttggtgttgccgttatctgcgtggtgccctacagatacctgcagaggagaaagaaaaagggcaaagcagacggcggtgccgagtacgccacgtaccagaccaaaagcaccacccccgcagaacagaggggctag

SEQ ID NO: 249347 - DNA, 3081 bp, Artificial Sequence
  derived and/or modified sequence
gcgtcccatatctggacccagaagggacttccctgctcggctggctctcggtttctctgctttcctccggagaaataacagcgtcttccgcgccgcgcatggagcctcccggccgccgcgagtgtccctttccttcctggcgctttcctgggttgcttctggcggccatggtgttgctgctgtactccttctccgatgcctgtgaggagccaccaacatttgaagctatggagctcattggtaaaccaaaaccctactatgagattggtgaacgagtagattataagtgtaaaaaaggatacttctatatacctcctcttgccacccatactatttgtgatcggaatcatacatggctacctgtctcagatgacgcctgttatagagaaacatgtccatatatacgggatcctttaaatggccaagcagtccctgcaaatgggacttacgagtttggttatcagatgcactttatttgtaatgagggttattacttaattggtgaagaaattctatattgtgaacttaaaggatcagtagcaatttggagcggtaagcccccaatatgtgaaaaggttttgtgtacaccacctccaaaaataaaaaatggaaaacacacctttagtgaagtagaagtatttgagtatcttgatgcagtaacttatagttgtgatcctgcacctggaccagatccattttcacttattggagagagcacgatttattgtggtgacaattcagtgtggagtcgtgctgctccagagtgtaaagtggtcaaatgtcgatttccagtagtcgaaaatggaaaacagatatcaggatttggaaaaaaattttactacaaagcaacagttatgtttgaatgcgataagggtttttacctcgatggcagcgacacaattgtctgtgacagtaacagtacttgggatcccccagttccaaagtgtcttaaaggatatcctaaacctgaggaaggaatacttgacagtttggatgtttgggtcattgctgtgattgttattgccatagttgttggagttgcagtaatttgtgttgtcccgtacagatatcttcaaaggaggaagaagaaagggaaagcagatggtggagctgaatatgccacttaccagactaaatcaaccactccagcagagcagagaggctgaatagattccacaacctggtttgccagttcatcttttgactctattaaaatcttcaatagttgttattctgtagtttcactctcatgagtgcaactgtggcttagctaatattgcaatgtggcttgaatgtaggtagcatcctttgatgcttctttgaaacttgtatgaatttgggtatgaacagattgcctgctttcccttaaataacacttagatttattggaccagtcagcacagcatgcctggttgtattaaagcagggatatgctgtattttataaaattggcaaaattagagaaatatagttcacaatgaaattatattttctttgtaaagaaagtggcttgaaatcttttttgttcaaagattaatgccaactcttaagattattctttcaccaactatagaatgtattttatatatcgttcattgtaaaaagcccttaaaaatatgtgtatactactttggctcttgtgcataaaaacaagaacactgaaaattgggaatatgcacaaacttggcttctttaaccaagaatattattggaaaattctctaaaagttaatagggtaaattctctattttttgtaatgtgttcggtgatttcagaaagctagaaagtgtatgtgtggcatttgttttcactttttaaaacatccctaactgatcgaatatatcagtaatttcagaatcagatgcatcctttcataagaagtgagaggactctgacagccataacaggagtgccacttcatggtgcgaagtgaacactgtagtcttgttgttttcccaaagagaactccgtatgttctcttaggttgagtaacccactctgaattctggttacatgtgtttttctctccctccttaaataaagagaggggttaaacatgccctctaaaagtaggtggttttgaagagaataaattcatcagataacctcaagtcacatgagaatcttagtccatttacattgccttggctagtaaaagccatctatgtatatgtcttacctcatctcctaaaaggcagagtacaaagtaagccatgtatctcaggaaggtaacttcattttgtctatttgctgttgattgtaccaagggatggaagaagtaaatatagctcaggtagcactttatactcaggcagatctcagccctctactgagtcccttagccaagcagtttctttcaaagaagccagcaggcgaaaagcagggactgccactgcatttcatatcacactgttaaaagttgtgttttgaaattttatgtttagttgcacaaattgggccaaagaaacattgccttgaggaagatatgattggaaaatcaagagtgtagaagaataaatactgttttactgtccaaagacatgtttatagtgctctgtaaatgttcctttcctttgtagtctctggcaagatgctttaggaagataaaagtttgaggagaacaaacaggaattctgaattaagcacagagttgaagtttatacccgtttcacatgcttttcaagaatgtcgcaattactaagaagcagataatggtgttttttagaaacctaattgaagtatattcaaccaaatactttaatgtataaaataaatattatacaatatacttgtatagcagtttctgcttcacatttgattttttcaaatttaatatttatattagagatctatatatgtataaatatgtattttgtcaaatttgttacttaaatatatagagaccagttttctctggaagtttgtttaaatgacagaagcgtatatgaattcaagaaaatttaagctgcaaaaatgtatttgctataaaatgagaagtctcactgatagaggttctttattgctcattttttaaaaaatggactcttgaaatctgttaaaataaaattgtacatttggaga

SEQ ID NO: 249348 - DNA, 1068 bp, Artificial Sequence
  derived and/or modified sequence
atggagccccccggcagaagagagtgccccttccccagctggagattccccggcctgctgctggccgccatggtgctgctgctgtacagcttcagcgacgcctgcgaggagccccccaccttcgaggccatggagctgatcggcaagcccaagccctactacgagatcggcgagagagtggactacaagtgcaagaagggctacttctacatcccccccctggccacccacaccatctgcgacagaaaccacacctggctgcccgtgagcgacgacgcctgctacagagagacctgcccctacatcagagaccccctgaacggccaggccgtgcccgccaacggcacctacgagttcggctaccagatgcacttcatctgcaacgagggctactacctgatcggcgaggagatcctgtactgcgagctgaagggcagcgtggccatctggagcggcaagccccccatctgcgagaaggtgctgtgcacccccccccccaagatcaagaacggcaagcacaccttcagcgaggtggaggtgttcgagtacctggacgccgtgacctacagctgcgaccccgcccccggccccgaccccttcagcctgatcggcgagagcaccatctactgcggcgacaacagcgtgtggagcagagccgcccccgagtgcaaggtggtgaagtgcagattccccgtggtggagaacggcaagcagatcagcggcttcggcaagaagttctactacaaggccaccgtgatgttcgagtgcgacaagggcttctacctggacggcagcgacaccatcgtgtgcgacagcaacagcacctgggacccccccgtgcccaagtgcctgaagggctaccccaagcccgaggagggcatcctggacagcctggacgtgtgggtgatcgccgtgatcgtgatcgccatcgtggtgggcgtggccgtgatctgcgtggtgccctacagatacctgcagagaagaaagaagaagggcaaggccgacggcggcgccgagtacgccacctaccagaccaagagcaccacccccgccgagcagagaggctag

SEQ ID NO: 249349 - protein, 989 aa, Artificial Sequence
  derived and/or modified sequence
MTMAGGRRGLVAPQNTFLENIVRRSNDTNFVLGNAQIVDWPIVYSNDGFCKLSGYHRAEVMQKSSTCSFMYGELTDKDTIEKVRQTFENYEMNSFEILMYKKNRTPVWFFVKIAPIRNEQDKVVLFLCTFSDITAFKQPIEDDSCKGWGKFARLTRALTSSRGVLQQLAPSVQKGENVHKHSRLAEVLQLGSDILPQYKQEAPKTPPHIILHYCVFKTTWDWIILILTFYTAILVPYNVSFKTRQNNVAWLVVDSIVDVIFLVDIVLNFHTTFVGPAGEVISDPKLIRMNYLKTWFVIDLLSCLPYDVINAFENVDEVSAFMGDPGKIGFADQIPPPLEGRESQGISSLFSSLKVVRLLRLGRVARKLDHYIEYGAAVLVLLVCVFGLAAHWMACIWYSIGDYEIFDEDTKTIRNNSWLYQLAMDIGTPYQFNGSGSGKWEGGPSKNSVYISSLYFTMTSLTSVGFGNIAPSTDIEKIFAVAIMMIGSLLYATIFGNVTTIFQQMYANTNRYHEMLNSVRDFLKLYQVPKGLSERVMDYIVSTWSMSRGIDTEKVLQICPKDMRADICVHLNRKVFKEHPAFRLASDGCLRALAMEFQTVHCAPGDLIYHAGESVDSLCFVVSGSLEVIQDDEVVAILGKGDVFGDVFWKEATLAQSCANVRALTYCDLHVIKRDALQKVLEFYTAFSHSFSRNLILTYNLRKRIVFRKISDVKREEEERMKRKNEAPLILPPDHPVRRLFQRFRQQKEARLAAERGGRDLDDLDVEKGNVLTEHASANHSLVKASVVTVRESPATPVSFQAASTSGVPDHAKLQAPGSECLGPKGGGGDCAKRKSWARFKDACGKSEDWNKVSKAESMETLPERTKASGEATLKKTDSCDSGITKSDLRLDNVGEARSPQDRSPILAEVKHSFYPIPEQTLQATVLEVRHELKEDIKALNAKMTNIEKQLSEILRILTSRRSSQSPQELFEISRPQSPESERDIFGAS

SEQ ID NO: 249350 - DNA, 2970 bp, Artificial Sequence
  derived and/or modified sequence
atgaccatggccgggggaagaagaggactcgtggctcctcagaacacattcctggagaatatagttcgcaggagcaatgataccaactttgttctcgggaatgcccagatagtggactggcccatcgtgtatagcaacgatggtttctgcaagctaagcggctatcacagagccgaagttatgcagaagagtagtacttgctctttcatgtacggggagctgaccgataaagatacgatcgagaaggtgcggcagacttttgagaactacgagatgaacagtttcgaaattttgatgtataagaagaaccggactcccgtgtggttttttgtcaagatcgccccaatccgcaacgagcaggataaagtcgtgctgtttttgtgtactttctccgacataaccgcgttcaaacagcccatcgaggacgactcttgtaaaggttgggggaagtttgcgagacttacaagggcactgacgagcagtaggggggtgctccagcaactggcgccctctgtgcaaaaaggcgagaacgtccataaacacagcagactagccgaagttctccagctcggatctgatatcctgccccagtacaaacaggaagcccctaagacccctccccacatcattctccattactgtgtgttcaagacaacttgggactggataatactgatactaacattctatactgctatattggtgccctacaatgtgtcctttaaaaccagacagaacaatgtggcctggctggttgtagatagtattgtcgacgtgatcttcctcgtggatatcgtgctgaatttccataccaccttcgtcggcccagccggcgaggtgatttcagaccctaaactgatcagaatgaattacctgaaaacatggttcgtgatcgacttgctgagctgtctcccatacgatgtcattaatgcattcgaaaacgtggacgaagtgtccgcttttatgggggatcccgggaagattggatttgccgaccaaattcctcctcctctagaaggtagggagagtcaaggaatatcaagcttattttcaagtcttaaagttgtccggctgttgcgtctgggcagagtcgcacgtaagttagatcattacattgaatacggagccgcggtgctggttcttctagtgtgtgtcttcggtctcgccgcacactggatggcgtgcatctggtatagcattggcgattatgaaattttcgacgaggacactaagactattcggaataatagttggttgtatcagttagccatggacatcggaacgccttatcagttcaatgggtcaggctcaggcaagtgggagggaggtccttccaagaacagcgtgtacatcagctctctatacttcaccatgacttctttaacaagcgtgggcttcgggaatatcgcaccttctacagatatcgaaaagattttcgccgttgccatcatgatgatcggctcactactgtacgcgacaatctttgggaatgtaacgacgatattccagcagatgtacgccaatactaacaggtaccatgaaatgttaaatagtgtaagagacttcctgaaactgtaccaggtcccaaagggcctttccgaacgtgtgatggactacatcgtgagcacatggtcaatgagcaggggcatagacaccgagaaggtcctccaaatctgcccaaaagacatgcgggccgatatttgcgtacacctaaaccgaaaagtttttaaggagcatcccgcctttagattagccagcgacgggtgtttaagagccctcgctatggagttccagacagttcattgtgctccaggcgacctgatttatcacgcaggcgaaagtgtagattctctttgttttgtggtcagtgggagtttggaagtaattcaggatgatgaggtcgtggccatactgggtaaaggggacgtgttcggagacgtattctggaaggaagccactttggctcagagctgtgccaatgttcgggccctcacgtattgtgatctccacgtcatcaagagggatgctctgcagaaagtgctggagttctatacagccttcagccattcatttagtcgtaatcttatcctaacgtataatctgcggaagcgaatcgtgttcaggaaaatcagcgacgtaaaacgagaagaagaggagagaatgaaacggaagaacgaggctcccctcatcctgccccccgaccacccggttagaagactctttcagcggtttcgacagcagaaggaggctcggctggcagccgaacgcggaggtagggatttggatgacctggacgtggaaaaaggcaatgtgcttactgagcacgcttcagccaaccactcactggtaaaagcctcagttgtgactgtgcgggaatcacctgcgacccccgtttccttccaggcagctagcacctcaggggtgccggaccacgccaaactgcaggcacccggaagcgaatgcctgggccccaaaggggggggcggcgattgcgccaagcggaagtcctgggctcggttcaaggatgcttgcggcaagagcgaggattggaacaaggtctctaaggcagaatcaatggagacacttccagaacggactaaggcctccggggaagccactttgaagaaaaccgactcatgcgactctggcattaccaaatcagaccttcggctcgataacgtgggtgaggccaggtcgccccaggaccgaagccctatcctggccgaagttaagcattcattttacccaatcccagaacagactctgcaggcgacggtgcttgaagtacgccatgagttaaaggaagacatcaaggctctcaacgcgaaaatgacaaacattgagaagcaactgagtgagatcttgcgcattctgacgtccaggcgctctagtcagtcgccccaagaactcttcgagatttctcgtccccagagtccagaaagcgagcgggacatttttggggcatcctag

SEQ ID NO: 249351 - DNA, 2970 bp, Artificial Sequence
  derived and/or modified sequence
atgaccatggccggcggcagaagaggcctggtggccccccagaacaccttcctggagaacatcgtgagaagaagcaatgacaccaactttgtgctgggcaatgcccagatcgtggactggcccatcgtgtacagcaatgatggcttctgcaagctgagcggctaccacagagctgaggtgatgcagaagagcagcacctgcagcttcatgtatggagagctgacagacaaggacaccatcgagaaggtgcggcagacctttgagaactatgagatgaacagctttgagatcctgatgtacaagaagaacagaacacctgtgtggttctttgtgaagatcgcccccatcagaaatgagcaggacaaggtggtgctcttcctgtgcaccttcagtgacatcacagccttcaagcagcccattgaagatgacagctgcaagggctggggcaagtttgcccggctgacccgggccctgaccagcagcagaggagtgctgcagcagctggcccccagcgtgcagaagggggagaatgtgcacaagcacagccggctggccgaggtgctgcagctgggcagtgacatcctgccccagtacaagcaggaggcccccaagaccccaccccacatcatcctgcactactgtgtgttcaagaccacctgggactggatcatcctgatcctgaccttctacacagccatcctggtgccctacaacgtgtccttcaagacccggcagaacaacgtggcctggctggtggtggacagcatcgtggatgtgatcttcctggtggacatcgtgctgaacttccacaccacctttgtgggccctgctggggaggtgatcagtgaccccaagctgatccgcatgaactacctgaagacctggtttgtgattgacctgctgagctgcctgccctatgatgtgatcaatgcctttgaaaatgtggatgaggtgtctgccttcatgggagaccccgggaagattggatttgctgaccagatccccccacccctggagggccgggagagccagggcatcagcagcctcttcagcagcctgaaggtggtgcggctgctgcggctgggccgggtggccaggaagctggaccactacatcgagtatggagctgctgtgctggtgctgctggtgtgtgtgtttggcctggccgcccactggatggcctgcatctggtacagcatcggggactatgagatctttgatgaggacaccaagaccatccggaacaacagctggctgtaccagctggccatggacatcggcaccccctaccagttcaatggaagtggcagcggcaagtgggagggcggccccagcaagaacagcgtgtacatcagcagcctgtacttcaccatgaccagcctgacctctgtgggcttcggcaacatcgcccccagcacagacatcgagaagatctttgctgtggccatcatgatgattggcagcctgctgtatgccaccatctttggaaatgtgaccaccatcttccagcagatgtatgccaacaccaaccgctaccacgagatgctgaacagcgtgcgggacttcctgaagctgtaccaggtgcccaagggcctgtctgagcgggtgatggactacatcgtgtccacctggagcatgagccggggcatcgacacagagaaggtgctgcagatctgccccaaggacatgagagctgacatctgtgtgcacctgaacaggaaggtgttcaaggagcacccagccttccggctggccagtgatggctgcctgcgggccctggccatggagttccagacagtgcactgtgcccctggggacctgatctaccacgccggggagagcgtggacagcctgtgctttgtggtgtctggcagcctggaggtgatccaggatgatgaggtggtggccatcctgggcaaaggagatgtgtttggagatgtgttctggaaggaggccaccctggcccagagctgtgccaacgtgcgggccctgacctactgtgacctgcacgtgatcaagagagatgccctgcagaaggtgctggagttctacacagccttcagccacagcttcagcaggaacctgatcctgacctacaacctgaggaagagaattgtgttcaggaagatcagtgatgtgaagcgggaggaggaggagaggatgaagaggaagaatgaggcccccctcatcctgcccccagaccaccctgtgcggcggctcttccagcgcttccggcagcagaaggaggcccggctggccgctgagcggggcggccgggacctggatgacctggatgtggagaagggaaatgtgctgacagaacatgccagcgccaaccacagcctggtgaaggcctctgtggtgacagtgcgggagagccctgccacccctgtgtccttccaggccgccagcaccagcggcgtgcctgaccacgccaagctgcaggcccctggcagcgagtgcctgggccccaagggcggcggcggggactgtgccaagaggaagtcctgggcccgcttcaaggatgcctgtgggaagtctgaggactggaacaaggtgtccaaggccgagagcatggagaccctgcctgagaggaccaaggccagcggggaggccaccctgaagaagacagacagctgtgacagcggcatcaccaagagtgacctgcggctggacaacgtgggggaggcccggagcccccaggacaggagccccatcctggccgaggtgaagcacagcttctaccccatccctgagcagaccctgcaggccaccgtgctggaggtgagacatgagctgaaggaggacatcaaggccctgaatgccaagatgaccaacatcgagaagcagctgtctgagatcctgcgcatcctgaccagcagaagaagcagccagagcccccaggagctgtttgagatcagccggccccagagccctgagagcgagcgggacatctttggagccagctag

SEQ ID NO: 249352 - DNA, 2970 bp, Artificial Sequence
  derived and/or modified sequence
atgaccatggccggcggccggcggggcctggtggccccccagaacacattcctggagaacatagtacgccgcagcaacgataccaattttgttctcgggaacgctcagatcgtggattggcctatcgtctacagcaacgatggcttctgcaaattgagcggttaccaccgagccgaagtgatgcaaaagtcctcgacttgctctttcatgtacggcgagttaactgacaaggataccatcgagaaggtgcgccagacgttcgagaactacgagatgaattcctttgaaatcctgatgtacaagaagaatcggaccccagtttggttttttgtgaaaatagcgcccatccggaatgagcaggataaagtcgtgctgtttctctgcactttcagtgacattaccgctttcaaacagcctattgaagatgactcatgcaaaggctggggaaaattcgctagactgacaagagcactgacgagctcccggggcgtacttcagcagttggccccatctgttcagaaaggggagaacgtgcacaaacactcaaggctggccgaggtgcttcaattgggttccgacatcctccctcagtacaagcaggaagcccctaagacgccacctcacataatattgcattattgtgtattcaaaacaacctgggactggatcattctcatcctgaccttctacaccgccatcctggtaccttacaacgtgtcttttaaaacccggcagaataatgtggcttggctcgtggtcgacagcatagtcgatgtgatcttccttgttgatatcgtgctgaacttccatactacctttgtgggaccggccggggaggtcatctcagatccaaagttaatccgcatgaattacctcaagacctggtttgtgatcgatcttctctcctgcttgccatatgatgttatcaacgcctttgaaaatgtggatgaggtgtccgcctttatgggcgacccaggaaagataggatttgcagaccagattccacctcctctggaaggtcgggagtcacaggggatttctagccttttttcctccctaaaagttgtccgcctgcttagactcggccgcgtcgccaggaagttggatcattacattgaatatggcgccgctgtgctggttcttctcgtttgtgtttttggactggcagctcactggatggcatgcatttggtatagcatcggtgactacgaaattttcgatgaagataccaagacaatacggaataattcatggctgtaccagcttgctatggacataggtaccccttatcagttcaatggctccggctcagggaaatgggagggagggccctctaaaaacagtgtatacatttcttcgctgtacttcacaatgacatcactgacaagcgttggatttggaaacatcgctccaagtactgacattgaaaagatctttgccgtggccattatgatgatagggtcgctcctgtatgctaccatctttgggaatgtgactaccatttttcagcaaatgtacgctaatacaaatagataccatgaaatgttaaacagcgtgagggatttcttgaagctgtatcaggtgcctaaaggccttagcgaaagggttatggattacatcgtgagtacttggagcatgagtcgcggtatagatacggagaaggtcttgcagatttgccccaaggacatgagagccgatatatgcgttcacctgaatagaaaggtgtttaaggaacacccagcgtttcggctcgccagcgacggctgccttcgtgctttggccatggagtttcagacagtccactgcgccccaggagacttaatttatcatgccggagaatctgtcgatagtctgtgttttgttgtatctgggtccctcgaggtgatacaggatgatgaggtcgtagccattctgggaaaaggcgatgtatttggcgacgtgttttggaaagaagcaacactagctcagtcttgtgccaacgttcgagccctgacttattgcgacctccatgtcattaaaagagacgccctacagaaagtcttggagttttataccgccttttcccactccttttctagaaacctgatcttaacatacaatttgcggaagcgtatcgttttcaggaagatctccgacgtgaagagagaagaggaggagcgcatgaaacgcaaaaacgaggcccctctgattctcccaccagatcatccagtgaggcggttatttcagcgctttcgccagcagaaagaggccaggctggctgctgagcgcggagggagagaccttgatgacttagatgtggaaaaggggaatgtcctgactgagcatgcaagcgcaaaccactctctggtcaaggcaagcgtggtcaccgtcagagaaagtccggctacccccgtgagctttcaggccgctagtacctctggcgtccctgatcacgctaagctgcaagctcctggaagtgagtgtcttggacccaaaggcgggggaggtgactgcgccaagcgcaagagttgggcccgctttaaagatgcttgcgggaaatcagaagactggaacaaagtctctaaggccgaaagcatggagactctgccagagcgtaccaaagccagcggcgaggcgactctcaaaaaaacagactcttgcgactcaggcatcacaaagagcgacttgagactggataatgttggcgaggcccggagccctcaggacagatcccctattttggccgaggttaagcacagcttttaccccattccggaacaaaccctgcaggcgaccgttctggaagtgagacacgaactgaaagaggacatcaaagctctgaacgccaagatgaccaacatcgagaaacagctcagcgagatactacggattctgacgagtagaaggagctctcagagtccccaggagctcttcgaaatatcacggcctcagtcgccagagtctgaaagagacatcttcggggcctcgtag

SEQ ID NO: 249353 - DNA, 3066 bp, Artificial Sequence
  derived and/or modified sequence
gcccgccggaccccgagctgctgggaggatgaccatggctgggggcaggaggggactagtggcccctcaaaacacgtttctggagaatattgttcggcggtccaatgatactaattttgtgttggggaatgctcagatagtggactggcctattgtgtacagcaatgatggattttgcaagctgtctggctatcacagggcagaagtgatgcaaaaaagcagcacctgcagttttatgtatggggagctgactgataaagacacgattgaaaaagtgcggcaaacatttgagaactatgagatgaattcctttgaaattctgatgtacaagaagaacaggacacctgtgtggttctttgtgaaaattgctccaattcgaaacgaacaggataaagtggttttatttctttgcactttcagtgacataacagctttcaaacagccaattgaggatgattcatgtaaaggctgggggaagtttgctcggctgacaagagcactgacaagcagcaggggtgtcctgcagcagctggctccaagcgtgcaaaaaggcgagaatgtccacaagcactcccgcctggcagaggtcctacagctgggctcagacatccttccccagtacaagcaagaggcaccaaagactccccctcacatcatcttacattattgtgtttttaagaccacgtgggattggatcatcttgatcttgaccttctatacagccatcttggtcccttataatgtctccttcaaaaccaggcagaataatgtggcctggctggttgttgatagcatcgtggatgttatctttttggtggacattgtgctcaattttcataccacctttgttggaccagcaggggaggtgatttctgaccccaaacttatccgcatgaactacctgaagacgtggtttgtgattgaccttctgtcctgtttgccatatgatgtcatcaacgcttttgagaacgtggatgaggttagtgcctttatgggtgatccagggaagattggttttgctgatcagattccaccaccactggaggggagagagagtcagggcatcagcagcctgttcagctctctaaaagttgtccggctgctccgtcttgggcgagtggcccgtaagctggaccactacattgaatatggagctgctgtgctggtcctgctggtgtgtgtgtttgggctggctgcacactggatggcctgcatctggtacagcattggggactatgagatctttgacgaggacaccaagacaatccgcaacaacagctggctgtaccaactagcgatggacattggcaccccttaccagtttaatgggtctggctcagggaagtgggaaggtggtcccagcaagaattctgtctacatctcctcgttgtatttcacaatgaccagcctcaccagtgtgggctttgggaacatcgccccatccacagacattgagaagatctttgcagtggccatcatgatgattggctcacttctctatgccaccatcttcgggaatgtgacgactattttccaacagatgtatgccaacaccaacagataccatgagatgctcaacagtgttcgggacttcctgaagctctaccaggtgccaaaaggattgagtgagcgagtaatggattatattgtgtccacttggtccatgtccagaggcattgacacagagaaggtcctgcagatctgccccaaggacatgagagccgacatctgcgtgcacctgaaccgcaaggtgttcaaggagcacccggccttccggctggccagtgatggctgcctccgggcactggccatggagttccagacggtgcactgtgccccaggggacctcatctaccatgcaggagagagcgttgacagcctctgctttgtggtttctggctccctggaggtgatccaagatgatgaggtggtggccattctaggaaaaggagacgtgtttggagatgtgttctggaaggaagccacccttgcccagtcctgtgccaatgttagggccttgacctactgtgatctgcatgtgatcaagcgggatgccctgcagaaagtgctggaattctacacggccttctcccattccttctcccggaacctgattctgacgtacaacttgaggaagaggattgtgttccggaagatcagcgatgtgaaacgtgaagaggaagaacgcatgaaacgaaagaatgaggcccccctgatcttgcccccggaccaccctgtccggcgcctcttccagagattccgacagcagaaagaggccaggctggcagctgagagagggggccgggacctggatgacctagatgtggagaagggcaatgtccttacagagcatgcctccgccaaccacagcctcgtgaaggccagcgtggtcaccgtgcgtgagagtcctgccacgcccgtatccttccaggcagcctccacctccggggtgccagaccacgcaaagctacaggcgccagggtccgagtgcctgggccccaaggggggcgggggcgattgtgccaagcgcaaaagctgggcccgcttcaaagatgcttgcgggaagagtgaggactggaacaaggtgtccaaggctgagtcgatggagacacttcccgagaggacaaaagcgtcaggcgaggccacactgaagaagacagactcgtgtgacagtggcatcaccaagagcgacttgcgcctggacaacgtgggtgaggccaggagtccccaggatcggagtcccatcctggcagaggtcaagcattcgttctaccccatccctgagcagacgctgcaggccacagtcctggaggtgaggcacgagctgaaggaggacatcaaggccttaaacgccaaaatgaccaatattgagaaacagctctctgagatactcaggatattaacttccagaagatcctctcagtctcctcaggagttgtttgaaatatcgaggccacagtccccagaatcagagagagacatttttggagccagctgagaggtctatttaaaaaaaaagtcagagacagatacctccaaccctgccgtcaccaccacccctaccac

SEQ ID NO: 249354 - DNA, 2970 bp, Artificial Sequence
  derived and/or modified sequence
atgaccatggcaggcggacgacgagggctggtcgctccacagaatacatttctcgagaatatcgtcaggaggagcaatgatacgaatttcgtgttgggaaatgcacagattgtggactggccaatcgtctattccaacgatggtttttgtaaattgagcggatatcatagagcggaggtgatgcaaaaaagtagtacgtgttccttcatgtatggcgaactgaccgacaaggacaccatagagaaagttcgccagacgtttgagaactacgagatgaattctttcgaaattctcatgtataagaagaatcggaccccggtgtggttcttcgtgaagattgcgccaatcaggaacgaacaggataaggtggtgctattcctttgtactttcagcgacattaccgcgtttaaacagccaattgaggatgacagctgcaagggttgggggaagtttgccaggttgactcgggctctcacatcgtctaggggcgtactacaacagctggcaccttctgtgcaaaaaggggagaatgtgcacaaacacagtcgattggccgaggtgctgcagttggggtccgacattctccctcagtataaacaggaggcacccaaaacccctccccacataatactgcactactgtgttttcaaaacaacatgggattggatcattttgatactgacattctacactgcaatactggtgccttataatgtcagttttaagacacggcaaaacaacgtcgcctggctggtcgtcgacagcatagtcgatgtcatcttcctggtcgatatcgttctcaactttcataccactttcgtgggaccagcaggtgaggtgatctcagaccctaaactgatacgcatgaattatttgaagacgtggtttgtgatagacctcttgagctgtctgccatatgacgtgatcaacgcttttgagaatgttgatgaggtatccgctttcatgggagatcccggtaagatcgggtttgcagaccagatccctcctccactggagggcagagagtcccaagggatcagctccttattcagttctctcaaggtggttcgtttgctgaggttgggtcgagtggcacgcaagctggaccactacattgagtatggagcagctgttctagtgctcctggtgtgtgtattcggtctggccgctcattggatggcgtgtatctggtattcgatcggggattacgagattttcgacgaggacaccaagaccataaggaataatagctggttgtatcagctggccatggacattgggaccccttaccagtttaatggcagcggaagcggcaaatgggaaggtggtccctctaaaaattcagtctatatcagcagtctatatttcaccatgacttcgttgacgtctgtaggcttcggaaatatcgcccctagcaccgatatagagaaaatcttcgctgtcgctatcatgatgataggttcgctattatacgctactatattcggcaacgtgaccacaatctttcaacagatgtacgccaatactaacagataccacgagatgctaaactcagttcgcgatttcctaaaactgtatcaggtccccaaaggactttcagagagggtgatggattatatcgtgtccacttggtctatgtctcggggaatcgatacagagaaggtgctgcaaatctgtccaaaagacatgagagctgatatatgtgtccatcttaaccggaaggtgttcaaggagcatcctgcattccggttagccagtgatggctgcttacgggctctggccatggaattccagactgtacattgtgctccaggtgatttaatctatcacgccggagaatccgtggacagtctctgttttgtcgtttctggctctttggaagtcattcaggatgatgaagtggttgcaatccttggcaagggtgacgtctttggcgacgtgttctggaaagaagctactctggcacaatcctgtgccaatgtgcgcgctctgacatactgtgacttgcatgtgatcaagcgcgatgccctccagaaagtgcttgaattctacacagcgttctctcatagcttctctcggaacctcatcctgacatataacctgagaaaacgaatcgtgttccgcaagatttccgatgtgaagagggaggaggaagagaggatgaagaggaagaatgaggccccactcatcctacctcctgatcaccctgtccgcagactctttcaacgatttcggcagcagaaagaagctaggctagccgctgaacggggtgggagagaccttgatgacctggacgtcgaaaaaggaaatgtgctgaccgagcatgctagcgccaatcattctttggttaaggcctccgttgtgaccgtgagggaaagcccagcaacccctgtctcattccaggcagccagcacctcgggggttcctgaccacgccaaactccaagcaccaggctcagagtgcttgggccctaagggcggaggcggagattgtgcaaagcgaaagtcctgggctaggtttaaagacgcttgtgggaagtccgaggactggaataaagtcagcaaggccgagtccatggagacactccccgaaaggaccaaagcatctggagaagcaacactgaagaagacagatagctgcgacagcgggatcacgaaaagcgacctacgcctggataacgtaggagaggcacggtccccccaagatcggagtcctattctagctgaggttaaacacagcttctaccctatccccgaacagactctgcaggctacagtgctggaagtccgccacgagctgaaggaggatatcaaagcgttaaacgccaagatgactaatattgagaagcagctgagtgagattcttcgtatcttaacttccaggagaagttcacagtcaccacaggagctctttgagatttcccggccacagagtcctgaatctgagagagatatttttggcgcttcatag

SEQ ID NO: 249355 - DNA, 2970 bp, Artificial Sequence
  derived and/or modified sequence
atgaccatggccggcggcagaagaggcctggtggccccccagaacaccttcctggagaacatcgtgagaagaagcaacgacaccaacttcgtgctgggcaacgcccagatcgtggactggcccatcgtgtacagcaacgacggcttctgcaagctgagcggctaccacagagccgaggtgatgcagaagagcagcacctgcagcttcatgtacggcgagctgaccgacaaggacaccatcgagaaggtgagacagaccttcgagaactacgagatgaacagcttcgagatcctgatgtacaagaagaacagaacccccgtgtggttcttcgtgaagatcgcccccatcagaaacgagcaggacaaggtggtgctgttcctgtgcaccttcagcgacatcaccgccttcaagcagcccatcgaggacgacagctgcaagggctggggcaagttcgccagactgaccagagccctgaccagcagcagaggcgtgctgcagcagctggcccccagcgtgcagaagggcgagaacgtgcacaagcacagcagactggccgaggtgctgcagctgggcagcgacatcctgccccagtacaagcaggaggcccccaagacccccccccacatcatcctgcactactgcgtgttcaagaccacctgggactggatcatcctgatcctgaccttctacaccgccatcctggtgccctacaacgtgagcttcaagaccagacagaacaacgtggcctggctggtggtggacagcatcgtggacgtgatcttcctggtggacatcgtgctgaacttccacaccaccttcgtgggccccgccggcgaggtgatcagcgaccccaagctgatcagaatgaactacctgaagacctggttcgtgatcgacctgctgagctgcctgccctacgacgtgatcaacgccttcgagaacgtggacgaggtgagcgccttcatgggcgaccccggcaagatcggcttcgccgaccagatccccccccccctggagggcagagagagccagggcatcagcagcctgttcagcagcctgaaggtggtgagactgctgagactgggcagagtggccagaaagctggaccactacatcgagtacggcgccgccgtgctggtgctgctggtgtgcgtgttcggcctggccgcccactggatggcctgcatctggtacagcatcggcgactacgagatcttcgacgaggacaccaagaccatcagaaacaacagctggctgtaccagctggccatggacatcggcaccccctaccagttcaacggcagcggcagcggcaagtgggagggcggccccagcaagaacagcgtgtacatcagcagcctgtacttcaccatgaccagcctgaccagcgtgggcttcggcaacatcgcccccagcaccgacatcgagaagatcttcgccgtggccatcatgatgatcggcagcctgctgtacgccaccatcttcggcaacgtgaccaccatcttccagcagatgtacgccaacaccaacagataccacgagatgctgaacagcgtgagagacttcctgaagctgtaccaggtgcccaagggcctgagcgagagagtgatggactacatcgtgagcacctggagcatgagcagaggcatcgacaccgagaaggtgctgcagatctgccccaaggacatgagagccgacatctgcgtgcacctgaacagaaaggtgttcaaggagcaccccgccttcagactggccagcgacggctgcctgagagccctggccatggagttccagaccgtgcactgcgcccccggcgacctgatctaccacgccggcgagagcgtggacagcctgtgcttcgtggtgagcggcagcctggaggtgatccaggacgacgaggtggtggccatcctgggcaagggcgacgtgttcggcgacgtgttctggaaggaggccaccctggcccagagctgcgccaacgtgagagccctgacctactgcgacctgcacgtgatcaagagagacgccctgcagaaggtgctggagttctacaccgccttcagccacagcttcagcagaaacctgatcctgacctacaacctgagaaagagaatcgtgttcagaaagatcagcgacgtgaagagagaggaggaggagagaatgaagagaaagaacgaggcccccctgatcctgccccccgaccaccccgtgagaagactgttccagagattcagacagcagaaggaggccagactggccgccgagagaggcggcagagacctggacgacctggacgtggagaagggcaacgtgctgaccgagcacgccagcgccaaccacagcctggtgaaggccagcgtggtgaccgtgagagagagccccgccacccccgtgagcttccaggccgccagcaccagcggcgtgcccgaccacgccaagctgcaggcccccggcagcgagtgcctgggccccaagggcggcggcggcgactgcgccaagagaaagagctgggccagattcaaggacgcctgcggcaagagcgaggactggaacaaggtgagcaaggccgagagcatggagaccctgcccgagagaaccaaggccagcggcgaggccaccctgaagaagaccgacagctgcgacagcggcatcaccaagagcgacctgagactggacaacgtgggcgaggccagaagcccccaggacagaagccccatcctggccgaggtgaagcacagcttctaccccatccccgagcagaccctgcaggccaccgtgctggaggtgagacacgagctgaaggaggacatcaaggccctgaacgccaagatgaccaacatcgagaagcagctgagcgagatcctgagaatcctgaccagcagaagaagcagccagagcccccaggagctgttcgagatcagcagaccccagagccccgagagcgagagagacatcttcggcgccagctag

SEQ ID NO: 249356 - protein, 974 aa, Artificial Sequence
  derived and/or modified sequence
MVCGCSALLPLPNPRPTMPATPNFLANPSSSSRWIPLQPMPVAWAFVQKTSALLWLLLLGTSLSPAWGQAKIPLETVKLWADTFGGDLYNTVTKYSGSLLLQKKYKDVESSLKIEEVDGLELVRKFSEDMENMLRRKVEAVQNLVEAAEEADLNHEFNESLVFDYYNSVLINERDEKGNFVELGAEFLLESNAHFSNLPVNTSISSVQLPTNVYNKDPDILNGVYMSEALNAVFVENFQRDPTLTWQYFGSATGFFRIYPGIKWTPDENGVITFDCRNRGWYIQAATSPKDIVILVDVSGSMKGLRMTIAKHTITTILDTLGENDFINIIAYNDYVHYIEPCFKGILVQADRDNREHFKLLVEELMVKGVGVVDQALREAFQILKQFQEAKQGSLCNQAIMLISDGAVEDYEPVFEKYNWPDCKVRVFTYLIGREVSFADRMKWIACNNKGYYTQISTLADTQENVMEYLHVLSRPMVINHDHDIIWTEAYMDSKLLSSQAQSLTLLTTVAMPVFSKKNETRSHGILLGVVGSDVALRELMKLAPRYKLGVHGYAFLNTNNGYILSHPDLRPLYREGKKLKPKPNYNSVDLSEVEWEDQAESLRTAMINRETGTLSMDVKVPMDKGKRVLFLTNDYFFTDISDTPFSLGVVLSRGHGEYILLGNTSVEEGLHDLLHPDLALAGDWIYCITDIDPDHRKLSQLEAMIRFLTRKDPDLECDEELVREVLFDAVVTAPMEAYWTALALNMSEESEHVVDMAFLGTRAGLLRSSLFVGSEKVSDRKFLTPEDEASVFTLDRFPLWYRQASEHPAGSFVFNLRWAEGPESAGEPMVVTASTAVAVTVDKRTAIAAAAGVQMKLEFLQRKFWAATRQCSTVDGPCTQSCEDSDLDCFVIDNNGFILISKRSRETGRFLGEVDGAVLTQLLSMGVFSQVTMYDYQAMCKPSSHHHSAAQPLVSPISAFLTATRWLLQELVL

SEQ ID NO: 249357 - protein, 1137 aa, Artificial Sequence
  derived and/or modified sequence
MVCGCSALLPLPNPRPTMPATPNFLANPSSSSRWIPLQPMPVAWAFVQKTSALLWLLLLGTSLSPAWGQAKIPLETVKLWADTFGGDLYNTVTKYSGSLLLQKKYKDVESSLKIEEVDGLELVRKFSEDMENMLRRKVEAVQNLVEAAEEADLNHEFNESLVFDYYNSVLINERDEKGNFVELGAEFLLESNAHFSNLPVNTSISSVQLPTNVYNKDPDILNGVYMSEALNAVFVENFQRDPTLTWQYFGSATGFFRIYPGIKWTPDENGVITFDCRNRGWYIQAATSPKDIVILVDVSGSMKGLRMTIAKHTITTILDTLGENDFINIIAYNDYVHYIEPCFKGILVQADRDNREHFKLLVEELMVKGVGVVDQALREAFQILKQFQEAKQGSLCNQAIMLISDGAVEDYEPVFEKYNWPDCKVRVFTYLIGREVSFADRMKWIACNNKGYYTQISTLADTQENVMEYLHVLSRPMVINHDHDIIWTEAYMDSKLLSSQAQSLTLLTTVAMPVFSKKNETRSHGILLGVVGSDVALRELMKLAPRYKLGVHGYAFLNTNNGYILSHPDLRPLYREGKKLKPKPNYNSVDLSEVEWEDQAESLRTAMINRETGTLSMDVKVPMDKGKRVLFLTNDYFFTDISDTPFSLGVVLSRGHGEYILLGNTSVEEGLHDLLHPDLALAGDWIYCITDIDPDHRKLSQLEAMIRFLTRKDPDLECDEELVREVLFDAVVTAPMEAYWTALALNMSEESEHVVDMAFLGTRAGLLRSSLFVGSEKVSDRKFLTPEDEASVFTLDRFPLWYRQASEHPAGSFVFNLRWAEGPESAGEPMVVTASTAVAVTVDKRTAIAAAAGVQMKLEFLQRKFWAATRQCSTVDGPCTQSCEDSDLDCFVIDNNGFILISKRSRETGRFLGEVDGAVLTQLLSMGVFSQVTMYDYQAMCKPSSHHHSAAQPLVSPISAFLTATRWLLQELVLFLLEWSVWGSWYDRGAEAKSVFHHSHKHKKQDPLQPCDTEYPVFVYQPAIREANGIVECGPCQKVFVVQQIPNSNLLLLVTDPTCDCSIFPPVLQEATEVKYNASVKCDRMRSQKLRRRPDSCHAFHPEENAQDCGGASDTSASPPLLLLPVCAWGLLPQLLR

SEQ ID NO: 249358 - protein, 1073 aa, Artificial Sequence
  derived and/or modified sequence
MAVALGTRRRDRVKLWADTFGGDLYNTVTKYSGSLLLQKKYKDVESSLKIEEVDGLELVRKFSEDMENMLRRKVEAVQNLVEAAEEADLNHEFNESLVFDYYNSVLINERDEKGNFVELGAEFLLESNAHFSNLPVNTSISSVQLPTNVYNKDPDILNGVYMSEALNAVFVENFQRDPTLTWQYFGSATGFFRIYPGIKWTPDENGVITFDCRNRGWYIQAATSPKDIVILVDVSGSMKGLRMTIAKHTITTILDTLGENDFINIIAYNDYVHYIEPCFKGILVQADRDNREHFKLLVEELMVKGVGVVDQALREAFQILKQFQEAKQGSLCNQAIMLISDGAVEDYEPVFEKYNWPDCKVRVFTYLIGREVSFADRMKWIACNNKGYYTQISTLADTQENVMEYLHVLSRPMVINHDHDIIWTEAYMDSKLLSSQAQSLTLLTTVAMPVFSKKNETRSHGILLGVVGSDVALRELMKLAPRYKLGVHGYAFLNTNNGYILSHPDLRPLYREGKKLKPKPNYNSVDLSEVEWEDQAESLRTAMINRETGTLSMDVKVPMDKGKRVLFLTNDYFFTDISDTPFSLGVVLSRGHGEYILLGNTSVEEGLHDLLHPDLALAGDWIYCITDIDPDHRKLSQLEAMIRFLTRKDPDLECDEELVREVLFDAVVTAPMEAYWTALALNMSEESEHVVDMAFLGTRAGLLRSSLFVGSEKVSDRKFLTPEDEASVFTLDRFPLWYRQASEHPAGSFVFNLRWAEGPESAGEPMVVTASTAVAVTVDKRTAIAAAAGVQMKLEFLQRKFWAATRQCSTVDGPCTQSCEDSDLDCFVIDNNGFILISKRSRETGRFLGEVDGAVLTQLLSMGVFSQVTMYDYQAMCKPSSHHHSAAQPLVSPISAFLTATRWLLQELVLFLLEWSVWGSWYDRGAEAKSVFHHSHKHKKQDPLQPCDTEYPVFVYQPAIREANGIVECGPCQKVFVVQQIPNSNLLLLVTDPTCDCSIFPPVLQEATEVKYNASVKCDRMRSQKLRRRPDSCHAFHPEENAQDCGGASDTSASPPLLLLPVCAWGLLPQLLR

SEQ ID NO: 249359 - protein, 204 aa, Artificial Sequence [sequence omitted]

SEQ ID NO: 249360 - protein, 267 aa, Artificial Sequence
  derived and/or modified sequence
MKLEFLQRKFWAATRQDLDCFVIDNNGFILISKRSRETGRFLGEVDGAVLTQLLSMGVFSQVTMYDYQAMCKPSSHHHSAAQPLVSPISAFLTATRWLLQELVLFLLEWSVWGSWYDRGAEAKSVFHHSHKHKKQDPLQPCDTEYPVFVYQPAIREANGIVECGPCQKVFVVQQIPNSNLLLLVTDPTCDCSIFPPVLQEATEVKYNASVKCDRMRSQKLRRRPDSCHAFHPEENAQDCGGASDTSASPPLLLLPVCAWGLLPQLLR

SEQ ID NO: 249361 - DNA, 2925 bp, Artificial Sequence
  derived and/or modified sequence
atggtttgcggttgtagtgcgttgctccccctgccgaacccacgaccaacaatgcccgcgacacctaacttcctcgctaatccctcatcgtcgtcccgctggatccccctccagcccatgccggtcgcctgggcgttcgtgcagaagacatcagccctcctgtggctgcttttactgggtacttcactgtcccccgcttggggtcaggcaaagattcctttggaaactgttaaattgtgggcagacactttcggtggagacctttataacaccgtgacaaaatattcaggttccctgttacttcagaagaagtataaagacgtggagagcagtcttaaaatcgaggaggtggatggactcgaacttgtaagaaaattcagcgaagacatggaaaatatgttgcgccgaaaagtcgaagctgtccagaaccttgtagaagccgcggaggaggctgacctcaaccacgagtttaatgaaagtctggtctttgactattacaactctgtgcttattaatgagcgcgatgagaagggtaattttgtcgaactgggagctgaattcctcctggagtctaacgcccacttttctaatctccccgtgaacacatctatttcgtccgtgcagctgcccactaatgtgtacaataaggatccagatatattgaacggcgtttatatgtcagaagcactcaacgctgtcttcgttgaaaatttccagagggaccccacgctaacctggcaatacttcggttctgcgacaggtttcttcagaatttaccccggcattaagtggacgcccgacgaaaacggggtaattacgttcgactgcaggaacagggggtggtacatccaggctgccacgtccccaaaggatatcgtgattctagtggatgtaagcggtagcatgaaagggcttcgaatgacgatagcaaagcatacaataaccaccattctggatactctgggtgagaacgattttattaacattatagcctacaacgactacgtccactatatcgaaccatgcttcaagggaatcctcgtgcaagcagaccgagataaccgggagcatttcaaactcctcgtggaggagctcatggtgaagggtgtcggcgttgtggatcaagctttgagggaagcctttcagattctgaagcagtttcaggaagctaagcaaggaagtttgtgtaatcaggccatcatgctaattagcgacggcgcagtggaagattatgagcctgtcttcgagaaatacaattggcccgattgtaaagtgagggtgtttacatacctgatcggacgcgaggtgtcctttgccgatagaatgaaatggatcgcttgtaacaataagggttattacactcaaatctccactttggctgatacccaggagaatgtcatggagtacctgcacgtcctgagccgaccgatggttattaaccacgaccacgatatcatttggaccgaagcttacatggactccaaactcctctctagtcaggcgcagagcttaaccttgttaactacagtggctatgcccgttttttccaagaagaacgagactcgttcccatggaatccttcttggggtcgtgggttcagatgtggccctgcgagaattgatgaaattggctccccgctacaagcttggcgtgcatggatatgccttcttgaataccaacaatggctacatactgtcccatcccgacctgcgccctctgtatcgtgaaggaaaaaaacttaagccgaagcccaattataactcagtagacttgtccgaggtagaatgggaagatcaggcagagtccttgcgtacagccatgattaatcgggagaccggcaccctgtcaatggacgtcaaagtcccgatggataaaggaaaacgcgtactgttcctgaccaacgactacttctttaccgatatcagcgatactccattcagtctcggagtagtgctttcgcgggggcacggagagtatattctactgggaaatacctctgttgaagagggactgcacgatctgctccatcccgatctggccctcgccggggactggatatattgtataactgacatagatcctgaccacagaaaactatcacagctcgaagccatgattcgctttctaacccgtaaagatcccgatttagagtgtgacgaggagctcgtgcgcgaagtactgttcgatgcggtggttacagctcctatggaagcttattggacagcacttgccctgaatatgtctgaggagagcgaacacgttgtggacatggcatttctcgggactcgggctgggttactgaggtcttctctgttcgttgggtccgaaaaggtaagcgatcgcaaatttctcaccccagaagatgaagcctctgtgtttaccctagatcgtttccccctgtggtatcggcaggcgtcagaacacccagccggcagtttcgtcttcaacctcaggtgggcagagggtcccgagagcgccggggaaccaatggttgtgactgccagtacagctgttgccgtgacggtagataaacgaacagcaattgcggcagccgctggtgtgcagatgaagctggagttcctacagaggaagttctgggcagccaccagacagtgttctactgtcgacggcccctgtacacagagctgtgaagacagcgatctggattgcttcgttatcgacaataatggctttattctcatctcaaaacgatctcgtgagacgggacgattcttaggagaagtagatggggcagttctcacacaactgctgtcgatgggagttttttcccaagtaacaatgtatgattatcaggcaatgtgtaagcccagctcacatcatcacagcgccgcacagcccctggtgagtcccatcagtgctttcctgactgcgacaagatggctcctgcaggaacttgtactgtag

SEQ ID NO: 249362 - DNA, 3414 bp, Artificial Sequence
  derived and/or modified sequence
atggtatgcgggtgctctgctttgttgcccctgcccaatccccgaccaactatgcccgccaccccaaatttccttgcaaatcctagctcttcctcacgttggattcctctgcagcctatgccagtcgcctgggcatttgtgcagaaaacgtctgcactgctatggctgctcctgttgggaacaagtctgtctcctgcttggggccaggccaagatccctctggaaactgtcaagctgtgggcagacacctttggaggcgatctgtacaacacggtcaccaagtactccggctcgctgctgctgcagaagaaatacaaggatgtggagtccagcttgaagattgaagaagtggatgggctcgaactagtccggaagttcagtgaagatatggaaaatatgctccgacgcaaagtggaggccgtccagaatctcgtggaggctgccgaggaggcagacctcaatcacgaatttaatgaatcattggtgttcgactactataatagcgttctgataaatgaacgggatgagaaagggaactttgtcgagctgggcgccgaatttctcctggaatccaacgcgcatttcagcaacttgcctgtaaacacctccatatcctcagttcagcttcctaccaatgtgtacaataaagacccagatatcctaaacggcgtgtacatgtccgaagctctgaacgctgtgttcgtagagaattttcaacgagatcccaccctgacatggcagtactttggttcagctaccgggttctttagaatatatcccggcataaagtggactcccgacgaaaacggtgttattacattcgattgcagaaaccgaggctggtacattcaggctgccacttctccaaaagacatcgtgatcctggtggatgtaagcggaagcatgaaaggtctgcgtatgaccatcgccaagcacacgattactaccattctggacacactgggggagaacgatttcattaacattattgcatacaatgattacgttcactatattgaaccctgcttcaagggcatacttgttcaggcagaccgtgataaccgcgaacattttaaactccttgtagaggaattgatggtcaaaggagttggggtggtggaccaggctctgcgggaagcattccagattctgaagcagtttcaggaagccaagcagggctcactttgcaaccaagctattatgctgatatcggacggcgcggtggaagactacgaacccgtgtttgagaagtacaactggcctgactgtaaggttagggtgttcacatatctaattggacgggaggtttcattcgccgatcggatgaagtggattgcgtgtaataacaagggctactatactcaaatctcgactcttgccgacacccaagagaatgtaatggagtacctccacgtgctaagcagaccgatggtcatcaaccacgaccatgatattatttggacagaagcttatatggacagcaagcttctctccagtcaggcccaatccctcacactactgactaccgtggccatgccggtgtttagtaagaagaatgagaccagaagccatggcatcttgttaggcgtggtgggaagtgatgtggccttgcgagagcttatgaagttagccccaagatacaagctcggggtccacgggtacgcttttctgaatacgaacaacggttatatactgtctcatcccgatctaagacctttataccgggaggggaagaaactaaaaccaaaaccgaactacaacagcgtggacctgtctgaagttgaatgggaagaccaagctgagtctctcagaacagcgatgatcaatcgcgagactggcactctgtcaatggatgtgaaggtccctatggataaaggaaagagggtgctattcctgacgaacgactacttttttactgacatctctgataccccatttagtctgggagtggtgctatcaaggggccacggagaatatatactcctaggtaatacttccgtggaagagggactgcacgatctgcttcatcctgatcttgccctggccggtgattggatatactgtatcacagatatagatcccgatcataggaaactgtctcagttggaggcgatgattaggtttctgactaggaaggacccagacttggagtgcgacgaggaactcgtcagagaagtgctgttcgatgcagtggtgaccgcccctatggaggcctattggacggccttggcccttaatatgagcgaagaatcagaacatgtagtcgacatggcatttctggggacacgtgctgggctgctacggtctagcctattcgtgggaagtgaaaaagtgtcggatcggaagttccttacgcctgaagatgaagcaagtgtgttcacactggacaggttccctctgtggtacagacaggctagtgaacatccggcgggttcatttgtctttaatcttaggtgggcggaaggtccagagagtgcaggggagcctatggttgtgactgcttcaacagccgtcgccgttaccgtcgataagcgaactgcaatcgccgctgctgcaggtgtgcagatgaagctggaattcttacagagaaagttttgggctgctacacggcaatgctctactgtcgatggcccctgtacacagtcatgcgaggattcggaccttgattgtttcgtcattgataacaatggtttcatcctgatctcaaagcgcagccgggagaccggaaggtttctgggcgaggttgatggtgccgtcctgacccagctgctgagcatgggagtcttctcccaggttaccatgtatgactaccaggccatgtgcaagccaagctctcatcatcatagcgccgctcagccgctggttagtccaatttctgcctttcttacagctacacggtggctgctgcaggagttagtcctgttcttgctcgagtggtctgtttggggctcctggtatgatcgtggcgctgaagccaagtcggtctttcatcactcccacaaacataagaagcaggaccctctgcagccgtgcgatactgaatacccagttttcgtgtaccagcccgccatccgggaggccaatggcattgtggagtgcggaccatgtcagaaggtcttcgtggtccagcaaatacctaacagcaatctgctgttactagtcaccgaccccacctgcgactgtagcatctttccgccggtgctacaggaagcgacagaagtcaaatacaatgccagcgtgaagtgcgacagaatgcggagtcagaagctgcggcgcagacccgatagttgtcatgctttccatcccgaagaaaacgcacaggactgcgggggggcctccgataccagtgccagtcccccattgctgctgctgcccgtgtgtgcctggggcctgctgcctcaactcctgcggtag

SEQ ID NO: 249363 - DNA, 3222 bp, Artificial Sequence
  derived and/or modified sequence
atggcggtggctctgggcaccaggaggagagacagagtcaagctctgggcggacacgtttggtggagacttatataacacggtcaccaagtactccgggagcttactgctacaaaagaagtacaaagatgtggaaagtagcttgaagattgaagaggtggacggactcgagctggtgcgaaaattttctgaggacatggaaaacatgctgaggcggaaggtggaagctgtacaaaacctggtggaggccgctgaggaggccgaccttaaccacgagtttaacgaaagtctggtgtttgattactacaattcagtattgattaatgagcgtgatgagaaaggaaactttgtggagctgggtgctgagttcctgttagaatccaatgcccacttctcaaacttgccagtgaataccagcatcagcagtgtccaactgccaacgaacgtttacaacaaagatcccgatattctgaacggagtctacatgtcagaagccctcaacgccgtatttgtcgagaacttccagcgggaccccaccctgacctggcaatatttcggctcagcaacaggattttttcgcatctatccaggcattaaatggaccccagatgagaacggagtgattaccttcgattgcaggaaccggggatggtatattcaggccgctacttcaccaaaggatatcgtaattctggtcgacgtgtccggcagtatgaagggtttgcgcatgacgatcgcgaagcacactattactaccattctggatacattgggtgaaaacgacttcataaatatcatcgcctataatgactatgtgcactacatcgagccatgctttaaaggaatcctggtccaggccgaccgtgacaatcgcgagcactttaagttactggtggaagagctgatggtcaagggggtgggggtggtggaccaggccttgcgggaggccttccagatcctgaagcagttccaagaggccaaacagggctctctgtgcaaccaggctattatgctgatcagcgacggagccgtcgaagactatgagcctgtattcgaaaagtataactggcccgattgtaaagtgagagtattcacttacctaattgggagagaagtctcctttgcagacaggatgaagtggatcgcttgtaataacaaaggatactacacccaaatctctactttagctgatacacaggagaacgtgatggagtacctccacgttctgtctcggccaatggtcatcaaccatgatcatgacattatctggactgaagcatacatggatagcaagttattgtcatcacaggcccagtctttgacgttactcactactgtagccatgcctgttttctctaaaaaaaacgagacacgctcgcacgggatcctgctgggagtggtagggtctgatgtcgccctcagggaattgatgaaattggccccacgctacaagctaggagtgcatgggtacgctttcctgaacactaacaatggctacattctgagtcatccagatctgcgacctctttacagagagggtaagaagcttaaaccaaaacctaactataattcagtcgatcttagcgaggtggagtgggaggatcaggcggagagcctgcggacagccatgattaatcgtgagactggaactctctccatggacgttaaggtccctatggacaaaggtaagcgggtactctttctgacgaacgactattttttcacagacatttccgacacccccttctccctgggagtggtgctgtcccgcgggcacggggaatacattctgctcggcaatacctctgtcgaagagggactgcacgatctcctgcatcctgatctggccttggcgggagactggatttactgtattactgatattgatccggatcatcggaagctttcacagctggaggctatgatccggttcttgactagaaaagatcctgatctggagtgcgacgaggagcttgtgagagaggttttattcgacgcagtagtcacagccccgatggaggcctattggaccgcactcgcgcttaacatgtctgaggaatcagagcacgtcgttgatatggccttcctaggcacccgggccgggctactccgatctagcttgttcgtgggttccgagaaagtatcagaccgcaaattcctcactccagaagatgaagcctcagttttcacacttgatcgcttcccgctgtggtaccgtcaggcaagcgagcacccagcaggctcattcgtattcaacctgaggtgggccgagggtccagagtccgccggcgagcctatggtagtgaccgcaagtacagcagtcgcggtcacggtggacaagagaacagcgatcgcagccgccgccggcgtgcagatgaaactcgaattcctccaaagaaagttttgggcagctaccagacagtgctcaaccgttgatggtccgtgtacacagagctgtgaggactccgatcttgattgcttcgtaattgataataatggttttatcctcatctccaagagatctcgcgaaaccggtcgctttttaggagaggttgacggagctgtcttgacccagctgttgtccatgggagtgttctctcaggttaccatgtatgattaccaggccatgtgcaaaccttcgagccaccaccattctgccgcccaacccttagtctctccaattagtgcctttctgacagccacgagatggcttctccaggagctggtgttattcttgctggaatggtcagtttggggctcctggtacgataggggggcggaggccaaaagtgtctttcatcattcccacaaacataagaaacaggatccactccagccttgtgataccgagtatcccgtgttcgtatatcaacccgccattcgcgaggcaaatggcatcgtggagtgtggtccgtgccagaaggtgttcgttgtgcagcagatacccaactctaatctgctgctactggtgactgacccaacatgtgattgcagcatctttccacccgttttacaggaggcaaccgaggtcaagtataatgcctcagtgaagtgcgatcgcatgagatcccaaaaactgcgcagaaggcctgactcatgccatgccttccaccccgaggaaaacgctcaagactgcggcggagcctctgatacctctgctagccctcccctgctgctcctcccagtttgcgcctggggtcttttgccgcagttgctgcgctag

SEQ ID NO: 249364 - DNA, 615 bp, Artificial Sequence
  derived and/or modified sequence
atgtatgattatcaggctatgtgcaaaccatcctcgcatcaccactctgcagcacagcccctggtctccccaatcagtgcctttctcaccgctaccaggtggttgcttcaggaactcgttctcttcctgctggaatggtccgtgtggggatcttggtacgacagaggcgcagaggccaagtctgtttttcaccattcacataagcacaaaaagcaggacccactgcagccctgcgacacagagtatcctgtgttcgtctaccagccagccatccgggaagcaaacgggatagtcgagtgcgggccttgtcagaaggtattcgttgtccagcagattcctaattctaatttgctgctattagtgacagatccgacctgcgattgctcaatttttccccctgtgctccaggaggctaccgaggtcaaatacaatgcgtctgtgaagtgcgatcgaatgcgctcgcagaagctgcgaaggcggcccgattcttgccacgctttccaccccgaagagaacgcgcaggattgcgggggcgccagtgacacatccgcctctcctcctcttctgttactgcccgtttgcgcatggggactgctgccacaacttctgcggtag

SEQ ID NO: 249365 - DNA, 615 bp, Artificial Sequence
  derived and/or modified sequence
atgtatgattaccaggccatgtgcaagccctccagccaccaccatagtgctgcccagcccctggttagtcctatttcagcattcctgaccgctaccagatggctgttgcaagaattggtgctgttcctgctggagtggagtgtgtggggcagttggtacgacagaggagccgaagcgaaatctgtgttccaccattctcacaagcacaagaagcaggaccccctccagccatgtgacaccgaatacccagtcttcgtgtatcaacccgcaatccgcgaggctaacggcatagtggaatgtggaccttgtcagaaagtgtttgtggtccagcagatccccaactctaacctcctcctgctagtgaccgatccaacgtgcgactgtagcatttttccccccgtcctgcaggaagctacggaagtcaagtataatgcctcagtgaaatgtgatcggatgcggtcccagaaattaagaaggaggcccgattcttgccatgcctttcatccggaagagaacgctcaagattgtggcggcgcaagtgacacaagcgcaagcccaccactcctcctactgccagtatgtgcctggggtctgcttccccaactgctcaggtag

SEQ ID NO: 249366 - DNA, 804 bp, Artificial Sequence
  derived and/or modified sequence
atgaaacttgagttcctccagcgcaagttctgggctgctacccggcaagatctagattgcttcgtaatcgataataatggctttatcctgataagtaagcggtcgagggagaccggtcgatttctcggtgaggtggatggtgcggtattaacgcaactgctgagtatgggtgtgttctcgcaagttaccatgtacgactaccaggccatgtgcaaaccgtcttcacatcaccactcagccgctcagccattggtatcccctatctcagcattcctgaccgccactcgatggcttctgcaggagttagtgctcttcctactggagtggtcggtctggggcagttggtacgatcggggcgcagaagctaaaagtgtattccaccacagccataaacataaaaagcaggaccctctgcagccttgtgacaccgagtacccggtattcgtgtaccagcccgccatcagggaggcaaatggtatcgtcgagtgcggcccctgccagaaggtgtttgtggtgcaacagatcccaaattctaacctgctcctgttggttaccgacccaacgtgcgactgcagtatctttcctccagtgttacaagaggccacagaagtcaagtacaacgccagcgtgaagtgcgaccgaatgaggagccagaaactgagaaggcgcccagattcttgtcacgcgttccacccagaagagaacgcacaagattgtgggggtgcttcagatacaagcgctagtcccccactgctactcctccctgtgtgtgcctgggggctgctgccgcaattgctcaggtag

SEQ ID NO: 249367 - DNA, 615 bp, Artificial Sequence
  derived and/or modified sequence
atgtacgattaccaagcgatgtgcaaaccgagcagtcaccatcactccgccgcacagcccttggtatctccgatatcagccttcctgactgccacaaggtggctgctgcaggaactggtgctgtttctcctggaatggagcgtgtgggggagctggtacgacaggggagctgaggccaaaagtgtttttcaccatagccataagcataagaaacaagaccctctccagccatgcgacactgaataccctgtgtttgtgtaccagcccgcaatacgcgaggcgaatgggatagttgaatgcggcccctgccaaaaggtcttcgtagtccaacagatccccaatagtaatctcctgctactggtgactgaccccacctgcgactgcagcatttttccgccggttctgcaagaggccactgaggtgaaatataacgcctccgtgaagtgcgacagaatgcgctcacaaaaactaagaaggcgaccggactcgtgtcacgcctttcacccggaagagaacgcccaggattgcgggggcgcctctgatacatctgcatcccctccactgctactactgcccgtctgtgcctggggcctccttcctcagcttctgaggtag

SEQ ID NO: 249368 - DNA, 2925 bp, Artificial Sequence
  derived and/or modified sequence
atggtgtgtggctgcagcgccctgctgcccctgcccaacccccggcccaccatgcctgccacccccaacttcctggccaaccccagcagcagcagccgctggatccccctgcagcccatgcctgtggcctgggcctttgtgcagaagaccagcgccctgctgtggctgctgctgctgggcaccagcctgagccctgcctggggccaggccaagatccccctggagaccgtgaagctgtgggccgacaccttcggcggggacctgtacaacacagtgaccaagtacagcggcagcctgctgctgcagaagaagtacaaggatgtggagagcagcctgaagattgaggaggtggatggcctggagctggtgaggaagttcagcgaggacatggagaacatgctgcggaggaaggtggaggccgtgcagaacctggtggaggccgctgaggaggccgacctgaaccacgagttcaatgaaagcctggtgtttgactactacaacagcgtgctgatcaatgaaagagatgagaagggcaactttgtggagctgggcgctgagttcctgctggagagcaatgcccacttcagcaacctgcctgtgaacaccagcatcagctctgtgcagctgcccaccaacgtgtacaacaaggaccctgacatcctgaatggagtgtacatgtctgaggccctgaatgctgtgtttgtggagaacttccagagggaccccaccctgacctggcagtactttggaagtgccaccggcttcttccgcatctacccaggcatcaagtggaccccagatgaaaatggagtcatcacctttgactgcaggaacagaggctggtacatccaggccgccaccagccccaaggacatcgtcatcctggtggatgtgtctggctccatgaagggcctgaggatgaccatcgccaagcacaccatcaccaccatcctggacaccctgggagaaaatgacttcatcaacatcatcgcctacaatgactatgtgcactacatcgagccctgcttcaagggcatcctggtgcaggccgaccgggacaaccgggagcacttcaagctgctggtggaggagctgatggtgaagggcgtgggcgtggtggaccaggccctgcgggaggccttccagatcctgaagcagttccaggaggccaagcagggcagcctgtgcaaccaggccatcatgctgatcagtgatggagctgtggaggactatgagcctgtgtttgagaagtacaactggccagactgcaaggtgcgggtcttcacctacctgattggccgggaggtgtcctttgctgacaggatgaagtggatcgcctgcaacaacaagggctactacacccagatcagcaccctggccgacacccaggagaatgtgatggagtacctgcacgtgctgagccggcccatggtgatcaaccacgaccatgacatcatctggacagaggcctacatggacagcaagctgctgagcagccaggcccagagcctgaccctgctgaccaccgtggccatgcctgtgttcagcaagaagaatgagaccaggagccacggcatcctgctgggcgtggtgggcagtgatgtggccctgcgggagctgatgaagctggccccccgctacaagctgggcgtgcacggctacgccttcctgaacaccaacaacggctacatcctgagccacccagacctgcggcccctgtaccgggagggcaagaagctgaagcccaagcccaactacaacagcgtggacctgtctgaggtggagtgggaggaccaggccgagagcctgaggacagccatgatcaaccgggagaccggcaccctgtccatggatgtgaaggtgcccatggacaagggcaagagggtgctcttcctgaccaatgactacttcttcacagacatcagtgacacccccttcagcctgggcgtggtgctgagccggggccacggggagtacatcctgctgggcaacacctctgtggaggagggcctgcatgacctgctgcacccagacctggccctggccggggactggatctactgcatcacagacatcgaccctgaccacaggaagctgagccagctggaggccatgatccgcttcctgaccaggaaggaccctgacctggagtgtgatgaggagctggtgcgggaggtgctgtttgatgctgtggtgacagcccccatggaggcctactggacagccctggccctgaacatgtctgaggagagcgagcacgtggtggacatggccttcctgggcacccgggccggcctgctgcggagcagcctgtttgtgggcagcgagaaggtgtctgacaggaagttcctgaccccagaagatgaggcctctgtgttcaccctggaccgcttccccctgtggtaccggcaggccagcgagcaccctgctggcagctttgtgttcaacctgcgctgggccgagggccctgagagcgctggggagcccatggtggtgacagccagcacagctgtggccgtgacagtggacaagaggacagccatcgctgctgctgctggggtgcagatgaagctggagttcctgcagaggaagttctgggccgccacccggcagtgcagcacagtggatggcccctgcacccagagctgtgaggacagcgacctggactgctttgtgattgacaacaacggcttcatcctgatcagcaagaggagccgggagaccggccgcttcctgggggaggtggatggagctgtgctgacccagctgctgtccatgggcgtcttcagccaggtgaccatgtatgactaccaggccatgtgcaagcccagcagccaccaccacagcgctgcccagcccctggtgagccccatcagcgccttcctgacagccacccgctggctgctgcaggagctggtgctgtag

SEQ ID NO: 249369 - DNA, 3414 bp, Artificial Sequence
  derived and/or modified sequence
atggtgtgtggctgcagcgccctgctgcccctgcccaacccccggcccaccatgcctgccacccccaacttcctggccaaccccagcagcagcagccgctggatccccctgcagcccatgcctgtggcctgggcctttgtgcagaagaccagcgccctgctgtggctgctgctgctgggcaccagcctgagccctgcctggggccaggccaagatccccctggagaccgtgaagctgtgggccgacaccttcggcggggacctgtacaacacagtgaccaagtacagcggcagcctgctgctgcagaagaagtacaaggatgtggagagcagcctgaagattgaggaggtggatggcctggagctggtgaggaagttcagcgaggacatggagaacatgctgcggaggaaggtggaggccgtgcagaacctggtggaggccgctgaggaggccgacctgaaccacgagttcaatgaaagcctggtgtttgactactacaacagcgtgctgatcaatgaaagagatgagaagggcaactttgtggagctgggcgctgagttcctgctggagagcaatgcccacttcagcaacctgcctgtgaacaccagcatcagctctgtgcagctgcccaccaacgtgtacaacaaggaccctgacatcctgaatggagtgtacatgtctgaggccctgaatgctgtgtttgtggagaacttccagagggaccccaccctgacctggcagtactttggaagtgccaccggcttcttccgcatctacccaggcatcaagtggaccccagatgaaaatggagtcatcacctttgactgcaggaacagaggctggtacatccaggccgccaccagccccaaggacatcgtcatcctggtggatgtgtctggctccatgaagggcctgaggatgaccatcgccaagcacaccatcaccaccatcctggacaccctgggagaaaatgacttcatcaacatcatcgcctacaatgactatgtgcactacatcgagccctgcttcaagggcatcctggtgcaggccgaccgggacaaccgggagcacttcaagctgctggtggaggagctgatggtgaagggcgtgggcgtggtggaccaggccctgcgggaggccttccagatcctgaagcagttccaggaggccaagcagggcagcctgtgcaaccaggccatcatgctgatcagtgatggagctgtggaggactatgagcctgtgtttgagaagtacaactggccagactgcaaggtgcgggtcttcacctacctgattggccgggaggtgtcctttgctgacaggatgaagtggatcgcctgcaacaacaagggctactacacccagatcagcaccctggccgacacccaggagaatgtgatggagtacctgcacgtgctgagccggcccatggtgatcaaccacgaccatgacatcatctggacagaggcctacatggacagcaagctgctgagcagccaggcccagagcctgaccctgctgaccaccgtggccatgcctgtgttcagcaagaagaatgagaccaggagccacggcatcctgctgggcgtggtgggcagtgatgtggccctgcgggagctgatgaagctggccccccgctacaagctgggcgtgcacggctacgccttcctgaacaccaacaacggctacatcctgagccacccagacctgcggcccctgtaccgggagggcaagaagctgaagcccaagcccaactacaacagcgtggacctgtctgaggtggagtgggaggaccaggccgagagcctgaggacagccatgatcaaccgggagaccggcaccctgtccatggatgtgaaggtgcccatggacaagggcaagagggtgctcttcctgaccaatgactacttcttcacagacatcagtgacacccccttcagcctgggcgtggtgctgagccggggccacggggagtacatcctgctgggcaacacctctgtggaggagggcctgcatgacctgctgcacccagacctggccctggccggggactggatctactgcatcacagacatcgaccctgaccacaggaagctgagccagctggaggccatgatccgcttcctgaccaggaaggaccctgacctggagtgtgatgaggagctggtgcgggaggtgctgtttgatgctgtggtgacagcccccatggaggcctactggacagccctggccctgaacatgtctgaggagagcgagcacgtggtggacatggccttcctgggcacccgggccggcctgctgcggagcagcctgtttgtgggcagcgagaaggtgtctgacaggaagttcctgaccccagaagatgaggcctctgtgttcaccctggaccgcttccccctgtggtaccggcaggccagcgagcaccctgctggcagctttgtgttcaacctgcgctgggccgagggccctgagagcgctggggagcccatggtggtgacagccagcacagctgtggccgtgacagtggacaagaggacagccatcgctgctgctgctggggtgcagatgaagctggagttcctgcagaggaagttctgggccgccacccggcagtgcagcacagtggatggcccctgcacccagagctgtgaggacagcgacctggactgctttgtgattgacaacaacggcttcatcctgatcagcaagaggagccgggagaccggccgcttcctgggggaggtggatggagctgtgctgacccagctgctgtccatgggcgtcttcagccaggtgaccatgtatgactaccaggccatgtgcaagcccagcagccaccaccacagcgctgcccagcccctggtgagccccatcagcgccttcctgacagccacccgctggctgctgcaggagctggtgctcttcctgctggagtggagcgtgtggggctcctggtatgacagaggagctgaggccaagagcgtcttccaccacagccacaagcacaagaagcaggaccccctgcagccctgtgacacagagtaccctgtgtttgtgtaccagcctgccatccgggaggccaacggcatcgtggagtgtggcccctgccagaaggtgtttgtggtgcagcagatccccaacagcaacctgctgctgctggtgacagaccccacctgtgactgcagcatcttcccccctgtgctgcaggaggccacagaggtgaagtacaatgcctctgtgaagtgtgacaggatgaggagccagaagctgcggcggcggccagacagctgccacgccttccaccctgaggagaatgcccaggactgtggcggggccagtgacaccagcgccagcccccccctgctgctgctgcctgtgtgtgcctggggcctgctgccccagctgctgaggtag

SEQ ID NO: 249370 - DNA, 3222 bp, Artificial Sequence
  derived and/or modified sequence
atggctgtggccctgggcaccaggagaagagacagagtgaagctgtgggccgacaccttcggcggggacctgtacaacacagtgaccaagtacagcggcagcctgctgctgcagaagaagtacaaggatgtggagagcagcctgaagattgaggaggtggatggcctggagctggtgaggaagttcagcgaggacatggagaacatgctgcggaggaaggtggaggccgtgcagaacctggtggaggccgctgaggaggccgacctgaaccacgagttcaatgaaagcctggtgtttgactactacaacagcgtgctgatcaatgaaagagatgagaagggcaactttgtggagctgggcgctgagttcctgctggagagcaatgcccacttcagcaacctgcctgtgaacaccagcatcagctctgtgcagctgcccaccaacgtgtacaacaaggaccctgacatcctgaatggagtgtacatgtctgaggccctgaatgctgtgtttgtggagaacttccagagggaccccaccctgacctggcagtactttggaagtgccaccggcttcttccgcatctacccaggcatcaagtggaccccagatgaaaatggagtcatcacctttgactgcaggaacagaggctggtacatccaggccgccaccagccccaaggacatcgtcatcctggtggatgtgtctggctccatgaagggcctgaggatgaccatcgccaagcacaccatcaccaccatcctggacaccctgggagaaaatgacttcatcaacatcatcgcctacaatgactatgtgcactacatcgagccctgcttcaagggcatcctggtgcaggccgaccgggacaaccgggagcacttcaagctgctggtggaggagctgatggtgaagggcgtgggcgtggtggaccaggccctgcgggaggccttccagatcctgaagcagttccaggaggccaagcagggcagcctgtgcaaccaggccatcatgctgatcagtgatggagctgtggaggactatgagcctgtgtttgagaagtacaactggccagactgcaaggtgcgggtcttcacctacctgattggccgggaggtgtcctttgctgacaggatgaagtggatcgcctgcaacaacaagggctactacacccagatcagcaccctggccgacacccaggagaatgtgatggagtacctgcacgtgctgagccggcccatggtgatcaaccacgaccatgacatcatctggacagaggcctacatggacagcaagctgctgagcagccaggcccagagcctgaccctgctgaccaccgtggccatgcctgtgttcagcaagaagaatgagaccaggagccacggcatcctgctgggcgtggtgggcagtgatgtggccctgcgggagctgatgaagctggccccccgctacaagctgggcgtgcacggctacgccttcctgaacaccaacaacggctacatcctgagccacccagacctgcggcccctgtaccgggagggcaagaagctgaagcccaagcccaactacaacagcgtggacctgtctgaggtggagtgggaggaccaggccgagagcctgaggacagccatgatcaaccgggagaccggcaccctgtccatggatgtgaaggtgcccatggacaagggcaagagggtgctcttcctgaccaatgactacttcttcacagacatcagtgacacccccttcagcctgggcgtggtgctgagccggggccacggggagtacatcctgctgggcaacacctctgtggaggagggcctgcatgacctgctgcacccagacctggccctggccggggactggatctactgcatcacagacatcgaccctgaccacaggaagctgagccagctggaggccatgatccgcttcctgaccaggaaggaccctgacctggagtgtgatgaggagctggtgcgggaggtgctgtttgatgctgtggtgacagcccccatggaggcctactggacagccctggccctgaacatgtctgaggagagcgagcacgtggtggacatggccttcctgggcacccgggccggcctgctgcggagcagcctgtttgtgggcagcgagaaggtgtctgacaggaagttcctgaccccagaagatgaggcctctgtgttcaccctggaccgcttccccctgtggtaccggcaggccagcgagcaccctgctggcagctttgtgttcaacctgcgctgggccgagggccctgagagcgctggggagcccatggtggtgacagccagcacagctgtggccgtgacagtggacaagaggacagccatcgctgctgctgctggggtgcagatgaagctggagttcctgcagaggaagttctgggccgccacccggcagtgcagcacagtggatggcccctgcacccagagctgtgaggacagcgacctggactgctttgtgattgacaacaacggcttcatcctgatcagcaagaggagccgggagaccggccgcttcctgggggaggtggatggagctgtgctgacccagctgctgtccatgggcgtcttcagccaggtgaccatgtatgactaccaggccatgtgcaagcccagcagccaccaccacagcgctgcccagcccctggtgagccccatcagcgccttcctgacagccacccgctggctgctgcaggagctggtgctcttcctgctggagtggagcgtgtggggctcctggtatgacagaggagctgaggccaagagcgtcttccaccacagccacaagcacaagaagcaggaccccctgcagccctgtgacacagagtaccctgtgtttgtgtaccagcctgccatccgggaggccaacggcatcgtggagtgtggcccctgccagaaggtgtttgtggtgcagcagatccccaacagcaacctgctgctgctggtgacagaccccacctgtgactgcagcatcttcccccctgtgctgcaggaggccacagaggtgaagtacaatgcctctgtgaagtgtgacaggatgaggagccagaagctgcggcggcggccagacagctgccacgccttccaccctgaggagaatgcccaggactgtggcggggccagtgacaccagcgccagcccccccctgctgctgctgcctgtgtgtgcctggggcctgctgccccagctgctgaggtag

SEQ ID NO: 249371 - DNA, 615 bp, Artificial Sequence
  derived and/or modified sequence
atgtatgactaccaggccatgtgcaagcccagcagccaccaccacagcgctgcccagcccctggtgagccccatcagcgccttcctgacagccacccgctggctgctgcaggagctggtgctcttcctgctggagtggagcgtgtggggctcctggtatgacagaggagctgaggccaagtctgtgttccaccacagccacaagcacaagaagcaggaccccctgcagccctgtgacacagagtaccctgtgtttgtgtaccagcctgccatccgggaggccaatggaattgtggagtgtggcccctgccagaaggtgtttgtggtgcagcagatccccaacagcaacctgctgctgctggtgacagaccccacctgtgactgcagcatcttcccccctgtgctgcaggaggccacagaggtgaagtacaatgcctctgtgaagtgtgacaggatgaggagccagaagctgcggcggcggccagacagctgccacgccttccacccagaagaaaatgcccaggactgtggcggggccagtgacaccagcgccagcccccccctgctgctgctgcctgtgtgtgcctggggcctgctgccccagctgctgaggtag

SEQ ID NO: 249372 - DNA, 804 bp, Artificial Sequence
  derived and/or modified sequence
atgaagctggagttcctgcagaggaagttctgggccgccacccggcaggacctggactgctttgtgattgacaacaacggcttcatcctgatcagcaagaggagccgggagaccggccgcttcctgggggaggtggatggagctgtgctgacccagctgctgtccatgggcgtcttcagccaggtgaccatgtatgactaccaggccatgtgcaagcccagcagccaccaccacagcgctgcccagcccctggtgagccccatcagcgccttcctgacagccacccgctggctgctgcaggagctggtgctcttcctgctggagtggagcgtgtggggctcctggtatgacagaggagctgaggccaagagcgtcttccaccacagccacaagcacaagaagcaggaccccctgcagccctgtgacacagagtaccctgtgtttgtgtaccagcctgccatccgggaggccaacggcatcgtggagtgtggcccctgccagaaggtgtttgtggtgcagcagatccccaacagcaacctgctgctgctggtgacagaccccacctgtgactgcagcatcttcccccctgtgctgcaggaggccacagaggtgaagtacaatgcctctgtgaagtgtgacaggatgaggagccagaagctgcggcggcggccagacagctgccacgccttccaccctgaggagaatgcccaggactgtggcggggccagtgacaccagcgccagcccccccctgctgctgctgcctgtgtgtgcctggggcctgctgccccagctgctgaggtag

SEQ ID NO: 249373 - DNA, 2925 bp, Artificial Sequence
  derived and/or modified sequence
atggtgtgcggctgcagcgccctgctgcccctgcccaacccccggcccaccatgccagctacacctaacttcctggctaatcctagctcctcttccaggtggattcccttacagccaatgccggtcgcctgggcctttgttcagaagaccagtgctctgctgtggctcctgctgctgggtacttccctgagccctgcctggggtcaggcgaagatacctctcgagactgtgaagttgtgggcagatacgttcggaggagatctttacaataccgtgaccaaatattcaggctcattgctgctccagaagaaatacaaggatgtggagtcctctttaaagattgaagaggttgacggacttgagcttgtcaggaagttctccgaagacatggagaatatgctgcgtaggaaagtagaagccgtgcagaacctggtggaagccgcagaagaagctgatttaaaccatgagttcaacgagtctctggtgttcgattactacaattctgttctgatcaacgagcgtgatgagaagggcaatttcgtggagcttggcgccgagttcctgctcgagagcaatgcccatttctccaatctgcctgtaaatacttcaatctcctcagtgcaattaccgacgaatgtgtacaacaaggacccggatattctgaacggcgtctatatgtcagaagcactgaacgctgtgtttgtggagaactttcagagggatccaacacttacgtggcagtattttgggagcgcaacagggtttttcagaatctatcccgggattaagtggacacctgacgagaacggggtgatcacatttgattgcaggaacagagggtggtacattcaggccgctaccagccctaaagacatcgtcattttggtcgacgtctcagggagtatgaagggactgagaatgacaattgccaagcataccataactactattctagacaccttaggagaaaacgactttattaatattatcgcctataacgactatgtgcactacatcgagccctgcttcaaaggaatcctcgtgcaggctgaccgcgacaatagggagcactttaagctcctggtagaggaattaatggtcaaaggcgtgggggtggtggaccaagctctcagggaggcctttcaaatactcaaacaattccaggaggctaagcagggaagcctctgtaaccaggcaattatgttaatctccgacggggcagtggaggactacgagcccgtatttgaaaaatataactggcccgattgcaaggtgcgggtgttcacatatcttatcggacgagaagttagttttgctgataggatgaaatggatcgcttgtaataacaagggatattacacccaaattagtaccctggctgacactcaggagaacgttatggagtatctccacgttctgagtcgccccatggtaatcaaccacgatcacgacattatctggacagaggcctacatggattccaagctgctgagctctcaggcccagtccctgacccttttgactacagttgccatgccagttttctccaaaaaaaatgaaacacgcagccacggaattctgctgggcgtggttgggtcagatgtggccttgcgggaattgatgaagctcgccccgcgttacaagctgggggttcatggctacgcttttcttaacacaaataacgggtatattctgtcccatcctgatctgcggcctttatatcgcgaagggaagaagctgaagcctaaacctaactataactctgttgatctgtctgaggtggagtgggaggatcaggccgagtctttgagaacagccatgatcaatagagaaacgggcactctgagcatggatgtcaaagtgcccatggataaaggtaagagagtgttgttcctgacgaacgattacttctttactgatatcagcgatactcccttctctctgggcgtggttctctcacgagggcatggggaatatattctcctggggaatacctcggtggaagaagggctgcacgatctattacaccccgatctagcactggccggggactggatctactgcatcaccgatattgatcccgaccacagaaaactcagccagctggaagcaatgatccgctttttgacgcggaaagacccagaccttgagtgtgacgaagaacttgtcagggaggtcttgtttgatgccgtagttaccgcgcccatggaggcgtactggacggctctggctctgaacatgtctgaagagagtgagcacgtggtggacatggcattcctggggacgcgggccgggctgctgcgctcttctctcttcgttgggagcgagaaagttagcgacaggaaatttctgactcccgaggacgaagcctctgtgtttacgctggatagatttcctctctggtaccggcaggcctcagagcatccagcaggcagcttcgtctttaatctccgctgggcagaggggcctgagagtgctggtgagccgatggtggttactgcttcgactgccgtggccgttacagtggacaaaaggaccgccatcgctgctgcagcgggtgtgcagatgaagctcgaatttctccagagaaagttttgggcagccacaagacaatgctcaacagtcgatggaccctgcacacagtcctgtgaagactctgacctagactgttttgtgatcgacaataatggattcatactgatcagcaaacgatcgagagagactggcagatttctgggcgaggtcgacggggctgtcctgacccaactgcttagtatgggggtgtttagccaggtgactatgtacgactaccaggccatgtgtaagcccagctcccaccatcactcagcggcccagcccctcgttagccctatcagcgcatttttgactgcgacaaggtggttgcttcaggagttggtcctgtag

SEQ ID NO: 249374 - DNA, 3414 bp, Artificial Sequence
  derived and/or modified sequence
atggtgtgcggctgcagcgccctgctgcccctgcccaacccccggcctacgatgccagcaaccccaaattttctggcgaaccccagctcttcatctcggtggatccctctccagcccatgcccgtggcatgggcatttgtgcagaaaacctccgcactgttgtggctgctgctcctgggcacatctctctcgcctgcatggggccaagccaaaatccccctggagacagtgaagctctgggctgacacttttggcggggatctgtataacacggttacaaagtattctgggtcccttttgctccaaaagaagtacaaggacgtggagagttctctcaagattgaagaggtagatgggcttgaactcgtgaggaagttttctgaggacatggagaatatgttgcggcgcaaagttgaagccgttcagaacctggttgaggccgcagaagaggccgaccttaaccacgagtttaatgagtctcttgtgttcgactactacaatagtgtcctgatcaacgaacgggatgagaagggaaatttcgtggagctaggagcggagttcctgttagaatctaacgcgcactttagcaatctgcccgtaaatacaagcatcagctcagtccagctgcccacaaatgtatacaacaaggatcccgacatcctcaacggggtgtatatgagcgaggcgctcaacgccgtcttcgttgaaaattttcaacgggatcccaccttgacatggcagtatttcggctctgccactgggttcttcaggatttacccaggaattaagtggactccggacgagaacggagtgatcacgttcgattgtagaaaccgcggctggtatatccaggccgccaccagcccgaaagatatagtcattttggtcgatgtctccggctccatgaaaggcctccggatgaccatcgccaaacacacaatcaccaccattcttgatacgctgggcgaaaatgacttcattaatatcattgcgtacaacgactacgtccattacatagaaccttgttttaaaggtatcctagtccaggctgatcgggataaccgggagcatttcaaactgctggtagaagagctgatggtgaagggtgtgggagtggttgatcaggctctgcgtgaggccttccagattctgaagcagtttcaagaggccaagcaaggatctctgtgtaatcaggctattatgcttattagcgatggggctgtagaggattacgaaccggtattcgaaaaatacaattggcctgattgcaaagtacgtgtatttacatatctcattgggagggaggtctcattcgcagaccgtatgaaatggatcgcatgcaataataagggttactatacacagatctccactctggcagatacacaggaaaacgttatggaatatttgcacgtactctctcggcccatggtgatcaaccacgaccatgacataatttggactgaggcatatatggatagtaagctcttgtcgtcgcaggctcagtcactgacactcctaacaactgttgcaatgccagttttcagtaaaaaaaacgaaacacgtagtcatggcatactgttgggcgttgtcggaagcgacgttgccctgagggagttgatgaagttagctccaagatataaactcggcgtccatgggtacgcgttcctgaacaccaacaatggctacatcctgagccatcctgatctgaggcctctctatcgggaggggaaaaagctcaagccaaaaccaaattacaacagcgtcgacctttcggaggttgaatgggaggaccaggctgagtcactgcgtacagcaatgatcaatcgtgaaacaggaaccttatcgatggatgttaaagtgccaatggataaaggcaaaagggtcttattccttacaaatgactatttcttcacagacattagtgacaccccctttagcctgggcgtggtactctcccgcggtcacggagaatatatcttgctgggaaacaccagtgttgaggagggcctgcacgacctcctgcatcctgaccttgcattggctggcgactggatttactgtatcacggatattgacccagaccacaggaaacttagtcaattagaggcgatgattagatttctcacgcggaaggatcccgatctcgaatgtgatgaggaactagttcgagaggttctgttcgacgctgtggttaccgccccgatggaggcttattggaccgcacttgccctgaatatgtccgaggaaagtgagcacgtggtcgatatggcatttctcgggacccgggctggtctcctgcggtcatcactctttgtcggatctgaaaaggtatccgatcgtaagtttctaacaccggaggatgaggccagcgtgttcacactcgaccggttccccttgtggtatcgccaagcatccgaacatcccgctgggtcgtttgtctttaacctcagatgggccgagggccctgagtcggccggcgaaccaatggtagtgactgcctctaccgcggtggccgttaccgtagataaacggacggcaattgcagctgcggccggagttcagatgaaacttgagttccttcagcgcaagttctgggcggctactcgccagtgtagcacagtggacggtccatgtacacaatcgtgtgaagactcagatctggattgcttcgtgatcgataacaacgggtttatccttatctccaagcggtccagagaaactggccgttttttaggcgaggtggatggggccgtcctcactcagttgctgagtatgggagtcttttcgcaggtaaccatgtatgattatcaggccatgtgcaagccatctagccaccaccattcagctgcccagcctcttgtcagccccatctcagcttttctgactgctacgcggtggttgctccaggagttagttctgtttctgctcgaatggtccgtgtggggttcttggtacgacaggggagcggaggcaaaatctgtgttccatcactcccataagcataaaaagcaggaccctttacagccgtgcgacaccgagtaccctgtgttcgtttaccagccagcaattcgcgaggcaaacggtatcgttgagtgtggtccctgtcaaaaggtgtttgtggtgcaacaaataccgaactccaacctgctgttgcttgtgacggatcccacctgcgattgctctatttttcctccggtgcttcaagaagccactgaggttaagtataacgctagcgtcaaatgtgacagaatgaggagtcagaagctccggaggcgtcctgactcttgccacgcatttcacccagaagagaatgcccaggactgtgggggagcttctgacacctccgcaagcccccctctgttactgttgcccgtctgtgcttgggggctcctgccccaactgctgaggtag

SEQ ID NO: 249375 - DNA, 3222 bp, Artificial Sequence
  derived and/or modified sequence
atggccgtggccctgggcacccggcggcgggaccgggtgaagctgtgggctgataccttcggcggcgacctgtacaacaccgttacaaagtattcgggaagcctgctcctgcagaagaagtacaaggacgtagaatcttccctgaagatcgaagaggtggacggcctcgagttagtaagaaagttttccgaggacatggaaaacatgttgagacgtaaggtggaagcagtgcaaaacctcgtcgaggcggccgaagaagcagacctgaatcacgagttcaacgagagcttggttttcgactattataacagcgtcctcatcaacgagcgagatgaaaagggtaacttcgtggaattgggcgccgaatttctcctggagtctaacgcccacttctccaacctaccagtcaatacgagcatctctagtgtacagctgcccactaacgtctataataaagacccagacatcctgaatggcgtgtacatgagcgaggccctaaacgccgtgttcgtcgagaacttccaacgagatccaaccctgacctggcagtacttcggatcagccacagggttctttcggatctatccaggtatcaagtggacccccgatgagaacggagtcatcactttcgattgcagaaaccgtggatggtatatccaagcggccaccagtcctaaggatatcgtgattcttgtggacgtcagcgggtcgatgaaagggttgagaatgacaatagcaaagcacacaatcaccaccatcctggatacccttggtgaaaacgacttcatcaacattatcgcatataacgattatgtgcactacattgagccatgttttaaaggcatcttggtgcaggccgaccgtgataaccgggaacatttcaaactgttggtggaagagctgatggtcaagggtgtgggtgtcgtcgaccaggcacttagggaagccttccagatcctcaagcaattccaagaggccaagcagggcagtctgtgtaatcaggcaatcatgctaatctcagacggagcagtggaggactatgagcccgtctttgaaaagtataattggccggactgcaaagttcgcgtctttacgtatttgatcggacgcgaggtttcgtttgccgacaggatgaagtggatagcgtgcaataacaaaggatattacacgcagatcagtaccctggctgacacgcaggagaatgtgatggagtacttgcatgttctttccaggcccatggtgattaaccacgaccacgacattatctggacagaggcctatatggactctaaactgctttcctctcaggctcagtctttaaccctgctgaccacggtggccatgcccgttttcagcaagaagaacgagacccgcagccacggaatcctcctaggtgtagtcggctcagatgtggcgcttagggagttaatgaaactggctcctcgttataagttgggagtccatggatacgccttcctgaacaccaacaacggttacatcctttctcaccctgatctgcgccccctctaccgcgagggcaagaaactgaagcctaagccaaattacaatagcgtcgatctaagtgaggtcgaatgggaagatcaagccgaaagccttaggactgcaatgatcaaccgggagaccggcaccttgagtatggatgttaaagtgcctatggataaaggtaaacgagtgctcttcctgactaatgactactttttcaccgacatttccgatactcctttttcattgggtgtagtgctttctaggggtcacggtgaatacattcttttgggaaatacgtccgtcgaagaaggcctgcatgatctgctgcaccctgacctcgccctcgcaggagactggatctattgcattactgacattgatcccgatcatagaaaactgtctcagctagaggcaatgatccggttcttgactagaaaagatccagacctggaatgcgatgaggagctcgttcgcgaggtgctgtttgatgccgtcgttaccgcaccaatggaagcctattggactgcgttagctctgaacatgtccgaggagtccgagcacgtggtagatatggcattccttgggactagggcaggtctgctccggtcctccctattcgtgggctctgaaaaagtgtcagaccgtaaattcctgacccctgaggacgaagcttcagtgttcacattagatagatttcccctttggtaccgacaggctagtgagcacccagccggaagttttgtattcaatctgcgttgggccgaggggcctgagtccgcgggagaaccaatggtagtgacagccagcactgccgtggctgtaaccgtagacaagaggactgccattgcagccgccgctggtgtgcaaatgaagctggaatttctgcagagaaaattctgggccgcgacccgacagtgctctacggtggatggaccctgcacccagagctgcgaagactcagacctggattgctttgtcattgacaacaatggattcatcttaatttccaagcggtccagggaaaccggcaggtttctaggggaagtggacggggccgtactgacacagctgttaagcatgggcgtttttagccaggtgaccatgtatgactaccaggccatgtgtaaaccatccagccatcaccactccgctgcccagcctttggtgtcacctattagtgctttcctgaccgccacccggtggcttctgcaggaacttgtgctcttcttgttagaatggtcagtttggggctcatggtatgataggggagccgaagccaagagcgtgttccaccactctcacaaacacaaaaaacaggacccactccaaccttgcgataccgaataccctgtgttcgtgtaccagccggccatcagggaagcaaacggaatcgtggagtgcgggccatgtcagaaggtctttgtggtgcaacagatccccaacagtaatcttctgctgttggtgacagatcctacttgcgactgcagcatctttcctcctgtgcttcaggaggccactgaagtgaaatacaacgctagcgttaaatgtgatagaatgcgatctcagaagctccggaggcggcccgactcctgtcatgcttttcaccccgaggaaaatgctcaggactgcgggggtgcatccgatacttcagctagtccacccctccttctgctgcctgtttgcgcctggggcctgctgccacagcttctccgatag

SEQ ID NO: 249376 - DNA, 615 bp, Artificial Sequence
  derived and/or modified sequence
atgtacgactaccaggccatgtgcaagcccagcagccaccaccacagcgccgctcagcccctcgtcagccctatcagtgcattcttgaccgccacccgttggctgctccaggagctcgtactgtttctgctcgagtggtctgtatggggttcttggtatgaccgtggagctgaagcaaaaagtgtctttcaccactcccacaagcacaagaagcaagatcctctgcagccttgcgacaccgaatatcccgtcttcgtgtaccagccagctatccgagaagcaaatggcatcgtggagtgtggaccatgccagaaagtattcgtggtccagcagatcccaaattctaacctgcttctcctggtcacagaccccacctgtgattgcagcatcttcccaccagttctgcaggaagctacagaggttaagtacaatgcttcagtgaagtgtgataggatgcgtagccagaagctccggcgcaggccggactcttgccacgccttccatcctgaagagaatgctcaggactgcggtggagctagtgacacatccgcttctcctccgctacttctactgcccgtctgcgcatgggggttattaccccaactacttcggtag

SEQ ID NO: 249377 - DNA, 615 bp, Artificial Sequence
  derived and/or modified sequence
atgtacgactaccaggccatgtgcaagcccagcagccaccaccacagcgccgcccagcccctcgtttccccaatcagcgcttttctgacagccacacgctggttgctgcaggagcttgttctgtttctcttagaatggagcgtgtggggcagttggtacgatcgcggtgcagaggccaagtctgtctttcaccattcccataaacacaagaagcaagatcccctgcaaccgtgtgataccgagtatcccgtttttgtatatcagccggcaataagagaagctaatggtatagtggagtgtggcccatgccaaaaggtgttcgtggtgcaacagatccccaactccaacctgctactcttggtcacagaccccacctgcgattgctcaatctttccccctgttttacaagaggccactgaggtgaagtacaacgcaagcgtgaaatgcgatcgtatgcgaagtcaaaaacttaggaggcgccccgacagctgccatgcttttcatccggaggaaaatgcccaggactgtgggggtgcttccgatactagtgcatctcccccactgctgcttcttcccgtttgtgcctggggcctgctgcctcaactattgcgatag

SEQ ID NO: 249378 - DNA, 804 bp, Artificial Sequence
  derived and/or modified sequence
atgaagctggagttcctgcagcggaagttctgggccgccacccggcaggatctcgactgtttcgtgatcgacaacaatgggtttattttgataagcaagcgctccagagaaactggtagatttctcggggaagtggacggcgccgtccttacacagctgctgtccatgggcgtattctctcaggtgaccatgtacgactatcaggcgatgtgcaagcccagttcgcatcaccactccgccgcccagccccttgtgagtccaatttccgccttcttaacagcaacacggtggttattgcaggagcttgtcctgttccttctcgagtggtcagtttgggggagctggtatgatcgaggagcagaggcaaaaagtgttttccatcattcacacaagcataaaaagcaggaccctctgcagccttgtgataccgagtacccagtgtttgtctaccagccagcaatcagagaagctaacggcattgtcgaatgcggcccatgtcagaaggtgttcgtcgtgcagcagatcccaaactcaaatctgctgttgttggtgacagaccccacgtgtgattgtagcattttcccgcctgtcctgcaggaagccaccgaggtaaaatacaatgcttctgtaaagtgcgaccgaatgagaagtcagaaactgcgtcgccggccagactcttgccacgcctttcacccagaggagaatgcacaggactgtggtggggccagcgacacatctgccagcccccctctcttgctgctgcctgtgtgcgcatggggtctgctgccccaacttctccgctag

SEQ ID NO: 249379 - DNA, 615 bp, Artificial Sequence
  derived and/or modified sequence
atgtacgactaccaggccatgtgcaagcccagcagccaccaccacagtgctgcacagccgctggttagccccatttccgcatttctgaccgctaccagatggctgctgcaggaattggtgttattcctgctcgagtggtccgtgtggggatcttggtacgatcggggcgctgaggccaagagcgtgtttcaccatagccataagcataaaaagcaggacccgctacaaccttgcgacactgaatatccagtcttcgtttatcagcccgcaatcagggaggcaaatggaattgttgaatgcggcccgtgtcagaaggtgttcgtcgtgcagcagatccccaactcaaatcttctcctgctggtgaccgaccccacatgcgactgtagtatcttcccacccgttttacaggaggcgaccgaggtgaagtacaatgcgagcgtcaagtgcgaccggatgagatcacagaaattgcgtcggcggccggatagctgccacgcctttcatcctgaggagaacgcccaggattgtggaggcgcgtcagacacgagcgcttcccctccccttctactgttgcccgtgtgcgcttggggtctgctgccacagttgctgcgatag

SEQ ID NO: 249380 - DNA, 2925 bp, Artificial Sequence
  derived and/or modified sequence
atggtttgcgggtgctccgccttgttacctcttcccaacccaaggcccaccatgcccgctactcctaattttttggccaatccgtcctcttcttctaggtggattcccctccagccaatgcccgtcgcatgggcattcgtgcagaaaacgagtgctttgctttggttgttgctactcggaaccagcctgagccccgcttggggccaggccaagataccactggagactgtgaagctctgggcggatacctttggcggtgacctgtacaataccgttactaaatacagtggatccctcctgttgcagaaaaagtataaagatgttgagtcttccctaaagatagaggaggtcgacggacttgagttggtcaggaagttcagcgaggacatggagaacatgcttagacgaaaggtggaagcagtacaaaacctggtggaggccgctgaggaggcggaccttaaccatgagttcaatgagagcctcgtttttgattattataatagcgtcctgatcaatgagcgcgacgaaaaaggtaactttgtggagctcggagctgaattcctgttggagagtaatgctcacttctcaaacttgccagtaaataccagtatctcgtccgttcagcttcccacaaacgtgtacaataaggatccagacatcctaaatggagtatatatgagcgaggcgctgaacgctgtgtttgtcgagaatttccagcgggatcccaccttgacatggcagtatttcgggtccgctacaggattctttcgcatttaccccggtataaagtggacacctgacgaaaatggagtgatcacctttgactgtaggaaccggggatggtacatccaggctgccacatcccctaaggatattgtgatccttgtggacgtctcgggctccatgaagggcttaagaatgacaattgctaagcacaccattaccactattttggacactctcggggagaatgattttattaatataattgcttacaatgattacgtacactacattgagccgtgttttaaagggatcctggtgcaggctgacagggataatagagagcacttcaagctcctagtcgaagagctgatggttaagggggttggggtagtggaccaggcattgagggaggcttttcagatacttaaacagttccaggaagctaagcagggctctctgtgtaaccaggctatcatgttgatctcagacggcgctgtggaagattacgagccagtcttcgagaaatacaattggccagactgcaaggtgcgggtgtttacttatctgattggaagggaggtctccttcgcagacagaatgaaatggatagcttgcaacaataagggatattatacccagattagcacgctggccgatactcaggaaaatgtcatggaatacctccatgtgcttagtcggccaatggtgatcaatcacgatcatgacatcatctggaccgaggcctacatggactctaaactgctgagctcccaggctcaaagtctcactctcttaacaacagttgccatgcctgtatttagcaaaaaaaacgaaaccagaagccatgggatcctccttggggtcgtgggatccgatgtggcccttcgtgaactgatgaagctagctcctcggtataaactgggggtgcacggatatgctttcctcaacaccaacaatggctatattctgtctcaccccgatctccgaccattgtacagggaggggaagaaactcaagcccaagccaaactataattccgtggacctcagcgaggtggagtgggaggaccaagctgaatccctccggacggctatgataaatcgtgaaacaggcacattgtccatggatgtgaaggtccccatggacaaggggaaacgggtcctcttcctgacaaacgactacttttttactgatatctccgatacgcctttctcactgggggttgttctgtcacgagggcatggcgagtatattttgctggggaacacttcagtggaggaaggcctccacgatctattacatcccgacttggctttggccggagattggatatattgcattaccgatatcgaccctgaccatcggaaactgtctcagctggaagcgatgatacgattcctgacgcgcaaggatcctgatctggagtgtgatgaggaactggttcgcgaggtgctgttcgatgcagtggtgactgcccctatggaggcatattggaccgcgctggctttgaacatgtcggaggaatctgagcacgtggtcgatatggcatttttgggaacaagggccggtctcctgcggtcctccctcttcgttggatctgagaaggtttcagatagaaaatttttaactcccgaggatgaggcttctgtcttcacgctcgaccgattcccattatggtatagacaggcttcagagcatcctgctggaagcttcgtatttaacctgcggtgggctgaaggccctgagtctgccggtgaaccaatggttgttaccgcaagcacagccgtcgcagtcacagtggacaagcggacagctatcgcagcagctgccggagtacaaatgaagcttgagttcctgcaacggaagttttgggccgctacaaggcagtgtagtacagtggacggaccctgtacacagtcctgtgaagattcagatctggactgtttcgttatagataataacggattcatcctgatcagcaagcgatcccgagagaccggtcgttttttaggggaggttgatggagccgtgctcacccaactcctgtcaatgggcgtgttctctcaagttacaatgtacgattatcaggccatgtgcaagccatcttcccaccatcacagtgcagctcagcctttggtctcgcccatctccgccttcctgactgctacacgatggctgcttcaggaactagtgctgtag

SEQ ID NO: 249381 - DNA, 3414 bp, Artificial Sequence
  derived and/or modified sequence
atggtctgtggttgttcagctctgctgcctcttcccaatcctaggcctaccatgcctgcaacgccgaacttccttgcgaatccgagctcttcttctcggtggattcctctgcagccgatgcccgttgcatgggcattcgtccagaaaacttcagcattgctttggttactcttgcttggaacaagtctgagtcctgcttggggccaagcaaaaatccctcttgaaactgttaaactatgggcggacactttcggtggagatctttataacacggtgaccaagtattcgggttctctcctgctgcagaagaaatacaaagatgttgagtcatcactgaagatcgaggaagtggatgggctagagctggtccgaaagttcagcgaggatatggaaaacatgctccgccgaaaggtcgaagccgtccagaacttggtggaggcagccgaggaagcagatctgaaccacgagtttaacgagtctctggtgtttgattactacaacagcgttcttatcaatgagagggatgagaaggggaacttcgtggagcttggcgctgaattcctactcgaatcaaacgcacacttctcgaacctgcctgtaaatacctctatttcgagcgtacaattacccactaatgtttacaataaggaccctgacatcctcaatggggtgtacatgagcgaggccctgaatgcagtatttgtcgagaatttccagagggaccccactctcacttggcagtactttggaagcgcaacaggtttttttagaatctaccccggaatcaagtggaccccagatgagaacggagtgataacgtttgattgtcgtaatcgcggatggtacattcaggccgctacaagtcctaaggatatcgttatactcgtggatgtatccggctccatgaaagggcttcggatgacaattgccaagcacaccatcaccactatcctggataccttgggtgagaacgattttatcaatatcattgcatacaacgattatgtgcattacatcgaaccctgttttaaggggatcctggtgcaggcagacagagacaatcgggaacatttcaagctgctcgtggaggaactgatggtcaaaggggttggagtggtggatcaggcattgcgagaggcatttcagattcttaagcaatttcaagaggccaagcagggcagtctctgcaatcaagctatcatgttgatcagcgacggcgcagttgaggattatgagccggtgttcgaaaaatacaattggccagactgcaaggtcagggtgttcacttatttgataggcagggaggtgtcattcgccgataggatgaagtggatcgcatgcaacaataaagggtactacacacagataagtacccttgccgacacgcaagagaatgtcatggaatacttgcacgtgttgtcaaggcctatggttatcaatcacgatcacgatatcatttggaccgaggcctatatggactctaagctcctgtctagtcaggctcaatctcttaccctccttaccacggtggctatgccagtgttctcaaagaagaatgaaacacggagccacggaatcctgttgggcgtggtggggtccgatgtggcccttagagaactgatgaaactcgctcctagatacaagctcggggtgcacggatacgcgtttctgaacaccaataatggttacattctcagtcacccagacctgcgacccctgtaccgcgaggggaagaagcttaagcctaaacctaattacaattcggtggatctgagcgaggttgagtgggaggaccaggccgagtccctgcgaacggctatgatcaatagggaaactgggaccctgtccatggatgtaaaagtgcctatggacaaaggcaagagagtgttatttcttactaatgactacttctttacagacatctccgacacccccttctccctcggggttgtgctgtcgcgaggccatggagaatacatcctgctggggaacacaagcgtggaagagggtctgcacgacttactccatcctgatttggcactggccggtgattggatatactgcatcactgatatcgatcccgaccatcgcaagttgagccagcttgaagctatgatcaggtttctgacacgaaaagatccagatttagaatgtgacgaggagcttgtaagggaagtgttgtttgacgcagtggtcaccgcacccatggaagcctattggacagccctcgctctcaacatgagcgaggagtccgagcatgtggtcgacatggctttcctggggaccagagccggtctacttcgctccagtctcttcgttggctcagagaaggtgtcagatagaaaatttctgactccagaggatgaagcctccgtcttcactctggatagatttccgctttggtatagacaggcctccgagcatccggctggatctttcgtttttaatctcagatgggcagaggggccagagtctgctggggaacctatggtggtgacggcctctaccgccgtggctgtgaccgtcgataagcgcactgccatagctgcagctgcgggagtgcagatgaaactagagttcctgcagaggaagttctgggcagcaactcggcagtgttctacggtggatgggccttgtacccaatcatgcgaggacagtgatctcgactgctttgtcatcgataacaacggatttatcctgatttcaaagcggagccgagagacagggagattcttgggagaggttgacggggctgttctcacccaattactttctatgggcgtcttctcccaggtgaccatgtatgactaccaggccatgtgcaagccatcttctcatcatcattccgccgctcaacccctcgttagtcctatttcagcctttctgaccgccacacgatggttactccaggagctcgtgttgttccttctggagtggagcgtgtggggcagctggtatgatagaggagccgaagccaaatccgtatttcatcatagccacaaacacaaaaaacaagatcctttgcagccatgcgatacggagtaccctgtgtttgtttatcaacccgcaattagagaggccaatgggattgtggagtgcggcccttgccagaaggtgtttgtggtgcagcagatccctaattcaaacctgctgctactcgtcactgatcctacatgtgactgctcaatatttcctccggtgctccaggaagctacggaagtcaagtataatgcttcagtaaagtgcgaccggatgcgctctcaaaaactgcggaggcggcctgacagttgtcatgcctttcatccagaagagaatgcccaggattgcggtggggcatcagacacttcagcctccccaccactcctgctactacccgtgtgcgcgtggggattgctaccccagctgctccgttag

SEQ ID NO: 249382 - DNA, 3222 bp, Artificial Sequence
  derived and/or modified sequence
atggccgtcgctctaggaactagaagacgagaccgcgtaaagctttgggcggacacatttgggggagatctgtacaatacggtgaccaaatactccggtagtcttctacttcagaaaaaatacaaggatgtcgagtccagtctgaagatcgaggaagtggatggcctggagctcgtcagaaagttctctgaagatatggaaaatatgttacgccgtaaagtcgaggcggtacagaacctcgttgaggccgctgaagaggccgaccttaaccacgagttcaacgagtcactcgtctttgactactacaattcagtcctgatcaatgagagagatgagaaagggaactttgtggagctgggggctgagttcctgttagagtctaacgcgcatttttctaacttacctgtgaataccagcatctcttcagtccaactccccacaaatgtgtataataaggaccccgacattctgaacggagtgtacatgagtgaagctctgaacgcggtctttgtggagaatttccagcgagacccaacgttgacgtggcaatatttcgggtcagccacgggcttttttaggatctatccaggtattaaatggaccccagatgaaaatggggtcattacattcgactgccggaacaggggatggtacatccaagcagccacaagcccaaaagacattgtgatccttgtcgacgtgagtgggtccatgaagggcctccgcatgacaatagcgaaacacaccattacgacaatcctcgataccttgggcgaaaatgacttcataaacatcatcgcctacaacgattatgttcactacattgaaccgtgtttcaagggaatcctggtgcaggccgatcgtgataatcgcgagcatttcaagctattggtggaagaactaatggtgaagggggtgggagtagtggaccaggcactccgtgaagctttccagatcctgaagcagttccaggaggccaaacaagggtcattgtgtaatcaagctattatgctgatctctgatggcgcagttgaggactatgaaccagtcttcgagaaatacaattggcccgattgcaaggttcgtgtcttcacataccttatcggccgagaagtgtcatttgcggaccgaatgaagtggattgcctgcaacaacaaaggttactacactcaaatcagcaccctcgcagacacccaggaaaatgtaatggaatatctgcacgtcctgagccggccaatggtgatcaaccacgatcatgacatcatctggactgaagcctacatggactcgaaactgttgagttctcaggcccagagtctgacgctactcactactgtcgctatgcccgtttttagcaagaagaacgagactcggtctcatggtattctcctgggtgtggttggaagtgacgtggccctgagggaactcatgaagcttgctccccgatacaaattgggcgttcacggctacgcattcttgaatacaaataacggatacattctgagtcatccagacctgcggccactgtatcgggaaggaaagaagctcaagccgaaacccaactataatagcgtggacctcagtgaagtggaatgggaagatcaggccgagagtctgagaaccgcgatgattaatcgcgaaacgggaaccttgagcatggacgtcaaggtgccaatggacaaagggaagagagtgctatttctgacaaacgactacttcttcacagatatcagcgatactcccttctctctgggggtcgtgctatcaaggggtcacggggagtatatcctattggggaacacgagtgtcgaagagggtctgcatgaccttctccatccggatctggccctggccggagattggatttattgcatcacggacattgacccagaccatagaaagcttagccagctggaagccatgatccgctttcttacacggaaagatcccgatcttgagtgcgatgaagagcttgtgagggaggtgctctttgatgccgtggtgaccgcccctatggaggcctattggaccgccctggccttgaatatgagcgaagagagtgaacatgtggtggatatggcatttctcggtaccagagccggtcttcttaggtcttccctgtttgtcggaagcgaaaaagtctcagaccggaagttcctcacgccagaggacgaggccagcgtcttcactctggatcgattcccactctggtatagacaggcctcggagcaccccgcaggatcatttgtgttcaatcttcgctgggcagaaggacctgaatcggccggagaacccatggtcgtcactgcgtcgacagccgtcgcagtcaccgtcgacaagcggaccgctatcgccgcagcagcgggagttcagatgaaactggaatttctgcagcgcaagttctgggctgccacaaggcaatgctccacagtcgacggaccatgtacccaatcatgcgaggacagtgatctggactgttttgtcatcgacaataacggctttatcttaatctcaaagaggtctcgtgaaactggaaggttcctgggagaagtggatggtgccgtactaacccagctccttagcatgggggtgttcagtcaggtgacgatgtacgactatcaggcaatgtgcaagccaagtagccaccatcattccgcggcacaaccgctggtgtcacctatctctgcgtttctgacggcaactagatggctgttgcaggagttagtactgttcctcctcgaatggtctgtatggggaagttggtatgacagaggggctgaggctaaatccgtcttccaccattctcacaagcacaaaaaacaggacccactacagccatgtgacaccgagtatccagtctttgtgtaccaacccgcaatccgcgaagctaacggcattgtggagtgcggcccatgccagaaagtgtttgttgtgcagcagattcccaacagcaatctgttgctgcttgtgacagaccccacgtgcgattgctcaatttttccgccagtgttgcaagaagctactgaagtgaagtataatgccagcgtgaaatgcgacaggatgagatctcagaaattaaggcgcaggcccgactcttgtcacgcttttcacccagaagaaaatgcccaagactgcggaggtgctagcgataccagtgcatcccctcctctgcttctgctgcctgtgtgcgcttggggtctcctgccacaactgctgagatag

SEQ ID NO: 249383 - DNA, 615 bp, Artificial Sequence
  derived and/or modified sequence
atgtacgactatcaggccatgtgtaaaccatctagccaccaccattcggcagcccaaccactcgtgagtcccatctccgccttcctcacagcaacaagatggcttcttcaggagctcgtgttatttttgctggaatggagcgtatggggaagttggtatgaccggggtgccgaggcgaaaagtgtgttccatcactctcacaaacacaaaaaacaggacccgttgcagccttgtgataccgagtacccagtattcgtataccagcctgcaatccgcgaggctaacgggatcgtggagtgtggcccttgccaaaaggtgttcgtcgttcagcaaattcctaattccaatcttctgctccttgtcactgaccctacctgcgactgttctatttttcctcccgtgctgcaggaagccacagaggtaaaatataacgcatcagtcaagtgcgatagaatgcgctcccagaagttgcggcgtcgtcctgatagctgtcacgccttccatcctgaagagaacgctcaggactgcggaggggcttcggatacttctgcctcgccccctctgctacttctcccggtatgtgcctggggtctgctgcctcagttgttgcgatag

SEQ ID NO: 249384 - DNA, 615 bp, Artificial Sequence
  derived and/or modified sequence
atgtacgattaccaggccatgtgcaaaccctcttcacaccaccactccgctgctcagccacttgtctcccctatctccgcttttctgaccgcaactagatggcttttgcaggagcttgtgctgttcctgttagagtggtctgtgtgggggtcatggtacgataggggcgcagaggccaaaagtgtattccatcatagccataagcacaaaaagcaggaccctctgcagccgtgtgacacggaatatcccgtgtttgtctatcagcccgctatcagagaggccaacggcatagtggagtgtgggccttgtcagaaggtgttcgtcgtacaacagatcccaaacagcaatcttctcctgctagtaacagacccgacctgcgactgtagcatctttcctcctgtcctacaggaggccacggaagtaaaatataacgcttcagtcaagtgcgatagaatgcggagccaaaaactgcgcagacgcccagattcctgccacgcgttccaccccgaagaaaacgctcaggattgcggaggcgctagtgataccagcgcctcaccccctctgctcttgctccctgtctgcgcttggggactgctgccccaactgttgcgttag

SEQ ID NO: 249385 - DNA, 804 bp, Artificial Sequence
  derived and/or modified sequence
atgaaactggagttcctgcagcgcaagttctgggccgcaacaaggcaggacctggactgcttcgtgatcgataacaatggttttattctgatttcaaagcgctcgcgggagacaggtcggttccttggggaagtggacggggcagtccttacccagctcttgagcatgggagtcttcagccaagttactatgtatgactaccaagctatgtgtaaaccctcatcccaccaccattcagcagcgcagcccctcgtaagcccaatcagcgcttttctgacagccaccaggtggctgctgcaagaactagtactgttcctcctggagtggagcgtgtggggctcatggtacgatcggggtgcggaagcaaaatcagtgtttcatcactcccacaaacataagaagcaggatccgctgcagccttgcgatactgagtatccagtcttcgtgtatcagccagccattcgagaagctaacgggatcgtcgagtgcggcccttgccagaaggtgttcgtggtccagcaaattccaaactctaatctgctgctacttgtgacagaccccacttgcgactgcagcatcttccccccagtgctgcaagaggcaactgaggttaagtacaacgcctctgtgaaatgcgaccgaatgagaagccaaaaactgcgcaggcggccagatagttgccatgcttttcatcccgaagagaatgctcaagattgcggaggagcctccgacacatcggcttcccctcccctgctgctactgcctgtctgcgcatggggcctcctgccccagctgctgagatag

SEQ ID NO: 249386 - DNA, 615 bp, Artificial Sequence
  derived and/or modified sequence
atgtatgactaccaggcaatgtgtaagccaagttcccaccatcacagtgctgcgcaacctcttgtatcccccatctcagcgttcctgactgccacacgctggctcttgcaggagcttgtgctgttcctgctggaatggtctgtttgggggtcctggtatgaccgtggggcagaggccaaatccgtgttccaccactctcacaaacacaaaaagcaggaccccctgcagccctgtgacacagaataccctgtgttcgtctatcaacccgctatccgagaggcgaacggaatagtggagtgcggcccatgtcagaaagtgtttgtggtgcagcagatcccaaactccaacttattgttattagtaacggacccaacatgcgattgttctatcttccctccggtactccaagaagcaacggaggtgaagtacaacgcatctgtgaagtgtgacagaatgagaagtcagaaactccgacgacgacccgacagctgccacgctttccaccccgaagagaacgctcaagattgcgggggagcttccgacacttcagcatcgccccctctgctattactgcccgtgtgcgcctggggactgcttccccagctgctgaggtag

SEQ ID NO: 249387 - DNA, 5934 bp, Artificial Sequence
  derived and/or modified sequence
acagcctctcccccagtccctgtctccgaggcctgcttgctaggtggggcgactcttctgtgagctgcagctgtggggcagagagaagccctccccacccaggactgagaggctggagaccccaggctcgccaaggcacggaagacaaaggcctggggcgtcctggggtctgggaggaaggcagacagagctcatggtctgtggctgctctgccctccttcccctccccaaccccaggcccaccatgcctgcaactcccaacttcctcgcaaaccccagctccagcagccgctggattcccctccagccaatgcccgtggcctgggcctttgtgcagaagacctcggccctcctgtggctgctgcttctaggcacctccctgtcccctgcgtggggacaggccaagattcctctggaaacagtgaagctatgggctgacaccttcggcggggacctgtataacactgtgaccaaatactcaggctctctcttgctgcagaagaagtacaaggatgtggagtccagtctgaagatcgaggaggtggatggcttggagctggtgaggaagttctcagaggacatggagaacatgctgcggaggaaagtcgaggcggtccagaatctggtggaagctgccgaggaggccgacctgaaccacgaattcaatgaatccctggtgttcgactattacaactcggtcctgatcaacgagagggacgagaagggcaacttcgtggagctgggcgccgagttcctcctggagtccaatgctcacttcagcaacctgccggtgaacacctccatcagcagcgtgcagctgcccaccaacgtgtacaacaaagacccagatattttaaatggagtctacatgtctgaagccttgaatgctgtcttcgtggagaacttccagagagacccaacgttgacctggcaatattttggcagtgcaactggattcttcaggatctatccaggtataaaatggacacctgatgagaatggagtcattacttttgactgccgaaaccgcggctggtacattcaagctgctacttctcccaaggacatagtgattttggtggacgtgagcggcagtatgaaggggctgaggatgactattgccaagcacaccatcaccaccatcttggacaccctgggggagaatgacttcattaatatcatagcgtacaatgactacgtccattacatcgagccttgttttaaagggatcctcgtccaggcggaccgagacaatcgagagcatttcaaactgctggtggaggagttgatggtcaaaggtgtgggggtcgtggaccaagccctgagagaagccttccagatcctgaagcagttccaagaggccaagcaaggaagcctctgcaaccaggccatcatgctcatcagcgacggcgccgtggaggactacgagccggtgtttgagaagtataactggccagactgtaaggtccgagttttcacttacctcattgggagagaagtgtcttttgctgaccgcatgaagtggattgcatgcaacaacaaaggctactacacgcagatctcaacgctggcggacacccaggagaacgtgatggaatacctgcacgtgctcagccgccccatggtcatcaaccacgaccacgacatcatctggacagaggcctacatggacagcaagctcctcagctcgcaggctcagagcctgacactgctcaccactgtggccatgccagtcttcagcaagaagaacgaaacgcgatcccatggcattctcctgggtgtggtgggctcagatgtggccctgagagagctgatgaagctggcgccccggtacaagcttggagtgcacggatacgcctttctgaacaccaacaatggctacatcctctcccatcccgacctccggcccctgtacagagaggggaagaaactaaaacccaaacctaactacaacagtgtggatctctccgaagtggagtgggaagaccaggctgaatctctgagaacagccatgatcaatagggaaacaggtactctctcgatggatgtgaaggttccgatggataaagggaagcgagttcttttcctgaccaatgactacttcttcacggacatcagcgacacccctttcagtttgggggtggtgctgtcccggggccacggagaatacatccttctggggaacacgtctgtggaagaaggcctgcatgacttgcttcacccagacctggccctggccggtgactggatctactgcatcacagatattgacccagaccaccggaagctcagccagctagaggccatgatccgcttcctcaccaggaaggacccagacctggagtgtgacgaggagctggtccgggaggtgctgtttgacgcggtggtgacagcccccatggaagcctactggacagcgctggccctcaacatgtccgaggagtctgaacacgtggtggacatggccttcctgggcacccgggctggcctcctgagaagcagcttgttcgtgggctccgagaaggtctccgacaggaagttcctgacacctgaggacgaggccagcgtgttcaccctggaccgcttcccgctgtggtaccgccaggcctcagagcatcctgctggcagcttcgtcttcaacctccgctgggcagaaggaccagaaagtgcgggtgaacccatggtggtgacggcaagcacagctgtggcggtgaccgtggacaagaggacagccattgctgcagccgcgggcgtccaaatgaagctggaattcctccagcgcaaattctgggcggcaacgcggcagtgcagcactgtggatgggccgtgcacacagagctgcgaggacagtgatctggactgcttcgtcatcgacaacaacgggttcattctgatctccaagaggtcccgagagacgggaagatttctgggggaggtggatggtgctgtcctgacccagctgctcagcatgggggtgttcagccaagtgactatgtatgactatcaggccatgtgcaaaccctcgagtcaccaccacagtgcagcccagcccctggtcagcccaatttctgccttcttgacggcgaccaggtggctgctgcaggagctggtgctgtgagtgggggtagacacggggctggtggagggctgcatgcgagggtggcttaggagggtgtccttgagcaggaggctgcaaggtctccaggacaacccacttgctaccagaccccggggaaggagggcacaatccctgggcatggacgccacctcttccctgcatgctgcccctgggagggacctcattgctcaaccagagccctcaagcagggaagagggtgtcctggaggagaggggatgggccgggggctgtcagggatactccagctccttgggaacccaagtcgggagggctcagaggtctccgagattcagtcctgtgtctgacaggttcctgctggagtggagtgtctggggctcctggtacgacagaggggccgagggtgagtgcacggagctgcagggccatgtgctgaagagcagtggcattttggtccactaacgtgagaccattccctgtggggtgggtgacagtggggataggtgaccctgaagcatcgttgttcacatctcaccctgcgtggccttctctcatcacatccctcactcctggctctgtgtgtgacatcatcttgggacaccgccactccatgtgccatcatcaccaccccatgacatcctgccctcatgtgccaccatgttttcctgtgccgtgtccaccctgtgctgggcttatgttccggccagccaaaagtgtcttccatcactcccacaaacacaagaagcaggacccgctgcagccctgcgacacggagtaccccgtgttcgtgtaccagccggccatccgggaggccaacgggatcgtggagtgcgggccctgccagaaggtatttgtggtgcagcagattcccaacagtaacctcctcctcctggtgacagaccccacctgtgactgcagcatcttcccaccagtgctgcaggaggcgacagaagtcaaataatgcctctgtcaaatgtgaccggatgcgctcccagaagctccgccggcgaccagactcctgccacgccttccatccagaggagaatgcccaggactgcggcggcgcctcggacacctcagcctcgccgcccctactcctgctgcctgtgtgtgcctgggggctactgccccaactcctgcggtgacaccacccagcctgacctgtgttttggcaaggtgatccttccagagccatcccaaaaagtcagcactgacatgggatgcagctaactgcagttgggtcgcccccaggccaacgctcctctcaatcctgggctggtggcccctggctccggagaatgctggatggaacaggaaaccaatcacctggcaccactttcaagatgcttcatggtgcccggtaccatctgccctaggtctcaacatgagcatacttctgacctaaccttcctgtctcctcttcgggaagccagcgtgagctcagcttggaccaagacaaaataatttagttcttcctgtactccagagtccagacccagccaagaaagggtcagttgtttctgaccctttctgtcggagtggtctctggtagaacccaaggacttctgggtactgagaagcagcagcagaatgaggccaaatgcagagatgaggctaaggcaagaatatgccccaactaaagcatagattccccaaagtgaggctcatggtgggaggccactcaccttcctagctgctgctcgaaaaggttttgactgtgttggggtgggggttgggtaagggaatggtcaagactgagaaaggaatgaaatccattcaggaaatatcgacagggctacacgtgatgtccccaaactgctgctattgaagaacttcccaaaacttctttacaaagccctaaaggaaagtttgcatctatgaaaagccaataggctgagacatccaattgctgcatggaaattgatgtacattcaggggacggcaaaaatagctgtaaaatagtgaaaaagagcagtggttgtgctcttttctggccaatgatttacaaaagaatctacttgactctgtccctggagtgaaatccttagggttggaacttgtgggaacattccaacttgctaagcagggtccactgggagggaagctctatctgggaactcacccccagcgcacacacatctcccccagggtcccaaggccccgcagcttcctcccccgaccaaaccccaagacctggatcccaggagacaacagtctccacagtgagagcaacattaagggcaaagccatggagaaatgtgggagaggccggcctcaaatctttccatttaacaaaccccagtgatgggtatggacagcatgcagggcttttggggcgcttccccccgctcctccatcaccctcagcctccacacttcaaagttcaagttcaaagctgttcaagtttcctaccagcaaatagccctaacttgcctctagagtaggccaaatgccaactctgtaaaacacacttacattatcggttacagaatgtcactcttaccgtcatgtcttgcaacaaccctgtgagggcagtattaatgcccccttacagcagaagacactgcagctcgaagacagcttaagtggcagaataatgctagaacagctaaggtttacatgtaccaaataacatgtttcagctcattccatcctcacaacagccccctgaaagtgggtactatcattagtcccatgttatagaaactgcagcagagttgaaaattgcctccaaattaccggaagagtgtatgaagattgaatgtgatgtattcacgtaacatgcttgaaactgcctggcatatactaaacgctaaataaatacatgctaactgcga

SEQ ID NO: 249388 - DNA, 4601 bp, Artificial Sequence
  derived and/or modified sequence
cacaggaacggggctgcctctttaaagcagaggggtgcactatagccctgagggaaccagctgcagttgtggtaatcttgggaggcagctccccaccccctgccaccccctccctgctgtcaggagaggattagaggagaggccagcggattaaagggtttcatgttgccacagcctctcccccagtccctgtctccgaggcctgcttgctaggtggggcgactcttctgtgagctgcagctgtggggcagagagaagccctccccacccaggactgagaggctggagaccccaggctcgccaaggcacggaagacaaaggcctggggcgtcctggggtctgggaggaaggcagacagagctcatggtctgtggctgctctgccctccttcccctccccaaccccaggcccaccatgcctgcaactcccaacttcctcgcaaaccccagctccagcagccgctggattcccctccagccaatgcccgtggcctgggcctttgtgcagaagacctcggccctcctgtggctgctgcttctaggcacctccctgtcccctgcgtggggacaggccaagattcctctggaaacagtgaagctatgggctgacaccttcggcggggacctgtataacactgtgaccaaatactcaggctctctcttgctgcagaagaagtacaaggatgtggagtccagtctgaagatcgaggaggtggatggcttggagctggtgaggaagttctcagaggacatggagaacatgctgcggaggaaagtcgaggcggtccagaatctggtggaagctgccgaggaggccgacctgaaccacgaattcaatgaatccctggtgttcgactattacaactcggtcctgatcaacgagagggacgagaagggcaacttcgtggagctgggcgccgagttcctcctggagtccaatgctcacttcagcaacctgccggtgaacacctccatcagcagcgtgcagctgcccaccaacgtgtacaacaaagacccagatattttaaatggagtctacatgtctgaagccttgaatgctgtcttcgtggagaacttccagagagacccaacgttgacctggcaatattttggcagtgcaactggattcttcaggatctatccaggtataaaatggacacctgatgagaatggagtcattacttttgactgccgaaaccgcggctggtacattcaagctgctacttctcccaaggacatagtgattttggtggacgtgagcggcagtatgaaggggctgaggatgactattgccaagcacaccatcaccaccatcttggacaccctgggggagaatgacttcattaatatcatagcgtacaatgactacgtccattacatcgagccttgttttaaagggatcctcgtccaggcggaccgagacaatcgagagcatttcaaactgctggtggaggagttgatggtcaaaggtgtgggggtcgtggaccaagccctgagagaagccttccagatcctgaagcagttccaagaggccaagcaaggaagcctctgcaaccaggccatcatgctcatcagcgacggcgccgtggaggactacgagccggtgtttgagaagtataactggccagactgtaaggtccgagttttcacttacctcattgggagagaagtgtcttttgctgaccgcatgaagtggattgcatgcaacaacaaaggctactacacgcagatctcaacgctggcggacacccaggagaacgtgatggaatacctgcacgtgctcagccgccccatggtcatcaaccacgaccacgacatcatctggacagaggcctacatggacagcaagctcctcagctcgcaggctcagagcctgacactgctcaccactgtggccatgccagtcttcagcaagaagaacgaaacgcgatcccatggcattctcctgggtgtggtgggctcagatgtggccctgagagagctgatgaagctggcgccccggtacaagcttggagtgcacggatacgcctttctgaacaccaacaatggctacatcctctcccatcccgacctccggcccctgtacagagaggggaagaaactaaaacccaaacctaactacaacagtgtggatctctccgaagtggagtgggaagaccaggctgaatctctgagaacagccatgatcaatagggaaacaggtactctctcgatggatgtgaaggttccgatggataaagggaagcgagttcttttcctgaccaatgactacttcttcacggacatcagcgacacccctttcagtttgggggtggtgctgtcccggggccacggagaatacatccttctggggaacacgtctgtggaagaaggcctgcatgacttgcttcacccagacctggccctggccggtgactggatctactgcatcacagatattgacccagaccaccggaagctcagccagctagaggccatgatccgcttcctcaccaggaaggacccagacctggagtgtgacgaggagctggtccgggaggtgctgtttgacgcggtggtgacagcccccatggaagcctactggacagcgctggccctcaacatgtccgaggagtctgaacacgtggtggacatggccttcctgggcacccgggctggcctcctgagaagcagcttgttcgtgggctccgagaaggtctccgacaggaagttcctgacacctgaggacgaggccagcgtgttcaccctggaccgcttcccgctgtggtaccgccaggcctcagagcatcctgctggcagcttcgtcttcaacctccgctgggcagaaggaccagaaagtgcgggtgaacccatggtggtgacggcaagcacagctgtggcggtgaccgtggacaagaggacagccattgctgcagccgcgggcgtccaaatgaagctggaattcctccagcgcaaattctgggcggcaacgcggcagtgcagcactgtggatgggccgtgcacacagagctgcgaggacagtgatctggactgcttcgtcatcgacaacaacgggttcattctgatctccaagaggtcccgagagacgggaagatttctgggggaggtggatggtgctgtcctgacccagctgctcagcatgggggtgttcagccaagtgactatgtatgactatcaggccatgtgcaaaccctcgagtcaccaccacagtgcagcccagcccctggtcagcccaatttctgccttcttgacggcgaccaggtggctgctgcaggagctggtgctgttcctgctggagtggagtgtctggggctcctggtacgacagaggggccgaggccaaaagtgtcttccatcactcccacaaacacaagaagcaggacccgctgcagccctgcgacacggagtaccccgtgttcgtgtaccagccggccatccgggaggccaacgggatcgtggagtgcgggccctgccagaaggtatttgtggtgcagcagattcccaacagtaacctcctcctcctggtgacagaccccacctgtgactgcagcatcttcccaccagtgctgcaggaggcgacagaagtcaaatataatgcctctgtcaaatgtgaccggatgcgctcccagaagctccgccggcgaccagactcctgccacgccttccatccagaggagaatgcccaggactgcggcggcgcctcggacacctcagcctcgccgcccctactcctgctgcctgtgtgtgcctgggggctactgccccaactcctgcggtgacaccacccagcctgacctgtgttttggcaaggtgatccttccagagccatcccaaaaagtcagcactgacatgggatgcagctaactgcagttgggtcgcccccaggccaacgctcctctcaatcctgggctggtggcccctggctccggagaatgctggatggaacaggaaaccaatcacctggcaccactttcaagatgcttcatggtgcccggtaccatctgccctaggtctcaacatgagcatacttctgacctaaccttcctgtctcctcttcgggaagccagcgtgagctcagcttggaccaagacaaaataatttagttcttcctgtactccagagtccagacccagccaagaaagggtcagttgtttctgaccctttctgtcggagtggtctctggtagaacccaaggacttctgggtactgagaagcagcagcagaatgaggccaaatgcagagatgaggctaaggcaagaatatgccccaactaaagcatagattccccaaagtgaggctcatggtgggaggccactcaccttcctagctgctgctcgaaaaggttttgactgtgttggggtgggggttgggtaagggaatggtcaagactgagaaaggaatgaaatccattcaggaaatatcgacagggctacacgtgatgtccccaaactgctgctattgaagaacttcccaaaacttctttacaaagccctaaaggaaagtttgcatctatgaaaagccaataggctgagacatccaattgctgcatggaaattgatgtacattcaggggacggcaaaaatagctgtaaaatagtgaaaaa

SEQ ID NO: 249389 - DNA, 4920 bp, Artificial Sequence
  derived and/or modified sequence
atggctgtagctttagggacaaggaggagggacagagtgaagctatgggctgacaccttcggcggggacctgtataacactgtgaccaaatactcaggctctctcttgctgcagaagaagtacaaggatgtggagtccagtctgaagatcgaggaggtggatggcttggagctggtgaggaagttctcagaggacatggagaacatgctgcggaggaaagtcgaggcggtccagaatctggtggaagctgccgaggaggccgacctgaaccacgaattcaatgaatccctggtgttcgactattacaactcggtcctgatcaacgagagggacgagaagggcaacttcgtggagctgggcgccgagttcctcctggagtccaatgctcacttcagcaacctgccggtgaacacctccatcagcagcgtgcagctgcccaccaacgtgtacaacaaagacccagatattttaaatggagtctacatgtctgaagccttgaatgctgtcttcgtggagaacttccagagagacccaacgttgacctggcaatattttggcagtgcaactggattcttcaggatctatccaggtataaaatggacacctgatgagaatggagtcattacttttgactgccgaaaccgcggctggtacattcaagctgctacttctcccaaggacatagtgattttggtggacgtgagcggcagtatgaaggggctgaggatgactattgccaagcacaccatcaccaccatcttggacaccctgggggagaatgacttcattaatatcatagcgtacaatgactacgtccattacatcgagccttgttttaaagggatcctcgtccaggcggaccgagacaatcgagagcatttcaaactgctggtggaggagttgatggtcaaaggtgtgggggtcgtggaccaagccctgagagaagccttccagatcctgaagcagttccaagaggccaagcaaggaagcctctgcaaccaggccatcatgctcatcagcgacggcgccgtggaggactacgagccggtgtttgagaagtataactggccagactgtaaggtccgagttttcacttacctcattgggagagaagtgtcttttgctgaccgcatgaagtggattgcatgcaacaacaaaggctactacacgcagatctcaacgctggcggacacccaggagaacgtgatggaatacctgcacgtgctcagccgccccatggtcatcaaccacgaccacgacatcatctggacagaggcctacatggacagcaagctcctcagctcgcaggctcagagcctgacactgctcaccactgtggccatgccagtcttcagcaagaagaacgaaacgcgatcccatggcattctcctgggtgtggtgggctcagatgtggccctgagagagctgatgaagctggcgccccggtacaagcttggagtgcacggatacgcctttctgaacaccaacaatggctacatcctctcccatcccgacctccggcccctgtacagagaggggaagaaactaaaacccaaacctaactacaacagtgtggatctctccgaagtggagtgggaagaccaggctgaatctctgagaacagccatgatcaatagggaaacaggtactctctcgatggatgtgaaggttccgatggataaagggaagcgagttcttttcctgaccaatgactacttcttcacggacatcagcgacacccctttcagtttgggggtggtgctgtcccggggccacggagaatacatccttctggggaacacgtctgtggaagaaggcctgcatgacttgcttcacccagacctggccctggccggtgactggatctactgcatcacagatattgacccagaccaccggaagctcagccagctagaggccatgatccgcttcctcaccaggaaggacccagacctggagtgtgacgaggagctggtccgggaggtgctgtttgacgcggtggtgacagcccccatggaagcctactggacagcgctggccctcaacatgtccgaggagtctgaacacgtggtggacatggccttcctgggcacccgggctggcctcctgagaagcagcttgttcgtgggctccgagaaggtctccgacaggaagttcctgacacctgaggacgaggccagcgtgttcaccctggaccgcttcccgctgtggtaccgccaggcctcagagcatcctgctggcagcttcgtcttcaacctccgctgggcagaaggaccagaaagtgcgggtgaacccatggtggtgacggcaagcacagctgtggcggtgaccgtggacaagaggacagccattgctgcagccgcgggcgtccaaatgaagctggaattcctccagcgcaaattctgggcggcaacgcggcagtgcagcactgtggatgggccgtgcacacagagctgcgaggacagtgatctggactgcttcgtcatcgacaacaacgggttcattctgatctccaagaggtcccgagagacgggaagatttctgggggaggtggatggtgctgtcctgacccagctgctcagcatgggggtgttcagccaagtgactatgtatgactatcaggccatgtgcaaaccctcgagtcaccaccacagtgcagcccagcccctggtcagcccaatttctgccttcttgacggcgaccaggtggctgctgcaggagctggtgctgttcctgctggagtggagtgtctggggctcctggtacgacagaggggccgaggccaaaagtgtcttccatcactcccacaaacacaagaagcaggacccgctgcagccctgcgacacggagtaccccgtgttcgtgtaccagccggccatccgggaggccaacgggatcgtggagtgcgggccctgccagaaggtatttgtggtgcagcagattcccaacagtaacctcctcctcctggtgacagaccccacctgtgactgcagcatcttcccaccagtgctgcaggaggcgacagaagtcaaatataatgcctctgtcaaatgtgaccggatgcgctcccagaagctccgccggcgaccagactcctgccacgccttccatccagaggagaatgcccaggactgcggcggcgcctcggacacctcagcctcgccgcccctactcctgctgcctgtgtgtgcctgggggctactgccccaactcctgcggtgacaccacccagcctgacctgtgttttggcaaggtgatccttccagagccatcccaaaaagtcagcactgacatgggatgcagctaactgcagttgggtcgcccccaggccaacgctcctctcaatcctgggctggtggcccctggctccggagaatgctggatggaacaggaaaccaatcacctggcaccactttcaagatgcttcatggtgcccggtaccatctgccctaggtctcaacatgagcatacttctgacctaaccttcctgtctcctcttcgggaagccagcgtgagctcagcttggaccaagacaaaataatttagttcttcctgtactccagagtccagacccagccaagaaagggtcagttgtttctgaccctttctgtcggagtggtctctggtagaacccaaggacttctgggtactgagaagcagcagcagaatgaggccaaatgcagagatgaggctaaggcaagaatatgccccaactaaagcatagattccccaaagtgaggctcatggtgggaggccactcaccttcctagctgctgctcgaaaaggttttgactgtgttggggtgggggttgggtaagggaatggtcaagactgagaaaggaatgaaatccattcaggaaatatcgacagggctacacgtgatgtccccaaactgctgctattgaagaacttcccaaaacttctttacaaagccctaaaggaaagtttgcatctatgaaaagccaataggctgagacatccaattgctgcatggaaattgatgtacattcaggggacggcaaaaatagctgtaaaatagtgaaaaagagcagtggttgtgctcttttctggccaatgatttacaaaagaatctacttgactctgtccctggagtgaaatccttagggttggaacttgtgggaacattccaacttgctaagcagggtccactgggagggaagctctatctgggaactcacccccagcgcacacacatctcccccagggtcccaaggccccgcagcttcctcccccgaccaaaccccaagacctggatcccaggagacaacagtctccacagtgagagcaacattaagggcaaagccatggagaaatgtgggagaggccggcctcaaatctttccatttaacaaaccccagtgatgggtatggacagcatgcagggcttttggggcgcttccccccgctcctccatcaccctcagcctccacacttcaaagttcaagttcaaagctgttcaagtttcctaccagcaaatagccctaacttgcctctagagtaggccaaatgccaactctgtaaaacacacttacattatcggttacagaatgtcactcttaccgtcatgtcttgcaacaaccctgtgagggcagtattaatgcccccttacagcagaagacactgcagctcgaagacagcttaagtggcagaataatgctagaacagctaaggtttacatgtaccaaataacatgtttcagctcattccatcctcacaacagccccctgaaagtgggtactatcattagtcccatgttatagaaactgcagcagagttgaaaattgcctccaaattaccggaagagtgtatgaagattgaatgtgatgtattcacgtaacatgcttgaaactgcctggcatatactaaacgctaaataaatacatgctaactgcgatcatta

SEQ ID NO: 249390 - DNA, 2876 bp, Artificial Sequence
  derived and/or modified sequence
ggagctggtccgggaggtgctgtttgacgcggtggtgacagcccccatggaagcctactggacagcgctggccctcaacatgtccgaggagtctgaacacgtggtggacatggccttcctgggcacccgggctggcctcctgagaagcagcttgttcgtgggctccgagaaggtctccgacaggaagttcctgacacctgaggacgaggccagcgtgttcaccctggaccgcttcccgctgtggtaccgccaggcctcagagcatcctgctggcagcttcgtcttcaacctccgctgggcagaaggaccagaaagtgcgggtgaacccatggtggtgacggcaagcacagctgtggcggtgaccgtggacaagaggacagccattgctgcagccgcgggcgtccaaatgaagctggaattcctccagcgcaaattctgggcggcaacgcggcagtgcagcactgtggatgggccgtgcacacagagctgcgaggacagtgatctggactgcttcgtcatcgacaacaacgggttcattctgatctccaagaggtcccgagagagtgactatgtatgactatcaggccatgtgcaaaccctcgagtcaccaccacagtgcagcccagcccctggtcagcccaatttctgccttcttgacggcgaccaggtggctgctgcaggagctggtgctgttcctgctggagtggagtgtctggggctcctggtacgacagaggggccgaggccaaaagtgtcttccatcactcccacaaacacaagaagcaggacccgctgcagccctgcgacacggagtaccccgtgttcgtgtaccagccggccatccgggaggccaacgggatcgtggagtgcgggccctgccagaaggtatttgtggtgcagcagattcccaacagtaacctcctcctcctggtgacagaccccacctgtgactgcagcatcttcccaccagtgctgcaggaggcgacagaagtcaaatataatgcctctgtcaaatgtgaccggatgcgctcccagaagctccgccggcgaccagactcctgccacgccttccatccagaggagaatgcccaggactgcggcggcgcctcggacacctcagcctcgccgcccctactcctgctgcctgtgtgtgcctgggggctactgccccaactcctgcggtgacaccacccagcctgacctgtgttttggcaaggtgatccttccagagccatcccaaaaagtcagcactgacatgggatgcagctaactgcagttgggtcgcccccaggccaacgctcctctcaatcctgggctggtggcccctggctccggagaatgctggatggaacaggaaaccaatcacctggcaccactttcaagatgcttcatggtgcccggtaccatctgccctaggtctcaacatgagcatacttctgacctaaccttcctgtctcctcttcgggaagccagcgtgagctcagcttggaccaagacaaaataatttagttcttcctgtactccagagtccagacccagccaagaaagggtcagttgtttctgaccctttctgtcggagtggtctctggtagaacccaaggacttctgggtactgagaagcagcagcagaatgaggccaaatgcagagatgaggctaaggcaagaatatgccccaactaaagcatagattccccaaagtgaggctcatggtgggaggccactcaccttcctagctgctgctcgaaaaggttttgactgtgttggggtgggggttgggtaagggaatggtcaagactgagaaaggaatgaaatccattcaggaaatatcgacagggctacacgtgatgtccccaaactgctgctattgaagaacttcccaaaacttctttacaaagccctaaaggaaagtttgcatctatgaaaagccaataggctgagacatccaattgctgcatggaaattgatgtacattcaggggacggcaaaaatagctgtaaaatagtgaaaaagagcagtggttgtgctcttttctggccaatgatttacaaaagaatctacttgactctgtccctggagtgaaatccttagggttggaacttgtgggaacattccaacttgctaagcagggtccactgggagggaagctctatctgggaactcacccccagcgcacacacatctcccccagggtcccaaggccccgcagcttcctcccccgaccaaaccccaagacctggatcccaggagacaacagtctccacagtgagagcaacattaagggcaaagccatggagaaatgtgggagaggccggcctcaaatctttccatttaacaaaccccagtgatgggtatggacagcatgcagggcttttggggcgcttccccccgctcctccatcaccctcagcctccacacttcaaagttcaagttcaaagctgttcaagtttcctaccagcaaatagccctaacttgcctctagagtaggccaaatgccaactctgtaaaacacacttacattatcggttacagaatgtcactcttaccgtcatgtcttgcaacaaccctgtgagggcagtattaatgcccccttacagcagaagacactgcagctcgaagacagcttaagtggcagaataatgctagaacagctaaggtttacatgtaccaaataacatgtttcagctcattccatcctcacaacagccccctgaaagtgggtactatcattagtcccatgttatagaaactgcagcagagttgaaaattgcctccaaattaccggaagagtgtatgaagattgaatgtgatgtattcacgtaacatgcttgaaactgcctggcatatactaaacgctaaataaatacatgctaactgcga

SEQ ID NO: 249391 - DNA, 1498 bp, Artificial Sequence
  derived and/or modified sequence
aacttgactctatttttttctctccccgtctcttccctggccttgccctctctctttctgccctgtagccgcgggcgtccaaatgaagctggaattcctccagcgcaaattctgggcggcaacgcggcaggatctggactgcttcgtcatcgacaacaacgggttcattctgatctccaagaggtcccgagagacgggaagatttctgggggaggtggatggtgctgtcctgacccagctgctcagcatgggggtgttcagccaagtgactatgtatgactatcaggccatgtgcaaaccctcgagtcaccaccacagtgcagcccagcccctggtcagcccaatttctgccttcttgacggcgaccaggtggctgctgcaggagctggtgctgttcctgctggagtggagtgtctggggctcctggtacgacagaggggccgaggccaaaagtgtcttccatcactcccacaaacacaagaagcaggacccgctgcagccctgcgacacggagtaccccgtgttcgtgtaccagccggccatccgggaggccaacgggatcgtggagtgcgggccctgccagaaggtatttgtggtgcagcagattcccaacagtaacctcctcctcctggtgacagaccccacctgtgactgcagcatcttcccaccagtgctgcaggaggcgacagaagtcaaatataatgcctctgtcaaatgtgaccggatgcgctcccagaagctccgccggcgaccagactcctgccacgccttccatccagaggagaatgcccaggactgcggcggcgcctcggacacctcagcctcgccgcccctactcctgctgcctgtgtgtgcctgggggctactgccccaactcctgcggtgacaccacccagcctgacctgtgttttggcaaggtgatccttccagagccatcccaaaaagtcagcactgacatgggatgcagctaactgcagttgggtcgcccccaggccaacgctcctctcaatcctgggctggtggcccctggctccggagaatgctggatggaacaggaaaccaatcacctggcaccactttcaagatgcttcatggtgcccggtaccatctgccctaggtctcaacatgagcatacttctgacctaaccttcctgtctcctcttcgggaagccagcgtgagctcagcttggaccaagacaaaataatttagttcttcctgtactccagagtccagacccagccaagaaagggtcagttgtttctgaccctttctgtcggagtggtctctggtagaacccaaggacttctgggtactgagaagcagcagcagaatgaggccaaatgcagagatgaggctaaggcaagaatatgccccaactaaagcatagattccccaaagtgaggctcatggtgggaggccactcaccttcctagctgctgctcgaaaaggttttgactgtgttggggtgggggttgggtaagggaatggtcaagactg

SEQ ID NO: 249392 - DNA, 1619 bp, Artificial Sequence
  derived and/or modified sequence
gtagccgcgggcgtccaaatgaagctggaattcctccagcgcaaattctgggcggcaacgcggcaggatctggactgcttcgtcatcgacaacaacgggttcattctgatctccaagaggtcccgagagagtgactatgtatgactatcaggccatgtgcaaaccctcgagtcaccaccacagtgcagcccagcccctggtcagcccaatttctgccttcttgacggcgaccaggtggctgctgcaggagctggtgctgttcctgctggagtggagtgtctggggctcctggtacgacagaggggccgaggccaaaagtgtcttccatcactcccacaaacacaagaagcaggacccgctgcagccctgcgacacggagtaccccgtgttcgtgtaccagccggccatccgggaggccaacgggatcgtggagtgcgggccctgccagaaggtatttgtggtgcagcagattcccaacagtaacctcctcctcctggtgacagaccccacctgtgactgcagcatcttcccaccagtgctgcaggaggcgacagaagtcaaatataatgcctctgtcaaatgtgaccggatgcgctcccagaagctccgccggcgaccagactcctgccacgccttccatccagaggagaatgcccaggactgcggcggcgcctcggacacctcagcctcgccgcccctactcctgctgcctgtgtgtgcctgggggctactgccccaactcctgcggtgacaccacccagcctgacctgtgttttggcaaggtgatccttccagagccatcccaaaaagtcagcactgacatgggatgcagctaactgcagttgggtcgcccccaggccaacgctcctctcaatcctgggctggtggcccctggctccggagaatgctggatggaacaggaaaccaatcacctggcaccactttcaagatgcttcatggtgcccggtaccatctgccctaggtctcaacatgagcatacttctgacctaaccttcctgtctcctcttcgggaagccagcgtgagctcagcttggaccaagacaaaataatttagttcttcctgtactccagagtccagacccagccaagaaagggtcagttgtttctgaccctttctgtcggagtggtctctggtagaacccaaggacttctgggtactgagaagcagcagcagaatgaggccaaatgcagagatgaggctaaggcaagaatatgccccaactaaagcatagattccccaaagtgaggctcatggtgggaggccactcaccttcctagctgctgctcgaaaaggttttgactgtgttggggtgggggttgggtaagggaatggtcaagactgagaaaggaatgaaatccattcaggaaatatcgacagggctacacgtgatgtccccaaactgctgctattgaagaacttcccaaaacttctttacaaagccctaaaggaaagtttgcatctatgaaaagccaataggctgagacatccaattgctgcatggaaattgatgtacattcaggggacggcaaaaatagctgtaaaatagtgaaaaagagcagtggttgtgctcttttctggccaatgatttacaaaagaa

SEQ ID NO: 249393 - DNA, 2925 bp, Artificial Sequence
  derived and/or modified sequence
atggtgtgcggctgcagcgccctgctgcccctgcccaaccccagacccaccatgcccgccacccccaacttcctggccaaccccagcagcagcagcagatggatccccctgcagcccatgcccgtggcctgggccttcgtgcagaagaccagcgccctgctgtggctgctgctgctgggcaccagcctgagccccgcctggggccaggccaagatccccctggagaccgtgaagctgtgggccgacaccttcggcggcgacctgtacaacaccgtgaccaagtacagcggcagcctgctgctgcagaagaagtacaaggacgtggagagcagcctgaagatcgaggaggtggacggcctggagctggtgagaaagttcagcgaggacatggagaacatgctgagaagaaaggtggaggccgtgcagaacctggtggaggccgccgaggaggccgacctgaaccacgagttcaacgagagcctggtgttcgactactacaacagcgtgctgatcaacgagagagacgagaagggcaacttcgtggagctgggcgccgagttcctgctggagagcaacgcccacttcagcaacctgcccgtgaacaccagcatcagcagcgtgcagctgcccaccaacgtgtacaacaaggaccccgacatcctgaacggcgtgtacatgagcgaggccctgaacgccgtgttcgtggagaacttccagagagaccccaccctgacctggcagtacttcggcagcgccaccggcttcttcagaatctaccccggcatcaagtggacccccgacgagaacggcgtgatcaccttcgactgcagaaacagaggctggtacatccaggccgccaccagccccaaggacatcgtgatcctggtggacgtgagcggcagcatgaagggcctgagaatgaccatcgccaagcacaccatcaccaccatcctggacaccctgggcgagaacgacttcatcaacatcatcgcctacaacgactacgtgcactacatcgagccctgcttcaagggcatcctggtgcaggccgacagagacaacagagagcacttcaagctgctggtggaggagctgatggtgaagggcgtgggcgtggtggaccaggccctgagagaggccttccagatcctgaagcagttccaggaggccaagcagggcagcctgtgcaaccaggccatcatgctgatcagcgacggcgccgtggaggactacgagcccgtgttcgagaagtacaactggcccgactgcaaggtgagagtgttcacctacctgatcggcagagaggtgagcttcgccgacagaatgaagtggatcgcctgcaacaacaagggctactacacccagatcagcaccctggccgacacccaggagaacgtgatggagtacctgcacgtgctgagcagacccatggtgatcaaccacgaccacgacatcatctggaccgaggcctacatggacagcaagctgctgagcagccaggcccagagcctgaccctgctgaccaccgtggccatgcccgtgttcagcaagaagaacgagaccagaagccacggcatcctgctgggcgtggtgggcagcgacgtggccctgagagagctgatgaagctggcccccagatacaagctgggcgtgcacggctacgccttcctgaacaccaacaacggctacatcctgagccaccccgacctgagacccctgtacagagagggcaagaagctgaagcccaagcccaactacaacagcgtggacctgagcgaggtggagtgggaggaccaggccgagagcctgagaaccgccatgatcaacagagagaccggcaccctgagcatggacgtgaaggtgcccatggacaagggcaagagagtgctgttcctgaccaacgactacttcttcaccgacatcagcgacacccccttcagcctgggcgtggtgctgagcagaggccacggcgagtacatcctgctgggcaacaccagcgtggaggagggcctgcacgacctgctgcaccccgacctggccctggccggcgactggatctactgcatcaccgacatcgaccccgaccacagaaagctgagccagctggaggccatgatcagattcctgaccagaaaggaccccgacctggagtgcgacgaggagctggtgagagaggtgctgttcgacgccgtggtgaccgcccccatggaggcctactggaccgccctggccctgaacatgagcgaggagagcgagcacgtggtggacatggccttcctgggcaccagagccggcctgctgagaagcagcctgttcgtgggcagcgagaaggtgagcgacagaaagttcctgacccccgaggacgaggccagcgtgttcaccctggacagattccccctgtggtacagacaggccagcgagcaccccgccggcagcttcgtgttcaacctgagatgggccgagggccccgagagcgccggcgagcccatggtggtgaccgccagcaccgccgtggccgtgaccgtggacaagagaaccgccatcgccgccgccgccggcgtgcagatgaagctggagttcctgcagagaaagttctgggccgccaccagacagtgcagcaccgtggacggcccctgcacccagagctgcgaggacagcgacctggactgcttcgtgatcgacaacaacggcttcatcctgatcagcaagagaagcagagagaccggcagattcctgggcgaggtggacggcgccgtgctgacccagctgctgagcatgggcgtgttcagccaggtgaccatgtacgactaccaggccatgtgcaagcccagcagccaccaccacagcgccgcccagcccctggtgagccccatcagcgccttcctgaccgccaccagatggctgctgcaggagctggtgctgtag

SEQ ID NO: 249394 - DNA, 3414 bp, Artificial Sequence
  derived and/or modified sequence
atggtgtgcggctgcagcgccctgctgcccctgcccaaccccagacccaccatgcccgccacccccaacttcctggccaaccccagcagcagcagcagatggatccccctgcagcccatgcccgtggcctgggccttcgtgcagaagaccagcgccctgctgtggctgctgctgctgggcaccagcctgagccccgcctggggccaggccaagatccccctggagaccgtgaagctgtgggccgacaccttcggcggcgacctgtacaacaccgtgaccaagtacagcggcagcctgctgctgcagaagaagtacaaggacgtggagagcagcctgaagatcgaggaggtggacggcctggagctggtgagaaagttcagcgaggacatggagaacatgctgagaagaaaggtggaggccgtgcagaacctggtggaggccgccgaggaggccgacctgaaccacgagttcaacgagagcctggtgttcgactactacaacagcgtgctgatcaacgagagagacgagaagggcaacttcgtggagctgggcgccgagttcctgctggagagcaacgcccacttcagcaacctgcccgtgaacaccagcatcagcagcgtgcagctgcccaccaacgtgtacaacaaggaccccgacatcctgaacggcgtgtacatgagcgaggccctgaacgccgtgttcgtggagaacttccagagagaccccaccctgacctggcagtacttcggcagcgccaccggcttcttcagaatctaccccggcatcaagtggacccccgacgagaacggcgtgatcaccttcgactgcagaaacagaggctggtacatccaggccgccaccagccccaaggacatcgtgatcctggtggacgtgagcggcagcatgaagggcctgagaatgaccatcgccaagcacaccatcaccaccatcctggacaccctgggcgagaacgacttcatcaacatcatcgcctacaacgactacgtgcactacatcgagccctgcttcaagggcatcctggtgcaggccgacagagacaacagagagcacttcaagctgctggtggaggagctgatggtgaagggcgtgggcgtggtggaccaggccctgagagaggccttccagatcctgaagcagttccaggaggccaagcagggcagcctgtgcaaccaggccatcatgctgatcagcgacggcgccgtggaggactacgagcccgtgttcgagaagtacaactggcccgactgcaaggtgagagtgttcacctacctgatcggcagagaggtgagcttcgccgacagaatgaagtggatcgcctgcaacaacaagggctactacacccagatcagcaccctggccgacacccaggagaacgtgatggagtacctgcacgtgctgagcagacccatggtgatcaaccacgaccacgacatcatctggaccgaggcctacatggacagcaagctgctgagcagccaggcccagagcctgaccctgctgaccaccgtggccatgcccgtgttcagcaagaagaacgagaccagaagccacggcatcctgctgggcgtggtgggcagcgacgtggccctgagagagctgatgaagctggcccccagatacaagctgggcgtgcacggctacgccttcctgaacaccaacaacggctacatcctgagccaccccgacctgagacccctgtacagagagggcaagaagctgaagcccaagcccaactacaacagcgtggacctgagcgaggtggagtgggaggaccaggccgagagcctgagaaccgccatgatcaacagagagaccggcaccctgagcatggacgtgaaggtgcccatggacaagggcaagagagtgctgttcctgaccaacgactacttcttcaccgacatcagcgacacccccttcagcctgggcgtggtgctgagcagaggccacggcgagtacatcctgctgggcaacaccagcgtggaggagggcctgcacgacctgctgcaccccgacctggccctggccggcgactggatctactgcatcaccgacatcgaccccgaccacagaaagctgagccagctggaggccatgatcagattcctgaccagaaaggaccccgacctggagtgcgacgaggagctggtgagagaggtgctgttcgacgccgtggtgaccgcccccatggaggcctactggaccgccctggccctgaacatgagcgaggagagcgagcacgtggtggacatggccttcctgggcaccagagccggcctgctgagaagcagcctgttcgtgggcagcgagaaggtgagcgacagaaagttcctgacccccgaggacgaggccagcgtgttcaccctggacagattccccctgtggtacagacaggccagcgagcaccccgccggcagcttcgtgttcaacctgagatgggccgagggccccgagagcgccggcgagcccatggtggtgaccgccagcaccgccgtggccgtgaccgtggacaagagaaccgccatcgccgccgccgccggcgtgcagatgaagctggagttcctgcagagaaagttctgggccgccaccagacagtgcagcaccgtggacggcccctgcacccagagctgcgaggacagcgacctggactgcttcgtgatcgacaacaacggcttcatcctgatcagcaagagaagcagagagaccggcagattcctgggcgaggtggacggcgccgtgctgacccagctgctgagcatgggcgtgttcagccaggtgaccatgtacgactaccaggccatgtgcaagcccagcagccaccaccacagcgccgcccagcccctggtgagccccatcagcgccttcctgaccgccaccagatggctgctgcaggagctggtgctgttcctgctggagtggagcgtgtggggcagctggtacgacagaggcgccgaggccaagagcgtgttccaccacagccacaagcacaagaagcaggaccccctgcagccctgcgacaccgagtaccccgtgttcgtgtaccagcccgccatcagagaggccaacggcatcgtggagtgcggcccctgccagaaggtgttcgtggtgcagcagatccccaacagcaacctgctgctgctggtgaccgaccccacctgcgactgcagcatcttcccccccgtgctgcaggaggccaccgaggtgaagtacaacgccagcgtgaagtgcgacagaatgagaagccagaagctgagaagaagacccgacagctgccacgccttccaccccgaggagaacgcccaggactgcggcggcgccagcgacaccagcgccagcccccccctgctgctgctgcccgtgtgcgcctggggcctgctgccccagctgctgagatag

SEQ ID NO: 249395 - DNA, 3222 bp, Artificial Sequence
  derived and/or modified sequence
atggccgtggccctgggcaccagaagaagagacagagtgaagctgtgggccgacaccttcggcggcgacctgtacaacaccgtgaccaagtacagcggcagcctgctgctgcagaagaagtacaaggacgtggagagcagcctgaagatcgaggaggtggacggcctggagctggtgagaaagttcagcgaggacatggagaacatgctgagaagaaaggtggaggccgtgcagaacctggtggaggccgccgaggaggccgacctgaaccacgagttcaacgagagcctggtgttcgactactacaacagcgtgctgatcaacgagagagacgagaagggcaacttcgtggagctgggcgccgagttcctgctggagagcaacgcccacttcagcaacctgcccgtgaacaccagcatcagcagcgtgcagctgcccaccaacgtgtacaacaaggaccccgacatcctgaacggcgtgtacatgagcgaggccctgaacgccgtgttcgtggagaacttccagagagaccccaccctgacctggcagtacttcggcagcgccaccggcttcttcagaatctaccccggcatcaagtggacccccgacgagaacggcgtgatcaccttcgactgcagaaacagaggctggtacatccaggccgccaccagccccaaggacatcgtgatcctggtggacgtgagcggcagcatgaagggcctgagaatgaccatcgccaagcacaccatcaccaccatcctggacaccctgggcgagaacgacttcatcaacatcatcgcctacaacgactacgtgcactacatcgagccctgcttcaagggcatcctggtgcaggccgacagagacaacagagagcacttcaagctgctggtggaggagctgatggtgaagggcgtgggcgtggtggaccaggccctgagagaggccttccagatcctgaagcagttccaggaggccaagcagggcagcctgtgcaaccaggccatcatgctgatcagcgacggcgccgtggaggactacgagcccgtgttcgagaagtacaactggcccgactgcaaggtgagagtgttcacctacctgatcggcagagaggtgagcttcgccgacagaatgaagtggatcgcctgcaacaacaagggctactacacccagatcagcaccctggccgacacccaggagaacgtgatggagtacctgcacgtgctgagcagacccatggtgatcaaccacgaccacgacatcatctggaccgaggcctacatggacagcaagctgctgagcagccaggcccagagcctgaccctgctgaccaccgtggccatgcccgtgttcagcaagaagaacgagaccagaagccacggcatcctgctgggcgtggtgggcagcgacgtggccctgagagagctgatgaagctggcccccagatacaagctgggcgtgcacggctacgccttcctgaacaccaacaacggctacatcctgagccaccccgacctgagacccctgtacagagagggcaagaagctgaagcccaagcccaactacaacagcgtggacctgagcgaggtggagtgggaggaccaggccgagagcctgagaaccgccatgatcaacagagagaccggcaccctgagcatggacgtgaaggtgcccatggacaagggcaagagagtgctgttcctgaccaacgactacttcttcaccgacatcagcgacacccccttcagcctgggcgtggtgctgagcagaggccacggcgagtacatcctgctgggcaacaccagcgtggaggagggcctgcacgacctgctgcaccccgacctggccctggccggcgactggatctactgcatcaccgacatcgaccccgaccacagaaagctgagccagctggaggccatgatcagattcctgaccagaaaggaccccgacctggagtgcgacgaggagctggtgagagaggtgctgttcgacgccgtggtgaccgcccccatggaggcctactggaccgccctggccctgaacatgagcgaggagagcgagcacgtggtggacatggccttcctgggcaccagagccggcctgctgagaagcagcctgttcgtgggcagcgagaaggtgagcgacagaaagttcctgacccccgaggacgaggccagcgtgttcaccctggacagattccccctgtggtacagacaggccagcgagcaccccgccggcagcttcgtgttcaacctgagatgggccgagggccccgagagcgccggcgagcccatggtggtgaccgccagcaccgccgtggccgtgaccgtggacaagagaaccgccatcgccgccgccgccggcgtgcagatgaagctggagttcctgcagagaaagttctgggccgccaccagacagtgcagcaccgtggacggcccctgcacccagagctgcgaggacagcgacctggactgcttcgtgatcgacaacaacggcttcatcctgatcagcaagagaagcagagagaccggcagattcctgggcgaggtggacggcgccgtgctgacccagctgctgagcatgggcgtgttcagccaggtgaccatgtacgactaccaggccatgtgcaagcccagcagccaccaccacagcgccgcccagcccctggtgagccccatcagcgccttcctgaccgccaccagatggctgctgcaggagctggtgctgttcctgctggagtggagcgtgtggggcagctggtacgacagaggcgccgaggccaagagcgtgttccaccacagccacaagcacaagaagcaggaccccctgcagccctgcgacaccgagtaccccgtgttcgtgtaccagcccgccatcagagaggccaacggcatcgtggagtgcggcccctgccagaaggtgttcgtggtgcagcagatccccaacagcaacctgctgctgctggtgaccgaccccacctgcgactgcagcatcttcccccccgtgctgcaggaggccaccgaggtgaagtacaacgccagcgtgaagtgcgacagaatgagaagccagaagctgagaagaagacccgacagctgccacgccttccaccccgaggagaacgcccaggactgcggcggcgccagcgacaccagcgccagcccccccctgctgctgctgcccgtgtgcgcctggggcctgctgccccagctgctgagatag

SEQ ID NO: 249396 - DNA, 615 bp, Artificial Sequence
  derived and/or modified sequence
atgtacgactaccaggccatgtgcaagcccagcagccaccaccacagcgccgcccagcccctggtgagccccatcagcgccttcctgaccgccaccagatggctgctgcaggagctggtgctgttcctgctggagtggagcgtgtggggcagctggtacgacagaggcgccgaggccaagagcgtgttccaccacagccacaagcacaagaagcaggaccccctgcagccctgcgacaccgagtaccccgtgttcgtgtaccagcccgccatcagagaggccaacggcatcgtggagtgcggcccctgccagaaggtgttcgtggtgcagcagatccccaacagcaacctgctgctgctggtgaccgaccccacctgcgactgcagcatcttcccccccgtgctgcaggaggccaccgaggtgaagtacaacgccagcgtgaagtgcgacagaatgagaagccagaagctgagaagaagacccgacagctgccacgccttccaccccgaggagaacgcccaggactgcggcggcgccagcgacaccagcgccagcccccccctgctgctgctgcccgtgtgcgcctggggcctgctgccccagctgctgagatag

SEQ ID NO: 249397 - DNA, 804 bp, Artificial Sequence
  derived and/or modified sequence
atgaagctggagttcctgcagagaaagttctgggccgccaccagacaggacctggactgcttcgtgatcgacaacaacggcttcatcctgatcagcaagagaagcagagagaccggcagattcctgggcgaggtggacggcgccgtgctgacccagctgctgagcatgggcgtgttcagccaggtgaccatgtacgactaccaggccatgtgcaagcccagcagccaccaccacagcgccgcccagcccctggtgagccccatcagcgccttcctgaccgccaccagatggctgctgcaggagctggtgctgttcctgctggagtggagcgtgtggggcagctggtacgacagaggcgccgaggccaagagcgtgttccaccacagccacaagcacaagaagcaggaccccctgcagccctgcgacaccgagtaccccgtgttcgtgtaccagcccgccatcagagaggccaacggcatcgtggagtgcggcccctgccagaaggtgttcgtggtgcagcagatccccaacagcaacctgctgctgctggtgaccgaccccacctgcgactgcagcatcttcccccccgtgctgcaggaggccaccgaggtgaagtacaacgccagcgtgaagtgcgacagaatgagaagccagaagctgagaagaagacccgacagctgccacgccttccaccccgaggagaacgcccaggactgcggcggcgccagcgacaccagcgccagcccccccctgctgctgctgcccgtgtgcgcctggggcctgctgccccagctgctgagatag

SEQ ID NO: 249398 - protein, 177 aa, Artificial Sequence
  derived and/or modified sequence
MAHPVQSEFPSAQEPGSAAFLDLPEMEILLTKAENKDDKTLNLSKTLSGPLDLEQNSQGLPFKAISEGHLEAPLPRSPSRASSRRASSIATTSYAQDQEAPRDYLILAVVACFCPVWPLNLIPLIISIMSRSSMQQGNVDGARRLGRLARLLSITLIIMGIVIIMVAVTVNFTVQKK

SEQ ID NO: 249399 - DNA, 534 bp, Artificial Sequence
  derived and/or modified sequence
atggcccaccccgtgcagagcgagttccccagcgcccaggagcccggcagcgccgccttcctggacctgcccgagatggagatcctgctgaccaaggccgagaacaaggacgacaagaccctgaacctgagcaagaccctgagcggccccctggacctggagcagaacagccagggcctgcccttcaaggccatcagcgagggccacctggaggcccccctgcccagaagccccagcagagccagcagcagaagagccagcagcatcgccaccaccagctacgcccaggaccaggaggcccccagagactacctgatcctggccgtggtggcctgcttctgccccgtgtggcccctgaacctgatccccctgatcatcagcatcatgagcagaagcagcatgcagcagggcaacgtggacggcgccagaagactgggcagactggccagactgctgagcatcaccctgatcatcatgggcatcgtgatcatcatggtggccgtgaccgtgaacttcaccgtgcagaagaagtag

SEQ ID NO: 249400 - DNA, 534 bp, Artificial Sequence
  derived and/or modified sequence
atggctcaccctgtccagagcgaattccctagcgcccaggaaccgggctcagctgccttcctcgaccttccggaaatggagatccttttaaccaaggcagagaacaaagatgacaagactctgaacctctcgaaaacgctgagcggacctctggacctcgagcagaactcccagggcttacccttcaaagctattagcgaaggccatttggaggctcctctgcccaggagtccaagtcgcgccagcagccgccgtgcatcttccattgcaaccacatcttatgcacaggatcaggaagcccccagggattacctgatccttgcagtcgtggcatgcttctgccctgtctggcccttgaatttgataccccttattatcagtatcatgtcaaggtcttcaatgcagcagggcaatgtggacggcgccaggagacttggaagactggcacgcctgctcagtatcactctgatcattatgggtatcgttatcatcatggtagccgtcacggtgaattttaccgtgcagaagaaatag

SEQ ID NO: 249401 - DNA, 534 bp, Artificial Sequence
  derived and/or modified sequence
atggcccaccctgtgcagagcgagttccccagcgcccaggagcccggcagcgctgccttcctggacctgcctgagatggagatcctgctgaccaaggccgagaacaaggatgacaagaccctgaacctgagcaagaccctgagcggccccctggacctggagcagaacagccagggcctgcccttcaaggccatcagcgagggccacctggaggcccccctgcccaggagccccagccgggccagcagccggcgggccagcagcatcgccaccaccagctatgcccaggaccaggaggccccccgggactacctgatcctggccgtggtggcctgcttctgccctgtgtggcccctgaacctgatccccctcatcatcagcatcatgagccgcagctccatgcagcagggcaatgtggatggagcccggcggctgggccgcctggcccggctgctgagcatcaccctcatcatcatgggcatcgtcatcatcatggtggccgtgacagtgaacttcaccgtgcagaagaagtag

SEQ ID NO: 249402 - DNA, 534 bp, Artificial Sequence
  derived and/or modified sequence
atggcccaccccgtgcagagcgagttccccagcgcccaggagcccggctccgccgctttcctagatcttcccgaaatggagatcctcttaaccaaagcggagaacaaggacgacaagacacttaacctgtccaaaaccctcagcgggcctctggatctggaacagaactcccagggattaccttttaaggccatcagtgaaggtcacctcgaggcacccctgcctcggtcaccaagcagagcaagcagtaggagggccagttcgattgcaacaacaagctatgcccaggatcaggaagccccacgggactatctcattcttgcagtggtggcctgtttttgccctgtctggcctctgaatctgatccctctgatcatcagcataatgtcgaggtctagcatgcagcaggggaatgtcgacggagctcggcgactcgggcgcctggctcgcctgctgtccataaccctaattataatggggatcgtgattattatggtagcagtcaccgtaaacttcaccgttcagaagaaatag

SEQ ID NO: 249403 - DNA, 534 bp, Artificial Sequence
  derived and/or modified sequence
atggcccatccagttcagtccgagttcccatcggcacaggagcctgggagcgccgcattcttagatctcccagaaatggagattctgctgacaaaggccgagaataaagacgataagacactgaatctgtctaagacactgtccggccctttagacctggagcagaactcgcaggggctccctttcaaagctatttctgagggtcatctcgaggcaccactgcctcgaagccctagcagggcctcgtccaggcgagctagttctattgccaccacgtcctatgctcaggatcaggaggccccacgtgactatctcatcctggccgtggtggcctgcttctgcccggtgtggcccctcaatttaattcctctgattattagtattatgagccggagctcaatgcaacaggggaacgtggatggcgctcgcaggctggggcgtttagccagactgctgtccattacattgatcattatgggtatcgttataatcatggtggccgtgaccgtgaatttcacggtgcagaagaagtag

SEQ ID NO: 249404 - DNA, 3596 bp, Artificial Sequence
  derived and/or modified sequence
cattcttctctctgctctctgagctttccgttgcttccctgcccatctgtgctctcagcagcaccagcaaagttggcctcaaacttgaacaaagctgcaggctccagcgtctttctgggagctccgcgggggcagcaggcaggccccagcctctgaactcagctggcttgagaagctcagcccaacccttccagcacccagccggccctccgtctcctgagggacgcccctgcccccgacctggaggccctcagtctgggctggggaatggcgcgctgaggtccctccagagccccttgtcccagcctggagctgcagccgcgcaaggcccaggcccccatggcccacccggtgcagtccgagtttccttcagcacaggagccaggctccgccgcattcctggacctgccggagatggagatactcctcaccaaggcagagaacaaggatgacaagaccctgaatctgtccaagaccctctcggggcctctggatctggagcagaacagccagggcctacccttcaaggccatctccgaggggcacctggaggccccactgcctcggtccccctcccgggccagctcaaggagggcgtcctccatcgccaccacctcctatgcccaagaccaagaagcccccagagattacctcatcctggccgtcgtcgcctgcttctgccccgtctggcccctcaacctcatccccctcatcatttccatcatgtctcgaagcagcatgcaacagggcaacgtggacggcgcccggaggctgggccgcctggctcggctgctcagcattaccctcatcatcatgggcatcgtcattatcatggtggccgtgaccgtcaacttcacagttcagaagaaataaacttaagcagggagctgggctagcagaggccggccctggccatcgggagagctctgacctgcacaccgcgggaggccagggtgctgactgtcaagcatcccctgtccccaagttccaaaagcacagactcaaagggaaaccccccagtcacccactgtcagcccccatctgacaagaaagcctggagcgaggaaggaaagcacagcgaacccaatgggtaacgtggtttactctcccggacgcgtcctgggatctcaaccccagcagtctggcttgtttctcattcccacaatttcctgggttccaccaagcagcgaaaactgccaggatgaatgaggaaaaaacccagccccacaaacgagacacacgctggcggggagagacgcagcagagctccttcctgtctgtggactcggagcaaagacgtggggccccatcttttgtgttttcctcaagcggggaaagaatggactgtttgcatgcttcgtgccacacgcccgcggtgatcccagccagggccccgagcgcagaggcggagctgtgctcagcacaggcctgggacctcccccggcaggcacctgtggggggtgcagctcccgggaaggaggcaactgcctcacttaacatcctccgctgcaaggtggtggcgccgagaggcgtgtctgtgaagacaggtaccaggatggcaggacccgcacgcctcttcccacacctgtcagcttcggaagcatctctcgaggactctggtcccaggatgtctcccaggacaagccagtctgcctcttcctcctacttctgctgtagcctgggaccagacctggccaaggtcagccagcggggagggccgaggtctgagctctcgtcctgccgtggcccccgcgatggcctggggtgcaagcttggggctccgtctggtgctgcttaggtagtttcaggcttccagcccagccctatgctctgtgcttggccctgggcccctggccatccacaaacagcagaggccttccctggaggaggctttgggaccacccctggggggacttcccaaagggtcccaggctgtcaggggcgtttgcgccacctgcaagggcgtgggtcagagagtttttatgggggtctgttgtttgaccgtcctgagaccgagggaagggctcagctgaaggaccccgtctgcaggagagtcgggggaccaggtttgggaatacacttgcatgtacagagcctggggcctggacgccacggcctctcatcttaggacctaatgggacccccgaaaggagccaagtggggccctcggcctcttccttcgttccaggcccatgattttccctacacttctccctggcccaggctccagccacaggcacctctcctgcccccgcccaccctcctgaccgcagctcccaggccctggagacctccaggctttcctgccctgggcagccccacctcacagccagagtcaatgccttcatgggaagggctcccagccacacccagagtggcccaaagctgttgaagtcagcatcctttgtcccatcaggaccctcctgcctcctctccaggcccttgttcgcctccccaccctcctcagaggcccggggaagggaagagcaggtcagtacagaggttctgtctacagggaggggccctgggtctatgcacagctggagctctgagccttccacagcccgtgtgactgctagagggcaggggtgcagggctcagggggcccgggctggtcctttggggctggtgttcctacgtcagtccccacctggggaataaactccagcctctcctgctcatacagaagggactggttgggtttgctttatgggatctttgagaccaaaacagatgctcctgtttgctgggggagggtgtgagcacggagtatttctgtccctcgtgaagtcacgtcacacaggggagaggcgaggtcgatggaactggccacgcacaggctctggctctggaaggagggatgatgagtgggcgttttcccggcaggcccccggggtcctcagcctcagcaacccagggagaggacagaaacgaaccgatggttgagggattgtcacgggaggaacatgacacccgaagggactctaggtgccctcggagtgccacacatgcccagaccttctcacacccacacaaataggctctgccgtgcactcctacacacacacacacacacacacacgcttgttcacactcagaacccaggacagccacagccaccgcttaggggaagccactgcagatgcccctggaatgggcacagcacagccagggcgctcttccaggcaggcgaggataacttgagagtttcctagggcaccagggacagagctcagaggcccccgaggtgtgtgtaggaggcggaggcccgcagagcacagagcaggagaagggcttgggccctggaggagaaagccattctggacaccaggggacctggacggagggtccccacagcccgtgccccacgccgcctggaggccagaggggtcagtggccctgctgtcccggctccatcttggttctagccgccacctgcatgaacacagtggcccggcttaacgcactaacccagcctctccctgtgtcccacagggagtagcaagacccaccccacactgccttcaccatctacaccagtgacgccgctgtgtgtcttagcatggaaataaataaacctgaatgtacgtgctcgc

SEQ ID NO: 249405 - protein, 153 aa, Artificial Sequence
  derived and/or modified sequence
MLEKLMGADSLQLFRSRYTLGKIYFIGFQRSILLSKSENSLNSIAKETEEGRETVTRKEGWKRRHEDGYLEMAQRHLQRSLCPWVSYLPQPYAELEEVSSHVGKVFMARNYEFLAYEASKDRRQPLERMWTCNYNQQKDQSCNHKEITSTKAE

SEQ ID NO: 249406 - protein, 82 aa, Artificial Sequence
  derived and/or modified sequence
MAQRHLQRSLCPWVSYLPQPYAELEEVSSHVGKVFMARNYEFLAYEASKDRRQPLERMWTCNYNQQKDQSCNHKEITSTKAE

SEQ ID NO: 249407 - DNA, 462 bp, Artificial Sequence
  derived and/or modified sequence
atgctcgaaaaactcatgggagctgattcactccagctgtttagatcaagatataccctcggcaaaatatactttatcggctttcagaggtcaatactgctgtcaaagagtgaaaactctttaaactccattgcaaaagaaacagaggaaggcagagaaacagtcacccgcaaggagggctggaagcgtcgccatgaggatggatacttggaaatggcccagcgacacctccagcgaagcttgtgcccgtgggtgtcctacctgccccaaccatacgcagagctggaagaggtcagttcacatgtggggaaggtcttcatggcaagaaactatgaattcttagcatatgaggcaagcaaagacagacgtcagccgctggagcgcatgtggacctgtaattataaccagcagaaagatcagagttgcaaccacaaggagattacttcaacgaaggccgaatag

SEQ ID NO: 249408 - DNA, 462 bp, Artificial Sequence
  derived and/or modified sequence
atgctggagaagctgatgggcgctgacagcctgcagctgttccgcagccgctacaccctgggcaagatctacttcatcggcttccagaggagcatcctgctgagcaagtctgagaacagcctgaacagcatcgccaaggagacagaggagggccgggagaccgtgaccaggaaggagggctggaagagaagacatgaagatggctacctggagatggcccagaggcacctgcagaggagcctgtgcccctgggtgtcctacctgccccagccctatgcagagctggaggaggtgagcagccacgtgggcaaggtgttcatggccagaaattatgagttcctggcctatgaggccagcaaggaccggcggcagcccctggagaggatgtggacctgcaactacaaccagcagaaggaccagagctgcaaccacaaggagatcaccagcaccaaggccgagtag

SEQ ID NO: 249409 - DNA, 462 bp, Artificial Sequence
  derived and/or modified sequence
atgctggagaagctgatgggcgccgacagcctgcagctgttccggtcgagatacaccctgggtaagatctattttatcggctttcaacgcagtattctcttaagtaaatccgaaaacagcctcaattctattgcaaaagaaacagaggagggccgggagaccgtgacacggaaagaaggatggaagaggcggcacgaggacggatacctcgaaatggcccagcgacatctgcaacgctccctgtgcccttgggtttcctatctccctcagccttacgccgaactggaagaggtctccagtcatgtcggaaaggtgttcatggccaggaactacgagttcctggcatacgaggctagcaaagatagaagacagcctctagaaagaatgtggacctgtaattacaaccagcagaaagatcagagttgcaaccacaaagagatcacatcaaccaaggccgaatag

SEQ ID NO: 249410 - DNA, 462 bp, Artificial Sequence
  derived and/or modified sequence
atgctggagaagctcatgggtgctgacagtctccagctctttcgatctagatacaccttgggcaagatctacttcataggcttccaacggagcatcctcctcagcaaatccgagaattctctgaatagcatcgcaaaggagactgaggaggggagggagactgtcacccgtaaagaaggctggaaacgccgacatgaagatggttatctggagatggcccagcgacacctgcaacggagtttgtgcccctgggtctcctacctccctcagccctacgcagagctcgaggaggtgtcttcacatgtagggaaggtgtttatggcacgcaattatgagtttctggcctatgaggcctccaaagaccggaggcagccgctcgagaggatgtggacttgtaattacaatcagcagaaggatcagtcctgcaaccacaaagagattacctctaccaaggcagagtag

SEQ ID NO: 249411 - DNA, 742 bp, Artificial Sequence
  derived and/or modified sequence
tcatctctgcttcacaatgccgatgatttagctgggaggacccaaaatgctggaaaagctgatgggtgctgattctctccagcttttcagatccagatatacattgggtaaaatctacttcataggttttcaaaggagcattcttctgagcaaatctgaaaactctctaaactctattgcaaaggagacagaagaaggaagagagacggtaacaaggaaagaaggatggaagagaaggcatgaggacggctatttggaaatggcacagaggcatttacagagatcattatgtccttgggtctcttaccttcctcagccctatgcagagcttgaagaagtaagcagccatgttggaaaagtcttcatggcaagaaactatgagttccttgcctatgaggcctctaaggaccgcaggcagcctctagaacgaatgtggacctgcaactacaaccagcaaaaagaccagtcatgcaaccacaaggaaataacttctaccaaagctgaatgagtttggaagcagattcttcccagccaatccttctgatgacaatgtagtctggccaacatcttcactggactctgacggactctgtgtctgggacccagctgataacacgtggtgatgggattgtatttgcaactctctggtcagtaagtgataaaatgccatttctatgcacccacctggcctgtgtgactgggagaatctctctttttattaaatgtgcttcaagttttaaca

SEQ ID NO: 249412 - DNA, 1009 bp, Artificial Sequence
  derived and/or modified sequence
ccaaacttctttcatttaaagaaccaaacttctttaaataaaaatgactcacaataatttaatattttaccatttacaaagagattaactacaacaatattgatcttgagttaatttcccacgaataacattttcatttcttaaaatttgctgaatggaaagccagaaagtagagtgaagcaagtaatgtgtgtgatttggaaagggcatggcaggaggtctcatctctgcttcacaatgccgatgatttagctgggaggacccaaaatgctggaaaagctgatgggtgctgattctctccagcttttcagggtataaaggaatctgaacacgactgatattttctttaatttttagatccagatatacattgggtaaaatctacttcataggttttcaaaggagcattcttctgagcaaatctgaaaactctctaaactctattgcaaaggagacagaagaaggaagagagacggtaacaaggaaagaaggatggaagagaaggcatgaggacggctatttggaaatggcacagaggcatttacagagatcattatgtccttgggtctcttaccttcctcagccctatgcagagcttgaagaagtaagcagccatgttggaaaagtcttcatggcaagaaactatgagttccttgcctatgaggcctctaaggaccgcaggcagcctctagaacgaatgtggacctgcaactacaaccagcaaaaagaccagtcatgcaaccacaaggaaataacttctaccaaagctgaatgagtttggaagcagattcttcccagccaatccttctgatgacaatgtagtctggccaacatcttcactggactctgacggactctgtgtctgggacccagctgataacacgtggtgatgggattgtatttgcaactctctggtcagtaagtgataaaatgccatttctatgcacccacctggcctgtgtgactgggagaatctctctttttattaaatgtgcttcaagttttaaca

SEQ ID NO: 249413 - DNA, 462 bp, Artificial Sequence
  derived and/or modified sequence
atgctggagaagctgatgggcgccgacagcctgcagctgttcagaagcagatacaccctgggcaagatctacttcatcggcttccagagaagcatcctgctgagcaagagcgagaacagcctgaacagcatcgccaaggagaccgaggagggcagagagaccgtgaccagaaaggagggctggaagagaagacacgaggacggctacctggagatggcccagagacacctgcagagaagcctgtgcccctgggtgagctacctgccccagccctacgccgagctggaggaggtgagcagccacgtgggcaaggtgttcatggccagaaactacgagttcctggcctacgaggccagcaaggacagaagacagcccctggagagaatgtggacctgcaactacaaccagcagaaggaccagagctgcaaccacaaggagatcaccagcaccaaggccgagtag

SEQ ID NO: 249414 - DNA, 1836 bp, Artificial Sequence
  derived and/or modified sequence
atgcccggcggcaagagaggcctggtggccccccagaacaccttcctggagaacatcgtgagaagaagcagcgagagcagcttcctgctgggcaacgcccagatcgtggactggcccgtggtgtacagcaacgacggcttctgcaagctgagcggctaccacagagccgacgtgatgcagaagagcagcacctgcagcttcatgtacggcgagctgaccgacaagaagaccatcgagaaggtgagacagaccttcgacaactacgagagcaactgcttcgaggtgctgctgtacaagaagaacagaacccccgtgtggttctacatgcagatcgcccccatcagaaacgagcacgagaaggtggtgctgttcctgtgcaccttcaaggacatcaccctgttcaagcagcccatcgaggacgacagcaccaagggctggaccaagttcgccagactgaccagagccctgaccaacagcagaagcgtgctgcagcagctgacccccatgaacaagaccgaggtggtgcacaagcacagcagactggccgaggtgctgcagctgggcagcgacatcctgccccagtacaagcaggaggcccccaagacccccccccacatcatcctgcactactgcgccttcaagaccacctgggactgggtgatcctgatcctgaccttctacaccgccatcatggtgccctacaacgtgagcttcaagaccaagcagaacaacatcgcctggctggtgctggacagcgtggtggacgtgatcttcctggtggacatcgtgctgaacttccacaccaccttcgtgggccccggcggcgaggtgatcagcgaccccaagctgatcagaatgaactacctgaagacctggttcgtgatcgacctgctgagctgcctgccctacgacatcatcaacgccttcgagaacgtggacgagggcatcagcagcctgttcagcagcctgaaggtggtgagactgctgagactgggcagagtggccagaaagctggaccactacctggagtacggcgccgccgtgctggtgctgctggtgtgcgtgttcggcctggtggcccactggctggcctgcatctggtacagcatcggcgactacgaggtgatcgacgaggtgaccaacaccatccagatcgacagctggctgtaccagctggccctgagcatcggcaccccctacagatacaacaccagcgccggcatctgggagggcggccccagcaaggacagcctgtacgtgagcagcctgtacttcaccatgaccagcctgaccaccatcggcttcggcaacatcgcccccaccaccgacgtggagaagatgttcagcgtggccatgatgatggtgggcagcctgctgtacgccaccatcttcggcaacgtgaccaccatcttccagcagatgtacgccaacaccaacagataccacgagatgctgaacaacgtgagagacttcctgaagctgtaccaggtgcccaagggcctgagcgagagagtgatggactacatcgtgagcacctggagcatgagcaagggcatcgacaccgagaaggtgctgagcatctgccccaaggacatgagagccgacatctgcgtgcacctgaacagaaaggtgttcaacgagcaccccgccttcagactggccagcgacggctgcctgagagccctggccgtggagttccagaccatccactgcgcccccggcgacctgatctaccacgccggcgagagcgtggacgccctgtgcttcgtggtgagcggcagcctggaggtgatccaggacgacgaggtggtggccatcctggaccacctgagctag

SEQ ID NO: 249415 - DNA, 1836 bp, Artificial Sequence
  derived and/or modified sequence
atgcccggggggaaaaggggactggtggcccctcaaaatacattcctggagaacattgttcgtagaagctcggaaagtagctttcttcttggaaacgcgcagatagtcgattggcctgtggtgtacagcaacgacggattttgcaagctgtcaggataccatagagccgacgtgatgcagaagtcttctacctgctctttcatgtacggcgaattgaccgacaagaagacgatcgagaaggtgcgccagacattcgacaactatgagagtaactgcttcgaggtattactttacaagaaaaaccgtacaccagtatggttctatatgcagatcgcccccattcgcaatgaacatgagaaagtggtcctgtttctgtgcaccttcaaggatattacactgtttaaacagccaattgaagacgattctacaaaaggctggaccaaattcgctaggcttaccagggccctgaccaacagtaggtcagtgctgcaacagctgacacctatgaacaagaccgaggttgtccacaagcacagtagactcgcagaggtcctgcagctgggctctgatattctgcctcagtataagcaggaggccccgaagactcctccccatattattttgcactactgcgctttcaagacgacctgggattgggtgattctgattcttaccttctacacagcgatcatggttccatacaatgtgtcattcaagaccaaacagaacaatatcgcttggctcgtgctggattccgtagtcgacgtaatctttctcgtggacatcgtgctcaatttccatacaacttttgtgggcccaggtggagaagtcatctcggaccccaagctgatcagaatgaactacctcaagacttggttcgtcattgatcttctttcctgtttaccttacgatataattaatgcttttgagaatgtcgatgagggtatctcatcgctgttctcttctctgaaggtggttcgtttgctcagactcggcagggttgccaggaaattggatcattatcttgagtacggcgcggccgtattagtgctcctcgtgtgtgtgttcggactggtggcccattggctggcatgtatttggtacagtatcggtgattacgaagtgatcgatgaggtcactaacaccatccagatcgatagctggctgtaccagctagcactctcaatcggcactccgtatcgttataatacatcagccggaatctgggagggaggcccatccaaggattcgctgtatgtgagctctctatacttcaccatgacatcactgactaccatcggcttcggcaacatagcacccaccaccgacgtggaaaaaatgtttagtgtcgctatgatgatggtaggctcactgctctacgcaacaatttttggtaatgtcacaaccatttttcaacagatgtacgccaacaccaaccgataccacgagatgttgaacaatgttcgtgactttctcaaactataccaggtgcccaaagggcttagcgaacgtgtgatggactatatcgtaagcacgtggagtatgtcaaaaggaatcgatacagaaaaagtgttgagcatctgccctaaagacatgagagcggacatctgcgtacacttgaatcggaaagtgtttaatgagcacccagccttccggcttgcctctgatgggtgtctccgggccctggccgttgagtttcagacgattcactgtgctccaggagatctgatataccatgcaggagagtcagttgacgctctatgtttcgtggttagcggcagcttagaagtaatacaagacgatgaggtggtcgctattttagaccacctctcctag

SEQ ID NO: 249416 - DNA, 1836 bp, Artificial Sequence
  derived and/or modified sequence
atgcctgggggcaagaggggcctggtggccccccagaacaccttcctggagaacatcgtgagaagaagcagcgagagcagcttcctgctgggcaatgcccagatcgtggactggcctgtggtgtacagcaatgatggcttctgcaagctgagcggctaccacagagcagatgtgatgcagaagagcagcacctgcagcttcatgtatggagagctgacagacaagaagaccatcgagaaggtgcggcagacctttgacaactatgagagcaactgctttgaggtgctgctgtacaagaagaacagaacacctgtgtggttctacatgcagatcgcccccatcagaaatgagcacgagaaggtggtgctcttcctgtgcaccttcaaggacatcaccctcttcaagcagcccattgaagatgacagcaccaagggctggaccaagtttgcccggctgacccgggccctgaccaacagccgctctgtgctgcagcagctgacccccatgaacaagacagaggtggtgcacaagcacagccggctggccgaggtgctgcagctgggcagtgacatcctgccccagtacaagcaggaggcccccaagaccccaccccacatcatcctgcactactgtgccttcaagaccacctgggactgggtgatcctgatcctgaccttctacacagccatcatggtgccctacaacgtgtccttcaagaccaagcagaacaacatcgcctggctggtgctggacagcgtggtggatgtgatcttcctggtggacatcgtgctgaacttccacaccacctttgtgggccctggaggagaggtgatcagtgaccccaagctgatccgcatgaactacctgaagacctggtttgtgattgacctgctgagctgcctgccctatgacatcatcaatgcctttgaaaatgtggatgagggcatcagcagcctcttcagcagcctgaaggtggtgcggctgctgcggctgggccgggtggccaggaagctggaccactacctggagtatggagctgctgtgctggtgctgctggtgtgtgtgtttggcctggtggcccactggctggcctgcatctggtacagcatcggggactatgaggtgattgatgaggtgaccaacaccatccagattgacagctggctgtaccagctggccctgagcatcggcaccccctaccgctacaacaccagcgctggcatctgggagggcggccccagcaaggacagcctgtatgtgagcagcctgtacttcaccatgaccagcctgaccaccatcggctttggaaacatcgcccccaccacagatgtggagaagatgttttctgtggccatgatgatggtgggcagcctgctgtatgccaccatctttggaaatgtgaccaccatcttccagcagatgtatgccaacaccaaccgctaccacgagatgctgaacaacgtgcgggacttcctgaagctgtaccaggtgcccaagggcctgtctgagcgggtgatggactacatcgtgtccacctggagcatgagcaaaggaattgacacagagaaggtgctgagcatctgccccaaggacatgagagctgacatctgtgtgcacctgaacaggaaggtgttcaatgagcacccagccttccggctggccagtgatggctgcctgcgggccctggccgtggagttccagaccatccactgtgcccctggggacctgatctaccacgccggggagagcgtggatgccctgtgctttgtggtgtctggcagcctggaggtgatccaggatgatgaggtggtggccatcctggaccacctgtcctag

SEQ ID NO: 249417 - DNA, 1836 bp, Artificial Sequence
  derived and/or modified sequence
atgcccggcggcaagcggggcctggtggccccccagaacaccttcctcgagaacattgttcgacgcagttcagagagctcttttctacttggtaacgcccagatcgtggactggcccgtcgtatattcaaacgacggcttttgtaagttaagcggatatcatcgggccgatgtgatgcaaaagtcttctacatgctccttcatgtacggggaactgactgataagaaaacaattgagaaggtgcgccagactttcgacaactacgagagcaattgcttcgaggttctgctctataagaaaaataggactcccgtttggttttatatgcagatcgcaccgatccgaaacgaacacgagaaagtggtgctctttctctgcacttttaaagacataaccctgtttaagcaacccattgaagacgacagcaccaaagggtggactaagttcgcacgccttactcgcgctctgaccaacagcaggtccgtgctccagcagttgacacccatgaacaaaaccgaggttgtgcacaaacactcccgacttgccgaagtgctgcagctgggcagcgatatcctgcctcagtataagcaggaggcccctaaaactcctcctcacataatcttacactactgcgccttcaaaactacctgggactgggtcatccttatcctaacattctatacagcgatcatggtgccatacaacgtgtctttcaaaacaaagcaaaacaacatcgcttggctggtcctggacagcgtcgtggacgtcatattccttgtagacattgtgctgaatttccacacaacctttgttgggcccggtggagaggtgataagcgatccgaagctaatcagaatgaactacctgaagacttggtttgtgatcgacctgttgtcctgcctcccctacgacattattaatgcattcgagaacgtggacgaagggatcagttctcttttcagcagcctgaaggttgtccgactcctgcgactgggtcgcgttgcccggaagctcgatcactatttggagtatggagccgctgtgttagtcttgctggtgtgcgtgtttggcctggtcgcccactggcttgcctgcatctggtactccatcggtgattatgaggtgattgatgaagttaccaataccatccagatcgactcctggttgtatcagttggccctgagcattgggaccccttacaggtataataccagtgccggtatttgggagggaggaccatctaaagacagcctgtatgtaagcagtttgtattttacaatgacctctctgaccactattggctttggcaatattgcacctacaacggatgttgaaaagatgttttccgttgctatgatgatggtcgggagtctgctatacgccaccatcttcggaaatgtgactacaatttttcagcaaatgtacgcgaataccaacagataccatgaaatgcttaacaatgtgcgggattttctgaagctgtatcaagtccccaagggactaagtgagagggttatggactatatcgtgagcacctggtccatgagcaagggcatcgatacggaaaaggtattgtcgatctgtccaaaggatatgcgggcagatatatgcgttcacctaaatagaaaggtgttcaatgagcatccagcttttcgcctagcatcggacggttgcctccgagcccttgctgtagagtttcagactattcactgcgcacctggagacctgatttatcacgccggggagagcgttgacgcgctgtgtttcgtcgtcagcgggagcctggaggttattcaggatgatgaggtggtggctatcttggatcacctcagttag

SEQ ID NO: 249418 - DNA, 1836 bp, Artificial Sequence
  derived and/or modified sequence
atgcccggtgggaaacgcggtctggtggctcctcagaacacttttctggaaaatatagtgcgacgctcctcagagtcatcttttcttctcggtaatgcacaaatcgtcgattggccggtggtttactccaatgacggtttttgcaaactgtcaggataccaccgtgccgatgtcatgcagaagtcatcgacttgctccttcatgtatggggaactaaccgacaagaagacgatagagaaggtccgtcagacgttcgacaactatgagtccaactgtttcgaggtccttctatataagaagaatcggactccagtgtggttttacatgcagatcgcacctattcgcaatgaacacgagaaagttgtgctcttcctttgtacctttaaggatattaccctgttcaaacagcccattgaggacgacagcactaagggctggaccaagttcgcacgcctcactcgcgcactgacaaactcccgaagcgtattacagcagctgaccccgatgaataagacggaagttgttcacaagcacagtaggttggctgaggtcctccagttgggctcggatatcctgcctcaatacaaacaggaagcacctaaaacccccccacatattatcctgcactattgcgcatttaagactacttgggactgggtaatcctgatcctcaccttctacactgcgatcatggtgccctacaacgtatcatttaaaacaaagcagaataacattgcatggctcgttctcgactcagtcgtggacgttatttttcttgtcgatatcgtcctgaacttccataccaccttcgtagggccaggaggtgaggtgattagtgaccccaagctgattagaatgaactacctgaagacctggttcgtgattgacctgctgtcgtgcctcccgtatgatattattaatgccttcgaaaacgtcgacgaagggattagcagtctgttctccagcttgaaggtggtaaggctcctgaggctgggccgtgtggccaggaaattggaccactatcttgagtacggcgctgctgtcctggtattactcgtgtgtgtcttcggcctggtggcacactggttggcttgcatctggtactctatcggagattatgaggtgattgacgaggtcacaaatacaatacagattgatagttggctgtatcagctagctttgagcattggcaccccctaccgctataatacctccgctggcatctgggaagggggtccttccaaagacagcctctatgtgtcaagtttgtacttcacaatgacctctctgacgaccatcggcttcggcaacatagccccaacgactgatgttgagaaaatgttctctgtcgctatgatgatggtcggctccttactttacgccacgatatttggtaatgttactacaattttccagcagatgtacgccaataccaatagatatcacgaaatgctcaacaatgttagggatttcttaaaattgtaccaggtgcctaaaggcctgtccgaacgtgttatggactatattgtctcgacatggagtatgtctaagggaatagataccgagaaggtactgtctatatgtcctaaagatatgcgcgctgacatctgcgtgcacttgaaccggaaggtcttcaacgagcatcctgcattcaggcttgcatccgacggctgcctacgggcattggcggtagaatttcagacaattcactgtgccccaggggatcttatatatcacgcaggagaatctgtggatgcattgtgctttgtcgtgtctggatccctggaggtcatccaggatgatgaagtcgtggcaatactcgaccacttgagctag

SEQ ID NO: 249419 - DNA, 2711 bp, Artificial Sequence
  derived and/or modified sequence
atgccggggggcaagagagggctggtggcaccgcagaacacatttttggagaacatcgtcaggcgctccagtgaatcaagtttcttactgggaaatgcccagattgtggattggcctgtagtttatagtaatgacggtttttgtaaactctctggatatcatcgagctgacgtcatgcagaaaagcagcacttgcagttttatgtatggggaattgactgacaagaagaccattgagaaagtcaggcaaacttttgacaactacgaatcaaactgctttgaagttcttctgtacaagaaaaacagaacccctgtttggttttatatgcaaattgcaccaataagaaatgaacatgaaaaggtggtcttgttcctgtgtactttcaaggatattacgttgttcaaacagccaatagaggatgattcaacaaaaggttggacgaaatttgcccgattgacacgggctttgacaaatagccgaagtgttttgcagcagctcacgccaatgaataaaacagaggtggtccataaacattcaagactagctgaagttcttcagctgggatcagatatccttcctcagtataaacaagaagcgccaaagacgccaccacacattattttacattattgtgcttttaaaactacttgggattgggtgattttaattcttaccttctacaccgccattatggttccttataatgtttccttcaaaacaaagcagaacaacatagcctggctggtactggatagtgtggtggacgttatttttctggttgacatcgttttaaattttcacacgactttcgtggggcccggtggagaggtcatttctgaccctaagctcataaggatgaactatctgaaaacttggtttgtgatcgatctgctgtcttgtttaccttatgacatcatcaatgcctttgaaaatgtggatgagggaatcagcagtctcttcagttctttaaaagtggtgcgtctcttacgactgggccgtgtggctaggaaactggaccattacctagaatatggagcagcagtcctcgtgctcctggtgtgtgtgtttggactggtggcccactggctggcctgcatatggtatagcatcggagactacgaggtcattgatgaagtcactaacaccatccaaatagacagttggctctaccagctggctttgagcattgggactccatatcgctacaataccagtgctgggatatgggaaggaggacccagcaaggattcattgtacgtgtcctctctctactttaccatgacaagccttacaaccataggatttggaaacatagctcctaccacagatgtggagaagatgttttcggtggctatgatgatggttggctctcttctttatgcaactatttttggaaatgttacaacaattttccagcaaatgtatgccaacaccaaccgataccatgagatgctgaataatgtacgggacttcctaaaactctatcaggtcccaaaaggccttagtgagcgagtcatggattatattgtctcaacatggtccatgtcaaaaggcattgatacagaaaaggtcctctccatctgtcccaaggacatgagagctgatatctgtgttcatctaaaccggaaggtttttaatgaacatcctgcttttcgattggccagcgatgggtgtctgcgcgccttggcggtagagttccaaaccattcactgtgctcccggggacctcatttaccatgctggagaaagtgtggatgccctctgctttgtggtgtcaggatccttggaagtcatccaggatgatgaggtggtggctattttagatcatctttcgtaagatcagtgatgtgaagaaagaggaggaggagcgcctccggcagaagaatgaggtgaccctcagcattcccgtggaccacccagtcagaaagctcttccagaagttcaagcagcagaaggagctgcggaatcagggctcaacacagggtgaccctgagaggaaccaactccaggtagagagccgctccttacagaatggagcctccatcaccggaaccagcgtggtgactgtgtcacagattactcccattcagacgtctctggcctatgtgaaaaccagtgaatcccttaagcagaacaaccgtgatgccatggaactcaagcccaacggcggtgctgaccaaaaatgtctcaaagtcaacagcccaataagaatgaagaatggaaatggaaaagggtggctgcgactcaagaataatatgggagcccatgaggagaaaaaggaagactggaataatgtcactaaagctgagtcaatggggctattgtctgaggaccccaagagcagtgattcagagaacagtgtgaccaaaaacccactaagaaaaacagattcttgtgacagtggaattacaaaaagtgaccttcgtttggataaggctggggaggcccgaagtccgctagagcacagtcccatccaggctgatgccaagcaccccttttatcccatccccgagcaggccttacagaccacactgcaggaagtcaaacacgaactcaaagaggacatccagctgctcagctgcagaatgactgccctagaaaagcaggtggcagaaattttaaaaatactgtcggaaaaaagcgtaccccaggcctcatctcccaaatcccaaatgccactccaagtacccccccagataccatgtcaggata

SEQ ID NO: 249420 - DNA, 1269 bp, Artificial Sequence
  derived and/or modified sequence
atgcagaagagcagcacatgcagtttcatgtacggagaacttacagacaaaaaaacaattgaaaaagtgcggcaaacttttgataactacgaatccaattgctttgaagtcctcctgtataagaagaaccggacgcctgtgtggttctacatgcagatcgcgcccattcgaaacgagcacgaaaaagtagtcctcttcctgtgcactttcaaagacatcaccctgttcaagcagcccatcgaggacgacagcacaaaggggtggaccaaattcgcaaggttgaccagagcacttaccaactcccgctccgtcctacagcagctgacgccaatgaataagacggaagttgtgcataaacatagccgactagctgaagtcctgcaattgggatccgacattctgcctcaatataagcaggaggctccaaagactcctcctcacatcatcctccactactgcgcctttaagacaacatgggactgggtcatcctgattctaacgttctacacagctatcatggtcccatacaatgtctcattcaaaactaagcaaaataacattgcgtggctagtgctcgatagcgtagtcgacgtgatctttctggttgacatagtgctgaactttcatacgactttcgtgggccctgggggcgaggttattagtgatcccaaactgatcagaatgaactacctgaaaacctggtttgtcattgacctgctgtcctgcttgccgtatgatatcatcaatgccttcgaaaacgtcgacgaaggaatatcgtctctgtttagctcactgaaagtggttcgactcttacgccttggaagggttgcgcggaagctcgaccattatctcgagtacggggctgccgtgctcgtgctgcttgtgtgtgtcttcgggctggtggcacattggttggcgtgcatctggtactccatcggagactacgaagtgatcgacgaggtcacaaacaccatccaaattgattcatggctatatcaactggccctgagcattggaactccctataggtataatacctcagctgggatctgggaggggggacctagtaaagattcactgtatgtgagttcactgtactttactatgactagtcttaccaccattggcttcggcaacatcgccccaacaaccgatgttgaaaaaatgttctccgtggcaatgatgatggtaggctgcaagtactttaactttttcattgagaactactgctactggcaattcagctggctgcagtcgcagattgggtag

SEQ ID NO: 249421 - DNA, 1269 bp, Artificial Sequence
  derived and/or modified sequence
atgcagaagagcagcacctgcagcttcatgtatggagagctgacagacaagaagaccatcgagaaggtgcggcagacctttgacaactatgagagcaactgctttgaggtgctgctgtacaagaagaacagaacacctgtgtggttctacatgcagatcgcccccatcagaaatgagcacgagaaggtggtgctcttcctgtgcaccttcaaggacatcaccctcttcaagcagcccattgaagatgacagcaccaagggctggaccaagtttgcccggctgacccgggccctgaccaacagccgctctgtgctgcagcagctgacccccatgaacaagacagaggtggtgcacaagcacagccggctggccgaggtgctgcagctgggcagtgacatcctgccccagtacaagcaggaggcccccaagaccccaccccacatcatcctgcactactgtgccttcaagaccacctgggactgggtgatcctgatcctgaccttctacacagccatcatggtgccctacaacgtgtccttcaagaccaagcagaacaacatcgcctggctggtgctggacagcgtggtggatgtgatcttcctggtggacatcgtgctgaacttccacaccacctttgtgggccctggaggagaggtgatcagtgaccccaagctgatccgcatgaactacctgaagacctggtttgtgattgacctgctgagctgcctgccctatgacatcatcaatgcctttgaaaatgtggatgagggcatcagcagcctcttcagcagcctgaaggtggtgcggctgctgcggctgggccgggtggccaggaagctggaccactacctggagtatggagctgctgtgctggtgctgctggtgtgtgtgtttggcctggtggcccactggctggcctgcatctggtacagcatcggggactatgaggtgattgatgaggtgaccaacaccatccagattgacagctggctgtaccagctggccctgagcatcggcaccccctaccgctacaacaccagcgctggcatctgggagggcggccccagcaaggacagcctgtatgtgagcagcctgtacttcaccatgaccagcctgaccaccatcggctttggaaacatcgcccccaccacagatgtggagaagatgttttctgtggccatgatgatggtgggctgcaagtacttcaacttcttcatcgagaactactgctactggcagttctcctggctgcagagccagattggatag

SEQ ID NO: 249422 - DNA, 1269 bp, Artificial Sequence
  derived and/or modified sequence
atgcagaagagcagcacctgcagcttcatgtacggcgagctgaccgataaaaagacaattgagaaggttagacagacctttgataactacgaatccaactgctttgaggttctgctatacaagaagaataggacaccagtctggttttatatgcagattgcgcccatccgaaacgaacacgagaaggttgtcctctttctctgcacttttaaggacatcactctctttaaacagccaatcgaagatgactctaccaagggttggacaaaattcgcccggctcactcgagcgctgacaaactcccggtctgtgctgcagcagctgaccccaatgaataaaacagaggtcgtgcacaagcacagtcgactcgcagaggtccttcaattgggctcagatattctgcctcagtacaagcaggaagccccaaagacccctccacacattatacttcattactgtgctttcaaaacgacatgggattgggtcatactcatcctaaccttctacaccgccatcatggttccttataacgtctcttttaaaacgaagcagaataacatcgcttggctggtcttggacagcgtggtcgacgtgattttcctggtggacattgtgctcaattttcataccaccttcgtgggaccaggcggcgaagtcatcagcgatcccaagctaattagaatgaactacctgaaaacctggtttgtcatcgacctgctttcctgcttgccttatgatatcattaatgcattcgaaaatgtggatgaggggatctcttctttgttcagctcacttaaagtcgtgcggctgctcaggctgggccgtgtggcaaggaaactcgaccactatctggagtatggagccgcagttctcgtgctcctggtctgtgtgttcggccttgtggcccattggttagcctgcatttggtattcaatcggggactacgaggtgattgacgaagttacaaatactatccagatcgactcctggctctaccagttggccctgtcaataggaactccataccgctataataccagcgcagggatctgggagggcgggccctcgaaggatagtctgtacgtcagctccttgtatttcaccatgacttctttaacaactatcgggtttggaaacatcgcacctaccaccgatgtggagaagatgtttagcgtagccatgatgatggtcggctgcaagtatttcaacttttttatagaaaactattgctactggcagttttcctggctgcagagtcagatagggtag

SEQ ID NO: 249423 - DNA, 1849 bp, Artificial Sequence
  derived and/or modified sequence
acgtcacgctatttttttttttttttttttttgtatttttagtagagacggagtttcacgtgttagccaggatggtctggatcttctgaccttgtgatctgcccgcctcggcctcccaaagtgctgggattacaggcgtgagccaccgcgcccggccgaagactgaatttttgagcaaatgaaagacaccaacaaaatccaacacataaagattcacacttgaaacagattaatcaggaatcaagtttcttactgggaaatgcccagattgtggattggcctgtagtttatagtaatgacggtttttgtaaactctctggatatcatcgagctgacgtcatgcagaaaagcagcacttgcagttttatgtatggggaattgactgacaagaagaccattgagaaagtcaggcaaacttttgacaactacgaatcaaactgctttgaagttcttctgtacaagaaaaacagaacccctgtttggttttatatgcaaattgcaccaataagaaatgaacatgaaaaggtggtcttgttcctgtgtactttcaaggatattacgttgttcaaacagccaatagaggatgattcaacaaaaggttggacgaaatttgcccgattgacacgggctttgacaaatagccgaagtgttttgcagcagctcacgccaatgaataaaacagaggtggtccataaacattcaagactagctgaagttcttcagctgggatcagatatccttcctcagtataaacaagaagcgccaaagacgccaccacacattattttacattattgtgcttttaaaactacttgggattgggtgattttaattcttaccttctacaccgccattatggttccttataatgtttccttcaaaacaaagcagaacaacatagcctggctggtactggatagtgtggtggacgttatttttctggttgacatcgttttaaattttcacacgactttcgtggggcccggtggagaggtcatttctgaccctaagctcataaggatgaactatctgaaaacttggtttgtgatcgatctgctgtcttgtttaccttatgacatcatcaatgcctttgaaaatgtggatgagggaatcagcagtctcttcagttctttaaaagtggtgcgtctcttacgactgggccgtgtggctaggaaactggaccattacctagaatatggagcagcagtcctcgtgctcctggtgtgtgtgtttggactggtggcccactggctggcctgcatatggtatagcatcggagactacgaggtcattgatgaagtcactaacaccatccaaatagacagttggctctaccagctggctttgagcattgggactccatatcgctacaataccagtgctgggatatgggaaggaggacccagcaaggattcattgtacgtgtcctctctctactttaccatgacaagccttacaaccataggatttggaaacatagctcctaccacagatgtggagaagatgttttcggtggctatgatgatggttggctgtaagtattttaattttttcattgaaaattattgttattggcaattttcctggctacaatctcagataggatgaaaacgaactactttgtttacagaaaggtatttaatccatcttatttgcaattgttttttttaatctaccttagaaaatagaaatgcaaaataatatattttactcttcaggacataataatgtgtgaaaaacatattaatgtgtgtacccagcagtgctctcttgaaggaaccaggaccagcatccagagaggtggcgtttcgcacattccatagattttgttggtaatgtgttaaattcc

SEQ ID NO: 249424 - DNA, 1269 bp, Artificial Sequence
  derived and/or modified sequence
atgcagaaaagtagtacttgcagtttcatgtacggggagctcacagacaagaagactattgagaaagtccggcagacatttgacaattacgagagtaattgctttgaagtcctgctctacaagaagaatagaactccagtgtggttttacatgcagatcgcgccaatccgcaatgaacacgaaaaggttgtgctattcttgtgtacatttaaagacattacacttttcaagcagccaatcgaggatgattctaccaagggctggactaagtttgcaaggctcacaagagctctcacgaatagtcggtccgtactgcagcagttaacacccatgaataagacagaggttgtgcacaagcactctagattggcagaggttctccagcttggaagtgatatcctcccacaatacaaacaggaagcaccgaagactcctccgcacattatcttgcattactgtgcctttaaaacaacctgggactgggttatcttgattttaaccttttataccgccattatggttccatacaacgtgagtttcaagaccaaacagaacaacatcgcatggctggtgctcgatagcgtggtggacgtgatatttctggttgatatcgtcttgaactttcacaccacctttgttggcccaggcggagaagtaatcagcgatcctaagctaattaggatgaattacctgaagacctggttcgttatcgaccttttaagctgcctcccgtacgatataattaacgcatttgagaatgttgacgagggtattagtagtttgttcagcagcttgaaggtcgtaaggctgctgcgcctggggagagtggccaggaaactcgaccactatcttgagtatggtgcagctgttttagtgctcctggtgtgtgtctttggtctggtggcccactggctggcttgtatttggtacagcattggcgactacgaagtgattgatgaggtgacaaatacaatccagatcgattcctggctgtatcagttagccctaagtatcgggaccccataccgatataataccagtgctggcatttgggaaggaggccctagtaaagatagcctttatgtgagcagtctgtatttcacaatgactagccttacaacaatcggttttggtaatattgctcctaccacagatgtcgagaagatgttcagtgtggcaatgatgatggtgggctgtaagtactttaattttttcatcgaaaactactgctattggcagttctcctggctacaaagccagatcgggtag

SEQ ID NO: 249425 - DNA, 1269 bp, Artificial Sequence
  derived and/or modified sequence
atgcagaagagcagcacctgcagcttcatgtacggcgagctgaccgacaagaagaccatcgagaaggtgagacagaccttcgacaactacgagagcaactgcttcgaggtgctgctgtacaagaagaacagaacccccgtgtggttctacatgcagatcgcccccatcagaaacgagcacgagaaggtggtgctgttcctgtgcaccttcaaggacatcaccctgttcaagcagcccatcgaggacgacagcaccaagggctggaccaagttcgccagactgaccagagccctgaccaacagcagaagcgtgctgcagcagctgacccccatgaacaagaccgaggtggtgcacaagcacagcagactggccgaggtgctgcagctgggcagcgacatcctgccccagtacaagcaggaggcccccaagacccccccccacatcatcctgcactactgcgccttcaagaccacctgggactgggtgatcctgatcctgaccttctacaccgccatcatggtgccctacaacgtgagcttcaagaccaagcagaacaacatcgcctggctggtgctggacagcgtggtggacgtgatcttcctggtggacatcgtgctgaacttccacaccaccttcgtgggccccggcggcgaggtgatcagcgaccccaagctgatcagaatgaactacctgaagacctggttcgtgatcgacctgctgagctgcctgccctacgacatcatcaacgccttcgagaacgtggacgagggcatcagcagcctgttcagcagcctgaaggtggtgagactgctgagactgggcagagtggccagaaagctggaccactacctggagtacggcgccgccgtgctggtgctgctggtgtgcgtgttcggcctggtggcccactggctggcctgcatctggtacagcatcggcgactacgaggtgatcgacgaggtgaccaacaccatccagatcgacagctggctgtaccagctggccctgagcatcggcaccccctacagatacaacaccagcgccggcatctgggagggcggccccagcaaggacagcctgtacgtgagcagcctgtacttcaccatgaccagcctgaccaccatcggcttcggcaacatcgcccccaccaccgacgtggagaagatgttcagcgtggccatgatgatggtgggctgcaagtacttcaacttcttcatcgagaactactgctactggcagttcagctggctgcagagccagatcggctag

SEQ ID NO: 249426 - protein, 180 aa, Artificial Sequence
  derived and/or modified sequence
MQAEGQGTGGSTGDADGPGGPGIPDGPGGNAGGPGEAGATGGRGPRGAGAARASGPRGGAPRGPHGGAASAQDGRCPCGARRPDSRLLQLHITMPFSSPMEAELVRRILSRDAAPLPRPGAVLKDFTVSGNLLFIRLTAADHRQLQLSISSCLQQLSLLMWITQCFLPVFLAQAPSGQRR

SEQ ID NO: 249427 - protein, 122 aa, Artificial Sequence
  derived and/or modified sequence
ALTFSLRAGAASAQDGRCPCGARRPDSRLLQLHITMPFSSPMEAELVRRILSRDAAPLPRPGAVLKDFTVSGNLLFIRLTAADHRQLQLSISSCLQQLSLLMWITQCFLPVFLAQAPSGQRR

SEQ ID NO: 249428 - DNA, 543 bp, Artificial Sequence
  derived and/or modified sequence
atgcaggccgagggccagggcaccggcggcagcaccggcgacgccgacggccccggcggccccggcatccccgacggccccggcggcaacgccggcggccccggcgaggccggcgccaccggcggcagaggccccagaggcgccggcgccgccagagccagcggccccagaggcggcgcccccagaggcccccacggcggcgccgccagcgcccaggacggcagatgcccctgcggcgccagaagacccgacagcagactgctgcagctgcacatcaccatgcccttcagcagccccatggaggccgagctggtgagaagaatcctgagcagagacgccgcccccctgcccagacccggcgccgtgctgaaggacttcaccgtgagcggcaacctgctgttcatcagactgaccgccgccgaccacagacagctgcagctgagcatcagcagctgcctgcagcagctgagcctgctgatgtggatcacccagtgcttcctgcccgtgttcctggcccaggcccccagcggccagagaagatag

SEQ ID NO: 249429 - DNA, 369 bp, Artificial Sequence
  derived and/or modified sequence
gccctgaccttcagcctgagagccggcgccgccagcgcccaggacggcagatgcccctgcggcgccagaagacccgacagcagactgctgcagctgcacatcaccatgcccttcagcagccccatggaggccgagctggtgagaagaatcctgagcagagacgccgcccccctgcccagacccggcgccgtgctgaaggacttcaccgtgagcggcaacctgctgttcatcagactgaccgccgccgaccacagacagctgcagctgagcatcagcagctgcctgcagcagctgagcctgctgatgtggatcacccagtgcttcctgcccgtgttcctggcccaggcccccagcggccagagaagatag

SEQ ID NO: 249430 - DNA, 543 bp, Artificial Sequence
  derived and/or modified sequence
atgcaagcagagggtcaagggaccggcggctccaccggcgacgccgatgggcctggcggccctggcatacctgatggtcctggagggaatgctggaggccccggggaagccggcgccactggtggacgcggccctcggggtgccggcgccgccagggccagtggccctcgtggtggcgcccctcggggccctcatggaggagccgcctcagctcaggatggtcggtgtccttgcggggcaagacggccagatagccgattactgcagctgcacataacaatgccattctccagccctatggaggccgagctggtgcgccgcatcctgagccgcgatgccgcgcccctccccaggccaggcgccgtgcttaaagactttactgttagcggaaatctgctgttcatccggttaacagctgcggatcaccggcagttgcagctatcaatttcatcttgcttgcagcagctcagcctgctgatgtggataacgcaatgcttcttgccagttttcctggcccaggcaccttcaggccagaggcggtag

SEQ ID NO: 249431 - DNA, 748 bp, Artificial Sequence
  derived and/or modified sequence
atcctcgtgggccctgaccttctctctgagagccgggcagaggctccggagccatgcaggccgaaggccagggcacagggggttcgacgggcgatgctgatggcccaggaggccctggcattcctgatggcccagggggcaatgctggcggcccaggagaggcgggtgccacgggcggcagaggtccccggggcgcaggggcagcaagggcctcggggccgagaggaggcgccccgcggggtccgcatggcggtgccgcttctgcgcaggatggaaggtgcccctgcggggccaggaggccggacagccgcctgcttcagttgcacatcacgatgcctttctcgtcgcccatggaagcggagctggtccgcaggatcctgtcccgggatgccgcacctctcccccgaccaggggcggttctgaaggacttcaccgtgtccggcaacctactgtttatccgactgactgctgcagaccaccgccaactgcagctctccatcagctcctgtctccagcagctttccctgttgatgtggatcacgcagtgctttctgcccgtgtttttggctcaggctccctcagggcagaggcgctaagcccagcctggcgccccttcctaggtcatgcctcctcccctagggaatggtcccagcacgagtggccagttcattgtgggggcctgattgtttgtcgctggaggaggacggcttacatgtttgtttctgtagaaaataaagctgagctacga

SEQ ID NO: 249432 - DNA, 369 bp, Artificial Sequence
  derived and/or modified sequence
gccctgacgttctccctgcgcgcaggtgcagcatccgcgcaagacggacggtgcccatgcggcgctaggcggcccgactcacgccttctgcagcttcacataacaatgcctttctctagtcccatggaggcagaactggttcgaaggatactctctagagacgccgccccactgccaagaccaggcgccgttctcaaggactttactgtgagcggcaacttgctgttcatccggttaactgccgcagatcaccggcaactccagctgtccatttcttcctgtcttcagcagctgagcctgctaatgtggattactcagtgtttcctgccagtgtttctggcccaggcccctagcgggcagcggaggtag

SEQ ID NO: 249433 - DNA, 543 bp, Artificial Sequence
  derived and/or modified sequence
atgcaggccgagggccagggcaccggcggcagcactggagatgctgatggccctgggggccctggcatcccagatggccctggaggaaatgccggcggccctggagaggccggggccaccggcggccggggccccaggggggccggggccgcccgggccagcggcccccggggcggggccccccggggcccccatggaggagctgccagcgcccaggacggccgctgcccctgtggggcccggcggccagacagccggctgctgcagctgcacatcaccatgcccttcagcagccccatggaggccgagctggtgcggcgcatcctgagcagagatgctgcccccctgcccaggcctggagctgtgctgaaggacttcaccgtgtctggcaacctgctcttcatccggctgacagctgctgaccaccggcagctgcagctgagcatcagcagctgcctgcagcagctgagcctgctgatgtggatcacccagtgcttcctgcccgtcttcctggcccaggcccccagcggccagaggaggtag

SEQ ID NO: 249434 - DNA, 369 bp, Artificial Sequence
  derived and/or modified sequence
gccctgaccttcagcctgcgggccggggccgccagcgcccaggacggccgctgcccctgtggggcccggcggccagacagccggctgctgcagctgcacatcaccatgcccttcagcagccccatggaggccgagctggtgcggcgcatcctgagcagagatgctgcccccctgcccaggcctggagctgtgctgaaggacttcaccgtgtctggcaacctgctcttcatccggctgacagctgctgaccaccggcagctgcagctgagcatcagcagctgcctgcagcagctgagcctgctgatgtggatcacccagtgcttcctgcccgtcttcctggcccaggcccccagcggccagaggaggtag

SEQ ID NO: 249435 - DNA, 543 bp, Artificial Sequence
  derived and/or modified sequence
atgcaggccgagggccagggcaccggcggcagcaccggcgacgccgatggcccgggcggtcccggaatccctgacgggcctggcggcaatgcaggcggtcctggtgaggccggcgcgaccggcgggcgggggccgcggggcgctggagccgctcgcgcctccggaccgaggggtggcgccccgcgcggccctcatgggggggccgcctccgcccaggacggacggtgcccctgcggcgcaagaaggccggattcacgcctactacagttacatattactatgccgtttagtagcccgatggaggccgaactggtgcgtcgtattcttagccgcgatgcggcacccctcccgaggccgggcgctgtgctgaaagattttactgtgtcaggtaacctgctgttcattaggctgacggccgccgaccacagacagctgcaactcagtattagcagctgtttgcaacagctgtcactgcttatgtggataacacagtgttttctgcctgtgtttctggcacaggctccctccggacaaaggcggtag

SEQ ID NO: 249436 - DNA, 369 bp, Artificial Sequence
  derived and/or modified sequence
gccctgaccttcagcctgcgggccggcgccgccagcgcccaggacggtcggtgcccttgcggcgcgcgacggccagattcacgccttctccaactccatatcacaatgcctttctcatctcctatggaggcagaattggtgcgcagaattctctcgagagatgctgctcctctcccccgccctggagctgtgctgaaggatttcaccgtcagcggcaatcttctatttatacggctgaccgcagcggatcacaggcagctgcaactgagcatcagcagctgtctgcagcaattgtctcttctgatgtggattactcagtgctttctccctgtgtttcttgctcaggcgccctcaggccagcggaggtag

SEQ ID NO: 249437 - DNA, 543 bp, Artificial Sequence
  derived and/or modified sequence
atgcaggcagaagggcaggggacgggcggatcaacaggcgatgccgatggacccggaggcccagggattcctgacggacctggagggaatgccggtggcccaggcgaagcaggagctaccggtggaagggggccaagaggcgcaggagctgctcgcgctagtgggcctagaggcggagcccctcgagggccacacggtggggctgcatctgcccaggacgggaggtgcccatgcggagctcggcgacccgattcccggctcttgcagttgcacataaccatgccattctcctcacctatggaggcggaactcgtaaggcgcatcctgagccgggacgccgcacccctcccgaggccaggagctgtgctcaaagactttactgtatcaggcaatcttctttttatcaggttgaccgccgctgatcatcgccagctgcaactgtctataagcagctgccttcagcagctctccctgctcatgtggattacacagtgctttttgccagttttcctggctcaggcccctagcgggcagcgtagatag

SEQ ID NO: 249438 - DNA, 369 bp, Artificial Sequence
  derived and/or modified sequence
gccctgaccttctcattgcgcgctggcgctgcttctgcccaagacggccgatgtccctgcggagccaggaggcctgattctcgacttctgcagttgcatataaccatgccattttcttctcccatggaagccgagctagtccgcaggatcctgagccgggatgctgcgccactgcctcgaccaggtgctgtgttaaaagacttcaccgtgtccggaaacctgctatttattaggctgacagcagccgatcaccgacagctccagctcagtatttcgagctgtctgcagcagcttagcctcctgatgtggattacgcaatgttttcttccggtttttcttgcacaggctcccagtggacagaggcgctag

SEQ ID NO: 249439 - DNA, 520 bp, Artificial Sequence
  derived and/or modified sequence
gccctgaccttctctctgagagccggggccgcttctgcgcaggatggaaggtgcccctgcggggccaggaggccggacagccgcctgcttcagttgcacatcacgatgcctttctcgtcgcccatggaagcggagctggtccgcaggatcctgtcccgggatgccgcacctctcccccgaccaggggcggttctgaaggacttcaccgtgtccggcaacctactgtttatccgactgactgctgcagaccaccgccaactgcagctctccatcagctcctgtctccagcagctttccctgttgatgtggatcacgcagtgctttctgcccgtgtttttggctcaggctccctcagggcagaggcgctaagcccagcctggcgccccttcctaggtcatgcctcctcccctagggaatggtcccagcacgagtggccagttcattgtgggggcctgattgtttgtcgctggaggaggacggcttacatgtttgtttctgtagaaaataaagctgagctacg

SEQ ID NO: 249440 - protein, 930 aa, Artificial Sequence
  derived and/or modified sequence
MTGLEDQEFDFEFLFEFNQRDEGAAAAAPEHYGYASSNVSPALPLPTAHSTLPAPCHNLQTSTPGIIPPADHPSGYGAALDGGPAGYFLSSGHTRPDGAPALESPRIEITSCLGLYHNNNQFFHDVEVEDVLPSSKRSPSTATLSLPSLEAYRDPSCLSPASSLSSRSCNSEASSYESNYSYPYASPQTSPWQSPCVSPKTTDPEEGFPRGLGACTLLGSPRHSPSTSPRASVTEESWLGARSSRPASPCNKRKYSLNGRQPPYSPHHSPTPSPHGSPRVSVTDDSWLGNTTQYTSSAIVAAINALTTDSSLDLGDGVPVKSRKTTLEQPPSVALKVEPVGEDLGSPPPPADFAPEDYSSFQHIRKGGFCDQYLAVPQHPYQWAKPKPLSPTSYMSPTLPALDWQLPSHSGPYELRIEVQPKSHHRAHYETEGSRGAVKASAGGHPIVQLHGYLENEPLMLQLFIGTADDRLLRPHAFYQVHRITGKTVSTTSHEAILSNTKVLEIPLLPENSMRAVIDCAGILKLRNSDIELRKGETDIGRKNTRVRLVFRVHVPQPSGRTLSLQVASNPIECSQRSAQELPLVEKQSTDSYPVVGGKKMVLSGHNFLQDSKVIFVEKAPDGHHVWEMEAKTDRDLCKPNSLVVEIPPFRNQRITSPVHVSFYVCNGKRKRSQYQRFTYLPANVPIIKTEPTDDYEPAPTCGPVSQGLSPLPRPYYSQQLAMPPDPSSCLVAGFPPCPQRSTLMPAAPGVSPKLHDLSPAAYTKGVASPGHCHLGLPQPAGEAPAVQDVPRPVATHPGSPGQPPPALLPQQVSAPPSSSCPPGLEHSLCPSSPSPPLPPATQEPTCLQPCSPACPPATGRPQHLPSTVRRDESPTAGPRLLPEVHEDGSPNLAPIPVTVKREPEELDQLYLDDVNEIIRNDLSSTSTHS

SEQ ID NO: 249441 - protein, 914 aa, Artificial Sequence
  derived and/or modified sequence
MTGLEDQEFDFEFLFEFNQRDEGAAAAAPEHYGYASSNVSPALPLPTAHSTLPAPCHNLQTSTPGIIPPADHPSGYGAALDGGPAGYFLSSGHTRPDGAPALESPRIEITSCLGLYHNNNQFFHDVEVEDVLPSSKRSPSTATLSLPSLEAYRDPSCLSPASSLSSRSCNSEASSYESNYSYPYASPQTSPWQSPCVSPKTTDPEEGFPRGLGACTLLGSPRHSPSTSPRASVTEESWLGARSSRPASPCNKRKYSLNGRQPPYSPHHSPTPSPHGSPRVSVTDDSWLGNTTQYTSSAIVAAINALTTDSSLDLGDGVPVKSRKTTLEQPPSVALKVEPVGEDLGSPPPPADFAPEDYSSFQHIRKGGFCDQYLAVPQHPYQWAKPKPLSPTSYMSPTLPALDWQLPSHSGPYELRIEVQPKSHHRAHYETEGSRGAVKASAGGHPIVQLHGYLENEPLMLQLFIGTADDRLLRPHAFYQVHRITGKTVSTTSHEAILSNTKVLEIPLLPENSMRAVIDCAGILKLRNSDIELRKGETDIGRKNTRVRLVFRVHVPQPSGRTLSLQVASNPIECSQRSAQELPLVEKQSTDSYPVVGGKKMVLSGHNFLQDSKVIFVEKAPDGHHVWEMEAKTDRDLCKPNSLVVEIPPFRNQRITSPVHVSFYVCNGKRKRSQYQRFTYLPANVPIIKTEPTDDYEPAPTCGPVSQGLSPLPRPYYSQQLAMPPDPSSCLVAGFPPCPQRSTLMPAAPGVSPKLHDLSPAAYTKGVASPGHCHLGLPQPAGEAPAVQDVPRPVATHPGSPGQPPPALLPQQVSAPPSSSCPPGLEHSLCPSSPSPPLPPATQEPTCLQPCSPACPPATGRPQHLPSTVRRDESPTAGPRLLPEVHEDGSPNLAPIPVTVKREPEELDQLYLDD

SEQ ID NO: 249442 - DNA, 2793 bp, Artificial Sequence
  derived and/or modified sequence
atgaccggcctggaggaccaggagttcgacttcgagttcctgttcgagttcaaccagagagacgagggcgccgccgccgccgcccccgagcactacggctacgccagcagcaacgtgagccccgccctgcccctgcccaccgcccacagcaccctgcccgccccctgccacaacctgcagaccagcacccccggcatcatcccccccgccgaccaccccagcggctacggcgccgccctggacggcggccccgccggctacttcctgagcagcggccacaccagacccgacggcgcccccgccctggagagccccagaatcgagatcaccagctgcctgggcctgtaccacaacaacaaccagttcttccacgacgtggaggtggaggacgtgctgcccagcagcaagagaagccccagcaccgccaccctgagcctgcccagcctggaggcctacagagaccccagctgcctgagccccgccagcagcctgagcagcagaagctgcaacagcgaggccagcagctacgagagcaactacagctacccctacgccagcccccagaccagcccctggcagagcccctgcgtgagccccaagaccaccgaccccgaggagggcttccccagaggcctgggcgcctgcaccctgctgggcagccccagacacagccccagcaccagccccagagccagcgtgaccgaggagagctggctgggcgccagaagcagcagacccgccagcccctgcaacaagagaaagtacagcctgaacggcagacagcccccctacagcccccaccacagccccacccccagcccccacggcagccccagagtgagcgtgaccgacgacagctggctgggcaacaccacccagtacaccagcagcgccatcgtggccgccatcaacgccctgaccaccgacagcagcctggacctgggcgacggcgtgcccgtgaagagcagaaagaccaccctggagcagccccccagcgtggccctgaaggtggagcccgtgggcgaggacctgggcagcccccccccccccgccgacttcgcccccgaggactacagcagcttccagcacatcagaaagggcggcttctgcgaccagtacctggccgtgccccagcacccctaccagtgggccaagcccaagcccctgagccccaccagctacatgagccccaccctgcccgccctggactggcagctgcccagccacagcggcccctacgagctgagaatcgaggtgcagcccaagagccaccacagagcccactacgagaccgagggcagcagaggcgccgtgaaggccagcgccggcggccaccccatcgtgcagctgcacggctacctggagaacgagcccctgatgctgcagctgttcatcggcaccgccgacgacagactgctgagaccccacgccttctaccaggtgcacagaatcaccggcaagaccgtgagcaccaccagccacgaggccatcctgagcaacaccaaggtgctggagatccccctgctgcccgagaacagcatgagagccgtgatcgactgcgccggcatcctgaagctgagaaacagcgacatcgagctgagaaagggcgagaccgacatcggcagaaagaacaccagagtgagactggtgttcagagtgcacgtgccccagcccagcggcagaaccctgagcctgcaggtggccagcaaccccatcgagtgcagccagagaagcgcccaggagctgcccctggtggagaagcagagcaccgacagctaccccgtggtgggcggcaagaagatggtgctgagcggccacaacttcctgcaggacagcaaggtgatcttcgtggagaaggcccccgacggccaccacgtgtgggagatggaggccaagaccgacagagacctgtgcaagcccaacagcctggtggtggagatcccccccttcagaaaccagagaatcaccagccccgtgcacgtgagcttctacgtgtgcaacggcaagagaaagagaagccagtaccagagattcacctacctgcccgccaacgtgcccatcatcaagaccgagcccaccgacgactacgagcccgcccccacctgcggccccgtgagccagggcctgagccccctgcccagaccctactacagccagcagctggccatgccccccgaccccagcagctgcctggtggccggcttccccccctgcccccagagaagcaccctgatgcccgccgcccccggcgtgagccccaagctgcacgacctgagccccgccgcctacaccaagggcgtggccagccccggccactgccacctgggcctgccccagcccgccggcgaggcccccgccgtgcaggacgtgcccagacccgtggccacccaccccggcagccccggccagcccccccccgccctgctgccccagcaggtgagcgccccccccagcagcagctgcccccccggcctggagcacagcctgtgccccagcagccccagcccccccctgccccccgccacccaggagcccacctgcctgcagccctgcagccccgcctgcccccccgccaccggcagaccccagcacctgcccagcaccgtgagaagagacgagagccccaccgccggccccagactgctgcccgaggtgcacgaggacggcagccccaacctggcccccatccccgtgaccgtgaagagagagcccgaggagctggaccagctgtacctggacgacgtgaacgagatcatcagaaacgacctgagcagcaccagcacccacagctag

SEQ ID NO: 249443 - DNA, 2745 bp, Artificial Sequence
  derived and/or modified sequence
atgaccggcctggaggaccaggagttcgacttcgagttcctgttcgagttcaaccagagagacgagggcgccgccgccgccgcccccgagcactacggctacgccagcagcaacgtgagccccgccctgcccctgcccaccgcccacagcaccctgcccgccccctgccacaacctgcagaccagcacccccggcatcatcccccccgccgaccaccccagcggctacggcgccgccctggacggcggccccgccggctacttcctgagcagcggccacaccagacccgacggcgcccccgccctggagagccccagaatcgagatcaccagctgcctgggcctgtaccacaacaacaaccagttcttccacgacgtggaggtggaggacgtgctgcccagcagcaagagaagccccagcaccgccaccctgagcctgcccagcctggaggcctacagagaccccagctgcctgagccccgccagcagcctgagcagcagaagctgcaacagcgaggccagcagctacgagagcaactacagctacccctacgccagcccccagaccagcccctggcagagcccctgcgtgagccccaagaccaccgaccccgaggagggcttccccagaggcctgggcgcctgcaccctgctgggcagccccagacacagccccagcaccagccccagagccagcgtgaccgaggagagctggctgggcgccagaagcagcagacccgccagcccctgcaacaagagaaagtacagcctgaacggcagacagcccccctacagcccccaccacagccccacccccagcccccacggcagccccagagtgagcgtgaccgacgacagctggctgggcaacaccacccagtacaccagcagcgccatcgtggccgccatcaacgccctgaccaccgacagcagcctggacctgggcgacggcgtgcccgtgaagagcagaaagaccaccctggagcagccccccagcgtggccctgaaggtggagcccgtgggcgaggacctgggcagcccccccccccccgccgacttcgcccccgaggactacagcagcttccagcacatcagaaagggcggcttctgcgaccagtacctggccgtgccccagcacccctaccagtgggccaagcccaagcccctgagccccaccagctacatgagccccaccctgcccgccctggactggcagctgcccagccacagcggcccctacgagctgagaatcgaggtgcagcccaagagccaccacagagcccactacgagaccgagggcagcagaggcgccgtgaaggccagcgccggcggccaccccatcgtgcagctgcacggctacctggagaacgagcccctgatgctgcagctgttcatcggcaccgccgacgacagactgctgagaccccacgccttctaccaggtgcacagaatcaccggcaagaccgtgagcaccaccagccacgaggccatcctgagcaacaccaaggtgctggagatccccctgctgcccgagaacagcatgagagccgtgatcgactgcgccggcatcctgaagctgagaaacagcgacatcgagctgagaaagggcgagaccgacatcggcagaaagaacaccagagtgagactggtgttcagagtgcacgtgccccagcccagcggcagaaccctgagcctgcaggtggccagcaaccccatcgagtgcagccagagaagcgcccaggagctgcccctggtggagaagcagagcaccgacagctaccccgtggtgggcggcaagaagatggtgctgagcggccacaacttcctgcaggacagcaaggtgatcttcgtggagaaggcccccgacggccaccacgtgtgggagatggaggccaagaccgacagagacctgtgcaagcccaacagcctggtggtggagatcccccccttcagaaaccagagaatcaccagccccgtgcacgtgagcttctacgtgtgcaacggcaagagaaagagaagccagtaccagagattcacctacctgcccgccaacgtgcccatcatcaagaccgagcccaccgacgactacgagcccgcccccacctgcggccccgtgagccagggcctgagccccctgcccagaccctactacagccagcagctggccatgccccccgaccccagcagctgcctggtggccggcttccccccctgcccccagagaagcaccctgatgcccgccgcccccggcgtgagccccaagctgcacgacctgagccccgccgcctacaccaagggcgtggccagccccggccactgccacctgggcctgccccagcccgccggcgaggcccccgccgtgcaggacgtgcccagacccgtggccacccaccccggcagccccggccagcccccccccgccctgctgccccagcaggtgagcgccccccccagcagcagctgcccccccggcctggagcacagcctgtgccccagcagccccagcccccccctgccccccgccacccaggagcccacctgcctgcagccctgcagccccgcctgcccccccgccaccggcagaccccagcacctgcccagcaccgtgagaagagacgagagccccaccgccggccccagactgctgcccgaggtgcacgaggacggcagccccaacctggcccccatccccgtgaccgtgaagagagagcccgaggagctggaccagctgtacctggacgactag

SEQ ID NO: 249444 - DNA, 2793 bp, Artificial Sequence
  derived and/or modified sequence
atgaccggactggaggaccaggaatttgacttcgagttcctcttcgagttcaaccagcgcgatgagggagccgctgccgcagctcctgaacactacggttacgcatcctccaacgtgtctccggccctcccactccccaccgctcactctaccctgcccgccccatgtcataatttacagacgagtacacccggcatcataccacccgccgaccacccaagcggctatggagccgctttggacggaggtcccgctggatactttctcagctcagggcacaccagacccgatggtgctcctgcccttgagtcaccccgtattgaaatcacaagctgcctcgggctgtaccacaacaataaccaattttttcatgacgtcgaagtcgaagacgttctacctagtagcaaacggagcccatctacagccacactttcacttccctctcttgaggcctatcgcgacccttcatgtctgagtcccgcgtcttcactttcatcccggtcttgcaactcagaggcctcaagttacgagagcaactacagctacccatacgccagccctcagacttcgccttggcaaagcccttgtgttagtcctaaaacaacagacccggaggaagggttccccaggggactgggcgcttgcacacttctgggttctcctcgccattcaccttctacatctcctagggcctccgtcaccgaggagtcctggctgggcgctagaagctcccgaccggcctctccgtgcaacaagcgtaagtattctttaaatgggaggcagccgccgtacagcccacaccattcccctaccccatctcctcacggctcccccagggttagcgtaactgatgattcatggttagggaacaccacccagtacacatcctctgctatcgtggctgctatcaatgccctgacaactgatagttcactggatctgggagacggcgtccccgtgaaaagtcgtaaaacgactctggagcaaccaccatccgtggcgctcaaagtggaaccagtgggtgaggatttaggtagtccgccaccacctgcggactttgcaccggaagactactcctcatttcagcacatccgaaagggggggttctgcgaccagtacctggccgtaccccagcatccatatcagtgggctaaacccaaacctctgagccctacatcatacatgtcccctaccctccccgctctggattggcagctacctagccatagcgggccctatgagctgagaattgaggtacagccaaaaagccaccatagagcccattacgagactgaggggtccagaggcgccgttaaagcctctgccggagggcatccgatcgtccagcttcacggctatttagagaacgagcccctcatgctacagctgttcattggaaccgctgacgatcggctgttgagaccccacgccttttatcaggttcatcgtatcaccggtaaaacagtgtctacaacctcacacgaagcaatcctctctaacaccaaagtccttgaaatccccctgctcccggaaaattccatgagggccgtcatcgactgcgccggcattcttaagctgaggaacagcgatatcgagctgaggaaaggcgagaccgacatcgggcggaagaacactcgcgttcggctggtgttccgcgttcacgtgccgcaaccatctggccgaacccttagcctgcaggtggctagtaatccgatcgagtgctcgcaacggtcagcacaggagctaccattggttgagaagcaatccacagacagctaccccgtggtcggggggaaaaagatggtgctgtccggacacaacttcctgcaggatagcaaggttatatttgtggagaaggcgcctgacggacaccatgtgtgggagatggaagccaaaacagatagagatctctgcaagcctaattccctagtggtcgagattccacctttccgtaaccagcgaataacctcacccgtgcacgtttctttttacgtctgcaatgggaagagaaagaggtctcagtaccagcggttcacttacctgcctgcgaacgtgcccatcattaagacggaacccactgacgattacgagcccgcccccacctgcggacccgttagccaaggattaagcccgctgcctagaccatactacagtcaacaactggctatgccacctgacccgtctagctgcctagtggccggctttcccccgtgcccccagaggtctaccctgatgcctgctgctcccggcgtgagccccaaactccatgatcttagtcccgcagcctacacaaagggcgtcgcatcccccggtcactgccatctgggactgccacagcctgccggggaggcccctgccgtgcaagatgtgcctagaccagtcgcaacacaccccgggagtcccggtcagcccccccccgctcttctgccgcagcaggttagtgcccccccatcctcgagttgcccacctgggctggaacacagtctttgcccttcttccccaagccctcctttgccacctgccacccaagaacccacttgtcttcagccatgttctcctgcctgtcctcctgctacgggacgacctcagcacttgccctccactgtaaggagagatgagtcacccaccgcagggcctaggctgcttcccgaggttcacgaggatggcagtcccaatctggccccaatccccgtcactgtgaagcgggaacctgaagaattggatcagctctatctcgacgatgtgaacgagattatcagaaacgatctctcctccactagtacacattcctag

SEQ ID NO: 249445 - DNA, 2745 bp, Artificial Sequence
  derived and/or modified sequence
atgacagggttggaagaccaggagtttgacttcgagtttttgttcgagtttaaccaacgcgatgaaggagccgcggcagccgcccctgaacattacggatatgcaagcagcaacgttagtccagccttacctctcccaacagcccattcaactctccctgcaccttgtcataacctgcaaaccagtaccccagggatcatcccaccagccgatcacccttctggctatggcgctgccctggacgggggccccgccggatactttctgagcagcggacatacaagacctgacggtgctcccgcccttgaatcaccccgcattgaaataacatcctgtctcgggctgtatcacaacaacaatcagttcttccatgacgtggaggtggaggatgtgctacctagtagcaagaggtccccaagtaccgcaactctgagtctcccatcccttgaggcgtatcgcgatcccagttgtctctcaccagccagcagcctatccagccgctcttgcaatagcgaggctagctcttatgagtctaattatagttacccttatgccagcccacagacctctccctggcaatccccctgcgtgtcccctaaaactactgatcccgaggagggttttccccgggggttgggtgcgtgcacactactcggatcacccagacattcaccttcaacttcccccagagcctctgtgacggaggagagctggctcggggcccgtagcagcaggcccgcgtccccatgtaacaaaagaaaatactctctgaatggacgtcagccaccctacagtcctcatcatagcccaacacccagcccccatggaagccctcgcgtctcagtcactgacgacagttggctgggcaacaccacgcagtatacttcatcggccattgtggccgccattaatgctctgaccacagactccagcctcgatctgggtgatggagtgccagttaagagccgtaagacaacactcgagcagcctccctccgtggctttgaaggtggagcccgttggggaggacttgggtagtccaccacctccggcagactttgctcccgaggattactcaagcttccaacatattcgtaaaggtggcttttgtgaccagtacttggcagtgccacaacacccttaccagtgggctaaacccaagcctttatctcctacgtcttatatgtcgccgactcttcctgcactggattggcagctgcccagccacagcggtccatacgaattgcggatcgaagtgcagcccaaatctcaccaccgtgcacactatgaaacagagggcagtaggggggccgtcaaggcttccgccggcggacaccctatagttcagctgcatgggtatctagaaaatgagcctcttatgctccaactcttcatcggaaccgctgatgacaggttactgagaccacacgcattttatcaggtgcatagaatcaccggcaaaacagtgagcacaacaagtcacgaagcgatccttagcaataccaaggtgttagagataccactgttgcccgagaattcaatgcgcgcagtgattgactgtgcgggcatcctcaaactacgcaacagtgacatcgaacttaggaaaggagagacagatatcgggcggaaaaatacccgggtacggctggtcttcagggtgcatgtgccacagccttctggtcgtacactgagcctccaggtcgcttcaaacccgatcgagtgttcgcagcgctctgctcaggagctcccgctcgtcgagaagcagtccaccgattcctaccccgtggtgggggggaagaaaatggtgctgagcggacacaacttcttacaagattcaaaagtgatattcgtggagaaggctccggacgggcaccatgtttgggaaatggaagccaaaacagatcgcgacctctgtaagccgaactccctcgtggttgagataccccccttcaggaaccagagaattacatcgcccgtacatgtctccttttacgtctgcaatgggaaaaggaaacggagccagtaccagagatttacatacctgcctgcaaacgtgccaatcattaagaccgaacccactgatgattacgagcccgcaccaacgtgcggtcccgtgtctcagggactgtcccccctgcctagaccttactacagccagcagcttgccatgcccccagacccctcgtcttgtctggtggcggggttcccgccgtgcccgcaacgaagtactctcatgcctgccgcaccaggggtttccccaaagctgcacgacttgagtcccgcagcttacaccaagggggtggcatcacctggacactgtcacctggggctgccacagccggccggcgaagcaccagccgtccaggacgttccaaggccggtcgccacccatccgggtagcccaggccagccaccgccagccttgttacctcagcaggtcagcgcaccacccagctcaagctgtccacccggcttagaacattctttgtgcccttcatcccctagcccaccactgcctcctgcaacacaggaaccaacctgtctgcaaccgtgttccccagcctgcccgcctgctacaggtaggcctcagcaccttccttctacagtgagacgagacgagagccccaccgctgggccacgcttgcttccggaagtacacgaggacggctccccaaaccttgcacccatccctgtgaccgttaagcgcgagcccgaagagctcgaccaactctacctggacgattag

SEQ ID NO: 249446 - DNA, 2793 bp, Artificial Sequence
  derived and/or modified sequence
atgacaggcctggaggaccaggagtttgattttgagttcctgtttgagttcaaccagagagatgaaggagctgctgctgctgcccctgagcactacggctacgccagcagcaatgtgtccccagccctgcccctgcccacagcccacagcaccctgcctgccccctgccacaacctgcagaccagcaccccaggcatcatccccccagctgaccaccccagcggctacggggccgccctggatggcggccctgctggctacttcctgagcagcggccacaccaggccagatggagccccagccctggagagccccagaattgagatcaccagctgcctgggcctgtaccacaacaacaaccagttcttccatgatgtggaggtggaggatgtgctgcccagcagcaagaggagccccagcacagccaccctgagcctgcccagcctggaggcctacagagaccccagctgcctgagccctgccagcagcctgagcagccgcagctgcaacagcgaggccagcagctatgagagcaactacagctacccctatgccagcccccagaccagcccctggcagagcccctgtgtgagccccaagaccacagatcctgaggagggcttcccccggggcctgggcgcctgcaccctgctgggcagccccaggcacagccccagcaccagcccccgggcctctgtgacagaggagagctggctgggcgcccggagcagcaggcctgccagcccctgcaacaagaggaagtacagcctgaatggccggcagcccccctacagcccccaccacagccccacccccagcccccacggcagcccccgggtgtctgtgacagatgacagctggctgggcaacaccacccagtacaccagcagcgccatcgtggccgccatcaatgccctgaccacagacagcagcctggacctgggagatggagtgcctgtgaagagcaggaagaccaccctggagcagccccccagcgtggccctgaaggtggagcctgtgggggaggacctgggcagccccccacctcctgctgactttgcccctgaggactacagcagcttccagcacatcaggaagggcggcttctgtgaccagtacctggccgtgccccagcacccctaccagtgggccaagcccaagcccctgagccccaccagctacatgagccccaccctgcctgccctggactggcagctgcccagccacagcggcccctatgagctgagaattgaggtgcagcccaagagccaccaccgggcccactatgaaacagagggcagcagaggagctgtgaaggccagcgctgggggccaccccatcgtgcagctgcacggctacctggagaatgagcccctgatgctgcagctgttcatcggcacagcagatgaccggctgctgcggccccacgccttctaccaggtgcaccgcatcaccgggaagacagtgtccaccaccagccatgaggccatcctgagcaacaccaaggtgctggagatccccctgctgcctgaaaattccatgagagctgtgattgactgtgccggcatcctgaagctgaggaacagcgacatcgagctgaggaaaggagaaacagacatcggcaggaagaacaccagggtgcggctggtgttccgggtgcacgtgccccagcccagcggccgcaccctgagcctgcaggtggccagcaaccccattgaatgttcccagaggtctgcccaggagctgcccctggtggagaagcagagcacagacagctaccctgtggtgggcggcaagaagatggtgctgagcggccacaacttcctgcaggacagcaaggtgatctttgtggagaaggccccagatggccaccacgtgtgggagatggaggccaagacagaccgggacctgtgcaagcccaacagcctggtggtggagatcccccccttcaggaaccagaggatcaccagccctgtgcacgtgtccttctacgtgtgcaatggcaagaggaagaggagccagtaccagcgcttcacctacctgcctgccaacgtgcccatcatcaagacagagcccacagatgattatgagcccgcccccacctgtggccctgtgtcccagggcctgagccccctgccccggccctactacagccagcagctggccatgcccccagaccccagcagctgcctggtggccggcttccccccctgcccccagaggagcaccctgatgcctgctgcccctggggtgagccccaagctgcatgacctgagccctgctgcctacaccaagggcgtggccagccctggccactgccacctgggcctgccccagcctgctggggaggccccagctgtgcaggatgtgcccaggcctgtggccacccaccctggcagccctggccagcccccaccagccctgctgccccagcaggtgtctgccccacccagcagcagctgccccccaggcctggagcacagcctgtgccccagcagccccagcccccccctgcccccagccacccaggagcccacctgcctgcagccctgcagccctgcctgccccccagccaccggccggccccagcacctgcccagcacagtgagaagagatgagagccccacagctggcccccggctgctgcctgaggtgcatgaagatggcagccccaacctggcccccatccctgtgacagtgaagcgggagcctgaggagctggaccagctgtacctggatgatgtgaatgagatcatcagaaatgacctgagcagcaccagcacccacagctag

SEQ ID NO: 249447 - DNA, 2745 bp, Artificial Sequence
  derived and/or modified sequence
atgacaggcctggaggaccaggagtttgattttgagttcctgtttgagttcaaccagagagatgaaggagctgctgctgctgcccctgagcactacggctacgccagcagcaatgtgtccccagccctgcccctgcccacagcccacagcaccctgcctgccccctgccacaacctgcagaccagcaccccaggcatcatccccccagctgaccaccccagcggctacggggccgccctggatggcggccctgctggctacttcctgagcagcggccacaccaggccagatggagccccagccctggagagccccagaattgagatcaccagctgcctgggcctgtaccacaacaacaaccagttcttccatgatgtggaggtggaggatgtgctgcccagcagcaagaggagccccagcacagccaccctgagcctgcccagcctggaggcctacagagaccccagctgcctgagccctgccagcagcctgagcagccgcagctgcaacagcgaggccagcagctatgagagcaactacagctacccctatgccagcccccagaccagcccctggcagagcccctgtgtgagccccaagaccacagatcctgaggagggcttcccccggggcctgggcgcctgcaccctgctgggcagccccaggcacagccccagcaccagcccccgggcctctgtgacagaggagagctggctgggcgcccggagcagcaggcctgccagcccctgcaacaagaggaagtacagcctgaatggccggcagcccccctacagcccccaccacagccccacccccagcccccacggcagcccccgggtgtctgtgacagatgacagctggctgggcaacaccacccagtacaccagcagcgccatcgtggccgccatcaatgccctgaccacagacagcagcctggacctgggagatggagtgcctgtgaagagcaggaagaccaccctggagcagccccccagcgtggccctgaaggtggagcctgtgggggaggacctgggcagccccccacctcctgctgactttgcccctgaggactacagcagcttccagcacatcaggaagggcggcttctgtgaccagtacctggccgtgccccagcacccctaccagtgggccaagcccaagcccctgagccccaccagctacatgagccccaccctgcctgccctggactggcagctgcccagccacagcggcccctatgagctgagaattgaggtgcagcccaagagccaccaccgggcccactatgaaacagagggcagcagaggagctgtgaaggccagcgctgggggccaccccatcgtgcagctgcacggctacctggagaatgagcccctgatgctgcagctgttcatcggcacagcagatgaccggctgctgcggccccacgccttctaccaggtgcaccgcatcaccgggaagacagtgtccaccaccagccatgaggccatcctgagcaacaccaaggtgctggagatccccctgctgcctgaaaattccatgagagctgtgattgactgtgccggcatcctgaagctgaggaacagcgacatcgagctgaggaaaggagaaacagacatcggcaggaagaacaccagggtgcggctggtgttccgggtgcacgtgccccagcccagcggccgcaccctgagcctgcaggtggccagcaaccccattgaatgttcccagaggtctgcccaggagctgcccctggtggagaagcagagcacagacagctaccctgtggtgggcggcaagaagatggtgctgagcggccacaacttcctgcaggacagcaaggtgatctttgtggagaaggccccagatggccaccacgtgtgggagatggaggccaagacagaccgggacctgtgcaagcccaacagcctggtggtggagatcccccccttcaggaaccagaggatcaccagccctgtgcacgtgtccttctacgtgtgcaatggcaagaggaagaggagccagtaccagcgcttcacctacctgcctgccaacgtgcccatcatcaagacagagcccacagatgattatgagcccgcccccacctgtggccctgtgtcccagggcctgagccccctgccccggccctactacagccagcagctggccatgcccccagaccccagcagctgcctggtggccggcttccccccctgcccccagaggagcaccctgatgcctgctgcccctggggtgagccccaagctgcatgacctgagccctgctgcctacaccaagggcgtggccagccctggccactgccacctgggcctgccccagcctgctggggaggccccagctgtgcaggatgtgcccaggcctgtggccacccaccctggcagccctggccagcccccaccagccctgctgccccagcaggtgtctgccccacccagcagcagctgccccccaggcctggagcacagcctgtgccccagcagccccagcccccccctgcccccagccacccaggagcccacctgcctgcagccctgcagccctgcctgccccccagccaccggccggccccagcacctgcccagcacagtgagaagagatgagagccccacagctggcccccggctgctgcctgaggtgcatgaagatggcagccccaacctggcccccatccctgtgacagtgaagcgggagcctgaggagctggaccagctgtacctggatgactag

SEQ ID NO: 249448 - DNA, 2793 bp, Artificial Sequence
  derived and/or modified sequence
atgaccggcctggaggaccaggagttcgacttcgagttcctgttcgagtttaaccaaagggacgagggcgccgccgcagccgccccagagcattatggctatgcaagctcaaacgttagccccgcactgccccttcctacagcacacagcacgctgcctgcaccctgtcataatctccagacctcaacacctggcattattccccctgccgatcaccccagcggttacggggcagccctggatgggggtccggccggctattttctgagctcggggcacactaggcctgacggggcaccagctctggaaagcccaagaatcgagattacttcttgtctcggcctttaccacaacaacaatcagttttttcacgacgtggaagtcgaggacgtgctaccttcttctaagaggagtccctctacagccacactgtccttgccgagcctggaagcttacagagacccctcgtgcctctcacctgcgtcgtctctgagctccaggagctgtaattcagaagcctcctcttatgagagtaactacagttatccttacgcaagcccccagaccagcccctggcagtccccttgtgtgagcccaaagacaacagaccctgaggaggggtttccacgcggcctaggtgcttgcacgctgctcgggagtcccagacattctccttctacctcccctagagcttcggtcactgaagagtcctggctgggtgcacggtcctcccggcctgcaagcccctgcaacaagagaaagtactctctcaatggcagacagccgccttacagtccccaccattcaccaactccctcccctcatggtagcccccgggtttctgttactgacgactcatggttgggcaacacgactcagtacacatcctcggccattgtagctgcgatcaatgccctcacaacagattcaagtctcgacttgggggacggagtgcccgtgaagagccggaaaacgacacttgaacaacccccctcagtggctctcaaagtcgaacccgttggggaggatttgggaagcccaccaccacctgccgattttgcccctgaggattattcttcctttcagcatattaggaaaggaggcttctgtgaccagtacctcgccgttccccagcacccttatcagtgggccaaaccaaaaccgctgtcccccacatcctacatgtcccccacgcttccagctttggactggcaacttccaagccacagcggaccatacgagttacgcatcgaagtgcagcctaaatcccatcatcgcgcacattacgagaccgagggttctagaggcgcggtgaaggcaagcgccggagggcaccccattgtccagcttcatggctatcttgagaacgagccgctcatgttgcagctttttataggtaccgccgacgatcggctgcttagaccgcacgctttttaccaagttcaccgcatcaccggcaagacagtgagtactacttcccacgaagctattctgagtaacaccaaggtgctggagattcctcttctgcctgaaaattccatgagagccgtaattgattgcgcaggcatcctgaagcttcgaaattctgacatagaattacggaagggagagactgacatcgggcgcaagaatacaagagtcaggctggtgtttcgggtgcatgtgccacagccttccggccggacccttagtcttcaggtcgcttccaatccgattgaatgttcccagaggtcggctcaagaactgccattagttgagaagcaaagcaccgatagctatcccgtggtcggaggtaaaaaaatggttctgagtggccacaattttcttcaagattccaaagtcattttcgtggagaaagcccctgatggccatcacgtatgggaaatggaagcaaagaccgatcgcgacctatgcaagccaaactccctcgtggtcgagatccccccattccgaaaccagcgaatcacgtcacctgtccacgtttccttctatgtttgtaacggaaagaggaaacggtcccagtatcagaggttcacatacttacctgccaatgtcccaataattaaaacagaaccaaccgatgactacgaacctgcacccacctgtggacccgtctcccaaggcttatcacctctccctcgcccttattatagccagcagctcgcaatgccgcctgacccctcatcctgtctcgtcgcgggattcccaccttgtccccagaggtctactctaatgcctgcagccccaggcgtaagtcccaagctccacgatctgtccccagccgcctacacgaagggggttgcctcccctggccattgtcaccttgggctgccacagcccgctggcgaggctcctgctgtgcaagacgtcccaagacccgtggctacccatcctggaagccctggccagccaccccccgctctgttacctcaacaggtgtctgccccaccatcttcctcgtgcccaccagggctggagcactcactgtgccctagttcacccagccctcctttgccaccagcaacacaggaacccacctgcctgcagccttgctccccggcctgtcctcccgccacaggaagacctcagcacctgcccagcactgtcaggcgggatgaatccccaaccgctggacccaggctgctgcccgaagtgcatgaagatggatctccaaacttggcacctattccggtgactgttaagcgggagcccgaggagctggaccagctgtacctagatgatgtcaacgagatcattcggaacgaccttagttcgacatccacccacagctag

SEQ ID NO: 249449 - DNA, 2745 bp, Artificial Sequence
  derived and/or modified sequence
atgaccggcctggaggaccaggagttcgacttcgagttcctgttcgaattcaatcagcgggatgaaggggccgcggcggccgccccagagcattacggatacgcctcctctaatgtgagtcccgccttgccattacctactgcccatagcacactgccggctccatgtcataacctgcagacgagcacacccgggatcatcccaccagctgatcatccttctggatacggggcagccctagacgggggcccggcaggatatttcctttcctcaggccacactaggccagacggcgctcctgcccttgaatcacctagaatagagatcacttcttgtctcggcttatatcacaacaataatcagttcttccacgacgtcgaagtggaagacgtcttaccttcgtcaaaaagaagcccgagcacagcaactttgagcttgccttcacttgaagcctatagggatcccagctgtctcagccccgctagctcactcagttcaaggagttgtaacagtgaggccagtagttacgagtcaaactattcctacccttacgcatcccctcagacctcaccatggcagtcaccttgtgtgagcccaaaaaccactgatccggaggagggcttcccacgcgggctcggagcatgtacattgttgggctctcccaggcactccccatcaacttctcctcgagcttctgtaacggaagagtcgtggctaggagcacgttccagtagacccgctagcccatgcaataaacggaaatacagcctaaacggaagacagccaccttacagcccacatcactctcctacgcccagtccccatggatcgccgagagtctccgttacagatgattcctggttgggaaataccacccagtacacaagcagcgccatagtggccgcaatcaacgctcttaccacggatagctccctggacctcggcgacggcgttcccgttaaatctcggaagacaaccctcgagcagcccccttctgtggcgctgaaggtcgaacccgtgggcgaagatctgggctccccccccccacccgcagatttcgccccagaagattattctagtttccaacacattaggaagggtggattctgcgaccaatacctggcagttccgcagcacccgtatcagtgggccaagcccaaaccactctctcctacgagctatatgtcccctactctgcctgcattggactggcaactcccatcacattctggtccctatgagctcagaatcgaggttcaaccgaaatcacatcatagggctcactacgagacagaagggtcccggggagcggtgaaagcttcagccggtgggcacccaatcgtgcagctgcacggatatctggagaatgagccccttatgctccagttgtttatcggtaccgctgacgatagactgctacggccccacgccttctaccaagtgcatcgcatcacaggcaaaaccgtcagtaccacctctcacgaagccattctgtccaatacaaaggtgctggagatacccctgctcccagagaactccatgcgtgccgtgatcgattgtgccgggattctgaagctgcggaatagcgatatagaactgaggaagggcgaaactgatattggtcgaaagaacacacgggttagactggtgttccgagtgcatgtacctcagccatcgggtcggaccctctctttacaggtggcatccaatcccattgaatgtagtcagcgatctgctcaggagctgcccctcgtggagaaacagagcaccgattcgtatccagtggtcggcggaaaaaagatggttttgtccggacataacttcttgcaggattctaaggtgattttcgtggaaaaagccccagatggccaccacgtctgggaaatggaggcaaagacggacagggacctctgtaagccaaatagtttggtggtggagatccccccctttcgcaatcagcggattacttcccctgtgcatgttagcttttatgtgtgcaatgggaaaagaaagcggtcacagtatcaacgcttcacttatcttcccgccaatgtaccaatcataaagacggaacccactgacgattacgagcccgccccaacctgcggtcctgtaagtcagggcctatcacctcttcccaggccctattattctcaacaattggcgatgccccccgaccccagtagctgcctcgtggcagggttccctccttgtccacaacggtcaactctaatgcctgctgcccccggtgtttcccctaaactgcacgacctttcaccagcggcttatacgaaaggcgtggcctctccaggtcattgccacctggggttaccacagcccgcaggggaagccccggcagttcaggacgtaccgcggcctgtggctacacatcctggttccccgggtcagcctccccccgctctgctgccacagcaggtgagtgctcctccttcgagctcctgtcctcctggtctcgagcattccctgtgcccctcgtcaccaagcccccctctgcccccggctacccaggagcccacgtgcttacagccctgctcaccggcgtgcccgcccgcaacaggtagacctcagcacctcccaagtactgtgagaagagatgagtcaccaaccgcaggacctcggcttctccccgaggtacacgaggacggcagtccaaaccttgctcctattcctgttaccgtgaagcgggagccggaggagctcgatcagctttatctcgacgattag

SEQ ID NO: 249450 - DNA, 4604 bp, Artificial Sequence
  derived and/or modified sequence
gccgggagaaccgaacccctggcggccgcgaccccggctcccgccccggccccggcccgacccgccatgacggggctggaggaccaggagttcgacttcgagttcctcttcgagtttaaccagcgcgacgagggcgccgccgcggccgccccagaacactatggctatgcatcctccaacgtcagccccgccctgccgctccccacggcgcactccaccctgccggccccgtgccacaaccttcagacctccacaccgggcatcatcccgccggcggatcacccctcggggtacggagcagctttggacggtgggcccgcgggctacttcctctcctccggccacaccaggcctgatggggcccctgccctggagagtcctcgcatcgagataacctcgtgcttgggcctgtaccacaacaataaccagtttttccacgatgtggaggtggaagacgtcctccctagctccaaacggtccccctccacggccacgctgagtctgcccagcctggaggcctacagagacccctcgtgcctgagcccggccagcagcctgtcctcccggagctgcaactcagaggcctcctcctacgagtccaactactcgtacccgtacgcgtccccccagacgtcgccatggcagtctccctgcgtgtctcccaagaccacggaccccgaggagggctttccccgcgggctgggggcctgcacactgctgggttccccgcggcactccccctccacctcgccccgcgccagcgtcactgaggagagctggctgggtgcccgctcctccagacccgcgtccccttgcaacaagaggaagtacagcctcaacggccggcagccgccctactcaccccaccactcgcccacgccgtccccgcacggctccccgcgggtcagcgtgaccgacgactcgtggttgggcaacaccacccagtacaccagctcggccatcgtggccgccatcaacgcgctgaccaccgacagcagcctggacctgggagatggcgtccctgtcaagtcccgcaagaccaccctggagcagccgccctcagtggcgctcaaggtggagcccgtcggggaggacctgggcagccccccgcccccggccgacttcgcgcccgaagactactcctctttccagcacatcaggaagggcggcttctgcgaccagtacctggcggtgccgcagcacccctaccagtgggcgaagcccaagcccctgtcccctacgtcctacatgagcccgaccctgcccgccctggactggcagctgccgtcccactcaggcccgtatgagcttcggattgaggtgcagcccaagtcccaccaccgagcccactacgagacggagggcagccggggggccgtgaaggcgtcggccggaggacaccccatcgtgcagctgcatggctacttggagaatgagccgctgatgctgcagcttttcattgggacggcggacgaccgcctgctgcgcccgcacgccttctaccaggtgcaccgcatcacagggaagaccgtgtccaccaccagccacgaggccatcctctccaacaccaaagtcctggagatcccactcctgccggagaacagcatgcgagccgtcattgactgtgccggaatcctgaaactcagaaactccgacattgaacttcggaaaggagagacggacatcgggaggaagaacacacgggtacggctggtgttccgcgttcacgtcccgcaacccagcggccgcacgctgtccctgcaggtggcctccaaccccatcgaatgctcccagcgctcagctcaggagctgcctctggtggagaagcagagcacggacagctatccggtcgtgggcgggaagaagatggtcctgtctggccacaacttcctgcaggactccaaggtcattttcgtggagaaagccccagatggccaccatgtctgggagatggaagcgaaaactgaccgggacctgtgcaagccgaattctctggtggttgagatcccgccatttcggaatcagaggataaccagccccgttcacgtcagtttctacgtctgcaacgggaagagaaagcgaagccagtaccagcgtttcacctaccttcccgccaacgttccaattataaaaacagaacccactgatgattatgagcctgctccaacctgtggaccggtgagccaggggttaagtcctctcccaagaccatactacagccagcagctcgcgatgccacccgaccccagctcctgcctcgtggccggcttcccgccctgtccgcagagaagcaccctgatgccagcggcccctggcgtgagccccaagctccacgacctttctcccgctgcctacaccaagggcgttgccagcccgggccactgtcacctcggactcccgcagccggccggagaggcccccgccgtccaggacgtgcccaggccagtggccacgcaccccggctcgcccgggcagccacccccggccctgctgccacagcaggtgagtgcgcctccaagcagtagctgcccccctggtctcgaacactcgctctgccccagcagcccctctcctccactcccgcctgccacccaagagccgacctgcctgcagccctgcagcccagcgtgcccgcccgccacgggccgcccgcagcacctgccgtccacggtccgcagggacgagtctccgactgccgggccacggctgctgccagaggtgcatgaggacggtagtcctaatttggcccctattcctgtaacggtcaagcgagagcctgaagagttggaccagttgtacctggatgacgtaaatgaaataatacgaaatgacctctccagcacgagcacccactcctagttgccacattggagcactcagttcagcaggggtatgctgacttcagcagacaaagacttttgaataaataaactgaactcacacctggtaccactcagaacctccaactgactgaatgccaggagctgaacattaatatgtgcaaagattggctctccaacaagaaggaaagcagggaggaagggagaccactgtgtcacctggaggagaagtcatctcatgacaacagaagggaggtggccgggctgagcacgggagacccaccgtgcaggggcctttcatgggaacggcccacacgcagtttgaccccacgcccagcccttctggcacccctggggttcaatactggaagtgccttatttaaccagaccatcagggcatcatagaattgagcattgaatttgctactgtaggagtatttttaggagcagaaactgcaaacacatttcattgtgaggttttaccctctgtatgaatgaagagaacgctggaaggctgcgagaggactctagtatgagtctccaacatttggaacgtttcctgggctgtcacgtacactcctgctgccttacacagtgcattttagaatcttccagtctgtcatctcagctcttttgtaacatgcttcccttgtctgcgcggttgaaaccgtaggcttgttcatagtcgcatgctcgcatctttgtttttaatctggcttcgaacatagcacaagtaacttgaatagcacatcaataggttactggacaaaagcagaaaaacctgttacaggatagcctgcatttgcatgtgtgtacatatctaggcatctatttatgtataaataataacagagccgacgtgtcctcgcccaggagggcttccctgtcagcaataaccggcatccgttttggaacctgcgtctggggctccagtcgctgctcttgctggcgtccatcgccgcctcggacggccgtgcattttctcgtctcacgcagttcgaggaggaccctagaaagccaggagctgtgattgacagtagctgtaggttaccagacggcaacattagaaagtgattgtaaataacatgcaacctaagtgtaatatatttgttcagttataagatgattgtttcacagaagccttaccactctctgcttcatctaagaaaaccaataccaaaaacgccactttaatgctcagccctgcgttgtgtgttttcagatgagttactgttaacaggtaggtttgtgtaggccttgctgggcactctgtacaattagttgcttattacgtatgattactcacagcgatctattgttccatataaccaaaaagcatggtttattcattgaaacacggttgacctgaactcgtgccttaggaattaatgcccccttatggaacctgcctgaattgcacctgcgggtggaggctccggctgtgaagtcactgaacagaacgtcgctgatggagaaagggctcccgcagaaggaacggcctgtaccgtgcgctccggcacaatcgcgtctcttgtgtctcactcacggaaagaaacaacctgaaggccatcccgtcggtctgcacgtaaccgtgaagacgtgtggccgcgtcccacctgcggctgggtaccctgcacccggcactgtaggagtcacgtgcagcctttctcaggggactgtcattgaaaaggaaacgtttgatgtctgtgtcagctgtctttgtagttaggaaatagatccaataaagccgtatttttttgctgg

SEQ ID NO: 249451 - DNA, 2799 bp, Artificial Sequence
  derived and/or modified sequence
ccgaacccctggcggccgcgaccccggctcccgccccggccccggcccgacccgccatgacggggctggaggaccaggagttcgacttcgagttcctcttcgagtttaaccagcgcgacgagggcgccgccgcggccgccccagaacactatggctatgcatcctccaacgtcagccccgccctgccgctccccacggcgcactccaccctgccggccccgtgccacaaccttcagacctccacaccgggcatcatcccgccggcggatcacccctcggggtacggagcagctttggacggtgggcccgcgggctacttcctctcctccggccacaccaggcctgatggggcccctgccctggagagtcctcgcatcgagataacctcgtgcttgggcctgtaccacaacaataaccagtttttccacgatgtggaggtggaagacgtcctccctagctccaaacggtccccctccacggccacgctgagtctgcccagcctggaggcctacagagacccctcgtgcctgagcccggccagcagcctgtcctcccggagctgcaactcagaggcctcctcctacgagtccaactactcgtacccgtacgcgtccccccagacgtcgccatggcagtctccctgcgtgtctcccaagaccacggaccccgaggagggctttccccgcgggctgggggcctgcacactgctgggttccccgcggcactccccctccacctcgccccgcgccagcgtcactgaggagagctggctgggtgcccgctcctccagacccgcgtccccttgcaacaagaggaagtacagcctcaacggccggcagccgccctactcaccccaccactcgcccacgccgtccccgcacggctccccgcgggtcagcgtgaccgacgactcgtggttgggcaacaccacccagtacaccagctcggccatcgtggccgccatcaacgcgctgaccaccgacagcagcctggacctgggagatggcgtccctgtcaagtcccgcaagaccaccctggagcagccgccctcagtggcgctcaaggtggagcccgtcggggaggacctgggcagccccccgcccccggccgacttcgcgcccgaagactactcctctttccagcacatcaggaagggcggcttctgcgaccagtacctggcggtgccgcagcacccctaccagtgggcgaagcccaagcccctgtcccctacgtcctacatgagcccgaccctgcccgccctggactggcagctgccgtcccactcaggcccgtatgagcttcggattgaggtgcagcccaagtcccaccaccgagcccactacgagacggagggcagccggggggccgtgaaggcgtcggccggaggacaccccatcgtgcagctgcatggctacttggagaatgagccgctgatgctgcagcttttcattgggacggcggacgaccgcctgctgcgcccgcacgccttctaccaggtgcaccgcatcacagggaagaccgtgtccaccaccagccacgaggccatcctctccaacaccaaagtcctggagatcccactcctgccggagaacagcatgcgagccgtcattgactgtgccggaatcctgaaactcagaaactccgacattgaacttcggaaaggagagacggacatcgggaggaagaacacacgggtacggctggtgttccgcgttcacgtcccgcaacccagcggccgcacgctgtccctgcaggtggcctccaaccccatcgaatgctcccagcgctcagctcaggagctgcctctggtggagaagcagagcacggacagctatccggtcgtgggcgggaagaagatggtcctgtctggccacaacttcctgcaggactccaaggtcattttcgtggagaaagccccagatggccaccatgtctgggagatggaagcgaaaactgaccgggacctgtgcaagccgaattctctggtggttgagatcccgccatttcggaatcagaggataaccagccccgttcacgtcagtttctacgtctgcaacgggaagagaaagcgaagccagtaccagcgtttcacctaccttcccgccaacgttccaattataaaaacagaacccactgatgattatgagcctgctccaacctgtggaccggtgagccaggggttaagtcctctcccaagaccatactacagccagcagctcgcgatgccacccgaccccagctcctgcctcgtggccggcttcccgccctgtccgcagagaagcaccctgatgccagcggcccctggcgtgagccccaagctccacgacctttctcccgctgcctacaccaagggcgttgccagcccgggccactgtcacctcggactcccgcagccggccggagaggcccccgccgtccaggacgtgcccaggccagtggccacgcaccccggctcgcccgggcagccacccccggccctgctgccacagcaggtgagtgcgcctccaagcagtagctgcccccctggtctcgaacactcgctctgccccagcagcccctctcctccactcccgcctgccacccaagagccgacctgcctgcagccctgcagcccagcgtgcccgcccgccacgggccgcccgcagcacctgccgtccacggtccgcagggacgagtctccgactgccgggccacggctgctgccagaggtgcatgaggacggtagtcctaatttggcccctattcctgtaacggtcaagcgagagcctgaagagttggaccagttgtacctggatgacg

SEQ ID NO: 249452 - DNA, 2793 bp, Artificial Sequence
  derived and/or modified sequence
atgaccgggctggaggatcaggaatttgatttcgagtttctgttcgaattcaaccagcgcgacgaaggcgctgcagcagcagcccctgagcactacggttacgccagctccaacgtgtcccccgctctgccactgccaacagcccatagcacattgcctgctccatgtcacaacctacaaacatcaacgcctggtatcatccccccagctgatcatcctagtggctatggggctgcactggatggcggtcctgcgggttatttcctcagctctgggcacacgcggcctgacggagccccagccctcgaaagcccgcgtattgagattacaagttgcctgggactttaccataataacaaccagttttttcacgatgtggaagtcgaggacgtgctgccgtcatccaagaggagcccatccaccgctacgttatcccttccctccctggaggcctatagggacccctcatgtctgtcgcccgctagtagcctgagcagtagatcatgcaattctgaggcctcatcctatgagagcaactacagttacccctacgcgtcaccgcagacatcgccctggcagtcaccatgtgtctcccctaagactactgaccccgaggaaggcttcccgcgaggccttggtgcgtgcacattgctgggaagtcccagacactccccatcgacctctcctagagccagcgttactgaggagtcttggctcggcgcacgctcctcccggcctgcctccccgtgtaataagcgaaaatattccctgaatggtcggcagcccccttacagccctcatcacagccctactcctagccctcatggcagccctagagtctccgtcactgacgatagctggctcggtaacaccactcagtacacctctagcgctattgtggcggctatcaacgctttaaccactgattcttctctggacctcggcgatggagtgcccgtgaagagccgcaagacgaccctggagcagcctccttcggttgctctgaaagtggagccagtgggagaggatcttgggtcgccaccacctcctgcggatttcgcgccagaagactactcctcattccaacacatacgaaagggtggtttctgcgaccaatacctcgcggtaccacagcatccctaccagtgggcaaaaccaaagcccttgtctccaaccagctatatgtctcccaccttacccgcactggactggcagcttccctcacactcgggcccatacgagctccgcatcgaagtgcagcctaaaagtcaccacagagctcattacgagactgagggatcacgcggagcagtgaaggcctccgcagggggacaccctattgtgcagttgcacggatatctcgagaacgaacccttaatgctccagctttttatcggcaccgccgacgataggcttctgcgacctcacgccttttaccaagtgcatagaatcactggcaagaccgtcagcactacttcccacgaggctatactcagcaatacgaaggttctcgaaattcctctgcttcctgagaattcaatgagagccgttattgactgtgcagggattcttaaactgagaaattctgatattgagctcaggaagggcgagacggatatcggcaggaagaacaccagggtccgtctagttttcagggttcatgtcccccaaccatctggacggactctctcactgcaggtcgcctccaaccctatagagtgtagtcaacggagcgctcaggagctgcctctggtggagaagcaatctacggattcttaccctgtcgtgggaggcaagaaaatggtgttgtctggccacaactttctgcaggacagcaaggtgatcttcgtcgagaaggccccagacggccaccacgtttgggagatggaagctaaaaccgatagggacctctgcaaaccaaactccctggtcgtcgaaatccctccttttagaaaccagcggatcactagccccgttcacgtgtcattctacgtctgcaacggaaaaagaaagcgatcccagtaccaaagatttacctatctccctgccaacgtgcctatcatcaaaaccgagcctactgacgattatgagcctgccccaacctgcggaccggtgtcacaggggctctcaccattacctcggccttattattcccaacaattggctatgcctccagacccgtcaagctgcctggtggccggttttcccccttgtccacagagaagtacgcttatgccagctgcgcctggggtgtcccctaaactgcacgatctgtctcctgcagcctataccaagggcgtggcctctccgggacactgccacctgggtctccctcagcccgcaggcgaggcgccagccgtacaggacgtgccccgaccagtggctacccaccctggctcaccagggcaaccccctcctgctttgctgccccagcaagtctctgccccacccagcagcagctgtcctccagggctcgaacatagtctgtgcccctcatcaccgagtcccccattgccacctgccacgcaggagcccacctgtttgcagccttgttccccagcctgtcccccagcgaccggcaggcctcaacatttaccttcaacagtgaggcgcgacgagtctcctactgctggccctcgcctgctccccgaagttcatgaggatggctctccgaatctggcccctatccctgttaccgtgaagcgggaacctgaggagctagatcagctttacctggacgacgtgaacgaaatcataagaaatgacctgtcgtcgaccagcacccatagctag

SEQ ID NO: 249453 - DNA, 2745 bp, Artificial Sequence
  derived and/or modified sequence
atgaccgggctggaggaccaggagttcgattttgagtttctgtttgagtttaaccagagagacgaaggtgctgccgctgctgcgccagagcactatgggtacgcctctagcaacgtgagccccgctctgcccttgccaactgcccattctacactgcctgcgccatgccacaacctgcaaacatccacgcctggcatcattcctcctgccgatcatccatcaggatatggagctgctctggacgggggacctgctggttactttctgtccagtgggcacactcggccagatggggctcccgctctggagagtcctcgaatcgaaatcacttcatgtctgggcctgtaccataataataaccaattcttccacgatgtcgaggtggaagacgtgcttcctagtagcaagaggtcccccagtacagctacactgtccctgcctagcctcgaggcctacagggacccctcatgtttatccccagcttctagtctgagctcacgctcttgcaacagtgaagcaagctcctacgagagcaattatagctacccctacgcatctccccagacatccccatggcaatctccatgcgtgtccccaaagacaaccgatcccgaagaggggtttccaagggggctgggagcctgcaccttgctggggagtcccaggcatagccctagcacatcccctagggccagtgttacagaggaatcttggctgggcgctagaagcagccggccagcttctccgtgcaataaacgtaaatactcgctgaacggcagacaaccgccatattccccccatcattctcccacaccctctccccacgggagtccacgggtgagtgtgactgatgacagttggttgggcaatacaacccagtatacaagttcggcaattgtggcagctattaacgccctgacaacagattcgtctttggatctcggagacggggtacccgtgaaatctagaaaaacgactcttgagcaaccgccatccgtagctctcaaggtggaaccagttggcgaggaccttgggtccccccctcctccagccgattttgctccagaagactatagcagttttcagcatatccgtaaaggcggattctgtgaccagtacctggccgtgccacagcatccttatcaatgggctaagccaaagcctcttagccctacctcttacatgagccccacactgccagcgctggactggcagttgccatcgcactccggtccatacgaactgcggattgaggtgcagccgaagagccaccacagagctcactatgaaaccgagggtagtaggggtgccgtcaaggcttctgcaggcggtcacccaatcgtgcaacttcacggctacctggaaaacgagccccttatgctacagctcttcattggaaccgctgatgaccgccttctccgcccacacgctttctatcaggtccatagaattacagggaaaacagtgagtactaccagccatgaagctatcctatccaatactaaggtactggaaattccccttctgcccgagaatagcatgcgtgcagtcattgattgcgcaggcattctgaagctcaggaatagcgatatcgagctgcgcaaaggcgagactgatatcggtagaaagaatacccgggtcagattagtcttccgagtacacgtgcctcagccaagcggcagaacgctgtcacttcaggtcgctagtaatcctattgagtgctcccagagatctgcacaggagttgcctcttgtggagaagcagtccaccgattcatacccagtagtgggtggcaagaaaatggtcctctctggccacaactttttgcaggacagtaaagtgattttcgtcgagaaagccccagacgggcatcacgtctgggagatggaagccaaaactgatcgggacctgtgcaaacccaattcgctggtggtggagattcctcccttcagaaatcagcggatcacttcaccggtgcacgtgagtttttacgtctgcaatggtaaacgcaaacgttcacagtatcagcgttttacctacctgccagctaatgtccctattataaaaactgagcccaccgatgattatgagcccgctcccacatgcggcccagtctcacagggattgtcacctttaccccgaccctactacagtcagcaacttgcgatgccccctgacccgtcaagctgtcttgtcgccggtttccctccctgccctcagcggtctactctgatgcctgcagcgccaggagtgagtccaaagctgcatgatctcagccctgccgcatacacgaaaggagtggcatctcctgggcactgccacctcggattgccacaaccagcaggcgaagccccagccgtgcaggatgtgcctcgcccagtggctacacatcccggatcgcctggtcagccgccaccagccctgctgccacagcaggtctccgcgcctccaagtagcagttgcccacctggcctggaacactcattgtgtcccagttctccatcaccacccctgcctcctgcaacccaggagcccacatgcctgcagccgtgctcccccgcatgccctcccgctacggggaggccccagcatctgccgtcaactgttcggagagatgaaagcccgaccgccggacctcgcctgctccccgaggtgcatgaggatgggtctcctaacctggcaccaatacccgtaaccgttaaaagagagcctgaggagctcgaccaactgtatttggacgactag

SEQ ID NO: 249454 - DNA, 1062 bp, Artificial Sequence
  derived and/or modified sequence
atgctgcagctgttcatcggcaccgccgacgacagactgctgagaccccacgccttctaccaggtgcacagaatcaccggcaagaccgtgagcaccaccagccacgaggccatcctgagcaacaccaaggtgctggagatccccctgctgcccgagaacagcatgagagccgtgatcgactgcgccggcatcctgaagctgagaaacagcgacatcgagctgagaaagggcgagaccgacatcggcagaaagaacaccagagtgagactggtgttcagagtgcacgtgccccagcccagcggcagaaccctgagcctgcaggtggccagcaaccccatcgagtgcagccagagaagcgcccaggagctgcccctggtggagaagcagagcaccgacagctaccccgtggtgggcggcaagaagatggtgctgagcggccacaacttcctgcaggacagcaaggtgatcttcgtggagaaggcccccgacggccaccacgtgtgggagatggaggccaagaccgacagagacctgtgcaagcccaacagcctggtggtggagatcccccccttcagaaaccagagaatcaccagccccgtgcacgtgagcttctacgtgtgcaacggcaagagaaagagaagccagtaccagagattcacctacctgcccgccaacgtgcccatcatcaagaccgagcccaccgacgactacgagcccgcccccacctgcggccccgtgagccagggcctgagccccctgcccagaccctactacagccagcagctggccatgccccccgaccccagcagctgcctggtggccggcttccccccctgcccccagagaagcaccctgatgcccgccgcccccggcgtgagccccaagctgcacgacctgagccccgccgcctacaccaagggcgtggccagccccggccactgccacctgggcctgccccagcccgccggcgaggcccccgccgtgcaggacgtgcccagacccgtggccacccaccccggcagccccggccagcccccccccgccctgctgccccagcagtag

SEQ ID NO: 249455 - DNA, 1062 bp, Artificial Sequence
  derived and/or modified sequence
atgttacagctctttattgggactgcagatgatagactgctgcggccacatgccttctatcaggtgcatcggatcacggggaaaactgtgagtacaacctctcacgaggccattctgtcaaatactaaggtccttgagatccctctcctccctgaaaatagcatgagggccgttatcgactgcgcagggattcttaaattgcgcaactccgacatagagctccgcaagggcgaaaccgacataggtcggaagaacacccgtgttaggttagtttttagagtgcatgtgcctcagccaagtggtcggactctctctttgcaggtggccagcaatccgattgagtgcagccagcgaagtgcccaggagctcccgctggtagaaaaacaatccaccgactcttaccccgttgttggtggcaagaaaatggtgctgtccggccataattttctccaggactctaaggtaatatttgtggaaaaagcacccgatgggcaccacgtctgggaaatggaagcaaaaactgacagagatctctgcaagcctaactctctcgtcgtcgaaatcccacctttccggaaccagaggataacatcaccggtgcatgtcagcttttacgtgtgcaacggcaaacgaaaaaggtctcagtaccagcgtttcacctacctgcctgccaatgtgcccatcatcaagactgagccaacagacgactacgaacctgcacccacttgtgggcctgtatcccagggcctgtccccgttgcctcggccatactattcccagcaactggcgatgccacccgacccatcttcatgcctggtcgcaggatttcccccttgtcctcaaaggtctaccctgatgccggccgcccctggagttagccccaagcttcacgacctttcccctgccgcctacactaagggcgtggcaagccccgggcattgccacttgggccttccgcagccagccggcgaggcacccgcagttcaagatgtgccacgtccagtggccacacacccgggcagtcccggtcagccaccaccggcactgctcccccagcagtag

SEQ ID NO: 249456 - DNA, 1062 bp, Artificial Sequence
  derived and/or modified sequence
atgctgcagctgttcatcggcacagcagatgaccggctgctgcggccccacgccttctaccaggtgcaccgcatcaccgggaagacagtgtccaccaccagccatgaggccatcctgagcaacaccaaggtgctggagatccccctgctgcctgagaacagcatgagagctgtgattgactgtgccggcatcctgaagctgaggaacagcgacatcgagctgaggaagggggagacagacattggaaggaagaacaccagggtgcggctggtgttccgggtgcacgtgccccagcccagcggccgcaccctgagcctgcaggtggccagcaaccccatcgagtgcagccagaggtctgcccaggagctgcccctggtggagaagcagagcacagacagctaccctgtggtgggcggcaagaagatggtgctgagcggccacaacttcctgcaggacagcaaggtgatctttgtggagaaggccccagatggccaccacgtgtgggagatggaggccaagacagaccgggacctgtgcaagcccaacagcctggtggtggagatcccccccttcaggaaccagaggatcaccagccctgtgcacgtgtccttctacgtgtgcaatggcaagaggaagaggagccagtaccagcgcttcacctacctgcctgccaacgtgcccatcatcaagacagagcccacagatgattatgagcccgcccccacctgtggccctgtgtcccagggcctgagccccctgccccggccctactacagccagcagctggccatgcccccagaccccagcagctgcctggtggccggcttccccccctgcccccagaggagcaccctgatgcctgctgcccctggggtgagccccaagctgcatgacctgagccctgctgcctacaccaagggcgtggccagccctggccactgccacctgggcctgccccagcctgctggggaggccccagctgtgcaggatgtgcccaggcctgtggccacccaccctggcagccctggccagcccccaccagccctgctgccccagcagtag

SEQ ID NO: 249457 - DNA, 1062 bp, Artificial Sequence
  derived and/or modified sequence
atgctgcagctgttcatcggcaccgccgacgaccggctgctgcggccccacgccttttatcaggtccaccgaattaccgggaaaactgtgagcactacaagtcatgaggcgatcttgagcaatacaaaagttctggagatccctttattgcctgagaatagcatgcgcgccgtgattgattgcgcaggcatccttaagctgaggaattctgacatcgaactgagaaagggagagactgatataggccgaaaaaacacccgggtgagacttgtcttccgcgttcacgttccccagccctcagggcgaactctcagtctgcaggtagccagtaaccccattgagtgctcacagcgttccgctcaagaactgcctctggttgaaaagcagtccactgactcttatccggtcgtgggcggcaagaaaatggtgctgagcggacataacttcttacaggactccaaagtcattttcgtggaaaaagctcccgacggtcaccacgtgtgggaaatggaggcaaagaccgatcgtgatttgtgcaagccaaactctctggtggtagagattccgccctttcgtaatcagagaataacaagcccagtgcatgttagtttctatgtttgtaacggaaagcggaaaagatcccagtaccagcgttttacttacctccctgctaacgtgccgatcattaagacagagccaaccgacgactacgaaccagctccgacttgcgggccggtgagccaagggctgtcccccttaccgaggccgtactactcccagcagctggcaatgccacctgatccctcttcctgcctcgtcgccggatttcccccttgcccccagaggtccacacttatgcctgccgctccgggtgtgtcaccgaaactccacgatctgtctcctgctgcttacactaaaggggtggcctccccagggcattgtcacctgggactgccacagcctgccggcgaggcaccagcagtgcaggacgtgcctaggccagtagcaactcatccagggagtcctggccagcctcctcctgccctgcttcctcagcagtag

SEQ ID NO: 249458 - DNA, 1062 bp, Artificial Sequence
  derived and/or modified sequence
atgctgcagctgttcattggtaccgccgacgaccggctccttaggcctcatgccttctaccaggttcatcggattaccgggaaaactgtcagtaccacatcccatgaggcaatcttgtctaacacgaaggtacttgaaatcccactgctgccagaaaacagcatgagagctgtgatcgattgcgccggaatcctgaagctgcgaaactcagacatagagctgcggaaaggcgagacggacatagggagaaagaatactagagtgcggcttgtgttccgcgtccacgttccccagcccagtggcagaaccttgagtctccaagtcgccagtaatcccatcgagtgctctcaacgaagcgcccaggagttgccccttgtggaaaagcagtcaacagacagctaccctgtggtcggcggtaaaaaaatggtcctgagtgggcacaattttctccaggacagcaaggtgatatttgtggagaaagcccctgacgggcaccatgtgtgggagatggaagctaaaactgatcgcgacctatgtaagcccaacagcctggttgtggaaattcctccattccgcaaccagagaattacgtcacccgtgcacgtctccttttacgtttgtaatggcaagcgaaagcggtctcaataccaacgattcacatatcttcctgccaatgtgccaattattaaaaccgagcccacagatgattatgaacccgctcccacatgcggccctgtgagtcagggcctctcaccgctgccaaggccctattacagccaacaacttgccatgcctccagatccaagctcctgtctggttgcgggatttcccccatgccctcagcgaagcacacttatgcccgcagcacccggtgtgagccccaaattgcatgacctgagtcccgctgcctacaccaagggtgtggcctcccctggacactgccacctgggactgccacagccagccggagaagcacctgcagtgcaggacgtgcccaggcctgtcgctacccacccgggtagcccaggacagcctcccccagccttgctgccgcagcagtag

SEQ ID NO: 249459 - DNA, 3453 bp, Artificial Sequence
  derived and/or modified sequence
ctcagaggctccgaactcgccggcggagtcgccgcgccagatcccagcagcagggcgcgggcaccggggcgcgggcagggctcggagccaccgcgcaggtcctagggccgcggccgggccccgccacgcgcgcacacgcccctcgatgactttcctccggggcgcgcggcgctgagcccggggcgagggctgtcttcccggagacccgaccccggcagcgcggggcggccgcttctcctgtgcctccgcccgccgctccactccccgccgccgccgcgcggatgccaagcaccagctttccagtcccttccaagtttccacttggccctgcggctgcggtcttcgggagaggagaaactttggggcccgcgccgcgcgccggcggcaccatgaagtcagcggaggaagcccgaccctgcccgccctggactggcagctgccgtcccactcaggcccgtatgagcttcggattgaggtgcagcccaagtcccaccaccgagcccactacgagacggagggcagccggggggccgtgaaggcgtcggccggaggacaccccatcgtgcagctgcatggctacttggagaatgagccgctgatgctgcagcttttcattgggacggcggacgaccgcctgctgcgcccgcacgccttctaccaggtgcaccgcatcacagggaagaccgtgtccaccaccagccacgaggccatcctctccaacaccaaagtcctggagatcccactcctgccggagaacagcatgcgagccgtcattgactgtgccggaatcctgaaactcagaaactccgacattgaacttcggaaaggagagacggacatcgggaggaagaacacacgggtacggctggtgttccgcgttcacgtcccgcaacccagcggccgcacgctgtccctgcaggtggcctccaaccccatcgaatgctcccagcgctcagctcaggagctgcctctggtggagaagcagagcacggacagctatccggtcgtgggcgggaagaagatggtcctgtctggccacaacttcctgcaggactccaaggtcattttcgtggagaaagccccagatggccaccatgtctgggagatggaagcgaaaactgaccgggacctgtgcaagccgaattctctggtggttgagatcccgccatttcggaatcagaggataaccagccccgttcacgtcagtttctacgtctgcaacgggaagagaaagcgaagccagtaccagcgtttcacctaccttcccgccaacgttccaattataaaaacagaacccactgatgattatgagcctgctccaacctgtggaccggtgagccaggggttaagtcctctcccaagaccatactacagccagcagctcgcgatgccacccgaccccagctcctgcctcgtggccggcttcccgccctgtccgcagagaagcaccctgatgccagcggcccctggcgtgagccccaagctccacgacctttctcccgctgcctacaccaagggcgttgccagcccgggccactgtcacctcggactcccgcagccggccggagaggcccccgccgtccaggacgtgcccaggccagtggccacgcaccccggctcgcccgggcagccacccccggccctgctgccacagcagtaaatgaaataatacgaaatgacctctccagcacgagcacccactcctagttgccacattggagcactcagttcagcaggggtatgctgacttcagcagacaaagacttttgaataaataaactgaactcacacctggtaccactcagaacctccaactgactgaatgccaggagctgaacattaatatgtgcaaagattggctctccaacaagaaggaaagcagggaggaagggagaccactgtgtcacctggaggagaagtcatctcatgacaacagaagggaggtggccgggctgagcacgggagacccaccgtgcaggggcctttcatgggaacggcccacacgcagtttgaccccacgcccagcccttctggcacccctggggttcaatactggaagtgccttatttaaccagaccatcagggcatcatagaattgagcattgaatttgctactgtaggagtatttttaggagcagaaactgcaaacacatttcattgtgaggttttaccctctgtatgaatgaagagaacgctggaaggctgcgagaggactctagtatgagtctccaacatttggaacgtttcctgggctgtcacgtacactcctgctgccttacacagtgcattttagaatcttccagtctgtcatctcagctcttttgtaacatgcttcccttgtctgcgcggttgaaaccgtaggcttgttcatagtcgcatgctcgcatctttgtttttaatctggcttcgaacatagcacaagtaacttgaatagcacatcaataggttactggacaaaagcagaaaaacctgttacaggatagcctgcatttgcatgtgtgtacatatctaggcatctatttatgtataaataataacagagccgacgtgtcctcgcccaggagggcttccctgtcagcaataaccggcatccgttttggaacctgcgtctggggctccagtcgctgctcttgctggcgtccatcgccgcctcggacggccgtgcattttctcgtctcacgcagttcgaggaggaccctagaaagccaggagctgtgattgacagtagctgtaggttaccagacggcaacattagaaagtgattgtaaataacatgcaacctaagtgtaatatatttgttcagttataagatgattgtttcacagaagccttaccactctctgcttcatctaagaaaaccaataccaaaaacgccactttaatgctcagccctgcgttgtgtgttttcagatgagttactgttaacaggtaggtttgtgtaggccttgctgggcactctgtacaattagttgcttattacgtatgattactcacagcgatctattgttccatataaccaaaaagcatggtttattcattgaaacacggttgacctgaactcgtgccttaggaattaatgcccccttatggaacctgcctgaattgcacctgcgggtggaggctccggctgtgaagtcactgaacagaacgtcgctgatggagaaagggctcccgcagaaggaacggcctgtaccgtgcgctccggcacaatcgcgtctcttgtgtctcactcacggaaagaaacaacctgaaggccatcccgtcggtctgcacgtaaccgtgaagacgtgtggccgcgtcccacctgcggctgggtaccctgcacccggcactgtaggagtcacgtgcagcctttctcaggggactgtcattgaaaaggaaacgtttgatgtctgtgtcagctgtctttgtagttaggaaatagatccaataaagccgtatttttttgctgga

SEQ ID NO: 249460 - protein, 716 aa, Artificial Sequence
  derived and/or modified sequence
MPSTSFPVPSKFPLGPAAAVFGRGETLGPAPRAGGTMKSAEEEHYGYASSNVSPALPLPTAHSTLPAPCHNLQTSTPGIIPPADHPSGYGAALDGGPAGYFLSSGHTRPDGAPALESPRIEITSCLGLYHNNNQFFHDVEVEDVLPSSKRSPSTATLSLPSLEAYRDPSCLSPASSLSSRSCNSEASSYESNYSYPYASPQTSPWQSPCVSPKTTDPEEGFPRGLGACTLLGSPRHSPSTSPRASVTEESWLGARSSRPASPCNKRKYSLNGRQPPYSPHHSPTPSPHGSPRVSVTDDSWLGNTTQYTSSAIVAAINALTTDSSLDLGDGVPVKSRKTTLEQPPSVALKVEPVGEDLGSPPPPADFAPEDYSSFQHIRKGGFCDQYLAVPQHPYQWAKPKPLSPTSYMSPTLPALDWQLPSHSGPYELRIEVQPKSHHRAHYETEGSRGAVKASAGGHPIVQLHGYLENEPLMLQLFIGTADDRLLRPHAFYQVHRITGKTVSTTSHEAILSNTKVLEIPLLPENSMRAVIDCAGILKLRNSDIELRKGETDIGRKNTRVRLVFRVHVPQPSGRTLSLQVASNPIECSQRSAQELPLVEKQSTDSYPVVGGKKMVLSGHNFLQDSKVIFVEKAPDGHHVWEMEAKTDRDLCKPNSLVVEIPPFRNQRITSPVHVSFYVCNGKRKRSQYQRFTYLPANGNAIFLTVSREHERVGCFF

SEQ ID NO: 249461 - DNA, 2151 bp, Artificial Sequence
  derived and/or modified sequence
atgcccagcaccagcttccccgtgcccagcaagttccccctgggccccgccgccgccgtgttcggcagaggcgagaccctgggccccgcccccagagccggcggcaccatgaagagcgccgaggaggagcactacggctacgccagcagcaacgtgagccccgccctgcccctgcccaccgcccacagcaccctgcccgccccctgccacaacctgcagaccagcacccccggcatcatcccccccgccgaccaccccagcggctacggcgccgccctggacggcggccccgccggctacttcctgagcagcggccacaccagacccgacggcgcccccgccctggagagccccagaatcgagatcaccagctgcctgggcctgtaccacaacaacaaccagttcttccacgacgtggaggtggaggacgtgctgcccagcagcaagagaagccccagcaccgccaccctgagcctgcccagcctggaggcctacagagaccccagctgcctgagccccgccagcagcctgagcagcagaagctgcaacagcgaggccagcagctacgagagcaactacagctacccctacgccagcccccagaccagcccctggcagagcccctgcgtgagccccaagaccaccgaccccgaggagggcttccccagaggcctgggcgcctgcaccctgctgggcagccccagacacagccccagcaccagccccagagccagcgtgaccgaggagagctggctgggcgccagaagcagcagacccgccagcccctgcaacaagagaaagtacagcctgaacggcagacagcccccctacagcccccaccacagccccacccccagcccccacggcagccccagagtgagcgtgaccgacgacagctggctgggcaacaccacccagtacaccagcagcgccatcgtggccgccatcaacgccctgaccaccgacagcagcctggacctgggcgacggcgtgcccgtgaagagcagaaagaccaccctggagcagccccccagcgtggccctgaaggtggagcccgtgggcgaggacctgggcagcccccccccccccgccgacttcgcccccgaggactacagcagcttccagcacatcagaaagggcggcttctgcgaccagtacctggccgtgccccagcacccctaccagtgggccaagcccaagcccctgagccccaccagctacatgagccccaccctgcccgccctggactggcagctgcccagccacagcggcccctacgagctgagaatcgaggtgcagcccaagagccaccacagagcccactacgagaccgagggcagcagaggcgccgtgaaggccagcgccggcggccaccccatcgtgcagctgcacggctacctggagaacgagcccctgatgctgcagctgttcatcggcaccgccgacgacagactgctgagaccccacgccttctaccaggtgcacagaatcaccggcaagaccgtgagcaccaccagccacgaggccatcctgagcaacaccaaggtgctggagatccccctgctgcccgagaacagcatgagagccgtgatcgactgcgccggcatcctgaagctgagaaacagcgacatcgagctgagaaagggcgagaccgacatcggcagaaagaacaccagagtgagactggtgttcagagtgcacgtgccccagcccagcggcagaaccctgagcctgcaggtggccagcaaccccatcgagtgcagccagagaagcgcccaggagctgcccctggtggagaagcagagcaccgacagctaccccgtggtgggcggcaagaagatggtgctgagcggccacaacttcctgcaggacagcaaggtgatcttcgtggagaaggcccccgacggccaccacgtgtgggagatggaggccaagaccgacagagacctgtgcaagcccaacagcctggtggtggagatcccccccttcagaaaccagagaatcaccagccccgtgcacgtgagcttctacgtgtgcaacggcaagagaaagagaagccagtaccagagattcacctacctgcccgccaacggcaacgccatcttcctgaccgtgagcagagagcacgagagagtgggctgcttcttctag

SEQ ID NO: 249462 - DNA, 2151 bp, Artificial Sequence
  derived and/or modified sequence
atgccatctacctcctttcccgtgccatccaagttccctctcggacctgcagctgcagttttcgggaggggagagaccttgggaccagccccaagggcaggtggcaccatgaaaagtgccgaggaggagcactacgggtatgcctcctcaaatgtgtcgccggcgctgccccttcccacagcccacagcacactccccgcgccatgtcataatctgcagacttccactccaggtatcattccacccgcagatcaccccagtggttacggcgcagcactggacggaggcccagccggctattttttatcttcaggtcataccaggcctgatggcgcacccgctctagaatccccacgcattgaaattacgagctgcctgggactgtaccataacaataaccagtttttccatgacgtggaagtagaagatgtgttaccaagctctaagagatccccttccaccgctactttaagcctcccctctctggaggcataccgggatcccagttgcctttcccccgccagctccctgtcatcccgtagctgtaacagtgaggcttcatcgtatgagtccaattattcgtacccttatgctagccctcagacatccccttggcaatctccctgtgtgagcccaaaaacaactgaccctgaggagggctttccccgcggactgggagcgtgcacactcctgggttccccgagacactctcctagcacaagtcctagggcctcagtgacggaagagagctggctcggagcgcgaagcagcagaccagcatcaccctgtaacaaacggaagtactctcttaatggtagacagcccccttactccccccaccatagcccaactcccagccctcacggctcccctagagtgagcgtgacggatgattcctggcttgggaataccacccagtacacatcatcagccattgtggcagcaatcaacgccctcacaacagactcctcattggacctgggggatggcgtccctgtgaaaagtcggaagaccactctggagcagccgccatctgttgccttaaaggtggagcccgtgggtgaggacttgggctccccccccccgcccgctgatttcgctcccgaagattattcctccttccagcacatccgtaagggcggcttttgcgatcaatatctcgccgtgccacagcacccataccaatgggctaagccgaaacccctctccccaacctcctatatgagcccaaccctgcccgcactcgattggcaacttccaagccactcgggaccatacgagctgcggatcgaggtgcagcccaagagtcatcaccgggctcattacgaaaccgaggggtcccgcggagctgtgaaggcttccgcaggaggacaccccattgtccagctgcatggctatttggagaacgagcctctgatgcttcagctgttcataggcaccgccgatgataggcttctgaggccacatgccttttatcaggtgcataggattacaggcaagactgtatcgacgacttcacatgaggccatcctctctaatacaaaggtcctcgagatcccccttctgcctgaaaattctatgcgcgccgtgattgactgcgccggaatcctgaaacttagaaactccgacattgagcttagaaagggggagacagacatcgggcgtaagaacaccagagtaagactcgtcttccgcgtccacgtacctcagccttccggtaggactctttcactccaggtagcttcaaacccaatcgagtgttcgcagcggtctgcccaggagctcccactggtggaaaagcagtccactgattcctacccggtggtggggggaaagaaaatggtgctctctgggcataatttcttacaggatagcaaggtcatattcgtcgaaaaagctcctgatggacatcatgtctgggaaatggaagcaaagactgatcgggatttatgcaagcccaacagtctcgtagttgaaatccccccctttagaaaccagcgtatcacgagccctgtgcatgtgtccttctatgtctgcaacggaaagaggaaaaggtcccaatatcaacgattcacatacctgcccgcaaatggaaacgccattttcttaactgtatcccgggagcacgaacgggtagggtgctttttctag

SEQ ID NO: 249463 - DNA, 2151 bp, Artificial Sequence
  derived and/or modified sequence
atgcccagcaccagcttccctgtgcccagcaagttccccctgggccctgctgctgctgtgtttggccgcggggagaccctgggccctgcccccagggctgggggcaccatgaagtctgctgaggaggagcactacggctacgccagcagcaatgtgtccccagccctgcccctgcccacagcccacagcaccctgcctgccccctgccacaacctgcagaccagcaccccaggcatcatccccccagctgaccaccccagcggctatggagctgccctggatggcggccctgctggctacttcctgagcagcggccacaccaggccagatggagccccagccctggagagcccccgcatcgagatcaccagctgcctgggcctgtaccacaacaacaaccagttcttccatgatgtggaggtggaggatgtgctgcccagcagcaagaggagccccagcacagccaccctgagcctgcccagcctggaggcctacagagaccccagctgcctgagccctgccagcagcctgagcagccgcagctgcaacagcgaggccagcagctatgagagcaactacagctacccctatgccagcccccagaccagcccctggcagagcccctgtgtgagccccaagaccacagatcctgaggagggcttcccccggggcctgggcgcctgcaccctgctgggcagccccaggcacagccccagcaccagcccccgggcctctgtgacagaggagagctggctgggcgcccggagcagcaggcctgccagcccctgcaacaagaggaagtacagcctgaatggccggcagcccccctacagcccccaccacagccccacccccagcccccacggcagcccccgggtgtctgtgacagatgacagctggctgggcaacaccacccagtacaccagcagcgccatcgtggccgccatcaatgccctgaccacagacagcagcctggacctgggagatggagtgcctgtgaagagcaggaagaccaccctggagcagcccccatctgtggccctgaaggtggagcctgtgggggaggacctgggcagccccccacctcctgctgactttgcccctgaggactacagcagcttccagcacatcagaaaaggaggcttctgtgaccagtacctggccgtgccccagcacccctaccagtgggccaagcccaagcccctgagccccaccagctacatgagccccaccctgcctgccctggactggcagctgcccagccacagcggcccctatgagctgcgcatcgaggtgcagcccaagagccaccaccgggcccactatgaaacagagggcagcagaggagctgtgaaggccagcgctgggggccaccccatcgtgcagctgcacggctacctggagaatgagcccctgatgctgcagctgttcatcggcacagcagatgaccggctgctgcggccccacgccttctaccaggtgcaccgcatcaccgggaagacagtgtccaccaccagccatgaggccatcctgagcaacaccaaggtgctggagatccccctgctgcctgagaacagcatgagagctgtgattgactgtgccggcatcctgaagctgaggaacagcgacatcgagctgaggaagggggagacagacattggaaggaagaacaccagggtgcggctggtgttccgggtgcacgtgccccagcccagcggccgcaccctgagcctgcaggtggccagcaaccccatcgagtgcagccagaggtctgcccaggagctgcccctggtggagaagcagagcacagacagctaccctgtggtgggcggcaagaagatggtgctgagcggccacaacttcctgcaggacagcaaggtgatctttgtggagaaggccccagatggccaccacgtgtgggagatggaggccaagacagaccgggacctgtgcaagcccaacagcctggtggtggagatcccccccttcaggaaccagaggatcaccagccctgtgcacgtgtccttctacgtgtgcaatggcaagaggaagaggagccagtaccagcgcttcacctacctgcctgccaatggaaatgccatcttcctgactgtgtcccgggagcacgagcgggtgggctgcttcttctag

SEQ ID NO: 249464 - DNA, 2151 bp, Artificial Sequence
  derived and/or modified sequence
atgcccagcaccagcttccccgtgcccagcaagttccccctgggcccagcggctgctgtgtttgggaggggtgagaccctgggcccagcccctcgagctggcgggacaatgaagtctgccgaggaagagcattatggctacgcttcatccaatgtgagcccagccctgcctctcccgacggctcatagcacgctgcctgcaccttgccacaacttacagacgtctacaccaggcatcataccaccagctgatcatccgtctggttacggagccgctttggatggaggtcccgccgggtactttctaagcagtggacacacccggccggacggtgctcccgctctggagtcaccccgcattgaaatcactagctgcctcggcctgtaccataacaataatcagttctttcacgacgtcgaggtagaggatgtgcttccttcaagcaaacgcagcccctcaacggccacgctttcccttccttccttggaggcttatagggatccaagttgcttgtcaccagcctcctccctttctagccgatcctgcaacagtgaagcctcaagctacgagagcaattactcttatccatatgcaagcccacagacatccccatggcagtctccttgcgtgagtccaaagacaacagaccctgaagagggctttcctaggggacttggagcctgcaccttactgggctcaccaagacattccccaagcacatccccacgcgcgtcagtgaccgaagagtcttggcttggagcccgttcgtcaagacccgccagcccttgcaacaagagaaaatactcgctcaatgggcggcaaccaccatactctcctcatcactcacctaccccctcgcctcacgggagtccacgagtcagcgttacggatgacagctggctgggtaatacgacacagtatacaagctctgctatcgtcgctgccatcaatgctttgacaacagacagctcgctcgatctcggggatggcgtcccagtcaagagtcggaagaccaccctcgagcaaccgcccagcgtcgcgttgaaagttgagccagtcggggaggatcttggatcacctccaccaccagcagattttgcacctgaagattacagcagctttcaacacatccggaagggggggttttgtgaccagtacctagctgtccctcagcatccttaccaatgggccaaaccaaagcccctctcccctacatcgtacatgtctcccacccttccagcgctcgattggcagctccctagccactctggaccttacgagctgcgtatcgaggtccagcccaaaagccatcatcgggcacattacgagactgagggctccagaggggcagtgaaggcttctgccggtggccaccccattgtccaactgcacggctatctggagaacgaacccctgatgctccaactcttcataggcaccgccgacgaccgtctgctgagaccccacgctttctaccaggtgcatcggattactgggaaaacagtgagcactacgtcacacgaggcaattttaagtaacaccaaagtcctcgaaattcctcttctgcccgagaatagtatgagggctgttatagattgcgccggcatcctcaaattgcgcaatagcgatattgagctgcgcaagggcgagacagatatcgggagaaagaatacacgcgtacgattggtttttcgggtccacgtccctcaaccctccggtcgcaccttatcactgcaagtagcatcaaaccccattgagtgttctcaacgctcggcccaagaactgccgctggtggagaagcaatctaccgattcataccctgtggtgggcggtaagaaaatggtgttgagcggtcacaatttcctgcaggattcaaaagtaattttcgtcgaaaaggcacccgatggacaccacgtgtgggagatggaagctaaaacggaccgcgatttgtgtaaacccaacagccttgtagtggagatccccccgttccggaaccagcggattaccagcccggtacacgtatccttttacgtttgcaatggaaagcggaaaagaagccagtaccagcgattcacatatctgccagctaacgggaatgccatatttctgaccgtaagtcgagaacatgagcgggtggggtgttttttctag

SEQ ID NO: 249465 - DNA, 2807 bp, Artificial Sequence
  derived and/or modified sequence
gcgtcagagcgagactcagaggctccgaactcgccggcggagtcgccgcgccagatcccagcagcagggcgcgggcaccggggcgcgggcagggctcggagccaccgcgcaggtcctagggccgcggccgggccccgccacgcgcgcacacgcccctcgatgactttcctccggggcgcgcggcgctgagcccggggcgagggctgtcttcccggagacccgaccccggcagcgcggggcggccgcttctcctgtgcctccgcccgccgctccactccccgccgccgccgcgcggatgccaagcaccagctttccagtcccttccaagtttccacttggccctgcggctgcggtcttcgggagaggagaaactttggggcccgcgccgcgcgccggcggcaccatgaagtcagcggaggaagaacactatggctatgcatcctccaacgtcagccccgccctgccgctccccacggcgcactccaccctgccggccccgtgccacaaccttcagacctccacaccgggcatcatcccgccggcggatcacccctcggggtacggagcagctttggacggtgggcccgcgggctacttcctctcctccggccacaccaggcctgatggggcccctgccctggagagtcctcgcatcgagataacctcgtgcttgggcctgtaccacaacaataaccagtttttccacgatgtggaggtggaagacgtcctccctagctccaaacggtccccctccacggccacgctgagtctgcccagcctggaggcctacagagacccctcgtgcctgagcccggccagcagcctgtcctcccggagctgcaactcagaggcctcctcctacgagtccaactactcgtacccgtacgcgtccccccagacgtcgccatggcagtctccctgcgtgtctcccaagaccacggaccccgaggagggctttccccgcgggctgggggcctgcacactgctgggttccccgcggcactccccctccacctcgccccgcgccagcgtcactgaggagagctggctgggtgcccgctcctccagacccgcgtccccttgcaacaagaggaagtacagcctcaacggccggcagccgccctactcaccccaccactcgcccacgccgtccccgcacggctccccgcgggtcagcgtgaccgacgactcgtggttgggcaacaccacccagtacaccagctcggccatcgtggccgccatcaacgcgctgaccaccgacagcagcctggacctgggagatggcgtccctgtcaagtcccgcaagaccaccctggagcagccgccctcagtggcgctcaaggtggagcccgtcggggaggacctgggcagccccccgcccccggccgacttcgcgcccgaagactactcctctttccagcacatcaggaagggcggcttctgcgaccagtacctggcggtgccgcagcacccctaccagtgggcgaagcccaagcccctgtcccctacgtcctacatgagcccgaccctgcccgccctggactggcagctgccgtcccactcaggcccgtatgagcttcggattgaggtgcagcccaagtcccaccaccgagcccactacgagacggagggcagccggggggccgtgaaggcgtcggccggaggacaccccatcgtgcagctgcatggctacttggagaatgagccgctgatgctgcagcttttcattgggacggcggacgaccgcctgctgcgcccgcacgccttctaccaggtgcaccgcatcacagggaagaccgtgtccaccaccagccacgaggccatcctctccaacaccaaagtcctggagatcccactcctgccggagaacagcatgcgagccgtcattgactgtgccggaatcctgaaactcagaaactccgacattgaacttcggaaaggagagacggacatcgggaggaagaacacacgggtacggctggtgttccgcgttcacgtcccgcaacccagcggccgcacgctgtccctgcaggtggcctccaaccccatcgaatgctcccagcgctcagctcaggagctgcctctggtggagaagcagagcacggacagctatccggtcgtgggcgggaagaagatggtcctgtctggccacaacttcctgcaggactccaaggtcattttcgtggagaaagccccagatggccaccatgtctgggagatggaagcgaaaactgaccgggacctgtgcaagccgaattctctggtggttgagatcccgccatttcggaatcagaggataaccagccccgttcacgtcagtttctacgtctgcaacgggaagagaaagcgaagccagtaccagcgtttcacctaccttcccgccaacggtaacgccatctttctaaccgtaagccgtgaacatgagcgcgtggggtgctttttctaaagacgcagaaacgacgtcgccgtaaagcagcgtggcgtgttgcacatttaactgtgtgatgtcccgttagtgagaccgagccatcgatgccctgaaaaggaaaggaaaagggaagcttcggatgcattttccttgatccctgttgggggtggggggcgggggttgcatactcagatagtcacggttattttgcttcttgcgaatgtataacagccaaggggaaaacatggctcttctgctccaaaaaactgagggggtcctggtgtgcatttgcaccctaaagctgcttacggtgaaaaggcaaataggtatagctattttgcaggcacctttaggaataaactttgcttttaagcctgta

SEQ ID NO: 249466 - DNA, 2151 bp, Artificial Sequence
  derived and/or modified sequence
atgccttctacatcctttccggtgccatctaagttcccccttgggcctgctgcagccgtcttcggccgaggcgaaactctgggccctgcgcctagagctgggggaaccatgaagtcagccgaggaggaacactatggttatgcctcgtcaaacgtcagcccagccctgcctttaccaacagctcactcaacgttgccagccccttgccataatctccagacttctacacctggtataatccctcccgcagaccacccatcaggttacggagccgctctcgacggcggaccagcagggtactttctgtcctctggccatacccgacctgacggcgctcctgctcttgaatctccgagaattgagattacatcatgtctgggactctaccacaacaacaaccaattcttccatgacgtggaggttgaagacgtgcttccctctagcaaacgtagtccctccacagccacacttagcctaccatccctcgaggcctaccgcgacccgtcctgtctgtcccccgcaagctcactctccagccgaagctgcaactcagaggcctctagctacgagtctaattattcttacccctacgcgtcccctcagactagcccctggcaatctccttgcgtatctccaaaaaccaccgatcctgaggagggtttcccaagaggactgggtgcttgtacactcctgggttccccccgtcatagcccctctaccagccctcgcgcttcagtgacggaagagtcctggctcggggcacggtccagcagacctgccagcccctgtaacaagcggaaatacagcctcaacgggagacaacctccatactcgccacaccactcaccaactccttctccacatggcagcccccgtgtgtcagtgactgacgatagttggttaggcaatacaactcagtatacgagctccgctattgtcgccgcaatcaacgcattaactaccgattccagcctcgaccttggagacggtgtgcccgtgaaatctaggaaaaccacactggaacagccccctagcgtagctttgaaggttgaaccagtgggtgaagacctaggttcgcccccaccacctgccgactttgctcctgaggactactctagtttccaacacatccggaaggggggattctgtgatcaatacctagctgtgcctcaacatccctaccaatgggccaagcccaaaccactcagcccaacaagttacatgagccccactcttcctgcactggactggcagctgccctcgcactccggcccatacgagctccgcatcgaagtccagcccaaaagtcaccatcgagctcactatgagacagagggttctagaggcgctgtgaaggcaagtgcaggtggtcatccgattgtacagttgcacggttatctcgagaacgaaccgcttatgctgcagctgttcatcggcactgcagatgacagactgctaagaccacacgcattttaccaggtgcatcggataacggggaagaccgtctccactacatcccatgaagcgatcctgtctaacaccaaggtgctcgagatccctttactccccgaaaatagtatgcgggctgtaatcgattgcgctggaatactgaagctccgcaatagtgatattgaactacgtaaaggggagaccgacatcgggagaaagaacacccgtgtgcgcctggtgttccgggtgcatgtgcctcagcccagtggccgtacattatctctccaggttgcttccaaccctattgaatgctctcagagaagtgcccaggagctccctctcgttgagaagcagtcaaccgactcttaccctgttgtgggaggcaaaaagatggtgctttccgggcataacttcctacaggactccaaagtgattttcgtggaaaaagctcctgacgggcaccacgtgtgggaaatggaagccaaaaccgatcgagacctgtgcaaaccaaacagtttggtcgttgagatcccccctttccgcaaccagcgcattacatctcccgtccacgtgagcttttatgtgtgtaatggcaaaagaaaaagatcccagtatcagcggtttacttacctcccagccaatggtaacgccatttttctcaccgtgtcgagggagcacgaacgtgtcggatgctttttctag

SEQ ID NO: 249467 - protein, 988 aa, Artificial Sequence
  derived and/or modified sequence
MGAAAVRWHLCVLLALGTRGRLAGGSGLPGSVDVDECSEGTDDCHIDAICQNTPKSYKCLCKPGYKGEGKQCEDIDECENDYYNGGCVHECINIPGNYRCTCFDGFMLAHDGHNCLDVDECQDNNGGCQQICVNAMGSYECQCHSGFFLSDNQHTCIHRSNEGMNCMNKDHGCAHICRETPKGGVACDCRPGFDLAQNQKDCTLTCNYGNGGCQHSCEDTDTGPTCGCHQKYALHSDGRTCIETCAVNNGGCDRTCKDTATGVRCSCPVGFTLQPDGKTCKDINECLVNNGGCDHFCRNTVGSFECGCRKGYKLLTDERTCQDIDECSFERTCDHICINSPGSFQCLCHRGYILYGTTHCGDVDECSMSNGSCDQGCVNTKGSYECVCPPGRRLHWNGKDCVETGKCLSRAKTSPRAQLSCSKAGGVESCFLSCPAHTLFVPDSENSYVLSCGVPGPQGKALQKRNGTSSGLGPSCSDAPTTPIKQKARFKIRDAKCHLRPHSQARAKETARQPLLDHCHVTFVTLKCDSSKKRRRGRKSPSKEVSHITAEFEIETKMEEASDTCEADCLRKRAEQSLQAAIKTLRKSIGRQQFYVQVSGTEYEVAQRPAKALEGQGACGAGQVLQDSKCVACGPGTHFGGELGQCVSCMPGTYQDMEGQLSCTPCPSSDGLGLPGARNVSECGGQCSPGFFSADGFKPCQACPVGTYQPEPGRTGCFPCGGGLLTKHEGTTSFQDCEAKVHCSPGHHYNTTTHRCIRCPVGTYQPEFGQNHCITCPGNTSTDFDGSTNVTHCKNQHCGGELGDYTGYIESPNYPGDYPANAECVWHIAPPPKRRILIVVPEIFLPIEDECGDVLVMRKSASPTSITTYETCQTYERPIAFTSRSRKLWIQFKSNEGNSGKGFQVPYVTYDEDYQQLIEDIVRDGRLYASENHQEILKDKKLIKALFDVLAHPQNYFKYTAQESKEMFPRSFIKLLRSKVSRFLRPYK

SEQ ID NO: 249468 - protein, 363 aa, Artificial Sequence [sequence omitted]

SEQ ID NO: 249469 - DNA, 2967 bp, Artificial Sequence
  derived and/or modified sequence
atgggtgccgcagccgtgcgctggcatctgtgcgtacttttggccctgggcacacggggcagactagctggcggtagtgggctgcccggctctgtggacgttgatgaatgctccgagggaacagatgactgtcatattgacgcaatttgtcagaacaccccaaaatcctataaatgcctgtgtaaacccggttacaaaggagaagggaagcagtgcgaggacatagatgaatgcgaaaatgattattataacggtgggtgcgtgcatgagtgtattaacatccccgggaactatcgctgcacgtgcttcgatgggtttatgttggcgcacgatggccacaactgtttggacgttgacgagtgccaggacaacaatggcggctgccagcaaatctgtgtcaatgctatggggagctacgaatgccagtgccatagcggcttctttctcagcgacaaccagcatacttgtattcacaggagcaatgagggtatgaactgcatgaacaaagaccatggctgcgctcatatttgtcgcgagactcctaaggggggcgtggcctgtgattgtcggccaggattcgacctggcacagaatcagaaagactgcacccttacctgtaactacggaaacggtggttgccagcacagttgtgaggatactgatactggccctacatgtggatgccaccagaagtacgcattacactccgacggccgcacctgcatcgaaacctgcgccgtcaataacggaggttgcgaccggacctgcaaagatactgctaccggtgtgcgctgctcgtgtcctgttgggttcaccctgcagcccgacggtaaaacctgcaaagacatcaatgagtgtctagtgaacaacggcggctgcgatcacttttgcagaaacacggtcggttcgttcgaatgtgggtgtagaaaaggctataagttgctcactgatgaacggacctgccaggatattgatgagtgctctttcgagcggacctgtgatcacatttgcatcaacagccccgggtcttttcaatgcctgtgtcaccgcggttatatcctgtatggcacaacacactgtggagatgtggacgagtgctccatgtcgaatggttcctgtgaccagggatgcgtcaacaccaagggctcgtacgaatgtgtatgcccccctggccgccggctgcattggaatggcaaagactgcgtcgaaacaggaaaatgcctgagtagagctaaaactagtccccgggcccagctcagctgttccaaggcaggcggcgtggaaagttgctttctgagctgtcccgcccacacattgttcgtgcccgatagcgagaactcatacgtactttcatgtggagttcccggaccccaggggaaggctcttcagaagcggaacgggacctcgagcgggctgggaccatcgtgctccgatgctccaactacccccatcaaacaaaaagcgaggtttaagatacgggatgctaaatgccatctgaggccacacagtcaggcccgtgctaaagagacagctaggcaacctctcttggatcactgccacgttacctttgtcaccctgaaatgtgactcatccaagaaaagaaggaggggacgtaaatcaccctcaaaagaggtgtcacacataacggccgaatttgagatcgaaaccaagatggaagaggcatccgacacctgcgaagccgattgtctccgcaagcgcgccgagcagtccctccaggcggctattaagacactaagaaaatccattggaagacaacagttctatgtgcaagtatccgggacagagtacgaagtcgcccagcgccccgcaaaagctctggagggacagggggcatgcggagcaggccaggtccttcaagatagcaaatgcgttgcctgtggacctggcactcactttggcggagagctcggccagtgcgtatcttgtatgcccggcacctatcaggacatggagggccagttgagctgtactccttgcccctccagcgacggcctgggactgcccggtgccagaaatgtgagtgaatgtggcggtcagtgctcacctggctttttttcagccgatggatttaagccctgccaggcttgccctgtgggcacctatcagcccgaacccggccggaccggctgctttccttgcggcggcggactgttaacaaaacacgagggcaccacctcttttcaggactgtgaagccaaggtacactgttcgccgggacatcactacaatacgaccactcacagatgtatccggtgcccagtgggcacataccagccggaatttggtcagaatcactgcataacctgtcctgggaacactagcacggatttcgatgggtccactaacgtgactcactgcaagaaccagcactgcgggggcgaactcggggattatacgggctatattgaaagtccaaattaccccggtgactatcccgctaacgccgagtgcgtttggcatatagcgccaccgcctaagcgccgcattcttatcgtggtgccagagatattcctgcccatcgaggacgagtgtggcgatgttctggttatgaggaagagcgcctcacctactagcataacaacttacgagacgtgccagacgtatgagcgccccattgcctttacgtctcgctcacgtaagctgtggattcagttcaaatcaaatgaaggaaattcgggtaaggggttccaggtcccgtacgtcacctacgatgaggattatcagcagctgatcgaggacatagttagagatggacgcctctacgcgagtgaaaaccaccaggagattctgaaggataaaaaactcatcaaggctctgtttgatgttctcgcccacccacaaaactactttaagtacaccgctcaggagagtaaagaaatgtttcccaggagttttatcaagctgctgagatccaaagtgagtcggtttctcagaccctataagtag

SEQ ID NO: 249470 - DNA, 1092 bp, Artificial Sequence
  derived and/or modified sequence
atgggcgccgcagccgtgaggtggcacttgtgtgtgctgttggcgttgggcactcggggcaggctcgccgggggaagcggcttgcccggttcagtcgatgtcgacgagtgcagcgagggcaccgatgactgccacattgatgctatttgccagaatacccctaagagctataagtgcttgtgtaagccaggctacaagggagagggaaaacaatgtgaggatatcgacgaatgcgagaacgattactacaacggcggttgcgtgcacgagtgtatcaacattccaggcaactatagatgtacttgtttcgacggattcatgctcgcccatgatggtcacaactgtttagatgttgacgagtgccaggacaacaatggaggatgccagcagatctgcgtgaatgcaatgggatcttatgaatgccagtgtcactccggtttctttctctcagacaatcagcacacctgcatacacaggtccaatgaggggatgaattgtatgaataaggatcacgggtgtgcacatatctgccgggagacgccaaaaggcggagtggcttgcgactgtcggcccggatttgatctcgcccaaaaccagaaggattgtacactgacatgtaattacggtaatggtgggtgccagcactcttgcgaagatacagatactgggcctacctgcggctgccaccagaagtacgccctacactccgatggacgtacatgcatcgaaacctgtgccgtgaataatgggggatgcgaccggacgtgtaaagacactgccactggggtccggtgtagctgtcctgtgggatttaccctgcagcccgacggcaaaacgtgtaaagatatcaatgaatgtctcgttaacaatggagggtgtgatcatttctgccgcaataccgtggggagcttcgagtgcggctgtcgcaaggggtataagctgcttaccgacgaacgcacctgccaagatattgatgaatgctcgttcgagcgcacctgcgaccatatttgcataaattcccccggatcatttcagtgtctgatcaaactattgagatccaaggtatcaaggttcctgagaccttacaaatag

SEQ ID NO: 249471 - DNA, 2967 bp, Artificial Sequence
  derived and/or modified sequence
atgggcgctgctgctgtgcgctggcacctgtgtgtgctgctggccctgggcacccggggccgcctggccggcggcagcggcctgcccggctctgtggatgtggatgagtgcagcgagggcacagatgactgccacattgatgccatctgccagaacacccccaagagctacaagtgcctgtgcaagccaggctacaagggggagggcaagcagtgtgaagatattgatgaatgtgaaaatgactactacaacggcggctgtgtgcatgagtgcatcaacatccctggcaactaccgctgcacctgctttgatggcttcatgctggcccatgatggccacaactgcctggatgtggatgagtgccaggacaacaatggaggctgccagcagatctgtgtgaatgccatgggcagctatgagtgccagtgccacagcggcttcttcctgagtgacaaccagcacacctgcatccacaggagcaatgaaggcatgaactgcatgaacaaggaccacggctgtgcccacatctgccgggagacccccaagggcggcgtggcctgtgactgcaggcctggctttgacctggcccagaaccagaaggactgcaccctgacctgcaactatggaaatggaggctgccagcacagctgtgaggacacagacaccggccccacctgtggctgccaccagaagtatgccctgcacagtgatggccgcacctgcatcgagacctgtgctgtgaacaatggaggctgtgacaggacctgcaaggacacagccactggagtgcgctgcagctgccctgtgggcttcaccctgcagccagatggcaagacctgcaaggacatcaatgaatgtctggtgaacaacggcggctgtgaccacttctgcaggaacacagtgggcagctttgaatgtggctgcaggaagggctacaagctgctgacagatgagaggacctgccaggacattgatgagtgcagctttgagaggacctgtgaccacatctgcatcaacagccctggcagcttccagtgcctgtgccaccggggctacatcctgtatggcaccacccactgtggagatgtggatgaatgttccatgagcaatggcagctgtgaccagggctgtgtgaacaccaagggcagctatgaatgtgtgtgccccccaggccggcggctgcactggaatggcaaggactgtgtggagaccgggaagtgcctgagccgggccaagaccagcccccgggcccagctgagctgcagcaaggccggcggcgtggagagctgcttcctgagctgcccagcccacaccctgtttgtgcctgacagtgaaaattcctatgtgctgagctgtggggtgcccggcccccagggcaaggccctgcagaagagaaatggcaccagcagcggcctgggccccagctgcagtgatgcccccaccacccccatcaagcagaaggcccgcttcaagatcagagatgccaagtgccacctgcggccccacagccaggcccgggccaaggagacagcccggcagcccctgctggaccactgccacgtgacctttgtgaccctgaagtgtgacagcagcaagaagagaagaagaggaaggaagagccccagcaaggaggtgagccacatcacagctgagtttgaaattgagaccaagatggaggaggccagtgacacctgtgaggccgactgcctgaggaagagagctgagcagagcctgcaggccgccatcaagaccctgaggaagagcatcggccggcagcagttctacgtgcaggtgtctggaacagaatatgaggtggcccagaggcctgccaaggccctggagggccagggcgcctgtggggccggccaggtgctgcaggacagcaaatgtgtggcctgtggccctggcacccactttggaggagagctgggccagtgtgtgtcctgcatgcctggcacctaccaggacatggagggccagctgagctgcaccccctgccccagcagtgatggcctgggcctgcccggggccagaaatgtgtctgaatgtggcggccagtgcagccctggcttcttcagcgcagatggcttcaagccctgccaggcctgccctgtgggcacctaccagcctgagcccggccgcacaggctgcttcccctgtggcggcggcctgctgaccaagcatgagggcaccaccagcttccaggactgtgaggccaaggtgcactgcagccctggccaccactacaacaccaccacccaccgctgcatccgctgccctgtgggcacctaccagcctgagtttggccagaaccactgcatcacctgccccggcaacaccagcacagactttgatggcagcaccaacgtgacccactgcaagaaccagcactgcggcggggagctgggggactacacaggctacatcgagagccccaactacccaggggactacccagccaatgcagaatgtgtgtggcacatcgcccccccacccaagaggcgcatcctgattgtggtgcctgagatcttcctgcccattgaagatgaatgtggagatgtgctggtgatgaggaagagcgccagccccaccagcatcaccacctatgagacctgccagacctatgagcggcccatcgccttcaccagccgcagcaggaagctgtggatccagttcaagagcaatgaaggcaacagcggcaagggcttccaggtgccctacgtgacctatgatgaggactaccagcagctgattgaagatattgtgagagatggccgcctgtatgccagcgagaaccaccaggagatcctgaaggacaagaagctgatcaaggccctgtttgatgtgctggcccacccccagaactacttcaagtacacagcccaggagagcaaggagatgttccccaggagcttcatcaagctgctgcggagcaaggtgagccgcttcctgcggccctacaagtag

SEQ ID NO: 249472 - DNA, 1092 bp, Artificial Sequence
  derived and/or modified sequence
atgggcgctgctgctgtgcgctggcacctgtgtgtgctgctggccctgggcacccggggccgcctggccggcggcagcggcctgcccggctctgtggatgtggatgagtgcagcgagggcacagatgactgccacattgatgccatctgccagaacacccccaagagctacaagtgcctgtgcaagccaggctacaagggggagggcaagcagtgtgaagatattgatgaatgtgaaaatgactactacaacggcggctgtgtgcatgagtgcatcaacatccctggcaactaccgctgcacctgctttgatggcttcatgctggcccatgatggccacaactgcctggatgtggatgagtgccaggacaacaatggaggctgccagcagatctgtgtgaatgccatgggcagctatgagtgccagtgccacagcggcttcttcctgagtgacaaccagcacacctgcatccacaggagcaatgaaggcatgaactgcatgaacaaggaccacggctgtgcccacatctgccgggagacccccaagggcggcgtggcctgtgactgcaggcctggctttgacctggcccagaaccagaaggactgcaccctgacctgcaactatggaaatggaggctgccagcacagctgtgaggacacagacaccggccccacctgtggctgccaccagaagtatgccctgcacagtgatggccgcacctgcatcgagacctgtgctgtgaacaatggaggctgtgacaggacctgcaaggacacagccactggagtgcgctgcagctgccctgtgggcttcaccctgcagccagatggcaagacctgcaaggacatcaatgaatgtctggtgaacaacggcggctgtgaccacttctgcaggaacacagtgggcagctttgaatgtggctgcaggaagggctacaagctgctgacagatgagaggacctgccaggacattgatgagtgcagctttgagaggacctgtgaccacatctgcatcaacagccctggcagcttccagtgcctgatcaagctgctgcggagcaaggtgagccgcttcctgcggccctacaagtag

SEQ ID NO: 249473 - DNA, 2967 bp, Artificial Sequence
  derived and/or modified sequence
atgggcgccgccgccgtgcggtggcacctgtgcgtgctgctggccctgggcacacgtggacgcctagctggtgggagtgggttgcctggctcggtggatgtcgacgagtgtagcgaagggaccgatgactgccatatcgacgcaatatgccagaacactcctaaatcatacaaatgcctgtgcaaacctgggtacaaaggtgaaggaaaacagtgcgaagatatcgatgaatgcgagaatgattactacaacggcggctgtgtgcatgaatgtataaacatccccgggaattatagatgcacttgcttcgatggctttatgctcgctcatgacggacataactgccttgatgtggatgagtgtcaggacaacaacggtggatgccagcaaatctgcgtgaacgcaatgggcagttatgaatgccagtgtcatagtggatttttcctaagtgataaccagcatacctgcatccatcgaagtaacgagggtatgaactgcatgaacaaagatcatggctgcgctcacatctgccgcgagactcctaaaggtggggtggcctgcgattgccggcccgggttcgatctggctcaaaatcaaaaagactgcacactcacctgtaattatggcaatggcggttgtcagcactcttgcgaagacaccgataccggtccaacttgcggatgccatcagaagtatgcactccattcagacggcaggacctgcatcgaaacctgcgccgtgaataacggcggctgtgatcgcacatgcaaggataccgccaccggtgttagatgttcctgcccagtgggcttcacactgcagccagatgggaagacctgtaaagatattaacgaatgtctcgtgaacaatggagggtgcgaccacttctgtcgcaatacagtgggtagttttgagtgtggctgtaggaagggctacaaacttctgacagatgaacgaacttgccaggacattgatgagtgctccttcgagcgcacatgcgaccatatctgtatcaacagccctggctcatttcaatgcctgtgtcaccgcggctacatcttgtatggtactacccactgtggcgacgtagatgaatgtagcatgtcaaacgggtcttgcgatcaaggctgtgtgaatacgaaagggagctacgaatgcgtctgtccaccgggtaggcgcttgcattggaacggtaaagattgtgtggagactgggaagtgcctgtcgagagccaagacaagccctcgcgcgcagttgtcctgcagcaaggccggtggcgtagaatcatgttttctgtcctgcccagcgcacaccctgtttgtacctgactcagagaattcctacgtgctgtcctgtggagtgcccggaccgcagggtaaagctctgcagaagagaaacggcacatcttccggcttgggaccctcttgttcagatgctccgaccaccccgattaaacaaaaagcaaggtttaagatcagggacgccaaatgccatttgcgccctcactctcaagcacgggccaaagagacagcaagacagcccttgttagaccactgccatgtcacatttgtgactctgaagtgtgacagctcaaagaaaagacgccgggggcgaaaatctcctagcaaagaggtctctcacattacagcggaattcgagattgagacaaaaatggaagaagcttcagatacctgcgaggccgactgccttcgaaagcgagctgaacagtccctccaagctgcaattaaaacactgaggaaatccatcggaaggcagcagttttatgtgcaggtttccggcacagaatacgaagtcgcccagcgtcctgctaaggccttggagggtcagggagcttgcggggccggccaggtgttacaggattcaaagtgcgttgcatgcgggcccggcactcatttcgggggcgagctggggcaatgcgtgtcttgcatgcctggtacttaccaggacatggaggggcagctgtcttgcactccttgtccttccagcgatggactgggactcccaggagcccggaacgtgtcagaatgcggaggacaatgttctccagggttcttttcggcggacggttttaagccgtgccaggcctgtcctgtgggcacctatcaacccgagcctggtagaacagggtgcttcccgtgtgggggcggtctgctaaccaaacacgagggaaccacctctttccaggattgtgaggctaaggtccattgcagccctggccatcactacaataccactactcatcgttgtattaggtgccctgtgggtacctatcagccagagtttggacagaatcactgtattacctgccccggaaacacatctacagacttcgacggctctaccaatgtcacacactgtaaaaaccagcattgcgggggcgagttaggggactataccggctacattgagtcccccaattaccccggagactatccagcaaatgctgaatgcgtctggcatatcgccccacccccaaagaggcggatcttgattgtcgtccccgaaatcttccttccaatcgaggatgagtgcggcgacgttctagtgatgcgcaagtccgccagccctactagcatcacgacctacgaaacctgtcaaacctacgagaggccaattgcctttacctctcggagcaggaaactgtggatccagtttaagagcaacgaaggcaattctggaaaaggatttcaagttccctatgtcacctatgatgaggactatcagcagttgatcgaagacatcgtgagggacggccgattgtatgccagcgaaaaccaccaagaaattttgaaggacaaaaaattgatcaaagccctctttgacgtgctggcgcatccccagaactactttaagtatacggcgcaagaaagtaaggaaatgttcccgagatcttttatcaagctcttgcggtctaaggtgtcgcggttcctgaggccctataaatag

SEQ ID NO: 249474 - DNA, 1092 bp, Artificial Sequence
  derived and/or modified sequence
atgggcgccgccgccgtgcggtggcacctgtgcgtgctgctggccctcgggaccaggggccgcctggccgggggtagcggactgcctggctcagttgacgtggacgagtgcagcgaaggtactgatgactgtcatatcgatgcgatctgtcaaaacacccctaaatcctataagtgtctctgcaagccgggatacaagggagagggaaagcaatgcgaagacatcgatgaatgcgagaatgattactataacggcgggtgcgtccatgagtgtatcaatatcccaggcaactaccgctgtacttgctttgacggttttatgctggcacacgatggccataattgtctcgatgtagatgagtgtcaggacaacaacggcggttgccagcagatatgtgtgaacgccatgggctcctatgaatgccagtgtcacagtgggtttttcttatcggacaaccagcacacctgtatacatcggagcaacgaagggatgaactgcatgaacaaggaccacggatgcgcacacatctgcagagaaaccccgaagggtggagtggcttgcgattgtaggcccggctttgacttggctcagaaccaaaaagactgcactcttacctgcaactatggtaatggcgggtgccagcattcttgcgaggataccgatactggccctacgtgcggatgccatcagaagtatgctctccactccgacgggcgcacctgcatcgagacctgcgccgtcaacaacggtggctgcgatcgtacctgcaaggataccgcaaccggcgtgagatgcagttgccccgttggttttacactgcagccagatggtaagacgtgtaaagatattaacgaatgtttggttaataatggaggttgcgatcacttctgtcggaatacagtcggcagcttcgagtgcggttgcagaaaaggctataaacttctgaccgacgagcggacctgccaggatatagacgagtgctcctttgaacgcacctgcgatcatatctgtatcaattcgcccgggtctttccagtgtctgataaagttgctcaggagtaaagtgagtcggtttctgcgcccttacaagtag

SEQ ID NO: 249475 - DNA, 2967 bp, Artificial Sequence
  derived and/or modified sequence
atgggggctgctgccgtgcgatggcatctgtgcgtgctgcttgcgttaggcacgcgagggagactcgctggtggttctggcctcccaggtagcgtagacgtcgacgaatgttcggaggggaccgacgattgccacattgacgcaatctgtcagaacacacccaaaagctataaatgcctgtgcaagccaggatacaaaggtgaaggcaaacaatgcgaggacatcgatgagtgcgaaaatgattattataatggtggctgcgttcacgagtgtattaatatccccggaaattatagatgcacgtgttttgacggcttcatgctcgcacacgacggccacaattgtcttgacgtcgatgagtgtcaagacaataacggtgggtgccagcagatctgcgttaatgcaatgggtagctacgagtgccaatgccactccggctttttcctgtccgacaatcaacatacatgtattcataggagtaacgaagggatgaattgcatgaataaggatcatgggtgcgcacatatctgccgggagacccccaagggaggcgtagcctgtgactgtcgacccggattcgatctggcgcagaaccagaaagattgcacactcacgtgcaattacggcaatggcggatgccagcacagctgtgaggatactgatacagggccaacctgtgggtgccaccaaaagtatgctctgcacagcgacggtcgcacctgcatcgaaacatgcgctgtgaacaatggaggctgcgaccggacttgcaaagacactgctacgggagtaaggtgttcctgcccggtaggctttactcttcaaccggacggcaagacctgtaaagacataaatgagtgtctcgtgaataatggaggatgcgatcatttttgtagaaacacagtgggcagttttgagtgcggctgccgcaaaggatacaaattgcttaccgacgagaggacctgccaagacatcgatgagtgcagcttcgaacgcacttgcgaccacatctgcatcaacagccctggctccttccagtgcttgtgccatcgtggttacatcttgtatgggacaactcattgtggtgacgtggatgagtgctcaatgagtaacggaagttgtgatcaggggtgtgtcaatacgaagggaagctacgagtgtgtgtgcccacccggaagacgactgcattggaacgggaaggattgcgtcgaaacagggaaatgtctgtccagagccaaaacctctcccagagcacagctctcctgttccaaggcagggggagtggagagctgctttctctcatgccctgcccacacattatttgttcccgattctgagaactcgtatgtgctttcctgtggcgtccccggaccacaaggaaaagctctacagaaaaggaacgggacctcaagtgggctcggtccctcctgctctgatgcacccactacgccgatcaagcagaaggcccgttttaaaattcgggatgctaagtgccacctcagacctcattctcaggcaagggccaaagaaaccgccagacagcctctgcttgatcactgtcatgtgacattcgtgaccctgaagtgcgattctagcaagaagagacggaggggacggaagtccccgagcaaggaagtgagtcatattacagccgaattcgaaatcgagaccaaaatggaggaagcgtcggatacctgtgaggcagactgtctgcgcaaaagggctgaacagagtctgcaagccgctatcaagaccttgcgaaaatccataggcagacagcagttctatgtgcaggtgtccgggacggagtatgaggtggcacagcggcctgctaaggctctcgagggccagggcgcatgtggcgctggtcaagtgttgcaagactctaaatgcgtagcttgcgggccaggcacgcacttcgggggtgagctcggtcagtgcgtctcctgcatgcctggcacctaccaggacatggaaggacagctgtcatgcacgccatgtccaagctcagacggcctgggacttccgggtgccaggaatgtgtcggagtgcggcggacagtgtagccctggcttcttctctgcagatgggttcaagccctgtcaagcatgccctgtggggacttaccagcccgaacccggaaggaccgggtgctttccctgcggaggcggactgctcactaagcatgaggggaccacctcttttcaggattgcgaggccaaagtgcattgtagtccaggccatcattataataccactacccatagatgcattagatgccccgtcggaacctaccagcctgagttcgggcagaaccactgcatcacctgtcctggcaatacttccacggactttgatggttccacaaatgtcacccactgcaagaatcagcactgtgggggtgaacttggagattacacaggatatatcgaaagccctaactacccaggagattatccagctaacgccgaatgtgtgtggcatattgcccctcccccaaagcgcagaatactcatagtggtgccagagatttttctgccgatcgaggacgagtgcggcgacgtactggtcatgagaaagtctgcctctcccacatctatcaccacctatgaaacttgccagacatacgagcggccaattgcatttaccagccgctctagaaagttgtggatccagttcaaatcaaacgagggaaactcgggtaagggttttcaggtaccctatgtcacctatgatgaagactatcagcagttaattgaagatattgtccgagacggtcgactatatgcttcagaaaatcaccaggagatcctcaaggacaagaagctcatcaaagccctattcgatgtgctggcgcacccccagaactatttcaaatataccgcccaagagtccaaagaaatgttcccgaggtcctttatcaaactgctgcggagtaaggtgtcccgtttcctccgtccttataaatag

SEQ ID NO: 249476 - DNA, 1092 bp, Artificial Sequence
  derived and/or modified sequence
atgggcgctgccgctgtgaggtggcatctgtgtgtacttttggccttaggcaccagaggacggctggctgggggtagcgggcttccgggatcagtagacgtagatgaatgtagtgaaggcacggacgattgccacatcgatgcaatttgccagaacaccccaaaatcttataaatgtctctgtaaacctggatacaaaggtgagggaaagcagtgcgaggatattgacgagtgtgaaaatgactactataacggaggatgcgtgcacgagtgtattaacatccctggaaactaccgttgtacctgtttcgacgggttcatgctggctcatgacggccacaattgccttgacgtggatgaatgccaggacaataatggaggctgccaacagatttgcgtgaacgcgatggggtcatacgaatgccagtgccattctggcttttttcttagtgataatcagcatacatgtatccaccggtccaatgaagggatgaattgtatgaataaggaccatggctgcgcacatatttgccgggagacccccaagggaggcgtcgcctgcgattgccgccctggattcgatctagctcagaaccagaaagattgtactcttacatgtaactacggaaatggcggatgtcagcattcttgcgaggacacggacacaggaccaacttgtgggtgtcatcagaagtacgcactgcatagtgatggcaggacctgcatcgagacctgcgcagtgaataacggcggatgtgatcgaacctgcaaggatactgcaaccggtgtgcgctgctcttgcccagttggcttcacgctgcagcctgacggcaagacatgtaaagacataaatgaatgtctggtgaataacgggggatgcgaccacttctgtaggaatacggttggtagctttgagtgcggatgccggaaagggtataagttgctgaccgatgaacgaacatgtcaggacattgacgagtgtagcttcgaacgcacttgcgaccacatttgcattaattctcctggaagctttcaatgcctgattaaacttctcagatcaaaggttagccgatttctccgaccttacaagtag

SEQ ID NO: 249477 - DNA, 3868 bp, Artificial Sequence
  derived and/or modified sequence
ggctgggcggctcgggagcccgagcggtggcggagcggcgagcagcgagcagcgcctgcgggagcggccggtcggtcgggtccccgcgccccgcacgcccgcacgcccagcggggcccgcattgagcatgggcgcggcggccgtgcgctggcacttgtgcgtgctgctggccctgggcacacgcgggcggctggccgggggcagcgggctcccagggtcagtcgacgtggatgagtgctcagagggcacagatgactgccacatcgatgccatctgtcagaacacgcccaagtcctacaaatgcctctgcaagccaggctacaagggggaaggcaagcagtgtgaagacattgacgagtgtgagaatgactactacaatgggggctgtgtccacgagtgcatcaacatcccggggaactacaggtgtacctgctttgatggcttcatgctggcacacgatggacacaactgcctggatgtggacgagtgtcaggacaataatggtggctgccagcagatctgcgtcaatgccatgggcagctacgagtgtcagtgccacagtggcttcttccttagtgacaaccagcatacctgcatccaccgctccaatgagggtatgaactgcatgaacaaagaccatggctgtgcccacatctgccgggagacgcccaaaggtggggtggcctgcgactgcaggcccggctttgaccttgcccaaaaccagaaggactgcacactaacctgtaattatggaaacggaggctgccagcacagctgtgaggacacagacacaggccccacgtgtggttgccaccagaagtacgccctccactcagacggtcgcacgtgcatcgagacgtgcgcagtcaataacggaggctgcgaccggacatgcaaggacacagccactggcgtgcgatgcagctgccccgttggattcacactgcagccggacgggaagacatgcaaagacatcaacgagtgcctggtcaacaacggaggctgcgaccacttctgccgcaacaccgtgggcagcttcgagtgcggctgccggaagggctacaagctgctcaccgacgagcgcacctgccaggacatcgacgagtgctccttcgagcggacctgtgaccacatctgcatcaactccccgggcagcttccagtgcctgtgtcaccgcggctacatcctctacgggacaacccactgcggagatgtggacgagtgcagcatgagcaacgggagctgtgaccagggctgcgtcaacaccaagggcagctacgagtgcgtctgtcccccggggaggcggctccactggaacgggaaggattgcgtggagacaggcaagtgtctttctcgcgccaagacctccccccgggcccagctgtcctgcagcaaggcaggcggtgtggagagctgcttcctttcctgcccggctcacacactcttcgtgccagactcggaaaatagctacgtcctgagctgcggagttccagggccgcagggcaaggcgctgcagaaacgcaacggcaccagctctggcctcgggcccagctgctcagatgcccccaccacccccatcaaacagaaggcccgcttcaagatccgagatgccaagtgccacctccggccccacagccaggcacgagcaaaggagaccgccaggcagccgctgctggaccactgccatgtgactttcgtgaccctcaagtgtgactcctccaagaagaggcgccgtggccgcaagtccccatccaaggaggtgtcccacatcacagcagagtttgagatcgagacaaagatggaagaggcctcagacacatgcgaagcggactgcttgcggaagcgagcagaacagagcctgcaggccgccatcaagaccctgcgcaagtccatcggccggcagcagttctatgtccaggtctcaggcactgagtacgaggtagcccagaggccagccaaggcgctggaggggcagggggcatgtggcgcaggccaggtgctacaggacagcaaatgcgttgcctgtgggcctggcacccacttcggtggtgagctcggccagtgtgtgtcatgtatgccaggaacataccaggacatggaaggccagctcagttgcacaccgtgccccagcagcgacgggcttggtctgcctggtgcccgcaacgtgtcggaatgtggaggccagtgttctccaggcttcttctcggccgatggcttcaagccctgccaggcctgccccgtgggcacgtaccagcctgagcccgggcgcaccggctgcttcccctgtggagggggtttgctcaccaaacacgaaggcaccacctccttccaggactgcgaggctaaagtgcactgctcccccggccaccactacaacaccaccacccaccgctgcatccgctgccccgtcggcacctaccagcccgagtttggccagaaccactgcatcacctgtccgggcaacaccagcacagacttcgatggctccaccaacgtcacacactgcaaaaaccagcactgcggcggcgagcttggtgactacaccggctacatcgagtcccccaactaccctggcgactacccagccaacgctgaatgcgtctggcacatcgcgcctcccccaaagcgcaggatcctcatcgtggtccctgagatcttcctgcccatcgaggatgagtgcggcgatgttctggtcatgaggaagagtgcctctcccacgtccatcaccacctatgagacctgccagacctacgagaggcccatcgccttcacctcccgctcccgcaagctctggatccagttcaaatccaatgaaggcaacagcggcaaaggcttccaagtgccctatgtcacctacgatgaggactaccagcaactcatagaggacatcgtgcgcgatgggcgcctgtacgcctcggagaaccaccaggaaattttgaaagacaagaagctgatcaaggccctcttcgacgtgctggcgcatccccagaactacttcaagtacacagcccaggaatccaaggagatgttcccacggtccttcatcaaactgctgcgctccaaagtgtctcggttcctgcggccctacaaataaccggggggagcggccctgcctgggggtggcctggtccgcggagggtgcacctgccctccacagtgggagctgcatgggcctccacaccaccttgggaaccccatggcactgcccttcagggaagccgaccagcccatggagaccgagcccaggcacccttcggacccgctgcccctgtgggagcaccctgcttcaggaagcctccctccctccctctgcctcccttccccaggacaccaagagcgccctctcctgagccctggcagaccgactgcaggtagcaggattgcaggaccctctgcctggcctggcgtttcaggagagaggggaagtggggcctgtgctctgggaggcgtggtcatccgagacaggagtccaggggagagaggaggggacaaaggcgccgtctgggggaggtcgatgagcctgtgctggcatccgcgggccccacgctttgccaactcctccagccacaggcaaggccacggctccgggctgttgcgctctaagggttctgtgattggatggaacagagctgctggggaggagactggaagtttctgcattccttcaacagaacatttaatgaagtactctatatatatatataaatatatatataaatatatatatatacttctatttgtgggtactttaggaaaatgccctttggtcactgtaaatatgaattgtgaccccatcccttcccgcatgagcccagtgagtcccagcagctatcagcctccctgaacgattaaacagctcctcccagca

SEQ ID NO: 249478 - DNA, 1119 bp, Artificial Sequence
  derived and/or modified sequence
cccagcggggcccgcattgagcatgggcgcggcggccgtgcgctggcacttgtgcgtgctgctggccctgggcacacgcgggcggctggccgggggcagcgggctcccagggtcagtcgacgtggatgagtgctcagagggcacagatgactgccacatcgatgccatctgtcagaacacgcccaagtcctacaaatgcctctgcaagccaggctacaagggggaaggcaagcagtgtgaagacattgacgagtgtgagaatgactactacaatgggggctgtgtccacgagtgcatcaacatcccggggaactacaggtgtacctgctttgatggcttcatgctggcacacgatggacacaactgcctggatgtggacgagtgtcaggacaataatggtggctgccagcagatctgcgtcaatgccatgggcagctacgagtgtcagtgccacagtggcttcttccttagtgacaaccagcatacctgcatccaccgctccaatgagggtatgaactgcatgaacaaagaccatggctgtgcccacatctgccgggagacgcccaaaggtggggtggcctgcgactgcaggcccggctttgaccttgcccaaaaccagaaggactgcacactaacctgtaattatggaaacggaggctgccagcacagctgtgaggacacagacacaggccccacgtgtggttgccaccagaagtacgccctccactcagacggtcgcacgtgcatcgagacgtgcgcagtcaataacggaggctgcgaccggacatgcaaggacacagccactggcgtgcgatgcagctgccccgttggattcacactgcagccggacgggaagacatgcaaagacatcaacgagtgcctggtcaacaacggaggctgcgaccacttctgccgcaacaccgtgggcagcttcgagtgcggctgccggaagggctacaagctgctcaccgacgagcgcacctgccaggacatcgacgagtgctccttcgagcggacctgtgaccacatctgcatcaactccccgggcagcttccagtgcctcatcaaactgctgcgctccaaagtgtctcggttcctgcggccctacaaataaccggg

SEQ ID NO: 249479 - DNA, 2967 bp, Artificial Sequence
  derived and/or modified sequence
atgggcgccgccgccgtgagatggcacctgtgcgtgctgctggccctgggcaccagaggcagactggccggcggcagcggcctgcccggcagcgtggacgtggacgagtgcagcgagggcaccgacgactgccacatcgacgccatctgccagaacacccccaagagctacaagtgcctgtgcaagcccggctacaagggcgagggcaagcagtgcgaggacatcgacgagtgcgagaacgactactacaacggcggctgcgtgcacgagtgcatcaacatccccggcaactacagatgcacctgcttcgacggcttcatgctggcccacgacggccacaactgcctggacgtggacgagtgccaggacaacaacggcggctgccagcagatctgcgtgaacgccatgggcagctacgagtgccagtgccacagcggcttcttcctgagcgacaaccagcacacctgcatccacagaagcaacgagggcatgaactgcatgaacaaggaccacggctgcgcccacatctgcagagagacccccaagggcggcgtggcctgcgactgcagacccggcttcgacctggcccagaaccagaaggactgcaccctgacctgcaactacggcaacggcggctgccagcacagctgcgaggacaccgacaccggccccacctgcggctgccaccagaagtacgccctgcacagcgacggcagaacctgcatcgagacctgcgccgtgaacaacggcggctgcgacagaacctgcaaggacaccgccaccggcgtgagatgcagctgccccgtgggcttcaccctgcagcccgacggcaagacctgcaaggacatcaacgagtgcctggtgaacaacggcggctgcgaccacttctgcagaaacaccgtgggcagcttcgagtgcggctgcagaaagggctacaagctgctgaccgacgagagaacctgccaggacatcgacgagtgcagcttcgagagaacctgcgaccacatctgcatcaacagccccggcagcttccagtgcctgtgccacagaggctacatcctgtacggcaccacccactgcggcgacgtggacgagtgcagcatgagcaacggcagctgcgaccagggctgcgtgaacaccaagggcagctacgagtgcgtgtgcccccccggcagaagactgcactggaacggcaaggactgcgtggagaccggcaagtgcctgagcagagccaagaccagccccagagcccagctgagctgcagcaaggccggcggcgtggagagctgcttcctgagctgccccgcccacaccctgttcgtgcccgacagcgagaacagctacgtgctgagctgcggcgtgcccggcccccagggcaaggccctgcagaagagaaacggcaccagcagcggcctgggccccagctgcagcgacgcccccaccacccccatcaagcagaaggccagattcaagatcagagacgccaagtgccacctgagaccccacagccaggccagagccaaggagaccgccagacagcccctgctggaccactgccacgtgaccttcgtgaccctgaagtgcgacagcagcaagaagagaagaagaggcagaaagagccccagcaaggaggtgagccacatcaccgccgagttcgagatcgagaccaagatggaggaggccagcgacacctgcgaggccgactgcctgagaaagagagccgagcagagcctgcaggccgccatcaagaccctgagaaagagcatcggcagacagcagttctacgtgcaggtgagcggcaccgagtacgaggtggcccagagacccgccaaggccctggagggccagggcgcctgcggcgccggccaggtgctgcaggacagcaagtgcgtggcctgcggccccggcacccacttcggcggcgagctgggccagtgcgtgagctgcatgcccggcacctaccaggacatggagggccagctgagctgcaccccctgccccagcagcgacggcctgggcctgcccggcgccagaaacgtgagcgagtgcggcggccagtgcagccccggcttcttcagcgccgacggcttcaagccctgccaggcctgccccgtgggcacctaccagcccgagcccggcagaaccggctgcttcccctgcggcggcggcctgctgaccaagcacgagggcaccaccagcttccaggactgcgaggccaaggtgcactgcagccccggccaccactacaacaccaccacccacagatgcatcagatgccccgtgggcacctaccagcccgagttcggccagaaccactgcatcacctgccccggcaacaccagcaccgacttcgacggcagcaccaacgtgacccactgcaagaaccagcactgcggcggcgagctgggcgactacaccggctacatcgagagccccaactaccccggcgactaccccgccaacgccgagtgcgtgtggcacatcgcccccccccccaagagaagaatcctgatcgtggtgcccgagatcttcctgcccatcgaggacgagtgcggcgacgtgctggtgatgagaaagagcgccagccccaccagcatcaccacctacgagacctgccagacctacgagagacccatcgccttcaccagcagaagcagaaagctgtggatccagttcaagagcaacgagggcaacagcggcaagggcttccaggtgccctacgtgacctacgacgaggactaccagcagctgatcgaggacatcgtgagagacggcagactgtacgccagcgagaaccaccaggagatcctgaaggacaagaagctgatcaaggccctgttcgacgtgctggcccacccccagaactacttcaagtacaccgcccaggagagcaaggagatgttccccagaagcttcatcaagctgctgagaagcaaggtgagcagattcctgagaccctacaagtag

SEQ ID NO: 249480 - DNA, 1092 bp, Artificial Sequence
  derived and/or modified sequence
atgggcgccgccgccgtgagatggcacctgtgcgtgctgctggccctgggcaccagaggcagactggccggcggcagcggcctgcccggcagcgtggacgtggacgagtgcagcgagggcaccgacgactgccacatcgacgccatctgccagaacacccccaagagctacaagtgcctgtgcaagcccggctacaagggcgagggcaagcagtgcgaggacatcgacgagtgcgagaacgactactacaacggcggctgcgtgcacgagtgcatcaacatccccggcaactacagatgcacctgcttcgacggcttcatgctggcccacgacggccacaactgcctggacgtggacgagtgccaggacaacaacggcggctgccagcagatctgcgtgaacgccatgggcagctacgagtgccagtgccacagcggcttcttcctgagcgacaaccagcacacctgcatccacagaagcaacgagggcatgaactgcatgaacaaggaccacggctgcgcccacatctgcagagagacccccaagggcggcgtggcctgcgactgcagacccggcttcgacctggcccagaaccagaaggactgcaccctgacctgcaactacggcaacggcggctgccagcacagctgcgaggacaccgacaccggccccacctgcggctgccaccagaagtacgccctgcacagcgacggcagaacctgcatcgagacctgcgccgtgaacaacggcggctgcgacagaacctgcaaggacaccgccaccggcgtgagatgcagctgccccgtgggcttcaccctgcagcccgacggcaagacctgcaaggacatcaacgagtgcctggtgaacaacggcggctgcgaccacttctgcagaaacaccgtgggcagcttcgagtgcggctgcagaaagggctacaagctgctgaccgacgagagaacctgccaggacatcgacgagtgcagcttcgagagaacctgcgaccacatctgcatcaacagccccggcagcttccagtgcctgatcaagctgctgagaagcaaggtgagcagattcctgagaccctacaagtag

SEQ ID NO: 249481 - protein, 3458 aa, Artificial Sequence
  derived and/or modified sequence
MERSGWARQTFLLALLLGATLRARAAAGYYPRFSPFFFLCTHHGELEGDGEQGEVLISLHIAGNPTYYVPGQEYHVTISTSTFFDGLLVTGLYTSTSVQASQSIGGSSAFGFGIMSDHQFGNQFMCSVVASHVSHLPTTNLSFIWIAPPAGTGCVNFMATATHRGQVIFKDALAQQLCEQGAPTDVTVHPHLAEIHSDSIILRDDFDSYHQLQLNPNIWVECNNCETGEQCGAIMHGNAVTFCEPYGPRELITTGLNTTTASVLQFSIGSGSCRFSYSDPSIIVLYAKNNSADWIQLEKIRAPSNVSTIIHILYLPEDAKGENVQFQWKQENLRVGEVYEACWALDNILIINSAHRQVVLEDSLDPVDTGNWLFFPGATVKHSCQSDGNSIYFHGNEGSEFNFATTRDVDLSTEDIQEQWSEEFESQPTGWDVLGAVIGTECGTIESGLSMVFLKDGERKLCTPSMDTTGYGNLRFYFVMGGICDPGNSHENDIILYAKIEGRKEHITLDTLSYSSYKVPSLVSVVINPELQTPATKFCLRQKNHQGHNRNVWAVDFFHVLPVLPSTMSHMIQFSINLGCGTHQPGNSVSLEFSTNHGRSWSLLHTECLPEICAGPHLPHSTVYSSENYSGWNRITIPLPNAALTRNTRIRWRQTGPILGNMWAIDNVYIGPSCLKFCSGRGQCTRHGCKCDPGFSGPACEMASQTFPMFISESFGSSRLSSYHNFYSIRGAEVSFGCGVLASGKALVFNKDGRRQLITSFLDSSQSRFLQFTLRLGSKSVLSTCRAPDQPGEGVLLHYSYDNGITWKLLEHYSYLSYHEPRIISVELPGDAKQFGIQFRWWQPYHSSQREDVWAIDEIIMTSVLFNSISLDFTNLVEVTQSLGFYLGNVQPYCGHDWTLCFTGDSKLASSMRYVETQSMQIGASYMIQFSLVMGCGQKYTPHMDNQVKLEYSTNHGLTWHLVQEECLPSMPSCQEFTSASIYHASEFTQWRRVIVLLPQKTWSSATRFRWSQSYYTAQDEWALDSIYIGQQCPNMCSGHGSCDHGICRCDQGYQGTECHPEAALPSTIMSDFENQNGWESDWQEVIGGEIVKPEQGCGVISSGSSLYFSKAGKRQLVSWDLDTSWVDFVQFYIQIGGESASCNKPDSREEGVLLQYSNNGGIQWHLLAEMYFSDFSKPRFVYLELPAAAKTPCTRFRWWQPVFSGEDYDQWAVDDIIILSEKQKQIIPVINPTLPQNFYEKPAFDYPMNQMSVWLMLANEGMVKNETFCAATPSAMIFGKSDGDRFAVTRDLTLKPGYVLQFKLNIGCANQFSSTAPVLLQYSHDAGMSWFLVKEGCYPASAGKGCEGNSRELSEPTMYHTGDFEEWTRITIVIPRSLASSKTRFRWIQESSSQKNVPPFGLDGVYISEPCPSYCSGHGDCISGVCFCDLGYTAAQGTCVSNVPNHNEMFDRFEGKLSPLWYKITGAQVGTGCGTLNDGKSLYFNGPGKREARTVPLDTRNIRLVQFYIQIGSKTSGITCIKPRTRNEGLIVQYSNDNGILWHLLRELDFMSFLEPQIISIDLPQDAKTPATAFRWWQPQHGKHSAQWALDDVLIGMNDSSQTGFQDKFDGSIDLQANWYRIQGGQVDIDCLSMDTALIFTENIGKPRYAETWDFHVSASTFLQFEMSMGCSKPFSNSHSVQLQYSLNNGKDWHLVTEECVPPTIGCLHYTESSIYTSERFQNWKRITVYLPLSTISPRTRFRWIQANYTVGADSWAIDNVVLASGCPWMCSGRGICDAGRCVCDRGFGGPYCVPVVPLPSILKDDFNGNLHPDLWPEVYGAERGNLNGETIKSGTSLIFKGEGLRMLISRDLDCTNTMYVQFSLRFIAKSTPERSHSILLQFSISGGITWHLMDEFYFPQTTNILFINVPLPYTAQTNATRFRLWQPYNNGKKEEIWIVDDFIIDGNNVNNPVMLLDTFDFGPREDNWFFYPGGNIGLYCPYSSKGAPEEDSAMVFVSNEVGEHSITTRDLNVNENTIIQFEINVGCSTDSSSADPVRLEFSRDFGATWHLLLPLCYHSSSHVSSLCSTEHHPSSTYYAGTMQGWRREVVHFGKLHLCGSVRFRWYQGFYPAGSQPVTWAIDNVYIGPQCEEMCNGQGSCINGTKCICDPGYSGPTCKISTKNPDFLKDDFEGQLESDRFLLMSGGKPSRKCGILSSGNNLFFNEDGLRMLMTRDLDLSHARFVQFFMRLGCGKGVPDPRSQPVLLQYSLNGGLSWSLLQEFLFSNSSNVGRYIALEIPLKARSGSTRLRWWQPSENGHFYSPWVIDQILIGGNISGNTVLEDDFTTLDSRKWLLHPGGTKMPVCGSTGDALVFIEKASTRYVVSTDVAVNEDSFLQIDFAASCSVTDSCYAIELEYSVDLGLSWHPLVRDCLPTNVECSRYHLQRILVSDTFNKWTRITLPLPPYTRSQATRFRWHQPAPFDKQQTWAIDNVYIGDGCIDMCSGHGRCIQGNCVCDEQWGGLYCDDPETSLPTQLKDNFNRAPSSQNWLTVNGGKLSTVCGAVASGMALHFSGGCSRLLVTVDLNLTNAEFIQFYFMYGCLITPNNRNQGVLLEYSVNGGITWNLLMEIFYDQYSKPGFVNILLPPDAKEIATRFRWWQPRHDGLDQNDWAIDNVLISGSADQRTVMLDTFSSAPVPQHERSPADAGPVGRIAFDMFMEDKTSVNEHWLFHDDCTVERFCDSPDGVMLCGSHDGREVYAVTHDLTPTEGWIMQFKISVGCKVSEKIAQNQIHVQYSTDFGVSWNYLVPQCLPADPKCSGSVSQPSVFFPTKGWKRITYPLPESLVGNPVRFRFYQKYSDMQWAIDNFYLGPGCLDNCRGHGDCLREQCICDPGYSGPNCYLTHTLKTFLKERFDSEEIKPDLWMSLEGGSTCTECGILAEDTALYFGGSTVRQAVTQDLDLRGAKFLQYWGRIGSENNMTSCHRPICRKEGVLLDYSTDGGITWTLLHEMDYQKYISVRHDYILLPEDALTNTTRLRWWQPFVISNGIVVSGVERAQWALDNILIGGAEINPSQLVDTFDDEGTSHEENWSFYPNAVRTAGFCGNPSFHLYWPNKKKDKTHNALSSRELIIQPGYMMQFKIVVGCEATSCGDLHSVMLEYTKDARSDSWQLVQTQCLPSSSNSIGCSPFQFHEATIYNSVNSSSWKRITIQLPDHVSSSATQFRWIQKGEETEKQSWAIDHVYIGEACPKLCSGHGYCTTGAICICDESFQGDDCSVFSHDLPSYIKDNFESARVTEANWETIQGGVIGSGCGQLAPYAHGDSLYFNGCQIRQAATKPLDLTRASKIMFVLQIGSMSQTDSCNSDLSGPHAVDKAVLLQYSVNNGITWHVIAQHQPKDFTQAQRVSYNVPLEARMKGVLLRWWQPRHNGTGHDQWALDHVEVVLTRKQNYMMNFSRQHGLRHFYNRRRRSLRRYP

SEQ ID NO: 249482 - DNA, 10377 bp, Artificial Sequence
  derived and/or modified sequence
atggagagaagcggctgggccagacagaccttcctgctggccctgctgctgggcgccaccctgagagccagagccgccgccggctactaccccagattcagccccttcttcttcctgtgcacccaccacggcgagctggagggcgacggcgagcagggcgaggtgctgatcagcctgcacatcgccggcaaccccacctactacgtgcccggccaggagtaccacgtgaccatcagcaccagcaccttcttcgacggcctgctggtgaccggcctgtacaccagcaccagcgtgcaggccagccagagcatcggcggcagcagcgccttcggcttcggcatcatgagcgaccaccagttcggcaaccagttcatgtgcagcgtggtggccagccacgtgagccacctgcccaccaccaacctgagcttcatctggatcgccccccccgccggcaccggctgcgtgaacttcatggccaccgccacccacagaggccaggtgatcttcaaggacgccctggcccagcagctgtgcgagcagggcgcccccaccgacgtgaccgtgcacccccacctggccgagatccacagcgacagcatcatcctgagagacgacttcgacagctaccaccagctgcagctgaaccccaacatctgggtggagtgcaacaactgcgagaccggcgagcagtgcggcgccatcatgcacggcaacgccgtgaccttctgcgagccctacggccccagagagctgatcaccaccggcctgaacaccaccaccgccagcgtgctgcagttcagcatcggcagcggcagctgcagattcagctacagcgaccccagcatcatcgtgctgtacgccaagaacaacagcgccgactggatccagctggagaagatcagagcccccagcaacgtgagcaccatcatccacatcctgtacctgcccgaggacgccaagggcgagaacgtgcagttccagtggaagcaggagaacctgagagtgggcgaggtgtacgaggcctgctgggccctggacaacatcctgatcatcaacagcgcccacagacaggtggtgctggaggacagcctggaccccgtggacaccggcaactggctgttcttccccggcgccaccgtgaagcacagctgccagagcgacggcaacagcatctacttccacggcaacgagggcagcgagttcaacttcgccaccaccagagacgtggacctgagcaccgaggacatccaggagcagtggagcgaggagttcgagagccagcccaccggctgggacgtgctgggcgccgtgatcggcaccgagtgcggcaccatcgagagcggcctgagcatggtgttcctgaaggacggcgagagaaagctgtgcacccccagcatggacaccaccggctacggcaacctgagattctacttcgtgatgggcggcatctgcgaccccggcaacagccacgagaacgacatcatcctgtacgccaagatcgagggcagaaaggagcacatcaccctggacaccctgagctacagcagctacaaggtgcccagcctggtgagcgtggtgatcaaccccgagctgcagacccccgccaccaagttctgcctgagacagaagaaccaccagggccacaacagaaacgtgtgggccgtggacttcttccacgtgctgcccgtgctgcccagcaccatgagccacatgatccagttcagcatcaacctgggctgcggcacccaccagcccggcaacagcgtgagcctggagttcagcaccaaccacggcagaagctggagcctgctgcacaccgagtgcctgcccgagatctgcgccggcccccacctgccccacagcaccgtgtacagcagcgagaactacagcggctggaacagaatcaccatccccctgcccaacgccgccctgaccagaaacaccagaatcagatggagacagaccggccccatcctgggcaacatgtgggccatcgacaacgtgtacatcggccccagctgcctgaagttctgcagcggcagaggccagtgcaccagacacggctgcaagtgcgaccccggcttcagcggccccgcctgcgagatggccagccagaccttccccatgttcatcagcgagagcttcggcagcagcagactgagcagctaccacaacttctacagcatcagaggcgccgaggtgagcttcggctgcggcgtgctggccagcggcaaggccctggtgttcaacaaggacggcagaagacagctgatcaccagcttcctggacagcagccagagcagattcctgcagttcaccctgagactgggcagcaagagcgtgctgagcacctgcagagcccccgaccagcccggcgagggcgtgctgctgcactacagctacgacaacggcatcacctggaagctgctggagcactacagctacctgagctaccacgagcccagaatcatcagcgtggagctgcccggcgacgccaagcagttcggcatccagttcagatggtggcagccctaccacagcagccagagagaggacgtgtgggccatcgacgagatcatcatgaccagcgtgctgttcaacagcatcagcctggacttcaccaacctggtggaggtgacccagagcctgggcttctacctgggcaacgtgcagccctactgcggccacgactggaccctgtgcttcaccggcgacagcaagctggccagcagcatgagatacgtggagacccagagcatgcagatcggcgccagctacatgatccagttcagcctggtgatgggctgcggccagaagtacaccccccacatggacaaccaggtgaagctggagtacagcaccaaccacggcctgacctggcacctggtgcaggaggagtgcctgcccagcatgcccagctgccaggagttcaccagcgccagcatctaccacgccagcgagttcacccagtggagaagagtgatcgtgctgctgccccagaagacctggagcagcgccaccagattcagatggagccagagctactacaccgcccaggacgagtgggccctggacagcatctacatcggccagcagtgccccaacatgtgcagcggccacggcagctgcgaccacggcatctgcagatgcgaccagggctaccagggcaccgagtgccaccccgaggccgccctgcccagcaccatcatgagcgacttcgagaaccagaacggctgggagagcgactggcaggaggtgatcggcggcgagatcgtgaagcccgagcagggctgcggcgtgatcagcagcggcagcagcctgtacttcagcaaggccggcaagagacagctggtgagctgggacctggacaccagctgggtggacttcgtgcagttctacatccagatcggcggcgagagcgccagctgcaacaagcccgacagcagagaggagggcgtgctgctgcagtacagcaacaacggcggcatccagtggcacctgctggccgagatgtacttcagcgacttcagcaagcccagattcgtgtacctggagctgcccgccgccgccaagaccccctgcaccagattcagatggtggcagcccgtgttcagcggcgaggactacgaccagtgggccgtggacgacatcatcatcctgagcgagaagcagaagcagatcatccccgtgatcaaccccaccctgccccagaacttctacgagaagcccgccttcgactaccccatgaaccagatgagcgtgtggctgatgctggccaacgagggcatggtgaagaacgagaccttctgcgccgccacccccagcgccatgatcttcggcaagagcgacggcgacagattcgccgtgaccagagacctgaccctgaagcccggctacgtgctgcagttcaagctgaacatcggctgcgccaaccagttcagcagcaccgcccccgtgctgctgcagtacagccacgacgccggcatgagctggttcctggtgaaggagggctgctaccccgccagcgccggcaagggctgcgagggcaacagcagagagctgagcgagcccaccatgtaccacaccggcgacttcgaggagtggaccagaatcaccatcgtgatccccagaagcctggccagcagcaagaccagattcagatggatccaggagagcagcagccagaagaacgtgccccccttcggcctggacggcgtgtacatcagcgagccctgccccagctactgcagcggccacggcgactgcatcagcggcgtgtgcttctgcgacctgggctacaccgccgcccagggcacctgcgtgagcaacgtgcccaaccacaacgagatgttcgacagattcgagggcaagctgagccccctgtggtacaagatcaccggcgcccaggtgggcaccggctgcggcaccctgaacgacggcaagagcctgtacttcaacggccccggcaagagagaggccagaaccgtgcccctggacaccagaaacatcagactggtgcagttctacatccagatcggcagcaagaccagcggcatcacctgcatcaagcccagaaccagaaacgagggcctgatcgtgcagtacagcaacgacaacggcatcctgtggcacctgctgagagagctggacttcatgagcttcctggagccccagatcatcagcatcgacctgccccaggacgccaagacccccgccaccgccttcagatggtggcagccccagcacggcaagcacagcgcccagtgggccctggacgacgtgctgatcggcatgaacgacagcagccagaccggcttccaggacaagttcgacggcagcatcgacctgcaggccaactggtacagaatccagggcggccaggtggacatcgactgcctgagcatggacaccgccctgatcttcaccgagaacatcggcaagcccagatacgccgagacctgggacttccacgtgagcgccagcaccttcctgcagttcgagatgagcatgggctgcagcaagcccttcagcaacagccacagcgtgcagctgcagtacagcctgaacaacggcaaggactggcacctggtgaccgaggagtgcgtgccccccaccatcggctgcctgcactacaccgagagcagcatctacaccagcgagagattccagaactggaagagaatcaccgtgtacctgcccctgagcaccatcagccccagaaccagattcagatggatccaggccaactacaccgtgggcgccgacagctgggccatcgacaacgtggtgctggccagcggctgcccctggatgtgcagcggcagaggcatctgcgacgccggcagatgcgtgtgcgacagaggcttcggcggcccctactgcgtgcccgtggtgcccctgcccagcatcctgaaggacgacttcaacggcaacctgcaccccgacctgtggcccgaggtgtacggcgccgagagaggcaacctgaacggcgagaccatcaagagcggcaccagcctgatcttcaagggcgagggcctgagaatgctgatcagcagagacctggactgcaccaacaccatgtacgtgcagttcagcctgagattcatcgccaagagcacccccgagagaagccacagcatcctgctgcagttcagcatcagcggcggcatcacctggcacctgatggacgagttctacttcccccagaccaccaacatcctgttcatcaacgtgcccctgccctacaccgcccagaccaacgccaccagattcagactgtggcagccctacaacaacggcaagaaggaggagatctggatcgtggacgacttcatcatcgacggcaacaacgtgaacaaccccgtgatgctgctggacaccttcgacttcggccccagagaggacaactggttcttctaccccggcggcaacatcggcctgtactgcccctacagcagcaagggcgcccccgaggaggacagcgccatggtgttcgtgagcaacgaggtgggcgagcacagcatcaccaccagagacctgaacgtgaacgagaacaccatcatccagttcgagatcaacgtgggctgcagcaccgacagcagcagcgccgaccccgtgagactggagttcagcagagacttcggcgccacctggcacctgctgctgcccctgtgctaccacagcagcagccacgtgagcagcctgtgcagcaccgagcaccaccccagcagcacctactacgccggcaccatgcagggctggagaagagaggtggtgcacttcggcaagctgcacctgtgcggcagcgtgagattcagatggtaccagggcttctaccccgccggcagccagcccgtgacctgggccatcgacaacgtgtacatcggcccccagtgcgaggagatgtgcaacggccagggcagctgcatcaacggcaccaagtgcatctgcgaccccggctacagcggccccacctgcaagatcagcaccaagaaccccgacttcctgaaggacgacttcgagggccagctggagagcgacagattcctgctgatgagcggcggcaagcccagcagaaagtgcggcatcctgagcagcggcaacaacctgttcttcaacgaggacggcctgagaatgctgatgaccagagacctggacctgagccacgccagattcgtgcagttcttcatgagactgggctgcggcaagggcgtgcccgaccccagaagccagcccgtgctgctgcagtacagcctgaacggcggcctgagctggagcctgctgcaggagttcctgttcagcaacagcagcaacgtgggcagatacatcgccctggagatccccctgaaggccagaagcggcagcaccagactgagatggtggcagcccagcgagaacggccacttctacagcccctgggtgatcgaccagatcctgatcggcggcaacatcagcggcaacaccgtgctggaggacgacttcaccaccctggacagcagaaagtggctgctgcaccccggcggcaccaagatgcccgtgtgcggcagcaccggcgacgccctggtgttcatcgagaaggccagcaccagatacgtggtgagcaccgacgtggccgtgaacgaggacagcttcctgcagatcgacttcgccgccagctgcagcgtgaccgacagctgctacgccatcgagctggagtacagcgtggacctgggcctgagctggcaccccctggtgagagactgcctgcccaccaacgtggagtgcagcagataccacctgcagagaatcctggtgagcgacaccttcaacaagtggaccagaatcaccctgcccctgcccccctacaccagaagccaggccaccagattcagatggcaccagcccgcccccttcgacaagcagcagacctgggccatcgacaacgtgtacatcggcgacggctgcatcgacatgtgcagcggccacggcagatgcatccagggcaactgcgtgtgcgacgagcagtggggcggcctgtactgcgacgaccccgagaccagcctgcccacccagctgaaggacaacttcaacagagcccccagcagccagaactggctgaccgtgaacggcggcaagctgagcaccgtgtgcggcgccgtggccagcggcatggccctgcacttcagcggcggctgcagcagactgctggtgaccgtggacctgaacctgaccaacgccgagttcatccagttctacttcatgtacggctgcctgatcacccccaacaacagaaaccagggcgtgctgctggagtacagcgtgaacggcggcatcacctggaacctgctgatggagatcttctacgaccagtacagcaagcccggcttcgtgaacatcctgctgccccccgacgccaaggagatcgccaccagattcagatggtggcagcccagacacgacggcctggaccagaacgactgggccatcgacaacgtgctgatcagcggcagcgccgaccagagaaccgtgatgctggacaccttcagcagcgcccccgtgccccagcacgagagaagccccgccgacgccggccccgtgggcagaatcgccttcgacatgttcatggaggacaagaccagcgtgaacgagcactggctgttccacgacgactgcaccgtggagagattctgcgacagccccgacggcgtgatgctgtgcggcagccacgacggcagagaggtgtacgccgtgacccacgacctgacccccaccgagggctggatcatgcagttcaagatcagcgtgggctgcaaggtgagcgagaagatcgcccagaaccagatccacgtgcagtacagcaccgacttcggcgtgagctggaactacctggtgccccagtgcctgcccgccgaccccaagtgcagcggcagcgtgagccagcccagcgtgttcttccccaccaagggctggaagagaatcacctaccccctgcccgagagcctggtgggcaaccccgtgagattcagattctaccagaagtacagcgacatgcagtgggccatcgacaacttctacctgggccccggctgcctggacaactgcagaggccacggcgactgcctgagagagcagtgcatctgcgaccccggctacagcggccccaactgctacctgacccacaccctgaagaccttcctgaaggagagattcgacagcgaggagatcaagcccgacctgtggatgagcctggagggcggcagcacctgcaccgagtgcggcatcctggccgaggacaccgccctgtacttcggcggcagcaccgtgagacaggccgtgacccaggacctggacctgagaggcgccaagttcctgcagtactggggcagaatcggcagcgagaacaacatgaccagctgccacagacccatctgcagaaaggagggcgtgctgctggactacagcaccgacggcggcatcacctggaccctgctgcacgagatggactaccagaagtacatcagcgtgagacacgactacatcctgctgcccgaggacgccctgaccaacaccaccagactgagatggtggcagcccttcgtgatcagcaacggcatcgtggtgagcggcgtggagagagcccagtgggccctggacaacatcctgatcggcggcgccgagatcaaccccagccagctggtggacaccttcgacgacgagggcaccagccacgaggagaactggagcttctaccccaacgccgtgagaaccgccggcttctgcggcaaccccagcttccacctgtactggcccaacaagaagaaggacaagacccacaacgccctgagcagcagagagctgatcatccagcccggctacatgatgcagttcaagatcgtggtgggctgcgaggccaccagctgcggcgacctgcacagcgtgatgctggagtacaccaaggacgccagaagcgacagctggcagctggtgcagacccagtgcctgcccagcagcagcaacagcatcggctgcagccccttccagttccacgaggccaccatctacaacagcgtgaacagcagcagctggaagagaatcaccatccagctgcccgaccacgtgagcagcagcgccacccagttcagatggatccagaagggcgaggagaccgagaagcagagctgggccatcgaccacgtgtacatcggcgaggcctgccccaagctgtgcagcggccacggctactgcaccaccggcgccatctgcatctgcgacgagagcttccagggcgacgactgcagcgtgttcagccacgacctgcccagctacatcaaggacaacttcgagagcgccagagtgaccgaggccaactgggagaccatccagggcggcgtgatcggcagcggctgcggccagctggccccctacgcccacggcgacagcctgtacttcaacggctgccagatcagacaggccgccaccaagcccctggacctgaccagagccagcaagatcatgttcgtgctgcagatcggcagcatgagccagaccgacagctgcaacagcgacctgagcggcccccacgccgtggacaaggccgtgctgctgcagtacagcgtgaacaacggcatcacctggcacgtgatcgcccagcaccagcccaaggacttcacccaggcccagagagtgagctacaacgtgcccctggaggccagaatgaagggcgtgctgctgagatggtggcagcccagacacaacggcaccggccacgaccagtgggccctggaccacgtggaggtggtgctgaccagaaagcagaactacatgatgaacttcagcagacagcacggcctgagacacttctacaacagaagaagaagaagcctgagaagatacccctag

SEQ ID NO: 249483 - DNA, 10377 bp, Artificial Sequence
  derived and/or modified sequence
atggagaggtcagggtgggccagacagacctttcttctggccctgcttctgggggccaccctgcgggcgagagccgccgcagggtattaccccaggtttagcccattctttttcctatgtacccaccatggggaacttgagggtgacggcgagcaaggggaagtgctgatcagcctgcatatcgctggcaaccccacctactacgtgcccggccaggagtatcacgttacaatctcaacctctacatttttcgacggcctgctggttacgggattgtatacttccactagcgttcaggcttctcaatccatcggaggttctagtgcctttggtttcggaataatgtctgatcatcagtttggaaaccagttcatgtgcagtgtggtggcttcgcatgtgagccacctgcccaccaccaacttaagctttatctggattgccccccccgctgggactgggtgtgtcaacttcatggctaccgccacacaccgtggtcaggtcattttcaaggatgccctggctcagcaactgtgtgaacaaggcgcgcccaccgacgtaactgtgcatccacacctggcggagattcactccgactctatcatactaagagatgatttcgactcttaccatcaactgcagctaaaccccaatatttgggtggagtgcaacaactgcgagactggggagcagtgtggagcaattatgcatggtaacgcagtcacattttgcgaaccttatgggcccagggagttaattaccactggtctgaacaccaccacagcatctgtgttacagttctcgataggatcaggctcctgcagattttcttactccgatccgtctattatcgtcttatatgcaaagaataatagtgcagattggatccagctagagaaaatcagagcaccttccaacgtatcgactataatacacatcctgtatctgccagaggatgccaagggcgaaaatgtgcagtttcagtggaaacaggaaaacctccgtgtgggcgaggtgtacgaagcctgttgggccctagataacatcctcatcataaatagcgctcataggcaggttgtcttggaagactccttggacccggtggataccgggaactggctatttttccccggggccacagttaagcactcctgccagtccgacggaaatagcatctacttccatgggaacgaagggagtgaatttaactttgccacaacaagggacgtcgatttgtcgacagaggacatccaggagcaatggtccgaagagttcgaatcccagccaaccggatgggacgtgctgggagccgtgatcgggaccgagtgcgggactatcgaaagcggtctctctatggtgttcttgaaggatggtgaacggaaactgtgtacaccctcaatggatacaacaggttacggtaatctaaggttctacttcgtaatggggggaatctgtgatcctgggaattcacatgagaacgatatcatactgtatgcaaaaatagagggtcggaaggagcatattacactggacacactcagctattccagttataaggtaccttcactcgtgtcagtcgtgattaatcccgagttacagacccctgctacaaagttctgcctcaggcagaaaaaccaccaggggcataacagaaacgtttgggctgtagacttcttccacgttctgcccgtccttccatccaccatgagccacatgatccaatttagtatcaatctgggttgcggcacacaccagcccggcaactctgtgagtctcgagtttagtacgaatcacggaaggagctggagtctcctccacacagagtgcctccctgagatctgcgcagggccacacttgccgcactcaacagtgtattctagcgaaaactacagtggctggaatcgcatcacgattcccctgccgaacgccgccctaacccgcaacactaggattcgttggcgccagacaggtccaattctggggaatatgtgggctatcgataatgtttacattggcccgagctgtctcaagttttgcagcggtcgcggccagtgtacgcggcacggatgtaagtgcgacccaggcttttctggtcccgcttgcgagatggcttcccagacttttcccatgtttatttctgaatctttcggatctagtagactgtctagctatcacaacttttactccattagaggcgcagaagtaagttttggatgtggggtgctggcatccggaaaggcgttggtgttcaataaggacggacgccgccagctgatcacatcattcttagattcatctcagtcccgattcctgcagtttaccttgcgactcggatcaaagtccgttctgagcacttgtagagcccccgaccaaccaggggagggggtccttctgcactactcatatgacaacggcataacttggaagttactcgaacactactcctacttgagctaccacgagccaagaataattagtgtagaactgccaggagatgccaagcagttcggcattcagtttagatggtggcagccttaccacagctcccagcgcgaagatgtctgggctattgacgaaatcatcatgactagtgtattattcaacagtatctccctcgattttactaacctcgtggaggtgacacagtctctcggattttaccttggcaatgtgcagccatattgcggccatgactggactctttgctttactggcgactcaaagcttgcctccagcatgcggtatgtggagacccagagcatgcagattggcgcgtcatacatgattcagttcagtctggtgatgggttgtggtcagaagtataccccccatatggataatcaggtgaaactggagtattcaaccaatcacggattgacatggcatctcgttcaggaggaatgtctcccgtcaatgccaagctgtcaagaatttacatccgctagcatttaccatgcaagtgagttcacacaatggcggagggtcattgtcctgctccctcagaagacatggtctagtgctactcggtttcgttggtcacagtcttactatacagctcaggatgaatgggctctggattctatctatatcggccaacagtgtcccaacatgtgctctgggcacgggtcatgcgatcacggaatctgtaggtgcgatcaaggctatcagggtactgaatgccacccagaagcggccctcccttccactatcatgagcgactttgagaatcaaaatggatgggagagtgattggcaggaagtgatcggaggagagatcgttaagcccgagcagggatgcggcgtgatctcaagcggtagctctctctatttctccaaagcagggaagcgtcagttggtgtcctgggacctcgatacttcttgggtagactttgtccagttttatatccaaatcggaggcgaaagcgcatcgtgtaacaaacctgacagtcgggaggagggagtgctgctccagtatagcaacaacggcggtatacaatggcatctcctggccgagatgtatttcagtgatttttccaaaccacggtttgtctacttggaactgcctgccgccgcaaagaccccctgcaccaggtttagatggtggcagccagtgtttagcggggaggactatgatcagtgggcagttgacgacatcataatcctgtccgaaaagcagaaacagattattcctgtgatcaacccaactttgcctcagaacttctatgaaaaacctgcatttgattaccctatgaatcagatgagcgtgtggttaatgttggccaatgaaggcatggtcaagaatgagactttttgtgccgccactcctagtgctatgatttttggtaagagcgatggggataggttcgccgtaactcgcgacctaacacttaaacctgggtatgtgctgcagtttaagctgaatattggatgcgccaaccagtttagctctactgcgccagtgttgctacagtactctcacgacgccgggatgagctggtttttggtcaaagaaggctgttatcccgcttcagctggcaaaggatgcgaaggtaattcccgcgagttgagtgaaccaacaatgtatcacacaggtgatttcgaggagtggacacggatcacaatagtgattccccgatccctggcctcctcaaaaactcgctttcgatggatacaggagtcctcgtctcagaaaaacgtgcctccttttggactggacggcgtgtacatttccgagccttgtccgagctattgcagcggacacggtgattgcattagtggcgtgtgcttctgcgatctgggttatacagcggcacaagggacctgcgtcagtaatgtgcctaatcacaatgaaatgtttgatcgattcgaagggaaactctctccactgtggtacaaaattactggagctcaagttggaacgggctgcggcaccctaaacgatggcaaaagtttatactttaacggcccaggcaaacgagaggccaggaccgtgcccctcgacactcggaacatccgactcgtccagttttatattcagatagggtctaagacctctggaatcacttgcatcaaaccaaggacccggaatgagggtctgatcgtgcaatattccaacgacaacggcatcttgtggcacctgctgagagaattggatttcatgtcattcttggagccacaaataatcagtatcgacctgcctcaggacgccaaaacgccggcaacagcgttccgctggtggcagcctcagcacggaaagcacagtgcacagtgggcactagatgacgttctgatcggaatgaatgacagcagtcaaaccgggttccaagacaaattcgatggttccattgatttacaggccaactggtacaggattcagggtggccaggttgatatcgactgcctctccatggatacagccctcatcttcacggagaatattggcaaacctcgatacgctgaaacatgggatttccacgtgtcagcctccacttttctccagtttgagatgtctatgggctgtagcaaacccttttctaattcgcactccgtgcaactccagtatagcctgaataacggaaaggactggcacctggttacggaggaatgcgtccctccgaccatcggctgcctgcactacacagagtctagcatctatacttccgagcgcttccagaactggaagcgcatcacagtctacttgccactgtccaccatctctccccgcactcgctttaggtggatccaagcgaattacaccgtgggagccgatagctgggcaatcgataacgtggtactggcctcaggttgcccctggatgtgcagcggaagagggatttgcgacgctgggcgctgcgtctgtgaccgggggtttggcggtccctactgtgtccctgtggtacctcttcctagcatcctgaaggacgacttcaatggcaatcttcaccccgatttgtggcctgaggtctatggcgctgaacggggcaatctgaatggcgagactatcaaaagtgggacatcactgatttttaagggcgaaggcctgcggatgcttatttcgcgcgatcttgactgcacaaacactatgtacgtgcagttctctctaaggttcatcgcaaagtctacccctgaacgatcccattctattcttctgcagttctcaattagcggaggaatcacatggcatttgatggacgagttctacttccctcagacaaccaacattctcttcatcaatgtgccactgccctacactgcccagaccaatgccactagatttagactgtggcagccttataacaacggcaagaaggaggaaatttggatagtagatgatttcatcatcgatgggaacaatgtgaacaatcctgtgatgctactggacacctttgactttggcccccgagaggacaactggttcttctatcctggtggtaacattggactgtattgcccatacagctctaaaggggctcctgaggaggacagcgccatggtatttgtttccaacgaagttggagaacacagcatcacaaccagggacctgaacgtgaatgagaataccatcatccaattcgaaataaacgttgggtgctctaccgattcctctagcgcagaccccgtgaggctggagttctctagggatttcggggccacctggcatttgctcctgccattgtgttaccacagctctagtcacgtctcttcactttgttctaccgagcatcatccatccagcacgtactacgcggggacgatgcaggggtggcgcagagaggtagttcatttcggaaagctccacctgtgtggtagcgtccgttttcggtggtatcagggcttttaccctgcaggcagccagccggtgacatgggctatcgataacgtgtatattggaccacaatgtgaagagatgtgcaacggacagggctcatgcatcaatgggaccaaatgtatctgcgatcctggatatagtggacccacctgtaagatcagcacgaaaaatcctgactttctgaaagatgactttgaggggcagctggagtcagaccgttttctccttatgagcgggggtaagccaagtcgtaagtgcggtatcttgagcagcgggaacaacctgttcttcaatgaggacggacttcggatgcttatgacgcgtgacctggatctgagccatgcccggtttgtgcagttttttatgagactaggatgtggcaagggggtcccggacccgcggtcacaacccgtcttgctgcagtattctttgaatggtggcctttcatggagcctattgcaggaattcctcttttccaatagcagcaacgtgggtaggtatatcgccctggagatcccgctgaaggcacggtcagggagtacaagacttaggtggtggcagccctctgagaatggccatttttactcaccgtgggtcattgaccaaatcctgattgggggtaacatatccggaaatacagttctggaggatgactttaccacattggattctcgcaagtggctgttgcatcccggaggcacgaaaatgcccgtttgtggcagtacaggcgatgcccttgtgtttatcgaaaaggccagcacgagatacgtcgtgagcactgacgtggcagtgaatgaggactcattccttcagatcgactttgctgcttcatgttccgtgactgacagctgttacgcaatcgagttggaatattctgtggatctgggtctgtcgtggcacccactcgttagagattgtctgccaactaacgttgaatgctctcggtaccatttacagcgtatcctggtctcggatacttttaataagtggacaagaatcaccctcccactccccccctacacgcgatctcaggcaacccgcttcaggtggcaccaacccgccccatttgacaaacagcagacatgggctattgataacgtgtacatcggagatggatgcatcgacatgtgcagcggccatggacgttgtatccagggcaactgtgtttgtgacgagcagtgggggggtctgtactgcgacgatccggaaacgagccttccaacgcagcttaaggataactttaacagggcacccagctcgcaaaactggctgaccgtcaacggcggtaagctatcaacagtgtgtggcgcagtcgccagcggaatggccttacacttctccggcggctgttcacggctgttggtaactgttgacctgaacctcaccaacgcagagtttatccagttttacttcatgtacggatgcctgattacccccaacaatcgcaaccaaggagtgctacttgaatattccgtgaacggagggatcacatggaacctcttgatggagattttctacgatcaatactccaaaccggggttcgtcaatattctgctaccccccgatgctaaggaaattgccacgcgctttaggtggtggcagcccaggcacgatggacttgatcaaaacgactgggctatcgataacgttctcataagtggatccgctgatcagcgtaccgtgatgctcgacacattctccagcgcgccagtaccacagcacgaaagatcaccagcagacgccggcccagtggggaggattgccttcgacatgttcatggaggataagacgtctgtgaatgaacactggctcttccatgacgattgtacagtagagcggttctgtgattctcccgatggcgtaatgctttgcggatcacatgacgggcgggaggtgtacgctgtgactcatgacttaacacccaccgaaggctggatcatgcagtttaaaatcagcgtgggctgtaaagttagtgagaagatcgcacaaaaccagatacacgtccagtacagcacagactttggcgtgagttggaactacttggtcccacagtgtctccctgccgatccaaagtgttccgggagtgtgagtcagccaagtgttttttttcctacaaagggatggaagcggatcacgtaccccttgcccgagtccctggtgggtaatccggtccggttcaggttctaccagaaatactccgacatgcaatgggccattgataatttttatcttgggcccggctgtttggataattgccgcggccacggagattgcctccgagaacagtgcatttgcgatcctggatactcaggtccaaactgctatctcactcacacactgaagacctttttaaaagagagattcgactcagaagagatcaaacctgatctctggatgtcacttgagggcggcagcacatgcacagagtgtgggattctggccgaagatacagcgctgtattttggtggctcaaccgtgcgtcaggcagtaacacaggatcttgacctgcgaggagctaaattcctgcagtattggggccgcataggatccgagaataatatgaccagctgccatcggcccatctgccgcaaggagggagtgctgctcgattactctacagatggaggtattacttggacactgctgcacgagatggactaccagaagtacattagtgttcgccacgattatattttactgcccgaggacgcacttacaaacaccacccgtctacggtggtggcagcctttcgttatttccaacggaattgttgtgtcaggggttgagcgggcacagtgggccttggacaatatactgataggcggagcagagatcaatcctagccagctggtcgatacatttgacgacgagggtacctcccacgaggaaaactggtctttttaccccaatgccgtgcggaccgctggtttctgtggcaacccatcttttcatctctactggccgaataagaagaaagataagacacataatgccctgagctctcgcgagctcatcatccagccaggctatatgatgcagttcaagatcgtggtcggttgtgaggccacttcatgtggcgatctgcatagtgtcatgctcgagtacaccaaggacgccagatctgactcctggcagttagtgcagactcagtgcctaccttcaagctcaaacagcatcgggtgcagtccgttccaattccacgaagctactatctacaactcggtgaactcttcaagctggaagagaatcaccattcagctgcccgaccacgtgtcaagtagcgccactcagttcaggtggatccagaaaggcgaagagactgagaagcagtcttgggcaatcgaccacgtgtacatcggggaggcatgtccaaagttgtgctccgggcacgggtattgcaccaccggggcaatctgcatctgcgatgagtcttttcaaggagacgattgttctgtgtttagccatgatctgcctagctatatcaaggacaacttcgagagcgcaagagtgaccgaggccaactgggagaccatccagggaggagtcataggtagcggttgtggacagctggccccatacgcccatggagactctctgtactttaatggttgccaaatcagacaagcagccacaaagccacttgacctgaccagggcctctaaaattatgttcgtgttacaaatcgggagcatgtctcagactgatagctgtaactcagacctgagcgggccacacgccgtcgacaaggccgtgctccttcaatatagcgtaaacaacggtattacatggcatgtgatcgcccagcaccagccgaaagactttacccaggcccagagggtgtcttacaatgtgccgctcgaggccaggatgaagggggtacttctaagatggtggcagcccagacataacggaacaggccatgatcagtgggcattagaccacgtggaagtggtcctgacacgaaaacaaaattacatgatgaacttttcacgacagcacggattaagacatttttataaccgtagaagacggtccctgcgccgctacccttag

SEQ ID NO: 249484 - DNA, 10377 bp, Artificial Sequence
  derived and/or modified sequence
atggagaggagcggctgggcccggcagaccttcctgctggccctgctgctgggcgccaccctgcgggcccgggctgctgctggctactacccccgcttcagccccttcttcttcctgtgcacccaccacggggagctggagggagatggagagcagggcgaggtgctgatcagcctgcacatcgccggcaaccccacctactacgtgcccggccaggagtaccacgtgaccatcagcaccagcaccttctttgatggcctgctggtgacaggcctgtacaccagcacctctgtgcaggccagccagagcatcggcggcagcagcgccttcggcttcggcatcatgtctgaccaccagtttggaaaccagttcatgtgcagcgtggtggccagccacgtgagccacctgcccaccaccaacctgtccttcatctggatcgcccccccagctggcaccggctgtgtgaacttcatggccacagccacccaccggggccaggtgatcttcaaggatgccctggcccagcagctgtgtgagcagggcgcccccacagatgtgacagtgcacccccacctggccgagatccacagcgacagcatcatcctgagagatgactttgacagctaccaccagctgcagctgaaccccaacatctgggtggagtgcaacaactgtgaaacaggagagcagtgtggggccatcatgcacggcaatgctgtgaccttctgtgagccctacggcccccgggagctgatcaccaccggcctgaacaccaccacagcctctgtgctgcagttcagcatcggcagcggcagctgccgcttctcctacagcgaccccagcatcatcgtgctgtatgccaagaacaacagcgctgactggatccagctggagaagatccgggcccccagcaatgtgtccaccatcatccacatcctgtacctgcctgaagatgccaagggggagaatgtgcagttccagtggaagcaggagaacctgcgggtgggggaggtgtatgaggcctgctgggccctggacaacatcctgatcatcaacagcgcccaccggcaggtggtgctggaggacagcctggaccctgtggacaccggcaactggctgttcttccctggggccaccgtgaagcacagctgccagagtgatggcaacagcatctacttccacggcaatgaaggcagcgagttcaactttgccaccaccagagatgtggacctgagcacagaggacatccaggagcagtggagcgaggagtttgagagccagcccaccggctgggatgtgctgggcgccgtcatcggcacagaatgtggcaccattgaaagtggcctgtccatggtgttcctgaaggatggagagaggaagctgtgcacccccagcatggacaccaccggctacggcaacctgcgcttctactttgtgatgggcggcatctgtgaccccggcaacagccatgaaaatgacatcatcctgtatgccaagattgagggcaggaaggagcacatcaccctggacaccctgagctacagcagctacaaggtgcccagcctggtgtctgtggtgatcaaccctgagctgcagaccccagccaccaagttctgcctgcggcagaagaaccaccagggccacaacagaaatgtgtgggccgtggacttcttccacgtgctgcctgtgctgcccagcaccatgagccacatgatccagttcagcatcaacctgggctgcggcacccaccagcccggcaacagcgtgtccctggagttcagcaccaaccacggccgctcctggagcctgctgcacacagaatgtctgcctgagatctgtgccggcccccacctgccccacagcacagtgtacagcagcgagaactacagcggctggaaccgcatcaccatccccctgcccaatgctgccctgaccaggaacacccgcatccgctggaggcagacaggccccatcctgggcaacatgtgggccatcgacaacgtgtacatcggccccagctgcctgaagttctgcagcggccggggccagtgcaccaggcatggctgcaagtgtgaccccggcttcagcggccctgcctgtgagatggccagccagaccttccccatgttcatcagcgagagctttggcagcagccggctgagcagctaccacaacttctacagcatcagaggagctgaggtgtcctttggctgcggcgtgctggccagcggcaaggccctggtgttcaacaaggatggccggcggcagctgatcaccagcttcctggacagcagccagagccgcttcctgcagttcaccctgcggctgggcagcaagtctgtgctgagcacctgccgggccccagaccagcctggagagggcgtgctgctgcactacagctatgacaatggcatcacctggaagctgctggagcactacagctacctgagctaccacgagccccgcatcatctctgtggagctgcctggagatgccaagcagtttggcatccagttccgctggtggcagccctaccacagcagccagagagaagatgtgtgggccattgatgagatcatcatgacctctgtgctcttcaacagcatcagcctggacttcaccaacctggtggaggtgacccagagcctgggcttctacctgggcaatgtgcagccctactgcggccatgactggaccctgtgcttcaccggggacagcaagctggccagctccatgagatatgtggagacccagagcatgcagatcggggccagctacatgatccagttcagcctggtgatgggctgcggccagaagtacaccccccacatggacaaccaggtgaagctggagtacagcaccaaccacggcctgacctggcacctggtgcaggaggagtgcctgcccagcatgcccagctgccaggagttcaccagcgccagcatctaccacgccagcgagttcacccagtggaggagagtgattgtgctgctgccccagaagacctggagcagcgccacccgcttccgctggagccagagctactacacagcccaggatgagtgggccctggacagcatctacatcggccagcagtgccccaacatgtgcagcggccacggcagctgtgaccacggcatctgccgctgtgaccagggctaccagggcacagagtgccaccctgaggccgccctgcccagcaccatcatgtctgactttgagaaccagaatggctgggagagtgactggcaggaggtgattggaggagaaattgtgaagccagagcagggctgtggggtcatcagcagcggcagcagcctgtacttcagcaaggccggcaagaggcagctggtgtcctgggacctggacacctcctgggtggactttgtgcagttctacatccagatcggcggggagagcgccagctgcaacaagccagacagccgggaggagggcgtgctgctgcagtacagcaacaacggcggcatccagtggcacctgctggccgagatgtacttcagtgacttcagcaagcccaggtttgtgtacctggagctgcctgctgctgccaagaccccctgcacccgcttccgctggtggcagcccgtcttctctggagaagattatgaccagtgggccgtggatgacatcatcatcctgtctgagaagcagaagcagatcatccctgtgatcaaccccaccctgccccagaacttctatgagaagccagcctttgactaccccatgaaccagatgtctgtgtggctgatgctggccaatgaaggcatggtgaagaatgagaccttctgtgccgccaccccatctgccatgatctttgggaagagtgatggagacagatttgctgtgacccgggacctgaccctgaagccaggctacgtgctgcagttcaagctgaacatcggctgtgccaaccagttcagcagcacagcccctgtgctgctgcagtacagccatgatgctggcatgtcctggttcctggtgaaggagggctgctacccagccagcgctgggaagggctgtgagggcaacagccgggagctgtctgagcccaccatgtaccacactggagactttgaggagtggacccgcatcaccatcgtcatccccaggagcctggccagcagcaagacccgcttccgctggatccaggagagcagcagccagaagaatgtgcccccatttggcctggatggagtgtacatcagcgagccctgccccagctactgcagcggccatggagactgcatcagcggcgtgtgcttctgtgacctgggctacacagctgcccagggcacctgtgtgtccaatgtgcccaaccacaatgagatgtttgacagatttgagggcaagctgagccccctgtggtacaagatcaccggggcccaggtgggcaccggctgcggcaccctgaatgatggcaagagcctgtacttcaacggccctgggaagcgggaggccaggacagtgcccctggacaccaggaacatccggctggtgcagttctacatccagatcggcagcaagaccagcggcatcacctgcatcaagcccaggaccagaaatgaaggcctcatcgtgcagtacagcaatgacaatggcatcctgtggcacctgctgcgggagctggacttcatgtccttcctggagccccagatcatcagcattgacctgccccaggatgccaagaccccagccacagccttccgctggtggcagccccagcacggcaagcacagcgcccagtgggccctggatgatgtgctgattggcatgaatgacagcagccagacaggcttccaggacaagtttgatggcagcattgacctgcaggccaactggtaccgcatccagggcggccaggtggacatcgactgcctgtccatggacacagccctgatcttcacagaaaatattggcaagcccaggtatgcagagacctgggacttccacgtgtctgccagcaccttcctgcagtttgagatgtccatgggctgcagcaagcccttcagcaacagccacagcgtgcagctgcagtacagcctgaacaacgggaaggactggcacctggtgacagaggagtgtgtgccccccaccatcggctgcctgcactacacagagagcagcatctacaccagcgagcgcttccagaactggaagaggatcaccgtgtacctgcccctgagcaccatcagccccaggacccgcttccgctggatccaggccaactacacagtgggcgctgacagctgggccatcgacaacgtggtgctggccagcggctgcccctggatgtgcagcggccggggcatctgtgatgctggccgctgtgtgtgtgaccggggctttggaggcccctactgtgtgcctgtggtgcccctgcccagcatcctgaaggatgacttcaatggaaacctgcacccagacctgtggccagaggtgtatggagctgagcggggcaacctgaatggagagaccatcaagagcggcaccagcctcatcttcaagggggagggcctgaggatgctgatcagccgggacctggactgcaccaacaccatgtatgtgcagttcagcctgcgcttcatcgccaagagcaccccagagaggagccacagcatcctgctgcagttcagcatcagcggcggcatcacctggcacctgatggatgagttctacttcccccagaccaccaacatcctcttcatcaacgtgcccctgccctacacagcccagaccaatgccacccgcttccggctgtggcagccctacaacaacgggaagaaggaggagatctggatcgtggatgacttcatcattgatggcaacaacgtgaacaaccctgtgatgctgctggacacctttgattttggcccccgggaggacaactggttcttctacccaggcggcaacatcggcctgtactgcccctacagcagcaaaggagcccctgaggaggacagcgccatggtgtttgtgtccaatgaggtgggggagcacagcatcaccacccgggacctgaatgtgaatgaaaacaccatcatccagtttgagatcaacgtgggctgcagcacagacagcagcagcgctgaccctgtgcggctggagttcagccgggactttggagccacctggcacctgctgctgcccctgtgctaccacagcagcagccacgtgagcagcctgtgcagcacagagcaccaccccagcagcacctactatgccggcaccatgcagggctggaggcgggaggtggtgcactttgggaagctgcacctgtgtggctctgtgcgcttccgctggtaccagggcttctacccagctggcagccagcctgtgacctgggccatcgacaacgtgtacatcggcccccagtgtgaggagatgtgcaatggccagggcagctgcatcaatggcaccaagtgcatctgtgaccccggctacagcggccccacctgcaagatcagcaccaagaacccagacttcctgaaggatgactttgagggccagctggagagtgaccgcttcctgctgatgtctgggggcaagcccagcaggaaatgtggcatcctgagcagcggcaacaacctcttcttcaatgaagatggcctgaggatgctgatgacccgggacctggacctgagccacgccaggtttgtgcagttcttcatgaggctgggctgtgggaagggcgtgcctgaccccaggagccagcctgtgctgctgcagtacagcctgaatggaggcctgtcctggagcctgctgcaggagttcctgttcagcaacagcagcaatgtgggccgctacatcgccctggagatccccctgaaggcccggagcggcagcacccggctgcgctggtggcagcccagtgaaaatggccacttctacagcccctgggtgattgaccagatcctgattggaggcaacatcagcggcaacacagtgctggaggatgacttcaccaccctggacagcaggaagtggctgctgcaccctgggggcaccaagatgcctgtgtgtggcagcactggagatgccctggtgttcatcgagaaggccagcacccgctacgtggtgtccacagatgtggccgtgaatgaagacagcttcctgcagattgactttgctgccagctgcagcgtgacagacagctgctacgccatcgagctggagtacagcgtggacctgggcctgtcctggcaccccctggtgcgggactgcctgcccaccaacgtggagtgcagccgctaccacctgcagaggatcctggtgtctgacaccttcaacaagtggacccgcatcaccctgcccctgcccccctacaccaggagccaggccacccgcttccgctggcaccagcctgccccctttgacaagcagcagacctgggccatcgacaacgtgtacatcggagatggctgcatcgacatgtgcagcggccacggccgctgcatccagggcaactgtgtgtgtgatgagcagtggggcggcctgtactgtgatgatcctgagaccagcctgcccacccagctgaaggacaacttcaacagagcccccagcagccagaactggctgactgtgaatggaggcaagctgagcacagtgtgtggggctgtggccagcggcatggccctgcacttcagcggcggctgcagccggctgctggtgacagtggacctgaacctgaccaatgctgagttcatccagttctacttcatgtatggctgcctgatcacccccaacaacagaaaccagggcgtgctgctggagtacagcgtgaatggaggcatcacctggaacctgctgatggagatcttctatgaccagtacagcaagccaggctttgtgaacatcctgctgcccccagatgccaaggagatcgccacccgcttccgctggtggcagcccaggcatgatggcctggaccagaatgactgggccatcgacaacgtgctgatcagcggcagcgctgaccagaggacagtgatgctggacaccttcagcagcgcccctgtgccccagcacgagaggagccctgcagatgctggccctgtgggcagaattgcctttgacatgttcatggaggacaagacctctgtgaatgagcactggctgttccatgatgactgcaccgtggagcgcttctgtgacagcccagatggagtgatgctgtgtggcagccatgatggccgggaggtgtatgctgtgacccatgacctgacccccacagagggctggatcatgcagttcaagatctctgtgggctgcaaggtgtctgagaagatcgcccagaaccagatccacgtgcagtacagcacagactttggagtgtcctggaactacctggtgccccagtgcctgcctgctgaccccaagtgcagcggctctgtgtcccagcccagcgtcttcttccccaccaagggctggaagaggatcacctaccccctgcctgagagcctggtgggcaaccctgtgcgcttccgcttctaccagaagtacagcgacatgcagtgggccatcgacaacttctacctgggccctggctgcctggacaactgccggggccatggagactgcctgcgggagcagtgcatctgtgaccccggctacagcggccccaactgctacctgacccacaccctgaagaccttcctgaaggagagatttgacagcgaggagatcaagccagacctgtggatgagcctggagggcggcagcacctgcacagaatgtggcatcctggccgaggacacagccctgtactttggaggcagcacagtgcggcaggccgtgacccaggacctggacctgcggggggccaagttcctgcagtactggggccgcatcggcagcgagaacaacatgaccagctgccaccggcccatctgcaggaaggagggcgtgctgctggactacagcacagatggcggcatcacctggaccctgctgcacgagatggactaccagaagtacatctctgtgagacatgactacatcctgctgcctgaagatgccctgaccaacaccacccggctgcgctggtggcagccctttgtgatcagcaatggaattgtggtgtctggagtggagcgggcccagtgggccctggacaacatcctgattggaggagctgagatcaaccccagccagctggtggacacctttgatgatgagggcaccagccatgaggagaactggagcttctacccaaatgctgtgaggacagctggcttctgtggcaaccccagcttccacctgtactggcccaacaagaagaaggacaagacccacaatgccctgagcagccgggagctgatcatccagcccggctacatgatgcagttcaagatcgtggtgggctgtgaggccaccagctgtggggacctgcacagcgtgatgctggagtacaccaaggatgcccggagtgacagctggcagctggtgcagacccagtgcctgcccagcagcagcaacagcatcggctgcagccccttccagttccacgaggccaccatctacaacagcgtgaacagcagctcctggaagaggatcaccatccagctgcctgaccacgtgagcagcagcgccacccagttccgctggatccagaagggggaggagacagagaagcagagctgggccatcgaccacgtgtacatcggggaggcctgccccaagctgtgcagcggccacggctactgcaccactggagccatctgcatctgtgatgagagcttccagggagatgactgcagcgtcttcagccatgacctgcccagctacatcaaggacaactttgaaagtgcccgggtgacagaggccaactgggagaccatccagggcggcgtgattggcagcggctgcggccagctggccccctatgcccatggagacagcctgtacttcaacggctgccagatccggcaggccgccaccaagcccctggacctgacccgggccagcaagatcatgtttgtgctgcagatcggctccatgagccagacagacagctgcaacagcgacctgagcggcccccatgctgtggacaaggctgtgctgctgcagtacagcgtgaacaacggcatcacctggcacgtgattgcccagcaccagcccaaggacttcacccaggcccagagggtgtcctacaacgtgcccctggaggccaggatgaagggcgtgctgctgcgctggtggcagcccaggcacaatggaactggacatgaccagtgggccctggaccacgtggaggtggtgctgaccaggaagcagaactacatgatgaacttcagccggcagcacggcctgcggcacttctacaacagaagaagaagaagcctgcggcgctacccctag

SEQ ID NO: 249485 - DNA, 10377 bp, Artificial Sequence
  derived and/or modified sequence
atggagcggagcggctgggcccggcagaccttcctgctggccctgttgcttggggcaaccttgcgagcccgcgcagccgctgggtactaccccaggttttcaccattttttttcctgtgcacacaccatggcgagcttgagggtgatggggaacagggagaggtgcttatcagcctccacattgccggcaatcccacatattatgtaccaggccaggaatatcatgtgactattagtaccagcacttttttcgatggcttacttgtcacaggcctttatacgtccacttcggtgcaggccagtcagagcatcggcggctcatcagcgttcgggtttgggatcatgtctgaccatcaattcggcaaccagtttatgtgctccgtagtggcgagccatgtgagtcatctgccaaccacaaatctttcctttatctggattgctcccccagccggaaccggctgtgtaaatttcatggccactgctacccacaggggacaagtcattttcaaggatgctctcgcccagcagctttgtgagcaaggcgctccaactgacgtgacagtgcatccacatctcgctgaaattcattctgatagtataattctccgcgatgactttgacagctaccaccagctccagctgaatccgaatatttgggtggagtgcaacaattgtgaaaccggggaacaatgcggcgcgatcatgcatggaaacgcagtgacgttttgcgagccatatggacctcgcgagctcataacaacaggcctcaacacaaccacagcgtcagtgctgcagttcagtatcggctccgggagttgccggttcagctactctgatcccagtattatcgtgctgtatgcgaaaaataattctgcggattggatccagctggagaagatacgggctccaagcaatgtttccactattatacatattttatacctgccagaggatgccaaaggggaaaacgttcaattccagtggaagcaggagaatcttcgcgttggagaagtgtacgaggcgtgttgggcactagacaatattctgatcattaacagcgcccataggcaggtcgtcctggaagatagtctcgacccagtggacacaggtaactggctgtttttcccaggggctacggttaagcacagctgtcagagcgacggcaacagtatctattttcatggcaacgaggggtctgaatttaattttgctactactagggatgtggacttgtccacagaggacatccaggaacagtggtccgaagaattcgaaagccagccgacaggctgggatgttcttggagcagtgatcggcaccgagtgcggtactattgaatcaggtctcagtatggtgttcctgaaggacggcgagagaaaactctgtacaccctccatggatacgactggatatggaaatcttaggttctacttcgtcatgggcgggatctgtgaccccgggaatagtcacgagaatgacattattctgtatgcgaagattgaggggagaaaggagcacatcacgctcgataccctctcctacagcagttataaggtgccatctctggtctctgttgtcatcaacccagaactgcagacaccagcaacaaagttctgcctgcggcaaaagaaccatcagggccacaacagaaacgtctgggccgtggatttcttccatgttctccccgtgttgccttccaccatgtctcatatgatccagttctccatcaatctgggctgcggcacacatcagccaggcaactcggtgtccctggagttctctaccaaccacgggcggagctggtcgctgttgcatacggagtgtctgcctgaaatctgcgctggaccacacctgccgcatagtactgtctatagcagtgagaattactcaggatggaacagaattactatccccctgcccaatgccgccttaactaggaacaccaggatccggtggcgccagacaggtcctatcttgggtaatatgtgggctatcgataatgtgtatatcggcccatcatgtctcaaattttgctcagggagaggccaatgtacgagacacggctgtaagtgcgaccccggcttctccggtcccgcgtgtgagatggcttcccagactttccccatgtttatctccgaatcttttggctcttcacgactgtccagttaccataacttctacagcattagaggggccgaggtctccttcggttgtggcgtccttgctagcgggaaagccctggttttcaataaagatggcaggcggcagcttataacgtcttttttggactcatcccagtcaagattcctacaattcactctgcgcttgggatccaagtctgtgctgagcacctgccgcgcgcccgaccagccaggggaaggggtgctgttgcactactcctacgacaatggcataacgtggaagttgttggaacattacagctaccttagctatcacgagccgcgtatcattagtgtggaactgccaggggacgccaaacagtttggaatacaattcaggtggtggcagccttaccactcctcgcagcgggaggacgtgtgggcaattgatgaaataatcatgacatcagtattatttaacagcatcagcttggattttactaatctggtggaggtgacacaaagcctcggtttctacttaggtaatgtgcaaccttattgtggtcacgattggactctgtgctttacaggcgattctaagcttgcctctagtatgcgctatgtcgagactcaaagtatgcagatcggcgcaagctatatgatccagttctcattggtgatgggatgcgggcaaaaatacacaccacatatggacaaccaggtcaagttggaatactccacaaaccacgggttaacctggcacctggtgcaagaggaatgcctcccaagcatgccatcgtgtcaggagtttacgagcgctagcatttaccacgcctctgaatttacgcagtggaggagagtcattgtactactgccccaaaaaacatggtcatctgccacacgtttccgatggtcccagtcctactacactgcgcaagatgagtgggccctcgattctatctatatcggccaacagtgtcccaacatgtgctccggacatggcagttgcgatcacgggatttgccgctgtgatcagggctatcagggcacggagtgtcacccagaggctgcgctccctagcacaattatgagtgactttgaaaatcagaacggatgggaaagcgactggcaggaggtaatcggtggagaaattgtaaaacctgagcagggttgtggggtaattagcagtggctcctctttatattttagcaaggctggaaaacggcagctggtgtcatgggacttggacaccagctgggttgattttgttcagttctacattcagatcggtggggaatcggccagctgcaacaaacccgatagccgggaggaaggagtcctactgcaatattctaataacggcgggatacagtggcatctgcttgcagagatgtacttctcggacttcagcaagccacggttcgtgtatctcgagctccctgcagcagccaagaccccatgtacacggtttcggtggtggcagcctgtattcagcggagaggattacgatcagtgggcagtggacgacattattattctgagcgagaagcaaaagcagatcatcccagtgatcaatcccacacttccacagaacttttatgagaaaccagcattcgattatccaatgaatcagatgtctgtatggttgatgctcgccaacgagggtatggtaaaaaatgagacattctgcgccgcaaccccatccgccatgatcttcggcaagtcggacggtgaccggttcgcggtgacccgcgacctgacacttaaaccagggtacgtgttacagtttaaactgaacatcggatgtgccaatcagttctcctctacagctccggtcttgttgcaatatagtcatgacgctggtatgtcttggttcctagtcaaggaaggttgttaccccgcgtccgccggcaaagggtgtgagggcaactctagagaactgtccgagccaaccatgtaccacaccggggattttgaggagtggactcgcatcacaattgtaatcccgagaagcctggcctccagcaaaacgcgtttcagatggatacaagaatcctcctcgcagaaaaatgtgcctccatttggactggatggcgtatacatctcggaaccttgcccttcatattgttctggacatggcgattgcataagcggggtttgtttttgtgacctggggtacactgctgcgcagggcacttgcgtgagtaacgttcccaatcataacgagatgttcgatcggtttgaaggaaaactgtcgcctttgtggtataagatcacgggggcccaagtggggaccggctgtggcacactcaatgatggtaagagcctgtactttaacggaccaggcaagagggaggcacggactgtcccccttgatacgagaaacatcaggttagtccaattctacattcagatcggctcgaaaacctccggcattacctgtataaagccacggacacgaaacgaaggcctgatcgtccaatacagtaatgataatggtatactttggcacctcctgcgcgagcttgacttcatgagctttctggagcctcagataatttcaattgatctgcctcaggatgctaaaacccccgccacggctttccggtggtggcagccccagcacggaaagcactcagcccagtgggccctggatgacgtgctgattgggatgaacgattcgtcccagactggattccaggacaagttcgacgggtccatcgacttacaggccaattggtacagaatacagggcggccaggttgatatagactgcctgtccatggacacggcactgatttttactgagaacattggaaaaccccgctacgccgagacatgggactttcatgtctctgctagcactttcctccagttcgagatgtctatgggctgttccaaaccattcagcaattcacactcagtgcagcttcagtactcacttaataatgggaaggactggcacctagtgacggaggagtgcgtccctccaacaatcggctgtctgcattatactgagagctccatttataccagtgagaggtttcaaaactggaagcggatcacagtgtatctgcctttgagcacaatttcccctagaactagatttagatggatccaggcaaactacaccgtgggggccgattcctgggccattgacaacgtggtgcttgccagtgggtgcccttggatgtgctctggccgcgggatttgtgacgcagggaggtgcgtatgcgacaggggcttcggcggaccttattgtgtgcctgtggtgcctttacctagtatactgaaagacgacttcaacgggaacttgcatcctgacttatggccagaagtctatggtgccgaacggggaaacctgaacggagagactatcaagagcggtacatccctgatctttaagggggaaggactgcgaatgttaataagtagggacctagattgcaccaacacaatgtacgttcagttttccttacggttcattgctaaaagtacgcccgaacgatcccacagtatcctactccaattcagtatctccggtgggatcacttggcaccttatggacgagttttatttcccgcagaccacgaatatactgttcataaacgttccgttaccttatacagcccagactaatgctacaaggttccgtctctggcaaccatacaacaatggaaaaaaagaggagatctggatcgtggatgattttataatcgacgggaataacgtcaacaaccccgtgatgttactggacacttttgacttcgggcctcgggaagataactggtttttctacccaggggggaacattggactctactgcccatacagctcaaagggcgcccccgaggaagactcagccatggtctttgtgtcaaacgaagtcggcgagcacagcatcactacaagagatctgaatgtgaacgaaaatactataatccaatttgaaatcaatgtcgggtgcagcaccgactcatctagtgcagaccctgtgaggctggagttctccagagacttcggagcaacttggcatctgctgcttccgctctgctatcattccagctctcacgtctcctctttgtgtagtaccgaacaccaccctagttcaacatactatgccggtacaatgcaaggatggaggagagaggtggtgcactttgggaagctccatctgtgtgggagtgtgcgcttccgctggtaccagggtttctacccagcaggatctcagcccgtgacatgggctatcgataacgtctacatcgggccacagtgcgaggagatgtgtaacggacagggcagttgcatcaacggcactaaatgtatttgtgatccagggtatagcgggcccacctgcaagatcagtaccaagaacccagactttttgaaagacgatttcgaggggcagctagagtcagacagattcctgctgatgtccgggggcaaacccagccggaaatgcggtatactgtcttccggcaacaacttattcttcaacgaagatggtctgcggatgctgatgacgcgtgatcttgatctgagccacgcaaggtttgttcagttttttatgcggttgggatgtggtaagggagtacctgatcccagatcacagcccgtgctactgcaatacagtctcaacggtggcttaagctggtctcttctacaagagtttctcttcagcaatagcagtaacgtcggcagatatatagcacttgagatccctctcaaggccaggagtggttctacacggttaagatggtggcagccttcagaaaatgggcacttctacagcccatgggtgattgatcaaatactgattggaggtaatatctccggcaataccgtcttggaggacgatttcacaactttagatagtcgtaagtggcttttgcatcccggcggaaccaagatgccagtgtgtggatccactggggatgccttagtcttcatagagaaggcatcgacgcgctacgttgtgtcaactgatgtggcggtcaatgaggactcatttctgcagatagacttcgccgctagctgctcagtgaccgactcctgttatgcaatcgagctggaatactctgtggaccttggactgagttggcaccctctggtccgcgattgcctgccgactaatgtggagtgttcaaggtaccacctccaacgaatcctagtttctgacaccttcaacaagtggacaaggatcactctgcccctccctccttatacccgaagccaggcaacccgatttcggtggcaccagccagcgcctttcgacaagcaacagacgtgggcaatcgacaacgtatacatcggagacggttgtatcgacatgtgttctggacacgggcggtgtattcaggggaattgcgtatgtgatgagcaatggggaggcctctactgcgacgatcccgagacttctctgccaacccaattaaaggacaattttaatcgcgccccatcctcacagaactggctgacggtaaacggtggcaagctgagcacagtgtgcggagccgtcgcttcaggaatggccctgcatttcagcggaggctgctcacggctgctcgttaccgtggacctgaatttaaccaatgcagagtttatccagttctacttcatgtatggttgcctaataacacctaataacagaaatcaaggtgtgcttctggagtattccgtcaacggaggaatcacatggaatctgttaatggagattttctatgaccagtattccaaacctggattcgttaacattctgttaccacccgatgccaaggaaatagcaactcgattcagatggtggcagccccggcatgatgggttagaccagaacgattgggcgattgacaatgtgcttatttctggctccgccgatcagcgaactgttatgctggacaccttcagtagcgccccggtgcctcagcacgagcgaagccccgctgatgccggtccggtaggtaggatcgcattcgatatgttcatggaggacaaaactagcgtgaacgagcattggctgtttcacgacgactgcactgtggagcggttctgtgatagtcccgacggggtcatgctttgcggtagtcacgatggacgagaagtgtacgcagttacacacgacctcacccctactgaaggatggatcatgcaatttaagatttcagttgggtgtaaggtcagcgagaagatcgcacagaaccagatccacgtgcagtatagtaccgacttcggagtgagctggaactatctggtgccacagtgccttccagccgaccccaagtgctctggctcagtgagtcagccttcagtttttttccctaccaaaggctggaaacggattacatacccattgccagaaagcctcgtagggaaccctgttcgtttcagattttaccagaaatattcagatatgcaatgggccattgacaatttctacttgggacccggatgtctggataactgtcgcgggcacggggactgcctgagggagcaatgtatctgcgaccccggctactctgggcccaattgctatctgacgcacaccttgaaaacattcttgaaagagaggttcgacagcgaagagataaagcccgatctttggatgtccctggagggcggctcaacctgtactgaatgcggcatccttgcagaagatacggctctctactttggcggtagtactgtgcggcaggctgtgactcaggatctggatctgagaggtgccaagtttctccagtactgggggagaatcggatctgagaacaatatgactagctgccaccgccctatctgtagaaaggagggagtgcttctcgattatagcactgacggaggtataacttggacactcctacatgagatggattaccagaagtacatcagcgtgcgtcacgattacattttgcttcctgaggacgcccttaccaatacaacacgccttcggtggtggcaaccttttgtgatttcaaacggtatcgtcgtctccggcgtggagagggcccagtgggccctcgataatatcctcatcggaggcgcagagataaatccctcgcagctagtggacacatttgacgatgagggtacgagccatgaggaaaactggtcattctaccctaatgccgtccgaactgctggcttctgtggcaatccctcttttcacctttattggcccaataagaaaaaggacaagactcacaatgctctgtcgtcgcgagagctcattattcagcctggctatatgatgcagttcaagatcgtagtgggctgcgaggccacctcttgcggagatttgcactccgtcatgctggaatatactaaggacgccaggtccgacagctggcaacttgttcagacccagtgtctaccaagcagttctaatagcattggttgctctcccttccagtttcacgaggcaaccatctacaattcggtgaactcgtcttcgtggaagcgtatcacaattcagctgccagaccacgtgagcagttccgccacccagttccggtggatccaaaaaggtgaggagactgagaagcagtcttgggcaatagaccatgtgtacatcggcgaggcctgtcctaagctgtgttccgggcacggctactgcactacaggcgcaatctgcatttgcgacgagtctttccagggtgacgattgtagcgtgttcagtcacgatcttcccagttacatcaaggacaattttgaaagcgccagggtcactgaggcaaattgggaaacaatccagggaggggtgatcgggtcaggatgtggccaattggctccctacgcccacggcgattcactttacttcaatgggtgccagatacggcaggccgccaccaaaccgctggatttaaccagggcctcgaaaatcatgttcgtcctgcagattggatctatgagccagactgactcttgcaactcagatctgtctggacctcacgcagtggacaaggccgtcctgcttcaatacagtgtgaataatggcatcacctggcatgttatagcccaacatcagcccaaagacttcacacaggcacagagagtgtcatataatgttcccctggaggctcgtatgaaaggcgtcttactacggtggtggcaacctagacacaatggcactggacacgaccagtgggccctggatcatgtggaagttgtactaaccagaaagcagaattatatgatgaacttctcccgccaacatgggctgcgccatttttacaatcggcgacggagatctcttaggcgatacccttag

SEQ ID NO: 249486 - DNA, 10377 bp, Artificial Sequence
  derived and/or modified sequence
atggagcggagcggttgggctcgccagactttccttctcgccctcttgctaggcgctactttaagagccagggcggcagccggatactatcctagattttccccgttcttctttctttgtacccatcatggggaactggagggggacggggaacagggcgaggttctcatctctctgcatattgcgggaaacccaacatattatgtgcctggccaagagtaccacgtgactattagcacgtctactttttttgacggtctgctggtcactgggctgtatacttcgactagtgtacaggcctcacagtcgattggcggttcttcagccttcggctttgggatcatgagcgaccatcagtttggtaaccagttcatgtgcagtgtggtcgcttcgcatgtatcccacttgccaaccactaatctgtctttcatctggatcgctccccctgcaggaactggttgtgtcaacttcatggcaacagccacacacagaggccaagtaattttcaaagacgcgctggcccagcaactgtgtgaacagggggcaccaactgatgtgaccgttcatccccacctagctgaaatccattcggactccatcattttgcgagacgactttgattcataccaccaattgcagttgaatcccaacatttgggttgaatgtaataactgtgagaccggagaacagtgcggggctataatgcacgggaatgcagtgacattttgtgaaccatatggtccccgagaacttatcactactggactgaacacgactaccgcctccgtgctgcagttctctataggttctggcagctgcaggtttagttacagtgatccctctattatcgtgctctacgctaagaataatagtgctgattggattcagctagaaaagattagagctccctcgaacgtgtctaccataatccacattctttacttgccagaggacgcaaaaggggagaatgtgcagtttcagtggaagcaggagaacctcagagttggcgaggtctatgaagcttgttgggcactggataatattctgattattaattcagctcacaggcaggtggtgctggaagatagtctggaccctgtggacactgggaactggctcttcttcccaggggctacagtgaaacacagctgccagtcagatggtaactcaatctacttccatggcaatgaagggtctgagttcaattttgcgaccacaagagacgtggacctatccaccgaagatatccaggaacagtggtccgaagaattcgaaagccaacccaccggatgggatgtgctaggcgctgtcatagggactgagtgcgggactatcgagtccgggctcagcatggtctttttgaaggatggggaacgcaaactttgtacccccagcatggacacaacagggtacgggaacctcagattctattttgtgatgggaggcatttgtgatccgggaaatagtcacgagaatgacatcattctctacgcaaagatcgaaggtaggaaggagcacatcacccttgacacgctgtcctattcatcatataaagttcccagcttggtctccgtggtgatcaacccagagctccagacacctgctactaaattttgccttaggcagaagaaccaccaaggacacaataggaatgtatgggcggttgacttcttccatgtccttcctgtgctaccaagcaccatgtcccacatgatccaattcagcatcaatctgggctgcgggacacaccaaccagggaattctgtgagtctggaattttcaacaaatcatgggaggtcttggagcttgctgcacacagagtgccttccagaaatctgtgccggacctcacctgccccattccactgtgtactctagtgaaaattacagtggttggaataggattacaatccctctccccaatgccgctcttacccgaaatacccgaatccgatggcggcagaccggtccaatcctgggcaacatgtgggcaatagacaacgtgtacatcgggccaagctgcctcaagttctgcagtgggcgagggcagtgtacacgccacgggtgcaagtgcgatcccggattttccggacctgcttgcgagatggcaagtcaaaccttcccaatgtttattagcgaaagtttcggctcaagtcggctttcctcctaccataatttttatagtattcgaggggctgaggtctcttttggctgtggcgtcctggcttctggcaaggccctagtattcaacaaagacggaaggcggcagctgattacatcattcctggacagctctcagagcagattcttacagttcacccttcggcttggaagcaaatctgtgctgtccacgtgtagagcacctgatcagccaggggagggagtgctcctgcactatagctacgataacggaattacctggaaactgctggagcattacagttatttgagctaccatgagccaaggattatctcagtagagctgcctggtgatgcaaaacagtttggcattcagttccgctggtggcagccctaccatagcagtcagcgcgaagatgtctgggccatcgatgagatcatcatgacatctgtcctttttaatagcatttctttggactttaccaacctggtcgaggtgacccagtctttaggcttttacctcggtaacgttcagccttactgtggacacgactggaccctctgtttcaccggtgacagcaaactggcaagcagtatgagatatgtagaaacccagagcatgcaaatcggcgcttcttacatgatacagttctctctcgtcatggggtgcggacagaagtacaccccacatatggacaatcaggtcaagttggaatatagcactaatcacggcttaacgtggcaccttgtgcaagaggaatgtctacctagcatgccctcttgccaagagttcaccagtgcttccatataccatgcttcagagtttacgcagtggcgtcgggtgatcgtgcttttgccgcagaaaacctggtccagtgctacccggttccgatggtcgcagtcctactacacagcccaggacgaatgggccctggattctatatacattgggcaacagtgcccgaacatgtgctctggtcatgggtcttgcgaccacggaatctgccgttgcgaccaaggctaccaggggacggagtgtcacccagaagccgcattgccctctaccatcatgtccgattttgagaaccaaaacggttgggagtctgattggcaggaggtcatcggaggagaaatagtcaaaccagaacagggttgtggcgtaatctccagcggtagctccctttacttctcaaaggcaggcaaacgacagcttgtctcttgggacctggacacctcctgggttgattttgttcagttctatatccagatcggtggcgaaagcgcaagttgtaataaacctgactcaagggaggaaggggtcctcctccaatacagtaataatgggggaatccagtggcacctgttagcggagatgtacttctccgatttttctaagccgaggttcgtgtacctggagctccctgctgctgccaagaccccatgtactcggttccgctggtggcagcctgtgttttcaggggaggactatgaccagtgggctgtagacgacataatcatcttgtccgagaaacagaagcagatcattcccgtcattaatcccacactgccccagaatttttatgaaaagcctgccttcgactatcccatgaatcaaatgagtgtgtggctgatgctggccaatgaggggatggtaaaaaacgagacgttttgcgctgcaactcctagcgccatgattttcgggaagtctgacggagaccgcttcgctgtgacccgggatctgaccctcaaaccaggatacgtcctgcagttcaagctgaatatcggctgtgcaaaccagttttcatccactgccccagtgctcctgcagtactctcatgacgcagggatgtcctggttcctcgtgaaagagggctgttacccagcatcggctggtaagggctgtgaaggtaatagcagagagctgtccgagccaactatgtaccacaccggggatttcgaggaatggaccaggattaccattgtgatccctcgcagtctggcatcgtcaaaaacacgttttagatggatccaggagagttcttcccagaagaatgtacctccttttggattggatggtgtgtacatatccgagccctgcccctcatattgctctggacatggcgactgcatctctggggtatgtttttgcgatcttggatacaccgctgctcagggtacctgcgtcagcaatgtccctaaccacaacgagatgttcgaccgcttcgaggggaagctctctcctctgtggtacaagattaccggggcacaggtggggaccggttgtgggaccctaaatgatggcaaatcactgtactttaatggtcctggcaagagggaagctcgaaccgtcccactagacacacgcaacatccggctggtccagttttatatacagattgggtcaaagacaagcggaataacgtgcattaagcccaggaccagaaacgaagggctaattgtacagtatagtaatgataacggtatcttgtggcatctgcttcgggaactggatttcatgagctttctggaaccgcagattataagcatcgaccttcctcaagacgccaaaacccccgcaaccgcttttagatggtggcagccacaacacgggaaacatagtgcgcagtgggcactagacgatgtgctgatcggaatgaacgatagcagtcagacgggattccaggataaatttgacggcagcatcgacctgcaggcaaactggtaccgtatacaagggggacaggtcgacatcgactgtttgagcatggatacagctcttatcttcactgaaaatatcgggaaacccaggtacgcggagacttgggacttccatgtaagcgcctccacgttcctgcagtttgaaatgtcaatgggctgtagcaagcctttttcaaatagtcacagtgtccagctgcaatacagcctgaacaatggtaaggattggcatctcgtcactgaggaatgcgtaccacctacaatcggttgcctgcattatacagagtcatcaatctatacctccgagcggttccaaaattggaagcgtataactgtatacctccctctgtccacaataagccccaggacccgattccgatggatccaggctaactacaccgttggggctgacagctgggccatcgacaatgttgttctggcctcaggctgtccctggatgtgcagtgggaggggaatttgcgatgcaggacgctgtgtgtgtgacagaggcttcgggggtccttattgtgtccccgtcgtgccattgccctccatccttaaagatgattttaacggcaatttgcacccagatctttggcctgaggtctatggagccgaacggggaaatctgaacggtgaaacaattaagtctgggactagtctgatcttcaagggagagggcctgaggatgctaatctcacgggatcttgactgcactaacacaatgtatgtgcaattcagtttgcgctttatcgcaaaaagcacccctgaaaggagccactccatcctgctgcaattttcaatctccggcggtattacttggcacctgatggacgagttctacttccctcaaaccacgaatatcttgtttataaacgttccattaccttataccgcccagaccaatgccactaggttccgcctctggcagccatataacaacggcaaaaaggaggagatttggatcgtggacgactttatcatcgacgggaataatgtcaacaaccccgttatgttactggacaccttcgatttcggacccagagaagacaattggttcttttatcccggaggtaatatcgggctgtattgcccatactccagcaagggagcacccgaagaagactcagccatggtcttcgtgtccaacgaagtgggagagcattctatcacaacacgggacctgaatgttaacgagaacaccatcattcaatttgaaattaacgtgggatgttcaacagattcgagctcagctgatcctgtccgcttagagttcagcagagactttggcgctacatggcatttactcttgccgctgtgctaccatagctcatctcatgtatctagcctgtgctccacagagcaccacccatcttcaacttattacgcgggaacgatgcaaggttggcggagagaagtggttcatttcggtaagctgcatctctgtggatccgtgagattcaggtggtaccagggattctaccccgcaggcagccaacctgttacatgggcaatcgacaacgtgtacatcggccctcagtgtgaagaaatgtgcaacggacaggggtcgtgtatcaacggaacgaagtgcatatgtgaccccggttatagcggcccaacatgtaagatttcaacaaagaaccctgatttcctgaaggatgattttgaaggacagctcgagtctgatcgcttcctgctgatgagtgggggaaagccttcaagaaaatgtggtattctgagctcaggaaacaatctgtttttcaacgaggacggcctacgcatgctcatgactcgggacttggatttgtcgcacgcccgattcgttcagttctttatgaggctcggatgtgggaagggcgtccccgaccctagatctcagcccgtgctgctccagtactctttgaatggaggattgagctggtcattacttcaagaatttctgttttcgaatagctcaaacgtgggtagatatatcgctcttgaaatccctttgaaggccagatccggctctaccaggttgagatggtggcagccttccgaaaatggacatttttattcaccttgggtgatcgatcaaatactgataggtggcaacatcagtggcaatactgtactcgaggacgactttaccaccttagacagccggaagtggttactgcaccctggaggaactaaaatgcctgtgtgtggcagtactggggatgctctggttttcattgaaaaggcatcaacacgatacgttgtttccacagacgtcgctgtgaacgaagattcttttttacagattgattttgctgcttcctgtagcgtcactgacagctgttatgctatagagcttgaatactccgttgacctgggcttatcatggcatccactggtgagggattgcctccctacaaatgtcgagtgtagcagataccatctgcagaggatcctggtaagtgacacctttaataaatggactcgtattactctccctctacccccttatacacggtcacaggccacaaggtttcggtggcatcaacccgcacccttcgataagcagcagacctgggcaattgataatgtgtatattggcgacggttgcatcgacatgtgttctggtcacggcaggtgtatccaggggaactgtgtgtgtgatgagcagtggggtgggctgtattgtgatgatccagagacgagtctccccactcagctgaaggacaacttcaaccgggctccttcttcccagaattggcttaccgtgaatgggggaaaattaagcacagtgtgcggcgctgtggccagtggcatggcattgcacttctcaggagggtgttcaaggcttctagtcaccgtggacctaaatctgaccaatgccgaatttatccagttttatttcatgtacgggtgtctcatcacccccaataacaggaatcaaggcgtcctactcgagtattctgtcaacggcggtatcacgtggaacctcctgatggagattttctatgatcaatattctaagcccggttttgtcaatattttgttacctcccgacgcaaaagaaattgccacaagatttcgctggtggcaaccaagacatgatggactggatcagaatgattgggcgattgataatgtcttgatttcaggatccgccgatcaacgcacagttatgctggacactttttcatcggcacccgtccctcagcatgagcggtcgcctgcagacgccggtccagtcggaaggatcgcttttgatatgttcatggaagacaaaacctccgtgaatgaacattggttgttccatgacgactgcacagtcgaacgattctgtgattctcctgacggggtcatgctctgcgggagtcacgatggcagggaagtctacgctgtcacccacgatctgacccctacagagggctggattatgcaatttaaaataagcgtcggttgtaaagtttcggagaagatagctcagaaccagatccacgtgcaatattcgaccgactttggggtttcttggaattacctggttccccagtgcctccctgccgaccccaagtgctctgggtctgttagccagccaagcgtgttcttccctacgaaggggtggaagagaattacctaccccctccccgaatcgctcgtcggcaacccagtgagattcagattctatcagaagtatagtgacatgcagtgggctatagacaacttttatctgggacccggatgcttagataattgtcggggacacggcgactgtctgcgggaacagtgcatatgcgacccgggttacagcgggcctaactgttaccttacacacacactgaaaacattcttgaaggagagatttgatagtgaggaaattaaacctgatctgtggatgagtctggaaggaggtagcacttgtaccgagtgcgggatcctagccgaggataccgcgctatatttcggaggctcaaccgtccgacaggcagtcacgcaagacttggatttgcgtggcgctaagttcctgcagtattggggtcgaatcgggtccgaaaacaatatgaccagctgccaccggcctatctgtaggaaggagggcgtccttttggattacagtaccgatggtgggattacttggacactgctccacgagatggattatcagaagtatatcagcgtcaggcatgactatattcttctgcctgaagatgcccttacgaataccacgcggttgagatggtggcagccttttgtaatctcgaacggcatcgtagtgagcggagtggaacgggcacagtgggctcttgacaacattctcattggcggagctgagattaatccatcccagcttgtggatactttcgacgatgagggtacttctcacgaggagaactggagtttttaccccaatgctgttagaacagcagggttctgtggaaatccgtccttccacttgtattggccgaacaaaaaaaaggataagactcacaatgcattaagcagtagggaactgatcatacagcccggttacatgatgcagtttaagatcgttgtcgggtgtgaggccacttcttgtggagatttgcacagcgtcatgctagaatacacgaaggacgcacgctccgacagctggcagctggtgcaaacacagtgtctgccctcctcatctaactctatcggctgtagtcccttccagtttcacgaggcaactatctataattcggttaactcttcttcctggaagcggatcaccattcagctgccggatcacgtgtcctcctcagctacccagttccgctggattcagaaaggcgaggagactgaaaagcaatcttgggcgatcgatcatgtttatatcggcgaagcatgtccaaagctctgcagcgggcatggttactgcactaccggggcaatttgtatatgtgacgagtctttccagggcgacgattgctcagtgttctctcacgaccttccatcatatataaaggataacttcgagtctgctcgggtcacagaagcaaactgggaaactatccaaggaggagtgatcggcagcggctgtggtcagctggcgccttatgcccatggagattcactgtacttcaatgggtgtcagattagacaagccgctaccaagccgctggacctcactcgagcaagtaaaatcatgttcgtcctgcagataggatcaatgagtcaaacagattcttgcaacagtgatttgtccggtccgcatgccgtcgataaggcagtgctcctgcagtattctgtcaataacgggatcacctggcatgttatcgcacagcatcagcctaaggacttcacccaagcacagcgagtgagctacaatgtgccactggaagccagaatgaagggcgttctgctgcgctggtggcagcctagacacaacggcactggccacgaccagtgggcgctggaccacgttgaggtagtgcttactcgcaagcagaactatatgatgaacttctcgcggcagcacggcttacgccacttctataatcgcaggagaaggagtctgcggcgttacccctaa

SEQ ID NO: 249487 - DNA, 11565 bp, Artificial Sequence
  derived and/or modified sequence
ctcggcgggggcccgctcccaggcccgctcccgagcccgttccgctcccgtccgccttcttctcgccttctctccgcgtggctcctccgtcccggcgtctccaaaactgaatgagcgagcggcgcgtagggcgcgcggcggcggcggcggcggcggcggcatggagcgcagtggctgggcccggcagactttcctcctagcgctgttgctgggggcgacgctgagggcgcgcgcggcggctggctattacccccgcttttcgcccttctttttcctgtgcacccaccacggggagctggaaggggatggggagcagggcgaggtgctcatttccctgcatattgcgggcaaccccacctactacgttccgggacaagaataccatgtgacaatttcaacaagcaccttttttgacggcttgctggtgacaggactatacacatctacaagtgttcaggcatcacagagcattggaggttccagtgctttcggatttgggatcatgtctgaccaccagtttggtaaccagtttatgtgcagtgtggtagcctctcacgtgagtcacctgcccacaaccaacctcagtttcatctggattgctccacctgcgggcacaggctgtgtgaatttcatggctacagcaacacaccggggccaggttattttcaaagatgctttagcccagcagttgtgtgaacaaggagctccaacagatgtcactgtgcacccacatctagctgaaatacatagtgacagcattatcctgagagatgactttgactcctaccaccaactgcaattaaatccaaatatatgggttgaatgtaacaactgtgagactggagaacagtgtggcgcgattatgcatggcaatgccgtcaccttctgtgaaccatatggcccacgagaactgattaccacaggccttaatacaacaacagcttctgtcctccaattttccattgggtcaggttcatgtcgctttagttattcagaccccagcatcatcgtgttatatgccaagaataactctgcggactggattcagctagagaaaattagagccccttccaatgtcagcacaatcatccatatcctctaccttcctgaggacgccaaaggggagaatgtccaatttcagtggaagcaggaaaatcttcgtgtaggtgaagtgtatgaagcctgctgggccttagataacatcttgatcatcaattcagctcacagacaagtcgttttagaagatagtctcgacccagtggacacaggcaactggcttttcttcccaggagctacagttaagcatagctgtcagtcagatgggaactccatttatttccatggaaatgaaggcagcgagttcaattttgccaccaccagggatgtagatctttccacagaagatattcaagagcaatggtcagaagaatttgagagccagcctacaggatgggatgtcttgggagctgtcattggtacagaatgtggaacgatagaatcaggcttatcaatggtcttcctcaaagatggagagaggaaattatgcactccatccatggacactaccggttatgggaacctgaggttttactttgtgatgggaggaatttgtgaccctggaaattctcatgaaaatgacataatcctgtatgcaaaaattgaaggaagaaaagagcatataacactggataccctttcctattcctcatataaggttccgtctttggtttctgtggtcatcaatcctgaacttcagactcctgctaccaaattttgtctcaggcaaaagaaccatcaaggacataataggaatgtctgggctgtagactttttccatgtcttgcctgttctcccttctacaatgtctcacatgatacagttttccatcaatctgggatgtggaacgcatcagcctggtaacagtgtcagcttggaattttctaccaaccatgggcgctcctggtccctccttcacactgaatgcttacctgagatctgtgctggaccccacctcccccacagcactgtctactcctctgaaaactacagtgggtggaaccgaataacaattccccttcctaacgcagcactaacccggaacaccaggattcgctggagacaaacaggaccaatccttggaaacatgtgggcaattgataatgtttatattggcccgtcatgtctcaaattctgttctggcagaggacagtgcactagacatggttgcaagtgtgaccctggattttctggcccagcttgtgagatggcatcccagacattcccaatgtttatttctgaaagctttggcagttccaggctctcctcttaccataacttttactctatccgtggtgctgaagtcagctttggttgtggtgtcttggccagtggtaaggccctggttttcaacaaagatgggcggcgtcagctaattacatctttccttgacagctcacaatccaggtttctccagttcacactgagactggggagcaaatctgttctgagcacgtgcagagcccctgatcagcctggtgaaggagttttgttgcattattcttatgataatgggataacttggaaactcctggagcattattcatatctcagctatcatgagcccagaataatctccgtagaactaccaggtgatgcaaagcagtttggaattcagttcagatggtggcaaccgtatcattcttcccagagagaagatgtatgggctattgatgagattatcatgacatctgtgcttttcaacagcattagtcttgactttaccaatcttgtggaggtcactcagtctctgggattctaccttggaaatgttcagccatactgtggccacgactggaccctttgttttacaggagattctaaacttgcctcaagtatgcgctatgtggaaacacaatcaatgcagataggagcatcctatatgattcagttcagtttggtgatgggatgtggccagaaatacaccccacacatggacaaccaggtgaagctggagtactcaaccaaccacggccttacctggcacctcgtccaagaagaatgccttccaagtatgccaagttgtcaggaatttacatcagcaagtatttaccatgccagtgagtttacacagtggaggagagtcatagtgcttcttccccagaaaacttggtccagtgctacccgtttccgctggagccagagctattacacagctcaagacgagtgggctttggacagcatttacattgggcagcagtgccccaacatgtgcagtgggcatggctcatgcgatcatggcatatgcaggtgtgaccaggggtaccaaggcactgaatgccacccagaagctgcccttccgtccacaattatgtcagattttgagaaccagaatggctgggagtctgactggcaagaagttattgggggagaaattgtaaaaccagaacaagggtgtggtgtcatctcttctggatcatctctgtacttcagcaaggctgggaaaagacagctggtgagttgggacctggatacttcttgggtggactttgtccagttctacatccagataggcggagagagtgcttcatgcaacaagcctgacagcagagaggagggcgtcctccttcagtacagcaacaatgggggcatccagtggcacctgctagcagagatgtacttttcagacttcagcaaacccagatttgtctatctggagcttccagctgctgccaagaccccttgcaccaggttccgctggtggcagcccgtgttctcaggggaggactatgaccagtgggcagtcgatgacatcatcattctgtccgagaagcagaagcagatcatcccagttatcaatccaactttacctcagaacttttatgagaagccagcttttgattaccctatgaatcagatgagtgtgtggttgatgttggctaatgaaggaatggttaaaaatgaaaccttctgtgctgccacaccatcagcaatgatatttggaaaatcagatggagatcgatttgcagtaactcgagatttgaccctgaaacctggatatgtgctacagttcaagctaaacataggttgtgccaatcaattcagcagtactgctccagttcttcttcagtactctcatgatgctggtatgtcctggtttctggtgaaagaaggctgttacccggcttctgcaggcaaaggatgcgaaggaaactccagagaactaagtgagcccaccatgtatcacacaggggactttgaagaatggacaagaatcaccattgttattccaaggtctcttgcatccagcaagaccagattccgatggatccaggagagcagctcacagaaaaacgtgcctccatttggtttagatggagtgtacatatccgagccttgtcccagttactgcagtggccatggggactgcatttcaggagtgtgtttctgtgacctgggatatactgctgcacaaggaacctgtgtgtcaaatgtccccaatcacaatgagatgttcgataggtttgaggggaagctcagccctctgtggtacaagataacaggtgcccaggttggaactggctgtggaacacttaacgatggcaaatctctctacttcaatggccctgggaaaagggaagcccggacggtccctctggacaccaggaatatcagacttgttcaattttatatacaaattggaagcaaaacttcaggcattacctgcatcaaaccaagaactagaaatgaagggcttattgttcagtattcaaatgacaatgggatactctggcatttgcttcgagagttggacttcatgtccttcctggaaccacagatcatttccattgacctgccacaggacgcgaagacacctgcaacggcatttcgatggtggcaaccgcaacatgggaagcattcagcccagtgggctttggatgatgttcttataggaatgaatgacagctctcaaactggatttcaagacaaatttgatggctctatagatttgcaagccaactggtatcgaatccaaggaggtcaagttgatattgactgtctctctatggatactgctctgatattcactgaaaacataggaaaacctcgttatgctgagacctgggattttcatgtgtcagcatctacctttttgcagtttgaaatgagcatgggctgtagcaagcccttcagcaactcccacagtgtacagctccagtattctctgaacaatggcaaggactggcatcttgtcaccgaagagtgtgttcctccaaccattggctgtctgcattacacggaaagttcaatttacacctcggaaagattccagaattggaagcggatcactgtctaccttccactctccaccatttctcccaggacccggttcagatggattcaggccaactacactgtgggggctgattcctgggcgattgataatgttgtactggcctcagggtgcccttggatgtgctcaggacgagggatttgtgatgctggacgctgtgtgtgtgaccggggctttggtggaccctattgtgttcctgttgttcctctgccctcgattcttaaagacgatttcaatgggaatttacatcctgacctttggcctgaagtgtatggtgcagagagggggaatctgaatggtgaaaccatcaaatctggaacatctctaatttttaaaggggaaggactaaggatgcttatttcaagagatctagattgtacaaatacaatgtatgtccagttttcacttagatttatagcaaaaagtaccccagagagatctcactctattctgttacaattctccatcagtggaggaatcacttggcacctgatggatgaattttactttcctcaaacaacgaatatacttttcatcaatgttcccttgccatacactgcccaaaccaatgctacaagattcagactctggcaaccttataataacggtaagaaagaagaaatctggattgttgatgacttcattatcgatggaaataatgtaaacaaccctgtgatgctcttggatacatttgattttgggcccagagaagacaattggtttttctatcctggtggtaacatcggtctttattgtccatattcttcaaagggggcacctgaagaagattcagctatggtgtttgtttcaaatgaagttggtgagcattccattaccacccgtgacctaaatgtgaatgagaacaccatcatacaatttgagatcaacgttggctgttcgactgatagctcatccgcggatccagtgagactggaattttcaagggacttcggggcgacctggcaccttctgctgcccctctgctaccacagcagcagccacgtcagctctttatgctccaccgagcaccaccccagcagcacctactacgcaggaaccatgcagggctggaggagggaggtcgtgcactttgggaagctgcacctttgtggatctgtccgtttcagatggtaccagggattttaccctgccggctctcagccagtgacatgggccattgataatgtctacatcggtccccagtgtgaggagatgtgtaatggacaggggagctgtatcaatggaaccaaatgtatatgtgaccctggctactcaggtccaacctgtaaaataagcaccaaaaatcctgattttctcaaagatgatttcgaaggtcagctagaatctgatagattcttattaatgagtggtgggaaaccatctcgaaagtgtggaatcctttctagtggaaacaacctctttttcaatgaagatggcttgcgcatgttgatgacacgagacctggatttatcacatgctagatttgtgcagttcttcatgagactgggatgtggtaaaggcgttcctgaccccaggagtcaacccgtgctcctacagtattctctcaacggtggcctctcgtggagtcttcttcaggagttccttttcagcaattccagcaatgtgggcaggtacattgccctggagatacccttgaaagcccgttctggttctactcgccttcgctggtggcaaccgtctgagaatgggcacttctacagcccctgggttatcgatcagattcttattggaggaaatatttctggtaatacggtcttggaagatgatttcacaacccttgatagtaggaaatggctgcttcacccaggaggcaccaagatgcccgtgtgtggctctactggtgatgccctggtcttcattgaaaaggccagcacccgttacgtggtcagcacagacgttgccgtgaatgaggattccttcctacagatagacttcgctgcctcctgctcagtcacagactcttgttatgcgattgaattggaatactcagtagatcttggattgtcatggcacccattggtaagggactgtctgcctaccaatgtggaatgcagtcgctatcatctgcaacggatcctggtgtcagacactttcaacaagtggactagaatcactctgcctctccctccttataccaggtcccaagccactcgtttccgttggcatcaaccagctccttttgacaagcagcagacatgggcaatagataatgtctatatcggggatggctgcatagacatgtgcagtggccatgggagatgcatccagggaaactgcgtctgtgatgaacagtggggtggcctgtactgtgatgaccccgagacctctcttccaacccaactcaaagacaacttcaatcgagctccatccagtcagaactggctgactgtgaacggagggaaattgagtacagtgtgtggagccgtggcgtcgggaatggctctccatttcagtgggggttgtagtcgattattagtcactgtggatctaaacctcactaatgctgagttcatccaattttacttcatgtatgggtgcctgattacaccaaacaaccgtaaccaaggtgttctcttggaatattctgtcaatggaggcattacctggaacctgctcatggagattttctatgaccagtacagtaagcccggatttgtgaatatccttctccctcctgatgctaaagagattgccactcgcttccgctggtggcagccaagacatgacggcctggatcagaacgactgggccattgacaatgtcctcatctcaggctctgctgaccaaaggaccgttatgctggacaccttcagcagcgccccagtaccccagcatgagcgctcccctgcagatgccggccctgtcgggaggatcgcctttgacatgtttatggaagacaaaacttcagtgaatgagcactggctattccatgatgattgtacagtagaaagattctgtgactcccctgatggtgtgatgctctgtggcagtcatgatggacgggaggtgtatgcagtgacccatgacctgactcccactgaaggctggattatgcaattcaagatctcagttggatgtaaggtgtctgaaaaaattgcccagaatcaaattcatgtgcagtattctactgacttcggtgtgagttggaattatctggtccctcagtgcttgcctgctgacccaaaatgctctggaagtgtttctcagccatctgtattctttccaactaaagggtggaaaaggatcacctacccacttcctgaaagcttagtgggaaatccggtaaggtttaggttctatcagaagtactcagacatgcagtgggcaatcgataatttctacctgggccctggatgcttggacaactgcaggggccatggagattgcttaagggaacagtgcatctgtgatccgggatactcagggccaaactgctacttgacccacactctgaagactttcctgaaggaacgctttgacagtgaagaaatcaaacctgacttatggatgtccttagaaggtggaagtacttgcactgagtgtggaattcttgccgaggacactgcactctattttgggggatccactgtgagacaagcggttacacaagatttggatcttcgaggtgcaaagttcctgcaatactgggggcgcatcggtagtgagaacaacatgacctcttgccatcgtcccatctgccggaaggaaggcgtgctgttggactactctaccgatggaggaattacctggactttgctccatgagatggattaccagaaatacatttctgttagacacgactacatacttcttcctgaagatgccctcaccaacacaactcgacttcgctggtggcagccttttgtgatcagcaatggaattgtggtctctggggtggagcgtgctcagtgggcactggacaacattttgattggtggagcagaaatcaatcccagccaattggtggacacttttgatgatgaaggcacttcccatgaagaaaactggagtttttaccctaatgctgtaaggacagcaggattttgtggcaatccatcctttcacctctattggccaaataaaaagaaggacaagactcacaatgctctctcctcccgagaactcattatacagccaggatacatgatgcagtttaaaattgtggtgggttgtgaagccacttcttgtggtgaccttcattccgtaatgctggaatacactaaggatgcaagatcggattcctggcagctcgtacagacccagtgccttccttcctcttctaacagcattggctgctcccctttccagttccatgaagccaccatctacaactctgtcaacagctcaagctggaaaagaatcaccatccagctgcctgaccatgtctcctctagtgcaacacagttccgctggatccagaagggagaagaaactgagaagcaaagctgggcaattgaccacgtgtacattggagaggcttgccccaagctctgcagcgggcacggatactgcacgaccggtgccatctgcatctgcgacgagagcttccaaggtgatgactgctctgttttcagtcacgaccttcccagttatattaaagataattttgagtccgcaagagtcaccgaggcaaactgggagaccattcaaggtggagtcataggaagtggctgtgggcagctggccccctacgcccatggagactcactgtactttaatggctgtcagatcaggcaagcagctaccaagcctctggatctcactcgagcaagcaaaatcatgtttgttttgcaaattgggagcatgtcgcagacggacagctgcaacagtgacctgagtggcccccacgctgtggacaaggcagtgctgctgcaatacagcgtcaacaacgggatcacctggcatgtcatcgcccagcaccagccaaaggacttcacacaagctcagagagtgtcttacaatgtccccctggaggcacggatgaaaggagtcttactgcgctggtggcaaccacgccacaatggaacaggtcatgatcaatgggctttggaccatgtggaggtcgtcctcactcgcaaacaaaattacatgatgaatttttcacgacaacatgggctcagacatttctacaacagaagacgaaggtcacttaggcgatacccatgaagaatcaaaaagtttattttttttcttccaacatgtgatgtgttgctctccattcttttaaatctcgcactacatctgatatcaggaaatatctgtgaaggacttggtgattacctgaaagcccttctcaagaccgagtgtacaccactttcccacactgtgaactaatgacaagtgacttatttgctcataagtaaatgtcttcatgttgatgtgtccgtgaaagttgtgatctgttgtaatatcagttacagtggcagtattgacaataagaaacagtttaacagaaaaatgaaatttaagcacaaaaaatttaagagattttatgtttaaaatggcatttagcacagtatttaacattcttggtcacaaagctatttaagtggactgtatttcggctatgtctcatgttttatatgattaaattatcattgtttgtcctttatgtattctcttctacaatacaacacattgaaactgtatttacttgttatgttgtaatattttgctgctgaatttggggctacttatattctgcagaaaattaattgaaatacctattcaagaagatagttgtaaagatattgtatctcctttaatatactccttaaaaatgtatgttggtttagcgttgttttgtggataagaaaaatgcttgaccctgaaatattttctactttaaattgtggatgaagaccctatctcccacaaataagttcccatttccttgtctaaagatctttttttaagtgttctgtggctgatttactaacagtaactgccattttttgtctgtgataacagagtgatttgtaaaacagtggttgttttttcattgtgttttcttcgtggattgttttttctgcgggtcatattcataccttctgatgaagttgtacaacaccagcaacattataatggccctgtagctctgaatgctatttgtgtaactgaaaggttgcactctagggtgaaccaagctataaaagcccatgcttaaataaaaattatgtccaaaagccattgaa

SEQ ID NO: 249488 - protein, 686 aa, Artificial Sequence
  derived and/or modified sequence
MNPTETKAVKTEPEKKSQSTKLSVVHEKKSQEGKPKEHTEPKSLPKQASDTGSNDAHNKKAVSRSAEQQPSEKSTEPKTKPQDMISAGGESVAGITAISGKPGDKKKEKKSLTPAVPVESKPDKPSGKSGMDAALDDLIDTLGGPEETEEENTTYTGPEVSDPMSSTYIEELGKREVTIPPKYRELLAKKEGITGPPADSSKPIGPDDAIDALSSDFTCGSPTAAGKKTEKEESTEVLKAQSAGTVRSAAPPQEKKRKVEKDTMSDQALEALSASLGTRQAEPELDLRSIKEVDEAKAKEEKLEKCGEDDETIPSEYRLKPATDKDGKPLLPEPEEKPKPRSESELIDELSEDFDRSECKEKPSKPTEKTEESKAAAPAPVSEAVCRTSMCSIQSAPPEPATLKGTVPDDAVEALADSLGKKEADPEDGKPVMDKVKEKAKEEDREKLGEKEETIPPDYRLEEVKDKDGKPLLPKESKEQLPPMSEDFLLDALSEDFSGPQNASSLKFEDAKLAAAISEVVSQTPASTTQAGAPPRDTSQSDKDLDDALDKLSDSLGQRQPDPDENKPMEDKVKEKAKAEHRDKLGERDDTIPPEYRHLLDDNGQDKPVKPPTKKSEDSKKPADDQDPIDALSGDLDSCPSTTETSQNTAKDKCKKAASSSKAPKNGGKAKDSAKTTEETSKPKDD

SEQ ID NO: 249489 - DNA, 2061 bp, Artificial Sequence
  derived and/or modified sequence
atgaaccccaccgagaccaaggccgtcaagacagagcctgaaaagaaaagccagtctactaagctcagcgtggtccatgaaaaaaagtcacaggaggggaagcctaaggaacacactgagcctaaatcgctcccaaaacaggcctctgatacagggagcaatgacgcccacaacaaaaaggctgtgtcccgctccgccgagcagcagcctagcgagaagtccaccgagcccaagaccaaaccacaggacatgatctccgccggcggagaaagtgtggccggaattacagcgatatcaggtaagccaggcgacaagaagaaagagaagaaaagcctaaccccagccgtccctgtggaaagcaaacctgacaaaccatccggcaaaagcggaatggatgctgccctggatgatctcatcgacacactcggcggtccagaggaaacggaagaggagaatacaacatacaccgggccagaggtgagcgacccaatgagcagtacttatattgaggaactcgggaagcgcgaggtgactatccctcctaagtacagagaacttctggcgaagaaggaaggcatcacggggccaccggcagacagtagcaagcctattggacctgacgacgccatcgatgccctcagcagcgacttcacatgcggaagccctacagctgccggcaagaagaccgaaaaagaggaaagcactgaggtccttaaggcacaatctgctgggacagttcgcagcgctgcacctcctcaggagaaaaagaggaaggtcgaaaaggacaccatgagcgatcaagcccttgaggccttatccgctagcctcggcaccaggcaagcagagccagaactcgatctgcgcagcatcaaagaggtggacgaagcaaaagccaaagaagaaaaactcgaaaaatgcggcgaagatgacgagactataccaagcgagtaccggctgaaacctgctactgataaagacggcaagcctttgcttcccgaacccgaagagaagcccaaacccagaagtgaaagcgagctcatcgacgaattatcagaagatttcgatcgcagtgagtgcaaggaaaaaccttctaagccgaccgaaaagacagaagaaagcaaagcagctgcgcctgcaccggtcagcgaagccgtctgtagaacatccatgtgtagtatccagtctgctccccccgagcctgctactctgaaggggaccgtccctgacgacgccgtagaggccttagcagactctctaggcaaaaaagaagcagacccagaggatggtaaacctgtcatggacaaagtaaaggaaaaggccaaagaggaggaccgcgaaaagctgggggaaaaagaagagacaatccctccagattacagattagaggaggtgaaggataaagatgggaagccgctgttacctaaagaatcaaaggaacaactcccccccatgtccgaagacttcctcctagatgcccttagcgaggatttctcaggtcctcagaacgcttcgagtctgaagttcgaagatgccaaattagctgccgctattagcgaggtggtcagccagacaccagcctctacaacacaggctggcgctcctcctcgtgatacctcacagtccgataaggacctggacgatgctcttgacaaattgagtgattcactgggtcagagacaacccgacccagacgaaaataagcctatggaggataaggtcaaggagaaggcaaaggccgagcatcgggataagttgggggagagagacgacactattccaccggaataccggcaccttctggatgataacgggcaagacaaacctgttaaacccccaaccaagaaatccgaagacagcaaaaagccagcagacgaccaagacccgatagatgctctctccggtgatttggacagttgtccttctacgacagagacaagtcagaacaccgccaaagacaagtgcaaaaaagctgcatcttccagtaaggctcccaaaaatgggggtaaagccaaagattccgcaaagaccaccgaggaaactagcaagccaaaggatgactag

SEQ ID NO: 249490 - DNA, 2061 bp, Artificial Sequence
  derived and/or modified sequence
atgaaccccacagagaccaaggctgtgaagacagagcctgagaagaagagccagagcaccaagctgtctgtggtgcatgagaagaagagccaggagggcaagcccaaggagcacacagagcccaagagcctgcccaagcaggccagtgacaccggcagcaatgatgcccacaacaagaaggctgtgagccgctctgctgagcagcagcccagcgagaagagcacagagcccaagaccaagccccaggacatgatctctgctggaggagagagcgtggccggcatcacagccatcagcggcaagccaggggacaagaagaaggagaagaagagcctgaccccagctgtgcctgtggagagcaagccagacaagcccagcggcaagagcggcatggatgctgccctggatgacctgattgacaccctgggcggccctgaggagacagaggaggagaacaccacctacacaggccctgaggtgtctgaccccatgagcagcacctacatcgaggagctgggcaagcgggaggtgaccatcccccccaagtaccgggagctgctggccaagaaggagggcatcaccggccccccagctgacagcagcaagcccatcggcccagatgatgccattgatgccctgagcagtgacttcacctgtggcagccccacagctgctgggaagaagacagagaaggaggagagcacagaggtgctgaaggcccagagcgctggcaccgtgcgctctgctgccccaccccaggagaagaagaggaaggtggagaaggacaccatgtctgaccaggccctggaggccctgagcgccagcctgggcacccggcaggccgagcctgagctggacctgcggagcatcaaggaggtggatgaggccaaggccaaggaggagaagctggagaagtgtggggaggatgatgagaccatccccagcgagtaccgcctgaagccagccacagacaaggatggcaagcccctgctgcctgagcctgaggagaagcccaagcccaggtctgagagcgagctgattgatgagctgtctgaggactttgacagaagtgagtgcaaggagaagcccagcaagcccacagagaagacagaggagagcaaggccgccgccccagcccctgtgtctgaggccgtgtgcaggacctccatgtgcagcatccagagcgcccctcctgagcccgccaccctgaagggcaccgtgcctgatgatgctgtggaggccctggccgacagcctgggcaagaaggaggccgaccctgaagatggcaagcctgtgatggacaaggtgaaggagaaggccaaggaggaggaccgggagaagctgggggagaaggaggagaccatccccccagactaccgcctggaggaggtgaaggacaaggatggcaagcccctgctgcccaaggagagcaaggagcagctgccccccatgtctgaggacttcctgctggatgccctgtctgaggacttcagcggcccccagaatgccagcagcctgaagtttgaagatgccaagctggccgccgccatcagcgaggtggtgtcccagaccccagccagcaccacccaggccggggccccaccccgggacaccagccagagcgacaaggacctggatgatgccctggacaagctgagtgacagcctgggccagaggcagcctgaccctgatgagaacaagcccatggaggacaaggtgaaggagaaggccaaggccgagcaccgggacaagctgggggagagagatgacaccatccccccagagtaccgccacctgctggatgacaatggccaggacaagcctgtgaagccacccaccaagaagtctgaggacagcaagaagccagcagatgaccaggaccccattgatgccctgagcggggacctggacagctgccccagcaccacagagaccagccagaacacagccaaggacaagtgcaagaaggccgccagcagcagcaaggcccccaagaatggaggcaaggccaaggacagcgccaagaccacagaggagaccagcaagcccaaggatgactag

SEQ ID NO: 249491 - DNA, 2061 bp, Artificial Sequence
  derived and/or modified sequence
atgaaccccaccgagaccaaggccgtgaagaccgagcccgagaagaaaagtcagtctaccaaattgagcgtggtgcacgaaaaaaaatctcaagaaggcaagccaaaagagcacacggagcctaagtctcttcccaaacaggcgagcgatacgggtagtaacgatgcacacaacaagaaagcagtgtcgcgctcagctgagcagcagccctcggagaagtcgaccgaaccaaaaactaagccacaagacatgatctctgccggcggggagagtgtggccggtattactgccatttctggaaagcccggagacaagaagaaagagaagaagagcctgacacccgcagtccctgtagagagcaaacccgataagccgtctgggaagtctggcatggatgcggctttagatgacctgatagatacactcggcggacctgaggaaaccgaggaggagaacactacatatactgggccagaagtatccgatcccatgtccagtacatatatcgaggaactggggaagcgggaggtaaccatcccccctaaatatagggagctcctggcgaaaaaagaggggattaccgggcctccagcagactccagtaaacccattgggcccgatgacgctattgatgctcttagcagcgacttcacatgcgggagccctaccgctgctgggaagaagaccgaaaaggaagagagcaccgaagtgctgaaagcacagagcgccggtactgtccgttcggccgcaccacctcaagagaaaaagcgcaaggtggaaaaggacacaatgagcgaccaagctcttgaagcactctcagcatctttgggcacccggcaggccgagccggaactcgatctgagatccatcaaagaagtggatgaggccaaagcaaaggaggagaagttagagaagtgcggagaggacgacgaaacaatcccttctgagtataggctaaagcctgccactgataaggatggaaaacccctcctccctgaacccgaggagaagccgaagcctagatctgagagcgaattgattgatgaactcagcgaagatttcgacaggagcgaatgcaaggagaaaccttctaaacctaccgaaaagactgaggaatccaaagcagcggcgccagcaccggtgagcgaagccgtgtgcagaacctccatgtgttcgattcaatctgcaccacctgagccagccacccttaaagggacggtgcccgacgacgccgtggaggcactggctgatagcctcggaaagaaggaggccgacccagaagatggaaagcccgtcatggacaaggtaaaggagaaggctaaggaggaagatagggagaaacttggcgaaaaagaggagacaatccccccagattataggctggaggaggtgaaagacaaagatggcaagccgctgctcccgaaagaaagcaaagagcagttgccccctatgtctgaagattttctcctggacgccctgtccgaggatttctcagggccacagaacgcatcttcacttaaattcgaggatgcaaagctcgccgcagcgatttcagaagtagttagtcagacaccagcaagcacgacccaggcaggcgccccgcccagagataccagccagtccgataaggacctggacgatgcactggacaagctaagtgattctttaggtcaacgccagccagatcccgatgagaacaagcccatggaggacaaagtcaaagagaaggcgaaagcagagcatagggataagctgggggaaagggatgacacgatccctcctgagtaccgccacctgctcgatgataacggccaggacaagccagtcaaaccacctactaagaagtcagaggactcgaaaaaaccggcagacgaccaagaccccatcgacgccctctccggcgaccttgactcttgcccctcgaccacagagacctctcagaacaccgctaaagataagtgtaaaaaggcggcctcgagcagtaaggctcccaagaatggaggaaaagcgaaagatagtgcaaaaactaccgaggaaaccagcaagccgaaggacgactag

SEQ ID NO: 249492 - DNA, 2061 bp, Artificial Sequence
  derived and/or modified sequence
atgaacccgacggagaccaaggccgtgaaaacagaaccggagaaaaagtcgcaaagcacgaagttgtctgtggttcatgaaaaaaagtcccaagaggggaaacctaaagaacataccgagcctaagagtctacccaagcaagcttctgacaccggctctaacgatgcacacaacaaaaaagctgtctcacgcagcgctgaacagcaaccaagcgagaagagcactgaacctaaaactaagccacaggatatgataagtgcagggggagaaagtgtggctgggatcacagcgatttctgggaagccaggcgataagaaaaaggagaagaaatcccttacccccgctgtgcccgtggaatcgaagcctgacaagccctcaggaaagagcggtatggacgcagcgttggacgacctgattgatacgttaggtggacccgaggaaaccgaggaggagaatacgacctacacagggccagaggtctcagaccccatgagctccacctacattgaggaattgggcaagcgggaggtaacgattccccctaagtatagagaattgctggccaaaaaagagggcattaccggaccacccgcagattcgagcaaacccatcgggccagatgatgctattgatgctctgtcgagcgattttacctgtggcagtcccacggccgcaggcaaaaaaacagaaaaagaggaatcaaccgaggtcctcaaagcccaatctgccggtactgtgcgttcagccgctccaccacaggaaaagaagaggaaagtcgaaaaggatactatgtcagaccaggctctggaagccctgagcgcatctctgggcactcggcaagcagagccagaactcgacttgcgatctataaaagaagtggatgaggctaaggccaaagaggagaaactggaaaagtgcggcgaggacgacgaaaccatcccctccgagtatcgtctcaaaccagccaccgacaaggacggtaaaccccttcttcccgagccagaagaaaagcctaaaccaagatcagaaagcgaattaatcgacgaactgagcgaggacttcgataggtccgagtgcaaagagaagccctcaaaaccaaccgaaaaaactgaggaaagcaaagctgctgctcctgcacctgtcagtgaagccgtgtgtagaacttccatgtgctcaatccagtccgcccctcccgagcctgctactctcaagggaaccgttccagacgatgccgtcgaggcactggccgattctctgggcaagaaagaagccgacccagaggatgggaagcccgtgatggataaggtcaaagaaaaggcaaaggaggaggacagagaaaagctgggggagaaggaagaaactatcccccctgactacagattggaagaagtgaaagacaaggatgggaaaccactgttacctaaagagagcaaggagcagcttccccctatgtcggaggactttcttctcgacgccctgtctgaggacttcagcggtcctcaaaacgcctccagtcttaagttcgaggatgccaagctcgccgcagctattagcgaagttgtgtcacaaacacctgcttcaaccacccaggcaggtgcacctccccgagacaccagccagagcgataaagacttggacgacgcccttgataaactatcagactcgctcgggcagaggcagcccgatccagatgagaacaagcccatggaggataaggtcaaggagaaagccaaggctgaacacagagataaactgggcgagagggatgataccattccacccgaataccgacacctacttgacgacaacggccaggataagccagtgaagccgcctactaaaaaaagtgaggattccaaaaagccagcagatgaccaagatcccattgacgcgctgagcggggatctcgacagctgcccgagcaccacagaaacatcccaaaataccgctaaagacaagtgcaagaaggctgctagctccagcaaggcaccaaaaaacggcggaaaagcgaaggactcggcgaagaccaccgaagaaacctcaaaaccaaaggacgactag

SEQ ID NO: 249493 - DNA, 4282 bp, Artificial Sequence
  derived and/or modified sequence
cactcagagagctgggctggagctccaagcggaaaccgcgggagccgagcccagctaggaatgcagacctcctgaaaaccaagccgaggactgcggggtccggtgtccacgcagagtgtcagcttcctctggtgcaaccagcaagtcttccagtatgaatcccacagaaaccaaggctgtaaaaacagaacctgagaagaagtcacagtcaaccaagctgtctgtggttcatgagaaaaaatcccaagaaggaaagccaaaagaacacacagagccaaaaagcctacccaagcaggcatcagatacaggaagtaacgatgctcacaataaaaaagcagtttccagatcagctgaacagcagccatcagagaaatcaacagaaccaaagactaaaccacaagacatgatttctgctggtggagagagtgttgctggtatcactgcaatatctggcaagccgggtgacaagaaaaaagaaaagaaatcattaaccccagctgtgccagttgaatctaaaccggataaaccatcgggaaagtcaggcatggatgctgctttggatgacttaatagatactttaggaggacctgaagaaactgaagaagaaaatacaacgtatactggaccagaagtttcagatccaatgagttccacctacatagaggaattgggtaaaagagaagtcacaattcctccaaaatatagggaactattggctaaaaaggaagggatcacagggcctcctgcagactcttcgaaacccatagggccagatgatgctatagacgccttgtcatctgacttcacctgtgggtcgcctacagctgctggaaagaaaactgaaaaagaggaatctacagaagttttaaaagctcagtcagcagggacagtcagaagtgctgctccaccccaagagaagaaaagaaaggtggagaaggatacaatgagtgatcaagcactcgaggctctgtcggcttcactgggcacccggcaagcagaacctgagctcgacctccgctcaattaaggaagtcgatgaggcaaaagctaaagaagaaaaactagagaagtgtggtgaggatgatgaaacaatcccatctgagtacagattaaaaccagccacggataaagatggaaaaccactattgccagagcctgaagaaaaacccaagcctcggagtgaatcagaactcattgatgaactttcagaagattttgaccggtctgaatgtaaagagaaaccatctaagccaactgaaaagacagaagaatctaaggccgctgctccagctcctgtgtcggaggctgtgtgtcggacctccatgtgtagtatacagtcagcaccccctgagccggctaccttgaagggcacagtgccagatgatgctgtagaagccttggctgatagcctggggaaaaaggaagcagatccagaagatggaaaacctgtgatggataaagtcaaggagaaggccaaagaagaagaccgtgaaaagcttggtgaaaaagaagaaacaattcctcctgattatagattagaagaggtcaaggataaagatggaaagccactcctgccaaaagagtctaaggaacagcttccacccatgagtgaagacttccttctggatgctttgtctgaggacttctctggtccacaaaatgcttcatctcttaaatttgaagatgctaaacttgctgctgccatctctgaagtggtttcccaaaccccagcttcaacgacccaagctggagccccaccccgtgatacctcgcagagtgacaaagacctcgatgatgccttggataaactctctgacagtctaggacaaaggcagcctgacccagatgagaacaaaccaatggaagataaagtaaaggaaaaagctaaagctgaacatagagacaagcttggagaaagagatgacactatcccacctgaatacagacatctcctggatgataatggacaggacaaaccagtgaagccacctacaaagaaatcagaggattcaaagaaacctgcagatgaccaagaccccattgatgctctctcaggagatctggacagctgtccctccactacagaaacctcacagaacacagcaaaggataagtgcaagaaggctgcttccagctccaaagcacctaagaatggaggtaaagcgaaggattcagcaaagacaacagaggaaacttccaagccaaaagatgactaaagaaatacaagttaaggtatctggtatctgcatgtaaaatcttcagctggtggatggtgacttttgaagaacaaaaggctttggcaacagaaaacaattgttctgggtgatttctagaatggtttttgttgagtctctgaacatcctaaatattggtttgttattcttttccagaaagaaaatgaatttgactggttcacctgtgtactgagtattgataaactttgaatttttttaattgccttcaattgggagagaaagctttatatttgtaagaaatatatttgataaagtttcttaaagcaacaccaaaaaaacaaaagaaaagctaagtgaatttttgcacattctacacacagtgcctgtaaatctcatttgtattttcagtttgcccttaattttttttgttagtgtttagaaaacaatgttttaaacattcttcagtgttctgatttcttattaccccctttcctcttgggcttttgaactgtatttgatgttgctttgggataatgtttataagtcaaacataagatattgtacattgggcacatatctcctcttgggctgctaataataaattaataacaggtaacctggacaaaccaggaagcaccaaaccccttttcagtttgaactcttctttgccaggtgtgaggacttctgcatcttacagtcagcacagaacacactgagacttgaatcaagtcagcaacagagcaaaataaaggttagataagtccttgtgtagcaaatttcgagcataagaaataaaatctaattaattcttagggtactcatctgacttgaactctgttggtttactgtgttagtaaactgtgctttctattatctatacataaaacctgagcagcaactgtgtctttagagctattgccacattagcctttgcactgtatagcgtctggctttatggaacttaagtttaccaaatataaaaagaaacttctgcttttaaaaaaattatatatatatattaaatttgaaacctgcatttctcccacagcaatgtaagaagtaggctctgatgtcctaccactttgaatggttttctaatatcttaatgaatagttcctgaacattgcactgatatcatcgattagaattttgatatttaatttcatctttatttcctggtagagaatgcaggaaaagatgtcaggtacataacataaaacagattgggaatttattgtttccaaagggcatggccttccttagcatcagtttgaagcttttgttatgacttagctgacttgtggcagcggggcaagcaaaaacaataacactgcttataaatggcaccacatcttgttaacctcccccccaaatactctctgaaagtcatgcacatacctatgggattttacacaccaccagcttaaaatgctatgtctctatccatcagaaatagtcattattctatttttaaggcagcaacaagaaaagaaaaaacacttttcctgagggatttctaaccatgtatctaatcctcccatttgggcagtataggtgtttgcttttttgttttctttttttaagaaaaaccttgaaacctttgacactgacagatgtgtttgcaaggatacggcttcagtattactaatttccatgtgtatctggaagtatttttaaatggcataccaaaatccagaagtttaaagatgcctataaaagtaaacaacatttatttaaaaagaactctgaatatgccttcttttttaattagaaatatcttcgagacttgggtgtttgttaataactaataactggagtaagctacaggatctaaagcagccctttttacagtctagttaggagagagaaaataattgcaaatatccacttagaggcaaagaacaattttttattatcaaaaaggtttctgcacattgttgtggcaatattgtatctgtttagaaaatgggcttttccaaaagcaaacaaagataggttcctcaggtgaccaaaactgaaaatcaatatttccatgtttcattaatcaaggcataaaatacaattaaagcaaaatattttacattaaaa

SEQ ID NO: 249494 - DNA, 2061 bp, Artificial Sequence
  derived and/or modified sequence
atgaaccccaccgagaccaaggccgtgaagaccgagcccgagaagaagagccagagcaccaagctgagcgtggtgcacgagaagaagagccaggagggcaagcccaaggagcacaccgagcccaagagcctgcccaagcaggccagcgacaccggcagcaacgacgcccacaacaagaaggccgtgagcagaagcgccgagcagcagcccagcgagaagagcaccgagcccaagaccaagccccaggacatgatcagcgccggcggcgagagcgtggccggcatcaccgccatcagcggcaagcccggcgacaagaagaaggagaagaagagcctgacccccgccgtgcccgtggagagcaagcccgacaagcccagcggcaagagcggcatggacgccgccctggacgacctgatcgacaccctgggcggccccgaggagaccgaggaggagaacaccacctacaccggccccgaggtgagcgaccccatgagcagcacctacatcgaggagctgggcaagagagaggtgaccatcccccccaagtacagagagctgctggccaagaaggagggcatcaccggcccccccgccgacagcagcaagcccatcggccccgacgacgccatcgacgccctgagcagcgacttcacctgcggcagccccaccgccgccggcaagaagaccgagaaggaggagagcaccgaggtgctgaaggcccagagcgccggcaccgtgagaagcgccgcccccccccaggagaagaagagaaaggtggagaaggacaccatgagcgaccaggccctggaggccctgagcgccagcctgggcaccagacaggccgagcccgagctggacctgagaagcatcaaggaggtggacgaggccaaggccaaggaggagaagctggagaagtgcggcgaggacgacgagaccatccccagcgagtacagactgaagcccgccaccgacaaggacggcaagcccctgctgcccgagcccgaggagaagcccaagcccagaagcgagagcgagctgatcgacgagctgagcgaggacttcgacagaagcgagtgcaaggagaagcccagcaagcccaccgagaagaccgaggagagcaaggccgccgcccccgcccccgtgagcgaggccgtgtgcagaaccagcatgtgcagcatccagagcgccccccccgagcccgccaccctgaagggcaccgtgcccgacgacgccgtggaggccctggccgacagcctgggcaagaaggaggccgaccccgaggacggcaagcccgtgatggacaaggtgaaggagaaggccaaggaggaggacagagagaagctgggcgagaaggaggagaccatcccccccgactacagactggaggaggtgaaggacaaggacggcaagcccctgctgcccaaggagagcaaggagcagctgccccccatgagcgaggacttcctgctggacgccctgagcgaggacttcagcggcccccagaacgccagcagcctgaagttcgaggacgccaagctggccgccgccatcagcgaggtggtgagccagacccccgccagcaccacccaggccggcgccccccccagagacaccagccagagcgacaaggacctggacgacgccctggacaagctgagcgacagcctgggccagagacagcccgaccccgacgagaacaagcccatggaggacaaggtgaaggagaaggccaaggccgagcacagagacaagctgggcgagagagacgacaccatcccccccgagtacagacacctgctggacgacaacggccaggacaagcccgtgaagccccccaccaagaagagcgaggacagcaagaagcccgccgacgaccaggaccccatcgacgccctgagcggcgacctggacagctgccccagcaccaccgagaccagccagaacaccgccaaggacaagtgcaagaaggccgccagcagcagcaaggcccccaagaacggcggcaaggccaaggacagcgccaagaccaccgaggagaccagcaagcccaaggacgactag

SEQ ID NO: 249495 - protein, 206 aa, Artificial Sequence
  derived and/or modified sequence
MKDNDIKRLLYTHLLCIFSIILSVFIPSLFLENFSILETHLTWLCICSGFVTAVNLVLYLVVKPNTSSKRSSLSHKVTGFLKCCIYFLMSCFSFHVIFVLYGAPLIELALETFLFAVILSTFTTVPCLCLLGPNLKAWLRVFSRNGVTSIWENSLQITTISSFVGAWLGALPIPLDWERPWQMTVERKRSTYRSLHVPCRGLGTVK

SEQ ID NO: 249496 - DNA, 621 bp, Artificial Sequence
  derived and/or modified sequence
atgaaggacaatgatataaaaaggctactctacacacatctcctgtgtatattcagcattatcttgtcggtcttcattccgagcttattcttggaaaacttttccatcctcgagactcatcttacatggctgtgcatttgttcaggctttgtgactgctgtcaatcttgttctttacctggtggtaaaacccaacacctcttccaagagatcctccctgtctcacaaggtgaccggatttctgaagtgctgtatttacttcttaatgtcatgcttttcattccacgtgatctttgttctgtacggcgctcctttaattgagctggccttagagactttcctgttcgccgtcatcttaagcacttttacgacagtcccgtgcctgtgcctcctcggaccaaatttgaaagcctggctccgggttttctcaagaaacggagttacgagtatctgggaaaattctttgcagattactaccattagctcatttgtcggtgcttggctaggggctctgcccataccactggattgggagcgcccatggcagatgacggttgagcgaaaaaggtccacttaccgcagcctgcatgtcccgtgtcgggggctcgggaccgttaagtag

SEQ ID NO: 249497 - DNA, 621 bp, Artificial Sequence
  derived and/or modified sequence
atgaaggacaatgacatcaagaggctgctgtacacccacctgctgtgcatcttcagcatcatcctgtctgtgttcatccccagcctcttcctggagaacttcagcatcctggagacccacctgacctggctgtgcatctgcagcggctttgtgacagctgtgaacctggtgctgtacctggtggtgaagcccaacaccagcagcaagaggagcagcctgagccacaaggtgacaggcttcctgaagtgctgcatctacttcctgatgagctgcttctccttccacgtgatctttgtgctgtatggagcccccctcatcgagctggccctggagaccttcctgtttgctgtgatcctgagcaccttcaccaccgtgccctgcctgtgcctgctgggccccaacctgaaggcctggctgcgggtcttcagcagaaatggagtgaccagcatctgggagaacagcctgcagatcaccaccatcagcagctttgtgggcgcctggctgggcgccctgcccatccccctggactgggagcggccctggcagatgacagtggagaggaagaggagcacctaccgcagcctgcacgtgccctgccggggcctgggcaccgtgaagtag

SEQ ID NO: 249498 - DNA, 621 bp, Artificial Sequence
  derived and/or modified sequence
atgaaggacaacgacatcaagcggctgctgtacacccacctgctgtgcatcttttctataatcttgtcagtgtttatcccatcactctttttggaaaacttctctatactggagacccacttgacgtggctctgcatatgttcaggtttcgtcaccgctgtgaatttggttctctacttggtggtgaagcccaatacatccagcaaaaggagctccctctcgcacaaagtaacgggttttttgaaatgttgtatctattttctcatgagttgcttttcatttcacgtgatcttcgtgctatacggtgcccccttgattgaactggccctcgagacctttctgttcgcggttatattatccacctttactacagtgccttgcctttgcctactcggacccaatttgaaggcttggctcagagttttctctcgcaacggcgtaaccagtatttgggagaacagcttgcagataaccacaatcagctccttcgtcggcgcctggctgggcgcactccctatccctctcgactgggaaaggccttggcaaatgacagtggagcgaaaacgttccacataccgcagtctccacgtcccttgtagaggcctgggaactgtgaagtag

SEQ ID NO: 249499 - DNA, 621 bp, Artificial Sequence
  derived and/or modified sequence
atgaaggacaacgacatcaaacggctcctctacacccatttgctttgcatattcagtatcattctatccgtgtttattccctcattgttccttgaaaatttttcaattttggaaacacatttgacatggctgtgtatctgttctggctttgtgaccgcagtgaacctggtactgtaccttgtggtgaagcctaatacgtcatccaaacgcagcagcctgtcgcataaagtcacgggattcctcaaatgctgcatctactttcttatgtcttgctttagttttcacgtaatcttcgtcctttacggagccccactgatcgaactggccctggagacgttcctatttgccgtaatcctctccacctttactacagttccatgcctctgcttactcggcccaaacctcaaggcatggctgcgtgtcttctcacggaatggggtgactagcatctgggagaacagtttgcagataacgaccatctcctctttcgtaggtgcctggctgggcgcattgccaatccccctggactgggaaaggccctggcagatgactgttgagcgcaaaaggtccacctacagatccctccatgtcccctgtcggggactgggaactgtgaaatag

SEQ ID NO: 249500 - DNA, 621 bp, Artificial Sequence
  derived and/or modified sequence
atgaaggacaacgacatcaagagactgctgtacacccacctgctgtgcatcttcagcatcatcctgagcgtgttcatccccagcctgttcctggagaacttcagcatcctggagacccacctgacctggctgtgcatctgcagcggcttcgtgaccgccgtgaacctggtgctgtacctggtggtgaagcccaacaccagcagcaagagaagcagcctgagccacaaggtgaccggcttcctgaagtgctgcatctacttcctgatgagctgcttcagcttccacgtgatcttcgtgctgtacggcgcccccctgatcgagctggccctggagaccttcctgttcgccgtgatcctgagcaccttcaccaccgtgccctgcctgtgcctgctgggccccaacctgaaggcctggctgagagtgttcagcagaaacggcgtgaccagcatctgggagaacagcctgcagatcaccaccatcagcagcttcgtgggcgcctggctgggcgccctgcccatccccctggactgggagagaccctggcagatgaccgtggagagaaagagaagcacctacagaagcctgcacgtgccctgcagaggcctgggcaccgtgaagtag

SEQ ID NO: 249501 - protein, 736 aa, Artificial Sequence
  derived and/or modified sequence
MSEVLPADSGVDTLAVFMASSGTTDVTNRNSPATPPNTLNLRSSHNELLNAEIKHTETKNSTPPKCRKKYALTNIQAAMGLSDPAAQPLLGNGSANIKLVKNGENQLRKAAEQGQQDPNKNLSPTAVINITSEKLEGKEPHPQDSSSCEILPSQPRRTKSFLNYYADLETSARELEQNRGNHHGTAEEKSQPVQGQASTIIGNGDLLLQKPNRPQSSPEDGQVATVSSSPETKKDHPKTGAKTDCALHRIQNLAPSDEESSWTTLSQDSASPSSPDETDIWSDHSFQTDPDLPPGWKRVSDIAGTYYWHIPTGTTQWERPVSIPADLQGSRKGSLSSVTPSPTPENEDLHAATVNPDPSLKEFEGATLRYASLKLRNAPHPDDDDSCSINSDPEAKCFAVRSLGWVEMAEEDLAPGKSSVAVNNCIRQLSYCKNDIRDTVGIWGEGKDMYLILENDMLSLVDPMDRSVLHSQPIVSIRVWGVGRDNGRDFAYVARDKDTRILKCHVFRCDTPAKAIATSLHEICSKIMAERKNAKALACSSLQERANVNLDVPLQDFPTPKTELVQKFHVQYLGMLPVDKPVGMDILNSAIENLMTSSNKEDWLSVNMNVADATVTVISEKNEEEVLVECRVRFLSFMGVGKDVHTFAFIMDTGNQRFECHVFWCEPNAGNVSEAVQAACMLRYQKCLVARPPSQKVRPPPPPADSVTRRVTTNVKRGVLSLIDTLKQKRPVTEMP

SEQ ID NO: 249502 - DNA, 2211 bp, Artificial Sequence
  derived and/or modified sequence
atgtctgaagttctccctgccgacagtggagtggacacacttgccgtgtttatggccagcagcggtacaactgatgttactaaccgaaatagcccggcgaccccacccaatactctcaacctcagatccagccataacgagctgttgaatgctgaaatcaagcacacggagacaaagaactccacgccccctaaatgtcgtaaaaagtatgccttgaccaatatccaagccgcaatgggcctctctgaccctgctgcacagccccttcttggcaacgggtccgccaacattaaactggtgaagaatggtgaaaaccagttgcggaaggccgctgaacagggtcagcaagaccccaacaagaacctgtcccccaccgcggttataaatattaccagcgagaagctcgagggcaaagagcctcacccccaagattcatcatcttgtgaaattctgccatcccaacccaggaggactaaatctttcttaaactattacgctgacctcgagacatcagcccgcgagctagagcagaatcgaggcaaccaccacggtaccgcggaggaaaagtcccaaccagtccagggacaggccagcactatcattggcaatggcgacttattgttgcagaaaccaaaccggccccagtcatcgccagaagacggccaggtggctaccgtgtcgagctcccccgagaccaagaaagatcatcccaaaaccggcgctaagactgattgcgccctacaccgtatacaaaacctggctccatccgacgaggaatccagctggacaacgctaagtcaggacagcgcctctcccagtagcccagacgagactgacatctggagcgaccacagttttcaaactgatcccgatttgcccccagggtggaagcgggtctctgatatagcgggcacatattactggcatatacccaccggcactacccagtgggaaaggccagtgtcaatccccgctgatctccaaggcagtaggaaggggtctctgtcatccgttacaccctcccctactccggaaaacgaagatttgcacgcggctacggtgaacccagaccctagcctgaaggaatttgaaggggccacccttaggtacgcctcgctaaaactcaggaatgcgccacatcctgacgatgacgattcttgctccattaactcagatcctgaggcgaaatgtttcgcagtcagaagcctgggatgggtggagatggcagaagaggatttagctcctgggaagtcaagcgtagccgtcaacaattgcattagacagctgtcctactgcaaaaacgatattagagataccgtcggcatctggggtgagggcaaagatatgtatctcatacttgagaatgatatgctctctcttgttgatccaatggatagatctgtcttgcactcacagcccatagtctcgataagggtctggggagtaggcagggataatggaagggatttcgcctatgtcgcccgcgacaaagataccagaattttgaaatgccatgtcttccggtgcgacaccccagccaaggcaatagcgacaagcttgcacgagatctgctcaaagattatggccgagcggaaaaacgcaaaagcgctggcttgcagctccctgcaggagagagcaaatgttaacctcgacgtgcccctgcaggactttccgacacccaaaactgagctggtccagaagttccacgtgcagtatctggggatgctccctgtcgataaacccgtcgggatggacattcttaacagcgcaatcgagaatctcatgacctcctcgaataaggaggactggctcagcgtaaatatgaacgtggctgatgccactgttactgtgatcagcgagaaaaacgaagaagaagttctcgttgaatgcagagtgcgcttcttatcattcatgggggtcggaaaagacgtgcatacattcgcctttattatggacacgggaaatcagcggtttgaatgccatgtcttttggtgcgagcccaatgcaggaaacgtgtcagaagctgtgcaggcagcctgcatgctgcgttatcagaaatgtctcgtggcccgtcctccatcacagaaggtcagaccgccaccgcccccagccgactccgtgacccgacgggtaaccaccaatgtgaagaggggggtgctgtctctgattgacacccttaagcagaagcgtcctgttacggagatgccgtag

SEQ ID NO: 249503 - DNA, 2211 bp, Artificial Sequence
  derived and/or modified sequence
atgtctgaggtgctgcctgctgacagcggcgtggacaccctggccgtgttcatggccagcagcggcaccacagatgtgaccaacagaaacagccctgccaccccacccaacaccctgaacctgcggagcagccacaatgagctgctgaatgctgagatcaagcacacagagaccaagaacagcaccccacccaagtgcaggaagaagtatgccctgaccaacatccaggccgccatgggcctgagtgaccctgctgcccagcccctgctgggcaatggcagcgccaacatcaagctggtgaagaatggagagaaccagctgaggaaggctgctgagcagggccagcaggaccccaacaagaacctgagccccacagctgtgatcaacatcaccagcgagaagctggagggcaaggagccccacccccaggacagcagcagctgtgagatcctgcccagccagcccaggaggaccaagagcttcctgaactactatgctgacctggagaccagcgcccgggagctggagcagaacagaggcaaccaccacggcacagctgaggagaagagccagcctgtgcagggccaggccagcaccatcattggaaatggagacctgctgctgcagaagcccaaccggccccagagcagcccagaagatggccaggtggccaccgtgagcagcagccctgagaccaagaaggaccaccccaagacaggagccaagacagactgtgccctgcaccgcatccagaacctggcccccagtgatgaggagagctcctggaccaccctgagccaggacagcgccagccccagcagcccagatgaaacagacatctggagcgaccacagcttccagacagatcctgacctgcccccaggctggaagagggtgtctgacattgctggcacctactactggcacatccccaccggcaccacccagtgggagaggcctgtgtccatcccagctgacctgcagggcagcaggaagggcagcctgagctctgtgacccccagccccaccccagaaaatgaagacctgcatgctgccaccgtgaacccagaccccagcctgaaggagtttgaaggagccaccctgcgctatgccagcctgaagctgagaaatgccccccacccagatgatgatgacagctgcagcatcaacagcgaccctgaggccaagtgctttgctgtgcgcagcctgggctgggtggagatggccgaggaggacctggcccctgggaagagctctgtggccgtgaacaactgcatccggcagctgagctactgcaagaatgacatccgggacacagtgggcatctggggcgagggcaaggacatgtacctgatcctggagaatgacatgctgagcctggtggaccccatggacagatctgtgctgcacagccagcccatcgtgtccatccgggtgtggggcgtgggccgggacaatggccgggactttgcctacgtggcccgggacaaggacacccgcatcctgaagtgccacgtgttccgctgtgacaccccagccaaggccatcgccaccagcctgcacgagatctgcagcaagatcatggccgagaggaagaatgccaaggccctggcctgcagcagcctgcaggagcgggccaacgtgaacctggatgtgcccctgcaggacttccccacccccaagacagagctggtgcagaagttccacgtgcagtacctgggcatgctgcctgtggacaagcctgtgggcatggacatcctgaacagcgccatcgagaacctgatgaccagcagcaacaaggaggactggctgtctgtgaacatgaatgtggctgatgccaccgtgaccgtcatcagcgagaagaatgaggaggaggtgctggtggagtgccgggtgcgcttcctgtccttcatgggcgtgggcaaggatgtgcacacctttgccttcatcatggacaccggcaaccagagatttgaatgtcatgtgttctggtgtgagcccaatgctggaaatgtgtctgaggccgtgcaggccgcctgcatgctgcgctaccagaagtgcctggtggcccggccccccagccagaaggtgcggcccccacctcctcctgctgacagcgtgaccaggagagtgaccaccaacgtgaagaggggcgtgctgagcctgattgacaccctgaagcagaagaggcctgtgacagagatgccctag

SEQ ID NO: 249504 - DNA, 2211 bp, Artificial Sequence
  derived and/or modified sequence
atgagcgaggtgctgcccgccgacagcggcgtggacaccctggccgtgttcatggccagtagcggaacaaccgatgtgacaaatcggaattcccccgcgacccctcccaacacgctcaatttacgaagttctcacaatgagctcctgaacgcagagattaaacatacagaaaccaaaaatagcaccccccccaagtgccggaagaagtatgccctgactaacattcaggcagccatgggactctctgaccctgccgcccagccccttctgggcaacggtagcgccaacataaagctggttaaaaacggagaaaaccagctgaggaaggcagccgagcagggtcaacaggaccctaacaagaacttgtcaccaaccgcggtaattaatatcactagcgagaagctcgagggcaaggagccgcaccctcaggattccagcagttgcgagatcctaccctctcagccaagaagaaccaagtcattcttgaactactatgcagatctcgaaaccagcgcacgcgagcttgagcaaaaccggggcaatcatcacggtacagctgaggaaaaatcccaacccgtccaggggcaggcaagtactattatagggaacggtgacctcctgctgcagaagccgaacaggccacaatcctcacccgaagatggacaggttgccactgttagcagttccccagagaccaagaaggatcaccctaagacgggcgccaagaccgactgtgcactgcacaggatccagaacctggccccaagtgacgaggagagctcatggacaactctctcacaagatagcgcgtcaccctcctctcccgacgagacggacatttggtctgaccacagctttcagaccgatccggacctgcctcccggctggaaaagagtgagtgacatcgccggcacttactactggcatatccccacgggaacaacgcaatgggagaggcctgtcagcatcccggctgacctgcagggaagccgaaaaggatcgttgtcgtcagtgaccccttctccgacacctgaaaacgaagatctgcatgcagctaccgttaatccagatccgagtctgaaggagtttgagggggcgacactgcggtatgcaagcttaaagctgcgcaatgccccacaccctgatgacgatgactcatgctctattaacagtgaccctgaagctaagtgctttgccgtgagatctctagggtgggtggagatggctgaagaagatctggctcccggaaaaagttctgtggcagtgaataactgcattcgccagttgagctattgcaagaatgatatcagagacactgttggtatatggggagaggggaaggacatgtatctcattctggaaaacgacatgctgtccctcgtggaccctatggatcgctctgttctgcatagtcagcctattgtgtctattagggtatggggggtgggccgggacaacggccgggactttgcgtacgtggcacgggataaggacacccgcattctgaaatgccatgtgtttagatgcgatacacccgcaaaggctattgcaacttccttgcatgagatatgcagcaaaataatggccgagagaaagaatgccaaggctctggcatgctcgtctttacaggagagagctaacgtgaatcttgacgttccactgcaggactttcccactcctaaaaccgaattggtgcagaaattccatgttcagtatctgggtatgctgcccgtggacaagccagtcggcatggatatccttaacagtgccatagagaatctgatgactagtagcaataaagaggattggttaagtgtgaatatgaacgttgcggatgcaactgttactgtgatttcggagaagaatgaagaagaagttcttgtggagtgtagagtacgctttctaagttttatgggagtgggtaaagatgtgcatacatttgcttttatcatggacaccggcaatcaaagattcgagtgtcacgtgttctggtgtgaaccaaacgcaggcaacgtcagtgaggccgtacaggccgcgtgcatgctgaggtatcagaagtgtctggtcgcgagacccccctcgcagaaagtgcggcctccacctccaccagcagactcagtgacccgacgcgtgaccaccaacgtgaaacggggggtgttgtcactcattgatactctgaagcagaaaagacccgtgaccgagatgccttag

SEQ ID NO: 249505 - DNA, 4166 bp, Artificial Sequence
  derived and/or modified sequence
ctggagcagagccgctgggcgccggagccgaggcgagcgccgcgcgcaccactggttggagttgctgtgggtgagctgctgtggtctgtagccaagcatgctgtggtcggatctgcccagccgtggaacagaaacatttgctggatggaaaatccataaaagaaagctcctgtgaaaagctgaggctgacaataatttaagcaaaatcagatcgatctctttgggctgcctgacctccttgggtgcttgctattaattaacagactttgtggggaaaaaaaggagcttgccttctgagctttgtaccaaagacctgggaaaactaaccatctcagtctttcctgaggacttgggaactgccgaggcctctgccaatgtgttgactgtcgctatgggctcactgttgtccaggcagctcatatttcaaattataacctatttcctgcaccattgctgacgcctggtgatccatgtcagaagtacttccagctgactcaggtgttgacaccttggcagtgtttatggccagcagcggaactacagacgtcacaaatcggaacagcccagccacaccaccaaacacccttaacctccgatcctcccacaatgaactgttgaacgctgaaataaaacacacagaaaccaagaacagcacacctcccaaatgcaggaaaaaatatgcactaactaacatccaggcggccatgggcctctcggatccagctgcacagcccctgctgggaaatggctctgccaacatcaagctggtgaaaaatggggagaaccagctccgtaaggctgcagagcaagggcagcaggaccccaacaaaaacctgagccccactgcagtcatcaacataacttctgagaagttagagggtaaagagccccacccacaggattcctcgagctgtgagattttaccctcccagcccaggagaactaagagcttcctaaattactatgcagatctggaaacctcagccagagaactagagcagaaccgaggcaatcaccatgggactgcggaagagaaatcccagccagtccagggccaggcctccaccatcattgggaatggcgatttgctgctgcagaaaccaaacagaccccagtccagccctgaagacggccaagtagccacagtgtcatccagcccagaaaccaagaaggatcatccgaaaacaggggccaaaaccgactgtgcactgcaccggatccagaacctggcaccgagcgatgaggagtccagctggacaacgttgtcccaagacagtgcctcacccagctccccggatgaaacagatatatggagtgatcactcatttcagactgatccagatttgccgcctggctggaaaagagtcagtgacattgccgggacctattattggcacatcccaacaggaacgactcagtgggaacggcccgtctccatcccagcagatctccagggttctaggaaagggtcacttagttctgtaacgccatctcccaccccagagaacgaggatttgcatgcagccactgttaacccggaccccagtttaaaagagtttgaaggagcaaccctacgctatgcatctttgaaactcagaaatgccccacaccctgatgatgatgattcttgtagtatcaacagtgacccagaagccaagtgttttgctgtgcgttctctgggatgggtagagatggcagaagaggacctcgcccccggtaaaagtagtgttgcggtcaacaactgcatcaggcaactttcctactgcaaaaatgacatccgagacacagtcgggatttggggagaggggaaagacatgtacctgatcctggagaatgacatgctcagcctggtggaccccatggaccgcagcgtgctgcactcgcagcccatcgtcagcatccgcgtgtggggcgtgggccgcgacaatggccgggattttgcttatgtagcaagagataaagatacaagaattttgaaatgtcatgtatttcgatgtgacacaccagcaaaagccattgccacaagtctccacgagatctgctccaagattatggctgaacggaagaatgccaaagcgctggcctgcagctccttacaggaaagggccaatgtgaacctcgatgtccctttgcaagattttccaacaccaaagactgagctggtccagaagttccacgtgcagtacttgggcatgttacctgtagacaaaccagtcggaatggatattttgaacagtgccatagaaaatcttatgacctcatccaacaaggaggactggctgtcagtgaacatgaacgtggctgatgccactgtgactgtcatcagtgaaaagaatgaagaggaagtcttagtggaatgtcgtgtgcgattcctgtccttcatgggtgttgggaaggacgtccacacatttgccttcatcatggacacggggaaccagcgctttgagtgccacgttttctggtgcgagcctaatgctggtaacgtgtctgaggcggtgcaggccgcctgcatgttacgatatcagaagtgcttggtagccaggccgccttctcagaaagttcgaccacctccaccgccagcagattcagtaaccagaagagtcacaaccaatgtaaaacgaggggtcttatccctcattgacactttgaaacagaaacgccctgtcaccgaaatgccatagctgcacatgcaaaaggactcggctatttacctgaagattgactagctacactaaagaaaatgaactccgccatccgaccttccatccagttgctgatgctttgtcttcagagaatttacccttaaccaagcagtgttagacaagcatgttctctcgtcttgccaccatcatgtgatatgaaaagaagcatgaataattttttttgctgtaagttacatcatgcgcagtggaaggtctttttcttattgtaaatattgtgaacattacttaacttcacacacacacagagaagagtgtggccccacccctcctagtgaactaacgctgcgtccttggaatgaatgatgcgtgagttagtttcactgtcttcttggctggacctgtcacaagcaacctttaagtcctacagcactttgccctgttttcaacattggagtaggcactgcatagcagataccattgaattgctgtaaaaataggatggcgagtttgtgttttaatttttcataaaattgaacctgttggttgacaaaattggctgttggcatcagtatagaaaccaactggcagctttccctgacaagctctttgacacatggacaccatttcatgtctacagctgtttgtgggatgttggaaaaaaatgaaacttcaaaattgatgaaaaactaaattcgaggaattaaaatcgaacaaaacatagcctttcttttccgatggttttcaaactgattatttttaaaagagattaataaaatcataatgcattttgggtgggacatatttcaaacttctgccttatattgtacggtgcagctagagaattatagttcactatggccattctctacataaacattaagatgaaatactcctcatcagcctttcatccttagtttgagaattagctgatatgcaatttgaagttgaggaaatatcattgatatttctatcatgcacgattattttagatttctaccaccgtgtgatttttgctagtccatgtgctagaggtaaacgttctgctggaattctgcatccagctctatccccctctgatgctttttgcccagaaagctgtctgtccatcatgtattgtccatggcaacaaattacattaggttgaacctttccttgattttatgtatttaatattagaatttgttggactcaactagatatattttttaatttatattttttccattttactttgaagatttgaaatgttcatacctgagcaaagtctacacaggagtaatggactgtttaacaagtttcccaaaacagcattttcctgctccttcgtatgtaggtgagaaacttagctggaaagacatacaaatttagactctcgttgacattgtcgttttaaaaggaagttgctaaggcgatcaatctcaatattagtcttgtttacttcttcttaatgtcaaaattaacatttacaacatccaattataaaagtaatgctttatgtttata

SEQ ID NO: 249506 - DNA, 2211 bp, Artificial Sequence
  derived and/or modified sequence
atgtcagaagtattaccggctgactctggagtggataccctggccgtcttcatggcctcgtcagggacaacagatgtcaccaatagaaattctcctgcgaccccacctaacaccctcaatctcaggagttcccataatgagctgttaaatgccgagatcaagcataccgagaccaagaatagtactccaccaaaatgccgcaaaaagtacgctttaaccaacattcaggcagcaatgggcctctccgaccctgcagctcagccactactgggcaacggctccgcaaatatcaaattggtaaagaatggcgaaaaccagctgcgaaaggccgctgagcaaggacaacaggacccaaacaaaaacctgtcgcccacagccgttatcaacatcacgagtgagaaactcgagggaaaggaacctcacccacaagattcttcgtcttgtgagatcctacccagtcagcctaggcggactaaatcattcctcaactattatgccgatctcgaaacgtccgccagagagctggagcagaatcggggaaaccaccatggtacagctgaagagaaaagccagcccgttcagggccaggcaagcaccattatagggaacggagatctcttgttgcagaaacctaaccgtccccagagttcaccagaggacgggcaggtggctactgtatcatcaagccccgagacaaagaaagaccacccaaaaaccggagccaagacagactgtgcgcttcataggattcagaatctggctccttccgacgaagagtcttcttggaccacactgtcccaggattctgcctcaccatccagccctgatgagactgacatttggtccgatcactccttccagacagatccagacctgcccccaggatggaagcgcgtcagcgacattgccggtacctattattggcacatccccactggtactacccagtgggaacggccagttagtattccagcagaccttcagggctctcgcaaaggtagcttgagctcagtcacgccctcccctacccctgaaaacgaagaccttcacgcggcaactgttaacccagatccgagtctaaaagaattcgaaggggcaacattgcgttatgcctcactcaagctgcggaacgctccgcacccggacgacgacgattcctgctccatcaactccgatcccgaagctaagtgtttcgccgtgagaagcctggggtgggtggaaatggctgaggaggatctcgcccctggtaagtcgagcgtggcagtgaacaactgcattagacagttgtcttattgtaaaaacgatatacgcgatacagtgggaatttggggagagggcaaagacatgtacttaattctcgagaacgacatgttgtccttggtcgacccaatggacagaagcgtcctacactcccaacctattgttagcattcgcgtatggggggtgggacgtgacaatggacgggatttcgcctacgtcgctagggacaaagatacgagaatcctgaagtgccatgtgtttcgctgcgacacaccagccaaggcaatagcgacgtccctgcacgagatatgctcaaaaattatggccgagagaaagaacgcaaaagccctcgcgtgttcctccctccaggagcgtgccaacgtcaacttggatgttcccctgcaagattttccgacaccaaaaacagagctggttcagaaattccacgtgcagtacctcgggatgctgccggtggacaaacccgtcggtatggacattctgaattctgcaattgaaaacctgatgactagcagcaacaaggaagactggctcagcgttaatatgaacgtggccgacgcaacagtgacggtcatttctgaaaagaacgaggaagaagttctcgtggagtgcagagtgcgctttttgtccttcatgggcgtaggcaaggacgttcacaccttcgctttcattatggacacgggaaatcagcgttttgagtgtcacgtgttctggtgtgagcccaacgccggtaatgtttctgaagctgtgcaggcagcctgtatgctgcgctatcaaaagtgcctcgtggccagaccacccagccagaaggtaaggccgcctccacctcccgctgacagcgttacccgacgcgtaaccacaaacgtcaaaaggggcgtgttatcgctcatcgatacccttaaacaaaagcggccagtgactgagatgccctag

SEQ ID NO: 249507 - DNA, 2211 bp, Artificial Sequence
  derived and/or modified sequence
atgagcgaggtgctgcccgccgacagcggcgtggacaccctggccgtgttcatggccagcagcggcaccaccgacgtgaccaacagaaacagccccgccaccccccccaacaccctgaacctgagaagcagccacaacgagctgctgaacgccgagatcaagcacaccgagaccaagaacagcaccccccccaagtgcagaaagaagtacgccctgaccaacatccaggccgccatgggcctgagcgaccccgccgcccagcccctgctgggcaacggcagcgccaacatcaagctggtgaagaacggcgagaaccagctgagaaaggccgccgagcagggccagcaggaccccaacaagaacctgagccccaccgccgtgatcaacatcaccagcgagaagctggagggcaaggagccccacccccaggacagcagcagctgcgagatcctgcccagccagcccagaagaaccaagagcttcctgaactactacgccgacctggagaccagcgccagagagctggagcagaacagaggcaaccaccacggcaccgccgaggagaagagccagcccgtgcagggccaggccagcaccatcatcggcaacggcgacctgctgctgcagaagcccaacagaccccagagcagccccgaggacggccaggtggccaccgtgagcagcagccccgagaccaagaaggaccaccccaagaccggcgccaagaccgactgcgccctgcacagaatccagaacctggcccccagcgacgaggagagcagctggaccaccctgagccaggacagcgccagccccagcagccccgacgagaccgacatctggagcgaccacagcttccagaccgaccccgacctgccccccggctggaagagagtgagcgacatcgccggcacctactactggcacatccccaccggcaccacccagtgggagagacccgtgagcatccccgccgacctgcagggcagcagaaagggcagcctgagcagcgtgacccccagccccacccccgagaacgaggacctgcacgccgccaccgtgaaccccgaccccagcctgaaggagttcgagggcgccaccctgagatacgccagcctgaagctgagaaacgccccccaccccgacgacgacgacagctgcagcatcaacagcgaccccgaggccaagtgcttcgccgtgagaagcctgggctgggtggagatggccgaggaggacctggcccccggcaagagcagcgtggccgtgaacaactgcatcagacagctgagctactgcaagaacgacatcagagacaccgtgggcatctggggcgagggcaaggacatgtacctgatcctggagaacgacatgctgagcctggtggaccccatggacagaagcgtgctgcacagccagcccatcgtgagcatcagagtgtggggcgtgggcagagacaacggcagagacttcgcctacgtggccagagacaaggacaccagaatcctgaagtgccacgtgttcagatgcgacacccccgccaaggccatcgccaccagcctgcacgagatctgcagcaagatcatggccgagagaaagaacgccaaggccctggcctgcagcagcctgcaggagagagccaacgtgaacctggacgtgcccctgcaggacttccccacccccaagaccgagctggtgcagaagttccacgtgcagtacctgggcatgctgcccgtggacaagcccgtgggcatggacatcctgaacagcgccatcgagaacctgatgaccagcagcaacaaggaggactggctgagcgtgaacatgaacgtggccgacgccaccgtgaccgtgatcagcgagaagaacgaggaggaggtgctggtggagtgcagagtgagattcctgagcttcatgggcgtgggcaaggacgtgcacaccttcgccttcatcatggacaccggcaaccagagattcgagtgccacgtgttctggtgcgagcccaacgccggcaacgtgagcgaggccgtgcaggccgcctgcatgctgagataccagaagtgcctggtggccagaccccccagccagaaggtgagacccccccccccccccgccgacagcgtgaccagaagagtgaccaccaacgtgaagagaggcgtgctgagcctgatcgacaccctgaagcagaagagacccgtgaccgagatgccctag

SEQ ID NO: 249508 - protein, 2595 aa, Artificial Sequence
  derived and/or modified sequence
MASLFHQLQILVWKNWLGVKRQPLWTLVLILWPVIIFIILAITRTKFPPTAKPTCYLAPRNLPSTGFFPFLQTLLCDTDSKCKDTPYGPQDLLRRKGIDDALFKDSEILRKSSNLDKDSSLSFQSTQVPERRHASLATVFPSPSSDLEIPGTYTFNGSQVLARILGLEKLLKQNSTSEDIRRELCDSYSGYIVDDAFSWTFLGRNVFNKFCLSNMTLLESSLQELNKQFSQLSSDPNNQKIVFQEIVRMLSFFSQVQEQKAVWQLLSSFPNVFQNDTSLSNLFDVLRKANSVLLVVQKVYPRFATNEGFRTLQKSVKHLLYTLDSPAQGDSDNITHVWNEDDGQTLSPSSLAAQLLILENFEDALLNISANSPYIPYLACVRNVTDSLARGSPENLRLLQSTIRFKKSFLRNGSYEDYFPPVPEVLKSKLSQLRNLTELLCESETFSLIEKSCQLSDMSFGSLCEESEFDLQLLEAAELGTEIAASLLYHDNVISKKVRDLLTGDPSKINLNMDQFLEQALQMNYLENITQLIPIIEAMLHVNNSADASEKPGQLLEMFKNVEELKEDLRRTTGMSNRTIDKLLAIPIPDNRAEIISQVFWLHSCDTNITTPKLEDAMKEFCNLSLSERSRQSYLIGLTLLHYLNIYNFTYKVFFPRKDQKPVEKMMELFIRLKEILNQMASGTHPLLDKMRSLKQMHLPRSVPLTQAMYRSNRMNTPQGSFSTISQALCSQGITTEYLTAMLPSSQRPKGNHTKDFLTYKLTKEQIASKYGIPINSTPFCFSLYKDIINMPAGPVIWAFLKPMLLGRILYAPYNPVTKAIMEKSNVTLRQLAELREKSQEWMDKSPLFMNSFHLLNQAIPMLQNTLRNPFVQVFVKFSVGLDAVELLKQIDELDILRLKLENNIDIIDQLNTLSSLTVNISSCVLYDRIQAAKTIDEMEREAKRLYKSNELFGSVIFKLPSNRSWHRGYDSGNVFLPPVIKYTIRMSLKTAQTTRSLRTKIWAPGPHNSPSHNQIYGRAFIYLQDSIERAIIELQTGRNSQEIAVQVQAIPYPCFMKDNFLTSVSYSLPIVLMVAWVVFIAAFVKKLVYEKDLRLHEYMKMMGVNSCSHFFAWLIESVGFLLVTIVILIIILKFGNILPKTNGFILFLYFSDYSFSVIAMSYLISVFFNNTNIAALIGSLIYIIAFFPFIVLVTVENELSYVLKVFMSLLSPTAFSYASQYIARYEEQGIGLQWENMYTSPVQDDTTSFGWLCCLILADSFIYFLIAWYVRNVFPGTYGMAAPWYFPILPSYWKERFGCAEVKPEKSNGLMFTNIMMQNTNPSASPEYMFSSNIEPEPKDLTVGVALHGVTKIYGSKVAVDNLNLNFYEGHITSLLGPNGAGKTTTISMLTGLFGASAGTIFVYGKDIKTDLHTVRKNMGVCMQHDVLFSYLTTKEHLLLYGSIKVPHWTKKQLHEEVKRTLKDTGLYSHRHKRVGTLSGGMKRKLSISIALIGGSRVVILDEPSTGVDPCSRRSIWDVISKNKTARTIILSTHHLDEAEVLSDRIAFLEQGGLRCCGSPFYLKEAFGDGYHLTLTKKKSPNLNANAVCDTMAVTAMIQSHLPEAYLKEDIGGELVYVLPPFSTKVSGAYLSLLRALDNGMGDLNIGCYGISDTTVEEVFLNLTKESQKNSAMSLEHLTQKKIGNSNANGISTPDDLSVSSSNFTDRDDKILTRGERLDGFGLLLKKIMAILIKRFHHTRRNWKGLIAQVILPIVFVTTAMGLGTLRNSSNSYPEIQISPSLYGTSEQTAFYANYHPSTEALVSAMWDFPGIDNMCLNTSDLQCLNKDSLEKWNTSGEPITNFGVCSCSENVQECPKFNYSPPHRRTYSSQVIYNLTGQRVENYLISTANEFVQKRYGGWSFGLPLTKDLRFDITGVPANRTLAKVWYDPEGYHSLPAYLNSLNNFLLRVNMSKYDAARHGIIMYSHPYPGVQDQEQATISSLIDILVALSILMGYSVTTASFVTYVVREHQTKAKQLQHISGIGVTCYWVTNFIYDMVFYLVPVAFSIGIIAIFKLPAFYSENNLGAVSLLLLLFGYATFSWMYLLAGLFHETGMAFITYVCVNLFFGINSIVSLSVVYFLSKEKPNDPTLELISETLKRIFLIFPQFCFGYGLIELSQQQSVLDFLKAYGVEYPNETFEMNKLGAMFVALVSQGTMFFSLRLLINESLIKKLRLFFRKFNSSHVRETIDEDEDVRAERLRVESGAAEFDLVQLYCLTKTYQLIHKKIIAVNNISIGIPAGECFGLLGVNGAGKTTIFKMLTGDIIPSSGNILIRNKTGSLGHVDSHSSLVGYCPQEDALDDLVTVEEHLYFYARVHGIPEKDIKETVHKLLRRLHLMPFKDRATSMCSYGTKRKLSTALALIGKPSILLLDEPSSGMDPKSKRHLWKIISEEVQNKCSVILTSHSMEECEALCTRLAIMVNGKFQCIGSLQHIKSRFGRGFTVKVHLKNNKVTMETLTKFMQLHFPKTYLKDQHLSMLEYHVPVTAGGVANIFDLLETNKTALNITNFLVSQTTLEEVFINFAKDQKSYETADTSSQGSTISVDSQDDQMES

SEQ ID NO: 249509 - DNA, 7788 bp, Artificial Sequence
  derived and/or modified sequence
atggctagcttgttccaccagctgcagatcctggtgtggaaaaattggctgggagtgaagcgccagcctctctggactttggtactcatcctgtggcccgtgattattttcatcatcctagccatcaccagaacgaaatttccaccaacagccaaaccgacgtgttacctcgcacctcggaatctgccatctacgggattctttccctttctgcagactcttctgtgcgatacggactccaagtgtaaggatacaccctacgggccgcaagacttactgaggagaaaagggattgatgatgcgctgttcaaggattctgaaatcctgcgtaaatcaagtaatttggacaaagattcttcgctgagcttccagagcacccaggtccccgagaggaggcatgcttctctggcaactgtgttcccaagccctagttccgatcttgagatcccaggtacgtacacctttaatggctcccaggtgctggccaggatcctagggctggagaagctactgaaacagaactcaacctccgaggatatccggcgagaactgtgtgatagctacagtggatatatagtagacgatgccttttcctggacatttttgggccggaacgtattcaataagttttgtctctccaacatgaccctccttgagagctcactacaggagctgaacaaacagttttcccagctgagtagtgaccccaacaatcagaagatcgtcttccaggagatcgtgcgaatgctgtctttcttctcccaggttcaggagcagaaggccgtctggcaactgctgagctctttccccaacgtattccagaacgacactagcctgtccaacctgttcgatgtgcttcggaaggctaattccgtgcttcttgtggtccaaaaagtgtatcctaggttcgccacaaatgaaggtttccgcacactgcagaagtctgtgaaacatttactgtacaccctagattccccggctcagggagacagcgataacatcacccatgtttggaatgaggatgacggacaaactctgtctccaagcagcctcgcggcccagttgcttatacttgagaactttgaggatgcactactgaatatctctgccaactctccatatatcccctatctagcgtgtgtgcggaacgtaacagacagcctggctagaggatcaccggaaaatctgagattactacagagtactatcaggtttaaaaagagttttctgcgcaacggcagttatgaggattatttcccccctgtgccagaagtgctaaaatccaaattgagtcaactccggaatttaaccgagttgctgtgtgaatccgaaacgttttccttgatcgaaaaatcttgtcagctttccgacatgtccttcggtagcttatgcgaagaatccgagtttgacctccagctgctagaagccgccgaactaggcacagagatagcagctagcctgttatatcacgataacgttatatccaaaaaggtgagggatctgttgacaggtgatccgagcaaaattaaccttaatatggatcagtttcttgaacaggccctgcagatgaactatctcgagaacattactcagttaatacctatcattgaagcaatgctgcacgtcaacaacagtgccgacgccagtgagaaacccggccagctccttgaaatgttcaagaacgtcgaggaactcaaggaggatctgagacggacgactggcatgagcaataggaccattgataagctactcgcaattcctatccccgataacagggcggaaattatctcacaagtgttttggctgcattcctgcgatacaaacatcactactcctaagctcgaggacgctatgaaggagttttgcaatctgtcactttctgaacgctcccgtcaatcctatctcattggtctgaccttgctgcactatctgaacatctataacttcacttacaaagttttctttccacggaaagatcagaaacccgttgagaaaatgatggagctgttcatcagactcaaggagatccttaaccagatggcttccggcacacaccctctgctggataagatgaggagcctaaagcaaatgcatctaccacgttcagtccctctgacacaagccatgtacaggtcaaatcgcatgaacaccccccagggatccttctccacaataagtcaggctctgtgtagccaaggaattaccaccgaatatctgactgctatgctcccttcgtcccaacgacccaaaggcaatcataccaaagactttctgacttacaagctgaccaaggagcagattgcctccaagtacgggattcctatcaatagtacccctttttgtttcagtctgtacaaggatataatcaacatgcctgcagggccagtgatttgggccttcctgaaacccatgttgctgggcaggatcctgtatgcaccctacaatcccgtgaccaaagcaataatggagaagagcaatgtgaccctgagacaactggcggagttgcgggagaaatcccaggagtggatggacaagtccccgctgttcatgaattcgtttcacttacttaatcaagctatccccatgttacagaatactctgagaaatccttttgtgcaagtatttgtcaagttctccgtcgggctggatgcagtcgaattgctcaaacagatagatgagctggatattctgcgactgaagttagaaaataatattgatattattgaccaactcaacacactttccagcctgactgtgaatatttcctcatgcgtcttgtacgaccgaattcaggccgctaaaaccatcgacgaaatggagcgcgaggcgaaacggctttacaaaagtaacgagcttttcggctccgtaatcttcaaactcccttctaatcggtcttggcaccgcggctatgactctgggaacgtgttcctgcctcctgtgatcaaatacacgatcaggatgtccttaaaaacagcccaaaccactcgctctctgaggaccaaaatctgggctccggggccccacaattccccatcacacaaccagatctacggcagagctttcatttatctgcaggattcgattgagagagccataatcgaattgcagactggtcgtaactcccaggagattgctgtgcaggtgcaggctatcccttatccctgttttatgaaggataactttttaacaagtgtgtcctatagcctgccaatcgttctcatggttgcatgggtggtatttatcgccgcttttgtcaaaaaactcgtgtacgagaaagatctgagactgcatgagtacatgaaaatgatgggcgtcaattcctgttcacatttttttgcgtggcttattgaatcggtcggatttttgttagtgaccatagttattctgatcatcattttaaagttcggcaacatcttacccaagaccaacggttttattctctttctgtatttcagtgattacagcttttccgtcatagccatgagctacttgatttcagtcttcttcaacaacaccaacattgccgcgctgatagggagtcttatttacatcatcgccttcttccctttcatagtactcgtgacagtcgaaaacgaattgtcgtacgtgctcaaggtgttcatgagcctcctttcccccaccgccttcagttacgccagtcagtacatcgcccgctacgaggagcaggggataggactccaatgggagaacatgtatacaagtcccgtacaggatgacaccacaagctttgggtggttgtgctgcctaatacttgcggactccttcatttattttctgatcgcatggtacgtgagaaatgtgttcccgggcacatatggcatggcagcaccatggtatttcccgatcctgccaagttactggaaggaacggttcggctgcgccgaagtgaaacccgagaaatcaaacggcctgatgttcaccaatataatgatgcagaacacaaatccatctgctagtccagagtacatgttttcctccaatatagaaccggagccaaaggacctgaccgtcggagtggccttacatggagtgacaaagatctatgggagcaaagtcgcagtggataatttgaatcttaacttctatgagggccacattacgagcctcttagggcctaacggggcaggcaagactaccactatctctatgctgacaggactgtttggtgcatccgcaggcactatctttgtgtacggaaaggacattaagaccgacctccacactgttcgtaagaacatgggagtgtgcatgcaacacgacgtactgttctcctatctgacgacaaaagagcatctcctgctttacgggtccatcaaagtgcctcattggacgaagaaacaacttcatgaggaagtcaaacgaaccctgaaagacactgggctttatagccatcggcataaacgcgtgggaacactctcggggggaatgaagcgtaaactgagtatttctatagcactgattgggggaagcagggttgttatattagacgaacccagtaccggagtggacccttgctcaaggagatcaatttgggacgtgatctccaagaacaaaacagcgcgcactattatactgtccacgcaccacttggacgaggccgaggtcttgagcgaccgtatcgcttttctggagcagggtggccttcggtgctgcggatcacctttctaccttaaagaggccttcggagatggatatcaccttaccctgactaaaaagaagtcgcccaatttgaacgcaaatgcagtttgtgatactatggccgtgaccgccatgatccagagccacctgcccgaagcctatctgaaagaggacattggcggggaacttgtttatgtcctgccgccattctccaccaaggtctccggggcttatctttcccttttgagggctctggataacgggatgggcgatcttaacatcggatgttatggcatatcagacactaccgttgaggaggtattcctgaacctcacaaaggaatcgcagaagaatagtgcgatgagcctggagcacctcacccagaagaagatcgggaatagtaatgcgaacggaatcagtacacccgacgatttaagtgtgagcagctccaactttactgaccgggatgataagatattgactaggggggagagactcgatgggttcggcctgctgctaaaaaagattatggcgatcctcataaaacgctttcaccacacacgtagaaactggaagggcctgattgcccaagtcatactacctatcgtttttgtgactacggccatgggcctgggaaccctacgcaattccagcaactcctatcccgagatccagatctcaccttcactgtacgggaccagcgaacagaccgctttctacgccaactatcatcccagtacggaggccctggtttccgccatgtgggatttccccggcattgataatatgtgtttgaatacctcagatctccagtgcctcaataaggactccctcgagaagtggaacaccagcggggagccgatcactaattttggggtgtgctcatgcagcgaaaacgtgcaggagtgtcccaaatttaactattctcctcctcatcgaaggacatactccagccaggttatttataatctgaccgggcagcgtgtcgagaattatctcatatcaacggcgaacgaattcgtgcagaagcggtacggtgggtggtcctttgggctccctttgactaaggacctgcggtttgatattaccggtgtcccagctaacagaacactggctaaggtgtggtatgaccccgagggatatcactccttaccggcttatctcaacagccttaataatttcctcctgcgggtaaatatgagcaagtatgatgccgccagacacggcattatcatgtattcccatccttaccctggcgtacaggaccaagaacaggccaccatttcctcgttgattgacatcttggtggctctgtctattctcatggggtactccgtaactacagcttcatttgtgacttatgtggtgcgtgaacaccagacaaaagctaaacagctgcaacatatctctggaataggcgtcacatgttactgggtgaccaattttatatatgacatggttttctatctggttcctgtggcattttccattggtattatagctattttcaagctccccgctttttattccgagaataacttgggcgccgtttcccttctgctcctcctctttgggtatgccacgttcagctggatgtacctactcgctggactcttccatgaaacaggcatggcattcatcacatatgtctgcgtgaatctatttttcgggatcaatagtattgtatcactctcagtggtctacttcctgtccaaggagaaacctaatgaccctaccctggagctgatcagtgaaaccctcaagcgcattttcctgatcttcccgcagttctgtttcggatatgggttgatcgaactgagccagcaacagagcgtccttgatttcctaaaagcgtacggggtcgagtaccctaatgaaacattcgagatgaacaaactgggggccatgttcgtggcactggtcagtcagggaactatgttcttttcactgaggcttcttataaatgaatccctgataaaaaagctgcgtctgttcttccgcaagtttaattcatctcatgttcgagaaactatcgacgaggacgaggacgttcgggctgaaagactgagagtggaatccggagctgctgagtttgacttggtgcagctttactgtctgaccaaaacctaccaactgatccataagaaaataatcgccgtcaataatatttcgataggcatcccagcgggcgaatgctttggcctgttaggagtgaatggggcaggaaaaactaccattttcaagatgttgactggagatattatcccgagttctggaaatattcttatcaggaataaaacaggcagtttaggtcacgtcgactcccacagttccctggtgggatattgtcctcaagaggatgcactggatgatctcgtgactgtggaggagcatctgtatttttatgccagggtccacggtatccctgagaaagacattaaggagacagtccacaagctgcttcgcaggttgcatcttatgccatttaaggacagagctacttcaatgtgctcatacggaacaaaacggaaactaagcaccgcccttgctctgattggaaagccatcgatcctgttactggatgagccgtcctcaggcatggaccccaaatccaagcgtcacctctggaaaattatctccgaggaggtgcagaacaagtgttccgttatccttacaagtcacagcatggaggagtgcgaagctctctgtacccggctcgcgatcatggtgaacggtaagtttcagtgcataggatcactgcagcacattaagtctaggtttggcagagggttcaccgttaaagtgcatcttaaaaacaataaagtgacaatggaaacccttacgaaatttatgcagctgcatttccccaagacatacttaaaggatcagcatttgtctatgttagaatatcatgtgcctgtgaccgccgggggagtggccaacatctttgacttgctcgaaacgaataagactgcgttgaacatcaccaatttcctcgtctcccagactactctggaagaagtctttattaattttgctaaggaccaaaagagttacgagaccgcagacacaagctctcagggcagcactatttccgtcgattcacaagacgaccaaatggagtcctag

SEQ ID NO: 249510 - DNA, 7788 bp, Artificial Sequence
  derived and/or modified sequence
atggccagcctcttccaccagctgcagatcctggtgtggaagaactggctgggcgtgaagaggcagcccctgtggaccctggtgctgatcctgtggcctgtgatcatcttcatcatcctggccatcaccaggaccaagttccccccaacagccaagcccacctgctacctggcccccaggaacctgcccagcacaggcttcttccccttcctgcagaccctgctgtgtgacacagacagcaagtgcaaggacaccccctacggcccccaggacctgctgcggaggaagggcattgatgatgccctcttcaaggacagcgagatcctgaggaagagcagcaacctggacaaggacagcagcctgtccttccagagcacccaggtgcctgagaggagacatgccagcctggccaccgtcttccccagccccagcagtgacctggagatccctggcacctacaccttcaacggcagccaggtgctggcccgcatcctgggcctggagaagctgctgaagcagaacagcaccagcgaggacatcagaagagagctgtgtgacagctacagcggctacatcgtggatgatgccttctcctggaccttcctgggcagaaatgtgttcaacaagttctgcctgagcaacatgaccctgctggagagcagcctgcaggagctgaacaagcagttcagccagctgagcagtgaccccaacaaccagaagatcgtgttccaggagatcgtgaggatgctgtccttcttcagccaggtgcaggagcagaaggctgtgtggcagctgctgagcagcttccccaacgtgttccagaatgacaccagcctgagcaacctgtttgatgtgctgaggaaggccaacagcgtgctgctggtggtgcagaaggtgtaccccaggtttgccaccaatgaaggcttccgcaccctgcagaagtctgtgaagcacctgctgtacaccctggacagccctgcccagggcgacagcgacaacatcacccacgtgtggaatgaagatgatggccagaccctgagccccagcagcctggccgcccagctgctgatcctggagaactttgaagatgccctgctgaacatcagcgccaacagcccctacatcccctacctggcctgtgtgagaaatgtgacagacagcctggcccggggcagccctgagaacctgcggctgctgcagagcaccatccgcttcaagaagagcttcctgagaaatggcagctatgaggactacttcccccctgtgcctgaggtgctgaagagcaagctgagccagctgaggaacctgacagagctgctgtgtgagagcgagaccttcagcctgattgagaagagctgccagctgagtgacatgagctttggcagcctgtgtgaggagagcgagtttgacctgcagctgctggaggccgctgagctgggcacagaaattgctgccagcctgctgtaccatgacaacgtcatcagcaagaaggtgcgggacctgctgactggagaccccagcaagatcaacctgaacatggaccagttcctggagcaggccctgcagatgaactacctggagaacatcacccagctgatccccatcatcgaggccatgctgcacgtgaacaacagcgcagatgccagcgagaagccaggccagctgctggagatgttcaagaatgtggaggagctgaaggaggacctgcggaggaccaccggcatgagcaacagaaccatcgacaagctgctggccatccccatcccagacaacagagctgagatcatcagccaggtgttctggctgcacagctgtgacaccaacatcaccacccccaagctggaggatgccatgaaggagttctgcaacctgagcctgtctgagaggagccggcagagctacctgattggcctgaccctgctgcactacctgaacatctacaacttcacctacaaggtgttcttccccaggaaggaccagaagcctgtggagaagatgatggagctgttcatccggctgaaggagatcctgaaccagatggccagcggcacccaccccctgctggacaagatgaggagcctgaagcagatgcacctgcccaggtctgtgcccctgacccaggccatgtaccgcagcaacaggatgaacaccccccagggcagcttcagcaccatcagccaggccctgtgcagccagggcatcaccacagagtacctgacagccatgctgcccagcagccagaggcccaagggcaaccacaccaaggacttcctgacctacaagctgaccaaggagcagatcgccagcaaatatggcatccccatcaacagcacccccttctgcttcagcctgtacaaggacatcatcaacatgcctgctggccctgtgatctgggccttcctgaagcccatgctgctgggccgcatcctgtatgccccctacaaccctgtgaccaaggccatcatggagaagagcaatgtgaccctgcggcagctggccgagctgcgggagaagagccaggagtggatggacaagagccccctcttcatgaacagcttccacctgctgaaccaggccatccccatgctgcagaacaccctgaggaacccctttgtgcaggtgtttgtgaagttctctgtgggcctggatgctgtggagctgctgaagcagattgatgagctggacatcctgcggctgaagctggagaacaacatcgacatcatcgaccagctgaacaccctgagcagcctgactgtgaacatcagcagctgtgtgctgtatgaccgcatccaggccgccaagaccattgatgagatggagcgggaggccaagaggctgtacaagagcaatgagctgtttggatctgtcatcttcaagctgcccagcaacagatcctggcaccggggctatgacagcggaaatgtgttcctgccccctgtgatcaagtacaccatccgcatgagcctgaagacagcccagaccaccaggagcctgcggaccaagatctgggcccctggcccccacaacagccccagccacaaccagatctacggccgggccttcatctacctgcaggacagcattgaaagagccatcatcgagctgcagacaggaagaaacagccaggagattgctgtgcaggtgcaggccatcccctacccctgcttcatgaaggacaacttcctgacctctgtgtcctacagcctgcccatcgtgctgatggtggcctgggtggtgttcatcgccgcctttgtgaagaagctggtgtatgagaaggacctgcggctgcacgagtacatgaagatgatgggcgtgaacagctgcagccacttctttgcctggctgattgagagcgtgggcttcctgctggtgaccatcgtcatcctgatcatcatcctgaagtttggaaacatcctgcccaagaccaacggcttcatcctcttcctgtacttcagtgactacagcttctctgtgattgccatgagctacctgatcagcgtcttcttcaacaacaccaacattgctgccctgattggcagcctcatctacatcatcgccttcttccccttcatcgtgctggtgacagtggagaatgagctgtcctatgtgctgaaggtgttcatgagcctgctgagccccacagccttctcctatgccagccagtacatcgcccgctatgaggagcagggcatcggcctgcagtgggagaacatgtacaccagccctgtgcaggatgacaccaccagctttggctggctgtgctgcctgatcctggccgacagcttcatctacttcctgattgcctggtacgtgagaaatgtgtttcctggcacctacggcatggccgccccctggtacttccccatcctgcccagctactggaaggagcgcttcggctgtgccgaggtgaagccagagaagagcaatggcctgatgttcaccaacatcatgatgcagaacaccaaccccagcgccagccctgagtacatgttcagcagcaacatcgagcctgagcccaaggacctgactgtgggcgtggccctgcatggagtgaccaagatctacggcagcaaggtggccgtggacaacctgaacctgaacttctatgagggccacatcaccagcctgctgggccccaacggggccggcaagaccaccaccatctccatgctgaccggcctgtttggagccagcgctggcaccatctttgtgtatggcaaggacatcaagacagacctgcacacagtgaggaagaacatgggcgtgtgcatgcagcatgatgtgctcttctcctacctgaccaccaaggagcacctgctgctgtatggcagcatcaaggtgccccactggaccaagaagcagctgcacgaggaggtgaagaggaccctgaaggacaccggcctgtacagccaccgccacaagagggtgggcaccctgagcggcggcatgaagaggaagctgagcatcagcatcgccctgattggaggcagccgggtggtgatcctggatgagcccagcactggagtggacccctgcagccgccgcagcatctgggatgtgatcagcaagaacaagacagcccggaccatcatcctgagcacccaccacctggatgaggccgaggtgctgagtgacagaattgccttcctggagcagggcggcctgcgctgctgcggcagccccttctacctgaaggaggcctttggagatggctaccacctgaccctgaccaagaagaagagccccaacctgaatgccaatgctgtgtgtgacaccatggctgtgacagccatgatccagagccacctgcctgaggcctacctgaaggaggacatcggcggggagctggtgtatgtgctgccccccttcagcaccaaggtgtctggggcctacctgagcctgctgcgggccctggacaatggcatgggagacctgaacatcggctgctacggcatcagtgacaccaccgtggaggaggtgttcctgaacctgaccaaggagagccagaagaacagcgccatgagcctggagcacctgacccagaagaagattggcaacagcaatgccaacggcatcagcaccccagatgacctgtctgtgagcagcagcaacttcacagacagagatgacaagatcctgaccagaggagagcggctggatggcttcggcctgctgctgaagaagatcatggccatcctgatcaagcgcttccaccacaccaggaggaactggaagggcctcatcgcccaggtgatcctgcccatcgtgtttgtgaccacagccatgggcctgggcaccctgaggaacagcagcaacagctacccagagatccagatcagccccagcctgtatggcaccagcgagcagacagccttctacgccaactaccaccccagcacagaggccctggtgtctgccatgtgggacttccctggcatcgacaacatgtgcctgaacaccagtgacctgcagtgcctgaacaaggacagcctggagaagtggaacaccagcggggagcccatcaccaactttggagtgtgcagctgcagtgaaaatgtgcaggagtgccccaagttcaactacagccccccccacaggaggacctacagcagccaggtgatctacaacctgaccggccagagggtggagaactacctgatcagcacagccaatgaatttgtgcagaagagatatggaggctggagctttggcctgcccctgaccaaggacctgcgctttgacatcaccggggtgcctgccaacagaaccctggccaaggtgtggtatgaccctgagggctaccacagcctgcctgcctacctgaacagcctgaacaacttcctgctgcgggtgaacatgagcaaatatgatgctgcccggcacggcatcatcatgtacagccacccctacccaggagtgcaggaccaggagcaggccaccatcagcagcctgattgacatcctggtggccctgagcatcctgatgggctacagcgtgaccacagccagctttgtgacctacgtggtgcgggagcaccagaccaaggccaagcagctgcagcacatctctggaattggagtgacctgctactgggtgaccaacttcatctatgacatggtgttctacctggtgcctgtggccttcagcatcggcatcatcgccatcttcaagctgcctgccttctacagcgagaacaacctgggcgctgtgtccctgctgctgctgctgtttggctacgccaccttctcctggatgtacctgctggccggcctcttccatgaaacaggcatggccttcatcacctacgtgtgtgtgaacctcttcttcggcatcaacagcatcgtgtccctgtctgtggtgtacttcctgagcaaggagaagcccaatgaccccaccctggagctgatcagcgagaccctgaagaggatcttcctgatcttcccccagttctgcttcggctacggcctgattgagctgagccagcagcagagcgtgctggacttcctgaaggcctacggcgtggagtacccaaatgagacctttgagatgaacaagctgggcgccatgtttgtggccctggtgtcccagggcaccatgttcttcagcctgcggctgctgatcaatgaaagcctcatcaagaagctgcggctcttcttcaggaagttcaacagcagccacgtgcgggagaccattgatgaagatgaagatgtgcgggcagagcggctgcgggtggagagcggggctgctgagtttgacctggtgcagctgtactgcctgaccaagacctaccagctgatccacaagaagatcatcgctgtgaacaacatcagcatcggcatcccagctggggagtgcttcggcctgctgggcgtgaatggagctgggaagaccaccatcttcaagatgctgaccggggacatcatccccagcagcggcaacatcctgatccggaacaagacaggcagcctgggccacgtggacagccacagcagcctggtgggctactgcccccaggaggatgccctggatgacctggtgacagtggaggagcacctgtacttctacgcccgggtgcacggcatccctgagaaggacatcaaggagaccgtgcacaagctgctgcggcggctgcacctgatgcccttcaaggaccgggccacctccatgtgcagctatggcaccaagaggaagctgagcacagccctggccctgattggcaagcccagcatcctgctgctggatgagcccagcagcggcatggaccccaagagcaagaggcacctgtggaagatcatcagcgaggaggtgcagaacaagtgcagcgtcatcctgaccagccacagcatggaggagtgtgaggccctgtgcacccggctggccatcatggtgaatggcaagttccagtgcatcggcagcctgcagcacatcaagagccgcttcggccggggcttcaccgtgaaggtgcacctgaagaacaacaaggtgaccatggagaccctgaccaagttcatgcagctgcacttccccaagacctacctgaaggaccagcacctgtccatgctggagtaccacgtgcctgtgacagctggaggagtggccaacatctttgacctgctggagaccaacaagacagccctgaacatcaccaacttcctggtgtcccagaccaccctggaggaggtgttcatcaactttgccaaggaccagaagagctatgaaacagctgacaccagcagccagggcagcaccatctctgtggacagccaggatgaccagatggagagctag

SEQ ID NO: 249511 - DNA, 7788 bp, Artificial Sequence
  derived and/or modified sequence
atggccagcctgttccaccagctgcagatcctggtgtggaagaactggctcggcgtcaaacggcagccactgtggactctggtgctaattctttggcccgtgatcatctttattattttggcgattacgcgaaccaagtttccccctacagcaaaaccaacttgttaccttgctcctcggaatctgccaagcaccggcttttttcccttcctgcagacactcttatgtgatactgactcaaagtgtaaggatactccatacggccctcaggacctcctgcgccgcaagggcatcgatgacgcactatttaaggacagtgaaatcttgcgcaaaagctccaacctggataaggactctagcctgagctttcagagtacccaagtgccagagagaagacacgcctccctcgctaccgtgttcccctctccatcatcagatctggaaatcccgggcacctatacctttaatggcagtcaggttctggcaagaatcttaggcctagagaagttgctgaaacagaatagtaccagcgaagatatccggagggagctgtgcgattcttatagtggttacattgtggacgatgccttctcctggacctttctggggcgcaatgtgttcaataagttttgcttgagtaacatgacgctgttggaaagcagccttcaggagctcaataagcagttttctcagctgtcaagcgacccaaataatcagaaaattgtattccaggagatcgtgagaatgctcagtttcttttcccaagtgcaggaacagaaggccgtatggcagctgttgagctccttcccgaatgtctttcagaatgatacctcattgtcaaatctgttcgacgttctgaggaaagccaactctgtgcttctcgttgtgcagaaagtttaccccagatttgcaacaaacgaggggtttagaactctgcaaaagtctgtgaagcacctgctgtacacgctcgatagccccgcacaaggtgactcggataacataactcatgtgtggaacgaagatgacgggcagactctaagcccaagttcattggcagcacagctcctgattttggagaatttcgaggatgctttgctgaacataagtgccaatagtccttacataccatacctggcatgcgtgaggaacgttaccgacagcttggcaagaggaagtccagagaacctccggctgctccagtcgactatccgcttcaaaaagtccttcctgcgcaacggcagctacgaagattatttcccgcctgtacccgaggtcctgaagagtaagctatctcaactacgaaacctgacagagctcctgtgcgagtccgaaacatttagcctgattgaaaaaagctgtcaactcagtgacatgagctttggaagtctgtgtgaggagagcgaattcgacctgcaactgttggaagctgcggaacttggaaccgagatcgctgccagcctgctgtatcacgataatgttatctccaagaaggtgcgggatctcttgacaggagatcccagcaagattaacctgaatatggaccaattcctcgagcaggctcttcagatgaattacctcgaaaatattacccagctgatcccgattattgaggctatgttgcatgtgaacaatagtgccgacgctagtgagaagcccggccaactgctcgaaatgttcaaaaatgtggaagagctgaaagaggacctgaggcggacaactggaatgagtaaccgcacaattgacaagttattggctatacccataccagacaatcgcgcagaaattatttcccaagttttctggctgcattcctgcgatacaaacataaccacccctaagttagaagatgccatgaaggaattctgcaacttatcccttagcgagaggtccaggcaaagttatctaattgggctgaccctcctacattacctcaatatctacaattttacatacaaggtcttcttcccgcggaaagatcagaagccggtggagaaaatgatggagctgttcatcaggctcaaggagatcttgaatcagatggccagcgggactcatcctctgctggacaagatgcgctccctcaaacagatgcacctgcccaggagcgtgcccctgacccaggcaatgtacaggagcaaccggatgaacacgccacaaggttccttctctaccatcagccaagctctctgcagccaaggtattaccactgagtacttgacggcaatgcttccttcatcacagcgccctaaaggcaaccataccaaggactttctgacctataaactgaccaaggagcagattgctagcaagtatggcattcccatcaactccacacccttctgcttctccctgtataaggatatcataaacatgcctgctggcccggtgatctgggcattcttgaagccaatgctgctcggaaggattctgtatgccccttataatccagtgacaaaggctattatggagaagagtaatgttaccctgcgccagctcgcagagctgcgagaaaagagtcaggagtggatggacaagtcccccctgttcatgaattcctttcatctgcttaaccaagcgatccccatgctccagaacacactccgaaatccctttgtccaggtgttcgtgaagttctccgtcggtctggatgccgtggaattacttaaacagatcgatgagttggacatcttgagactcaagctggaaaacaacattgacataatcgaccagctgaacacactcagctcactgacggtgaatattagcagctgcgttctgtacgaccgcatacaggcggctaaaactatcgacgagatggaacgggaggccaaacgactgtataagtcaaatgagctgttcggcagcgtaatcttcaaactaccttccaatcgctcctggcatcgggggtacgatagtggcaatgttttcctcccccccgtgatcaagtacacaatccgcatgtccctgaagaccgcccagaccaccagaagtttaagaaccaagatttgggcacctggtcctcacaactccccaagccataatcaaatctatgggcgcgcattcatctacctgcaggacagtatcgaacgggcaattattgagctccagacagggaggaacagccaggaaatagctgtgcaagtacaggcaattccatatccctgcttcatgaaagacaatttcctcacgagcgtgtcgtacagtctgcctatcgtgcttatggtcgcctgggttgtgtttatagcggcttttgtgaaaaagcttgtgtacgaaaaggatttgaggttacacgagtacatgaagatgatgggtgtgaacagctgttcacatttttttgcctggctgatcgagtccgtaggtttcctacttgtgaccattgtgattctcatcattatccttaagtttggtaacatccttccgaaaacgaacggctttatccttttcctgtacttttccgactattccttcagcgtgatcgctatgagctacttgatctctgtgtttttcaataacactaatatcgccgcgcttatcggttccctgatttacatcatcgcattttttccttttattgtactcgtgacagtcgagaacgaactctcttatgtccttaaagtttttatgagcctcctgtcgcccacagctttctcatacgcctcacaatatatcgctagatatgaagagcaggggatagggttacagtgggagaatatgtacaccagcccagttcaggatgacacaacatccttcgggtggctgtgctgtcttatccttgctgacagctttatatatttcttgatcgcctggtatgtgcggaacgtcttccctggcacctacggcatggccgcgccctggtactttccgatcctgccaagttattggaaggagaggtttggatgtgcagaagtgaaacctgaaaaaagtaatggtctcatgtttactaatatcatgatgcagaatacaaacccatctgccagccctgagtacatgttctcctctaatattgaacccgagcccaaggatttgacggtcggagtagccttacatggcgtcacaaagatatacggaagtaaagtcgctgtggacaatctaaacctgaatttctacgaggggcatatcacttctctactggggcctaacggggcaggaaagacaactaccattagcatgctcactggactgtttggtgcaagcgccggaacaatctttgtgtacgggaaggacattaagacagatttacacactgtcagaaagaatatgggtgtttgtatgcagcacgatgtcctattctcttatctgacaactaaagaacacctgctactctatggctctataaaggtgccgcactggactaagaaacaactgcacgaggaagtaaagcgtaccctaaaagataccgggctgtattctcatcggcataaacgggtcggcactcttagcggaggtatgaaacggaagctgtctatctccattgctctcatcggcggtagtagggtcgtgatactcgacgagcctagtaccggggtggacccctgttccagacgttcgatctgggacgtaatctctaaaaataaaactgcccgcactataattctgagtacccaccacctcgatgaggccgaggttctctccgaccggatcgctttcctcgaacagggcggccttcggtgttgtggaagccccttttaccttaaagaagccttcggcgacgggtatcacctcacattgacaaaaaagaaatctccgaacctgaacgcaaacgccgtttgcgacaccatggcggtgaccgctatgatccagagtcacctgccggaggcatacctaaaggaagacatagggggggagcttgtgtatgtactgccccctttctccaccaaggtgtccggagcctacctcagtctccttcgagcattggacaatggcatgggagaccttaacattggctgttacggtatatccgacaccaccgtggaggaggtttttttgaaccttaccaaggaatctcagaagaactccgccatgagtctcgaacacctgactcagaagaaaatcggcaattctaatgccaacggaatttctacacccgatgatttgagcgtttcatcctctaatttcaccgatagagacgataaaatattgactcggggagaaagactcgacggcttcgggttattgcttaagaaaattatggcaatcctgataaagagatttcaccatacccgcagaaattggaaaggtctcattgctcaggtgatccttcccatagtgttcgttacaacagcaatgggactgggtacccttcgaaacagcagtaactcgtaccccgaaatacagatttcacctagcctctacggaacttccgagcaaactgctttttatgcaaactatcacccatcaactgaagccctggtcagtgcaatgtgggacttccctggcatcgacaacatgtgtctcaacacatcagacttgcagtgtctgaataaagattccctggagaaatggaatacttccggagaacctataactaacttcggggtgtgctcctgcagcgagaacgtacaagagtgccccaaattcaattattcgccaccacaccggcggacttattcctctcaagtaatctataatttgactggccaaagagtcgagaactaccttatctccaccgcaaatgaattcgtacaaaagcggtacggagggtggagcttcggtcttcctctcacaaaggatcttcgcttcgatataacaggtgtgccggctaaccgcacgttggccaaagtatggtatgatccagaggggtaccattcacttcccgcatacctcaattccttaaacaatttcctgctcagagtgaacatgagcaagtatgacgctgcgaggcacggtatcattatgtattcacatccttaccctggcgtacaggatcaggagcaggccactatatcaagcctcattgacattctggtggccctctccatcctgatgggctatagtgtgacgaccgccagttttgtaacatacgtggtgagggaacatcagaccaaagcaaagcagctacaacacatctcagggatcggcgttacttgctactgggtaacgaatttcatctacgacatggttttttacctggtacctgtcgccttttctattgggatcattgccatttttaagctgcctgccttttacagtgagaataatcttggtgctgttagtctgctcctgttgctcttcgggtacgccaccttcagctggatgtatttgctggctgggcttttccacgagacaggaatggcctttatcacatatgtctgtgtaaatctcttttttggtatcaactccatcgtaagcctgtccgtggtgtacttcctatccaaggaaaaaccaaacgacccaactttagagctgattagcgagacccttaagcgcatctttctgatctttcctcagttctgtttcggctacgggttgatagaactttcacagcagcagagtgtgctggattttctcaaggcttacggcgtggagtatcccaatgaaacatttgaaatgaataagctgggggccatgttcgtggccctggtgtcccagggcacgatgtttttctcactcaggcttctcatcaacgaatccctcattaagaagttgaggctattctttcgcaaattcaactcttcccacgtgagagagacaattgatgaggatgaggacgtcagggccgagagactgcgagtcgagagcggcgccgccgagttcgacctggtgcaactttactgcctcaccaagacgtaccagcttatccacaaaaagatcattgccgtcaacaatatttcaattggaataccagcgggggaatgcttcggtctcctgggggtgaacggggcaggcaagactactattttcaagatgctgacgggcgatataatcccctcgtcaggaaacattttgatccggaataagacggggagtttgggccacgttgatagtcacagctcgttggttggttactgcccacaggaggatgccctggacgatctcgtgacagttgaggagcacctgtatttttatgctagggtgcatggcatccccgaaaaggatatcaaggagaccgtccacaagttgttacgtaggctccacctcatgcctttcaaagaccgcgcaacctccatgtgcagctacgggacaaaacggaagctgtctacagctttagctctgattggcaaacctagcatcctgcttctggacgagccgtccagcggaatggaccccaaatcaaagcggcatctttggaagatcatatccgaggaggtgcagaataagtgtagcgtgatcctgacctcacacagtatggaggagtgtgaagcgttatgtaccagactggcaataatggtcaacggaaagtttcaatgtattggctctttgcaacatattaagtccaggttcgggcggggcttcacggtgaaggtacaccttaaaaataataaggtgacaatggaaacacttaccaaattcatgcagctccactttccaaagacttacctgaaggatcaacacctgtcaatgctcgagtaccacgtgccggtcacagctggaggcgttgcaaacatcttcgacttgttagagaccaataaaactgcacttaacattacaaacttcctcgttagtcagaccaccctagaggaggtgtttattaattttgctaaagaccagaaaagctacgagactgcagatacttccagccaggggtccacaatttccgtagactcgcaagatgaccagatggagtcatag

SEQ ID NO: 249512 - DNA, 7788 bp, Artificial Sequence
  derived and/or modified sequence
atggccagccttttccaccaactacagattttggtgtggaagaactggcttggggtgaagcgtcagcctctctggacgcttgtgctgatcttgtggccagtgataattttcataatcctcgctattaccagaactaagtttcctcctaccgctaagcccacctgttacctagccccaagaaatctgccttcaaccgggttctttccttttctgcagaccctcttatgtgacactgattctaagtgtaaagacactccctatggcccacaggaccttctgagaaggaaggggatagatgacgcactctttaaggactctgagatattaaggaaaagtagtaacctcgacaaagactccagtctcagcttccaaagtacccaggtgcctgagagaagacacgccagcctggctacggtctttccttcaccctcttcagacctggagatccctgggacatatacctttaacggcagccaggtgcttgctcggattctcggcttagagaagctgctgaaacagaatagcacatctgaagatatcaggagagaactgtgcgattcctactcaggctatattgtggacgatgccttcagctggacttttctggggagaaatgtgttcaataagttttgtctctcaaacatgacactgctggaaagttcacttcaggaactgaacaaacagttctctcagttgagctcagatcccaataatcagaaaatcgtttttcaggagattgtccgcatgcttagttttttctcccaggtgcaggagcagaaagcagtctggcagcttctctcctctttccccaacgttttccagaatgatacctcactctctaatctgttcgacgttctgcgaaaagcaaactcggtgttgctggtagttcagaaggtctacccaaggttcgccaccaatgaagggttccgaacgctccagaagagtgttaagcacctcctgtacactctggacagtcctgctcagggagatagcgacaacatcacccacgtgtggaacgaagatgacgggcaaacgttaagcccctctagtctcgctgcacaattgctcatcctggaaaatttcgaagacgccttactcaacatctcagcaaattcaccatacattccttacttggcatgcgtgcgtaacgttacagacagcctggcccgaggctctccggagaatctaagattactgcagtcaaccatccgtttcaaaaaatctttcctcaggaatggaagttatgaagactatttccccccagtgcctgaagtacttaagtctaagttatcccagctgcggaatttaacagagctactctgtgaatctgagacttttagtctgatagaaaagagctgccagctttctgatatgtcttttggttccctgtgcgaggaatccgaattcgacctgcaactgctcgaggcggcagaactcggaaccgagattgcggcttcacttttgtatcacgataatgttatctctaagaaagtcagagatctgctgactggagacccttccaaaatcaacctaaatatggaccagttcctggaacaggctctgcagatgaattaccttgaaaacattactcaattgatccccattattgaggccatgctccacgtgaataattcggccgacgcctctgagaagccaggacagctccttgagatgtttaagaacgtggaggaattgaaagaggacctgcgtagaacaactggcatgtccaaccgtacaattgataagcttctcgctatccccatccccgacaatcgggctgagatcatctcacaggtgttttggctccactcttgtgatacgaacattacaacaccaaagctagaggacgccatgaaggagttctgtaatctgtccctctcagagaggagtcggcagagctacctgataggattgactctgttacattacctgaatatttacaattttacatataaggtgtttttccctagaaaggaccagaagcctgtggagaagatgatggagctttttatcaggctcaaagaaatattaaatcagatggcgagcggtacacatcctctgcttgataagatgcgttcactcaagcaaatgcacctgccacgatccgtgcctcttacacaggctatgtatcgctccaacagaatgaatacacctcaaggcagctttagtaccatctcccaggctctatgcagtcaggggattaccacggaatatcttacagcgatgctacctagtagtcaacgacctaagggaaaccataccaaagattttctgacctataagctcactaaggagcaaattgccagtaaatatggcattccgatcaactctacacctttttgtttctcgctgtataaggatatcatcaatatgccagcaggtcctgtgatctgggctttccttaagcccatgctgttgggccgtatcctgtatgcgccttataaccccgtaactaaagctatcatggagaaatcaaatgtcacactgcgccagctcgctgaattacgggaaaaatcccaagagtggatggacaagtcaccactgttcatgaactctttccatttacttaatcaggctatcccgatgctgcagaacacacttcgaaacccattcgtgcaggttttcgttaaattttcagtaggactggacgcagtggagttactaaaacagatcgacgaactcgatattctgagactgaagctggagaataatatcgatatcatcgaccagctgaacacccttagcagtctgaccgtaaatattagctcctgcgtactatacgataggattcaggctgcaaaaaccatcgatgaaatggaacgcgaagctaagcgactctacaagtcaaacgaactcttcggttccgtgatttttaaattacccagcaaccgctcatggcataggggctatgattccggcaacgtgttcctgccacccgtgattaaatacacaatcaggatgagcctgaaaactgcacagaccacccggagtctccggaccaagatttgggcccctgggccacacaactcgccctctcataaccaaatttacgggagagcttttatttacctacaggactccattgaacgggcaattatcgagctccagaccggaaggaattcgcaggaaatcgccgtgcaggtgcaggcaattccctacccatgtttcatgaaggacaattttctgacatccgtcagttactcgctgcccattgtgctgatggtcgcgtgggtggtgtttatcgccgctttcgtgaagaagcttgtgtacgagaaagatctcaggcttcacgagtatatgaagatgatgggcgtgaacagctgttcacacttcttcgcttggctgatcgagtcagtcggtttcttattggtgactatagtcatactgatcattattctcaaattcggcaatatactacctaaaaccaatggattcatcctgtttctgtacttcagcgattattcattcagtgtgatagctatgagctacctgattagcgtattttttaataacacaaatatagctgccctcatcggctccttgatctacattattgctttcttcccgttcattgtcttagttactgtggagaacgaattatcttacgtcttaaaggttttcatgtcactactgagcccaacggctttttcctatgctagccaatatatcgccagatacgaggagcaaggcatcggtctccagtgggaaaatatgtacacaagcccagtacaggacgacactacgtcatttgggtggctctgctgcttaatattggcagacagcttcatctatttcctcattgcgtggtacgtgcgaaacgtgtttcccggaacatacggcatggccgctccatggtattttccaattctgccctcctattggaaggaacgtttcggatgcgcggaggtgaagccagaaaagagcaacggtctgatgttcaccaacatcatgatgcagaatacgaatcctagcgcctctcccgaatatatgttttcctctaacatcgaacctgagcctaaggacctcactgtgggcgtggcccttcatggcgtgacaaaaatttatggttcaaaggttgcggtggacaatttgaatctcaacttctatgagggacacatcacctcccttttggggccaaacggtgccggaaaaacaacaacaatttcaatgttaacaggcttgtttggcgcaagtgctgggaccatatttgtttatggaaaagacattaagacagatctgcacacagttagaaagaacatgggggtctgcatgcagcacgacgtgctgttttcttacctgaccactaaagaacatctgctcctttacgggagtatcaaggtgcctcattggactaagaagcaactgcacgaggaggtgaagcggaccctaaaggacaccggtttatatagccaccgccataagagggtgggcaccttgagcgggggtatgaagcgcaaactgtctatcagcatcgcgctcattggaggctctcgagtggtgatattggatgaaccatccactggcgtggatccctgcagcagaagatctatatgggatgtgatttccaaaaataagacagcgagaacaatcatattgtctacccaccatctcgacgaggctgaggttctgtcggatcggattgcgttcctggagcagggaggccttcggtgttgtggctcccctttctacctcaaagaggcatttggggatgggtaccacctgacactaaccaagaagaaatcccccaatctgaacgcaaacgcagtgtgtgacactatggcagtgactgccatgattcagtcacacctgcccgaggcttacctgaaggaggatattggcggtgagctagtttatgtcctgcctcccttttctaccaaggttagcggcgcttatcttagcttgctgcgggcactggataatggcatgggtgacctgaacatcggatgttatggcatttcagacaccacagtggaagaagttttcctcaatctcaccaaggaatcacagaaaaactcagccatgtcactggaacatctgacacagaaaaagatagggaattctaacgctaatggcatctcgacccccgacgatctgtcagttagcagcagcaatttcaccgaccgcgacgacaaaatcttgacacgtggggagcggctggatgggtttggtttactcctgaagaagattatggccattttgatcaagcgattccaccacacgagacggaattggaagggcctgattgcacaggtcattctgcccatcgtcttcgttactactgccatggggctcggcactctgcgtaactccagcaattcctaccctgagatccaaatctctcccagcctctatggtacctctgaacagaccgctttctacgcaaattaccacccctctactgaagctttagtttctgccatgtgggactttcctggcatcgacaacatgtgtctgaacacttccgacttgcagtgtttaaacaaggacagcctcgaaaagtggaatacaagcggagaacccataacaaactttggcgtctgctcctgcagcgaaaacgtgcaggagtgtccaaaatttaactacagccccccacataggagaacctattcgagccaagtgatttacaacctgactggtcaacgggtggagaactatctgatttccacagcaaacgaattcgtccaaaagcggtacgggggttggagcttcgggctccctctcactaaagaccttcgctttgatatcacgggggtgcccgcaaatcggaccctggctaaggtatggtacgatcccgaggggtatcactcattacctgcttatctgaactcactaaacaactttctgctccgtgtgaatatgagtaaatacgacgcggctagacatgggattatcatgtacagccacccttatcccggtgtacaggatcaggaacaggcaacaatctcttccctgattgatatactcgtcgccctctccatcctgatggggtactctgtaaccacagcatcgttcgtgacctacgtcgttcgcgagcatcagacaaaagctaaacaactccagcatatttctgggatcggcgtcacctgctactgggtaacgaacttcatctacgacatggtcttctatctcgtccccgtggctttctccatcggcatcattgctatcttcaagttgcccgctttctatagtgaaaataacctgggcgcagtgtccttgttgctattactattcggctatgctaccttttcttggatgtacttgttggccggactatttcacgagactggtatggctttcatcacatatgtctgtgtgaacctctttttcgggatcaacagcatcgtcagcttatccgtggtatacttcctttccaaggagaagcccaatgatcccacattagagctgatctccgagaccctcaaacgcatctttttaatttttcctcaattttgttttgggtatggcctcatagagctgagccagcagcagtcagtccttgattttttgaaggcttacggagtagaatatccaaatgaaacgttcgaaatgaacaagttaggcgctatgttcgtcgccctggtatcccagggaaccatgtttttttctctgaggctattgataaatgagagcttaataaaaaagctcaggctctttttccggaaatttaactcctcccacgtacgggagaccatcgacgaggacgaggatgtacgcgcagaacggctgcgggtggagagcggagccgctgagttcgatctggtgcagctctattgccttacaaaaacctatcagctgatacataaaaaaataattgcagtgaataatattagtattgggatcccagctggggaatgtttcggacttcttggggtgaatggagccggtaagacaactattttcaagatgcttacgggcgacatcataccttcctctggaaatattttaattagaaacaagacaggcagcctggggcacgtggattctcactcaagcttggtcggctattgcccacaggaagatgccctcgacgatctcgtcactgttgaggagcacttgtatttttacgccagagtccatggcatcccggagaaagacattaaggagactgtgcacaagctgttgcgacgattacatctaatgcctttcaaggatcgtgccacgtccatgtgttcctatggcacgaaacgcaagctgagtactgctcttgcactgataggcaagccatcgattctgctgcttgacgagccctcttctggaatggatcccaagtctaagcgccatctgtggaagataatatctgaggaagtgcagaacaagtgttctgttatcctcacatcccactctatggaggaatgtgaggccctgtgtacacgcctggctatcatggtgaacgggaagttccagtgcatcggctccctccagcacatcaaaagtcgcttcggccgaggcttcactgtgaaggtccacctcaaaaataacaaagtcaccatggagaccctgactaaattcatgcagttgcacttccccaagacctatctcaaggaccagcatttaagcatgcttgaatatcacgtgccagtaaccgctgggggtgtggcaaatatctttgacctgctggaaaccaataagacggctctcaacatcacaaatttcctggtgagtcagaccactctggaagaggtgttcatcaatttcgccaaggatcagaagtcttatgagactgccgacacttcctcacagggttccacaatcagcgtcgatagccaagacgaccagatggaatcctac

SEQ ID NO: 249513 - DNA, 9100 bp, Artificial Sequence
  derived and/or modified sequence
gaagagttgattgagaagtgcctcttggttaaggattaaccacagggaaaaatccagcagaaacagaagaactgtgggtttcttaccccagccctcaaggaagctatgccgtgaaaggggtactgatacactgacatacagcaagttggacggggcatcagttcttcatttgtggagtggagaaaagaagaggaaatctctcatttggggcatttgaaggatggcttccctgtttcatcagcttcagatcctggtctggaaaaattggctaggtgtaaaaaggcagccgctttggacacttgtcttgatcttatggccagtcattattttcataattttggctattactcggaccaaatttcctccaactgcaaaaccaacttgttacctcgcacctcgaaaccttcctagtactggattctttccattcctgcagaccctactctgtgacacagactctaaatgcaaagacacaccctatggcccacaagatctgcttcgtaggaaaggaattgatgatgcactatttaaagacagtgagattctgagaaagtcatccaacctggataaggacagcagtttatcattccagagcacccaagttccagaaagaaggcatgcatcactagccacagtatttcccagtccaagttctgatttggaaatccccggaacatatactttcaatggcagtcaagtgctcgcacgaattcttggcttggaaaagctgttaaagcaaaattcaacttcagaagatatacgaagagaactatgtgacagctattcaggatacattgtggatgatgccttctcttggacctttctaggaagaaatgtttttaacaaattttgcctttctaacatgacccttttagagtcttctctccaagaactaaacaaacagttctcccagctatccagtgaccccaacaatcagaagatagtgtttcaggaaatagtcagaatgctgtctttcttctcacaagtgcaagagcagaaagctgtgtggcagcttctgtctagttttccaaatgtgtttcagaatgacacatcactaagcaatctatttgatgttcttcgaaaggcaaacagtgtgctgctggttgtgcagaaggtttatccacgttttgcaactaacgaaggtttcagaaccctccagaagtctgttaaacatctgctgtacactctggactccccagctcaaggtgactccgataatataacgcatgtgtggaatgaggatgatggacagaccttatctccaagcagtctggctgcacagctcctaattctggaaaactttgaagatgccctcttaaatatatcagcaaatagtccttatattccttacttggcatgtgtgagaaatgtgactgacagtttggccagaggttcaccagaaaatctaagactcctgcagtccacaatacgatttaaaaaatcttttcttcgcaatggttcctatgaagattactttcctccagttcctgaagtcctaaaatcaaaactgtctcaacttcgaaacttgaccgaacttctttgtgaatctgaaactttcagtttgatagagaagtcatgccagctctctgatatgagctttgggagcctgtgtgaagaaagtgagtttgatctgcaactcctcgaagcggcagagctgggcaccgaaatagcagccagcttactgtaccatgacaatgtcatatctaaaaaagtgagagatttgctgactggagatccaagcaaaattaatttaaatatggatcagtttctagaacaggcactgcaaatgaattacttggaaaatatcactcagttaataccgatcatagaagccatgctgcatgtcaataacagtgcagatgcttctgaaaagccaggtcagttactagaaatgtttaaaaatgttgaagagctgaaagaagatttaaggagaacaacaggaatgtccaacaggactattgacaagttgctggccattcccatccctgataatagagctgagattatttctcaggtgttctggctgcattcctgtgatactaatatcaccactcccaaactagaagatgcaatgaaagaattctgcaacctgtctctttcagagagatcccggcagtcttacctcatcggactcacccttctgcactacttaaacatttacaacttcacatacaaggtgtttttcccgaggaaagatcaaaagccagtagaaaagatgatggagctcttcataagactaaaagagattctcaatcagatggcttctggcacacatccgctgctagacaaaatgagatccctgaagcaaatgcatctgcccagaagtgttccattaacacaggcaatgtacagaagcaaccgaatgaacacaccacaaggatcatttagcaccatctcccaagcattatgttctcaaggaattaccactgaatatttaactgccatgctgccctcttcccagaggccaaaaggcaaccacaccaaggattttttgacttataaattaactaaagagcaaattgcttcaaaatatggaattcccataaattccacaccattttgcttctccctttataaagacatcattaacatgcccgctggacctgtgatttgggctttcttgaaacctatgttgttgggaagaattttgtatgcaccatataacccagtcacaaaggcaataatggaaaagtccaatgtaactctgagacagctggcggaattaagagaaaaatctcaagagtggatggataagtcgccacttttcatgaattccttccatctgttaaaccaggcaattccaatgctccagaatactctaaggaacccttttgtgcaagtttttgtaaagttctccgtgggactcgatgctgttgaactattgaaacagatagatgaactcgatattctaagactgaaattagagaacaacattgacatcatcgatcagcttaacacactatcttccctgacagtaaatatttcctcttgtgtattatatgaccgtattcaggcagcaaaaaccatagatgaaatggagagagaggctaaaaggctctacaaaagcaacgaactctttggaagtgttatttttaagcttccttctaacagaagctggcacagaggctatgactctggaaatgtctttcttcctcctgtcataaaatataccatccggatgagtctcaagaccgcacagaccacaagaagcctaagaaccaagatttgggctccagggccacacaattctccatcacacaaccagatctatggcagggcttttatttatttacaggatagtattgaaagagcaatcattgaattgcaaactggaaggaactcccaggaaatagcagtccaggttcaagcaattccttatccctgcttcatgaaagacaacttcctaaccagtgtctcttattctcttccaattgtgcttatggttgcctgggttgtatttatagctgcctttgtaaaaaagcttgtctatgagaaagacctccggcttcatgagtacatgaagatgatgggtgtgaactcctgcagccatttctttgcctggcttatagagagtgttggatttttactggttaccatcgtgatcctcatcattatactcaagtttggcaatattcttcctaaaacaaatgggttcattttgttcctgtatttttcggactacagcttctcggttattgccatgagctatcttatcagtgtcttcttcaacaacaccaacattgcagctctgatcggaagcctcatctacatcattgccttctttccatttattgttctggttacagtggagaatgagttgagctatgtattgaaagtgttcatgagcctgctgtccccaacagcattcagctatgcaagccaatacattgcacgatacgaagaacagggcattggtcttcagtgggaaaatatgtacacctccccggttcaggatgacaccacctcatttggctggctgtgctgtctaatcctagctgactctttcatttatttccttattgcttggtatgtcaggaatgtcttcccagggacatacggtatggcagctccctggtattttccaattcttccttcctattggaaggagcgatttgggtgtgcagaggtgaagcctgagaagagcaatggcctcatgtttactaacatcatgatgcagaacaccaacccatctgccagtcctgaatacatgttttcctctaacatcgagcctgaacctaaagatctcacagtcggggttgccctgcatggggtcacaaagatctatggctcaaaagttgctgttgataacctcaatctgaacttttatgaagggcatattacttcattgctggggcccaatggagctgggaaaactactaccatttccatgttaactgggctgtttggggcctcagcaggcaccatttttgtatatggaaaagatatcaaaacagacctacacacggtacggaagaacatgggagtctgtatgcagcacgacgtcttgttcagttacctcactactaaggagcaccttctcctatatggttccatcaaagttcctcactggactaaaaagcagctccacgaggaagtaaaaaggactttaaaagatactggactatatagccatcgtcataagagagttggaacactgtcaggaggcatgaagaggaagttatctatatccatagctctcattggtggatcaagggtagtaattttggatgaaccatctactggagttgacccatgttctcgccgaagtatatgggatgttatatccaagaacaaaactgccagaacaatcattctgtcaacgcaccacttggacgaggctgaagtgctgagtgaccgcatcgccttcctggagcagggtgggcttaggtgctgtgggtccccattttacctcaaggaagcctttggcgatgggtatcacctcacgcttaccaagaagaagagtccaaatttaaatgcaaatgcagtatgtgacaccatggccgtgacagcaatgatccaatcacatctccccgaagcctacctcaaggaggatattgggggagagcttgtttatgtacttcctccattcagcaccaaagtctcaggggcctacctgtcactcctacgggcactcgacaatggcatgggtgacctcaacatcgggtgctacggcatttcagataccaccgtggaggaggtctttctgaacttgaccaaagagtcacaaaaaaatagtgctatgagtcttgagcacttaacacaaaagaaaattgggaattccaatgccaatggcatctcaactcctgacgatttatctgtgagcagcagcaatttcacagacagagatgacaaaatcctgacaagaggagagaggctggatggctttggactgttgctgaagaagatcatggctatactcatcaagaggttccaccacacccgcaggaactggaaaggtctcattgctcaggttatcctccccatcgtctttgttaccactgccatgggccttggcacactgagaaattccagcaacagttatccagagattcagatctccccctctctttatggtacctccgaacagacagccttctatgctaattatcacccgagcacggaagcacttgtctcagcaatgtgggacttccctggaattgacaacatgtgtctgaacaccagtgatctacagtgtttaaacaaagacagtctggaaaaatggaacaccagtggagaacccatcactaattttggtgtttgctcctgctcagaaaatgtccaggaatgtcctaaatttaactattccccaccgcacagaagaacttactcatcccaggtaatttataacctcactgggcaacgagtggaaaattatcttatatcaactgcaaatgagtttgtccaaaaaagatatggaggttggagttttgggctgcctttgacaaaagaccttcgttttgatataacaggagtccctgccaatagaacacttgccaaggtatggtatgatccagaaggctatcactcccttccagcttacctcaacagcctgaataatttccttctgcgagttaacatgtcaaaatacgatgctgcccgacatggcatcatcatgtatagccatccttatccaggagtgcaagaccaagaacaagccacaatcagcagtttaatcgatattttagtggcactgtctatcttgatgggctactctgtcaccaccgccagctttgtcacctatgttgtaagggaacatcaaaccaaagccaaacagttgcagcacatttcaggcattggcgtgacatgctactgggtaacaaacttcatttatgacatggttttctacttggtgcctgtagcgttttcaattggtatcattgcgattttcaaattacctgcattctacagtgaaaacaacctaggcgctgtatctctcctacttctcctgtttgggtatgcaacattttcctggatgtacttgctggctgggctcttccatgaaacaggaatggccttcatcacttacgtctgtgtcaacttgttttttggcattaattccattgtttccctgtcagtggtatactttctttccaaggaaaagcctaatgatccgactttagaacttatttctgaaaccctcaagcgcattttcctgattttcccacaattctgttttggctacggtttgattgaactttctcaacaacagtcggtcctagacttcttaaaagcatatggagtggaatacccaaatgaaacctttgagatgaataaactaggtgcaatgtttgtggctttggtttctcagggcaccatgtttttttccttgcgactcttaatcaacgaatccctgataaagaaactcaggcttttcttcagaaaatttaattcttcacatgtaagggagacaatagatgaggatgaagatgtgcgggctgagagattaagagttgagagtggtgcagctgaatttgacttggtccaactttattgtctcacaaagacctaccaacttatccacaaaaagattatagctgtaaacaacatcagcattgggatacctgctggagagtgttttgggcttcttggagtgaatggagcaggaaagaccactatattcaagatgctgacaggagacatcattccttcaagtggaaacattctgatcagaaataagaccggatctctgggtcacgttgattctcacagctcattagttggctactgtcctcaggaagatgccttagatgacctggtaactgtggaagaacatttgtatttctatgccagggtacatggaattccagaaaaggatattaaagaaactgttcataaactccttaggagacttcacctgatgcccttcaaggacagagctacctctatgtgcagttatggcacaaaaagaaaattatccactgcactggccttgatagggaaaccttccattctactgctggatgagccgagctctggcatggatccgaagtcgaaacggcacctctggaagatcatttcagaagaagtacagaacaaatgttccgtcatcctcacatctcacagcatggaagaatgtgaagctctctgtaccaggttggccattatggtgaatggaaagtttcaatgtattggatctttgcagcacataaagagcaggtttggacgaggatttactgtcaaagttcacttgaagaataacaaagtgaccatggagaccctcacaaagttcatgcagctgcactttccaaaaacatacttaaaagatcagcacctcagcatgctagagtatcatgtaccagtcacagcaggaggagtcgcaaacatttttgatctgctggaaaccaacaagactgctttaaatattacaaatttcttagtgagtcagaccactctggaagaggttttcatcaactttgccaaagaccagaagtcctatgaaactgctgataccagcagccaaggttccactataagtgttgactcacaagatgaccagatggagtcttaacacttccagcaaactcaatctcagcgtgtgaccaatggcttcattttgaagaaaagccacagaagatacacttccgcaagatatcttcattttaaagtaaagtaatatactgtatggaaagttacaactgtgttagactaacaagtaattataaaaggaaatttttccttctaaggtcagtgagtgttgttgctactgaaatgaattcctgtatactcaacactgtgagcatgctaatgtatatgctggtgattcttatgcaaaggtgaagccacctcaagatgaatatcttaatttattactttcaataaaaagacagtttaaaaggcatggattttggtagttgaaatataagagtggagaagaaaagtcagatggtttgtggcaggtgccaccgggcaagcagacaacataatttatttccagaaaacaacagaatgaacatcatcatgaatacatgaatcggctgtgatgtgtgaactgctaagggccaaatgaacgtttgcagagcagtgggcacaatgtttacaatgtatgtgtatgtcactttcggtacctgtgaatgcatggggacgtgctgaacccgaaaaaaagtgcctttccataaggactgcaatagagagggcaatttaccctggtggtacacggaacctagattcactcctgccatgccttgccaatagtaagctgcagggtggaacaagaaatcacttgctctggggggaagggaggggggaatgggtgtgtcagctgggtagatacaaaccctgaaaagagaatccatgtgctactggcaggcaacattttttaaagctctttcagaaaccctcatatttggggtttcttttcaggaaacattcctgtggagggaaaacgaatatgaagataattttcagctaattatctgggtgacccagaatcgtgtatatggctataggatagacttcttaataatggcaagtgacgtggccctggggaaaggtgctttatgtaccgtgtgtgcgtgtatgtgtgtgtatctatacaagtttgtcagctttggcatgactgtttgtctcgaaaaccaataaactcaaagtttagaaaaactca

SEQ ID NO: 249514 - DNA, 7788 bp, Artificial Sequence
  derived and/or modified sequence
atggccagcctgttccaccagctgcagatcctggtgtggaagaactggctgggcgtgaagagacagcccctgtggaccctggtgctgatcctgtggcccgtgatcatcttcatcatcctggccatcaccagaaccaagttcccccccaccgccaagcccacctgctacctggcccccagaaacctgcccagcaccggcttcttccccttcctgcagaccctgctgtgcgacaccgacagcaagtgcaaggacaccccctacggcccccaggacctgctgagaagaaagggcatcgacgacgccctgttcaaggacagcgagatcctgagaaagagcagcaacctggacaaggacagcagcctgagcttccagagcacccaggtgcccgagagaagacacgccagcctggccaccgtgttccccagccccagcagcgacctggagatccccggcacctacaccttcaacggcagccaggtgctggccagaatcctgggcctggagaagctgctgaagcagaacagcaccagcgaggacatcagaagagagctgtgcgacagctacagcggctacatcgtggacgacgccttcagctggaccttcctgggcagaaacgtgttcaacaagttctgcctgagcaacatgaccctgctggagagcagcctgcaggagctgaacaagcagttcagccagctgagcagcgaccccaacaaccagaagatcgtgttccaggagatcgtgagaatgctgagcttcttcagccaggtgcaggagcagaaggccgtgtggcagctgctgagcagcttccccaacgtgttccagaacgacaccagcctgagcaacctgttcgacgtgctgagaaaggccaacagcgtgctgctggtggtgcagaaggtgtaccccagattcgccaccaacgagggcttcagaaccctgcagaagagcgtgaagcacctgctgtacaccctggacagccccgcccagggcgacagcgacaacatcacccacgtgtggaacgaggacgacggccagaccctgagccccagcagcctggccgcccagctgctgatcctggagaacttcgaggacgccctgctgaacatcagcgccaacagcccctacatcccctacctggcctgcgtgagaaacgtgaccgacagcctggccagaggcagccccgagaacctgagactgctgcagagcaccatcagattcaagaagagcttcctgagaaacggcagctacgaggactacttcccccccgtgcccgaggtgctgaagagcaagctgagccagctgagaaacctgaccgagctgctgtgcgagagcgagaccttcagcctgatcgagaagagctgccagctgagcgacatgagcttcggcagcctgtgcgaggagagcgagttcgacctgcagctgctggaggccgccgagctgggcaccgagatcgccgccagcctgctgtaccacgacaacgtgatcagcaagaaggtgagagacctgctgaccggcgaccccagcaagatcaacctgaacatggaccagttcctggagcaggccctgcagatgaactacctggagaacatcacccagctgatccccatcatcgaggccatgctgcacgtgaacaacagcgccgacgccagcgagaagcccggccagctgctggagatgttcaagaacgtggaggagctgaaggaggacctgagaagaaccaccggcatgagcaacagaaccatcgacaagctgctggccatccccatccccgacaacagagccgagatcatcagccaggtgttctggctgcacagctgcgacaccaacatcaccacccccaagctggaggacgccatgaaggagttctgcaacctgagcctgagcgagagaagcagacagagctacctgatcggcctgaccctgctgcactacctgaacatctacaacttcacctacaaggtgttcttccccagaaaggaccagaagcccgtggagaagatgatggagctgttcatcagactgaaggagatcctgaaccagatggccagcggcacccaccccctgctggacaagatgagaagcctgaagcagatgcacctgcccagaagcgtgcccctgacccaggccatgtacagaagcaacagaatgaacaccccccagggcagcttcagcaccatcagccaggccctgtgcagccagggcatcaccaccgagtacctgaccgccatgctgcccagcagccagagacccaagggcaaccacaccaaggacttcctgacctacaagctgaccaaggagcagatcgccagcaagtacggcatccccatcaacagcacccccttctgcttcagcctgtacaaggacatcatcaacatgcccgccggccccgtgatctgggccttcctgaagcccatgctgctgggcagaatcctgtacgccccctacaaccccgtgaccaaggccatcatggagaagagcaacgtgaccctgagacagctggccgagctgagagagaagagccaggagtggatggacaagagccccctgttcatgaacagcttccacctgctgaaccaggccatccccatgctgcagaacaccctgagaaaccccttcgtgcaggtgttcgtgaagttcagcgtgggcctggacgccgtggagctgctgaagcagatcgacgagctggacatcctgagactgaagctggagaacaacatcgacatcatcgaccagctgaacaccctgagcagcctgaccgtgaacatcagcagctgcgtgctgtacgacagaatccaggccgccaagaccatcgacgagatggagagagaggccaagagactgtacaagagcaacgagctgttcggcagcgtgatcttcaagctgcccagcaacagaagctggcacagaggctacgacagcggcaacgtgttcctgccccccgtgatcaagtacaccatcagaatgagcctgaagaccgcccagaccaccagaagcctgagaaccaagatctgggcccccggcccccacaacagccccagccacaaccagatctacggcagagccttcatctacctgcaggacagcatcgagagagccatcatcgagctgcagaccggcagaaacagccaggagatcgccgtgcaggtgcaggccatcccctacccctgcttcatgaaggacaacttcctgaccagcgtgagctacagcctgcccatcgtgctgatggtggcctgggtggtgttcatcgccgccttcgtgaagaagctggtgtacgagaaggacctgagactgcacgagtacatgaagatgatgggcgtgaacagctgcagccacttcttcgcctggctgatcgagagcgtgggcttcctgctggtgaccatcgtgatcctgatcatcatcctgaagttcggcaacatcctgcccaagaccaacggcttcatcctgttcctgtacttcagcgactacagcttcagcgtgatcgccatgagctacctgatcagcgtgttcttcaacaacaccaacatcgccgccctgatcggcagcctgatctacatcatcgccttcttccccttcatcgtgctggtgaccgtggagaacgagctgagctacgtgctgaaggtgttcatgagcctgctgagccccaccgccttcagctacgccagccagtacatcgccagatacgaggagcagggcatcggcctgcagtgggagaacatgtacaccagccccgtgcaggacgacaccaccagcttcggctggctgtgctgcctgatcctggccgacagcttcatctacttcctgatcgcctggtacgtgagaaacgtgttccccggcacctacggcatggccgccccctggtacttccccatcctgcccagctactggaaggagagattcggctgcgccgaggtgaagcccgagaagagcaacggcctgatgttcaccaacatcatgatgcagaacaccaaccccagcgccagccccgagtacatgttcagcagcaacatcgagcccgagcccaaggacctgaccgtgggcgtggccctgcacggcgtgaccaagatctacggcagcaaggtggccgtggacaacctgaacctgaacttctacgagggccacatcaccagcctgctgggccccaacggcgccggcaagaccaccaccatcagcatgctgaccggcctgttcggcgccagcgccggcaccatcttcgtgtacggcaaggacatcaagaccgacctgcacaccgtgagaaagaacatgggcgtgtgcatgcagcacgacgtgctgttcagctacctgaccaccaaggagcacctgctgctgtacggcagcatcaaggtgccccactggaccaagaagcagctgcacgaggaggtgaagagaaccctgaaggacaccggcctgtacagccacagacacaagagagtgggcaccctgagcggcggcatgaagagaaagctgagcatcagcatcgccctgatcggcggcagcagagtggtgatcctggacgagcccagcaccggcgtggacccctgcagcagaagaagcatctgggacgtgatcagcaagaacaagaccgccagaaccatcatcctgagcacccaccacctggacgaggccgaggtgctgagcgacagaatcgccttcctggagcagggcggcctgagatgctgcggcagccccttctacctgaaggaggccttcggcgacggctaccacctgaccctgaccaagaagaagagccccaacctgaacgccaacgccgtgtgcgacaccatggccgtgaccgccatgatccagagccacctgcccgaggcctacctgaaggaggacatcggcggcgagctggtgtacgtgctgccccccttcagcaccaaggtgagcggcgcctacctgagcctgctgagagccctggacaacggcatgggcgacctgaacatcggctgctacggcatcagcgacaccaccgtggaggaggtgttcctgaacctgaccaaggagagccagaagaacagcgccatgagcctggagcacctgacccagaagaagatcggcaacagcaacgccaacggcatcagcacccccgacgacctgagcgtgagcagcagcaacttcaccgacagagacgacaagatcctgaccagaggcgagagactggacggcttcggcctgctgctgaagaagatcatggccatcctgatcaagagattccaccacaccagaagaaactggaagggcctgatcgcccaggtgatcctgcccatcgtgttcgtgaccaccgccatgggcctgggcaccctgagaaacagcagcaacagctaccccgagatccagatcagccccagcctgtacggcaccagcgagcagaccgccttctacgccaactaccaccccagcaccgaggccctggtgagcgccatgtgggacttccccggcatcgacaacatgtgcctgaacaccagcgacctgcagtgcctgaacaaggacagcctggagaagtggaacaccagcggcgagcccatcaccaacttcggcgtgtgcagctgcagcgagaacgtgcaggagtgccccaagttcaactacagccccccccacagaagaacctacagcagccaggtgatctacaacctgaccggccagagagtggagaactacctgatcagcaccgccaacgagttcgtgcagaagagatacggcggctggagcttcggcctgcccctgaccaaggacctgagattcgacatcaccggcgtgcccgccaacagaaccctggccaaggtgtggtacgaccccgagggctaccacagcctgcccgcctacctgaacagcctgaacaacttcctgctgagagtgaacatgagcaagtacgacgccgccagacacggcatcatcatgtacagccacccctaccccggcgtgcaggaccaggagcaggccaccatcagcagcctgatcgacatcctggtggccctgagcatcctgatgggctacagcgtgaccaccgccagcttcgtgacctacgtggtgagagagcaccagaccaaggccaagcagctgcagcacatcagcggcatcggcgtgacctgctactgggtgaccaacttcatctacgacatggtgttctacctggtgcccgtggccttcagcatcggcatcatcgccatcttcaagctgcccgccttctacagcgagaacaacctgggcgccgtgagcctgctgctgctgctgttcggctacgccaccttcagctggatgtacctgctggccggcctgttccacgagaccggcatggccttcatcacctacgtgtgcgtgaacctgttcttcggcatcaacagcatcgtgagcctgagcgtggtgtacttcctgagcaaggagaagcccaacgaccccaccctggagctgatcagcgagaccctgaagagaatcttcctgatcttcccccagttctgcttcggctacggcctgatcgagctgagccagcagcagagcgtgctggacttcctgaaggcctacggcgtggagtaccccaacgagaccttcgagatgaacaagctgggcgccatgttcgtggccctggtgagccagggcaccatgttcttcagcctgagactgctgatcaacgagagcctgatcaagaagctgagactgttcttcagaaagttcaacagcagccacgtgagagagaccatcgacgaggacgaggacgtgagagccgagagactgagagtggagagcggcgccgccgagttcgacctggtgcagctgtactgcctgaccaagacctaccagctgatccacaagaagatcatcgccgtgaacaacatcagcatcggcatccccgccggcgagtgcttcggcctgctgggcgtgaacggcgccggcaagaccaccatcttcaagatgctgaccggcgacatcatccccagcagcggcaacatcctgatcagaaacaagaccggcagcctgggccacgtggacagccacagcagcctggtgggctactgcccccaggaggacgccctggacgacctggtgaccgtggaggagcacctgtacttctacgccagagtgcacggcatccccgagaaggacatcaaggagaccgtgcacaagctgctgagaagactgcacctgatgcccttcaaggacagagccaccagcatgtgcagctacggcaccaagagaaagctgagcaccgccctggccctgatcggcaagcccagcatcctgctgctggacgagcccagcagcggcatggaccccaagagcaagagacacctgtggaagatcatcagcgaggaggtgcagaacaagtgcagcgtgatcctgaccagccacagcatggaggagtgcgaggccctgtgcaccagactggccatcatggtgaacggcaagttccagtgcatcggcagcctgcagcacatcaagagcagattcggcagaggcttcaccgtgaaggtgcacctgaagaacaacaaggtgaccatggagaccctgaccaagttcatgcagctgcacttccccaagacctacctgaaggaccagcacctgagcatgctggagtaccacgtgcccgtgaccgccggcggcgtggccaacatcttcgacctgctggagaccaacaagaccgccctgaacatcaccaacttcctggtgagccagaccaccctggaggaggtgttcatcaacttcgccaaggaccagaagagctacgagaccgccgacaccagcagccagggcagcaccatcagcgtggacagccaggacgaccagatggagagctag

SEQ ID NO: 249515 - protein, 872 aa, Artificial Sequence
  derived and/or modified sequence
MGKKIKKEVEPPPKDVFDPLMIESKKAATVVLMLNSPEEEILAKACEAIYKFALKGEENKTTLLELGAVEPLTKLLTHEDKIVRRNATMIFGILASNNDVKKLLRELDVMNSVIAQLAPEEEVVIHEFASLCLANMSAEYTSKVQIFEHGGLEPLIRLLSSPDPDVKKNSMECIYNLVQDFQCRAKLQELNAIPPILDLLKSEYPVIQLLALKTLGVIANDKESRTMLRDNQGLDHLIKILETKELNDLHIEALAVIANCLEDMDTMVQIQQTGGLKKLLSFAENSTIPDIQKNAAKAITKAAYDPENRKLFHEQEVEKCLVALLGSENDGTKIAASQAISAMCENSGSKDFFNNQGIPQLIQLLKSDNEEVREAAALALANLTTCNPANANAAAEADGIDPLINLLSSKRDGAIANAATVLTNMAMQEPLRLNIQNHDIMHAIISPLRSANTVVQSKAALAVTATACDVEARTELRNSGGLEPLVELLRSKNDEVRKHASWAVMVCAGDELTANELCRLGALDILEEVNVSGTRKNKFSEAAYNKLLNNNLSLKYSQTGYLSSSNIINDGFYDYGRINPGTKLLPLKELCLQEPSDLRAVLLINSKSYVSPPSSMEDKSDVGYGRSISSSSSLRRSSKEKNKKNSYHFSAGFGSPIEDKSEPASGRNTVLSKSATKEKGWRKSKGKKEEEKVKEEEEVMVVPKFVGEGSSDKEWCPPSDPDFSMYVYEVTKSILPITNIKEQIEDLAKYVAEKMGGKIPKEKLPDFSWELHISELKFQLKSNVIPIGHVKKGIFYHRALLFKALADRIGIGCSLVRGEYGRAWNEVMLQNDSRKGVIGGLPAPEMYVIDLMFHPGGLMKLRSREADLYRFI

SEQ ID NO: 249516 - DNA, 2619 bp, Artificial Sequence
  derived and/or modified sequence
atgggcaagaagatcaagaaggaggtggagcccccccccaaggacgtgttcgaccccctgatgatcgagagcaagaaggccgccaccgtggtgctgatgctgaacagccccgaggaggagatcctggccaaggcctgcgaggccatctacaagttcgccctgaagggcgaggagaacaagaccaccctgctggagctgggcgccgtggagcccctgaccaagctgctgacccacgaggacaagatcgtgagaagaaacgccaccatgatcttcggcatcctggccagcaacaacgacgtgaagaagctgctgagagagctggacgtgatgaacagcgtgatcgcccagctggcccccgaggaggaggtggtgatccacgagttcgccagcctgtgcctggccaacatgagcgccgagtacaccagcaaggtgcagatcttcgagcacggcggcctggagcccctgatcagactgctgagcagccccgaccccgacgtgaagaagaacagcatggagtgcatctacaacctggtgcaggacttccagtgcagagccaagctgcaggagctgaacgccatcccccccatcctggacctgctgaagagcgagtaccccgtgatccagctgctggccctgaagaccctgggcgtgatcgccaacgacaaggagagcagaaccatgctgagagacaaccagggcctggaccacctgatcaagatcctggagaccaaggagctgaacgacctgcacatcgaggccctggccgtgatcgccaactgcctggaggacatggacaccatggtgcagatccagcagaccggcggcctgaagaagctgctgagcttcgccgagaacagcaccatccccgacatccagaagaacgccgccaaggccatcaccaaggccgcctacgaccccgagaacagaaagctgttccacgagcaggaggtggagaagtgcctggtggccctgctgggcagcgagaacgacggcaccaagatcgccgccagccaggccatcagcgccatgtgcgagaacagcggcagcaaggacttcttcaacaaccagggcatcccccagctgatccagctgctgaagagcgacaacgaggaggtgagagaggccgccgccctggccctggccaacctgaccacctgcaaccccgccaacgccaacgccgccgccgaggccgacggcatcgaccccctgatcaacctgctgagcagcaagagagacggcgccatcgccaacgccgccaccgtgctgaccaacatggccatgcaggagcccctgagactgaacatccagaaccacgacatcatgcacgccatcatcagccccctgagaagcgccaacaccgtggtgcagagcaaggccgccctggccgtgaccgccaccgcctgcgacgtggaggccagaaccgagctgagaaacagcggcggcctggagcccctggtggagctgctgagaagcaagaacgacgaggtgagaaagcacgccagctgggccgtgatggtgtgcgccggcgacgagctgaccgccaacgagctgtgcagactgggcgccctggacatcctggaggaggtgaacgtgagcggcaccagaaagaacaagttcagcgaggccgcctacaacaagctgctgaacaacaacctgagcctgaagtacagccagaccggctacctgagcagcagcaacatcatcaacgacggcttctacgactacggcagaatcaaccccggcaccaagctgctgcccctgaaggagctgtgcctgcaggagcccagcgacctgagagccgtgctgctgatcaacagcaagagctacgtgagcccccccagcagcatggaggacaagagcgacgtgggctacggcagaagcatcagcagcagcagcagcctgagaagaagcagcaaggagaagaacaagaagaacagctaccacttcagcgccggcttcggcagccccatcgaggacaagagcgagcccgccagcggcagaaacaccgtgctgagcaagagcgccaccaaggagaagggctggagaaagagcaagggcaagaaggaggaggagaaggtgaaggaggaggaggaggtgatggtggtgcccaagttcgtgggcgagggcagcagcgacaaggagtggtgcccccccagcgaccccgacttcagcatgtacgtgtacgaggtgaccaagagcatcctgcccatcaccaacatcaaggagcagatcgaggacctggccaagtacgtggccgagaagatgggcggcaagatccccaaggagaagctgcccgacttcagctgggagctgcacatcagcgagctgaagttccagctgaagagcaacgtgatccccatcggccacgtgaagaagggcatcttctaccacagagccctgctgttcaaggccctggccgacagaatcggcatcggctgcagcctggtgagaggcgagtacggcagagcctggaacgaggtgatgctgcagaacgacagcagaaagggcgtgatcggcggcctgcccgcccccgagatgtacgtgatcgacctgatgttccaccccggcggcctgatgaagctgagaagcagagaggccgacctgtacagattcatctag

SEQ ID NO: 249517 - DNA, 2619 bp, Artificial Sequence
  derived and/or modified sequence
atgggcaaaaaaattaagaaagaagtggaaccaccgccaaaggacgtgtttgaccccctcatgatagagagtaaaaaggcagctaccgtagttctcatgctgaatagccctgaagaagagatccttgctaaagcatgcgaggcaatttataaattcgctctcaaaggagaggagaacaagacaaccctcctcgaactaggggccgtagagcctcttacgaaactcctgacacatgaggacaaaatcgtccgacgcaacgcaacaatgatcttcggaatcttggcttctaataacgacgtgaaaaagctgctccgcgaattggatgttatgaacagtgttatcgctcagctggctcctgaggaagaagttgtgatacatgagtttgcctcactctgcctagcgaacatgagtgcggaatacacgtcaaaggttcagatctttgaacacggcggcctggagcccctgatccgcctgctctcctccccagacccagacgtcaaaaagaactcaatggaatgtatctataaccttgtgcaagattttcaatgccgggcaaaactgcaagagctcaatgctatccctcccattctagaccttctgaagtcggagtacccggtaatacagctcttagcgctcaaaaccctcggtgtgatcgccaacgacaaagaatctcgaaccatgctgagagataatcaggggctggaccatctcatcaaaatcctggaaacgaaggagctcaacgatctgcatattgaagcactcgctgtgatcgctaattgcttggaagacatggatactatggtgcagatccagcaaacagggggtctgaagaagttgctgtcattcgccgagaattccacaattcctgatattcaaaaaaacgcagctaaggctattaccaaggctgcttatgacccagagaaccgtaaactctttcatgagcaagaagtggagaaatgtctcgtggctctactgggatctgaaaacgacggaacgaagattgctgcctctcaggccatatccgccatgtgtgagaattcaggctccaaagacttcttcaataaccaaggtatcccacagctcatccaactgctcaagtccgacaacgaggaggtcagggaggctgcggcccttgccttagccaatctgaccacttgcaatccagctaacgctaacgccgcagctgaggcagatggaatcgaccccctgataaatttactcagcagcaagagggacggggcgattgccaatgcggcaaccgtattgacaaatatggcaatgcaggaaccgctgagactgaacattcagaatcacgacataatgcacgcaatcatcagcccactgcggtcagccaatacagtggtgcaaagcaaggccgccctcgcagtgacagcgaccgcgtgtgacgtggaggctagaacggagttgcggaactcaggcggcctcgaacccctcgttgaattgctgcgctccaagaatgatgaagtccgcaagcatgcctcatgggcggtaatggtgtgtgcaggagatgagctcacggccaacgaactctgcaggctaggcgctctggacattcttgaggaagtgaatgtttctggcaccagaaagaacaagttctcagaggctgcttacaacaaattgctcaacaacaacttgagcttaaagtactcacagaccggctacctgagtagctcgaacattattaacgacggcttctatgactacgggaggattaatcctgggacaaagctgctgccactcaaagagctgtgcctccaggagcctagtgatctgcgggccgtgctcctcattaacagcaaatcatatgtgagccctccctccagcatggaggacaagagcgatgtgggatacggccggtccattagttcttccagttctcttaggcgatcttcaaaagagaagaacaaaaaaaattcttatcacttctctgcaggctttggttcccccatcgaagacaagtccgagccagcctcaggtcgaaataccgtgttaagcaagtccgcgactaaagagaagggatggcggaagtccaaaggcaaaaaggaggaagagaaagtgaaggaagaagaggaggtgatggtggttcccaagttcgtcggagagggtagcagtgacaaggagtggtgccctccttctgatccggacttcagtatgtacgtttacgaagtgaccaagagcatccttcctatcacaaatatcaaggaacagatcgaagacttggccaagtacgtcgccgagaagatgggcggaaagatcccaaaggaaaaactgcctgacttctcctgggaacttcacatttcagagctcaaatttcaattaaagagcaatgttatccccattgggcatgttaagaaagggatcttttaccaccgcgcgctgctatttaaggcccttgctgatagaatcggaataggctgctcacttgtcaggggggagtatgggagggcctggaacgaggtgatgttgcagaacgactctaggaaaggcgtcattggcgggctcccagctcctgaaatgtacgtgatcgatctgatgtttcaccctggtggcctgatgaagttgcgtagccgggaagccgacctgtatcggttcatctag

SEQ ID NO: 249518 - DNA, 2619 bp, Artificial Sequence
  derived and/or modified sequence
atgggcaagaagatcaagaaggaggtggagcccccacccaaggatgtgtttgaccccctgatgattgagagcaagaaggccgccaccgtggtgctgatgctgaacagccctgaggaggagatcctggccaaggcctgtgaggccatctacaagtttgccctgaagggggaggagaacaagaccaccctgctggagctgggcgctgtggagcccctgaccaagctgctgacccatgaggacaagatcgtgagaagaaatgccaccatgatcttcggcatcctggccagcaacaatgatgtgaagaagctgctgcgggagctggatgtgatgaacagcgtcatcgcccagctggcccctgaggaggaggtggtgatccacgagtttgccagcctgtgcctggccaacatgtctgctgagtacaccagcaaggtgcagatctttgaacatggaggcctggagcccctcatccggctgctgagcagcccagaccctgatgtgaagaagaacagcatggagtgcatctacaacctggtgcaggacttccagtgccgggccaagctgcaggagctgaatgccatcccccccatcctggacctgctgaagtctgagtaccctgtgatccagctgctggccctgaagaccctgggcgtcatcgccaatgacaaggagagcaggaccatgctgcgggacaaccagggcctggaccacctgatcaagatcctggagaccaaggagctgaatgacctgcacatcgaggccctggccgtgattgccaactgcctggaggacatggacaccatggtgcagatccagcagacaggaggcctgaagaagctgctgagctttgctgagaacagcaccatcccagacatccagaagaatgctgccaaggccatcaccaaggccgcctatgaccctgaaaataggaagctgttccacgagcaggaggtggagaagtgcctggtggccctgctgggctctgaaaatgatggcaccaagattgctgccagccaggccatcagcgccatgtgtgaaaattctggcagcaaggacttcttcaacaaccagggcatcccccagctgatccagctgctgaagagtgacaatgaggaggtgcgggaggccgccgccctggccctggccaacctgaccacctgcaacccagccaatgccaatgctgctgctgaggctgatggcatcgaccccctcatcaacctgctgagcagcaagagagatggagccatcgccaatgctgccaccgtgctgaccaacatggccatgcaggagcccctgcggctgaacatccagaaccacgacatcatgcacgccatcatcagccccctgcggagcgccaacacagtggtgcagagcaaggccgccctggccgtgacagccacagcctgtgatgtggaggccaggacagagctgagaaattctgggggcctggagcccctggtggagctgctgcggagcaagaatgatgaggtgaggaagcacgcctcctgggccgtgatggtgtgtgctggagatgagctgacagccaatgagctgtgccgcctgggcgccctggacatcctggaggaggtgaatgtgtctggcaccaggaagaacaagttcagcgaggccgcctacaacaagctgctgaacaacaacctgagcctgaagtacagccagacaggctacctgagcagcagcaacatcatcaatgatggcttctatgactatggccgcatcaaccctggcaccaagctgctgcccctgaaggagctgtgcctgcaggagcccagcgacctgcgggctgtgctgctgatcaacagcaagagctatgtgagcccccccagctccatggaggacaagagtgatgtgggctacggccgcagcatcagcagcagcagcagcctgcggcgcagcagcaaggagaagaacaagaagaacagctaccacttctctgctggcttcggcagccccatcgaggacaagtctgagcccgccagcggcaggaacacagtgctgagcaagagcgccaccaaggagaagggctggaggaagagcaagggcaagaaggaggaggagaaggtgaaggaggaggaggaggtgatggtggtgcccaagtttgtgggggagggcagcagtgacaaggagtggtgccccccaagtgaccctgacttctccatgtatgtgtatgaggtgaccaagagcatcctgcccatcaccaacatcaaggagcagatcgaggacctggccaagtatgtggccgagaagatgggcggcaagatccccaaggagaagctgcctgacttctcctgggagctgcacatcagcgagctgaagttccagctgaagagcaatgtcatccccatcggccacgtgaagaagggcatcttctaccaccgggccctgctcttcaaggccctggccgacagaattggaattggctgcagcctggtgcggggggagtatggccgggcctggaatgaggtgatgctgcagaatgacagcaggaaaggagtcatcggcggcctgcctgcccctgagatgtatgtgattgacctgatgttccaccctgggggcctgatgaagctgcggagccgggaggccgacctgtaccgcttcatctag

SEQ ID NO: 249519 - DNA, 2619 bp, Artificial Sequence
  derived and/or modified sequence
atgggcaagaagatcaagaaggaggtggagcccccccccaaggacgttttcgaccctctgatgattgaatccaaaaaagcggctactgtggtcctgatgctcaactcgccagaagaagaaatccttgcgaaagcctgcgaggcaatttataaattcgcactcaagggggaggagaataaaaccacactgctggagttaggcgcagtggaaccactgacgaagctactcacacatgaggataaaattgtgagacgaaatgcaactatgatttttggcatcctcgctagcaataacgacgtgaaaaagctgcttagggagctcgatgttatgaactccgttattgctcagttagcacctgaggaggaggttgttattcatgaattcgcttccctgtgccttgcgaacatgagcgcagagtacacctcgaaggttcagatcttcgagcatgggggcttggagcccttgatacgactgttaagctctccagatcccgacgtaaagaaaaattctatggaatgtatctacaacctggttcaggactttcagtgtagggcaaagctgcaggagttgaatgctataccaccaatactggatctgctcaagagcgaatatcccgtaatccaactgctggcattaaagacactcggagttatcgcaaatgataaagagagcaggacaatgctgcgagacaaccaaggtctggatcacctgattaagatcctggagactaaggaactgaacgacttacatatcgaagcactggccgtcattgctaattgtttggaggatatggacactatggtacagattcagcagaccggaggtctgaagaaattgctctcctttgccgagaattcaacaatccccgacatccaaaagaatgctgcgaaggctatcactaaagctgcctatgaccccgagaaccggaaactatttcacgaacaggaggtcgagaagtgcctcgtggccctcctcgggagcgaaaacgatggcacaaaaatcgctgctagccaggcaatcagtgcaatgtgcgaaaatagcggcagcaaagacttctttaacaatcagggcatcccacagctgatccagctgctgaagagcgataacgaagaagtgcgggaagccgctgccctggcacttgccaacctcacgacatgtaaccctgccaatgctaatgctgccgctgaggctgacggtattgatcctctcattaacctgctgtcatccaagagagacggcgccattgcaaacgctgcgaccgtcttgacaaacatggctatgcaggagcccctaaggctaaatatccagaatcacgacatcatgcatgccatcattagtcccctgcggagcgcaaatactgtcgtgcagagcaaagcagctctggccgtcacggcgacagcttgtgatgtagaagcccggacagaactgaggaacagtggggggctggaaccacttgtggagcttcttcgaagtaaaaacgatgaggtgaggaagcacgcatcatgggccgtgatggtgtgtgctggggatgagctcacagcaaatgagctgtgcaggctcggcgcactggacattctggaagaagtgaacgttagcgggacccgtaaaaataaattcagcgaggctgcttacaataagttactcaataataatctcagcctaaagtattcccaaacaggttacctatcaagctctaacataattaacgacggattctacgattacggccgtatcaatcctggcacaaaactgcttcctttaaaggagctctgccttcaggagcctagtgacttgcgtgcagttctcttaatcaacagcaaaagttacgtttcacctccaagctctatggaagacaaaagtgatgtagggtacggccggtctattagctcgagcagctcgttaaggaggagcagcaaggaaaaaaataagaaaaattcctaccacttttccgcggggtttggctctcctatcgaagataagagcgaaccagcatcgggaagaaacacagtcttatccaaaagcgccacgaaagaaaaagggtggcgtaaatctaaagggaagaaagaagaggagaaagtgaaagaagaggaagaggtgatggtggtcccaaaattcgtgggggagggctcctcagataaggagtggtgcccaccctctgatcccgacttctccatgtacgtttatgaagttactaagtcgattcttcctattacgaatattaaggagcagattgaggatctcgctaagtacgtcgctgagaagatggggggtaaaatcccaaaagaaaaattgccagacttcagctgggaactgcacattagcgagttaaagttccagctcaagtctaatgtgatccccattggtcacgtgaaaaaaggtatcttctaccaccgcgccctgctctttaaagccctagccgatagaatcgggatcggctgtagtctggtgcgtggcgaatatggacgagcttggaacgaagtcatgcttcagaatgattcccggaagggcgtcatcggtggacttccggccccagagatgtacgtcatcgatcttatgtttcacccgggggggctaatgaaattgagatcaagggaggccgatctgtatcggttcatctag

SEQ ID NO: 249520 - DNA, 2619 bp, Artificial Sequence
  derived and/or modified sequence
atgggaaagaagatcaaaaaggaagtcgaacctcctcctaaggatgttttcgatccactgatgattgagagcaagaaggccgctacagtcgttcttatgctgaatagcccagaagaggaaatcctagctaaggcttgcgaggccatatacaagtttgcactgaaaggcgaagagaacaagacgactctccttgagctaggtgcagtggagcccttgactaaactcctgactcacgaagataagatcgtgcgacgcaacgccactatgatttttggcattctggcatctaacaacgacgtcaagaagcttctgagagaacttgatgtgatgaacagtgtcatcgcccagctggcccctgaagaagaggtcgtgatacacgagttcgcaagcctgtgtctcgctaatatgagcgcagagtacacttcaaaggtccaaatctttgagcacggcggactcgaaccactgatacgcctcctctctagcccagacccggatgtgaaaaaaaatagcatggaatgtatttataatttggtgcaagacttccagtgcagagctaaactccaggaattgaacgcaatccctcctattctggaccttctcaagagcgagtaccctgtgatccagctgttggctcttaaaactttgggagtgatcgccaacgacaaggagagtaggactatgctccgcgacaatcaggggctcgatcatctcataaagatactggagactaaagagctgaacgatctgcacatcgaggccttggccgtaatagctaattgtctggaggatatggacacgatggtgcagatccaacaaaccggaggactgaaaaagcttctctccttcgccgagaattccactataccagacatccagaaaaatgcagcaaaagcgatcacaaaagctgcctacgatccagagaaccgaaaactgtttcacgaacaggaggtggaaaagtgtctggtggctttactgggctccgagaacgatgggacaaagattgcagccagtcaagcaattagcgcaatgtgtgaaaactctgggtcgaaggatttcttcaacaatcaggggatcccacaactgatccagcttcttaagtctgacaacgaagaggtcagagaggcagcggcactagcgttagcaaaccttactacctgtaaccctgcaaacgctaatgccgctgctgaggcagacgggattgacccactgattaatctgctctcttctaagcgggacggtgcaattgccaatgctgccaccgtcctgaccaacatggcaatgcaagaaccactgcggctgaacatacagaatcatgatattatgcatgcaattatctcccctcttcgttcggccaatacggtggtgcagagcaaggccgctcttgcggttaccgcgacagcctgtgatgtagaagctaggactgagctgcgtaacagtgggggtttggaaccattggtcgagctgctaaggagtaagaatgacgaggtgcgtaaacatgccagctgggctgtgatggtctgtgctggcgacgagctgacagccaacgagctctgtagactcggtgcacttgacattctggaggaggtgaacgtgagcggaacacgaaagaataaattcagcgaggctgcttataacaagctcctaaacaacaatctgtctttaaaatattctcagaccggatacttgagctccagcaatatcatcaatgacggcttctatgactatgggagaatcaatcccggaacaaaactgctgcctctgaaggagctctgccttcaggaaccgagcgacctgagggcagtactgctgatcaactctaagtcatatgtgtctcccccttcatctatggaggataaaagtgacgtcggatacggacggtccataagtagctctagtagcctgagaagaagttcaaaggagaaaaacaaaaagaattcttaccatttctccgccggttttgggtcccctattgaagacaaatctgagcctgcctcgggtagaaataccgtacttagcaagagtgctaccaaggagaaaggatggaggaagagcaaaggaaagaaggaggaggaaaaagtgaaggaggaggaggaagtgatggtggttccaaagttcgtgggagaggggagctcagataaagaatggtgccccccaagtgatccagattttagcatgtacgtgtacgaggtcaccaagtctatcttacctattacgaacattaaagaacaaatcgaggacctggccaagtatgtagcagagaagatgggtggcaaaattccaaaggaaaagctgcctgatttctcgtgggagctgcatattagtgagctgaaatttcagctcaagtcaaatgtaattcctattggacatgtgaagaagggcattttttaccacagggccctactcttcaaagccctggcagatagaatcggaatcggatgttctttggtacgcggtgagtatggtcgagcgtggaacgaggtaatgttacaaaacgattcaagaaagggtgtgattgggggactgcccgctcccgagatgtacgtgatcgacctcatgtttcacccgggagggctgatgaagctgcgctccagagaagccgacttataccgctttatctag

SEQ ID NO: 249521 - DNA, 2811 bp, Artificial Sequence
  derived and/or modified sequence
tagcaacgaggcacaacaagggactgggggttcgtctgctgggtttgcggagcagctagctactcggcgggatctcccggcaggatgggtaaaaagataaagaaggaagtagagcctcctcctaaggatgtgtttgacccattaatgattgaaagcaaaaaagcagcaactgtggtgttaatgcttaattctccagaagaggaaattttggctaaagcatgtgaagccatttataaatttgctttaaaaggtgaggaaaataaaacaaccctccttgaacttggagctgtggaacctttaactaagctactcacccatgaagacaaaattgtaagaagaaatgctactatgatatttggaatcctggcttctaataatgatgttaaaaaattgttaagggagttagatgtcatgaattctgtcattgcccagctcgctccagaagaagaagtagttatccatgagtttgctagtctttgtctagcaaacatgtctgcagagtacaccagtaaagtgcaaatatttgaacatgggggattagagccactcatcagactactgagtagccctgacccggatgtaaagaagaactctatggaatgcatttacaacttggtgcaggattttcagtgtcgagctaaacttcaagaactaaatgcaatacctcctatcttagatctcttgaagtcagaatatccagtgattcagttgttggctctcaaaaccttaggtgttattgcaaatgataaggagtctcgaacaatgctaagagacaatcaaggattggaccatcttattaagatcctagaaactaaggaattgaatgaccttcatatagaagcacttgcagtgatagccaattgccttgaagacatggatactatggtgcagattcagcagacagggggtcttaaaaagctcctgtcatttgcagaaaactctacaattcctgatattcagaagaatgcagcaaaagccattactaaagcagcttatgatcctgaaaatagaaaactttttcatgaacaagaggttgaaaagtgccttgtagcccttttgggttctgaaaatgatggaactaaaattgctgcttcccaagctatttcagcaatgtgtgagaattcaggcagcaaagattttttcaataatcaggggattccacagttaattcagttgctaaaaagtgacaatgaagaggtacgggaagcagcagctctagccctggcaaacctaaccacttgcaaccctgctaatgcaaacgctgctgctgaagctgatggtattgatccattaataaacctcctgtctagtaaacgagatggagccattgccaacgctgctacagtattaacaaacatggccatgcaggagcccctgcgcctgaacatacagaatcacgacatcatgcatgccatcatcagcccactgcgttctgcaaacacagtcgtgcagagcaaagctgctctcgctgtcaccgcaactgcgtgtgacgttgaagcccggactgagttaagaaattctggtggattggagcccctggtagagctgctacgctccaagaatgatgaagtgaggaagcacgccagttgggcagtgatggtctgtgctggtgacgagctgacggccaatgaattatgcaggctcggggctttagatatccttgaagaagttaacgtatcaggaactcggaaaaataaattcagtgaggcagcttataataagttgctcaataacaatctttccctgaaatacagccagactggctatttgtcatcaagtaacataattaacgatggattctatgattatggtcggataaatcccggcaccaaactgttgcctttgaaggagctctgcttacaagaaccaagtgacctacgggctgtactcttaatcaacagtaaatcttacgtttctccaccttcatctatggaagataaatcagatgttggttatggacgaagtatttcttcttcatcttccttaagaagatcaagtaaagaaaagaacaaaaaaaatagttatcattttagtgctggatttggatctcccatagaagacaaatcagagccagcttctggacgaaatactgttctcagcaaaagcgccaccaaagaaaaaggatggaggaaaagcaaaggaaaaaaagaagaggaaaaagtgaaagaggaggaagaggttatggtggtaccaaaatttgttggtgaaggaagctctgacaaagaatggtgtcctccctctgaccctgatttctctatgtatgtgtatgaggtgaccaaatcaatactgccaataaccaatattaaggaacagattgaggatctggcaaagtatgtagcagaaaaaatgggtggtaagattccaaaagagaaactacctgatttcagctgggaacttcacataagtgaactgaaatttcaacttaaatccaatgttataccgattggacatgtcaaaaaaggaatcttctaccatcgagctttgcttttcaaggctctggctgatagaattggcattggttgctccctagttcgcggagagtacggtagagcgtggaatgaagtcatgctgcagaatgactctcggaagggagtgattgggggcctccccgctcctgagatgtacgtgattgacctcatgttccatccaggtggactgatgaagttgagaagtcgagaggctgatctttacagattcatttaagccatcagacgaacacaagagaggctcaaacaagaaattcactgtgtacactctctaagacattctccaaattgattttatctctttaaataaaaactttaaataaaa

SEQ ID NO: 249522 - protein, 1687 aa, Artificial Sequence
  derived and/or modified sequence
MSSRRKRAPPVRVDEEKRQQLHWNMHEDRRNEPIIISDDDEQPCPGSDTSSAHYIILSDSLKEEVAHRDKKRCSKVVSFSKPIEKEETVGIFSPLSVKLNIVISPYHFDNSWKAFLGELTLQLLPAQSLIENFSERSITLMSSESSNQFLIYVHSKGEDVEKQKKEPMSICDKGILVESSFSGEMLEDLGWLQKKRRIKLYQKPEGNHIIKVGIYLLEAGLAKLDFLSDANSRMKKFNQLMKKVMEKLHNSIIPDVLEEDEDDPESEPEGQDIDELYHFVKQTHQQETQSIQVDVQHPALIPVLRPYQREAVNWMLQQECFRSSPATESALHFLWREIVTSEGLKLYYNPYTGCIIREYPNSGPQLLGGILADEMGLGKTVEVLALILTHTRQDVKQDALTLPEGKVVNYFIPSHYFGGKLKKTEIQNIEFEPKEKVQCPPTRVMILTAVKEMNGKKGVSILSIYKYVSSIYRYDVQRNRSLLKRMLKCLIFEGLVKQIKGHGFSGTFTLGKNYKEEDICDKTKKQAVGSPRKIQKETRKSGNKDTDSEYLPSDTSDDDDDPYYYYYKSRRNRSKLRKKLVPSTKKGKSQPFINPDSQGHCPATSDSGITDVAMSKSTCISEFNQEHETEDCAESLNHADSDVPPSNTMSPFNTSDYRFECICGELDQIDRKPRVQCLKCHLWQHAKCVNYDEKNLKIKPFYCPHCLVAMEPVSTRATLIISPSSICHQWVDEINRHVRSSSLRVLVYQGVKKDGFLQPHFLAEQDIVIITYDVLRSELNYVDIPHSNSEDGRRLRNQKRYMAIPSPLVAVEWWRICLDEAQMVECPTVKAAEMAQRLSGINRWCISGTPVQRGLEDLFGLVVFLGIEPYCVKHWWVRLLYRPYCKKNPQHLYSFIAKILWRSAKKDVIDQIQIPPQTEEIHWLHFSPVERHFYHRQHEVCCQDVVVKLRKISDWALKLSSLDRRTVTSILYPLLRLRQACCHPQAVRGEFLPLQKSFEQSTFSFSTMTMEELLTSLQKKCGTECEEAHRQLVCALNGLAGIHIIKGEYALAAELYREVLRSSEEHKGKLKTDSLQRLHATHNLMELLIARHPGIPPTLRDGRLEEEAKQLREHYMSKCNTEVAEAQQALYPVQQTIHELQRKIHSNSPWWLNVIHRAIEFTIDEELVQRVRNEITSNYKQQTGKLSMSEKGLQFLLTTQMEELNKCQKLVREAVKNLEGPPSRNVIESATVCHLRPARLPLNCCVFCKADELFTEYESKLFSNTVKGQTAIFEEMIEDEEGLVDDRAPTTTRGLWAISETERSMKAILSFAKSHRFDVEFVDEGSTSMDLFEAWKKEYKLLHEYWMALRNRVSAVDELAMATERLRVRDPREPKPNPPVLHIIEPHEVEQNRIKLLNDKAVATSQLQKKLGQLLYLTNLEKSQDKTSGGVNPEPCPICARQLGKQWAVLTCGHCFCNECISIIIEQYSVGSHRSSIKCAICRQTTSHKEISYVFTSEKANQEEDIPVKGSHSTKVEAVVRTLMKIQLRDPGAKALVFSTWQDVLDIISKALTDNNMEFAQISRVKTFQENLSAFKRDPQINILLLPLHTGSNGLTIIEATHVLLVEPILNPAHELQAIGRVHRIGQTKPTIVHRFLIKATIEERMQAMLKTAERSHTNSSAKHSEASVLTVADLADLFTKETEELE

SEQ ID NO: 249523 - protein, 1659 aa, Artificial Sequence
  derived and/or modified sequence
MSSRRKRAPPVRVDEEKRQQLHWNMHEDRRNEPIIISDDDEQPCPGSDTSSAHYIILSDSLKEEVAHRDKKRCSKVVSFSKPIEKEETVGIFSPLSVKLNIVISPYHFDNSWKAFLGELTLQLLPAQSLIENFSERSITLMSSESSNQFLIYVHSKGEDVEKQKKEPMSICDKGILVESSFSGEMLEDLGWLQKKRRIKLYQKPEGNHIIKVGIYLLEAGLAKLDFLSDANSRMKKFNQLMKKVMEKLHNSIIPDVLEEDEDDPESEPEGQDIDELYHFVKQTHQQETQSIQVDVQHPALIPVLRPYQREAVNWMLQQECFRSSPATESALHFLWREIVTSEGLKLYYNPYTGCIIREYPNSGPQLLGGILADEMGLGKTVEVLALILTHTRQDVKQDALTLPEGKVVNYFIPSHYFGGKLKKTEIQNIEFEPKEKVQCPPTRVMILTAVKEMNGKKGVSILSIYKYVSSIYRYDVQRNRSLLKRMLKCLIFEGLVKQIKGHGFSGTFTLGKNYKEEDICDKTKKQAVGSPRKIQKETRKSGNKDTDSEYLPSDTSDDDDDPYYYYYKSRRNRSKLRKKLVPSTKKGKSQPFINPDSQGHCPATSDSGITDVAMSKSTCISEFNQEHETEDCAESLNHADSDVPPSNTMSPFNTSDYRFECICGELDQIDRKPRVQCLKCHLWQHAKCVNYDEKNLKIKPFYCPHCLVAMEPVSTRATLIISPSSICHQWVDEINRHVRSSSLRVLVYQGVKKDGFLQPHFLAEQDIVIITYDVLRSELNYVDIPHSNSEDGRRLRNQKRYMAIPSPLVAVEWWRICLDEAQMVECPTVKAAEMAQRLSGINRWCISGTPVQRGLEDLFGLVVFLGIEPYCVKHWWVRLLYRPYCKKNPQHLYSFIAKILWRSAKKDVIDQIQIPPQTEEIHWLHFSPVERHFYHRQHEVCCQDVVVKLRKISDWALKLSSLDRRTVTSILYPLLRLRQACCHPQAVRGEFLPLQKSFEQSTFSFSTMTMEELLTSLQKKCGTECEEAHRQLVCALNGLAGIHIIKGEYALAAELYREVLRSSEEHKGKLKTDSLQRLHATHNLMELLIARHPGIPPTLRDGRLEEEAKQLREHYMSKCNTEVAEAQQALYPVQQTIHELQRKIHSNSPWWLNVIHRAIEFTIDEELVQRVRNEITSNYKQQTGKLSMSEKGLQFLLTTQMEELNKCQKLVREAVKNLEGPPSRNVIESATVCHLRPARLPLNCCVFCKADELFTEYESKLFSNTVKGQTAIFEEMIEDEEGLVDDRAPTTTRGLWAISETERSMKAILSFAKSHRFDVEFVDEGSTSMDLFEAWKKEYKLLHEYWMALRNRVSAVDELAMATERLRVRDPREPKPNPPVLHIIEPHEVEQNRIKLLNDKAVATSQLQKKLGQLLYLTNLEKSQDKTSGGVNPEPCPICARQLGKQWAVLTCGHCFCNECISIIIEQYSVGSHRSSIKCAICRQTTSHKEISYVFTSEKANQEEDIPVKGSHSTKVEAVVRTLMKIQLRDPGAKALVFSTWQDVLDIISKALTDNNMEFAQISRVKTFQENLSAFKRDPQINILLLPLHTGSNGLTIIEATHVLLVEPILNPAHELQAIGRVHRIGQTKPTIVHRFLIKATIEERMQAMLKTAERSIYI

SEQ ID NO: 249524 - DNA, 4980 bp, Artificial Sequence
  derived and/or modified sequence
atgtcctcccgaaggaagcgagcgccaccggtgagggttgatgaggagaagcggcaacaactgcattggaatatgcacgaagacaggaggaatgagcccatcatcatttccgacgatgacgagcagccttgcccaggctccgacacaagcagcgcccactatattattctttcagatagcctgaaagaggaggttgcacaccgagataagaagaggtgtagtaaagtggtctcattctcaaagccgatcgagaaggaggagactgtcggaattttctctcctctgagtgtaaaattaaacattgttatctctccctaccacttcgacaacagttggaaagccttcctgggggagctgaccctccaactgctgccggcccagagcctgatcgaaaatttctccgaacggtcaataacccttatgagcagcgagtcgtcgaaccagttcctcatttacgtccacagtaagggtgaagacgtggagaagcagaagaaagagcccatgagtatttgcgataaaggaatcctggtggaaagcagcttctctggtgagatgcttgaggacctgggatggctgcagaaaaagcggagaattaagctctaccagaagcctgaaggcaatcacatcataaaagtgggtatttaccttctggaggccggtttggctaagcttgatttccttagtgatgctaattcacggatgaaaaagttcaaccagctgatgaaaaaggtcatggagaaattgcataactctatcatccccgatgtcctggaggaagatgaagacgatcccgagtcagagccagagggccaagatattgatgagctctaccattttgtaaaacagacgcaccagcaggagacccagagtattcaggttgacgtgcaacatcctgccctgatcccggtactccggccatatcagagagaagcagtaaactggatgctgcagcaggagtgcttcagaagttctcctgccactgagagcgctctgcacttcctctggcgggagatcgtcacctcagaggggctcaaattatactataatccttacacagggtgtataatccgtgagtatccaaactccggaccccaactgcttggaggaattctcgccgacgagatggggctgggcaagaccgttgaagtgctagcactgattctcacccacactagacaggatgtgaagcaggatgctctcacactgcctgaggggaaggtggtgaattatttcattccgagccactactttggcggaaaactgaagaaaacagagattcagaatattgagttcgaaccgaaggagaaggtgcagtgtccccccacgagagtgatgatcttaaccgccgtaaaagagatgaatgggaagaagggtgtttctattctctcgatttacaaatacgtgtcctccatctaccgctacgacgttcaaagaaaccgcagtttactgaagcgtatgctgaagtgcctgattttcgagggcctggtgaaacagatcaagggccacggattcagtggcactttcaccctcggtaaaaactacaaagaagaagatatctgtgacaaaaccaagaagcaggccgtgggttctcctagaaagatacagaaggagactaggaagagtggaaataaagacacagactcagagtacctgcccagcgacacatccgacgatgacgacgacccctattattattattacaaatctcgccgtaatagatctaagttaagaaagaagctggtcccatcaaccaagaagggcaaatcccagcccttcataaatccggattcacagggccactgtcccgccacatctgattctggcattacagacgtagcaatgagtaaatctacatgcatatccgaatttaaccaggagcacgaaaccgaggactgtgcggagtctcttaaccacgctgattccgatgtcccacctagtaatactatgagtcctttcaatacttccgactataggttcgagtgcatttgcggcgagctcgatcagattgacaggaaaccgagggtgcaatgcctgaagtgccacctatggcagcatgcgaagtgcgtgaactatgatgagaagaacctcaaaataaagcccttttattgccctcactgtctggtagccatggagcctgtgtcaactcgggccacacttattatttctccgtcctctatctgccaccaatgggtggacgaaatcaaccggcacgtaaggtcttccagcttgagggtccttgtttaccaaggggtgaaaaaggacggcttcctccagccccacttccttgccgaacaggatatcgttattatcacttatgacgtgctacgaagcgaactgaactatgtggacattcctcattctaatagcgaggatggtcggagacttcggaatcagaaacgatatatggccatcccaagcccattagtggctgtagaatggtggagaatctgtctagatgaagcccagatggtggagtgtccaactgtgaaagcagccgaaatggcccaacggttgagtggtataaaccggtggtgcatctcaggcacccccgtccagcgcgggctagaggatctgttcgggctcgtggtgtttctgggcattgaaccatattgcgtaaaacactggtgggttcgattgctgtatcggccatactgtaagaagaatcctcaacacctgtacagctttatagccaagatattgtggcgatccgctaagaaagatgtcatagaccagattcagatacctccgcagaccgaagagatccactggctgcatttctcacccgttgagcggcatttctaccatcgtcagcatgaagtatgttgtcaggatgtagtggtgaagctccgcaaaatatccgattgggctctgaagctgagcagcttggatcgaaggaccgtgacttcaatcctgtacccgttattgcgcctccggcaagcctgttgccaccctcaggctgtccgcggagaattcctaccacttcagaagtcttttgaacagtctacattctcattttcaacgatgactatggaggaactgctaacctctcttcagaaaaaatgtggaacagagtgtgaggaagctcacagacagttggtgtgtgccctgaacggactggccggtattcacatcataaaaggcgagtatgctctggccgcagaactgtacagagaggtgctgagatcaagtgaggagcacaagggcaaactgaagaccgactcacttcagagactgcacgccactcacaacttgatggaattgctgattgccaggcacccagggatccccccaactctgagggacgggaggctagaggaggaagctaagcagctgcgtgagcactatatgagcaaatgcaacaccgaggtggccgaagcccaacaagcactgtatccagttcagcagactattcacgaacttcagcgaaagatccactccaatagcccgtggtggcttaacgtcattcaccgagctattgagttcaccattgatgaagaactggtgcaaagggtccggaacgagataacttctaactacaagcagcagaccgggaaactgagcatgagtgagaaagggctccaattcctgctgaccacacagatggaagagctgaataaatgtcagaaactggtaagggaggccgtgaagaacctcgagggaccaccttctcgcaacgtgattgagtctgccaccgtctgtcacttgcgacctgcacggctgcccctgaattgctgcgtgttttgcaaggccgatgagctttttacagaatacgagtcaaagcttttctccaacacagtcaagggtcagactgcaatatttgaagaaatgatcgaagacgaagaggggttagtggacgatcgtgcaccgactaccacacggggcctgtgggcaattagcgagacagagaggtctatgaaggccatcctcagctttgctaaatcacacaggttcgacgtagaatttgttgacgaggggagcacctctatggacctattcgaagcctggaaaaaagaatacaagctcttacacgagtattggatggctctgcgcaatcgggtctctgccgttgacgaattggccatggcaactgagcggctaagggtgcgagacccaagagagccaaaacctaacccacccgtcctgcacattatagaaccacacgaagtggagcagaaccgcatcaaattgctcaatgacaaggccgttgccacttcacagctgcaaaaaaaacttggccagctgctgtacttgaccaacctagagaaatctcaggacaagacgtcaggtggcgttaatcctgagccatgtccaatatgcgccagacagctggggaagcaatgggcggtcttaacctgtgggcactgcttctgcaatgagtgtatcagcatcatcatcgaacagtacagcgtgggttcccaccgatcgtcaattaaatgcgccatatgtagacagacaacgagtcacaaggaaatctcttatgtcttcacgtcagagaaagccaatcaggaggaagatattccagttaagggatctcactccaccaaagtagaggctgtggttaggaccttaatgaaaatccaattgcgcgatcccggcgcgaaggccctcgtgttttcaacatggcaggacgttctcgacataatctccaaggccttgacagataacaacatggagtttgcgcagatttccagggtgaaaactttccaagaaaatctctcagcattcaagcgcgaccctcagataaacattttgctcttaccgctgcacacgggttccaatggactgaccattatcgaggccacacacgtgttgctggtagagcccatcctgaacccggcacatgagttgcaggcgatagggcgcgtccataggatcgggcagacgaagccaaccatcgtccatcgctttctcataaaggctacaatcgaagagcgaatgcaagccatgcttaagacggccgaacgcagcatctacatatag

SEQ ID NO: 249525 - DNA, 1983 bp, Artificial Sequence
  derived and/or modified sequence
atgtcaagcagacgcaagagggcccccccagtgcgggttgatgaagagaaacggcagcagcttcactggaacatgcatgaggacagaagaaacgagcctattatcatttcagatgatgacgaacagccttgccctggagaagatgttgaaaagcagaagaaagagcccatgagtatctgtgataagggtatcttggtcgaatctagtttttcaggggagatgttggaggatcttggatggctccagaaaaagcgccgaatcaagctttaccagaagcctgaaggcaatcacattatcaaggtaggaatttacctcctcgaggcgggacttgccaaattggattttctgtcagacgcgaactcccgtatgaaaaaatttaatcagctcatgaaaaaagtcatggagaaactgcataatagtattatacccgatgttctagaggaggacgaggacgatccagagagtgagccagaggggcaggacattgacgagctatatcacttcgttaagcaaactcaccaacaggagacacagtctattcaggtagacgtgcaacatcccgctctgattcctgtgctgagaccataccaaagggaagctgtaaactggatgctgcaacaggagtgcttccgcagtagtccagctacggaaagtgctcttcattttctgtggagagagatagtaacctctgaaggattgaaactgtattacaacccatacaccggatgcattatccgcgagtacccaaattctgggccccagctactcggtggaatcttggccgatgagatgggactgggcaagacggtcgaggtactcgcgctgatcctcacacacaccaggcaggacgtcaagcaggatgctctgactctgcctgaagggaaggtagtcaattacttcataccttctcattactttggtggcaagttgaaaaaaacggaaatccagaatatcgagttcgaaccaaaagagaaggtgcaatgtccacccacccgagtgatgatcctgacggcggtaaaggaaatgaacgggaagaagggcgtgagcatccttagtatctacaagtatgtgtcgagcatttatagatacgatgttcagaggaatagatcactgctcaaacgtatgctgaagtgtctgatcttcgaagggttggtgaagcaaattaaggggcatggattcagcgggacttttaccctgggcaagaactacaaggaggaagacatttgtgacaagactaaaaagcaggccgtcgggagcccacgcaagatccagaaggagacccgtaagtccggaaacaaagacactgacagcgaatacctgccctcggatacatcggacgacgatgatgacccctactactattactataagtcaaggagaaatcgctctaaactcaggaagaaactggtgccttcaaccaaaaagggcaagtcccagccctttatcaacccagatagccagggccattgcccagcaacgtcagactctggtatcacagatgtggccatgtccaaaagcacatgtatttcggagtttaaccaggagcacgaaaccgaggattgcgccgagagcctgaatcacgctgactccgacgttcctccctccaatacaatgtccccctttaatacgagcgattatagattcgagtgtatttgcggcgaattggatcagattgatcgaaagccacgtgtgcagtgtctcaagtgccacctctggcagcacgctaagtgcgttaactacgacgaaaagaacctaaaaatcaagccattctactgccctcattgcctcgtagccatggaaccagtgtctacccgggctaccctgatcatcagccctagtagtatttgccaccagtgggtggatgagatcaatagacacgtccgctcctcttctttgcgggtcttagtttaccaaggcgtcaaaaaagatggattcctgcagccccattttggaagaacaggttactcatatcattatttatag

SEQ ID NO: 249526 - DNA, 4980 bp, Artificial Sequence
  derived and/or modified sequence
atgagcagcaggaggaagagggcccctcctgtgcgggtggatgaggagaagaggcagcagctgcactggaacatgcatgaagatagaagaaatgagcccatcatcatcagtgatgatgatgagcagccctgccccggcagtgacaccagcagcgcccactacatcatcctgagtgacagcctgaaggaggaggtggcccaccgggacaagaagcgctgcagcaaggtggtgtccttcagcaagcccatcgagaaggaggagaccgtgggcatcttcagccccctgtctgtgaagctgaacatcgtcatcagcccctaccactttgacaacagctggaaggccttcctgggggagctgaccctgcagctgctgcctgcccagagcctgattgagaacttcagcgagaggagcatcaccctgatgagcagcgagagcagcaaccagttcctgatctacgtgcacagcaagggggaggatgtggagaagcagaagaaggagcccatgagcatctgtgacaagggcatcctggtggagagcagcttcagcggggagatgctggaggacctgggctggctgcagaagaagaggcgcatcaagctgtaccagaagccagagggcaaccacatcatcaaggtgggcatctacctgctggaggccggcctggccaagctggacttcctgagtgatgccaacagcaggatgaagaagttcaaccagctgatgaagaaggtgatggagaagctgcacaacagcatcatcccagatgtgctggaggaggatgaagatgatcctgagagcgagcctgagggccaggacattgatgagctgtaccactttgtgaagcagacccaccagcaggagacccagagcatccaggtggatgtgcagcacccagccctgatccctgtgctgcggccctaccagcgggaggccgtgaactggatgctgcagcaggagtgcttccgcagcagccctgccacagaaagtgccctgcacttcctgtggagggagatcgtgaccagcgagggcctgaagctgtactacaacccctacacaggctgcatcatccgggagtaccccaacagcggcccccagctgctgggcggcatcctggctgatgagatgggcctgggcaagacagtggaggtgctggccctgatcctgacccacacccggcaggatgtgaagcaggatgccctgaccctgcctgagggcaaggtggtgaactacttcatccccagccactactttggaggcaagctgaagaagacagagatccagaacattgaatttgagcccaaggagaaggtgcagtgcccccccaccagggtgatgatcctgacagctgtgaaggagatgaatggcaagaagggcgtgtccatcctgagcatctacaagtatgtgagcagcatctaccgctatgatgtgcagaggaacagaagcctgctgaagaggatgctgaagtgcctgatctttgagggcctggtgaagcagatcaagggccacggcttcagcggcaccttcaccctgggcaagaactacaaggaggaggacatctgtgacaagaccaagaagcaggccgtgggcagccccaggaagatccagaaggagaccaggaagagcggcaacaaggacacagacagcgagtacctgcccagcgacaccagtgatgatgatgatgacccctactactactactacaagagcagaagaaacagaagcaagctgaggaagaagctggtgcccagcaccaagaagggcaagagccagcccttcatcaacccagacagccagggccactgcccagccaccagtgacagcggcatcacagatgtggccatgagcaagagcacctgcatcagcgagttcaaccaggagcatgaaacagaggactgtgccgagagcctgaaccacgccgacagtgatgtgccccccagcaacaccatgagccccttcaacaccagtgactacagatttgagtgcatctgtggggagctggaccagattgacaggaagccccgggtgcagtgcctgaagtgccacctgtggcagcacgccaagtgtgtgaactatgatgagaagaacctgaagatcaagcccttctactgcccccactgcctggtggccatggagcctgtgtccacccgggccaccctcatcatcagccccagcagcatctgccaccagtgggtggatgagatcaacagacatgtgcgcagcagcagcctgcgggtgctggtgtaccagggcgtgaagaaggatggcttcctgcagccccacttcctggccgagcaggacatcgtcatcatcacctatgatgtgctgcggtctgagctgaactacgtggacatcccccacagcaacagtgaagatggaagaaggctgaggaaccagaagcgctacatggccatccccagccccctggtggccgtggagtggtggaggatctgcctggatgaggcccagatggtggagtgccccaccgtgaaggctgctgagatggcccagaggctgagcggcatcaaccgctggtgcatcagcggcacccctgtgcagaggggcctggaggacctgtttggcctggtggtgttcctgggcatcgagccctactgtgtgaagcactggtgggtgcggctgctgtaccggccctactgcaagaagaacccccagcacctgtacagcttcatcgccaagatcctgtggaggtctgccaagaaggatgtgattgaccagatccagatccccccccagacagaggagatccactggctgcacttcagccctgtggagcggcacttctaccaccggcagcacgaggtgtgctgccaggatgtggtggtgaagctgaggaagatcagtgactgggccctgaagctgagcagcctggacagaagaacagtgaccagcatcctgtaccccctgctgcggctgcggcaggcctgctgccacccccaggccgtgcggggggagttcctgcccctgcagaagagctttgagcagagcaccttctccttcagcaccatgaccatggaggagctgctgaccagcctgcagaagaagtgtggcacagaatgtgaggaggcccaccggcagctggtgtgtgccctgaatggcctggccggcatccacatcatcaagggggagtatgccctggccgctgagctgtaccgggaggtgctgcggagcagcgaggagcacaagggcaagctgaagacagacagcctgcagaggctgcacgccacccacaacctgatggagctgctgattgcccggcaccctggcatcccccccaccctgagagatggccgcctggaggaggaggccaagcagctgcgggagcactacatgagcaagtgcaacacagaggtggccgaggcccagcaggccctgtaccctgtgcagcagaccatccacgagctgcagaggaagatccacagcaacagcccctggtggctgaatgtcatccaccgggccatcgagttcaccattgatgaggagctggtgcagagggtgagaaatgagatcaccagcaactacaagcagcagacaggcaagctgtccatgtctgagaagggcctgcagttcctgctgaccacccagatggaggagctgaacaagtgccagaagctggtgcgggaggccgtgaagaacctggagggcccccccagcagaaatgtgattgaaagtgccaccgtgtgccacctgcggcctgcccggctgcccctgaactgctgcgtgttctgcaaggcagatgagctgttcacagaatatgagagcaagctgttcagcaacacagtgaagggccagacagccatctttgaggagatgattgaagatgaggagggcctggtggatgaccgggcccccaccaccacccggggcctgtgggccatcagcgagacagagaggtccatgaaggccatcctgagctttgccaagagccacagatttgatgtggagtttgtggatgagggcagcacctccatggacctgtttgaggcctggaagaaggagtacaagctgctgcacgagtactggatggccctgaggaacagagtgtctgctgtggatgagctggccatggccacagagcggctgcgggtgcgggacccccgggagcccaagcccaacccccctgtgctgcacatcatcgagccccatgaggtggagcagaaccgcatcaagctgctgaatgacaaggctgtggccaccagccagctgcagaagaagctgggccagctgctgtacctgaccaacctggagaagagccaggacaagaccagcggcggcgtgaaccctgagccctgccccatctgtgcccggcagctgggcaagcagtgggccgtgctgacctgtggccactgcttctgcaatgaatgcatcagcatcatcatcgagcagtacagcgtgggcagccacaggagcagcatcaagtgtgccatctgccggcagaccaccagccacaaggagatctcctatgtgttcaccagcgagaaggccaaccaggaggaggacatccctgtgaagggcagccacagcaccaaggtggaggccgtggtgaggaccctgatgaagatccagctgcgggaccccggggccaaggccctggtgttcagcacctggcaggatgtgctggacatcatcagcaaggccctgacagacaacaacatggagtttgcccagatcagccgggtgaagaccttccaggagaacctgagcgccttcaagagggacccccagatcaacatcctgctgctgcccctgcacacaggcagcaatggcctgaccatcatcgaggccacccacgtgctgctggtggagcccatcctgaacccagcccacgagctgcaggccatcggccgggtgcacagaattggccagaccaagcccaccatcgtgcaccgcttcctgatcaaggccaccatcgaggagaggatgcaggccatgctgaagacagctgagaggagcatctacatctag

SEQ ID NO: 249527 - DNA, 1983 bp, Artificial Sequence
  derived and/or modified sequence
atgagcagcaggaggaagagggcccctcctgtgcgggtggatgaggagaagaggcagcagctgcactggaacatgcatgaagatagaagaaatgagcccatcatcatcagtgatgatgatgagcagccctgccctggagaagatgtggagaagcagaagaaggagcccatgagcatctgtgacaagggcatcctggtggagagcagcttctctggagagatgctggaggacctgggctggctgcagaagaagaggcgcatcaagctgtaccagaagccagagggcaaccacatcatcaaggtgggcatctacctgctggaggccggcctggccaagctggacttcctgagtgatgccaacagcaggatgaagaagttcaaccagctgatgaagaaggtgatggagaagctgcacaacagcatcatcccagatgtgctggaggaggatgaagatgatcctgagagcgagcctgagggccaggacattgatgagctgtaccactttgtgaagcagacccaccagcaggagacccagagcatccaggtggatgtgcagcacccagccctgatccctgtgctgcggccctaccagcgggaggccgtgaactggatgctgcagcaggagtgcttccgcagcagccctgccacagagagcgccctgcacttcctgtggagagaaattgtgaccagcgagggcctgaagctgtactacaacccctacacaggctgcatcatccgggagtaccccaacagcggcccccagctgctgggcggcatcctggctgatgagatgggcctgggcaagacagtggaggtgctggccctgatcctgacccacacccggcaggatgtgaagcaggatgccctgaccctgcctgagggcaaggtggtgaactacttcatccccagccactactttggaggcaagctgaagaagacagagatccagaacatcgagtttgagcccaaggagaaggtgcagtgcccccccaccagggtgatgatcctgacagctgtgaaggagatgaatggcaagaagggcgtgtccatcctgagcatctacaagtatgtgagcagcatctaccgctatgatgtgcagaggaacagaagcctgctgaagaggatgctgaagtgcctgatctttgagggcctggtgaagcagatcaagggccacggcttcagcggcaccttcaccctgggcaagaactacaaggaggaggacatctgtgacaagaccaagaagcaggccgtgggcagccccaggaagatccagaaggagaccaggaagagcggcaacaaggacacagattctgagtacctgcccagcgacaccagtgatgatgatgatgacccctactactactactacaagagcagaagaaacagaagcaagctgaggaagaagctggtgcccagcaccaagaagggcaagagccagcccttcatcaacccagacagccagggccactgcccagccaccagtgacagcggcatcacagatgtggccatgagcaagagcacctgcatcagcgagttcaaccaggagcacgagacagaggactgtgccgagagcctgaaccacgccgacagtgatgtgccccccagcaacaccatgagccccttcaacaccagtgactacagatttgagtgcatctgtggggagctggaccagattgacaggaagccccgggtgcagtgcctgaagtgccacctgtggcagcacgccaagtgtgtgaactatgatgagaagaacctgaagatcaagcccttctactgcccccactgcctggtggccatggagcctgtgtccacccgggccaccctcatcatcagccccagcagcatctgccaccagtgggtggatgagatcaacagacatgtgcgcagcagcagcctgcgggtgctggtgtaccagggcgtgaagaaggatggcttcctgcagccccacttcggccgcacaggctacagctaccactacctgtag

SEQ ID NO: 249528 - DNA, 4980 bp, Artificial Sequence
  derived and/or modified sequence
atgagcagccggcggaagcgggccccccccgtgcgggtggacgaggaaaaaaggcagcagctccactggaatatgcacgaggaccgtcgcaacgaacccattatcattagcgatgacgatgagcagccatgtccaggctctgacacaagctctgcccactatattatcctgtcagatagcctaaaggaggaggtggctcatagggacaaaaagcgctgtagcaaggttgtcagcttctccaagcccatagaaaaggaagaaacagtaggaatcttcagtcctctgtccgtcaagcttaatattgtgatcagcccgtaccattttgacaattcatggaaagccttcttgggcgagctcacgctgcagctgctgcccgctcagtccctgattgaaaacttttccgaacgatctatcactcttatgtcaagtgaatcttccaaccagttcctcatttacgtgcactctaaaggcgaggacgtggagaaacagaagaaggagcccatgagcatctgcgacaagggcattttggtggagtcctctttctcaggagagatgctcgaagacctcggatggctgcaaaagaaacggcggatcaagctctatcagaagcctgagggcaaccatataattaaggtggggatctacttactggaagcagggctcgctaaactagattttctgagtgacgcaaacagtcggatgaagaaattcaaccagctgatgaaaaaagtcatggagaaattacacaatagtattatcccggacgttttggaagaggatgaagatgatcccgaaagcgagcctgagggccaggatatcgacgagttatatcactttgtcaaacaaacccaccaacaggagacacagagcattcaggtagatgtgcagcacccagccttgataccagttctacggccttaccaacgcgaagccgtcaactggatgctccagcaagaatgctttaggagctcacccgctaccgagtcagcgctgcatttcctctggcgtgagattgtcacatccgaagggttgaaactttattacaatccttataccggttgtatcattcgcgaataccccaacagcgggccgcagctgctcggaggcattctggccgatgagatggggctcgggaaaaccgtggaggttcttgccctgatactgacccatactcgccaggacgtgaaacaggacgcactgacattgcctgaaggcaaagtcgttaattattttataccatcgcattatttcggcggcaagctgaagaaaactgaaatccagaatatcgagtttgagcctaaagagaaggtgcagtgcccacctactcgggtgatgatcctgacggccgtcaaagagatgaatggcaaaaagggcgtgtccatcctctctatctataagtacgttagttccatttataggtatgatgtccagcgcaaccgttccctgctgaagcggatgctcaagtgtcttatcttcgagggcctcgttaagcaaattaaaggccacggtttcagcggaactttcactctggggaaaaattacaaagaagaggatatttgcgacaaaactaagaagcaggcagtgggatcacctcggaagatccagaaagaaactcggaagtcaggtaacaaggatacggatagtgaatatctgccatcagatacatctgatgacgacgacgacccgtactattattactacaaaagcagaagaaaccgtagcaaactccgcaagaaattagttccaagcacgaaaaaaggcaaaagccagccttttatcaaccccgacagccagggacactgtcccgcaacttcagacagcggtattactgacgttgctatgtctaaatccacctgcatctctgagtttaatcaggaacatgaaactgaggactgtgctgagtcacttaatcatgcagatagtgacgtgccccctagtaatacaatgtccccattcaatacctctgactatcggttcgaatgcatctgtggagaactcgatcagatcgatcgcaaaccacgggtgcagtgccttaagtgtcacctctggcaacatgcaaaatgcgtgaactatgacgaaaagaacttgaaaatcaaacctttctattgcccacactgcctcgtggccatggagcccgtgtccacccgtgctacacttatcatttcccctagttccatctgccaccaatgggtggatgagatcaacagacatgtcagatcctcatctctaagagtgttggtgtatcagggagtgaagaaggacggtttcctacaaccacactttctcgctgagcaagacatcgtcatcattacttatgatgttttacggtccgagctcaattatgttgacattccccatagcaattctgaagacgggaggcggctgcgaaatcagaaaagatacatggccattcctagcccactggtcgctgttgaatggtggcgaatttgcctagatgaagcccagatggtggagtgtccgactgttaaagctgccgaaatggcccagcgcctgtctgggattaaccgctggtgcatcagcggaactccagtccagagaggcctcgaggacctttttggactagtggtattcttgggcattgaaccctactgcgtgaaacactggtgggtgaggctcctttacaggccatactgcaaaaaaaatccccagcatttatactccttcatcgcgaagattctgtggcggtccgccaagaaggacgttatagaccagatccagataccaccacagaccgaggagatccactggctccatttctccccagtcgaaagacatttttaccatcgccagcacgaagtgtgctgtcaggatgtagtggtcaagctgaggaaaatctccgactgggccctcaagctttcttccctggacagacgtaccgtcactagcattctgtatcctctcctccgcctgaggcaggcctgctgccaccctcaggcagtgcgaggcgagtttttacccctgcagaaatctttcgaacagtccactttctctttctcaaccatgaccatggaggagttgctgacctccctgcagaaaaagtgtggaaccgaatgcgaggaagcacacagacagctcgtctgcgctttgaatggactcgcggggatccatattatcaagggtgagtacgcgcttgccgcagaattatatagggaggtgctacgcagcagcgaagagcacaagggaaagttgaagaccgactcacttcagcgtcttcacgcaacacacaatctgatggagctgcttatcgctaggcatccgggcatacccccgacactgagagatggcagacttgaggaagaggccaaacaactgagggagcactatatgtccaagtgtaacactgaggtcgccgaggctcaacaggctttgtaccccgtgcagcagaccattcacgaactacaacggaagattcattctaacagcccgtggtggctcaacgtcatccatcgagctattgagttcacaatcgacgaagagctcgtgcagcgggtacgaaatgaaattacctccaattacaagcagcagactgggaaactcagcatgtctgaaaagggacttcagttcttgttaaccactcagatggaggaactcaataagtgccagaagctcgtcagagaggccgtcaagaacctggagggacctcctagccggaacgttatcgaatctgcaaccgtatgccatctgagaccagctcgcctgcctctgaactgttgcgtgttttgcaaggccgatgagttgtttactgagtatgagtctaagttattttcgaatactgtcaaaggccagaccgccatttttgaggaaatgatcgaggacgaagagggacttgtagacgacagggccccaacaacaacacgcggactttgggctatcagcgagaccgagaggtccatgaaggcgatcctctccttcgccaaaagccacagattcgacgtagagtttgtggacgagggcagcactagcatggacctctttgaggcttggaaaaaggaatacaagttgctgcatgagtactggatggcactgcgaaaccgcgtttcagcggtggacgaactagccatggccactgagcgcctgagggtccgggaccctcgggaacctaagcccaacccacccgtactgcatattatcgaacctcacgaggtcgaacagaatcgtattaagttactcaatgacaaggcagtggccaccagtcagctgcagaaaaaactcggtcagcttctctatctgactaatctagaaaagtcacaggataagacctccggcggagttaacccagaaccatgccctatttgcgcccgccagcttggcaagcagtgggctgttcttacctgtggccattgcttttgtaacgagtgcatctctattattatcgagcaatactcagtaggttcgcacagatcttctatcaagtgcgctatttgtaggcaaacaactagtcacaaggagatatcgtacgtgtttacttccgaaaaagccaaccaggaggaggacatccctgtcaaaggttcgcatagcacaaaggtggaggcggtggtgcggacattgatgaagatccagctgagagatcctggagcaaaagcccttgtcttcagtacatggcaagatgtcttggatatcattagcaaagcattaactgataataacatggaattcgctcagattagccgggttaagacttttcaggagaacttatcagccttcaaacgtgatcctcagatcaacatcctgctgcttccgcttcatactggttcgaatgggttgacaatcattgaagccactcacgtactgttagtggagcctattctgaaccctgcccacgagttacaagcaattggcagggtgcataggatcggacagaccaagccaaccatcgtacatcgttttttaattaaggccaccatagaggagcgcatgcaggcaatgcttaagacggccgaaaggtctatttatatctag

SEQ ID NO: 249529 - DNA, 1983 bp, Artificial Sequence
  derived and/or modified sequence
atgagcagccggcggaagcgggccccccccgtgcgggtggacgaggagaaaaggcagcagctgcactggaacatgcacgaagatagaaggaacgaacctataatcatatctgacgacgacgagcagccatgcccaggtgaagacgttgagaagcaaaaaaaggagcccatgagcatttgcgacaaaggtattctcgtcgagtccagtttcagcggcgaaatgcttgaggacctgggctggttgcagaagaaacgccgtataaaactgtatcagaagccagaagggaaccacattatcaaagtggggatttacctacttgaagccgggctcgcgaagctggattttctgtccgacgccaatagccgaatgaagaaattcaatcagctaatgaagaaagtcatggagaaactgcacaatagtatcatccccgatgtgcttgaggaggacgaagacgatccagagtctgaacccgaaggtcaggacattgatgagctgtaccactttgtaaagcaaactcaccagcaagagactcaaagcattcaagtggacgttcagcaccctgcactcatccccgtgctgcgcccctaccaaagagaagccgttaattggatgctccagcaggagtgctttcgctccagccctgccactgagtctgcattacactttttgtggagggagatcgttaccagcgagggcctgaagctctactacaatccatacactggctgcatcattcgggaataccctaactctggtcctcaactgctgggcggcatcctggccgacgagatggggctgggtaagaccgtggaggtcctggcactgattctaactcacacacgtcaggacgtgaaacaggatgccctcacactgcccgagggtaaggtcgtgaactacttcataccttcccactattttggaggtaagcttaaaaaaaccgagatacagaacattgaatttgaacctaaggaaaaagtgcagtgcccccctactagggtcatgatcttgacggcagtgaaggagatgaatggaaaaaagggagtctcaatactgtctatatacaaatatgttagctcaatatacaggtacgacgttcaacgaaatcgtagcttactcaagcggatgctaaagtgcctgatctttgagggtctcgtaaagcagattaaaggccatgggttcagtggaaccttcactctgggcaagaattataaggaagaggatatttgcgacaagacaaagaaacaggccgtaggctccccacgtaagatccagaaagaaacacgcaagtccgggaataaggataccgatagcgaatatctaccaagcgatacttcagatgatgatgatgacccgtactactactactacaaatcccggcgcaacagatccaaactgagaaagaagctagtgcccagcaccaaaaagggaaaatctcaacctttcattaacccagacagtcaaggccattgccccgccaccagcgactctggcattacggatgtggcaatgtcgaagagcacctgtatctctgagtttaatcaggaacatgaaacagaggactgcgccgaaagcctaaatcatgcagactccgatgttccaccatcaaacaccatgtctcccttcaatacctctgactaccgctttgaatgcatctgcggcgagctggaccagattgaccgtaaaccgagagtgcagtgcttaaaatgccacctgtggcagcatgccaaatgtgtgaactatgacgaaaagaacctgaagattaagccgttctactgccctcactgtctggtcgctatggaaccagtgagtactcgagctacactgataatttcaccctccagcatatgtcatcagtgggtggacgaaattaataggcacgtaaggagctccagcctaagagtcctcgtgtaccagggggtcaagaaggatggcttcctgcagccccattttggcaggactggttatagttaccactacctgtag

SEQ ID NO: 249530 - DNA, 6994 bp, Artificial Sequence
  derived and/or modified sequence
gtctttggcctccgggaccagggagggaggacgctggttgtcctggagcccgggaagctcaagggctgagagggagccgctgcgcgagtcttccccacctcttcccgatcccggactagcgaacttcggaccaccacgtccctccggggataaagtggggtcgtgggaaaggaggctgtgcttctcctcatgcactggggcctgcggtgtttgtctcgagcgtccaacacactaggatccgggagtccgtcgtcacgctccttggcctcgcggtcgcttgtttgctcggcctgctgggagcgatccggcgctgacagccccgctcagactccgggagccgcttgtgggtctttcggaagataactgaagttcacagttaccagccaagaaaacttgaaaatgagcagccgacggaaacgtgctcctccagtgagggtagatgaggaaaagaggcagcagcttcattggaatatgcatgaggacagaaggaatgaacctatcatcataagtgatgatgacgagcagccctgcccaggttcagatacctcttctgctcattatatcattctaagtgatagtctaaaggaagaagtggctcacagagataagaagaggtgttcaaaagtggtgagcttctcaaaaccaattgaaaaagaagagactgttggtattttttcccctttgtctgtaaagttaaatattgtgatttctccctatcattttgataattcctggaaagcatttctaggagaattaactcttcagcttcttcctgcacagagtttaattgaaaatttttccgaaaggagtattacattgatgagttcagagtcaagcaatcagttcctgatttatgttcattcaaaaggtgaagatgtagagaaacaaaaaaaagaaccgatgagtatttgtgacaagggtattctggtggagtcatccttcagtggtgaaatgttagaagatttggggtggctacaaaagaagagaagaataaaactctatcagaaaccagaaggaaatcacattatcaaggttggaatttatcttttggaagctggcctagcaaaactagacttcttgagtgatgcaaattcaagaatgaaaaagttcaatcagctcatgaagaaagtaatggaaaagttacacaattctattattccagatgtgttggaagaggatgaagatgatccggagagtgagccagagggacaagacattgacgagctgtatcactttgtgaaacaaacacatcagcaagaaacgcagtccatccaagtggatgtccagcatcctgcattgatccctgtgttgagaccctaccaaagagaggctgtcaattggatgctacaacaagagtgtttcagaagcagtcctgctactgaaagtgccctgcacttcttatggcgagagattgttacatctgagggtctgaaactctactataatccatatacaggctgcatcattcgtgagtacccaaattctgggccgcagttgcttggtggaattttagcagatgagatgggtcttggaaagacagtggaggttttggctctgattctgacacatactcgacaagatgtcaagcaagatgctctcactcttcccgagggaaaagtggtgaattattttattccgtcacattattttggaggaaaactgaaaaagacagaaatccagaatatcgaatttgaaccaaaagaaaaagttcaatgccctcctacacgtgtgatgatactgacagctgtgaaagaaatgaatggaaaaaaaggagtgtccatcctttccatctataagtatgtcagttctatatatagatacgatgttcaacggaacaggagtcttttgaaacggatgctgaaatgtttaatttttgaaggtctcgtgaaacagatcaaaggccatggtttttctgggacttttacattgggaaagaattacaaggaagaggatatatgtgataaaacaaaaaagcaggcagtagggagtccaaggaaaattcagaaagaaactagaaaatcagggaacaaggacacagattctgaatacttgccatcagacacctctgatgatgatgatgatccttactattattattataagtccaggagaaatcgcagtaaattgaggaaaaagcttgttccatccacaaaaaaaggaaaaagtcaaccatttatcaatcccgattcacaaggtcactgtccagctactagcgactctggaataactgatgttgctatgtctaaaagtacatgtatctctgaattcaaccaagaacatgaaacagaggactgtgctgaatctctaaatcatgctgatagtgatgtaccaccttctaataccatgagtccctttaacacctctgattaccgctttgagtgtatatgtggtgaacttgatcagatagatcgtaagcctcgtgttcaatgcctgaagtgtcacctgtggcaacatgcaaagtgtgtgaattatgatgagaaaaatctgaagatcaagcctttttactgcccccactgccttgttgcaatggaaccagtgtcaacaagagcaactctgatcatctctccaagttccatctgtcaccagtgggtggatgagatcaacaggcatgtgaggtcgtcatctcttcgagtcttggtatatcaaggagtgaagaaagatggctttttacaacctcattttttggcagaacaggatatagttatcattacctatgatgtactgcgttcagaattaaattatgtcgatatcccacatagcaatagtgaggatgggcgtcgcctacggaaccagaagcgctatatggctatcccgagccccctggtagctgtggagtggtggaggatctgccttgatgaagctcagatggttgagtgtcccacagtaaaagctgcagaaatggcccagcgtttgagtgggattaatcgatggtgtatcagtggcactccagtacagagaggattagaggatctttttgggttagtggtctttcttggtattgaaccttactgtgtcaaacactggtgggttcgacttctctatcggccttactgcaagaagaatcctcagcatctctacagctttattgccaagatactgtggaggtctgcaaagaaagatgtgattgaccaaatccaaataccaccacaaaccgaagaaatacactggctccacttttctccagtggaaaggcatttctatcaccgtcagcatgaggtgtgctgccaggatgtggtggtaaaactcaggaagatttctgactgggctctgaagctcagcagcctagacagaaggactgtcacctctatcctgtatccattgctgaggctcagacaggcctgctgtcacccacaggctgttcgtggagagttcttgccactccaaaaaagttttgaacagtctaccttttcttttagcaccatgacaatggaagagctgctgacatctttgcagaagaaatgtggaactgaatgtgaagaagcacatcgacagctagtttgtgctctcaatggcttagcaggcattcatattattaaaggtgagtatgccttggcagcagaattgtacagagaagtgttgcgctcctcggaggaacacaaaggaaaactcaaaactgattcacttcaaagacttcatgctacccataacttgatggaattgttgatagccaggcacccagggataccacctaccttgcgtgatggccgacttgaggaagaggccaaacagctgcgagagcactacatgagcaagtgtaatacagaagttgctgaagcccagcaagctttatatcctgtgcagcagaccatccatgagcttcaaagaaagattcattctaattctccttggtggctaaatgtgatccacagagcaatagaatttactattgatgaggagctagttcagcgagtgcgaaatgaaataaccagcaactacaagcaacaaactggcaagctttctatgtcagagaaaggtcttcagttcttacttacaacacaaatggaagagctaaataaatgccagaagctagtaagagaggctgtaaaaaacctggagggacctccatctcgtaatgttattgagtctgcaacagtctgtcacctccgaccagccagacttcctctcaactgctgtgtcttttgtaaagctgatgaattgttcacagagtatgaatcaaagctattttccaacacagtcaaaggccagactgcaatatttgaggagatgatagaagatgaagaaggactggtggatgatcgagcacctaccaccacccggggtctctgggcaataagtgagacagagcgatctatgaaagcaatactatcatttgcaaaatcacataggtttgatgttgaatttgttgatgaaggaagcacttcaatggatctctttgaagcatggaagaaggaatataagttgcttcatgaatattggatggctctgaggaatcgtgtgtctgctgttgatgaacttgcaatggctacagaacgactaagagtgcgtgatcctagggagccaaagcctaatccgcctgttcttcatatcattgaaccacatgaggtagaacaaaaccgaataaaactactaaatgataaagctgttgctacatcacagcttcagaaaaaacttgggcagcttctttacctaactaatttggagaagtctcaagataaaacatcgggaggtgttaatccagaaccttgcccaatctgtgctcgacagctaggaaaacagtgggcggtactgacctgtggtcactgtttctgtaatgaatgcatttctataattattgaacaatacagcgtgggatctcacagaagctccattaagtgtgcaatctgccgccagaccacatctcacaaagaaatctcgtatgtctttacctcagagaaagcaaaccaggaggaggacatccctgtgaagggcagccattctacaaaagtggaagctgtggtcagaactctgatgaaaatacagcttagagatccaggggccaaagcactcgttttctcaacgtggcaagatgtattagatattatttcaaaagctcttactgacaacaacatggaatttgcacaaatcagtcgtgttaagacatttcaggagaacctttcagcatttaaacgtgatccccaaatcaatattttgctgctgcccctgcacacaggttctaatggattaactatcattgaagcaactcatgttctcttggtggagcccatattgaaccctgcccatgagcttcaggccatagggagggtgcaccgaattggacagacaaaacctactattgtacacagattcttaattaaagcaacaatagaagaaagaatgcaggcaatgctgaaaactgctgagagaagtatctatatctgatgatgcaagggaattaagagaggtaatgtgtacttttcttatgataagatcactcataaaacagttggaataagaaagtaaactagtctagttttatatgacctggtatattgaacaaacatagatctcagttttggaagggccttcagtatctttagcacatgattcaccaatatcttgttagtaatattttaagtagatggtgaattatattaacccattttttgagtaggcttataccataactttacacctagtaattttgcagtaatacaactccttacaataagttaatgttagacagttatttgtttcttctgcatcttgctactgaaaacaaaaacaatgaaaatattcatatttctattatgtgtaaagtggtgttagtgtaaacagttaactccaaatagattttttaatgtattaatgattaccttaaaattatctgctttccctactcttaatttttcttattgttaaagtttttatatgttgtaagattgatgtatctgtaaatattgcagtttttatgattttgttttattataacatggaaatatggcagggttttttttttaatcattattatactgatgtcttggattctttttctttcccatgttcttgtgtaactagactttttagccagtgatatctgaattcatggtagagttgttatttcactccagttgttcctcccttaagcacgagtctttgaccttttgaacaagagaatgccatgttcacataagcaaatcgttgcaagtgataataacgaagtgtttcttcttctgtgaggaattaatggactttgaaattgctgaataaggagtagcttgttacatcctagccatttgatgtaatacaaatgttcttatttggcttccttttctttgagccttcagagttttaaaggaccctctttgaccctcaggacttattagctcccagttagctgcctggaaaactcatagaaccattccctagatcccatttgtccgagaggctttggtgcttagttaaggtgcattttcttactctaggtttatagagtgatgtaattcaactgaagaaaacacacacatgcttttggtgcttattcttcagttaaaaggaggtatccattgattcttttatatgaaattaaatcaaactgttatttttatagctcttcacatattaaaaagagctttcatgtacatttacgtgtttaatttacccaacaatcttgtgaagttgatataattaatatctttactgttttaaaggtagagaactgaagttcagatatattgaaactttcttaggacatgtagcaagtaaacagtggagcccaggtcccctgactccatatcttacattcttttactaataacatgtcatgctgagattcagaaggcccatgcttataatttaaaaatgagactatttcagtatttctttgtgtttgttttctactattcctttctgagctatgttttagagaaaacaatttgatatgcttcaattttgtaaaatcaaattacatatatataaaaaaacctatctgtattagacaaaaactgtttttatttatttctgtaagatatccattaaataaatattttagtggaaa

SEQ ID NO: 249531 - DNA, 5237 bp, Artificial Sequence
  derived and/or modified sequence
actcatgaagccagcgcaggagaaagggggcggggtgctctgacgagcgcgttcgccttgaccccacgctacagcgcgcgcccggcagctaggcgctgtggtttctgggtctcccgggggacccctacacgttccggcaaaaagcgctcgtgcccacctcaagcccatgttcggtgggtggcgaatgcgtgcccgtgatctgctgggtctgtagaggagcgcaggcctggtgcaaacagactcaagaggctcggagaaccagcttggagttcacagttaccagccaagaaaacttgaaaatgagcagccgacggaaacgtgctcctccagtgagggtagatgaggaaaagaggcagcagcttcattggaatatgcatgaggacagaaggaatgaacctatcatcataagtgatgatgacgagcagccctgcccaggtgaagatgtagagaaacaaaaaaaagaaccgatgagtatttgtgacaagggtattctggtggagtcatccttcagtggtgaaatgttagaagatttggggtggctacaaaagaagagaagaataaaactctatcagaaaccagaaggaaatcacattatcaaggttggaatttatcttttggaagctggcctagcaaaactagacttcttgagtgatgcaaattcaagaatgaaaaagttcaatcagctcatgaagaaagtaatggaaaagttacacaattctattattccagatgtgttggaagaggatgaagatgatccggagagtgagccagagggacaagacattgacgagctgtatcactttgtgaaacaaacacatcagcaagaaacgcagtccatccaagtggatgtccagcatcctgcattgatccctgtgttgagaccctaccaaagagaggctgtcaattggatgctacaacaagagtgtttcagaagcagtcctgctactgaaagtgccctgcacttcttatggcgagagattgttacatctgagggtctgaaactctactataatccatatacaggctgcatcattcgtgagtacccaaattctgggccgcagttgcttggtggaattttagcagatgagatgggtcttggaaagacagtggaggttttggctctgattctgacacatactcgacaagatgtcaagcaagatgctctcactcttcccgagggaaaagtggtgaattattttattccgtcacattattttggaggaaaactgaaaaagacagaaatccagaatatcgaatttgaaccaaaagaaaaagttcaatgccctcctacacgtgtgatgatactgacagctgtgaaagaaatgaatggaaaaaaaggagtgtccatcctttccatctataagtatgtcagttctatatatagatacgatgttcaacggaacaggagtcttttgaaacggatgctgaaatgtttaatttttgaaggtctcgtgaaacagatcaaaggccatggtttttctgggacttttacattgggaaagaattacaaggaagaggatatatgtgataaaacaaaaaagcaggcagtagggagtccaaggaaaattcagaaagaaactagaaaatcagggaacaaggacacagattctgaatacttgccatcagacacctctgatgatgatgatgatccttactattattattataagtccaggagaaatcgcagtaaattgaggaaaaagcttgttccatccacaaaaaaaggaaaaagtcaaccatttatcaatcccgattcacaaggtcactgtccagctactagcgactctggaataactgatgttgctatgtctaaaagtacatgtatctctgaattcaaccaagaacatgaaacagaggactgtgctgaatctctaaatcatgctgatagtgatgtaccaccttctaataccatgagtccctttaacacctctgattaccgctttgagtgtatatgtggtgaacttgatcagatagatcgtaagcctcgtgttcaatgcctgaagtgtcacctgtggcaacatgcaaagtgtgtgaattatgatgagaaaaatctgaagatcaagcctttttactgcccccactgccttgttgcaatggaaccagtgtcaacaagagcaactctgatcatctctccaagttccatctgtcaccagtgggtggatgagatcaacaggcatgtgaggtcgtcatctcttcgagtcttggtatatcaaggagtgaagaaagatggctttttacaacctcattttggcagaacaggatatagttatcattacctatgatgtactgcgttcagaattaaattatgtcgatatcccacatagcaatagtgaggatgggcgtcgcctacggaaccagaagcgctatatggctatcccgagccccctggtagctgtggagtggtggaggatctgccttgatgaagctcagatggttgagtgtcccacagtaaaagctgcagaaatggcccagcgtttgagtgggattaatcgatggtgtatcagtggcactccagtacagagaggattagaggatctttttgggttagtggtctttcttggtattgaaccttactgtgtcaaacactggtgggttcgacttctctatcggccttactgcaagaagaatcctcagcatctctacagctttattgccaagatactgtggaggtctgcaaagaaagatgtgattgaccaaatccaaataccaccacaaaccgaagaaatacactggctccacttttctccagtggaaaggcatttctatcaccgtcagcatgaggtgtgctgccaggatgtggtggtaaaactcaggaagatttctgactgggctctgaagctcagcagcctagacagaaggactgtcacctctatcctgtatccattgctgaggctcagacaggcctgctgtcacccacaggctgttcgtggagagttcttgccactccaaaaaaggcaccatgacaatggaagagctgctgacatctttgcagaagaaatgtggaactgaatgtgaagaagcacatcgacagctagtttgtgctctcaatggcttagcaggcattcatattattaaaggtagaaggtgagtatgccttggcagcagaattgtacagagaagtgttgcgctcctcggaggaacacaaaggaaaactcaaaactgattcacttcaaagacttcatgctacccataacttgatggaattgttgatagccaggcacccagggataccacctaccttgcgtgatggccgacttgaggaagaggccaaacagctgcgagagcactacatgagcaagtgtaatacagaagttgctgaagcccagcaagctttatatcctgtgcagcagaccatccatgagcttcaaagaaagattcattctaattctccttggtggctaaatgtgatccacagagcaatagaatttactattgatgaggagctagttcagcgagtgcgaaatgaaataaccagcaactacaagcaacaaactggcaagctttctatgtcagagaagttccgtgattgcagaggtcttcagttcttacttacaacacaaatggaagagctaaataaatgccagaagctagtaagagaggctgtaaaaaacctggagggacctccatctcgtaatgttattgagtctgcaacagtctgtcacctccgaccagccagacttcctctcaactgctgtgtcttttgtaaagctgatgaattgttcacagagtatgaatcaaagctattttccaacacagtcaaaggccagactgcaatatttgaggagatgatagaagatgaagaaggactggtggatgatcgagcacctaccaccacccggggtctctgggcaataagtgagacagagcgatctatgaaagcaatactatcatttgcaaaatcacataggtttgatgttgaatttgttgatgaaggaagcacttcaatggatctctttgaagcatggaagaaggaatataagttgcttcatgaatattggatggctctgaggaatcgtgtgtctgctgttgatgaacttgcaatggctacagaacgactaagagtgcgtgatcctagggagccaaagcctaatccgcctgttcttcatatcattgaaccacatgaggtagaacaaaaccgaataaaactactaaatgataaagctgttgctacatcacagcttcagaaaaaacttgggcagcttctttacctaactaatttggagaaggtattgtttctaagacatgctactttttcctatgctgcattatcataaaccactttagtgactcctttcataattaatggtgcaaattgttgtaattagtatttggtgttatatgagtcagaacactacctatgtctctacaatagcttcagagatcacaaaagaatattgtatctatagaaatttattatgcagatgatatagaaggcatgcactcgatagtagagaacaatgtaaatggactgtagttcaaagccttgaatagtaaaagtattaaaacatatctcggtgaaactggcataatgcaatttatacacatgcattcattcatcaatacaaaaatatgttgtaatttgttatttgaaactgaagtgtgtttcgaaagctactaaatcagagtacatggtaataaaggtagacttcaaatattaagtaattcaaaacacatgttctgagttatgatctgagtattatactggacactgatgaattggtgggtcattgattaaatataatttcattttattgcaggaatcatattttgctagttggcagagaaccttctaggggcaagatatagtagtaaatatttggatagggcaagtgaggacaagatatagatttgaattcttctggaaactggtataacatatacttaagtgaatcagtaaatctcagacaaaatgaaaagttagacattcattatagatatagcatggcgactaagaaggtagactttggaactggacagcccaattttgaatcgtgactcaactgttttctagatatgtgactttatttaagttattcacctttcctcgcatcatcagtaaaatgagaatgatgtcaacactactttatagtatagggctgtcttgaggattgtgtgaattaatacatgtaaaatgctagagtagtttctgatctattaagcactttctaggtttttgctgctattaatattattaagatcattattactgttatgattaccaacacttattctgaaag

SEQ ID NO: 249532 - DNA, 4979 bp, Artificial Sequence
  derived and/or modified sequence
atgtcgagccggaggaagcgggcacctcctgtccgcgtggacgaggaaaagcgccagcaactgcactggaatatgcacgaggatcgacggaacgagcccataattatctcagatgatgatgagcagccatgccccggatccgatacctcttctgcccactacataatcctctcagacagccttaaggaggaggtggcccatagagacaaaaagcgttgcagtaaggtcgtctcattttctaagcccatcgagaaggaagagacagtgggcatcttcagtccgctgtccgtcaagttgaacatcgtgatctcaccataccatttcgataatagctggaaggcattcctaggggagctcaccctgcaactgctacctgcacagagcctaatagagaattttagtgagagatccataacgcttatgtcatccgagtcctcgaaccagtttctcatttacgtacactccaagggagaagatgtggaaaaacagaaaaaggaaccgatgtctatatgtgacaagggtatactggtggagtcttccttcagtggagagatgttagaggaccttggatggctgcaaaagaagcgaagaattaaactataccaaaagccggaagggaaccacattataaaggtgggtatttatctcttggaagccggacttgccaagttagattttctgagcgatgctaatagcaggatgaagaaattcaaccagttaatgaagaaggtaatggagaagctccacaactctattataccagatgtactcgaggaagacgaggacgaccccgagtcagagccagaaggacaggatatagacgagctctatcacttcgtgaaacagacacaccaacaggagacacagagcatacaagtggacgtccagcaccccgctttgattcctgtccttcggccataccaacgggaggccgtaaactggatgctccagcaggagtgtttcagatcctcaccagctacagagagtgccttgcactttctatggcgtgagatcgtgacatcagagggccttaagttgtactacaacccatataccggttgcataatccgggaataccctaattcagggccacagcttctcggcggaattcttgctgatgaaatgggactcggcaagacggtcgaagtacttgctctcattctcacccacactaggcaggatgtgaagcaggatgccttgacattgcccgagggtaaagtagtgaactatttcatcccttctcactatttcggtggtaaactgaagaaaacagaaatccagaatattgagttcgaacctaaagagaaggtccagtgcccacccacccgcgtgatgatacttaccgccgtgaaggaaatgaacggtaagaaaggagtttctattctgagcatctataaatacgtgtcctccatctatcgctatgatgtgcagagaaatagatctctgctgaaacggatgttgaagtgcctgatttttgaaggtcttgtcaagcagataaaaggccacggattcagcggtacattcacccttggcaaaaactataaggaggaagatatatgcgacaaaactaaaaagcaagccgtgggatccccccgtaaaatccagaaagaaacaagaaaatctgggaataaagacaccgactctgagtacctgccctctgacaccagtgacgatgatgatgatccctactactactactataaatcccgcaggaaccggagtaaactgcggaaaaagctggtgccttcaactaagaagggcaagtctcagcctttcataaatcctgatagccagggccactgtcccgctacttccgacagcggcatcactgacgtggcaatgtcgaaatctacctgcatttccgagtttaatcaggaacacgaaaccgaggactgcgcggaaagcctaaatcacgcagatagtgatgtgccaccttcaaacaccatgtctccatttaatacaagtgattatagattcgaatgtatctgtggagaactggaccagatcgatagaaaacccagagtccagtgcctgaagtgccacctctggcagcatgccaagtgcgtcaattatgacgaaaagaacctgaaaattaagcccttctattgccctcattgtctggtggctatggaacccgtctccacacgagccacgctgataatatctccatccagcatttgtcaccaatgggttgacgagatcaacagacacgtccgatcgagcagtctccgcgtgctagtttaccagggcgttaagaaggacggcttcctgcagccccacttcctcgccgaacaggatattgtgatcatcacctacgacgtactccgaagtgagctcaattacgttgatatcccccactccaactcagaggacggccgacggctgcggaatcagaaaagatacatggcaattccatcaccactcgtggcagtggagtggtggagaatctgcctcgacgaggcgcaaatggtagaatgcccaactgtaaaggccgctgaaatggcccagagactgtccggcattaatcgatggtgtatctccggcacccctgtccaacggggtctggaggacctttttggactggtcgtgtttctgggtatcgaaccctactgcgtaaagcactggtgggtgcggttattgtacaggccatattgtaaaaaaaatccgcagcatctgtatagctttattgccaagatcctatggaggtctgctaaaaaggatgtcattgaccagatacagatacctcctcagaccgaggagatacactggcttcacttttctccagtagaaaggcatttctatcatagacagcacgaagtgtgttgccaagacgtggttgtgaagctcaggaaaatttcagattgggccctgaagctttcttctctggacagacggaccgttactagtatcctctaccccctcctccgtctgcggcaggcctgttgccacccccaggctgtaagaggtgaatttttgcccctgcagaaaagttttgagcagtctacattttccttttcgacgatgaccatggaagagttactcacctctctgcagaaaaagtgcgggactgagtgcgaggaagctcatcgccaactggtatgtgcgctgaacggcctggctgggatccatatcattaagggagaatatgctctggccgctgagctgtatagggaggtcctcagaagcagcgaagagcataagggtaagctaaagacagactctttacaaaggctgcacgcgacccacaacctcatggaactgctgatcgccaggcatccagggattccgccaaccctgcgggatggacggttagaagaggaagcaaagcaattgcgcgagcattacatgtccaagtgtaataccgaagtggccgaggctcagcaagctctgtacccggtgcaacagactatccacgagctgcagagaaagatccattccaatagtccctggtggctcaatgtgattcatagggctatcgagtttacaattgacgaggagctcgtccagcgcgtcaggaacgaaattactagcaactacaaacagcagacaggtaagctttctatgtccgaaaaggggctgcagtttctgctgacgacccagatggaggaactgaataaatgtcaaaagcttgtgcgcgaagcggtcaaaaaccttgagggtcctccatcgcgcaatgtgatagaaagcgccactgtttgtcacctcagaccagctaggctgccactgaactgctgcgtattctgcaaagcagatgagttgttcacggagtatgaatccaagctattctccaacaccgtcaagggccagacagcgatttttgaggagatgatcgaggatgaggaaggtctcgtcgacgatcgcgctccaacaacaactagggggttatgggcgataagcgaaactgaaagaagcatgaaggccattctgagctttgcaaagtcccatcggtttgacgtggagtttgtcgacgaggggtctacctcgatggacctcttcgaggcctggaagaaggaatataagctcctgcacgaatactggatggcgctgcggaaccgcgtctctgcagtggatgaactggctatggcaaccgagagactgcgggtcagagacccaagggaaccaaaacctaatcccccagtcctccacattattgagccacacgaagtggagcagaatagaatcaaattgctaaacgataaggccgtagccacctcacaactgcaaaaaaagctgggacagctcctctatctcactaatctggagaaaagccaggacaaaacatctggtggggtcaacccggagccttgcccaatctgtgccagacaactgggcaagcagtgggctgtgctcacatgtggccattgcttctgtaatgagtgtattagtattatcattgagcagtattccgtggggagccaccgttcatctatcaagtgtgctatctgtagacagacaactagtcataaggaaatttcctatgtattcacttctgagaaggcaaaccaggaggaagacatccctgtgaaaggttctcattccactaaggtcgaagcagttgtaagaacccttatgaagattcagcttagagatcctggggctaaggcactcgtgttctcaacctggcaggacgtcctggacattataagcaaggcgctgacagataataacatggagtttgcgcagataagtagggtcaagacatttcaggaaaatctgagtgcttttaagcgggacccacagataaacatcctgctactgcccctgcatacaggcagcaatggcctcaccatcattgaggctacccacgtactcctcgtcgagccaattttgaatccagcccatgagttacaggccatcggaagagtccacaggatagggcagaccaaacctactattgttcaccggtttcttattaaagctacaatagaagagagaatgcaggccatgctgaaaacagccgagcgatctatatatatcta

SEQ ID NO: 249533 - DNA, 1983 bp, Artificial Sequence
  derived and/or modified sequence
atgtcctcccgacggaagcgggcaccacctgtgcgggtggatgaggagaagagacagcagcttcattggaacatgcacgaggatcgtcgtaatgaacctataatcattagcgatgacgacgaacagccatgtcctggtgaagatgttgaaaagcagaagaaagagccgatgtccatttgcgacaaaggcatacttgtggaaagctctttcagcggggaaatgctggaagatctcggatggttgcagaagaaacggaggatcaagctctatcagaagcctgagggcaaccacattataaaggtcggaatttacctactggaggctggtttagcgaagcttgacttcctctccgatgcaaattcaagaatgaaaaagttcaatcaacttatgaaaaaagtgatggaaaaactgcacaactcgataattccagacgttctggaagaggatgaggacgatcccgaaagcgaaccagaaggtcaggacattgatgaattgtatcatttcgttaaacagacacaccagcaggaaactcagtctatccaagtcgacgtgcaacatccggctctcatacccgtgctcagaccctatcagcgcgaggccgtcaactggatgctacagcaggaatgctttcgctctagccctgcaaccgagtccgcactgcattttctttggcgcgagatcgtgacttcagaaggactcaaattgtactacaacccctataccgggtgcatcatacgcgagtatcccaattctggacctcagcttctgggcggaatactggctgatgagatgggcttaggtaaaacagtggaggtcttagccctgatcctaacgcataccagacaagacgtcaagcaggacgcacttaccctgcccgagggtaaagtcgtcaactatttcatccctagccattactttggtggcaaactgaaaaaaacagagattcagaatatcgaattcgagccaaaagaaaaagtgcaatgtcccccaactagagttatgattctcactgccgtgaaagagatgaacggcaagaagggggtcagcatactatcaatctacaaatacgtgagcagcatctaccgctacgatgttcagagaaatagaagcctgctcaaacgcatgctcaagtgcctgattttcgaaggcttagtgaaacagattaaaggccacggattttcaggaacgttcaccctcggtaagaactacaaggaggaggatatttgtgacaaaacaaagaagcaggcagtgggttctcccaggaagatccagaaagagaccaggaagtcaggaaataaggatacggactccgagtacttgccatcagacacttccgacgatgatgacgatccctactactattactacaagagcagacgtaacagatctaaacttcgcaaaaagttggtaccatccaccaagaaggggaaatctcaaccattcatcaatccagattctcaggggcactgtccagccacctccgattccgggatcactgatgtcgcgatgagtaagtctacatgtatttcagaatttaaccaagaacacgagaccgaagactgcgccgaatccctgaatcacgctgattccgatgtcccaccaagtaataccatgagcccattcaatacaagtgactacagatttgagtgtatatgtggagagttggatcagattgacaggaagccccgagtgcagtgcctcaagtgccacctttggcagcacgccaagtgtgtcaactacgacgaaaagaatctaaaaattaagccattttactgccctcactgtctggtggcaatggagccggtgagtacgcgcgctacccttatcattagcccttctagcatctgccaccagtgggtggacgaaatcaaccgtcatgtgcggtcaagctcgcttagggtcctggtttaccagggagttaagaaggatggcttcctccagcctcatttcgggaggactgggtactcatatcactacctatag

SEQ ID NO: 249534 - DNA, 4980 bp, Artificial Sequence
  derived and/or modified sequence
atgagcagcagaagaaagagagccccccccgtgagagtggacgaggagaagagacagcagctgcactggaacatgcacgaggacagaagaaacgagcccatcatcatcagcgacgacgacgagcagccctgccccggcagcgacaccagcagcgcccactacatcatcctgagcgacagcctgaaggaggaggtggcccacagagacaagaagagatgcagcaaggtggtgagcttcagcaagcccatcgagaaggaggagaccgtgggcatcttcagccccctgagcgtgaagctgaacatcgtgatcagcccctaccacttcgacaacagctggaaggccttcctgggcgagctgaccctgcagctgctgcccgcccagagcctgatcgagaacttcagcgagagaagcatcaccctgatgagcagcgagagcagcaaccagttcctgatctacgtgcacagcaagggcgaggacgtggagaagcagaagaaggagcccatgagcatctgcgacaagggcatcctggtggagagcagcttcagcggcgagatgctggaggacctgggctggctgcagaagaagagaagaatcaagctgtaccagaagcccgagggcaaccacatcatcaaggtgggcatctacctgctggaggccggcctggccaagctggacttcctgagcgacgccaacagcagaatgaagaagttcaaccagctgatgaagaaggtgatggagaagctgcacaacagcatcatccccgacgtgctggaggaggacgaggacgaccccgagagcgagcccgagggccaggacatcgacgagctgtaccacttcgtgaagcagacccaccagcaggagacccagagcatccaggtggacgtgcagcaccccgccctgatccccgtgctgagaccctaccagagagaggccgtgaactggatgctgcagcaggagtgcttcagaagcagccccgccaccgagagcgccctgcacttcctgtggagagagatcgtgaccagcgagggcctgaagctgtactacaacccctacaccggctgcatcatcagagagtaccccaacagcggcccccagctgctgggcggcatcctggccgacgagatgggcctgggcaagaccgtggaggtgctggccctgatcctgacccacaccagacaggacgtgaagcaggacgccctgaccctgcccgagggcaaggtggtgaactacttcatccccagccactacttcggcggcaagctgaagaagaccgagatccagaacatcgagttcgagcccaaggagaaggtgcagtgcccccccaccagagtgatgatcctgaccgccgtgaaggagatgaacggcaagaagggcgtgagcatcctgagcatctacaagtacgtgagcagcatctacagatacgacgtgcagagaaacagaagcctgctgaagagaatgctgaagtgcctgatcttcgagggcctggtgaagcagatcaagggccacggcttcagcggcaccttcaccctgggcaagaactacaaggaggaggacatctgcgacaagaccaagaagcaggccgtgggcagccccagaaagatccagaaggagaccagaaagagcggcaacaaggacaccgacagcgagtacctgcccagcgacaccagcgacgacgacgacgacccctactactactactacaagagcagaagaaacagaagcaagctgagaaagaagctggtgcccagcaccaagaagggcaagagccagcccttcatcaaccccgacagccagggccactgccccgccaccagcgacagcggcatcaccgacgtggccatgagcaagagcacctgcatcagcgagttcaaccaggagcacgagaccgaggactgcgccgagagcctgaaccacgccgacagcgacgtgccccccagcaacaccatgagccccttcaacaccagcgactacagattcgagtgcatctgcggcgagctggaccagatcgacagaaagcccagagtgcagtgcctgaagtgccacctgtggcagcacgccaagtgcgtgaactacgacgagaagaacctgaagatcaagcccttctactgcccccactgcctggtggccatggagcccgtgagcaccagagccaccctgatcatcagccccagcagcatctgccaccagtgggtggacgagatcaacagacacgtgagaagcagcagcctgagagtgctggtgtaccagggcgtgaagaaggacggcttcctgcagccccacttcctggccgagcaggacatcgtgatcatcacctacgacgtgctgagaagcgagctgaactacgtggacatcccccacagcaacagcgaggacggcagaagactgagaaaccagaagagatacatggccatccccagccccctggtggccgtggagtggtggagaatctgcctggacgaggcccagatggtggagtgccccaccgtgaaggccgccgagatggcccagagactgagcggcatcaacagatggtgcatcagcggcacccccgtgcagagaggcctggaggacctgttcggcctggtggtgttcctgggcatcgagccctactgcgtgaagcactggtgggtgagactgctgtacagaccctactgcaagaagaacccccagcacctgtacagcttcatcgccaagatcctgtggagaagcgccaagaaggacgtgatcgaccagatccagatccccccccagaccgaggagatccactggctgcacttcagccccgtggagagacacttctaccacagacagcacgaggtgtgctgccaggacgtggtggtgaagctgagaaagatcagcgactgggccctgaagctgagcagcctggacagaagaaccgtgaccagcatcctgtaccccctgctgagactgagacaggcctgctgccacccccaggccgtgagaggcgagttcctgcccctgcagaagagcttcgagcagagcaccttcagcttcagcaccatgaccatggaggagctgctgaccagcctgcagaagaagtgcggcaccgagtgcgaggaggcccacagacagctggtgtgcgccctgaacggcctggccggcatccacatcatcaagggcgagtacgccctggccgccgagctgtacagagaggtgctgagaagcagcgaggagcacaagggcaagctgaagaccgacagcctgcagagactgcacgccacccacaacctgatggagctgctgatcgccagacaccccggcatcccccccaccctgagagacggcagactggaggaggaggccaagcagctgagagagcactacatgagcaagtgcaacaccgaggtggccgaggcccagcaggccctgtaccccgtgcagcagaccatccacgagctgcagagaaagatccacagcaacagcccctggtggctgaacgtgatccacagagccatcgagttcaccatcgacgaggagctggtgcagagagtgagaaacgagatcaccagcaactacaagcagcagaccggcaagctgagcatgagcgagaagggcctgcagttcctgctgaccacccagatggaggagctgaacaagtgccagaagctggtgagagaggccgtgaagaacctggagggcccccccagcagaaacgtgatcgagagcgccaccgtgtgccacctgagacccgccagactgcccctgaactgctgcgtgttctgcaaggccgacgagctgttcaccgagtacgagagcaagctgttcagcaacaccgtgaagggccagaccgccatcttcgaggagatgatcgaggacgaggagggcctggtggacgacagagcccccaccaccaccagaggcctgtgggccatcagcgagaccgagagaagcatgaaggccatcctgagcttcgccaagagccacagattcgacgtggagttcgtggacgagggcagcaccagcatggacctgttcgaggcctggaagaaggagtacaagctgctgcacgagtactggatggccctgagaaacagagtgagcgccgtggacgagctggccatggccaccgagagactgagagtgagagaccccagagagcccaagcccaacccccccgtgctgcacatcatcgagccccacgaggtggagcagaacagaatcaagctgctgaacgacaaggccgtggccaccagccagctgcagaagaagctgggccagctgctgtacctgaccaacctggagaagagccaggacaagaccagcggcggcgtgaaccccgagccctgccccatctgcgccagacagctgggcaagcagtgggccgtgctgacctgcggccactgcttctgcaacgagtgcatcagcatcatcatcgagcagtacagcgtgggcagccacagaagcagcatcaagtgcgccatctgcagacagaccaccagccacaaggagatcagctacgtgttcaccagcgagaaggccaaccaggaggaggacatccccgtgaagggcagccacagcaccaaggtggaggccgtggtgagaaccctgatgaagatccagctgagagaccccggcgccaaggccctggtgttcagcacctggcaggacgtgctggacatcatcagcaaggccctgaccgacaacaacatggagttcgcccagatcagcagagtgaagaccttccaggagaacctgagcgccttcaagagagacccccagatcaacatcctgctgctgcccctgcacaccggcagcaacggcctgaccatcatcgaggccacccacgtgctgctggtggagcccatcctgaaccccgcccacgagctgcaggccatcggcagagtgcacagaatcggccagaccaagcccaccatcgtgcacagattcctgatcaaggccaccatcgaggagagaatgcaggccatgctgaagaccgccgagagaagcatctacatctag

SEQ ID NO: 249535 - DNA, 1983 bp, Artificial Sequence
  derived and/or modified sequence
atgagcagcagaagaaagagagccccccccgtgagagtggacgaggagaagagacagcagctgcactggaacatgcacgaggacagaagaaacgagcccatcatcatcagcgacgacgacgagcagccctgccccggcgaggacgtggagaagcagaagaaggagcccatgagcatctgcgacaagggcatcctggtggagagcagcttcagcggcgagatgctggaggacctgggctggctgcagaagaagagaagaatcaagctgtaccagaagcccgagggcaaccacatcatcaaggtgggcatctacctgctggaggccggcctggccaagctggacttcctgagcgacgccaacagcagaatgaagaagttcaaccagctgatgaagaaggtgatggagaagctgcacaacagcatcatccccgacgtgctggaggaggacgaggacgaccccgagagcgagcccgagggccaggacatcgacgagctgtaccacttcgtgaagcagacccaccagcaggagacccagagcatccaggtggacgtgcagcaccccgccctgatccccgtgctgagaccctaccagagagaggccgtgaactggatgctgcagcaggagtgcttcagaagcagccccgccaccgagagcgccctgcacttcctgtggagagagatcgtgaccagcgagggcctgaagctgtactacaacccctacaccggctgcatcatcagagagtaccccaacagcggcccccagctgctgggcggcatcctggccgacgagatgggcctgggcaagaccgtggaggtgctggccctgatcctgacccacaccagacaggacgtgaagcaggacgccctgaccctgcccgagggcaaggtggtgaactacttcatccccagccactacttcggcggcaagctgaagaagaccgagatccagaacatcgagttcgagcccaaggagaaggtgcagtgcccccccaccagagtgatgatcctgaccgccgtgaaggagatgaacggcaagaagggcgtgagcatcctgagcatctacaagtacgtgagcagcatctacagatacgacgtgcagagaaacagaagcctgctgaagagaatgctgaagtgcctgatcttcgagggcctggtgaagcagatcaagggccacggcttcagcggcaccttcaccctgggcaagaactacaaggaggaggacatctgcgacaagaccaagaagcaggccgtgggcagccccagaaagatccagaaggagaccagaaagagcggcaacaaggacaccgacagcgagtacctgcccagcgacaccagcgacgacgacgacgacccctactactactactacaagagcagaagaaacagaagcaagctgagaaagaagctggtgcccagcaccaagaagggcaagagccagcccttcatcaaccccgacagccagggccactgccccgccaccagcgacagcggcatcaccgacgtggccatgagcaagagcacctgcatcagcgagttcaaccaggagcacgagaccgaggactgcgccgagagcctgaaccacgccgacagcgacgtgccccccagcaacaccatgagccccttcaacaccagcgactacagattcgagtgcatctgcggcgagctggaccagatcgacagaaagcccagagtgcagtgcctgaagtgccacctgtggcagcacgccaagtgcgtgaactacgacgagaagaacctgaagatcaagcccttctactgcccccactgcctggtggccatggagcccgtgagcaccagagccaccctgatcatcagccccagcagcatctgccaccagtgggtggacgagatcaacagacacgtgagaagcagcagcctgagagtgctggtgtaccagggcgtgaagaaggacggcttcctgcagccccacttcggcagaaccggctacagctaccactacctgtag

SEQ ID NO: 249536 - protein, 558 aa, Artificial Sequence
  derived and/or modified sequence
MHRGGQPLKKRRGSFKMAELDQLPDESSSAKALVSLKEGSLSNTWNEKYSSLQKTPVWKGRNTSSAVEMPFRNSKRSRLFSDEDDRQINTRSPKRNQRVAMVPQKFTATMSTPDKKASQKIGFRLRNLLKLPKAHKWCIYEWFYSNIDKPLFEGDNDFCVCLKESFPNLKTRKLTRVEWGKIRRLMGKPRRCSSAFFEEERSALKQKRQKIRLLQQRKVADVSQFKDLPDEIPLPLVIGTKVTARLRGVHDGLFTGQIDAVDTLNATYRVTFDRTGLGTHTIPDYEVLSNEPHETMPIAAFGQKQRPSRFFMTPPRLHYTPPLQSPIIDNDPLLGQSPWRSKISGSDTETLGGFPVEFLIQVTRLSKILMIKKEHIKKLREMNTEAEKLKSYSMPISIEFQRRYATIVLELEQLNKDLNKVLHKVQQYCYELAPDQGLQPADQPTDMRRRCEEEAQEIVRHANSSTGQPCVENENLTDLISRLTAILLQIKCLAEGGDLNSFEFKSLTDSLNDIKSTIDASNISCFQNNVEIHVAHIQSGLSQMGNLHAFAANNTNRD

SEQ ID NO: 249537 - DNA, 1677 bp, Artificial Sequence
  derived and/or modified sequence
atgcacagaggcggccagcccctgaagaagagaagaggcagcttcaagatggccgagctggaccagctgcccgacgagagcagcagcgccaaggccctggtgagcctgaaggagggcagcctgagcaacacctggaacgagaagtacagcagcctgcagaagacccccgtgtggaagggcagaaacaccagcagcgccgtggagatgcccttcagaaacagcaagagaagcagactgttcagcgacgaggacgacagacagatcaacaccagaagccccaagagaaaccagagagtggccatggtgccccagaagttcaccgccaccatgagcacccccgacaagaaggccagccagaagatcggcttcagactgagaaacctgctgaagctgcccaaggcccacaagtggtgcatctacgagtggttctacagcaacatcgacaagcccctgttcgagggcgacaacgacttctgcgtgtgcctgaaggagagcttccccaacctgaagaccagaaagctgaccagagtggagtggggcaagatcagaagactgatgggcaagcccagaagatgcagcagcgccttcttcgaggaggagagaagcgccctgaagcagaagagacagaagatcagactgctgcagcagagaaaggtggccgacgtgagccagttcaaggacctgcccgacgagatccccctgcccctggtgatcggcaccaaggtgaccgccagactgagaggcgtgcacgacggcctgttcaccggccagatcgacgccgtggacaccctgaacgccacctacagagtgaccttcgacagaaccggcctgggcacccacaccatccccgactacgaggtgctgagcaacgagccccacgagaccatgcccatcgccgccttcggccagaagcagagacccagcagattcttcatgaccccccccagactgcactacaccccccccctgcagagccccatcatcgacaacgaccccctgctgggccagagcccctggagaagcaagatcagcggcagcgacaccgagaccctgggcggcttccccgtggagttcctgatccaggtgaccagactgagcaagatcctgatgatcaagaaggagcacatcaagaagctgagagagatgaacaccgaggccgagaagctgaagagctacagcatgcccatcagcatcgagttccagagaagatacgccaccatcgtgctggagctggagcagctgaacaaggacctgaacaaggtgctgcacaaggtgcagcagtactgctacgagctggcccccgaccagggcctgcagcccgccgaccagcccaccgacatgagaagaagatgcgaggaggaggcccaggagatcgtgagacacgccaacagcagcaccggccagccctgcgtggagaacgagaacctgaccgacctgatcagcagactgaccgccatcctgctgcagatcaagtgcctggccgagggcggcgacctgaacagcttcgagttcaagagcctgaccgacagcctgaacgacatcaagagcaccatcgacgccagcaacatcagctgcttccagaacaacgtggagatccacgtggcccacatccagagcggcctgagccagatgggcaacctgcacgccttcgccgccaacaacaccaacagagactag

SEQ ID NO: 249538 - DNA, 1677 bp, Artificial Sequence
  derived and/or modified sequence
atgcatcgcgggggacagcccctaaaaaagcgacgcgggtcttttaaaatggccgagctggatcaacttcccgatgaatcatccagtgcaaaggccctggtttccctgaaggaagggagcctgtcgaacacctggaacgaaaaatactcgagtttgcagaagacccccgtctggaaagggcgcaataccagctcggctgttgaaatgcccttccgcaattctaagagatctcgactattcagcgatgaggatgaccggcaaattaacacccggagtcccaaacggaatcaacgagttgcaatggtacctcaaaaattcactgccactatgtccactccggataagaaagctagccaaaagattggtttccgcttacggaacctcctgaagctcccgaaagctcacaagtggtgcatttacgagtggttttactctaacattgacaaaccccttttcgaaggtgacaatgatttttgcgtgtgtctgaaggaaagttttcccaatctgaaaacccgcaaactcacacgcgtggagtggggcaagatacggagactaatgggcaaacccaggaggtgcagcagcgcgtttttcgaggaggagcgctcagctcttaagcagaagaggcagaagataagactcctccagcagcgaaaggtcgctgacgtatcccaattcaaagacctacccgatgagattccccttccactcgttattggtacgaaagttaccgccaggctgcgtggggtccatgacgggctgttcaccggccagatcgatgctgtggacaccctcaatgcgacatatcgggtgacgtttgatcgcacaggactgggcactcacactattccagactatgaggtgcttagtaatgaaccacatgaaaccatgcctatcgctgccttcgggcagaagcagcgtcccagcaggttctttatgacccctcccagactgcactatactcctcccctgcagagccctatcatagacaatgaccctcttctgggacaatccccttggaggagtaagatttccggcagcgacaccgagactttggggggcttccctgtcgaatttcttatacaggttaccagactgtccaagatacttatgataaagaaagagcatatcaaaaaactccgggaaatgaatacagaagccgagaagttaaaatcatacagcatgcccatttctatagaatttcagcggcgctatgcaacgatcgttctggagctcgaacagctgaacaaagatctcaacaaagtcctccataaagtccagcagtattgttacgagttggccccagaccagggacttcagcccgcagaccagcctactgatatgcgacgcaggtgcgaggaggaggcacaagagattgtacgccacgcaaatagctccactggtcagccctgcgtggagaatgagaacttgacagatctcatctcccgcctgaccgctattctgctgcagatcaagtgcctggcagagggtggtgacctgaactcatttgagtttaagagcctgacggatagcctcaacgacattaaaagcacaattgacgcctctaacatatcgtgctttcaaaataatgttgagattcacgttgcccacatacaaagcgggttatcgcagatgggaaacttacacgcgtttgcagccaataataccaacagagactag

SEQ ID NO: 249539 - DNA, 1677 bp, Artificial Sequence
  derived and/or modified sequence
atgcaccggggcggccagcccctgaagaagagaagaggcagcttcaagatggccgagctggaccagctgcctgatgagagcagcagcgccaaggccctggtgtccctgaaggagggcagcctgagcaacacctggaatgagaagtacagcagcctgcagaagacccctgtgtggaagggcaggaacaccagcagcgctgtggagatgcccttcaggaacagcaagaggagccgcctcttcagtgatgaagatgaccggcagatcaacaccaggagccccaagaggaaccagagggtggccatggtgccccagaagttcaccgccaccatgagcaccccagacaagaaggccagccagaagattggcttccggctgaggaacctgctgaagctgcccaaggcccacaagtggtgcatctatgagtggttctacagcaacatcgacaagcccctgtttgaaggagacaatgacttctgtgtgtgcctgaaggagagcttccccaacctgaagaccaggaagctgaccagggtggagtggggcaagatccggcggctgatgggcaagccccggcgctgcagcagcgccttctttgaggaggagaggtctgccctgaagcagaagaggcagaagatccggctgctgcagcagaggaaggtggctgatgtgtcccagttcaaggacctgcctgatgagatccccctgcccctggtgattggcaccaaggtgacagcccggctgcggggcgtgcatgatggcctcttcaccggccagattgatgctgtggacaccctgaatgccacctacagagtgacctttgacagaacaggcctgggcacccacaccatcccagactatgaggtgctgagcaatgagccccatgagaccatgcccatcgccgccttcggccagaagcagaggcccagccgcttcttcatgaccccaccccggctgcactacaccccacccctgcagagccccatcatcgacaatgaccccctgctgggccagagcccctggaggagcaagatcagcggcagtgacacagagaccctgggcggcttccctgtggagttcctgatccaggtgacccggctgagcaagatcctgatgatcaagaaggagcacatcaagaagctgcgggagatgaacacagaggccgagaagctgaagagctacagcatgcccatcagcattgagttccagaggagatatgccaccatcgtgctggagctggagcagctgaacaaggacctgaacaaggtgctgcacaaggtgcagcagtactgctatgagctggccccagaccagggcctgcagcctgctgaccagcccacagacatgagaagaagatgtgaggaggaggcccaggagatcgtgagacatgccaacagcagcacaggccagccctgtgtggagaatgaaaacctgacagacctgatcagccggctgacagccatcctgctgcagatcaagtgcctggccgagggcggggacctgaacagctttgagttcaagagcctgacagacagcctgaatgacatcaagagcaccattgatgccagcaacatcagctgcttccagaacaacgtggagatccacgtggcccacatccagagcggcctgagccagatgggcaacctgcacgcctttgctgccaacaacaccaacagagactag

SEQ ID NO: 249540 - DNA, 3567 bp, Artificial Sequence
  derived and/or modified sequence
gctgggaccgagtcccggacgtcgcgacgcgcagggggctgctgcggccggcggtctcgggaaaagtgaggggacggaggcgcccaagcaacgtgggtttcgggaactgtgagtatttcactttgcgtagagccccctcgggcaatgcgacccagaaccgagggcttctttccccccgccggggcctccctcccgttctccactcggaacaaacagcctgcagttcccgcagctgcagcgcgggccgcggaacatgcgccgggagcggggcccgggcgggactccggagctggtactgctccccccgcgctccggcgccgggcctcgccgtgcggcctccttcctcccttcctcccgcccggctcggccggaggcggcggcggaggggcgaggcgcggccccccttcggcggcacctcctccccgggcaggcgcgggcggagccgggcccgcctcagccagccgcggcgggagcagcgcagcgcggcgccgcgggcagcgagctccgcattcgaacctccctcgcaaagacagtctccgccccacaatgcaccgcggcgggcagcctttgaaaaagcggcgcggctcgttcaagatggcggagctcgaccagttgcctgacgagagctcttcagcaaaagcccttgtcagtttaaaagaaggaagcttatctaacacgtggaatgaaaagtacagttctttacagaaaacacctgtttggaaaggcaggaatacaagctctgctgtggaaatgcctttcagaaattcaaaacgaagtcgacttttttctgatgaagatgataggcaaataaatacaaggtcacctaaaagaaaccagagggttgcaatggttccacagaaatttacagcaacaatgtcaacaccagataagaaagcttcacagaagattggttttcgattacgtaatctgctcaagcttcctaaagcacataaatggtgtatatacgagtggttctattcaaatatagataaaccactttttgaaggtgataatgacttctgtgtatgtctaaaggaatcttttcctaatttgaaaacaagaaagttaacaagagtagaatggggaaaaattcggcggcttatgggaaaaccacggagatgttcttctgcattttttgaggaagagagatcagcattaaaacagaaacggcagaaaataaggctcttacaacaaaggaaagttgcagatgtttcacaattcaaagatctcccagatgaaattcctttgcctctggttattggaacgaaagttacagcacgattacgtggtgttcatgatggtttgttcactggacaaatagatgctgtggatactcttaatgctacttatagagtaacttttgataggacagggcttggaacccataccatccctgactatgaagttctcagtaatgaacctcatgagacaatgccaattgctgcctttggacaaaaacagcggccttctcgattttttatgaccccaccacggttacattatactcctcctctccagtcaccaattatagataatgatcctttattaggacagtcgccgtggagaagtaaaatttctggctctgacactgaaacattaggtggttttccagtagaatttcttatccaagtgaccagattatcaaaaattctcatgattaaaaaggaacatatcaagaaattaagggaaatgaacacagaagcagaaaaattgaaatcatattccatgcccatcagcattgaatttcagcggagatatgcaacaattgttctggagcttgaacagctgaacaaggacctaaacaaagttttgcataaagttcaacagtattgctatgagcttgctccagaccaggggctccagcctgcagatcagccaacagatatgagacgcaggtgtgaggaagaagcacaggaaattgttcggcatgcaaattcctcaacaggacagccctgcgttgaaaatgaaaatctgacagacttaatttccaggcttacagctattttgttacaaattaagtgtctagcagaaggaggagacctgaattcctttgaattcaaatcacttacagactcattaaatgatatcaagagtacaatagacgcttctaatatcagttgctttcagaataatgtagaaatccatgttgcacatattcagagtggcctgagccagatgggaaacttacatgcctttgcagcaaataacaccaacagagactgagtaaagatttcattattccaactgcacgggacattgtttttgagaagttcttttcctttatataggcttccaacaccaaataacctaactgctggaaaacaagggaaatttaaatctccaaataaggcattttaatagactgtactgcttcttaaaccagcattgctgaccagcattatatttatttttcttttattattcagatgcagtagcattgcttatgttacatatgtttatattcacaaatatttttaaactgaaatatctgaacataatataatttcgtggaagaatacattgaccattttttttaatgtgcatgaattcaccgcaacacatgcagacaactgctgcaatggagagtatgaagaaacctggtctttttattcatgtcggtggcagtgtggaaattccatccagaaaattacaactccacttgatttagttgatcaccatctcagtcttcaaaagataacatcatgaggtgtgggaagtcctagttttaaggaaaccactgaaatatagatgggaaatgtggactttacaagtatatgttatatatacttgcaatgtgacatggttctgtagatcattttataataataaatattttaatttatcataacatataaaagaaacctttgttgtttgttgaaagaaaatgaaggaacagggggaaaaaaggtgcaaaatgctaaatttctaaaaatggatttggcatgtcttcccatcagttcaggtcaaaagtgcattgttgtgagatttattaaaaaaaaaatgataacacactattttcatatttttttgtttatttgcacaacttttaaaccagattactggttaaaatccaacagtacacaatttataaagtaaaaagattttataaggaaaacaaatataataaccagtgctgtgaaatgcagaagaaaggcttgttttggttgtttttcttttttaggaaaacgctgcctaaaatgttaatcttgtaaaaagtatgtatttggaattttcttcgttttaatagaatattataaactcaaaatataaatttttttcaaatttggagtttaagatatagctgtagaggtggttttaattcctttagatgtctcataaaatgagactttttatatgttaatgtataataaaactgaaacaagattattttccatttgaaatttttgtatagtttaaaaaggcttccgtattctttgttggtattgtgccactgcagaactttagtgcagagtttatatttagctaaactgttatgttaattaagaaatgcataaatcttctattcttaatatttgtaattctaaataaattgatctatgaaaatta

SEQ ID NO: 249541 - DNA, 1677 bp, Artificial Sequence
  derived and/or modified sequence
atgcaccggggcggccagcccctgaagaagcggcggggcagcttcaaaatggccgaacttgatcagttgccagacgagtcttcctccgcaaaagccctggttagcctgaaggaggggtctttatccaatacttggaatgagaagtatagctccttgcagaaaactccggtgtggaagggcagaaatacatcaagcgccgtagaaatgccttttcggaattcaaagcggtcccgactgttcagtgatgaggacgatcgccagattaacaccaggagtcccaagcgcaatcagcgggtcgccatggtgcctcagaagtttacagcaaccatgagtaccccagataaaaaagcctctcagaagatcggattcagactccgaaatctgctcaagcttcctaaagctcacaaatggtgcatctatgagtggttctatagcaacatcgataagcccttattcgagggcgataatgatttttgtgtttgtctgaaggaaagctttccaaatctcaagacaagaaaactgactagagtagaatggggtaaaatcaggagactcatgggtaaaccgcggcgatgttcatccgccttcttcgaagaggagcggagcgcccttaagcagaagcgccagaagattagacttttgcagcagcgaaaggtggccgacgtcagccagttcaaggacctgcccgatgaaatccctctccccctggtgatcggcaccaaagtcaccgccaggctgaggggtgtccatgacgggctattcactggccaaattgatgcagtggatacgctaaacgctacttaccgcgtgaccttcgatcgaaccggtctggggacccataccatacctgattacgaagtgctgagtaacgagccccacgaaacaatgccaatcgccgcattcgggcagaagcagagaccctccagattcttcatgactcccccccgactccattacaccccccctcttcagtcacctataatagataacgaccctctcttggggcagtctccctggcgctccaagatctctgggtccgacaccgagactttgggcgggtttccggtggagtttctgatacaagtaacacgactctccaaaatcttgatgatcaagaaagaacacataaagaaactccgggagatgaataccgaggcagaaaagctgaagtcgtactccatgccaatttcaatagaattccagaggcggtacgccacgatcgtcttggaactagagcagctgaacaaagatttgaataaggtgctgcataaagtgcagcagtactgctatgaattggcaccagaccagggactccaacccgcggaccagccaactgatatgaggcggcgctgtgaagaagaggcccaggaaattgttcgccacgcaaatagtagcacagggcaaccatgcgtagagaacgagaacctcactgatttgatcagtaggcttacggctatcctccttcaaatcaagtgtctggcagaaggcggcgacctcaatagttttgagtttaagagcctgaccgatagcctgaatgacataaagtccaccatagatgcatcaaacatctcatgttttcaaaataacgttgagatacatgttgcccacatccaatctgggctctctcagatggggaacttgcatgctttcgccgcaaacaacaccaatcgggactag

SEQ ID NO: 249542 - DNA, 1677 bp, Artificial Sequence
  derived and/or modified sequence
atgcacaggggcggtcagccactaaaaaaaagaagggggagcttcaaaatggccgagctggaccaactgcccgacgagtcatcaagcgccaaggcactagtgtctttgaaggagggctccttatctaacacttggaatgagaaatactcttcccttcagaagactcctgtgtggaaaggtagaaatacgtcaagcgctgtcgaaatgcccttcaggaactcaaagcggtccaggttgtttagcgatgaggatgacagacagatcaacacaaggagcccaaaacggaaccagcgtgtagccatggtccctcagaaatttaccgccacaatgtccacccccgacaagaaggcatctcagaagatcggatttagattgcgcaacctgcttaagctaccaaaggcacataaatggtgcatatatgagtggttctattccaacattgacaaaccactgtttgagggcgacaacgatttttgcgtgtgcctaaaagagtccttccctaacctgaagacacggaaacttaccagagtagaatggggaaagatccggcgtttaatgggaaagcctcgccgatgtagtagcgctttcttcgaggaggagaggtcggcgctgaagcaaaaacgccagaagatcaggctattgcagcagcgcaaggtggccgacgtctctcagtttaaggaccttccagacgagatcccattgcctctggtgattggtacaaaagttacagcgagattgcgcggtgtacacgatgggttgtttactggacagatagacgcagtcgacaccctaaacgcgacctaccgcgtaacgttcgacagaaccgggctaggtacacacaccatccctgactacgaagtgctgagcaatgagccccacgagacaatgccgatcgcggcttttggtcagaaacagaggccctctcggttcttcatgacccctcctcgcctacactatacaccaccactccagtcccctattatcgacaacgatccgcttttgggccagtctccttggcgctccaagatctcaggtagcgatacagaaaccctcggcggatttcctgttgaatttctcatccaagtgaccagactgtccaagatccttatgattaagaaggaacatatcaagaagctgcgggaaatgaacaccgaggctgagaaactaaaatcatacagtatgccgatctcaattgagttccagcgccgttatgcaaccatcgtgcttgaactggagcagctgaacaaagacctcaataaggtgctgcacaaggttcagcagtattgctatgagttggctccggaccagggattacagcctgcagaccaaccgaccgatatgcgtcgtcggtgtgaggaggaagcacaggagatcgtgcgacatgccaactcaagcacaggtcaaccatgcgtcgaaaacgaaaatttaactgatctgatctcaagactaactgccattctcctccaaatcaagtgtctagccgaaggtggagacctcaactctttcgaatttaaatctttaaccgacagcctaaatgatattaagtccacaatcgacgcatctaacatttcctgcttccagaataatgtggagatccacgtcgcccatatccagagcggcttgtcccagatgggaaatctacatgccttcgctgctaataacaccaatagagactag

SEQ ID NO: 249543 - protein, 403 aa, Artificial Sequence
  derived and/or modified sequence
MHNFEEELTCPICYSIFEDPRVLPCSHTFCRNCLENILQASGNFYIWRPLRIPLKCPNCRSITEIAPTGIESLPVNFALRAIIEKYQQEDHPDIVTCPEHYRQPLNVYCLLDKKLVCGHCLTIGQHHGHPIDDLQSAYLKEKDTPQKLLEQLTDTHWTDLTHLIEKLKEQKSHSEKMIQGDKEAVLQYFKELNDTLEQKKKSFLTALCDVGNLINQEYTPQIERMKEIREQQLELMALTISLQEESPLKFLEKVDDVRQHVQILKQRPLPEVQPVEIYPRVSKILKEEWSRTEIGQIKNVLIPKMKISPKRMSCSWPGKDEKEVEFLKILNIVVVTLISVILMSILFFNQHIITFLSEITLIWFSEASLSVYQSLSNSLHKVKNILCHIFYLLKEFVWKIVSH

SEQ ID NO: 249544 - protein, 114 aa, Artificial Sequence
  derived and/or modified sequence
MHNFEEELTCPICYSIFEDPRVLPCSHTFCRNCLENILQASGNFYIWRPLRIPLKCPNCRSITEIAPTGIESLPVNFALRAIIEKYQQEDHPDIVTCPEHYRQPLNVYCLLDKK

SEQ ID NO: 249545 - protein, 155 aa, Artificial Sequence
  derived and/or modified sequence
MHNFEEELTCPICYSIFEDPRVLPCSHTFCRNCLENILQASGNFYIWRPLRIPLKCPNCRSITEIAPTGIESLPVNFALRAIIEKYQQEDHPDIVTCPEHYRQPLNVYCLLDKKLVCGHCLTIGQHHGHPIDDLQSAYLKEKDTPQKLLEQLTDT

SEQ ID NO: 249546 - protein, 177 aa, Artificial Sequence
  derived and/or modified sequence
MHNFEEELTCPICYSIFEDPRVLPCSHTFCRNCLENILQASGNFYIWRPLRIPLKCPNCRSITEIAPTGIESLPVNFALRAIIEKYQQEDHPDIVTCPEHYRQPLNVYCLLDKKLVCGHCLTIGQHHGHPIDDLQSAYLKEKDTPQKLLEQLTDTHWTDLTHLIEKLKEQKSHSEKM

SEQ ID NO: 249547 - protein, 111 aa, Artificial Sequence
  derived and/or modified sequence
MHNFEEELTCPICYSIFEDPRVLPCSHTFCRNCLENILQASGNFYIWRPLRIPLKCPNCRSITEIAPTGIESLPVNFALRAIIEKYQQEDHPDIVTCPEHYRQPLNVYCLL

SEQ ID NO: 249548 - protein, 323 aa, Artificial Sequence
  derived and/or modified sequence
MHNFEEELTCPICYSIFEDPRVLPCSHTFCRNCLENILQASGNFYIWRPLRIPLKCPNCRSITEIAPTGIESLPVNFALRAIIEKYQQEDHPDIVTCPEHYRQPLNVYCLLDKKLVCGHCLTIGQHHGHPIDDLQSAYLKEKDTPQKLLEQLTDTHWTDLTHLIEKLKEQKSHSEKMIQGDKEAVLQYFKELNDTLEQKKKSFLTALCDVGNLINQEYTPQIERMKEIREQQLELMALTISLQEESPLKFLEKVDDVRQHVQILKQRPLPEVQPVEIYPRVSKILKEEWSRTEIGQIKNVLIPKMKISPKRMSCSWPDEGTDK

SEQ ID NO: 249549 - DNA, 1212 bp, Artificial Sequence
  derived and/or modified sequence
atgcacaacttcgaggaggagctgacctgccccatctgctacagcatcttcgaggaccccagagtgctgccctgcagccacaccttctgcagaaactgcctggagaacatcctgcaggccagcggcaacttctacatctggagacccctgagaatccccctgaagtgccccaactgcagaagcatcaccgagatcgcccccaccggcatcgagagcctgcccgtgaacttcgccctgagagccatcatcgagaagtaccagcaggaggaccaccccgacatcgtgacctgccccgagcactacagacagcccctgaacgtgtactgcctgctggacaagaagctggtgtgcggccactgcctgaccatcggccagcaccacggccaccccatcgacgacctgcagagcgcctacctgaaggagaaggacaccccccagaagctgctggagcagctgaccgacacccactggaccgacctgacccacctgatcgagaagctgaaggagcagaagagccacagcgagaagatgatccagggcgacaaggaggccgtgctgcagtacttcaaggagctgaacgacaccctggagcagaagaagaagagcttcctgaccgccctgtgcgacgtgggcaacctgatcaaccaggagtacaccccccagatcgagagaatgaaggagatcagagagcagcagctggagctgatggccctgaccatcagcctgcaggaggagagccccctgaagttcctggagaaggtggacgacgtgagacagcacgtgcagatcctgaagcagagacccctgcccgaggtgcagcccgtggagatctaccccagagtgagcaagatcctgaaggaggagtggagcagaaccgagatcggccagatcaagaacgtgctgatccccaagatgaagatcagccccaagagaatgagctgcagctggcccggcaaggacgagaaggaggtggagttcctgaagatcctgaacatcgtggtggtgaccctgatcagcgtgatcctgatgagcatcctgttcttcaaccagcacatcatcaccttcctgagcgagatcaccctgatctggttcagcgaggccagcctgagcgtgtaccagagcctgagcaacagcctgcacaaggtgaagaacatcctgtgccacatcttctacctgctgaaggagttcgtgtggaagatcgtgagccactag

SEQ ID NO: 249550 - DNA, 345 bp, Artificial Sequence
  derived and/or modified sequence
atgcacaacttcgaggaggagctgacctgccccatctgctacagcatcttcgaggaccccagagtgctgccctgcagccacaccttctgcagaaactgcctggagaacatcctgcaggccagcggcaacttctacatctggagacccctgagaatccccctgaagtgccccaactgcagaagcatcaccgagatcgcccccaccggcatcgagagcctgcccgtgaacttcgccctgagagccatcatcgagaagtaccagcaggaggaccaccccgacatcgtgacctgccccgagcactacagacagcccctgaacgtgtactgcctgctggacaagaagtag

SEQ ID NO: 249551 - DNA, 468 bp, Artificial Sequence
  derived and/or modified sequence
atgcacaacttcgaggaggagctgacctgccccatctgctacagcatcttcgaggaccccagagtgctgccctgcagccacaccttctgcagaaactgcctggagaacatcctgcaggccagcggcaacttctacatctggagacccctgagaatccccctgaagtgccccaactgcagaagcatcaccgagatcgcccccaccggcatcgagagcctgcccgtgaacttcgccctgagagccatcatcgagaagtaccagcaggaggaccaccccgacatcgtgacctgccccgagcactacagacagcccctgaacgtgtactgcctgctggacaagaagctggtgtgcggccactgcctgaccatcggccagcaccacggccaccccatcgacgacctgcagagcgcctacctgaaggagaaggacaccccccagaagctgctggagcagctgaccgacacctag

SEQ ID NO: 249552 - DNA, 534 bp, Artificial Sequence
  derived and/or modified sequence
atgcacaacttcgaggaggagctgacctgccccatctgctacagcatcttcgaggaccccagagtgctgccctgcagccacaccttctgcagaaactgcctggagaacatcctgcaggccagcggcaacttctacatctggagacccctgagaatccccctgaagtgccccaactgcagaagcatcaccgagatcgcccccaccggcatcgagagcctgcccgtgaacttcgccctgagagccatcatcgagaagtaccagcaggaggaccaccccgacatcgtgacctgccccgagcactacagacagcccctgaacgtgtactgcctgctggacaagaagctggtgtgcggccactgcctgaccatcggccagcaccacggccaccccatcgacgacctgcagagcgcctacctgaaggagaaggacaccccccagaagctgctggagcagctgaccgacacccactggaccgacctgacccacctgatcgagaagctgaaggagcagaagagccacagcgagaagatgtag

SEQ ID NO: 249553 - DNA, 336 bp, Artificial Sequence
  derived and/or modified sequence
atgcacaacttcgaggaggagctgacctgccccatctgctacagcatcttcgaggaccccagagtgctgccctgcagccacaccttctgcagaaactgcctggagaacatcctgcaggccagcggcaacttctacatctggagacccctgagaatccccctgaagtgccccaactgcagaagcatcaccgagatcgcccccaccggcatcgagagcctgcccgtgaacttcgccctgagagccatcatcgagaagtaccagcaggaggaccaccccgacatcgtgacctgccccgagcactacagacagcccctgaacgtgtactgcctgctgtag

SEQ ID NO: 249554 - DNA, 972 bp, Artificial Sequence
  derived and/or modified sequence
atgcacaacttcgaggaggagctgacctgccccatctgctacagcatcttcgaggaccccagagtgctgccctgcagccacaccttctgcagaaactgcctggagaacatcctgcaggccagcggcaacttctacatctggagacccctgagaatccccctgaagtgccccaactgcagaagcatcaccgagatcgcccccaccggcatcgagagcctgcccgtgaacttcgccctgagagccatcatcgagaagtaccagcaggaggaccaccccgacatcgtgacctgccccgagcactacagacagcccctgaacgtgtactgcctgctggacaagaagctggtgtgcggccactgcctgaccatcggccagcaccacggccaccccatcgacgacctgcagagcgcctacctgaaggagaaggacaccccccagaagctgctggagcagctgaccgacacccactggaccgacctgacccacctgatcgagaagctgaaggagcagaagagccacagcgagaagatgatccagggcgacaaggaggccgtgctgcagtacttcaaggagctgaacgacaccctggagcagaagaagaagagcttcctgaccgccctgtgcgacgtgggcaacctgatcaaccaggagtacaccccccagatcgagagaatgaaggagatcagagagcagcagctggagctgatggccctgaccatcagcctgcaggaggagagccccctgaagttcctggagaaggtggacgacgtgagacagcacgtgcagatcctgaagcagagacccctgcccgaggtgcagcccgtggagatctaccccagagtgagcaagatcctgaaggaggagtggagcagaaccgagatcggccagatcaagaacgtgctgatccccaagatgaagatcagccccaagagaatgagctgcagctggcccgacgagggcaccgacaagtag

SEQ ID NO: 249555 - DNA, 1212 bp, Artificial Sequence
  derived and/or modified sequence
atgcacaattttgaggaagaattgacttgcccaatctgttactccatctttgaggaccctcgggttctgccttgcagtcacaccttttgccgtaattgccttgagaacattctgcaggccagcggcaatttttatatctggcgccccctgagaatcccactgaagtgtcccaattgtcggtccatcactgagattgcaccgactggcatcgagtccttgcccgtgaacttcgcactgagggcaataatcgagaagtatcagcaagaggatcaccccgacatcgtgacctgccctgagcactacagacaacctctcaacgtctactgcctccttgataagaaactggtctgtggacattgcttgacaatcggacagcatcacggacacccaattgacgacttacaatcagcttacttgaaagagaaagatacccctcagaagttgcttgagcagcttaccgatacacactggaccgatttaacacatttaatcgaaaagctgaaggagcagaagagccatagcgaaaaaatgatccagggcgataaggaggctgtcctccagtacttcaaggaactgaacgacacccttgagcagaagaaaaaaagcttcctgaccgccctgtgcgatgtgggaaatttaatcaatcaggagtacacaccgcagatcgagcgtatgaaagagatccgagaacagcagttggagttaatggctctcacgattagcctgcaagaggaatcacctcttaagtttctggaaaaagtcgatgatgtgagacagcatgtccagattcttaagcagcggccgcttcccgaggtgcagcctgtggagatttatcctagggtctccaagatcttaaaagaagaatggtctcgaacggaaattgggcagatcaagaatgttttaattccaaaaatgaagatcagccccaagaggatgagctgctcatggcctggcaaagacgaaaaggaggtggagttcctcaaaatccttaacattgtggtggtgacacttatctcagtaattctgatgtccatattgttcttcaaccagcacattatcacgttcctctcagagattactttgatctggttttctgaggcttccctgtccgtataccagagcctcagtaattccttgcacaaagtgaaaaacattctttgccacatattttaccttctcaaggagtttgtttggaagattgtttcacactag

SEQ ID NO: 249556 - DNA, 345 bp, Artificial Sequence
  derived and/or modified sequence
atgcataattttgaggaggaattgacttgccccatctgctacagtatcttcgaagacccgcgcgttctcccctgttctcacacattttgcaggaattgtctcgagaacattctgcaagctagcggcaatttctacatatggcgcccattacggatccccctcaaatgccccaattgccgcagtattacagaaattgcccctactggcatcgagagcctcccagttaactttgcactgcgtgcaatcattgaaaaataccagcaggaggaccaccctgacatcgttacatgccctgagcactatcggcagcccctcaatgtgtactgtctgctagataagaaatag

SEQ ID NO: 249557 - DNA, 468 bp, Artificial Sequence
  derived and/or modified sequence
atgcataatttcgaggaagaattgacctgccccatctgctatagcatcttcgaagacccgagggtcctgccatgttcccacacgttctgccggaattgcttagagaatattttgcaagcgtccggtaacttctatatatggcgaccactgcggattcccttgaagtgcccaaattgccgaagcatcacagagattgcccccacaggcattgagtctctgcccgtgaatttcgctctccgggctataatcgagaagtaccagcaggaagatcatcctgacattgtgacctgccctgagcattataggcaaccactgaacgtgtattgtctgcttgacaaaaagctggtatgcgggcactgcttaacgatcggccagcaccatggtcatccaatcgacgaccttcaatctgcatatcttaaggaaaaggataccccccagaagcttctggaacaattaacagacacctag

SEQ ID NO: 249558 - DNA, 534 bp, Artificial Sequence
  derived and/or modified sequence
atgcataattttgaggaggaacttacttgccctatctgctattcgatattcgaggatcctcgggtccttccatgctcccatacattttgtcgaaattgcctagagaacatactacaggcgtccggaaacttctacatttggcgtcctctacggatacctctgaagtgccccaattgcaggagtatcaccgagatcgctcccacagggatcgaatctttacccgtgaactttgctctgagagccatcatcgagaaatatcagcaagaggaccaccctgatatcgtcacctgccccgagcattatcgacagccgctgaatgtatactgtctcctagacaagaagctggtgtgtggacactgcttaactataggacaacatcacggccacccaatcgatgatctacaatctgcatatctgaaagaaaaggataccccacaaaagcttctggaacagctgactgatacccattggacagacttaacacacctgatcgaaaaacttaaagaacagaagtcacatagcgagaagatgtag

SEQ ID NO: 249559 - DNA, 336 bp, Artificial Sequence
  derived and/or modified sequence
atgcacaacttcgaagaggaactcacatgcccaatctgttattcaatttttgaggatccacgggtacttccttgtagccatactttttgtaggaactgtttggagaatatattacaagcatccggcaacttttatatctggcgccctctgcgaatccctctgaagtgccccaactgccgcagcataaccgagatagcacctactgggattgaatctctacctgtgaatttcgccctgagagctataatcgaaaaataccagcaggaggatcatcccgatatcgtcacctgtcccgagcactatagacagcctctcaacgtatattgtttactttag

SEQ ID NO: 249560 - DNA, 972 bp, Artificial Sequence
  derived and/or modified sequence
atgcacaacttcgaggaggagctcacatgccccatttgttatagcatctttgaggacccgcgagtgctgccctgtagccacacattctgccggaattgtctggagaatatcctccaggcctctggcaatttttacatctggagacctttacgcattccattaaaatgccccaactgcaggtccattactgagattgctccaactggaatcgagtccctcccagtcaactttgccttgcgggcaattatcgagaaataccagcaggaggatcaccctgacattgtaacctgccccgagcattatcgccagccattaaacgtgtactgcttactagacaaaaagctggtgtgcggacactgcctgacaattggccagcatcatgggcatcctattgacgatcttcaatccgcatatttgaaagagaaggacaccccacagaagctgttggagcagctcacagacacccactggacagatctgacccacctcatcgagaaattgaaggagcagaaatctcacagtgagaagatgatccaaggagacaaggaagcagtgctgcaatacttcaaagaactcaatgacaccctcgaacagaagaaaaagtcctttctgacggccctgtgcgacgtggggaatcttattaatcaggagtacacgccacagatcgagcgcatgaaggagatccgtgaacagcaattagagttaatggccctaaccataagtctacaagaagagtccccactgaaatttttagagaaggtggatgacgtgaggcagcacgtacagattcttaagcagagacctttgccagaggttcagcccgtggagatttacccaagagttagcaagattctgaaagaggaatggtccagaactgaaatcggccaaatcaagaacgtgctcattcccaagatgaaaattagtcccaaacgaatgagctgctcttggcctgacgagggcactgataagtag

SEQ ID NO: 249561 - DNA, 1212 bp, Artificial Sequence
  derived and/or modified sequence
atgcacaactttgaggaggagctgacctgccccatctgctacagcatctttgaggacccccgggtgctgccctgcagccacaccttctgcaggaactgcctggagaacatcctgcaggccagcggcaacttctacatctggaggcccctgcgcatccccctgaagtgccccaactgccgcagcatcacagaaattgcccccaccggcatcgagagcctgcctgtgaactttgccctgcgggccatcatcgagaagtaccagcaggaggaccacccagacatcgtgacctgcccagagcactaccggcagcccctgaatgtgtactgcctgctggacaagaagctggtgtgtggccactgcctgaccatcggccagcaccacggccaccccattgatgacctgcagagcgcctacctgaaggagaaggacaccccccagaagctgctggagcagctgacagacacccactggacagacctgacccacctgattgagaagctgaaggagcagaagagccacagcgagaagatgatccagggcgacaaggaggccgtgctgcagtacttcaaggagctgaatgacaccctggagcagaagaagaagagcttcctgacagccctgtgtgatgtgggcaacctgatcaaccaggagtacaccccccagatcgagaggatgaaggagatccgggagcagcagctggagctgatggccctgaccatcagcctgcaggaggagagccccctgaagttcctggagaaggtggatgatgtgcggcagcacgtgcagatcctgaagcagaggcccctgcctgaggtgcagcctgtggagatctacccccgggtgtccaagatcctgaaggaggagtggagcaggacagagatcggccagatcaagaatgtgctgatccccaagatgaagatcagccccaagaggatgagctgctcctggccaggcaaggatgagaaggaggtggagttcctgaagatcctgaacatcgtggtggtgaccctcatcagcgtcatcctgatgagcatcctcttcttcaaccagcacatcatcaccttcctgtctgagatcaccctcatctggttcagcgaggccagcctgtctgtgtaccagagcctgagcaacagcctgcacaaggtgaagaacatcctgtgccacatcttctacctgctgaaggagtttgtgtggaagatcgtgagccactag

SEQ ID NO: 249562 - DNA, 345 bp, Artificial Sequence
  derived and/or modified sequence
atgcacaactttgaggaggagctgacctgccccatctgctacagcatctttgaggacccccgggtgctgccctgcagccacaccttctgcaggaactgcctggagaacatcctgcaggccagcggcaacttctacatctggaggcccctgcgcatccccctgaagtgccccaactgccgcagcatcacagaaattgcccccaccggcatcgagagcctgcctgtgaactttgccctgcgggccatcatcgagaagtaccagcaggaggaccacccagacatcgtgacctgcccagagcactaccggcagcccctgaatgtgtactgcctgctggacaagaagtag

SEQ ID NO: 249563 - DNA, 468 bp, Artificial Sequence
  derived and/or modified sequence
atgcacaactttgaggaggagctgacctgccccatctgctacagcatctttgaggacccccgggtgctgccctgcagccacaccttctgcaggaactgcctggagaacatcctgcaggccagcggcaacttctacatctggaggcccctgcgcatccccctgaagtgccccaactgccgcagcatcacagaaattgcccccaccggcatcgagagcctgcctgtgaactttgccctgcgggccatcatcgagaagtaccagcaggaggaccacccagacatcgtgacctgcccagagcactaccggcagcccctgaatgtgtactgcctgctggacaagaagctggtgtgtggccactgcctgaccatcggccagcaccacggccaccccattgatgacctgcagagcgcctacctgaaggagaaggacaccccccagaagctgctggagcagctgacagacacctag

SEQ ID NO: 249564 - DNA, 534 bp, Artificial Sequence
  derived and/or modified sequence
atgcacaactttgaggaggagctgacctgccccatctgctacagcatctttgaggacccccgggtgctgccctgcagccacaccttctgcaggaactgcctggagaacatcctgcaggccagcggcaacttctacatctggaggcccctgcgcatccccctgaagtgccccaactgccgcagcatcacagaaattgcccccaccggcatcgagagcctgcctgtgaactttgccctgcgggccatcatcgagaagtaccagcaggaggaccacccagacatcgtgacctgcccagagcactaccggcagcccctgaatgtgtactgcctgctggacaagaagctggtgtgtggccactgcctgaccatcggccagcaccacggccaccccattgatgacctgcagagcgcctacctgaaggagaaggacaccccccagaagctgctggagcagctgacagacacccactggacagacctgacccacctgattgagaagctgaaggagcagaagagccacagcgagaagatgtag

SEQ ID NO: 249565 - DNA, 336 bp, Artificial Sequence
  derived and/or modified sequence
atgcacaactttgaggaggagctgacctgccccatctgctacagcatctttgaggacccccgggtgctgccctgcagccacaccttctgcaggaactgcctggagaacatcctgcaggccagcggcaacttctacatctggaggcccctgcgcatccccctgaagtgccccaactgccgcagcatcacagaaattgcccccaccggcatcgagagcctgcctgtgaactttgccctgcgggccatcatcgagaagtaccagcaggaggaccacccagacatcgtgacctgcccagagcactaccggcagcccctgaatgtgtactgcctgctgtag

SEQ ID NO: 249566 - DNA, 972 bp, Artificial Sequence
  derived and/or modified sequence
atgcacaactttgaggaggagctgacctgccccatctgctacagcatctttgaggacccccgggtgctgccctgcagccacaccttctgcaggaactgcctggagaacatcctgcaggccagcggcaacttctacatctggaggcccctgcgcatccccctgaagtgccccaactgccgcagcatcacagaaattgcccccaccggcatcgagagcctgcctgtgaactttgccctgcgggccatcatcgagaagtaccagcaggaggaccacccagacatcgtgacctgcccagagcactaccggcagcccctgaatgtgtactgcctgctggacaagaagctggtgtgtggccactgcctgaccatcggccagcaccacggccaccccattgatgacctgcagagcgcctacctgaaggagaaggacaccccccagaagctgctggagcagctgacagacacccactggacagacctgacccacctgattgagaagctgaaggagcagaagagccacagcgagaagatgatccagggcgacaaggaggccgtgctgcagtacttcaaggagctgaatgacaccctggagcagaagaagaagagcttcctgacagccctgtgtgatgtgggcaacctgatcaaccaggagtacaccccccagatcgagaggatgaaggagatccgggagcagcagctggagctgatggccctgaccatcagcctgcaggaggagagccccctgaagttcctggagaaggtggatgatgtgcggcagcacgtgcagatcctgaagcagaggcccctgcctgaggtgcagcctgtggagatctacccccgggtgtccaagatcctgaaggaggagtggagcaggacagagatcggccagatcaagaatgtgctgatccccaagatgaagatcagccccaagaggatgagctgctcctggccagatgagggcacagacaagtag

SEQ ID NO: 249567 - DNA, 1212 bp, Artificial Sequence
  derived and/or modified sequence
atgcacaacttcgaggaggagctgacctgccccatctgctacagcattttcgaggatccaagggtgctgccctgtagtcatacattctgcagaaactgcctggagaacatactgcaggctagcgggaacttctacatttggcggccactgcgaattccactaaagtgcccaaactgcagaagcattactgagatcgctcccaccggcattgagagcctccccgtcaattttgctctgagggcaattattgagaagtatcagcaggaggaccatcccgatattgtaacttgcccagaacactataggcagcctctcaatgtttattgcctccttgataagaaactagtttgtggccattgcctcacaattgggcaacaccacggccacccaatcgatgacctgcagtccgcttacctgaaggagaaagacacgccccaaaagcttctggagcaattgaccgatacacactggacagacttgactcacctgatcgagaaactgaaagagcagaagtcacacagcgagaaaatgatccaaggggacaaggaagctgtgctgcagtattttaaagagcttaacgacacccttgagcagaagaagaagtctttcctgaccgccctgtgcgatgtgggaaatctcattaaccaggaatatactccccaaattgagcggatgaaggagatcagggagcagcagctcgaactgatggcactcacaatttcactacaggaggagagcccactgaagttcttggagaaggtcgacgacgtgcgtcagcatgttcaaattcttaagcagaggccactccccgaagtccagccagtcgagatttatccccgggtgtctaaaatccttaaggaggagtggagtcgtaccgaaatagggcaaatcaaaaacgtactgatccctaaaatgaagatctcgcccaaacgaatgagctgcagctggcctggtaaggacgagaaagaggttgagttccttaagatcctcaatattgttgtcgtcaccctaatctcagtgatattgatgagcatactgttctttaaccaacacattataactttcctctctgaaattaccctcatctggttttccgaggctagtttgtctgtctaccagtccctatctaacagcctacataaagtgaagaatatactgtgccacatcttttacctgttgaaggagttcgtttggaagatcgttagtcactag

SEQ ID NO: 249568 - DNA, 345 bp, Artificial Sequence
  derived and/or modified sequence
atgcacaacttcgaggaggagctgacctgccccatctgctacagcatatttgaagatcctagagtgttaccctgttcacacaccttctgccgcaactgtctggaaaacatactccaggctagtgggaacttttacatctggcgaccactgcgaataccgctcaaatgtccgaactgtcgtagcattactgagatcgcaccgaccggaatcgagagtctgcctgtgaatttcgccttgcgagccataattgaaaaatatcagcaggaggatcaccccgatatcgtgacatgccccgaacactataggcagcctctaaacgtttactgcctgctggataaaaagtag

SEQ ID NO: 249569 - DNA, 468 bp, Artificial Sequence
  derived and/or modified sequence
atgcacaacttcgaggaggagctgacctgccccatctgctacagcatctttgaggatcccagggtcctgccatgctcccacactttctgtcgaaactgtctggaaaacatcctgcaggccagcggcaatttctacatctggaggcccttacgaatccccctcaagtgccccaattgtcggagcattactgagatcgcgccaaccggcatcgagagcctgccagtgaacttcgccctccgcgccatcatcgagaagtaccaacaggaggatcaccctgacatcgtaacgtgtccagaacattaccgtcagcctctaaacgtctattgcctgctcgacaaaaaactcgtatgtgggcattgcctgacaatcggccaacaccatggtcatcctatcgatgacttgcagtctgcctatcttaaggagaaggatacccctcagaagctcttggagcagctaacagatacatag

SEQ ID NO: 249570 - DNA, 534 bp, Artificial Sequence
  derived and/or modified sequence
atgcacaacttcgaggaggagctgacctgccccatctgctacagcatctttgaggacccgcgcgtgctgccatgtagccacacattctgtcggaattgtttagaaaacatcctgcaggcttccggcaacttctacatctggaggccactgcggattccactgaaatgccccaattgtcggtccataacagagatcgccccgacaggcattgagagtctgccagtgaactttgccttgcgagcgatcatagaaaaatatcaacaggaggaccacccagacattgtgacttgcccagagcactacagacaacccttgaacgtgtactgcctgctggacaaaaaactggtttgtgggcactgtctcacaattggtcagcaccacggccacccaatagacgatctacagagtgcataccttaaagagaaagatacccctcagaagcttctggagcagctgactgacacccactggacggatcttacccaccttatcgaaaagctcaaggaacagaagtctcacagcgagaaaatgtag

SEQ ID NO: 249571 - DNA, 336 bp, Artificial Sequence
  derived and/or modified sequence
atgcacaacttcgaggaggagctgacctgccccatctgctacagcattttcgaggatccacgcgtgttgccttgctctcataccttctgccggaattgcctcgagaacatcctgcaagcgtccggaaacttctatatttggcgtccgctgcggataccgttgaagtgccctaattgccggtctattaccgaaatagcccccacagggatagagtctttgcctgtgaatttcgcactgagagcaattattgagaagtaccagcaggaagatcatcctgacattgtcacatgccctgaacattaccgtcagcctctgaacgtttactgcctcctgtag

SEQ ID NO: 249572 - DNA, 972 bp, Artificial Sequence
  derived and/or modified sequence
atgcacaacttcgaggaggagctgacctgccccatctgctacagcatattcgaggatccccgggtgctgccttgctcccacaccttttgtaggaattgcttggagaacattctccaagcgtccggaaatttctacatttggaggcctcttaggatcccacttaagtgtcctaactgtaggtcgatcacagagattgctccaaccgggattgaaagcttgcccgttaatttcgccctgagagcgataattgagaaatatcagcaggaggatcatcctgacatcgtgacctgccccgagcactacagacagccattgaatgtttattgtcttcttgacaagaaactcgtctgtgggcactgtctgacaattgggcagcatcatggtcatcccatcgatgatctgcagagcgcctacctaaaagagaaggatacgccccagaaattactggaacaattaacagacactcattggactgacctcacccatctgatcgaaaaactaaaagaacagaagagccactccgaaaagatgattcagggagataaggaggccgtcctccaatactttaaggagctcaacgacacgctggagcagaagaaaaaaagctttttgaccgcactttgcgacgtgggaaatctcattaaccaggaatatactccgcagatagaacggatgaaagaaattcgggagcagcagctggagctgatggctctgactatcagtttacaggaagagtccccgttaaagttcctcgagaaagtagatgatgttagacagcatgtgcaaattctaaagcagagacccctgccagaggtccagcctgtagagatataccccagggtgtcgaagatactcaaagaagagtggagtcgtactgagattggtcagattaagaacgtgctgatcccaaagatgaaaataagcccaaagcgtatgtcttgctcatggcctgacgaaggaactgataaatag

SEQ ID NO: 249573 - DNA, 1212 bp, Artificial Sequence
  derived and/or modified sequence
atgcacaatttcgaagaggaactcacatgcccaatatgttactcgatatttgaggacccacgggtgttaccctgtagccacactttctgccgcaattgtcttgaaaacattctccaggcatcagggaacttttacatatggaggcccttgcggataccgttaaagtgcccgaattgtaggagcatcacagaaatagctccaacgggcatagagtctctcccggtgaattttgcgctgcgtgccattatcgaaaaatatcaacaggaggaccatccagatatcgtcacatgccctgaacactaccgtcagccattaaacgtatattgtttattagacaaaaaacttgtgtgcgggcactgcctgactatcggacagcatcatggccacccaatcgacgacctgcagagcgcctacttgaaagagaaagatacacctcaaaagctgctggaacagctcacggacacccactggactgacctgacacacttgatcgaaaaacttaaggaacagaaaagtcactccgagaaaatgatccagggcgacaaagaagcagtgctacagtatttcaaggagttgaatgacaccctagaacagaagaagaagtccttcttaacagcgttgtgcgacgttggcaaccttattaatcaggagtacaccccccagatcgagcgtatgaaggaaatcagagagcaacagctggagctgatggctctgaccataagtctacaggaagagtcacccctgaaatttctcgagaaagtggacgatgtgaggcaacacgttcagatacttaagcagcgaccccttccggaagttcagcctgtggaaatctacccccgtgtctccaagattctgaaagaggaatggtcacgaacagagataggtcaaattaaaaacgttctcatccctaagatgaaaatttctccaaaaaggatgagctgctcatggcctggcaaggacgaaaaggaggttgagttcctgaaaattcttaatatcgtcgtcgtcaccctgatcagtgtgatcctgatgtccatattattctttaatcaacacatcattacttttctgtcagaaataacattgatctggttttccgaagcctctctgagcgtgtaccagtcactttccaatagcctgcacaaagtcaaaaacatcttgtgtcatatcttctatctgctgaaggaatttgtgtggaaaatagtgagccactag

SEQ ID NO: 249574 - DNA, 345 bp, Artificial Sequence
  derived and/or modified sequence
atgcacaacttcgaagaggagctaacctgcccgatttgttactctatcttcgaagaccccagagtcctgccgtgttcccacacattctgccgaaactgcctggagaacattctccaagccagcggaaacttttatatttggcgtcccctgagaatccctttgaagtgccctaactgtagatccataaccgagattgcgcctacgggtatcgagtccctcccagtgaattttgcccttcgggcaataattgagaagtatcagcaagaagaccaccctgatattgtcacgtgtccagagcactaccgccagcccttgaatgtttattgtctgctggacaagaaatag

SEQ ID NO: 249575 - DNA, 468 bp, Artificial Sequence
  derived and/or modified sequence
atgcataatttcgaagaagagctgacatgccccatctgttactccatttttgaggatccaagagttcttccatgcagtcacaccttctgcagaaattgtttggagaatattctgcaggcctcagggaacttttatatctggaggccccttcgcatacctcttaaatgccccaactgccgcagcatcacggagatagccccaacggggattgaaagcctccccgtcaatttcgctctcagagctattattgaaaagtatcagcaagaagatcatcctgacatcgttacctgcccagagcactatagacagcccttgaacgtgtattgcctgcttgataagaaactggtctgcggacactgcttgaccatcggccagcaccacgggcaccctatcgacgaccttcaaagtgcctatctgaaagaaaaggatacgccacaaaaactgctggaacagctcaccgacacctag

SEQ ID NO: 249576 - DNA, 534 bp, Artificial Sequence
  derived and/or modified sequence
atgcataactttgaagaagaactcacatgccctatctgctattctatcttcgaggaccccagagtgttaccatgttcccatactttttgtcgaaactgtttggaaaacattttgcaggcatctggaaacttttacatatggaggccactccgaatcccactgaaatgccccaactgtcgctccatcaccgaaatcgctcccactggtattgaatctctgccagtcaactttgcactgagggctattattgagaaataccaacaggaggaccacccggacatcgtcacctgtcccgaacactacagacagcccctaaacgtgtactgcttgctcgataagaaactcgtgtgcggtcactgccttacaatcggacagcaccatgggcacccaattgatgatctgcagagcgcttacctcaaggaaaaggacactccccaaaagctcctcgagcagctgacagacacgcattggacagacctgactcacctgattgagaagctgaaagaacagaagtctcacagcgagaaaatgtag

SEQ ID NO: 249577 - DNA, 336 bp, Artificial Sequence
  derived and/or modified sequence
atgcacaatttcgaggaggaactaacttgcccaatctgttactcgatcttcgaggacccccgagttctgccttgttctcatacattctgtcgtaactgtctcgagaatattctccaggcttctggcaacttctatatttggcgtccactgaggattcccctgaagtgcccgaattgcagatccattacagagattgcgccaacaggtatcgagagtctgcccgttaacttcgctctgagggcaatcatagagaagtaccagcaggaagaccatccagatattgtgacgtgtcctgaacattatcggcaaccgcttaatgtctattgtctgctgtag

SEQ ID NO: 249578 - DNA, 972 bp, Artificial Sequence
  derived and/or modified sequence
atgcataacttcgaagaggagctgacctgccccatttgttattcaatctttgaggatcctagggtgcttccttgtagccatacgttctgccgtaactgccttgagaacatcctccaggcctcgggtaatttctacatatggagaccgctccggattccactaaagtgtcccaattgcagatccattactgaaatcgctcccacaggaatcgagtcgttacccgttaattttgcgctaagagctatcattgaaaaatatcagcaggaggaccaccctgacatcgtcacttgccctgaacattatcggcagcctctgaatgtgtattgcctcctggacaaaaagctcgtgtgcgggcattgccttaccattggacagcatcatgggcacccaatcgacgacttacagtctgcctatctcaaagaaaaagatacccctcaaaaattactcgagcagttgaccgacactcactggacggacctgacccatttgattgagaaactcaaagagcagaagtcacatagtgaaaagatgattcagggcgataaggaagccgtcctgcagtactttaaggaactgaacgacacactcgagcagaaaaagaagtcattcctgactgccctatgcgacgtcgggaaccttattaatcaggagtatacacctcagatcgaacgcatgaaggagattcgcgagcaacagctggagctcatggcattgactattagtttgcaggaagagagccctcttaagttccttgaaaaggtggacgatgtgagacagcacgtccagatcctcaaacagcgacctcttccggaggtccagccagttgagatctaccctagagtgagcaagatcttaaaggaggagtggtcacggacagagattggacaaatcaagaacgtgctgattccgaagatgaaaatctctcctaagcggatgagttgctcttggcccgacgagggcacggataagtag

SEQ ID NO: 249579 - DNA, 3867 bp, Artificial Sequence
  derived and/or modified sequence
agcccttcggggcagaggagggcggggactcggggcggctctcagcatccgcctggagctcgtggcgctgtgtttccgtgctgtggagttgcctggtccgcttcctccccgcgaataagaataaaagattctggaggagttggagaagagtgtattcagcccccaaaccacgagatcaacaaagaaatgcacaattttgaggaagagttaacttgtcccatatgttatagtatttttgaagatcctcgtgtactgccatgctctcatacattttgtagaaattgtttggaaaacattcttcaggcatctggtaacttttatatatggagacctttacgaattccactcaagtgccctaattgcagaagtattactgaaattgctccaactggcattgaatctttacctgttaattttgcactaagggctattattgaaaagtaccagcaagaagaccatccagatattgtcacctgccctgaacattacaggcaaccattaaatgtttactgtctattagataaaaaattagtttgtggtcattgccttaccataggtcaacatcatggtcatcctatagatgaccttcaaagtgcctatttgaaagaaaaggacactcctcaaaaactgcttgaacagttgactgacacacactggacagatcttacccatcttattgaaaagctgaaagaacaaaaatctcattctgagaaaatgatccaaggcgataaggaagctgttctccagtattttaaggagcttaatgatacattagaacagaaaaaaaaaagtttcctaacggctctctgtgatgttggcaatctaattaatcaagaatatactccacaaattgaaagaatgaaggaaatacgagagcagcagcttgaattaatggcactgacaatatctttacaagaagagtctccacttaaatttcttgaaaaagttgatgatgtacgccagcatgtacagatcttgaaacaaagaccacttcctgaggttcaacccgttgaaatttatcctcgagtaagcaaaatattgaaagaagaatggagcagaacagaaattggacaaattaagaacgttctcattcccaaaatgaaaatttctccaaaaaggatgtcatgttcctggcctggtaaggatgaaaaggaagttgaatttttaaaaattttaaacattgttgtagttacattaatttcagtaatactgatgtcgatactctttttcaaccaacacatcataacctttttaagtgaaatcactttaatatggttttctgaagcctctctatctgtttaccaaagtttatctaacagtctgcataaggtaaagaatatactgtgtcacattttctatttgttgaaggaatttgtgtggaaaatagtttcccattgaaaatgtcaacctgaattgtttaaatgggcttattctgtacattgctaaacaaaaaatggggtagcatggataaagagcaaactaagctttattagtgctgcaactaatataaacaaatgtttatatttgttgcttcttttggttagcaatgatatgtcaaagttatatctgaaatagtcaaatctttgggaaacagaatctagtaacaatttgaaaagtaatacactatcccatttttattggctttatgatggttgacataatgttgctgtgacatttaaacattcttgtaccaatattgtcttttaccattattatatactgcagttaattggctttacagttctttatatatatagcaaaatcctgaaagaacatatacctttattttgatgtggcttgaagcttttgaatgggtgaataaggatgatagaaaggtttcaaaatcaagcaacaaagtcttaaagtgataaggcatggcttaaagatcttttgatcaaacatacctgtgtttgagatagatttaagagccctaaatgcttatcaccattcactccaaataaaactattgcttttggataactgttagagtaaagtggctttttaaaagaaatttttgagactgggtctcaccttgttgcccaggctggagtgtagttgtctggtcatgactcactgcagtttcgaccacccaggctcaatcgatcctcccgcctctgcctctggagcagctgggacaaggcacacacccccatgcctggctaattaaaaaaattgttttttgtagaaacgaggttttgccatattgcccaggttggtctcaaacttctgggctcaagagatctgcccaccttggcctcccaaagtgctgggattacagacgttagccacactgtgcctgggggccagcattttctaatacttgtcatattctatagtttgtgcaaatttaagattgtttttttttctgctcgtcagtcaaatcagttcttggattaaaaactcattcttattagaacagaatcatgttggtaacttggtctgcaacaggttttgatggcatcatgtggactttattcatcttaactcatttaaattttctaccacattcccttaagctaatgcaaaagtaccaacaacttaatcttttttttttttttttttttttttttttgagacggagtcttgctctgtcgcccaggctggagtgcagtggcgtgatctcggctcattgcaagccccgcctcccgggttcacaccattctcctgcctcagcctcccgagtagctgggactacaggcatctgctaccacgcccagctaattttctgtatttttagtagagatggggtttcactgtgttagccaggatggtctctatctcctgacctcatgatccactcgcctcagcctcccaaaatgctgggattataggcgtgagccgccacgcccggcccaacaacttaatcttttattagctttgcttaagagggccaattaaatcaaagccctttagttccctttaacagggactggagttatgatgcatgtgttacgacttttggcccactgtccatgcaactctaagtgcaggttgatttgctttccagaaatcccaaaggggctgctcttggatcaccgaagagccttacctatatcaaatcaaaaagacattctgggtcagattagactatgctcctggccctacagattgcacataaactatcataaatacagctttttcagggaactagttctaaaactcttacctgctgagaataagtcttaacactaagatgactgtattatatcaatttattattagaatcagacttatacctagcacaattaactattgtgtgggcaaagaacatttaaagggcatagtagaggtaaggagagacacatactcagctagagataaaaatactaagttgcactgattacttaaaatactagtcacaccataaaagtgccctgtagtttcaaaaacacgtaagcaatgaaatgttagccattatgtgttaaactacttaatctcatttctgtgatgtgaatatttttaaccccctttttgtagatgagggaactgacaagtgacttgtccaaggccatatagctgtgagaaaacccatgcattctcttttcagagttcatgctatcactcaactttaaagtaggccaagattaatgttggtaagggtttgtaatctgtaagaatgctaaaaacgtaagtatatatatcattttagatttgacattttgtatcttgccagtttttaggagaacttttcattttgttaagtatgcatgaatatagttgagtatatgagtaactggttcttatgctgctgttttgtatttttaccagcaggaagattgcaaaagttgatgtatgtaaatcttgaaatatttctaagttttatgtataacaaaatatgtattttaataaacttcttttgatatttta

SEQ ID NO: 249580 - DNA, 576 bp, Artificial Sequence
  derived and/or modified sequence
gcgctgtgtttccgtgctgtggagttgcctggtccgcttcctccccgcgaataagaataaaagattctggaggagttggagaagagtgtattcagcccccaaaccacgagatcaacaaattaggtccacaaagatgtgagccccagtttgggtggtggcaccacttgaattttcccatacttaaagctgactcactagaagtcttgggacaagtcatcgaattctataatgaaatgcacaattttgaggaagagttaacttgtcccatatgttatagtatttttgaagatcctcgtgtactgccatgctctcatacattttgtagaaattgtttggaaaacattcttcaggcatctggtaacttttatatatggagacctttacgaattccactcaagtgccctaattgcagaagtattactgaaattgctccaactggcattgaatctttacctgttaattttgcactaagggctattattgaaaagtaccagcaagaagaccatccagatattgtcacctgccctgaacattacaggcaaccattaaatgtttactgtctattagataaaaaat

SEQ ID NO: 249581 - DNA, 548 bp, Artificial Sequence
  derived and/or modified sequence
gctgtgtttccgtgctgtggagttgcctggtccgcttcctccccgcggtgagtctaaggacctttacggatgcggagaaggaaatgcacaattttgaggaagagttaacttgtcccatatgttatagtatttttgaagatcctcgtgtactgccatgctctcatacattttgtagaaattgtttggaaaacattcttcaggcatctggtaacttttatatatggagacctttacgaattccactcaagtgccctaattgcagaagtattactgaaattgctccaactggcattgaatctttacctgttaattttgcactaagggctattattgaaaagtaccagcaagaagaccatccagatattgtcacctgccctgaacattacaggcaaccattaaatgtttactgtctattagataaaaaattagtttgtggtcattgccttaccataggtcaacatcatggtcatcctatagatgaccttcaaagtgcctatttgaaagaaaaggacactcctcaaaaactgcttgaacagttgactgacaca

SEQ ID NO: 249582 - DNA, 860 bp, Artificial Sequence
  derived and/or modified sequence
ctccccgcggtgagtctaaggacctttacggatgcggagaaggtggttctgagtcctttttcttttcctgtagcacagtctggtgtgcctagtgtgttgggcggggagtcctgggggcgcgacgatggagggagtggcttgggacctgcactcattccctcttgtcccatactggagtttggggagccactttcccgtccctccactgtggagctgcgttcctgtgagggaggaggccctctgtggtggcgaggaataagaataaaagattctggaggagttggagaagagtgtattcagcccccaaaccacgagatcaacaaagaaatgcacaattttgaggaagagttaacttgtcccatatgttatagtatttttgaagatcctcgtgtactgccatgctctcatacattttgtagaaattgtttggaaaacattcttcaggcatctggtaacttttatatatggagacctttacgaattccactcaagtgccctaattgcagaagtattactgaaattgctccaactggcattgaatctttacctgttaattttgcactaagggctattattgaaaagtaccagcaagaagaccatccagatattgtcacctgccctgaacattacaggcaaccattaaatgtttactgtctattagataaaaaattagtttgtggtcattgccttaccataggtcaacatcatggtcatcctatagatgaccttcaaagtgcctatttgaaagaaaaggacactcctcaaaaactgcttgaacagttgactgacacacactggacagatcttacccatcttattgaaaagctgaaagaacaaaaatctcattctgagaaaatgat

SEQ ID NO: 249583 - DNA, 577 bp, Artificial Sequence
  derived and/or modified sequence
gggggcgcgacgatggagggagtggcttgggacctgcactcattccctcttgtcccatactggagtttggggagccactttcccgtccctccactgtggagctgcgttcctgtgagggaggaggccctctgtggtggcgagggtgagctgagcggacgccgccgagtcgaataagaataaaagattctggaggagttggagaagagtgtattcagcccccaaaccacgagatcaacaaagaaatgcacaattttgaggaagagttaacttgtcccatatgttatagtatttttgaagatcctcgtgtactgccatgctctcatacattttgtagaaattgtttggaaaacattcttcaggcatctggtaacttttatatatggagacctttacgaattccactcaagtgccctaattgcagaagtattactgaaattgctccaactggcattgaatctttacctgttaattttgcactaagggctattattgaaaagtaccagcaagaagaccatccagatattgtcacctgccctgaacattacaggcaaccattaaatgtttactgtctattaga

SEQ ID NO: 249584 - DNA, 4615 bp, Artificial Sequence
  derived and/or modified sequence
aactgtgttggtgtttgtggcttttctgaaaacacgatgaagcatcgtgaagataaatatcaaagacagtgaactaacaaccatttttatgacatgagacaataaattgaaaacattaaagataacattattttaattttagaataagaataaaagattctggaggagttggagaagagtgtattcagcccccaaaccacgagatcaacaaagaaatgcacaattttgaggaagagttaacttgtcccatatgttatagtatttttgaagatcctcgtgtactgccatgctctcatacattttgtagaaattgtttggaaaacattcttcaggcatctggtaacttttatatatggagacctttacgaattccactcaagtgccctaattgcagaagtattactgaaattgctccaactggcattgaatctttacctgttaattttgcactaagggctattattgaaaagtaccagcaagaagaccatccagatattgtcacctgccctgaacattacaggcaaccattaaatgtttactgtctattagataaaaaattagtttgtggtcattgccttaccataggtcaacatcatggtcatcctatagatgaccttcaaagtgcctatttgaaagaaaaggacactcctcaaaaactgcttgaacagttgactgacacacactggacagatcttacccatcttattgaaaagctgaaagaacaaaaatctcattctgagaaaatgatccaaggcgataaggaagctgttctccagtattttaaggagcttaatgatacattagaacagaaaaaaaaaagtttcctaacggctctctgtgatgttggcaatctaattaatcaagaatatactccacaaattgaaagaatgaaggaaatacgagagcagcagcttgaattaatggcactgacaatatctttacaagaagagtctccacttaaatttcttgaaaaagttgatgatgtacgccagcatgtacagatcttgaaacaaagaccacttcctgaggttcaacccgttgaaatttatcctcgagtaagcaaaatattgaaagaagaatggagcagaacagaaattggacaaattaagaacgttctcattcccaaaatgaaaatttctccaaaaaggatgtcatgttcctggcctgatgagggaactgacaagtgacttgtccaaggccatatagctgtgagaaaacccatgcattctcttttcagagttcatgctatcactcaactttaaagtaggccaagattaatgttggtaagggtttgtaatctgtaagaatgctaaaaacgtaagtatatatatcattttagatttgacattttgtatcttgccagtttttaggagaacttttcattttgttaagtatgcatgaatatagttgagtatatgagtaactggttcttatgctgctgttttgtatttttaccagcaggaagattgcaaaagttgatgtatgtaaatcttgaaatatttctaagttttatgtataacaaaatatgtattttaataaacttcttttgatattttatttgcactgtcttaatgagacttccatactcaggagtggtagctatgggattttcacatgggttctgggtacttctaattctttgaaacttagtactgcaggctgggtgcagtggctcatgcctatagtccagcactttgggaggctgaggcaggcagatcacttgaggccaggagtttgagaccagcttggccaacatggcaaaaccctgtctaccaaaaacacaaaaattagctgggcactgtggtgtgcacctgtagtcccagctactcatgtggctgaggcacttgaatcgcttgaacccgtgaggcagggttgcagtgagccaagatcttgccacagcactccaccctgggtgatgcagtgagactttcaaaaaaaaaaaaaaaatctgagctctactgcattggttattaaaatataataaaagtattaaattctattttcgcaccaaatgaaaacacttgattatcattatagcactttaaacttacttttcccttatatattcttgatttagaacaaattaccgtacttgaatttccgatcttgctttctttaaatctttatttaaaagtccatgctaataatgtgtttacatttttacagttacattatgatagaaactgttggattttttaaatatctaaaacaatggcccactgaagaaaggaacaattaactctttaattaattccttaggataaatacccagaaatttaacagctagggcagacttctaatacaataccgaaagtccttccaaaaaccaagtggttgccaacttatgtcccttagcattataacattcttgagccaatagtgtaaaaatacgctgacaattttataggcaaacattactcaaggtatcttactttccacttattactaaagtaattaacccctaaatagatgctcctcaacagtgggactacatcctggtaaacctatcataagttgaaactatcaagttgaaatgcatttagtacccggataaacctatcataaagttgaaaatttgtaaattgaaccagtgtaaatcagaggccatcttacttcatactcatgaagcaactatagtgggatatttttcaacttacgagatagcctaggcttgttgaaacactgtcctaatttactggctctctggtaattaagtcataaatggtcaaacatcaaattctagaaaagcatatatttaaattctcatcactataattcagaatgactggtttacaaaaatatgttcatagtatttgggtaataactgtggtgattgtctcaactggcaagctaagtggaatgccttaaagaatctatccaagattagttggcaggcatttccagtgttggtaaatcaaaggcccacgaaggtatgctgagccttgatagcacaaccttgcttaggactttgcctcaactaacatactttttagtttggcaagttacctgaccctccaggtaactcatttttctccatagtctgctacttacaagattgtcatatttttgtaatctagaagcaattatagagaatattttattagactttacaaatgacaactgcataaaacagaaaccagtttcatgatctagtttagggagtatgtattttatacaactcataatcctttacaaatagaaaaaaatcagtaatacactgaatcaacttgaagaatcttcagcataaagttcaacaaagtcccttagatgcaatttcttttggatttacagcaacactttttgttatgttgtatgtcttgtaaattccaataagtctatccgaaatctcaaacatattatttcgaagagaaattattatgaactgtgcattttttgtttgttcctaaagagaaacaaagaaaagtcaaacattaagtaataacaggtaaatcacacaaacatgtaacctcaaatattttttggacaataaacattacattgataacatgtaaaggaatgatggcaggaataattcataaaacagtatttgagtgtgaaaggaatttggttattttgacttctagtggaaaagatctaggaagatgacctaggattctagctgtgattctgctactaatttgcatttttaatttatattttactcctccaaaatggaaatatttggttcaaataaaaaataatttggtctccactgataccagaggagatggagatggagttattagacaataaagaaaaagctcaattgtaagaaataaagaattccatgtgtaatgtttaggatacccctaaaagtttctggaatgaaaatcccaaaatgattacttacatatatataaaatgcaacaatggacacatttttaaaatcaagggctgcatcaatctcatccatgaagtaaaggggagtgggcttgtagtggtgaagagcaaatactaaagccaatgaactaagtgttttctctcctcccgaaaggttgaagatctttttccaacttttcttaggtggtcgaacactgaaatgattaagaaaatcatagtcaaattacctgtaaagctaaagttaagactttgtgatttgctttccataattgagttctactatcttttttaggaatctgtaacttgcttttcacaaatatgaattctcttttctgttattttataaaaacgttattggaggatgcatacataggagcacataccaaagttttaagatttaaagagcaagctaagtattatacttcttgctattctttctccttatcaaatacaatttctcaatcctcatgttaaaaatgccttgaaaatttaagaaaagatgaactagacaaatattttgtaaatactggctgtctgcccctgtaaactgcaagcataaatagcatgcaagcaaattagtatttactagtaaatgaaacaagttgtacatcttgccttcacatcctacctccaagaaatactgagtttggagaatatgtagaaaaaggtaacagtgggattataaactcagcataattacacacctgaacatgattccttcagagaaaggatccaagctgtctacaagctcgagttcggcgtcccctcccaaagt

SEQ ID NO: 249585 - protein, 564 aa, Artificial Sequence
  derived and/or modified sequence
MASTSTTIRSHSSSRRGFSANSARLPGVSRSGFSSISVSRSRGSGGLGGACGGAGFGSRSLYGLGGSKRISIGGGSCAISGGYGSRAGGSYGFGGAGSGFGFGGGAGIGFGLGGGAGLAGGFGGPGFPVCPPGGIQEVTVNQSLLTPLNLQIDPAIQRVRAEEREQIKTLNNKFASFIDKVRFLEQQNKVLDTKWTLLQEQGTKTVRQNLEPLFEQYINNLRRQLDSIVGERGRLDSELRNMQDLVEDLKNKYEDEINKRTAAENEFVTLKKDVDAAYMNKVELQAKADTLTDEINFLRALYDAELSQMQTHISDTSVVLSMDNNRNLDLDSIIAEVKAQYEEIAQRSRAEAESWYQTKYEELQVTAGRHGDDLRNTKQEIAEINRMIQRLRSEIDHVKKQCASLQAAIADAEQRGEMALKDAKNKLEGLEDALQKAKQDLARLLKEYQELMNVKLALDVEIATYRKLLEGEECRLNGEGVGQVNVSVVQSTISSGYGGASGVGSGLGLGGGSSYSYGSGLGIGGGFSSSSGRAIGGGLSSVGGGSSTIKYTTTSSSSRKSYKH

SEQ ID NO: 249586 - protein, 549 aa, Artificial Sequence
  derived and/or modified sequence
MASTSTTIRSHSSSRSGFSSISVSRSRGSGGLGGACGGAGFGSRSLYGLGGSKRISIGGGSCAISGGYGSRAGGSYGFGGAGSGFGFGGGAGIGFGLGGGAGLAGGFGGPGFPVCPPGGIQEVTVNQSLLTPLNLQIDPAIQRVRAEEREQIKTLNNKFASFIDKVRFLEQQNKVLDTKWTLLQEQGTKTVRQNLEPLFEQYINNLRRQLDSIVGERGRLDSELRNMQDLVEDLKNKYEDEINKRTAAENEFVTLKKDVDAAYMNKVELQAKADTLTDEINFLRALYDAELSQMQTHISDTSVVLSMDNNRNLDLDSIIAEVKAQYEEIAQRSRAEAESWYQTKYEELQVTAGRHGDDLRNTKQEIAEINRMIQRLRSEIDHVKKQCASLQAAIADAEQRGEMALKDAKNKLEGLEDALQKAKQDLARLLKEYQELMNVKLALDVEIATYRKLLEGEECRLNGEGVGQVNVSVVQSTISSGYGGASGVGSGLGLGGGSSYSYGSGLGIGGGFSSSSGRAIGGGLSSVGGGSSTIKYTTTSSSSRKSYKH

SEQ ID NO: 249587 - DNA, 1695 bp, Artificial Sequence
  derived and/or modified sequence
atggccagcacctctacgaccataagatcacacagctcatctaggaggggatttagtgccaattcagcccgcctccctggagtatcccgtagtgggttttcctctatttctgtgtctaggtcaaggggctctggcggtcttggtggcgcgtgcggaggtgccggcttcggctctcgcagcctgtatgggcttggcgggtcaaaacgaatatccatcggaggcggatcatgtgccattagtggtgggtacggctctagggcgggaggctcctacggcttcggcggcgccgggagcgggttcggcttcgggggcggagctggaattggattcggcctgggaggcggggctggtctggctggtggctttggcggaccaggattcccggtgtgccctccaggaggtatccaggaggtaaccgtaaaccagagtctgctcactcccctcaatctgcagatcgatcccgcaattcagagggtccgtgcagaagaaagagaacagattaagacactgaacaataagttcgcaagctttattgacaaggtcagattccttgaacaacaaaacaaggtcctcgacacgaagtggaccctcctccaggaacaaggaaccaaaactgtgcgacagaacttagagccactgtttgagcagtatatcaacaaccttagaagacagttggatagcattgtgggtgagcgaggaagactcgactccgagctccggaatatgcaggatctggtcgaggatctgaaaaacaagtacgaggatgaaatcaacaaacgaacagccgccgaaaatgaatttgtcacgcttaagaaggatgtggatgcagcatatatgaataaagtggagctacaggccaaagctgacaccctgactgacgagataaacttcctcagggctctgtacgatgctgaattgtcccaaatgcagactcacatctcagatacaagtgtggtcctctctatggataacaatcgtaacttagatctcgattcaatcattgccgaggttaaagctcagtatgaagaaattgcacaaagaagtcgagccgaagcagagagctggtatcagacaaagtacgaagagcttcaggtcacagccgggcggcatggtgacgacctgcgaaatacaaaacaggagattgccgagattaatagaatgatacaaaggttgcgatcagaaattgatcacgtgaagaagcagtgcgcatccttacaggcggcgatcgccgacgctgagcagcggggagaaatggccctgaaagacgctaaaaataagctggaggggctggaggatgctctgcagaaggccaaacaagacctcgcaagactgttaaaggagtatcaggagttgatgaatgtcaaactggccttggacgtcgagatagctacttaccgaaagcttttagaaggggaagagtgtcgactgaacggagaaggtgtgggacaggtgaatgtctctgtcgtccagtcgaccatcagttcaggatacgggggcgcatctggagtggggagcgggcttggtctgggtgggggaagtagctactcttacggctcaggtctgggtatcggtggtggtttttcgagctccagcggcagagcaatcggcggcgggctctcctcagttggcggcgggtcctccacgatcaagtatactactacttccagctcctctcgaaaatcttacaagcattag

SEQ ID NO: 249588 - DNA, 1650 bp, Artificial Sequence
  derived and/or modified sequence
atggccagcaccagcacaaccattcgctctcacagttcgtctaggagcgggttcagtagcatctctgtgtccagatcccgcggcagcggcgggctgggcggggcatgtggcggggccggttttggctctcgcagcctctacgggctgggcggctccaagaggatctcaatcggcggcggaagctgtgccattagtgggggttatggcagccgagccggcggtagctatggtttcggaggggccgggagtggatttgggtttggagggggtgcgggaatcggatttggcctcggcggtggagccggtttagcgggtggcttcggagggcctggattcccagtgtgtccgcctgggggaatacaggaagtgactgtgaatcaaagtctcttaacgcccttgaacctgcaaatcgatcctgccattcagagagtgagagccgaagaacgcgaacagattaagacattaaataataagtttgccagcttcatcgataaagtgcgcttccttgaacagcaaaataaagtgctggatacaaagtggaccttattgcaggagcaaggaactaaaaccgtccgccagaatttagagcccctgttcgagcaatatataaataacctgaggcgccagctggatagtatcgtcggtgagcggggccgtctcgactctgagctgcgcaacatgcaagacctggtggaggacttaaaaaacaagtacgaggatgagattaataaacgaaccgccgctgagaacgaatttgtcacgctgaagaaggacgtggacgctgcttacatgaacaaggtggagctgcaagctaaggctgacacactcactgacgaaattaattttttgcgggccctctacgacgcagagcttagtcagatgcagacacatattagtgatacatctgtggtcctgagcatggataacaaccgcaaccttgatcttgactcgatcatagccgaagtcaaagcacagtacgaggaaattgctcagaggtcaagagcagaagccgaatcctggtaccagacaaagtacgaggagctccaggtgactgccggccgccatggcgacgacctcaggaatacgaaacaagaaatcgccgagattaaccgtatgatacaaagactaaggtccgagatcgaccacgtaaagaagcaatgcgcttcacttcaggccgccatcgccgatgcagagcaaaggggcgagatggcactgaaagatgccaaaaacaaattggagggcctcgaggacgcgttgcaaaaagccaagcaggacttagcaagactgctaaaagaatatcaggagctgatgaacgttaagctggccttggacgtggaaattgctacataccgaaagctattggaaggggaggagtgccgacttaacggcgaaggcgttgggcaggtgaacgtttcggttgtgcaaagtaccatctcctccggttacggcggcgcatcaggagtcggttccggactgggcttgggaggaggctccagctatagttacggctctggcctggggattggcggcggcttttccagtagctcaggaagggctattggagggggacttagctccgtcggcggaggttccagcacgattaaatataccactactagttcaagcagtcggaaatcctataaacattag

SEQ ID NO: 249589 - DNA, 2289 bp, Artificial Sequence
  derived and/or modified sequence
cgcctccagcctccaacgctcgccacagccctctcatctcctggaaccatggccagcacatccaccaccatcaggagccacagcagcagccgccggggtttcagtgccaactcagccaggctccctggggtcagccgctctggcttcagcagcatctccgtgtcccgctccaggggcagtggtggcctgggtggtgcatgtggaggagctggctttggcagccgcagtctgtatggcctggggggctccaagaggatctccattggagggggcagctgtgccatcagtggcggctatggcagcagagccggaggcagctatggctttggtggcgccgggagtggatttggtttcggtggtggagccggcattggctttggtctgggtggtggagccggccttgctggtggctttgggggccctggcttccctgtgtgcccccctggaggcatccaagaggtcaccgtcaaccagagtctcctgactcccctcaacctgcaaattgaccccgccatccagcgggtgcgggccgaggagcgtgagcagatcaagaccctcaacaacaagtttgcctccttcatcgacaaggtgcggttcctagagcagcagaacaaggttctggacaccaagtggaccctgctgcaggagcagggcaccaagactgtgaggcagaacctggagccgttgttcgagcagtacatcaacaacctcaggaggcagctggacagcatcgtcggggaacggggccgcctggactcggagctgagaaacatgcaggacctggtggaggacctcaagaacaaatatgaggatgaaatcaacaagcgcacagcagcagagaatgaatttgtgactctgaagaaggatgtggatgctgcctacatgaacaaggttgaactgcaagccaaggcagacactctcacagatgagatcaacttcctgagagccttgtatgatgcagagctgtcccagatgcagacccacatctcagacacatccgtggtgctatccatggacaacaaccgcaacctggacctggacagcatcatcgctgaggtcaaggcccaatacgaggagattgctcagaggagccgggctgaggctgagtcctggtaccagaccaagtacgaggagctgcaggtcacagcaggcagacatggggacgacctgcgcaacaccaagcaggagattgctgagatcaaccgcatgatccagaggctgagatctgagatcgaccatgtcaagaagcagtgtgccagcctgcaggctgccattgctgatgctgagcagcgtggggagatggcactcaaggatgctaagaacaagctggaagggctggaggatgccctgcagaaggccaagcaggacctggcccggctgctgaaggagtaccaggagctgatgaatgtcaagctggccctggatgtggagatcgccacctaccgcaagctgctggagggcgaggagtgcaggctgaatggcgaaggcgttggacaagtcaacgtctctgtagtacagtccaccatctccagtggctatggcggtgccagcggtgtcggcagtggcttaggcctgggtggaggaagcagctactcctatggcagtggtcttggcattggaggtggcttcagttccagcagtggcagagccattgggggtggcctcagctctgttggaggcggcagttccaccatcaagtacaccaccacctcctcctccagcaggaagagctacaagcactaaagtgctgcctccagctctcggtcccacagtcctcaggcccttctctggctgcagagccgtctcctcaggttgcctatcctctcctggcctctagtcttccctgctctccgaggtagagctgggtatggatgcttagtgccctcacttctctctgtctatacctgccccatctgagcacccattgctcaccatcagatcaacctttgattttacatcataatgtattcaccaatggagcttcactttgttactaaattattaatttcttgcctccaaaattgttctctctgaggctgagcattataagaaaatgatctctgttccttttcattactgaaaatcgcctggggcttatttcagaacaacttccacttattttccattggcccccaaactccctaagttaaaagtattgtgaacccccgccccgcagtatgcatggaagcacaagtgactagtcgtatgatgtacacagtctttctccctgtgatgatttctctgctctttgctctttgtaatttctaaataaagcaggttttagaataa

SEQ ID NO: 249590 - DNA, 2189 bp, Artificial Sequence
  derived and/or modified sequence
atggccagcacatccaccaccatcaggagccacagcagcagccgctctggcttcagcagcatctccgtgtcccgctccaggggcagtggtggcctgggtggtgcatgtggaggagctggctttggcagccgcagtctgtatggcctggggggctccaagaggatctccattggagggggcagctgtgccatcagtggcggctatggcagcagagccggaggcagctatggctttggtggcgccgggagtggatttggtttcggtggtggagccggcattggctttggtctgggtggtggagccggccttgctggtggctttgggggccctggcttccctgtgtgcccccctggaggcatccaagaggtcaccgtcaaccagagtctcctgactcccctcaacctgcaaattgaccccgccatccagcgggtgcgggccgaggagcgtgagcagatcaagaccctcaacaacaagtttgcctccttcatcgacaaggtgcggttcctagagcagcagaacaaggttctggacaccaagtggaccctgctgcaggagcagggcaccaagactgtgaggcagaacctggagccgttgttcgagcagtacatcaacaacctcaggaggcagctggacagcatcgtcggggaacggggccgcctggactcggagctgagaaacatgcaggacctggtggaggacctcaagaacaaatatgaggatgaaatcaacaagcgcacagcagcagagaatgaatttgtgactctgaagaaggatgtggatgctgcctacatgaacaaggttgaactgcaagccaaggcagacactctcacagatgagatcaacttcctgagagccttgtatgatgcagagctgtcccagatgcagacccacatctcagacacatccgtggtgctatccatggacaacaaccgcaacctggacctggacagcatcatcgctgaggtcaaggcccaatacgaggagattgctcagaggagccgggctgaggctgagtcctggtaccagaccaagtacgaggagctgcaggtcacagcaggcagacatggggacgacctgcgcaacaccaagcaggagattgctgagatcaaccgcatgatccagaggctgagatctgagatcgaccatgtcaagaagcagtgtgccagcctgcaggctgccattgctgatgctgagcagcgtggggagatggcactcaaggatgctaagaacaagctggaagggctggaggatgccctgcagaaggccaagcaggacctggcccggctgctgaaggagtaccaggagctgatgaatgtcaagctggccctggatgtggagatcgccacctaccgcaagctgctggagggcgaggagtgcaggctgaatggcgaaggcgttggacaagtcaacgtctctgtagtacagtccaccatctccagtggctatggcggtgccagcggtgtcggcagtggcttaggcctgggtggaggaagcagctactcctatggcagtggtcttggcattggaggtggcttcagttccagcagtggcagagccattgggggtggcctcagctctgttggaggcggcagttccaccatcaagtacaccaccacctcctcctccagcaggaagagctacaagcactaaagtgctgcctccagctctcggtcccacagtcctcaggcccttctctggctgcagagccgtctcctcaggttgcctatcctctcctggcctctagtcttccctgctctccgaggtagagctgggtatggatgcttagtgccctcacttctctctgtctatacctgccccatctgagcacccattgctcaccatcagatcaacctttgattttacatcataatgtattcaccaatggagcttcactttgttactaaattattaatttcttgcctccaaaattgttctctctgaggctgagcattataagaaaatgatctctgttccttttcattactgaaaatcgcctggggcttatttcagaacaacttccacttattttccattggcccccaaactccctaagttaaaagtattgtgaacccccgccccgcagtatgcatggaagcacaagtgactagtcgtatgatgtacacagtctttctccctgtgatgatttctctgctctttgctctttgtaatttctaaataaagcaggtttt

SEQ ID NO: 249591 - DNA, 1695 bp, Artificial Sequence
  derived and/or modified sequence
atggccagcaccagcaccaccatccgcagccacagcagcagcagaagaggcttcagcgccaacagcgcccggctgcccggggtgagccgcagcggcttcagcagcatctctgtgagccgcagccggggcagcggcggcctgggcggggcctgtggcggggccggcttcggcagccgcagcctgtatggcctgggcggcagcaagaggatcagcatcggcggcggcagctgtgccatcagcggcggctacggcagcagagctgggggcagctatggctttggaggagctggcagcggcttcggctttggaggaggagctggcatcggcttcggcctgggcggcggggccggcctggccggcggctttggaggccctggcttccctgtgtgccccccaggcggcatccaggaggtgacagtgaaccagagcctgctgacccccctgaacctgcagattgatcctgccatccagagggtgcgggcagaggagcgggagcagatcaagaccctgaacaacaagtttgccagcttcatcgacaaggtgcgcttcctggagcagcagaacaaggtgctggacaccaagtggaccctgctgcaggagcagggcaccaagacagtgcggcagaacctggagcccctgtttgagcagtacatcaacaacctgcggcggcagctggacagcatcgtgggggagcggggccgcctggacagcgagctgaggaacatgcaggacctggtggaggacctgaagaacaagtatgaagatgagatcaacaagaggacagctgctgaaaatgaatttgtgaccctgaagaaggatgtggatgctgcctacatgaacaaggtggagctgcaggccaaggctgacaccctgacagatgagatcaacttcctgcgggccctgtatgatgctgagctgagccagatgcagacccacatcagtgacacctctgtggtgctgtccatggacaacaacagaaacctggacctggacagcatcatcgccgaggtgaaggcccagtatgaggagatcgcccagaggagcagagctgaggccgagagctggtaccagaccaagtatgaggagctgcaggtgacagctggaagacatggagatgacctgaggaacaccaagcaggagattgctgagatcaacaggatgatccagaggctgcggagtgaaattgaccacgtgaagaagcagtgtgccagcctgcaggccgccatcgcagatgctgagcagagaggagagatggccctgaaggatgccaagaacaagctggagggcctggaggatgccctgcagaaggccaagcaggacctggcccggctgctgaaggagtaccaggagctgatgaatgtgaagctggccctggatgtggagatcgccacctacaggaagctgctggagggggaggagtgccgcctgaatggagagggcgtgggccaggtgaatgtgtctgtggtgcagagcaccatcagcagcggctatggaggagccagcggcgtgggcagcggcctgggcctgggcggcggcagcagctacagctatggcagcggcctgggcattggaggcggcttcagcagcagcagcggccgggccatcggcggcggcctgagctctgtgggcggcggcagcagcaccatcaagtacaccaccaccagcagcagcagcaggaagagctacaagcactag

SEQ ID NO: 249592 - DNA, 1650 bp, Artificial Sequence
  derived and/or modified sequence
atggccagcaccagcaccaccatccgcagccacagcagcagccgcagcggcttcagcagcatctctgtgagccgcagccggggcagcggcggcctgggcggggcctgtggcggggccggcttcggcagccgcagcctgtatggcctgggcggcagcaagaggatcagcattggaggcggcagctgtgccatcagcggcggctacggcagccgggccggcggcagctatggctttggaggagctggcagcggctttggatttggaggaggagctggcattggatttggcctgggcggcggggccggcctggccggcggctttggaggccctggcttccctgtgtgccccccaggcggcatccaggaggtgacagtgaaccagagcctgctgacccccctgaacctgcagattgatcctgccatccagagggtgcgggcagaggagcgggagcagatcaagaccctgaacaacaagtttgccagcttcatcgacaaggtgcgcttcctggagcagcagaacaaggtgctggacaccaagtggaccctgctgcaggagcagggcaccaagacagtgcggcagaacctggagcccctgtttgagcagtacatcaacaacctgcggcggcagctggacagcatcgtgggggagcggggccgcctggacagcgagctgaggaacatgcaggacctggtggaggacctgaagaacaagtatgaagatgagatcaacaagaggacagctgctgaaaatgaatttgtgaccctgaagaaggatgtggatgctgcctacatgaacaaggtggagctgcaggccaaggctgacaccctgacagatgagatcaacttcctgcgggccctgtatgatgctgagctgagccagatgcagacccacatcagtgacacctctgtggtgctgtccatggacaacaacagaaacctggacctggacagcatcatcgccgaggtgaaggcccagtatgaggagatcgcccagaggagcagagctgaggccgagagctggtaccagaccaagtatgaggagctgcaggtgacagctggaagacatggagatgacctgaggaacaccaagcaggagattgctgagatcaacaggatgatccagaggctgcggagtgaaattgaccacgtgaagaagcagtgtgccagcctgcaggccgccatcgcagatgctgagcagagaggagagatggccctgaaggatgccaagaacaagctggagggcctggaggatgccctgcagaaggccaagcaggacctggcccggctgctgaaggagtaccaggagctgatgaatgtgaagctggccctggatgtggagatcgccacctacaggaagctgctggagggggaggagtgccgcctgaatggagaaggagtgggccaggtgaatgtgtctgtggtgcagagcaccatcagcagcggctacggcggggccagcggcgtgggcagcggcctgggcctgggcggcggcagcagctacagctatggcagcggcctgggcatcggcggcggcttcagcagcagcagcggccgggccatcggcggcggcctgagctctgtgggcggcggcagcagcaccatcaagtacaccaccaccagcagcagcagcaggaagagctacaagcactag

SEQ ID NO: 249593 - DNA, 1695 bp, Artificial Sequence
  derived and/or modified sequence
atggccagcaccagcaccaccatccggagccacagcagcagccggagaggctttagtgccaatagtgctcgtctgccgggggtcagcaggagcggcttttccagtataagtgtgtcaagaagtcggggcagtggcggtctcggaggtgcttgcgggggcgccgggtttgggtcacgctcactgtatgggctgggagggtccaagcgtatctcgattggaggtggctcttgtgctatctcaggcgggtatggaagcagggccggtggctcctatggattcgggggcgcaggctcaggctttggtttcggggggggagccggaatagggtttggcctcggaggtggggccgggctggctgggggctttggggggccaggttttcccgtctgtccgcctggtggaattcaagaggtcacggtgaaccagagcttgctgacgcctctcaatctccagatcgatcccgctatccagcgcgttagagccgaggaaagagagcaaatcaagacattaaataataagttcgcatcgtttatcgataaagtgcggttccttgagcaacaaaataaggtgctagatacaaagtggacactgctgcaggaacaggggaccaagaccgtgcgccagaatcttgagcctctgttcgagcagtatattaacaacttacgccggcaacttgacagtatcgtgggagaaaggggcagactcgacagcgagctgcggaatatgcaggatttggtagaagatctcaagaacaagtacgaggacgagattaataagcgcactgcagcagaaaacgagttcgttaccctcaagaaggatgttgatgccgcatacatgaataaggtcgaactccaggcaaaggcagacaccctgaccgatgagatcaacttcctccgggcgctgtacgacgccgagctgagccagatgcagacgcacatttctgacacatctgtagtgctgagtatggataacaaccgcaacctcgacctggattccatcatagcagaggtgaaggcgcagtatgaagaaatcgcccaaagatctcgcgctgaagccgaaagctggtaccagacaaaatacgaggaacttcaggtgacagccggccggcacggggatgatcttagaaatacaaaacaggagattgctgagattaaccgcatgatacagagactgaggtcggagatagaccatgtgaaaaaacagtgtgctagcttacaagcagctatcgccgatgcagaacagaggggggaaatggctttgaaagacgcgaagaacaagctggaagggttggaggacgcacttcagaaagccaagcaggatctcgcgcgcttgctcaaggaataccaggagctgatgaatgtcaaactagccctcgacgtagaaatcgccacctataggaaattgttggaaggcgaggaatgcagactgaacggggagggggttggacaggtcaatgtttctgttgtacaatcaaccatctcttctgggtatggcggggcctcaggcgtgggctccggcctcgggctcggggggggctcctcatattcatatggaagcggcctggggatcgggggcggcttttcttctagtagcggacgggccatcggcggaggcctcagcagtgtaggcggcggaagcagcactatcaaatacaccaccacaagttcttcatctcggaagagctacaaacattag

SEQ ID NO: 249594 - DNA, 1650 bp, Artificial Sequence
  derived and/or modified sequence
atggccagcaccagcaccaccatccggagccacagcagcagccggagcggcttcagctctatttcagtgtccaggtcacgggggtctggagggctggggggggcatgtggcggggccggcttcggttctcgttccctttacggcctcggcggtagtaagcgcatctctataggtggcggaagttgcgctataagcggtggatacggatcgcgggccggcgggagttacgggtttggcggagccggcagcggcttcgggttcggagggggcgccggcatagggttcggcctgggtggcggcgcgggcttggccgggggcttcggcggccctggctttccagtgtgtcccccaggaggcattcaggaggtcaccgtgaaccagtcgctgctcaccccgttgaacctgcagattgaccccgctattcagcgggtccgggctgaggagagagaacagatcaaaacccttaacaataagttcgcgtctttcatcgataaggtgagattcttagagcaacaaaacaaggtcctggacacgaagtggacccttctgcaagagcagggcacaaagacagtgcgccagaatctcgagcctctgttcgaacaatacattaataacctgcgacgtcagctagatagcattgtcggggagcgtggtagactggatagcgagctgcgaaatatgcaggatctggtcgaagacctcaaaaataagtacgaggatgagataaataaacggactgcagccgaaaacgaatttgtgacactgaaaaaagatgtagatgccgcatatatgaataaggtcgaactccaggctaaagccgacacactaaccgatgagatcaacttcttgcgcgctctctatgacgccgagcttagccagatgcaaacccacatcagcgatacttccgtggtgttgtccatggacaataacagaaatctggacctggactccatcatcgctgaggtcaaggcacagtacgaagaaattgctcagagatcccgtgccgaagccgagtcctggtaccaaactaagtacgaagaactacaggtcacagcaggaagacacggagatgatctgagaaacaccaagcaggaaatcgcagagatcaatcgcatgattcagcgcttacggagtgagatcgaccacgtaaagaagcaatgtgcctcattacaagctgctattgccgatgctgagcagcggggagagatggccctcaaggacgctaaaaataagcttgaaggattggaggatgctctccagaaagccaaacaggacctggccaggcttctcaaggagtaccaagaactcatgaatgtcaagctggccttagatgtcgaaatcgcaacctatcggaagctcctggagggagaggaatgtcgcctgaatggagaaggtgtgggccaggtaaacgtgtctgtcgtgcagagcacaatctcatcaggatatggcggggcaagcggagtaggatccggcctagggttagggggtgggtcctcttatagctacgggtcagggctggggatcggtggcgggttctctagctcttcaggcagggcgatcgggggtgggctctcttccgtgggcggagggtcatctaccataaagtacacgacgacaagctcttcttcccgcaaatcctataagcactag

SEQ ID NO: 249595 - DNA, 1695 bp, Artificial Sequence
  derived and/or modified sequence
atggctagcacatccacaaccattcggagccattcttccagccgcagggggttctccgccaattccgcacgcttacccggtgtctcgaggtctggtttttcttcgatttcagttagcagatctcgcggtagcggcggattgggtggagcatgcggcggagccggattcggctcccgctctctgtacgggttgggaggatccaaacggattagtattgggggaggttcgtgcgctatttcaggaggctacggctccagggccggtggaagttacgggtttgggggagccggtagcggcttcgggttcggtggaggagcgggaatcgggtttggtctcgggggaggagctggtctggcgggaggatttggtggcccaggcttccccgtttgtcctcccggtggcattcaggaggtgacggtcaatcagtcgttacttacacccctgaacttgcagattgacccagccattcaacgagtgagagcggaggaaagggaacagattaagacattgaataacaaatttgcttcctttatcgacaaggtacgcttcctcgagcagcagaataaggtactagacacgaaatggacattgttacaggaacagggtactaagactgtcaggcaaaatttggaaccactcttcgaacaatatataaacaacctcaggcggcaactcgacagcatcgtgggcgaaagaggacgacttgatagcgagctgagaaatatgcaggatctcgtggaagatctgaaaaacaagtatgaggatgagatcaataaacgtacagcggctgagaacgaattcgtgactcttaaaaaggacgtagacgccgcttacatgaacaaagtcgagttgcaggctaaagctgatacacttaccgacgagattaatttcctgagggctctttacgacgcggagctgagtcagatgcaaacccacatctccgatacctccgtggtcctgagtatggacaacaatagaaacctggatttggacagtatcattgcagaggttaaggctcagtacgaagagattgcacaacgtagtcgggctgaagccgagtcatggtaccagacaaaatacgaagagctgcaagtcaccgcgggaaggcacggagatgatctcagaaacacgaagcaggaaattgcagagattaaccgcatgatccaacgtcttcgatccgagattgaccacgtgaaaaagcagtgcgccagcctccaagcagccattgccgacgctgaacagaggggggaaatggccctgaaagatgccaaaaataaactggaaggcctggaagatgccttacagaaggctaagcaggatctggcacggctcctgaaggagtaccaggaactgatgaatgtaaagctggcactcgatgtggagatagcaacctacagaaaactgctggagggggaagagtgcaggttgaatggggaaggagtagggcaggtcaacgtgagcgttgtgcaatcgacaatctcttcagggtacgggggagccagcggtgtgggatccggcctagggttaggaggcggatcatcttattcctacggcagcggcctgggaatcggcggaggattttccagcagttccgggcgtgcaatcgggggaggtctatctagcgttgggggtggttccagcaccatcaagtacaccaccaccagttcatcgagccggaagtcttacaaacactag

SEQ ID NO: 249596 - DNA, 1650 bp, Artificial Sequence
  derived and/or modified sequence
atggcatccacaagtactacaattcggtcacacagcagcagtaggtcgggcttctcttcaatctccgtgagtcgctcccgcggttctggagggctgggtggcgcttgtggtggagccggtttcggcagtagaagcctttatgggctcggcggttcaaagcgtatctccatcggtggcggtagctgcgccatatcagggggttacggaagcagagccggagggtcgtatgggttcggaggcgctggttccgggtttggttttggaggtggggctggaatcggctttggcttgggtgggggtgccggactcgccggtggatttggcggacctggatttcccgtgtgtccacccggtgggatccaggaggtgaccgtcaatcagtccctgctgacaccactgaatctacagattgacccagctatccagcgggttcgggcagaggagcgtgagcagatcaaaactcttaataacaaattcgcctccttcatcgacaaagtgaggtttttggagcagcagaacaaggtgctggacactaaatggacattactccaagaacaaggtacgaagacagtccgccagaacctcgagcctctgtttgaacagtatattaacaatcttaggcgccagctagactccatcgtgggagaacggggtcgactcgatagtgaactaagaaatatgcaagatctagtagaagatctgaagaataagtatgaagatgaaatcaataaacggacagccgctgagaatgaattcgtaactcttaagaaagatgttgacgcggcatatatgaataaggtggaactgcaagctaaggccgacaccctgactgatgaaatcaatttccttcgggcattatatgatgccgagttgtctcagatgcaaacccatatctccgatacaagcgttgtcctgtcgatggataataacagaaacctggacctggattcaattatcgcagaggtgaaggcccaatacgaggaaatcgcacagaggtcaagggccgaggcggaatcttggtaccagactaaatatgaggagctacaggtgactgctggtcgacacggtgacgatctgcggaacacgaaacaggaaatagcagagatcaatagaatgattcaaagactgaggagcgagatcgatcacgtgaagaagcagtgtgcctcgctacaggccgctatcgctgacgccgagcagagaggggagatggcactgaaggatgctaagaataagcttgaaggcttagaggatgcactgcagaaggcgaaacaggaccttgccaggctgcttaaagagtatcaggagctgatgaatgtcaagctcgcgcttgacgtggaaatcgcaacttaccgcaaacttttggagggtgaagaatgtcggttaaacggcgagggcgtgggccaggtcaatgtgagtgtggttcaatctacaattagctctggctacggaggtgcctcgggcgttggatccggtttggggttgggagggggatcatcctattcatatggaagcggcctcggaatcggcggtggtttctcctccagcagtggacgtgccatcggcggtggcctgagttctgtgggaggcggttcatctactattaaatatactactacctcatcaagcagcagaaaaagctataagcactag

SEQ ID NO: 249597 - DNA, 1695 bp, Artificial Sequence
  derived and/or modified sequence
atggccagcaccagcaccaccatcagaagccacagcagcagcagaagaggcttcagcgccaacagcgccagactgcccggcgtgagcagaagcggcttcagcagcatcagcgtgagcagaagcagaggcagcggcggcctgggcggcgcctgcggcggcgccggcttcggcagcagaagcctgtacggcctgggcggcagcaagagaatcagcatcggcggcggcagctgcgccatcagcggcggctacggcagcagagccggcggcagctacggcttcggcggcgccggcagcggcttcggcttcggcggcggcgccggcatcggcttcggcctgggcggcggcgccggcctggccggcggcttcggcggccccggcttccccgtgtgcccccccggcggcatccaggaggtgaccgtgaaccagagcctgctgacccccctgaacctgcagatcgaccccgccatccagagagtgagagccgaggagagagagcagatcaagaccctgaacaacaagttcgccagcttcatcgacaaggtgagattcctggagcagcagaacaaggtgctggacaccaagtggaccctgctgcaggagcagggcaccaagaccgtgagacagaacctggagcccctgttcgagcagtacatcaacaacctgagaagacagctggacagcatcgtgggcgagagaggcagactggacagcgagctgagaaacatgcaggacctggtggaggacctgaagaacaagtacgaggacgagatcaacaagagaaccgccgccgagaacgagttcgtgaccctgaagaaggacgtggacgccgcctacatgaacaaggtggagctgcaggccaaggccgacaccctgaccgacgagatcaacttcctgagagccctgtacgacgccgagctgagccagatgcagacccacatcagcgacaccagcgtggtgctgagcatggacaacaacagaaacctggacctggacagcatcatcgccgaggtgaaggcccagtacgaggagatcgcccagagaagcagagccgaggccgagagctggtaccagaccaagtacgaggagctgcaggtgaccgccggcagacacggcgacgacctgagaaacaccaagcaggagatcgccgagatcaacagaatgatccagagactgagaagcgagatcgaccacgtgaagaagcagtgcgccagcctgcaggccgccatcgccgacgccgagcagagaggcgagatggccctgaaggacgccaagaacaagctggagggcctggaggacgccctgcagaaggccaagcaggacctggccagactgctgaaggagtaccaggagctgatgaacgtgaagctggccctggacgtggagatcgccacctacagaaagctgctggagggcgaggagtgcagactgaacggcgagggcgtgggccaggtgaacgtgagcgtggtgcagagcaccatcagcagcggctacggcggcgccagcggcgtgggcagcggcctgggcctgggcggcggcagcagctacagctacggcagcggcctgggcatcggcggcggcttcagcagcagcagcggcagagccatcggcggcggcctgagcagcgtgggcggcggcagcagcaccatcaagtacaccaccaccagcagcagcagcagaaagagctacaagcactag

SEQ ID NO: 249598 - DNA, 1650 bp, Artificial Sequence
  derived and/or modified sequence
atggccagcaccagcaccaccatcagaagccacagcagcagcagaagcggcttcagcagcatcagcgtgagcagaagcagaggcagcggcggcctgggcggcgcctgcggcggcgccggcttcggcagcagaagcctgtacggcctgggcggcagcaagagaatcagcatcggcggcggcagctgcgccatcagcggcggctacggcagcagagccggcggcagctacggcttcggcggcgccggcagcggcttcggcttcggcggcggcgccggcatcggcttcggcctgggcggcggcgccggcctggccggcggcttcggcggccccggcttccccgtgtgcccccccggcggcatccaggaggtgaccgtgaaccagagcctgctgacccccctgaacctgcagatcgaccccgccatccagagagtgagagccgaggagagagagcagatcaagaccctgaacaacaagttcgccagcttcatcgacaaggtgagattcctggagcagcagaacaaggtgctggacaccaagtggaccctgctgcaggagcagggcaccaagaccgtgagacagaacctggagcccctgttcgagcagtacatcaacaacctgagaagacagctggacagcatcgtgggcgagagaggcagactggacagcgagctgagaaacatgcaggacctggtggaggacctgaagaacaagtacgaggacgagatcaacaagagaaccgccgccgagaacgagttcgtgaccctgaagaaggacgtggacgccgcctacatgaacaaggtggagctgcaggccaaggccgacaccctgaccgacgagatcaacttcctgagagccctgtacgacgccgagctgagccagatgcagacccacatcagcgacaccagcgtggtgctgagcatggacaacaacagaaacctggacctggacagcatcatcgccgaggtgaaggcccagtacgaggagatcgcccagagaagcagagccgaggccgagagctggtaccagaccaagtacgaggagctgcaggtgaccgccggcagacacggcgacgacctgagaaacaccaagcaggagatcgccgagatcaacagaatgatccagagactgagaagcgagatcgaccacgtgaagaagcagtgcgccagcctgcaggccgccatcgccgacgccgagcagagaggcgagatggccctgaaggacgccaagaacaagctggagggcctggaggacgccctgcagaaggccaagcaggacctggccagactgctgaaggagtaccaggagctgatgaacgtgaagctggccctggacgtggagatcgccacctacagaaagctgctggagggcgaggagtgcagactgaacggcgagggcgtgggccaggtgaacgtgagcgtggtgcagagcaccatcagcagcggctacggcggcgccagcggcgtgggcagcggcctgggcctgggcggcggcagcagctacagctacggcagcggcctgggcatcggcggcggcttcagcagcagcagcggcagagccatcggcggcggcctgagcagcgtgggcggcggcagcagcaccatcaagtacaccaccaccagcagcagcagcagaaagagctacaagcactag

SEQ ID NO: 249599 - protein, 729 aa, Artificial Sequence
  derived and/or modified sequence
MPTVISASVAPRTAAEPRSPGPVPHPAQSKATEAGGGNPSGIYSAIISRNFPIIGVKEKTFEQLHKKCLEKKVLYVDPEFPPDETSLFYSQKFPIQFVWKRPPEICENPRFIIDGANRTDICQGELGDCWFLAAIACLTLNQHLLFRVIPHDQSFIENYAGIFHFQFWRYGEWVDVVIDDCLPTYNNQLVFTKSNHRNEFWSALLEKAYAKLHGSYEALKGGNTTEAMEDFTGGVAEFFEIRDAPSDMYKIMKKAIERGSLMGCSIDTIIPVQYETRMACGLVRGHAYSVTGLDEVPFKGEKVKLVRLRNPWGQVEWNGSWSDRWKDWSFVDKDEKARLQHQVTEDGEFWMSYEDFIYHFTKLEICNLTADALQSDKLQTWTVSVNEGRWVRGCSAGGCRNFPDTFWTNPQYRLKLLEEDDDPDDSEVICSFLVALMQKNRRKDRKLGASLFTIGFAIYEVPKEMHGNKQHLQKDFFLYNASKARSKTYINMREVSQRFRLPPSEYVIVPSTYEPHQEGEFILRVFSEKRNLSEEVENTISVDRPVPQPGSSDQESEEQQQFRNIFKQIAGDDMEICADELKKVLNTVVNKHKDLKTHGFTLESCRSMIALMDTDGSGKLNLQEFHHLWNKIKAWQKIFKHYDTDQSGTINSYEMRNAVNDAGFHLNNQLYDIITMRYADKHMNIDFDSFICCFVRLEGMFRAFHAFDKDGDGIIKLNVLEWLQLTMYA

SEQ ID NO: 249600 - DNA, 2190 bp, Artificial Sequence
  derived and/or modified sequence
atgccgacagttatcagtgccagcgtggccccacggactgctgcagagccacgcagccccggtccagtcccgcatcccgcacagtccaaggccacagaagcagggggcggcaaccctagcgggatctacagtgccatcattagtcgcaacttccccattatcggtgtcaaggagaaaaccttcgagcagcttcataaaaaatgtctcgagaaaaaagtcctgtacgtggatccagagtttccacctgacgaaacttcccttttctattctcagaaatttcccatccagttcgtatggaagcgcccccctgagatctgtgagaatcctagattcataattgacggcgcaaataggactgatatatgccaaggagaactgggagactgttggttcctggctgccatcgcatgcttgactctgaaccagcacttacttttccgtgtgatccctcacgatcaatccttcattgagaactatgctgggatctttcacttccagttttggaggtacggggaatgggtggacgtggtaatcgatgactgtctccctacttataataaccagctggtgtttacaaaaagtaaccaccggaacgagttctggagcgccctgctggagaaggcctacgccaaactgcatggatcctacgaggctctgaagggcggaaacaccaccgaggccatggaagactttacaggaggagtggctgagttttttgaaattcgtgacgcccctagcgatatgtataaaatcatgaaaaaggcgatcgagcgaggttctctcatggggtgtagtatcgacacaatcatcccagttcagtatgaaactagaatggcatgcggactggtgaggggccatgcctattcggtcaccggcctggatgaagtgccttttaaaggcgaaaaagttaaactggtgaggttgcgtaacccctgggggcaagtggaatggaatggttcctggtccgaccggtggaaggactggagctttgtggataaggacgagaaggcccggctgcagcaccaggtcactgaggacggagaattctggatgagttacgaggatttcatctaccactttaccaagctcgaaatttgtaatctcactgccgacgctctgcagagcgataaactgcaaacatggactgtcagcgtgaacgagggaaggtgggttagaggttgttctgccggaggatgtcgaaacttccccgataccttctggactaatccccagtacaggctgaagctgctagaggaagacgacgacccagatgacagcgaggtcatatgtagttttctggtggccttgatgcagaagaaccgtaggaaggatcggaaattaggggcctcactctttacaattggtttcgccatctacgaggtccccaaggagatgcacgggaataagcagcacttgcagaaagatttcttcctctacaatgcttccaaagcacggtctaaaacttacatcaatatgcgggaggtgtcccagcgcttccgactgcctccatctgagtatgttatcgtgccatctacatatgaaccccaccaggaaggcgaatttatcctccgggttttttctgagaaacgaaacctgtctgaggaggtggagaatactataagcgtcgacagacctgttccacagccggggtcatccgaccaagagtcagaagaacagcagcagttcaggaatatctttaaacagatcgccggagacgacatggagatctgtgctgatgaactcaaaaaggttctgaacaccgtggtaaacaaacataaggatctgaagacacacggatttactcttgaatcctgccggtctatgattgcactgatggataccgatggaagtggcaagttgaacctacaggagttccaccatctgtggaacaagatcaaagcatggcagaaaattttcaaacattacgacacagatcaatcgggcactattaattcctacgaaatgcgtaatgccgtgaatgacgctggcttccacctgaacaaccagctgtacgatatcataaccatgcggtacgcggacaagcatatgaatattgattttgactctttcatttgttgttttgtcaggctcgagggtatgttccgggcatttcacgcctttgacaaagatggcgacggcatcatcaaactcaatgttctggaatggctgcaactgacaatgtacgcctag

SEQ ID NO: 249601 - DNA, 2190 bp, Artificial Sequence
  derived and/or modified sequence
atgcccaccgtcatcagcgcctctgtggcccccaggacagctgctgagcccaggagccctggccctgtgccccacccagcccagagcaaggccacagaggccggcggcggcaaccccagcggcatctacagcgccatcatcagcaggaacttccccatcatcggcgtgaaggagaagacctttgagcagctgcacaagaagtgcctggagaagaaggtgctgtatgtggaccctgagttccccccagatgagaccagcctcttctacagccagaagttccccatccagtttgtgtggaagaggcctcctgagatctgtgagaacccccgcttcatcattgatggagccaacagaacagacatctgccagggcgagctgggggactgctggttcctggccgccatcgcctgcctgaccctgaaccagcacctgctcttccgggtcatcccccatgaccagagcttcattgaaaattatgccggcatcttccacttccagttctggaggtatggagagtgggtggatgtggtgattgatgactgcctgcccacctacaacaaccagctggtgttcaccaagagcaaccacagaaatgagttctggagcgccctgctggagaaggcctatgccaagctgcacggcagctatgaggccctgaagggcggcaacaccacagaggccatggaggacttcaccggcggcgtggccgagttctttgagatcagagatgcccccagcgacatgtacaagatcatgaagaaggccatcgagcggggcagcctgatgggctgcagcattgacaccatcatccctgtgcagtatgagaccaggatggcctgtggcctggtgcggggccacgcctacagcgtgacaggcctggatgaggtgcccttcaagggggagaaggtgaagctggtgcggctgaggaacccctggggccaggtggagtggaatggctcctggagcgaccgctggaaggactggagctttgtggacaaggatgagaaggcccggctgcagcaccaggtgacagaagatggagagttctggatgtcctatgaggacttcatctaccacttcaccaagctggagatctgcaacctgacagcagatgccctgcagagcgacaagctgcagacctggacagtgtctgtgaatgaaggccgctgggtgcggggctgcagcgctgggggctgcaggaacttcccagacaccttctggaccaacccccagtaccgcctgaagctgctggaggaggatgatgatcctgatgacagcgaggtgatctgcagcttcctggtggccctgatgcagaagaacagaaggaaggacaggaagctgggcgccagcctcttcaccatcggctttgccatctatgaggtgcccaaggagatgcacggcaacaagcagcacctgcagaaggacttcttcctgtacaatgccagcaaggcccggagcaagacctacatcaacatgagggaggtgtcccagcgcttccggctgcccccatctgaatatgtgattgtgcccagcacctatgagccccaccaggagggggagttcatcctgcgggtcttcagcgagaagaggaacctgtctgaggaggtggagaacaccatctctgtggacaggcctgtgccccagcccggcagcagtgaccaggagagcgaggagcagcagcagttcaggaacatcttcaagcagattgctggagatgacatggagatctgtgctgatgagctgaagaaggtgctgaacacagtggtgaacaagcacaaggacctgaagacccacggcttcaccctggagagctgccgctccatgattgccctgatggacacagatggcagcggcaagctgaacctgcaggagttccaccacctgtggaacaagatcaaggcctggcagaagatcttcaagcactatgacacagaccagagcggcaccatcaacagctatgagatgagaaatgctgtgaatgatgctggcttccacctgaacaaccagctgtatgacatcatcaccatgagatatgctgacaagcacatgaacatcgactttgacagcttcatctgctgctttgtgcggctggagggcatgttccgggccttccacgcctttgacaaggatggagatggcatcatcaagctgaatgtgctggagtggctgcagctgaccatgtatgcctag

SEQ ID NO: 249602 - DNA, 2190 bp, Artificial Sequence
  derived and/or modified sequence
atgcccaccgtgatcagcgccagcgtggccccccggaccgccgccgagccacgttccccagggccagttcctcatcctgcccagagcaaggctacggaggcaggcggcgggaatccttccggcatatattcagcaataatcagtagaaacttccccattattggcgtcaaagaaaaaacctttgagcagctccacaaaaaatgtctcgaaaaaaaagtgctctatgtcgatccagaattccctccagacgagacctcacttttttacagccagaaatttcccattcagtttgtatggaagcgcccgccagagatttgtgagaatcccaggtttataattgacggagccaatcgcactgacatatgtcagggggagttgggtgattgctggtttcttgcagctattgcctgcctgacactgaatcagcatctgctttttcgggtcatcccgcacgaccagtcatttatagaaaattacgctgggatctttcattttcagttttggcgctatggagagtgggtagacgtcgtcatcgacgactgcctccctacctacaataaccagttagtctttaccaaaagcaaccacaggaatgaattttggtccgctctcttagaaaaggcatatgccaagctgcatggatcctacgaggcactgaagggcggaaacacaaccgaagctatggaggattttactggaggagttgccgaattttttgaaattagagatgcgccctcagacatgtataaaatcatgaagaaagcaattgagcgcggatctcttatgggctgcagtatcgatacaatcattccggtacagtacgagacaaggatggcatgcggcctcgtgagggggcacgcttactccgttactggcctggacgaggttcccttcaagggagagaaagtaaagctggttcgacttcgtaatccctggggacaagtggagtggaatggaagttggagcgatagatggaaggattggtcctttgtggataaagacgaaaaagcccgattgcaacatcaggtcactgaggatggcgaattctggatgtcatatgaggattttatataccacttcactaagctcgagatctgtaatttgactgctgatgcgttacaatctgataaactacagacttggacggtgagcgttaacgagggacggtgggtccgggggtgtagtgccggggggtgtcgaaattttcccgacaccttctggactaacccccaataccgcctcaaactgctggaagaagatgatgacccagacgatagtgaggtgatctgttcattcctagtcgccctaatgcagaagaatcgccgaaaggatcgcaagctgggggcatccttgttcaccattggctttgctatctacgaagtgccaaaggaaatgcacggaaacaaacagcacctgcaaaaggatttttttttgtacaacgcctcaaaagctaggagcaagacctacatcaacatgcgtgaagtttcccagaggttcagactcccccctagcgaatacgtgattgttccatccacttacgagccacatcaggaaggagaattcatcctgagggtcttctctgaaaaaagaaacctttcagaagaggtggagaatacgatcagcgtcgacagacctgttcctcaaccaggctccagcgaccaggaaagcgaggagcagcagcagttccgaaacatctttaagcagatagcaggagacgatatggagatctgtgcggatgagctgaaaaaggtactaaacactgtcgtaaataagcacaaagatctcaagacccatgggtttactctggagagttgcagaagcatgattgccctcatggatactgacggatccgggaagttgaacctccaggagttccaccacctgtggaacaagattaaggcttggcaaaagatttttaagcattacgatacagatcagtctgggactattaactcttacgagatgcgcaatgcagtaaatgatgctggcttccatttaaacaatcagctgtacgatattattaccatgcgctacgctgacaaacacatgaatatcgatttcgacagctttatctgctgcttcgtcaggctcgaaggcatgttcagggccttccacgcgtttgacaaggatggggacggcatcatcaaactgaatgtactcgagtggctgcagctgacaatgtacgcttag

SEQ ID NO: 249603 - DNA, 2190 bp, Artificial Sequence
  derived and/or modified sequence
atgccaacggtcatctctgcctctgtcgctcctagaactgccgcagagccgaggagtcccggtcccgtgccccaccccgcacagagtaaggctactgaagccggaggaggcaatccaagcggcatatacagcgctataatcagccggaacttccccattattggcgtgaaggagaagacattcgaacaactccacaaaaagtgtttagaaaagaaggtgctctacgtcgacccggaattcccgcctgacgaaacttcgctcttctattcacaaaagttccccatccagtttgtctggaagcgcccaccggaaatttgtgaaaatcccaggttcataatcgatggagctaatagaacggatatctgccaaggagaactcggcgactgctggtttctggctgccatcgcctgtttgactttgaaccagcacctcctttttagagtgatcccccacgaccagagtttcatagaaaattacgccggtatctttcattttcaattctggcgctacggggagtgggtcgatgtagtgattgacgattgcttgcctacctataataatcagctggtgtttaccaaaagcaaccatcgtaatgaattctggtcggcgttgttagagaaggcttatgccaaacttcacggctcctatgaggcgttgaagggcggtaacactaccgaagccatggaggactttaccgggggagtggccgagtttttcgaaataagagatgcaccctccgacatgtataagataatgaagaaggctatcgaacgcggatccctcatgggctgctctattgacactatcatacctgtccagtacgaaacccgaatggcttgcggcctcgtaagaggtcacgcttattccgtaacaggcctcgacgaagttccattcaagggcgaaaaggtgaagttagtgcgactgaggaacccatggggacaggttgaatggaatggatcatggtcagacagatggaaggattggtccttcgtggacaaggacgagaaggccaggctgcaacaccaagtgacggaagacggagaattctggatgtcttatgaagatttcatttaccattttacaaaattagaaatttgcaacctcacggcagacgcactccagtctgataagctccagacctggacagtgtctgtaaatgagggcaggtgggtgcgaggttgcagcgccggaggctgcagaaacttcccagataccttctggactaatcctcaatatagactaaagctgcttgaggaagacgacgacccggatgattccgaggttatttgctctttcttggtagcgcttatgcaaaagaacaggcggaaagatagaaaattgggcgcttcgttgttcactattggatttgccatttatgaggtgccgaaggagatgcacgggaacaagcagcacttgcagaaggacttcttcctttacaacgcgtcaaaagctcgctcaaagacttacataaacatgcgtgaggtcagtcagcgattccggctccccccatctgagtatgttatagtgccttccacttatgagccacatcaagagggcgaatttatcctccgggtattttccgagaagcgaaatctctctgaggaggtggagaataccattagcgttgaccgtccagtcccgcagccgggaagttccgaccaagagagtgaggaacagcagcaattccgcaacatattcaagcagattgcgggagatgacatggagatctgtgcggacgagctgaagaaagtgctgaataccgtggtcaacaagcacaaggacctgaagacgcacggcttcactcttgaatcttgtaggtctatgatcgcactgatggatacggacggctccggaaaactcaaccttcaagagttccaccacttgtggaataagatcaaggcgtggcaaaagatcttcaagcattacgacacagaccagtccggcacaatcaatagttacgaaatgagaaatgccgtgaacgacgcgggatttcacctgaataaccaattgtatgacattataaccatgcgatacgcagacaagcacatgaatattgacttcgactcatttatctgctgtttcgtcagactggagggcatgttcagagcttttcacgcttttgacaaggatggggatggaatcatcaagctgaacgtgctcgaatggttgcagcttacaatgtatgcctag

SEQ ID NO: 249604 - DNA, 2187 bp, Artificial Sequence
  derived and/or modified sequence
atgcccaccgtgatcagcgccagcgtggccccccgcaccgccgccgagccccgcagccccggccccgtgccccaccccgcccagagcaaggccaccgaggccggcggcggcaaccccagcggcatctacagcgccatcatcagccgcaacttccccatcatcggcgtgaaggagaagaccttcgagcagctgcacaagaagtgcctggagaagaaggtgctgtacgtggaccccgagttcccccccgacgagaccagcctgttctacagccagaagttccccatccagttcgtgtggaagcgcccccccgagatctgcgagaacccccgcttcatcatcgacggcgccaaccgcaccgacatctgccagggcgagctgggcgactgctggttcctggccgccatcgcctgcctgaccctgaaccagcacctgctgttccgcgtgatcccccacgaccagagcttcatcgagaactacgccggcatcttccacttccagttctggcgctacggcgagtgggtggacgtggtgatcgacgactgcctgcccacctacaacaaccagctggtgttcaccaagagcaaccaccgcaacgagttctggagcgccctgctggagaaggcctacgccaagctgcacggcagctacgaggccctgaagggcggcaacaccaccgaggccatggaggacttcaccggcggcgtggccgagttcttcgagatccgcgacgcccccagcgacatgtacaagatcatgaagaaggccatcgagcgcggcagcctgatgggctgcagcatcgacaccatcatccccgtgcagtacgagacccgcatggcctgcggcctggtgcgcggccacgcctacagcgtgaccggcctggacgaggtgcccttcaagggcgagaaggtgaagctggtgcgcctgcgcaacccctggggccaggtggagtggaacggcagctggagcgaccgctggaaggactggagcttcgtggacaaggacgagaaggcccgcctgcagcaccaggtgaccgaggacggcgagttctggatgagctacgaggacttcatctaccacttcaccaagctggagatctgcaacctgaccgccgacgccctgcagagcgacaagctgcagacctggaccgtgagcgtgaacgagggccgctgggtgcgcggctgcagcgccggcggctgccgcaacttccccgacaccttctggaccaacccccagtaccgcctgaagctgctggaggaggacgacgaccccgacgacagcgaggtgatctgcagcttcctggtggccctgatgcagaagaaccgccgcaaggaccgcaagctgggcgccagcctgttcaccatcggcttcgccatctacgaggtgcccaaggagatgcacggcaacaagcagcacctgcagaaggacttcttcctgtacaacgccagcaaggcccgcagcaagacctacatcaacatgcgcgaggtgagccagcgcttccgcctgccccccagcgagtacgtgatcgtgcccagcacctacgagccccaccaggagggcgagttcatcctgcgcgtgttcagcgagaagcgcaacctgagcgaggaggtggagaacaccatcagcgtggaccgccccgtgccccagcccggcagcagcgaccaggagagcgaggagcagcagcagttccgcaacatcttcaagcagatcgccggcgacgacatggagatctgcgccgacgagctgaagaaggtgctgaacaccgtggtgaacaagcacaaggacctgaagacccacggcttcaccctggagagctgccgcagcatgatcgccctgatggacaccgacggcagcggcaagctgaacctgcaggagttccaccacctgtggaacaagatcaaggcctggcagaagatcttcaagcactacgacaccgaccagagcggcaccatcaacagctacgagatgcgcaacgccgtgaacgacgccggcttccacctgaacaaccagctgtacgacatcatcaccatgcgctacgccgacaagcacatgaacatcgacttcgacagcttcatctgctgcttcgtgcgcctggagggcatgttccgcgccttccacgccttcgacaaggacggcgacggcatcatcaagctgaacgtgctggagtggctgcagctgaccatgtacgcc

SEQ ID NO: 249605 - DNA, 2955 bp, Artificial Sequence
  derived and/or modified sequence
atttctcaggagaacttatggcttcagaatcacagctcggtttttaagatggacataacctgtacgaccttctgatgggctttcaactttgaactggatgtggacacttttctctcagatgacagaattactccaacttcccctttgcagttgcttcctttccttgaaggtagctgtatcttattttctttaaaaagctttttcttccaaagccacttgccatgccgaccgtcattagcgcatctgtggctccaaggacagcggctgagccccggtccccagggccagttcctcacccggcccagagcaaggccactgaggctgggggtggaaacccaagtggcatctattcagccatcatcagccgcaattttcctattatcggagtgaaagagaagacattcgagcaacttcacaagaaatgtctagaaaagaaagttctttatgtggaccctgagttcccaccggatgagacctctctcttttatagccagaagttccccatccagttcgtctggaagagacctccggaaatttgcgagaatccccgatttatcattgatggagccaacagaactgacatctgtcaaggagagctaggggactgctggtttctcgcagccattgcctgcctgaccctgaaccagcaccttcttttccgagtcataccccatgatcaaagtttcatcgaaaactacgcagggatcttccacttccagttctggcgctatggagagtgggtggacgtggttatagatgactgcctgccaacgtacaacaatcaactggttttcaccaagtccaaccaccgcaatgagttctggagtgctctgctggagaaggcttatgctaagctccatggttcctacgaagctctgaaaggtgggaacaccacagaggccatggaggacttcacaggaggggtggcagagttttttgagatcagggatgctcctagtgacatgtacaagatcatgaagaaagccatcgagagaggctccctcatgggctgctccattgatacaatcattccggttcagtatgagacaagaatggcctgcgggctggtcagaggtcacgcctactctgtcacggggctggatgaggtcccgttcaaaggtgagaaagtgaagctggtgcggctgcggaatccgtggggccaggtggagtggaacggttcttggagtgatagatggaaggactggagctttgtggacaaagatgagaaggcccgtctgcagcaccaggtcactgaggatggagagttctggatgtcctatgaggatttcatctaccatttcacaaagttggagatctgcaacctcacggccgatgctctgcagtctgacaagcttcagacctggacagtgtctgtgaacgagggccgctgggtacggggttgctctgccggaggctgccgcaacttcccagatactttctggaccaaccctcagtaccgtctgaagctcctggaggaggacgatgaccctgatgactcggaggtgatttgcagcttcctggtggccctgatgcagaagaaccggcggaaggaccggaagctaggggccagtctcttcaccattggcttcgccatctacgaggttcccaaagagatgcacgggaacaagcagcacctgcagaaggacttcttcctgtacaacgcctccaaggccaggagcaaaacctacatcaacatgcgggaggtgtcccagcgcttccgcctgcctcccagcgagtacgtcatcgtgccctccacctacgagccccaccaggagggggaattcatcctccgggtcttctctgaaaagaggaacctctctgaggaagttgaaaataccatctccgtggatcggccagtgccacagcctggcagctctgatcaggaaagtgaggaacagcaacaattccggaacattttcaagcagatagcaggagatgacatggagatctgtgcagatgagctcaagaaggtccttaacacagtcgtgaacaaacacaaggacctgaagacacacgggttcacactggagtcctgccgtagcatgattgcgctcatggatacagatggctctggaaagctcaacctgcaggagttccaccacctctggaacaagattaaggcctggcagaaaattttcaaacactatgacacagaccagtccggcaccatcaacagctacgagatgcgaaatgcagtcaacgacgcaggattccacctcaacaaccagctctatgacatcattaccatgcggtacgcagacaaacacatgaacatcgactttgacagtttcatctgctgcttcgttaggctggagggcatgttcagagcttttcatgcatttgacaaggatggagatggtatcatcaagctcaacgttctggagtggctgcagctcaccatgtatgcctgaaccaggctggcctcatccaaagccatgcaggatcactcaggatttcagtttcaccctctatttccaaagccatttacctcaaaggacccagcagctacacccctacaggcttccaggcacctcatcagtcatgctcctcctccattttaccccctacccatccttgatcggtcatgcctagcctgaccctttagtaaagcaatgaggtaggaagaacaaacccttgtccctttgccatgtggaggaaagtgcctgcctctggtccgagccgcctcggttctgaagcgagtgctcctgcttaccttgctctaggctgtctgcagaagcacctgccggtggcactcagcacctccttgtgctagagccctccatcaccttcacgctgtcccaccatgggccaggaaccaaaccagcactgggttctactgctgtggggtaaactaactcagtggaatagggctggttactttgggctgtccaactcataagtttggctgcattttgaaaaaagctgatctaaataaaggcatgtgtatggctggtc

SEQ ID NO: 249606 - DNA, 2190 bp, Artificial Sequence
  derived and/or modified sequence
atgcccaccgtgatcagcgccagcgtggcccccagaaccgccgccgagcccagaagccccggccccgtgccccaccccgcccagagcaaggccaccgaggccggcggcggcaaccccagcggcatctacagcgccatcatcagcagaaacttccccatcatcggcgtgaaggagaagaccttcgagcagctgcacaagaagtgcctggagaagaaggtgctgtacgtggaccccgagttcccccccgacgagaccagcctgttctacagccagaagttccccatccagttcgtgtggaagagaccccccgagatctgcgagaaccccagattcatcatcgacggcgccaacagaaccgacatctgccagggcgagctgggcgactgctggttcctggccgccatcgcctgcctgaccctgaaccagcacctgctgttcagagtgatcccccacgaccagagcttcatcgagaactacgccggcatcttccacttccagttctggagatacggcgagtgggtggacgtggtgatcgacgactgcctgcccacctacaacaaccagctggtgttcaccaagagcaaccacagaaacgagttctggagcgccctgctggagaaggcctacgccaagctgcacggcagctacgaggccctgaagggcggcaacaccaccgaggccatggaggacttcaccggcggcgtggccgagttcttcgagatcagagacgcccccagcgacatgtacaagatcatgaagaaggccatcgagagaggcagcctgatgggctgcagcatcgacaccatcatccccgtgcagtacgagaccagaatggcctgcggcctggtgagaggccacgcctacagcgtgaccggcctggacgaggtgcccttcaagggcgagaaggtgaagctggtgagactgagaaacccctggggccaggtggagtggaacggcagctggagcgacagatggaaggactggagcttcgtggacaaggacgagaaggccagactgcagcaccaggtgaccgaggacggcgagttctggatgagctacgaggacttcatctaccacttcaccaagctggagatctgcaacctgaccgccgacgccctgcagagcgacaagctgcagacctggaccgtgagcgtgaacgagggcagatgggtgagaggctgcagcgccggcggctgcagaaacttccccgacaccttctggaccaacccccagtacagactgaagctgctggaggaggacgacgaccccgacgacagcgaggtgatctgcagcttcctggtggccctgatgcagaagaacagaagaaaggacagaaagctgggcgccagcctgttcaccatcggcttcgccatctacgaggtgcccaaggagatgcacggcaacaagcagcacctgcagaaggacttcttcctgtacaacgccagcaaggccagaagcaagacctacatcaacatgagagaggtgagccagagattcagactgccccccagcgagtacgtgatcgtgcccagcacctacgagccccaccaggagggcgagttcatcctgagagtgttcagcgagaagagaaacctgagcgaggaggtggagaacaccatcagcgtggacagacccgtgccccagcccggcagcagcgaccaggagagcgaggagcagcagcagttcagaaacatcttcaagcagatcgccggcgacgacatggagatctgcgccgacgagctgaagaaggtgctgaacaccgtggtgaacaagcacaaggacctgaagacccacggcttcaccctggagagctgcagaagcatgatcgccctgatggacaccgacggcagcggcaagctgaacctgcaggagttccaccacctgtggaacaagatcaaggcctggcagaagatcttcaagcactacgacaccgaccagagcggcaccatcaacagctacgagatgagaaacgccgtgaacgacgccggcttccacctgaacaaccagctgtacgacatcatcaccatgagatacgccgacaagcacatgaacatcgacttcgacagcttcatctgctgcttcgtgagactggagggcatgttcagagccttccacgccttcgacaaggacggcgacggcatcatcaagctgaacgtgctggagtggctgcagctgaccatgtacgcctag

SEQ ID NO: 249607 - protein, 309 aa, Artificial Sequence
  derived and/or modified sequence
MHGNKQHLQKDFFLYNASKARSKTYINMREVSQRFRLPPSEYVIVPSTYEPHQEGEFILRVFSEKRNLSEEVENTISVDRPVRKETYKPIIFVSDRANSNKELGVDQESEEGKGKTSPDKQKQSPQPQPGSSDQESEEQQQFRNIFKQIAGDDMEICADELKKVLNTVVNKHKDLKTHGFTLESCRSMIALMDTDGSGKLNLQEFHHLWNKIKAWQKIFKHYDTDQSGTINSYEMRNAVNDAGFHLNNQLYDIITMRYADKHMNIDFDSFICCFVRLEGMFRAFHAFDKDGDGIIKLNVLEWLQLTMYA

SEQ ID NO: 249608 - protein, 309 aa, Artificial Sequence
  derived and/or modified sequence
MHGNKQHLQKDFFLYNASKARSKTYINMREVSQRFRLPPSEYVIVPSTYEPHQEGEFILRVFSEKRNLSEEVENTISVDRPVKKKKTKPIIFVSDRANSNKELGVDQESEEGKGKTSPDKQKQSPQPQPGSSDQESEEQQQFRNIFKQIAGDDMEICADELKKVLNTVVNKHKDLKTHGFTLESCRSMIALMDTDGSGKLNLQEFHHLWNKIKAWQKIFKHYDTDQSGTINSYEMRNAVNDAGFHLNNQLYDIITMRYADKHMNIDFDSFICCFVRLEGMFRAFHAFDKDGDGIIKLNVLEWLQLTMYA

SEQ ID NO: 249609 - DNA, 930 bp, Artificial Sequence
  derived and/or modified sequence
atgcatggaaataaacagcacttacaaaaagattttttcctgtataacgcctctaaagccaggtcgaaaacctacattaatatgcgggaagtcagtcagaggttccggcttcctccctccgaatatgtgatcgtcccctccacttatgaaccgcaccaggaaggagagttcatcttgcgggtcttctccgaaaagcgaaacctgagtgaggaggtcgagaacactatatccgtcgatcgacccgtccggaaggagacttataagcccattatttttgtcagcgatcgagcgaactcaaacaaggagctgggcgtcgatcaggaaagcgaagagggcaaaggaaagacgagtccagacaagcagaagcagagcccgcagccccagcctggcagctcagatcaggagagcgaggagcagcaacagtttaggaatattttcaagcagatcgcgggcgatgatatggagatttgtgccgatgagctcaagaaagttctgaataccgttgtaaataagcacaaggatctgaagacccacggctttaccctggagtcttgtcggtccatgatcgctctgatggacactgatggttctgggaaattgaacctgcaggaattccatcatctatggaataaaattaaagcctggcagaaaattttcaagcattacgatacggaccagtccgggaccattaacagttacgaaatgagaaacgctgtaaatgacgccggctttcacctaaataaccagttgtacgacatcatcactatgcgctatgcggacaaacatatgaatattgacttcgattctttcatctgctgctttgtgagactggaaggaatgtttcgggcgttccatgcattcgataaggatggcgatgggattattaagctcaacgtcctggagtggttgcaattgaccatgtacgcttag

SEQ ID NO: 249610 - DNA, 930 bp, Artificial Sequence
  derived and/or modified sequence
atgcacggcaataagcaacacctccagaaagacttcttcctttataacgcctctaaagcccgtagtaaaacctatattaacatgagggaagtgagtcagcggtttcggttgcccccttcagagtatgtcatcgtccccagcacttacgagcctcaccaggagggagaatttatactgcgcgtgttttcagaaaaaagaaacctgtcagaagaagtggagaacacaatatcagtcgatcgccctgtcaaaaaaaagaaaaccaagccaatcatctttgtgagcgatcgagccaattccaacaaagaactcggcgttgaccaagagtcagaggagggaaaggggaagacgtccccggacaaacagaagcaaagccctcagcctcagcccggctccagcgaccaagaatcagaggaacaacagcaattccgcaacatctttaagcaaattgccggggatgatatggaaatctgcgcggatgagttgaaaaaagtgctaaatacagtggtgaacaaacataaagatctcaagacccacggatttaccctggagagttgccgctccatgattgcgctgatggatacagacggctcgggtaagttgaacctccaggaattccatcacttgtggaataaaataaaagcatggcaaaagatcttcaaacattatgataccgatcagtctggtactattaactcttatgaaatgcgaaacgccgtgaatgacgccggctttcacctgaacaatcagttatacgatataattaccatgaggtacgctgacaagcacatgaatatagacttcgattcttttatttgctgttttgtccggctagaaggcatgtttagagctttccacgcatttgataaggatggtgatgggattattaagctgaacgtcctggaatggctgcagctgactatgtatgcctag

SEQ ID NO: 249611 - DNA, 930 bp, Artificial Sequence
  derived and/or modified sequence
atgcacggcaacaagcagcacctgcagaaggacttcttcctgtacaatgccagcaaggcccggagcaagacctacatcaacatgagggaggtgtcccagcgcttccggctgcccccatctgaatatgtgattgtgcccagcacctatgagccccaccaggagggggagttcatcctgcgggtcttcagcgagaagaggaacctgtctgaggaggtggagaacaccatctctgtggacaggcctgtgaggaaggagacctacaagcccatcatctttgtgtctgaccgggccaacagcaacaaggagctgggcgtggaccaggagagcgaggagggcaagggcaagaccagcccagacaagcagaagcagagcccccagccccagcccggcagcagtgaccaggagagcgaggagcagcagcagttcaggaacatcttcaagcagattgctggagatgacatggagatctgtgctgatgagctgaagaaggtgctgaacacagtggtgaacaagcacaaggacctgaagacccacggcttcaccctggagagctgccgctccatgattgccctgatggacacagatggcagcggcaagctgaacctgcaggagttccaccacctgtggaacaagatcaaggcctggcagaagatcttcaagcactatgacacagaccagagcggcaccatcaacagctatgagatgagaaatgctgtgaatgatgctggcttccacctgaacaaccagctgtatgacatcatcaccatgagatatgctgacaagcacatgaacatcgactttgacagcttcatctgctgctttgtgcggctggagggcatgttccgggccttccacgcctttgacaaggatggagatggcatcatcaagctgaatgtgctggagtggctgcagctgaccatgtatgcctag

SEQ ID NO: 249612 - DNA, 930 bp, Artificial Sequence
  derived and/or modified sequence
atgcacggcaacaagcagcacctgcagaaggacttcttcctgtacaatgccagcaaggcccggagcaagacctacatcaacatgagggaggtgtcccagcgcttccggctgcccccatctgaatatgtgattgtgcccagcacctatgagccccaccaggagggggagttcatcctgcgggtcttcagcgagaagaggaacctgtctgaggaggtggagaacaccatctctgtggacaggcctgtgaagaagaagaagaccaagcccatcatctttgtgtctgaccgggccaacagcaacaaggagctgggcgtggaccaggagagcgaggagggcaagggcaagaccagcccagacaagcagaagcagagcccccagccccagcccggcagcagtgaccaggagagcgaggagcagcagcagttcaggaacatcttcaagcagattgctggagatgacatggagatctgtgctgatgagctgaagaaggtgctgaacacagtggtgaacaagcacaaggacctgaagacccacggcttcaccctggagagctgccgctccatgattgccctgatggacacagatggcagcggcaagctgaacctgcaggagttccaccacctgtggaacaagatcaaggcctggcagaagatcttcaagcactatgacacagaccagagcggcaccatcaacagctatgagatgagaaatgctgtgaatgatgctggcttccacctgaacaaccagctgtatgacatcatcaccatgagatatgctgacaagcacatgaacatcgactttgacagcttcatctgctgctttgtgcggctggagggcatgttccgggccttccacgcctttgacaaggatggagatggcatcatcaagctgaatgtgctggagtggctgcagctgaccatgtatgcctag

SEQ ID NO: 249613 - DNA, 930 bp, Artificial Sequence
  derived and/or modified sequence
atgcacggcaacaagcagcacctgcagaaggacttcttcctgtacaatgcaagtaaagccagatctaagacgtatattaatatgagagaggtgtcacagcgcttcagactgcccccatctgaatacgtaatcgtgcctagtacgtatgagccccatcaggagggggaatttatactgagagtgttttcagaaaaacggaacctgagtgaagaggtggaaaataccatcagcgttgatagaccagtgcgaaaggagacctacaagcctatcatcttcgtgtccgaccgggccaactcaaacaaagaactcggagtcgatcaagagtccgaggaggggaaaggcaagacatcaccagataaacaaaagcagagcccccaaccacagccaggctcatccgatcaggaaagcgaagaacagcagcagtttaggaacattttcaagcaaattgcaggagatgacatggaaatctgcgccgatgagcttaagaaggtgcttaatactgtggtgaataagcataaagacctgaagacccatggatttactctggagtcctgccgatcaatgatagcgctgatggacacggacggctctgggaagctcaacctgcaggaatttcaccacctgtggaataaaattaaggcctggcagaagatctttaaacactacgacaccgaccaatccggcactataaatagttacgaaatgagaaatgcggttaacgacgccggattccatcttaacaatcagctgtacgacattatcaccatgcgatatgctgacaagcacatgaacattgatttcgactccttcatttgttgcttcgtccggttggagggaatgtttagagcctttcatgcctttgacaaggacggggacggcattattaagctgaacgtgttggagtggctccagcttacaatgtacgcttag

SEQ ID NO: 249614 - DNA, 930 bp, Artificial Sequence
  derived and/or modified sequence
atgcacggcaacaagcagcacctgcagaaggacttcttcctgtacaatgcaagcaaggcaaggtctaaaacatacatcaacatgcgcgaggtatcccaacggttccgattgccccccagtgaatatgtcattgtgccctccacatacgaaccacaccaggaaggtgagttcattttgagggtgttttctgagaagaggaacctctcggaagaagtggaaaacaccatctccgtagataggccagtgaagaaaaagaagaccaagccgataattttcgtgagcgaccgtgcgaacagcaacaaggagctgggggttgatcaggagagcgaggagggcaagggcaaaacgagccccgataagcagaagcagagcccacagccgcagcctggttcatcagatcaggaatcagaggagcagcagcagttccggaacatttttaagcagattgcaggtgatgacatggaaatttgcgcagacgaactgaagaaggttctcaatacagtggtgaataagcataaggacctcaaaacccacgggtttacgttagaatcgtgccgttcaatgatagctctgatggataccgatggcagtggaaagttgaatctgcaagaattccatcatttgtggaataaaatcaaggcctggcagaaaatttttaagcactacgataccgatcagtccggcaccatcaatagctatgagatgaggaatgctgttaacgatgcaggattccacttgaacaaccaactgtacgatattatcaccatgcgatatgctgataagcatatgaatattgacttcgactcattcatttgttgttttgttcgcctggagggcatgtttagagcatttcacgcctttgataaagatggcgatggaatcataaagttgaacgtgttagagtggctgcaactgacgatgtatgcttag

SEQ ID NO: 249615 - DNA, 930 bp, Artificial Sequence
  derived and/or modified sequence
atgcacggtaacaagcagcatctgcagaaggatttctttctgtacaacgctagcaaagctagaagcaaaacttacataaacatgagagaagtatcccaaaggtttaggttgcctccttcagagtatgtgatcgtgcccagtacatacgagccacaccaagagggggagttcattcttagagtcttctccgaaaaacgcaatctgagtgaggaagtggaaaacactatttctgtcgacagacccgtccggaaggagacctataagcccatcattttcgtgtctgacagagcaaactctaacaaggagttgggagtcgatcaggaaagcgaagagggcaaggggaagactagccctgacaaacagaaacagtctccccagcctcagccagggagctctgaccaggagagcgaggagcagcagcaatttcgcaacatatttaaacagatcgcgggtgatgacatggagatctgtgccgatgagctcaagaaagtgttaaacaccgtggtcaacaaacataaagatctcaaaacccacgggtttacgctcgaatcctgtaggtcaatgatcgctctcatggacactgacggcagcggcaaattaaaccttcaagaattccatcatctgtggaacaaaatcaaggcttggcagaaaatcttcaagcattacgacactgatcagagcggcacaatcaattcttacgagatgcgcaacgctgtgaatgacgctggattccacctgaataatcagttatatgatattatcacaatgcggtatgccgacaaacacatgaatatcgacttcgattccttcatttgttgtttcgtgagactggaggggatgtttcgggcatttcacgctttcgataaggacggagacggcataatcaaactaaatgtgcttgaatggctccagctgaccatgtacgcatag

SEQ ID NO: 249616 - DNA, 930 bp, Artificial Sequence
  derived and/or modified sequence
atgcacgggaataaacagcaccttcaaaaggacttcttcctgtataatgcctccaaagccaggtccaaaacctacatcaacatgcgcgaggtctctcaacgctttcggctaccgccaagtgaatacgtgattgtgccttcaacttatgaaccccatcaggaaggggaatttatcctccgcgtatttagtgagaagaggaacctgtccgaggaggtcgagaacactatttctgttgacaggcctgttaagaaaaaaaaaaccaaacccatcatcttcgtctcggatagagctaactccaataaagagctgggtgtagaccaagagagtgaggagggaaaggggaaaacaagtcccgataaacagaagcaaagcccgcaacctcagccgggttcatcggatcaggagtcggaagagcaacagcaatttcgaaatatatttaaacagattgcaggagacgacatggaaatctgcgccgacgagcttaaaaaggtacttaatactgtagtgaataaacataaggacctcaagactcacggttttaccttggagtcttgccggagcatgattgcccttatggacacagacgggagtggtaaacttaacctccaggaattccatcatctttggaataagataaaagcctggcagaagatatttaagcactacgacacagaccaatccggaaccattaattcatacgaaatgaggaacgctgtaaatgatgctggctttcacctgaataatcagctatacgacatcatcaccatgcgttatgccgataaacatatgaacattgactttgatagtttcatctgctgttttgttagactcgaggggatgttcagggccttccacgccttcgataaagacggggacggcataataaagctcaatgtcctggagtggttacagctgacgatgtatgcttag

SEQ ID NO: 249617 - DNA, 927 bp, Artificial Sequence
  derived and/or modified sequence
atgcacggcaacaagcagcacctgcagaaggacttcttcctgtacaacgccagcaaggcccgcagcaagacctacatcaacatgcgcgaggtgagccagcgcttccgcctgccccccagcgagtacgtgatcgtgcccagcacctacgagccccaccaggagggcgagttcatcctgcgcgtgttcagcgagaagcgcaacctgagcgaggaggtggagaacaccatcagcgtggaccgccccgtgaagaagaagaagaccaagcccatcatcttcgtgagcgaccgcgccaacagcaacaaggagctgggcgtggaccaggagagcgaggagggcaagggcaagaccagccccgacaagcagaagcagagcccccagccccagcccggcagcagcgaccaggagagcgaggagcagcagcagttccgcaacatcttcaagcagatcgccggcgacgacatggagatctgcgccgacgagctgaagaaggtgctgaacaccgtggtgaacaagcacaaggacctgaagacccacggcttcaccctggagagctgccgcagcatgatcgccctgatggacaccgacggcagcggcaagctgaacctgcaggagttccaccacctgtggaacaagatcaaggcctggcagaagatcttcaagcactacgacaccgaccagagcggcaccatcaacagctacgagatgcgcaacgccgtgaacgacgccggcttccacctgaacaaccagctgtacgacatcatcaccatgcgctacgccgacaagcacatgaacatcgacttcgacagcttcatctgctgcttcgtgcgcctggagggcatgttccgcgccttccacgccttcgacaaggacggcgacggcatcatcaagctgaacgtgctggagtggctgcagctgaccatgtacgcc

SEQ ID NO: 249618 - DNA, 1271 bp, Artificial Sequence
  derived and/or modified sequence
cataatcctgaccctgagccagtgccaggtctccaagtgccttctgaatgaccacaggcgattggttttagtggtaggtgtgtggggatctgttctggtcatctggatgctggtcatcggtgtgcagtattgatcaggacctgcaaacccaaaagcttatgggagctggcacgtcacccacagcctggcagctctgatcaggaaagtgaggaacagcaacaattccggaacattttcaagcagatagcaggagatgacatggagatctgtgcagatgagctcaagaaggtccttaacacagtcgtgaacaaacacaaggacctgaagacacacgggttcacactggagtcctgccgtagcatgattgcgctcatggatacagatggctctggaaagctcaacctgcaggagttccaccacctctggaacaagattaaggcctggcagaaaattttcaaacactatgacacagaccagtccggcaccatcaacagctacgagatgcgaaatgcagtcaacgacgcaggattccacctcaacaaccagctctatgacatcattaccatgcggtacgcagacaaacacatgaacatcgactttgacagtttcatctgctgcttcgttaggctggagggcatgttcagagcttttcatgcatttgacaaggatggagatggtatcatcaagctcaacgttctggagtggctgcagctcaccatgtatgcctgaaccaggctggcctcatccaaagccatgcaggatcactcaggatttcagtttcaccctctatttccaaagccatttacctcaaaggacccagcagctacacccctacaggcttccaggcacctcatcagtcatgctcctcctccattttaccccctacccatccttgatcggtcatgcctagcctgaccctttagtaaagcaatgaggtaggaagaacaaacccttgtccctttgccatgtggaggaaagtgcctgcctctggtccgagccgcctcggttctgaagcgagtgctcctgcttaccttgctctaggctgtctgcagaagcacctgccggtggcactcagcacctccttgtgctagagccctccatcaccttcacgctgtcccaccatgggccaggaaccaaaccagcactgggttctactgctgtggggtaaactaactcagtggaatagggctggttactttgggctgtccaactcataagtttggctgcattttgaaaaaagctgatctaaataaaggcatgtgtatggctgg

SEQ ID NO: 249619 - DNA, 1643 bp, Artificial Sequence
  derived and/or modified sequence
ccctcctccacgcttacagccacacacacagtcacacagacgcgttctgagggtggctgcccgcttgggatggaggaatcacttccctcagaacccagccaagtcctctaggcctccttgggggtccttccagcctgaggggcttcggagctgaggagcagctgttctgatgcacgggaacaagcagcacctgcagaaggacttcttcctgtacaacgcctccaaggccaggagcaaaacctacatcaacatgcgggaggtgtcccagcgcttccgcctgcctcccagcgagtacgtcatcgtgccctccacctacgagccccaccaggagggggaattcatcctccgggtcttctctgaaaagaggaacctctctgaggaagttgaaaataccatctccgtggatcggccagtgaaaaagaaaaaaaccaagcccatcatcttcgtttcggacagagcaaacagcaacaaggagctgggtgtggaccaggagtcagaggagggcaaaggcaaaacaagccctgataagcaaaagcagtccccacagccacagcctggcagctctgatcaggaaagtgaggaacagcaacaattccggaacattttcaagcagatagcaggagatgacatggagatctgtgcagatgagctcaagaaggtccttaacacagtcgtgaacaaacacaaggacctgaagacacacgggttcacactggagtcctgccgtagcatgattgcgctcatggatacagatggctctggaaagctcaacctgcaggagttccaccacctctggaacaagattaaggcctggcagaaaattttcaaacactatgacacagaccagtccggcaccatcaacagctacgagatgcgaaatgcagtcaacgacgcaggattccacctcaacaaccagctctatgacatcattaccatgcggtacgcagacaaacacatgaacatcgactttgacagtttcatctgctgcttcgttaggctggagggcatgttcagagcttttcatgcatttgacaaggatggagatggtatcatcaagctcaacgttctggagtggctgcagctcaccatgtatgcctgaaccaggctggcctcatccaaagccatgcaggatcactcaggatttcagtttcaccctctatttccaaagccatttacctcaaaggacccagcagctacacccctacaggcttccaggcacctcatcagtcatgctcctcctccattttaccccctacccatccttgatcggtcatgcctagcctgaccctttagtaaagcaatgaggtaggaagaacaaacccttgtccctttgccatgtggaggaaagtgcctgcctctggtccgagccgcctcggttctgaagcgagtgctcctgcttaccttgctctaggctgtctgcagaagcacctgccggtggcactcagcacctccttgtgctagagccctccatcaccttcacgctgtcccaccatgggccaggaaccaaaccagcactgggttctactgctgtggggtaaactaactcagtggaatagggctggttactttgggctgtccaactcataagtttggctgcattttgaaaaaagctgatctaaataaaggcatgtgtatggctggtc

SEQ ID NO: 249620 - DNA, 1291 bp, Artificial Sequence
  derived and/or modified sequence
cataatcctgaccctgagccagtgccaggtctccaagtgccttctgaatgaccacaggcgattggttttagtggtaggtgtgtggggatctgttctggtcatctggatgctggtcatcggtgtgcagtattgatcaggacctgcaaacccaaaagcttatgggagctggcacgtcacaaaaagaaaaaaaccaagccacagcctggcagctctgatcaggaaagtgaggaacagcaacaattccggaacattttcaagcagatagcaggagatgacatggagatctgtgcagatgagctcaagaaggtccttaacacagtcgtgaacaaacacaaggacctgaagacacacgggttcacactggagtcctgccgtagcatgattgcgctcatggatacagatggctctggaaagctcaacctgcaggagttccaccacctctggaacaagattaaggcctggcagaaaattttcaaacactatgacacagaccagtccggcaccatcaacagctacgagatgcgaaatgcagtcaacgacgcaggattccacctcaacaaccagctctatgacatcattaccatgcggtacgcagacaaacacatgaacatcgactttgacagtttcatctgctgcttcgttaggctggagggcatgttcagagcttttcatgcatttgacaaggatggagatggtatcatcaagctcaacgttctggagtggctgcagctcaccatgtatgcctgaaccaggctggcctcatccaaagccatgcaggatcactcaggatttcagtttcaccctctatttccaaagccatttacctcaaaggacccagcagctacacccctacaggcttccaggcacctcatcagtcatgctcctcctccattttaccccctacccatccttgatcggtcatgcctagcctgaccctttagtaaagcaatgaggtaggaagaacaaacccttgtccctttgccatgtggaggaaagtgcctgcctctggtccgagccgcctcggttctgaagcgagtgctcctgcttaccttgctctaggctgtctgcagaagcacctgccggtggcactcagcacctccttgtgctagagccctccatcaccttcacgctgtcccaccatgggccaggaaccaaaccagcactgggttctactgctgtggggtaaactaactcagtggaatagggctggttactttgggctgtccaactcataagtttggctgcattttgaaaaaagctgatctaaataaaggcatgtgtatggctggtc

SEQ ID NO: 249621 - DNA, 930 bp, Artificial Sequence
  derived and/or modified sequence
atgcacggcaacaagcagcacctgcagaaggacttcttcctgtacaacgccagcaaggccagaagcaagacctacatcaacatgagagaggtgagccagagattcagactgccccccagcgagtacgtgatcgtgcccagcacctacgagccccaccaggagggcgagttcatcctgagagtgttcagcgagaagagaaacctgagcgaggaggtggagaacaccatcagcgtggacagacccgtgagaaaggagacctacaagcccatcatcttcgtgagcgacagagccaacagcaacaaggagctgggcgtggaccaggagagcgaggagggcaagggcaagaccagccccgacaagcagaagcagagcccccagccccagcccggcagcagcgaccaggagagcgaggagcagcagcagttcagaaacatcttcaagcagatcgccggcgacgacatggagatctgcgccgacgagctgaagaaggtgctgaacaccgtggtgaacaagcacaaggacctgaagacccacggcttcaccctggagagctgcagaagcatgatcgccctgatggacaccgacggcagcggcaagctgaacctgcaggagttccaccacctgtggaacaagatcaaggcctggcagaagatcttcaagcactacgacaccgaccagagcggcaccatcaacagctacgagatgagaaacgccgtgaacgacgccggcttccacctgaacaaccagctgtacgacatcatcaccatgagatacgccgacaagcacatgaacatcgacttcgacagcttcatctgctgcttcgtgagactggagggcatgttcagagccttccacgccttcgacaaggacggcgacggcatcatcaagctgaacgtgctggagtggctgcagctgaccatgtacgcctag

SEQ ID NO: 249622 - DNA, 930 bp, Artificial Sequence
  derived and/or modified sequence
atgcacggcaacaagcagcacctgcagaaggacttcttcctgtacaacgccagcaaggccagaagcaagacctacatcaacatgagagaggtgagccagagattcagactgccccccagcgagtacgtgatcgtgcccagcacctacgagccccaccaggagggcgagttcatcctgagagtgttcagcgagaagagaaacctgagcgaggaggtggagaacaccatcagcgtggacagacccgtgaagaagaagaagaccaagcccatcatcttcgtgagcgacagagccaacagcaacaaggagctgggcgtggaccaggagagcgaggagggcaagggcaagaccagccccgacaagcagaagcagagcccccagccccagcccggcagcagcgaccaggagagcgaggagcagcagcagttcagaaacatcttcaagcagatcgccggcgacgacatggagatctgcgccgacgagctgaagaaggtgctgaacaccgtggtgaacaagcacaaggacctgaagacccacggcttcaccctggagagctgcagaagcatgatcgccctgatggacaccgacggcagcggcaagctgaacctgcaggagttccaccacctgtggaacaagatcaaggcctggcagaagatcttcaagcactacgacaccgaccagagcggcaccatcaacagctacgagatgagaaacgccgtgaacgacgccggcttccacctgaacaaccagctgtacgacatcatcaccatgagatacgccgacaagcacatgaacatcgacttcgacagcttcatctgctgcttcgtgagactggagggcatgttcagagccttccacgccttcgacaaggacggcgacggcatcatcaagctgaacgtgctggagtggctgcagctgaccatgtacgcctag

SEQ ID NO: 249623 - DNA, 471 bp, Artificial Sequence
  derived and/or modified sequence
atggagatttgtgccgatgagctgaagaaagttctcaatacagtcgtaaacaaacataaagacctcaaaacacatgggttcacgctggagtcatgccggagcatgatagcgctaatggacacagacggctctggaaagcttaacttacaagagttccatcacctgtggaataaaatcaaagcttggcagaaaatttttaagcactacgataccgaccagtccggcacgatcaattcttatgaaatgcggaacgctgtaaacgacgccgggtttcatctcaacaatcagttatacgacatcattacaatgagatatgcagataagcatatgaacatcgacttcgactccttcatttgttgctttgtgcggctcgaaggaatgtttcgcgcatttcatgccttcgataaggatggagatggaatcatcaagctgaatgttttggagtggttgcagctgacgatgtatgcgtag

SEQ ID NO: 249624 - DNA, 471 bp, Artificial Sequence
  derived and/or modified sequence
atggagatatgtgccgacgaacttaagaaagtgctgaacacagtagtgaacaagcacaaagacctcaagacacacgggtttacccttgaaagttgccggtcaatgatagctctgatggatacagatgggagtggcaagctgaatctccaggagttccaccacctgtggaacaaaatcaaagcatggcagaaaattttcaagcattacgacacggatcagagtggcactataaattcttatgaaatgaggaatgcggtgaatgatgcaggcttccatctcaataaccaactctacgatataatcaccatgagatatgctgacaaacatatgaacatagatttcgactccttcatttgttgtttcgtgaggctcgaagggatgtttagggccttccacgcctttgataaggacggggacggaattattaaactgaacgtcctggagtggctccagttgacaatgtacgcctag

SEQ ID NO: 249625 - DNA, 471 bp, Artificial Sequence
  derived and/or modified sequence
atggagatctgtgctgatgagctgaagaaggtgctgaacacagtggtgaacaagcacaaggacctgaagacccacggcttcaccctggagagctgccgctccatgattgccctgatggacacagatggcagcggcaagctgaacctgcaggagttccaccacctgtggaacaagatcaaggcctggcagaagatcttcaagcactatgacacagaccagagcggcaccatcaacagctatgagatgagaaatgctgtgaatgatgctggcttccacctgaacaaccagctgtatgacatcatcaccatgagatatgctgacaagcacatgaacatcgactttgacagcttcatctgctgctttgtgcggctggagggcatgttccgggccttccacgcctttgacaaggatggagatggcatcatcaagctgaatgtgctggagtggctgcagctgaccatgtatgcctag

SEQ ID NO: 249626 - DNA, 471 bp, Artificial Sequence
  derived and/or modified sequence
atggagatctgcgccgacgagctgaagaaggtgctgaacaccgtggtgaataagcacaaggatctgaagactcatggctttacgctggagagctgtcggagcatgattgccctcatggacactgacggcagcggaaagctgaatctgcaggaattccatcacctatggaataaaatcaaagcgtggcagaaaattttcaagcactatgatacggaccaaagcggtacaatcaactcctacgagatgaggaacgccgtgaacgatgcaggattccacctgaataaccagctttatgatattatcacgatgcggtatgctgacaaacacatgaacatcgactttgattcattcatatgctgttttgtgcgccttgaaggaatgtttagagcattccatgcttttgacaaggatggggatggcattatcaagctgaatgtgctggaatggttgcagctgaccatgtatgcctag

SEQ ID NO: 249627 - DNA, 471 bp, Artificial Sequence
  derived and/or modified sequence
atggagatctgcgccgacgagctgaagaaggtgctgaacaccgtggtgaacaagcacaaagacctgaagactcatggcttcacactggagtcatgccggagcatgattgctttaatggacacagacggttctgggaaactgaatctgcaggaattccatcacctttggaacaagatcaaggcttggcaaaaaattttcaaacactacgacactgatcagagcggcacaatcaattcttacgaaatgcggaacgccgtgaatgacgctggattccacctcaacaaccaattgtacgacatcattacaatgaggtatgctgacaaacacatgaacatagatttcgatagctttatctgctgctttgtaaggctggaaggcatgtttagagccttccacgcctttgacaaagatggcgacggtatcatcaaactaaatgtcctcgagtggctacagctcaccatgtacgcatag

SEQ ID NO: 249628 - DNA, 471 bp, Artificial Sequence
  derived and/or modified sequence
atggagatttgcgccgacgagttgaagaaggtccttaacacagtcgtcaataagcacaaggacctgaagacccacgggttcaccctggaatcatgtagatctatgatcgcgctgatggacactgatggatcagggaagctaaaccttcaagagttccaccatctatggaataagattaaagcatggcagaagatcttcaaacattacgacacggaccaatccgggactattaattcatacgagatgcgcaacgccgttaacgatgctggctttcatttaaacaatcagctgtacgacatcataactatgcggtacgcagataagcatatgaacattgactttgattcattcatctgttgcttcgtgagactggaaggaatgtttcgagctttccacgcgtttgataaagacggagacggaatcatcaagctaaacgtgctggaatggctacagttgacaatgtatgcctag

SEQ ID NO: 249629 - DNA, 471 bp, Artificial Sequence
  derived and/or modified sequence
atggagatttgtgcggacgagctgaaaaaagtgctgaacacggtagtcaacaagcataaagatctgaagacccatggttttaccctggagtcttgtcggtccatgattgctcttatggacaccgacggatccggcaagctcaacctgcaagagttccaccatctatggaacaaaattaaagcctggcagaagatatttaagcactacgacactgatcagtccggaaccatcaattcatacgagatgaggaacgctgtgaatgatgctgggtttcatttgaacaaccagctttacgacatcattaccatgcggtacgccgacaagcatatgaacattgacttcgatagctttatttgttgctttgtccgcctcgagggcatgttcagagcctttcatgcctttgataaggacggcgatggcatcatcaaacttaatgtgcttgagtggctccagttgaccatgtacgcctag

SEQ ID NO: 249630 - DNA, 468 bp, Artificial Sequence
  derived and/or modified sequence
atggagatctgcgccgacgagctgaagaaggtgctgaacaccgtggtgaacaagcacaaggacctgaagacccacggcttcaccctggagagctgccgcagcatgatcgccctgatggacaccgacggcagcggcaagctgaacctgcaggagttccaccacctgtggaacaagatcaaggcctggcagaagatcttcaagcactacgacaccgaccagagcggcaccatcaacagctacgagatgcgcaacgccgtgaacgacgccggcttccacctgaacaaccagctgtacgacatcatcaccatgcgctacgccgacaagcacatgaacatcgacttcgacagcttcatctgctgcttcgtgcgcctggagggcatgttccgcgccttccacgccttcgacaaggacggcgacggcatcatcaagctgaacgtgctggagtggctgcagctgaccatgtacgcc

SEQ ID NO: 249631 - DNA, 471 bp, Artificial Sequence
  derived and/or modified sequence
atggagatctgcgccgacgagctgaagaaggtgctgaacaccgtggtgaacaagcacaaggacctgaagacccacggcttcaccctggagagctgcagaagcatgatcgccctgatggacaccgacggcagcggcaagctgaacctgcaggagttccaccacctgtggaacaagatcaaggcctggcagaagatcttcaagcactacgacaccgaccagagcggcaccatcaacagctacgagatgagaaacgccgtgaacgacgccggcttccacctgaacaaccagctgtacgacatcatcaccatgagatacgccgacaagcacatgaacatcgacttcgacagcttcatctgctgcttcgtgagactggagggcatgttcagagccttccacgccttcgacaaggacggcgacggcatcatcaagctgaacgtgctggagtggctgcagctgaccatgtacgcctag

SEQ ID NO: 249632 - protein, 925 aa, Artificial Sequence
  derived and/or modified sequence
MNAPERQPQPDGGDAPGHEPGGSPQDELDFSILFDYEYLNPNEEEPNAHKVASPPSGPAYPDDVLDYGLKPYSPLASLSGEPPGRFGEPDRVGPQKFLSAAKPAGASGLSPRIEITPSHELIQAVGPLRMRDAGLLVEQPPLAGVAASPRFTLPVPGFEGYREPLCLSPASSGSSASFISDTFSPYTSPCVSPNNGGPDDLCPQFQNIPAHYSPRTSPIMSPRTSLAEDSCLGRHSPVPRPASRSSSPGAKRRHSCAEALVALPPGASPQRSRSPSPQPSSHVAPQDHGSPAGYPPVAGSAVIMDALNSLATDSPCGIPPKMWKTSPDPSPVSAAPSKAGLPRHIYPAVEFLGPCEQGERRNSAPESILLVPPTWPKPLVPAIPICSIPVTASLPPLEWPLSSQSGSYELRIEVQPKPHHRAHYETEGSRGAVKAPTGGHPVVQLHGYMENKPLGLQIFIGTADERILKPHAFYQVHRITGKTVTTTSYEKIVGNTKVLEIPLEPKNNMRATIDCAGILKLRNADIELRKGETDIGRKNTRVRLVFRVHIPESSGRIVSLQTASNPIECSQRSAHELPMVERQDTDSCLVYGGQQMILTGQNFTSESKVVFTEKTTDGQQIWEMEATVDKDKSQPNMLFVEIPEYRNKHIRTPVKVNFYVINGKRKRSQPQHFTYHPVPAIKTEPTDEYDPTLICSPTHGGLGSQPYYPQHPMVAESPSCLVATMAPCQQFRTGLSSPDARYQQQNPAAVLYQRSKSLSPSLLGYQQPALMAAPLSLADAHRSVLVHAGSQGQSSALLHPSPTNQQASPVIHYSPTNQQLRCGSHQEFQHIMYCENFAPGTTRPGPPPVSQGQRLSPGSYPTVIQQQNATSQRAAKNGPPVSDQKEVLPAGVTIKQEQNLDQTYLDDVNEIIRKEFSGPPARNQT

SEQ ID NO: 249633 - DNA, 2778 bp, Artificial Sequence
  derived and/or modified sequence
atgaacgcccccgagagacagccccagcccgacggcggcgacgcccccggccacgagcccggcggcagcccccaggacgagctggacttcagcatcctgttcgactacgagtacctgaaccccaacgaggaggagcccaacgcccacaaggtggccagcccccccagcggccccgcctaccccgacgacgtgctggactacggcctgaagccctacagccccctggccagcctgagcggcgagccccccggcagattcggcgagcccgacagagtgggcccccagaagttcctgagcgccgccaagcccgccggcgccagcggcctgagccccagaatcgagatcacccccagccacgagctgatccaggccgtgggccccctgagaatgagagacgccggcctgctggtggagcagccccccctggccggcgtggccgccagccccagattcaccctgcccgtgcccggcttcgagggctacagagagcccctgtgcctgagccccgccagcagcggcagcagcgccagcttcatcagcgacaccttcagcccctacaccagcccctgcgtgagccccaacaacggcggccccgacgacctgtgcccccagttccagaacatccccgcccactacagccccagaaccagccccatcatgagccccagaaccagcctggccgaggacagctgcctgggcagacacagccccgtgcccagacccgccagcagaagcagcagccccggcgccaagagaagacacagctgcgccgaggccctggtggccctgccccccggcgccagcccccagagaagcagaagccccagcccccagcccagcagccacgtggccccccaggaccacggcagccccgccggctacccccccgtggccggcagcgccgtgatcatggacgccctgaacagcctggccaccgacagcccctgcggcatcccccccaagatgtggaagaccagccccgaccccagccccgtgagcgccgcccccagcaaggccggcctgcccagacacatctaccccgccgtggagttcctgggcccctgcgagcagggcgagagaagaaacagcgcccccgagagcatcctgctggtgccccccacctggcccaagcccctggtgcccgccatccccatctgcagcatccccgtgaccgccagcctgccccccctggagtggcccctgagcagccagagcggcagctacgagctgagaatcgaggtgcagcccaagccccaccacagagcccactacgagaccgagggcagcagaggcgccgtgaaggcccccaccggcggccaccccgtggtgcagctgcacggctacatggagaacaagcccctgggcctgcagatcttcatcggcaccgccgacgagagaatcctgaagccccacgccttctaccaggtgcacagaatcaccggcaagaccgtgaccaccaccagctacgagaagatcgtgggcaacaccaaggtgctggagatccccctggagcccaagaacaacatgagagccaccatcgactgcgccggcatcctgaagctgagaaacgccgacatcgagctgagaaagggcgagaccgacatcggcagaaagaacaccagagtgagactggtgttcagagtgcacatccccgagagcagcggcagaatcgtgagcctgcagaccgccagcaaccccatcgagtgcagccagagaagcgcccacgagctgcccatggtggagagacaggacaccgacagctgcctggtgtacggcggccagcagatgatcctgaccggccagaacttcaccagcgagagcaaggtggtgttcaccgagaagaccaccgacggccagcagatctgggagatggaggccaccgtggacaaggacaagagccagcccaacatgctgttcgtggagatccccgagtacagaaacaagcacatcagaacccccgtgaaggtgaacttctacgtgatcaacggcaagagaaagagaagccagccccagcacttcacctaccaccccgtgcccgccatcaagaccgagcccaccgacgagtacgaccccaccctgatctgcagccccacccacggcggcctgggcagccagccctactacccccagcaccccatggtggccgagagccccagctgcctggtggccaccatggccccctgccagcagttcagaaccggcctgagcagccccgacgccagataccagcagcagaaccccgccgccgtgctgtaccagagaagcaagagcctgagccccagcctgctgggctaccagcagcccgccctgatggccgcccccctgagcctggccgacgcccacagaagcgtgctggtgcacgccggcagccagggccagagcagcgccctgctgcaccccagccccaccaaccagcaggccagccccgtgatccactacagccccaccaaccagcagctgagatgcggcagccaccaggagttccagcacatcatgtactgcgagaacttcgcccccggcaccaccagacccggccccccccccgtgagccagggccagagactgagccccggcagctaccccaccgtgatccagcagcagaacgccaccagccagagagccgccaagaacggcccccccgtgagcgaccagaaggaggtgctgcccgccggcgtgaccatcaagcaggagcagaacctggaccagacctacctggacgacgtgaacgagatcatcagaaaggagttcagcggcccccccgccagaaaccagacctag

SEQ ID NO: 249634 - DNA, 2778 bp, Artificial Sequence
  derived and/or modified sequence
atgaacgctccggagagacaaccacaacccgacggcggggacgctccaggacatgagcccgggggttccccacaggacgagttggatttctctatattgtttgactacgagtaccttaatcccaacgaagaggagcccaacgcccataaggtggcttctccaccatcagggcctgcctatcccgacgatgtgttagactatggactgaaaccatacagccccctcgcctctctgagcggggaaccccctggtaggttcggcgagcccgatagggtcggtcctcagaaatttctgagtgcggcaaaaccggccggagccagtggtctgagcccaaggattgagattacaccttctcacgaactgatacaagcagtgggccctctacgcatgcgggacgcggggctgctggtagaacagccacctctggccggggttgccgcctccccacgctttactctgcccgttcctggattcgaggggtacagagagccattatgcctgtccccagcgtcatctggaagcagtgcctccttcatttcagacaccttctccccatacacatcaccttgcgtctctcctaacaacggcggacccgatgatctttgtccccagtttcaaaacatcccagcacactactcacccagaacgtctcctataatgtccccaaggacttctcttgccgaggacagttgcctcgggcggcactcacccgtcccccgccccgcctcccgctcaagtagcccgggggcgaaaagacgtcacagctgcgctgaggctctggtcgccctgccacctggtgcaagccctcagaggtctcggtctcccagccctcagcctagctctcacgtcgctccacaggatcatggctctccagccgggtaccctcccgtggcagggtcagcagtcatcatggatgccctgaattccctggctacagattcaccatgcgggattccacctaagatgtggaagacctcccctgacccaagccctgtgagtgctgcccctagcaaagcgggcctccctcggcatatataccctgcagtagagtttctgggaccgtgcgaacagggggagcgccggaactctgctcctgagtccatcttactggtacctcccacatggcccaagcccctggtgcccgccattcctatctgtagtattcctgttacagcatctctgccgcctttggagtggcccctgtcatcccagagcgggtcatacgaactgaggatagaagttcagcctaaaccgcaccaccgggcacactacgaaacggagggatcacggggtgccgtcaaagctccgactgggggtcatcccgtggtacagttgcatggctacatggagaacaaaccactgggcctgcaaattttcataggtactgctgatgaaagaattctgaaacctcacgccttctaccaagtccacaggatcaccggcaagaccgttacaaccacaagctatgaaaaaatcgtgggcaacacgaaggtgttagaaatcccgttagaacccaagaacaacatgagggctaccatcgactgcgcgggcatactgaaactcaggaacgcagatattgaactaaggaagggcgagaccgatattggcagaaagaatacgcgagtgagactggtgtttcgggttcacatccctgaatcttccgggagaatagtttcactccagactgcatccaatccaattgagtgctcacagcgatccgctcatgagctgcccatggtcgaacggcaggacaccgactcgtgtctcgtgtatggcggccagcagatgatactaacagggcaaaactttacctcagagagcaaggttgtctttacagagaagaccacggacggccaacagatttgggaaatggaggccacagttgataaggataagtcccagcccaacatgctgtttgtcgagattcccgaatatcgaaacaagcatatacgaacaccagtgaaagtgaacttctacgttattaacggaaagagaaagcgctctcagcctcagcatttcacatatcaccccgtgccagctattaaaaccgagcccacagatgagtacgacccaaccttgatttgcagtccaacacatgggggactggggtctcagccttattatccacaacatccaatggttgccgaatcaccaagttgcctcgtagctaccatggctccgtgccaacagttccgcaccggattgagctcacccgatgcccgatatcagcaacagaaccctgcagctgtcctctatcagagaagcaagtcgctctccccgagcctgctgggataccagcagccagctctgatggccgcaccgctcagcctggccgatgctcaccggagcgttttggtccacgcgggtagccaggggcagtcttcggctctccttcacccttctcccactaaccagcaagcttcccccgttatacattactcccctacaaatcagcagctgcgctgcggcagccaccaggaattccaacatatcatgtactgcgaaaattttgctccaggaacaacacgtcctgggcccccacctgttagtcaagggcagcgactttcccctggctcctaccctacggtaattcagcagcagaacgcaaccagtcagagggccgctaagaacggtccccctgttagcgaccagaaggaggtgctgcctgcgggcgtaacaatcaagcaggaacagaatctggaccagacctacctggatgacgtgaacgagattatccgaaaggaattttctgggccgccggcgcgcaaccagacttag

SEQ ID NO: 249635 - DNA, 2778 bp, Artificial Sequence
  derived and/or modified sequence
atgaatgcccctgagcggcagccccagccagatggaggagatgcccctggccacgagcccggcggcagcccccaggatgagctggacttcagcatcctgtttgattatgagtacctgaaccccaatgaggaggagcccaatgcccacaaggtggccagcccccccagcggccctgcctacccagatgatgtgctggactatggcctgaagccctacagccccctggccagcctgtctggagagcccccaggccgctttggagagccagacagagtgggcccccagaagttcctgtctgctgccaagccagctggggccagcggcctgagccccagaattgagatcacccccagccatgagctgatccaggccgtgggccccctgaggatgagagatgctggcctgctggtggagcagccccccctggccggcgtggccgccagcccccgcttcaccctgcctgtgcccggctttgagggctaccgggagcccctgtgcctgagccctgccagcagcggcagcagcgccagcttcatcagtgacaccttcagcccctacaccagcccctgtgtgagccccaacaatggaggcccagatgacctgtgcccccagttccagaacatcccagcccactacagccccaggaccagccccatcatgagccccaggaccagcctggccgaggacagctgcctgggccgccacagccctgtgcccaggcctgccagccgcagcagcagccctggggccaagaggaggcacagctgtgccgaggccctggtggccctgcccccaggggccagcccccagaggagccgcagccccagcccccagcccagcagccacgtggccccccaggaccacggcagccctgctggctacccacctgtggccggcagcgctgtgatcatggatgccctgaacagcctggccacagacagcccctgtggcatcccccccaagatgtggaagaccagcccagaccccagccctgtgtctgctgcccccagcaaggccggcctgcccaggcacatctacccagctgtggagttcctgggcccctgtgagcagggcgagaggagaaattctgcccctgagagcatcctgctggtgccccccacctggcccaagcccctggtgcctgccatccccatctgcagcatccctgtgacagccagcctgccccccctggagtggcccctgagcagccagagcggcagctatgagctgcgcatcgaggtgcagcccaagccccaccaccgggcccactatgaaacagagggcagcagaggagctgtgaaggcccccactggaggccaccctgtggtgcagctgcacggctacatggagaacaagcccctgggcctgcagatcttcatcggcacagcagatgagcgcatcctgaagccccacgccttctaccaggtgcaccgcatcaccgggaagacagtgaccaccaccagctatgagaagatcgtgggcaacaccaaggtgctggagatccccctggagcccaagaacaacatgagggccaccatcgactgtgccggcatcctgaagctgagaaatgctgacatcgagctgaggaagggggagacagacattggaaggaagaacaccagggtgcggctggtgttccgggtgcacatccctgagagcagcggcagaattgtgtccctgcagacagccagcaaccccatcgagtgcagccagaggtctgcccacgagctgcccatggtggagcggcaggacacagacagctgcctggtgtatggaggccagcagatgatcctgaccggccagaacttcaccagcgagagcaaggtggtgttcacagagaagaccacagatggccagcagatctgggagatggaggccaccgtggacaaggacaagagccagcccaacatgctgtttgtggagatccctgagtacagaaacaagcacatccgcacccctgtgaaggtgaacttctacgtgatcaacgggaagaggaagaggagccagccccagcacttcacctaccaccctgtgcctgccatcaagacagagcccacagatgaatatgaccccaccctcatctgcagccccacccatggaggcctgggcagccagccctactacccccagcaccccatggtggccgagagccccagctgcctggtggccaccatggccccctgccagcagttcagaacaggcctgagcagcccagatgcccgctaccagcagcagaacccagctgctgtgctgtaccagaggagcaagagcctgagccccagcctgctgggctaccagcagcctgccctgatggccgcccccctgagcctggctgatgcccacaggtctgtgctggtgcacgccggcagccagggccagagcagcgccctgctgcaccccagccccaccaaccagcaggccagccctgtgatccactacagccccaccaaccagcagctgcgctgtggcagccaccaggagttccagcacatcatgtactgtgaaaattttgcccctggcaccacccggcccggccccccacctgtgtcccagggccagaggctgagccctggcagctaccccaccgtcatccagcagcagaatgccaccagccagagagctgccaagaatggacctcctgtgtctgaccagaaggaggtgctgcctgctggggtgaccatcaagcaggagcagaacctggaccagacctacctggatgatgtgaatgagatcatcaggaaggagttcagcggccccccagccaggaaccagacctag

SEQ ID NO: 249636 - DNA, 2778 bp, Artificial Sequence
  derived and/or modified sequence
atgaacgcccccgagcggcagccccagcccgacggcggcgacgcccctgggcatgagccaggcggcagccctcaggacgagttggatttctcaatcctgttcgattatgagtatctgaatcccaacgaggaagaacccaacgcccacaaagtggcgagtcctccctccggccctgcgtaccccgacgacgtcctcgactacggcctgaaaccttactcccctctcgcttccctttcaggagagcctccagggaggtttggtgaacccgatcgcgtcgggccacagaaattcttgtcggcggccaagcctgccggtgcctctggtctgagcccaagaatcgaaattactcctagccatgagctgattcaggcggtcgggcctctgaggatgcgggatgctggtcttctagtggaacaacctcccttagctggtgtagctgcgagcccccgtttcacgctgccagtcccaggattcgaaggctatagggaacccctatgtttgtcacccgctagctccggtagtagcgccagttttatttctgatacctttagtccgtataccagcccatgcgtgtcccccaataatggcgggcctgatgacctatgtcctcagtttcagaacattcccgcccattactccccccgaacaagccccatcatgtcaccacgtacctccctggccgaagacagctgcctcggccgccattctcccgtgccacgcccggcctcccgctcatcctcacctggcgcgaagcggagacattcctgtgccgaggcattagtggcactgccacccggcgcttctccacagcgcagtcgcagcccaagccctcagccaagcagccatgtcgcaccccaggaccacggaagcccggcaggttaccccccggtggctggatcagcggtgatcatggacgcacttaattccctggccactgactccccctgcgggatccctccaaagatgtggaaaactagtcccgatccaagccccgtgtcagcagctccctccaaagccggccttccccggcacatctatccagccgtggagttcctgggcccatgcgaacaaggggagcgaaggaatagtgcccctgaaagcatcctgttagttcccccaacatggccaaagcccctggtacccgccattcctatctgcagcatccctgtcaccgccagcctcccacccctcgagtggccgctgagttcacaaagcggcagctatgagctgaggatcgaggtgcaaccaaagcctcatcaccgcgctcattatgaaaccgagggctctaggggcgccgttaaggccccaaccggagggcacccagttgttcagctccacggatatatggaaaacaagcctctcggcctccagatcttcatcgggacagctgatgagagaatcctgaagccgcacgccttctatcaggtgcacagaatcacaggaaagactgtaacaacaacatcttatgaaaagattgtggggaacactaaagtgttggagataccacttgaacccaaaaataatatgcgggcaactatagattgcgccgggatattgaaattgcgcaacgccgatatcgaattgcgcaaaggggagacggacattggtagaaagaataccagggttcgtctggtgttcagggtgcacattcccgagtcttcgggaagaatcgtaagcctgcaaactgcttccaaccctatcgagtgttctcagcggtctgcccatgagctgcccatggtggaaagacaggataccgacagctgcctggtgtacggagggcagcaaatgattctaaccggccagaatttcacctcggagagtaaagtggtcttcactgaaaaaacaacagacggccagcaaatttgggagatggaagctactgtcgataaggacaagagtcagccgaatatgctcttcgtcgaaatcccagaatatcgcaataagcacatcagaactccagtgaaggttaacttctatgttattaatggaaagcggaagagaagccagcctcagcatttcacgtaccaccccgtgccagccatcaagacagaacccactgacgaatatgaccctaccctgatctgtagcccgacccacggggggctcggctcgcagccttactatccccagcaccccatggtggcggaatccccttcctgtttggtggccaccatggctccctgccagcaattccgaacgggcctgagttccccggacgcacgctaccagcagcagaacccggcggcagtcctgtatcagcgatcgaaatcactttccccctcacttctcggctatcagcaacctgcgttgatggccgctcctctctccctggccgacgcacaccgatccgtgctggtccacgccgggagtcaaggccagtcgtctgccctcctccacccgtcccctactaatcaacaggcgagcccagtgatccattattctccaacaaatcaacaactgcgctgtggcagccaccaggagttccaacacatcatgtattgtgaaaactttgcgccaggcacgaccagacctgggccaccaccagtctcacagggacagagattatctcctggttcctaccccactgtcatacaacagcaaaatgccacgtcacaaagggccgccaagaacgggcctccggtatctgatcagaaggaggtcctgcccgctggtgtcacaattaagcaggagcagaatctggaccaaacatacttggatgatgtcaacgagatcattaggaaagagttctcaggaccccccgcaaggaatcagacatag

SEQ ID NO: 249637 - DNA, 7437 bp, Artificial Sequence
  derived and/or modified sequence
agcaggaagctcgcgccgccgtcgccgccgccgctcagcttccccgggcgcgtccaggacccgctgcgccaggcgcgccgtccccggacccggcgtgcgtccctacgaggaaagggaccccgccgctcgagccgcctccgccagccccactgcgaggggtcccagagccagccgcgcccgccctcgcccccggccccgcagccttcccgccctgcgcgccatgaacgcccccgagcggcagccccaacccgacggcggggacgccccaggccacgagcctgggggcagcccccaagacgagcttgacttctccatcctcttcgactatgagtatttgaatccgaacgaagaagagccgaatgcacataaggtcgccagcccaccctccggacccgcataccccgatgatgtcctggactatggcctcaagccatacagcccccttgctagtctctctggcgagccccccggccgattcggagagccggatagggtagggccgcagaagtttctgagcgcggccaagccagcaggggcctcgggcctgagccctcggatcgagatcactccgtcccacgaactgatccaggcagtggggcccctccgcatgagagacgcgggcctcctggtggagcagccgcccctggccggggtggccgccagcccgaggttcaccctgcccgtgcccggcttcgagggctaccgcgagccgctttgcttgagccccgctagcagcggctcctctgccagcttcatttctgacaccttctccccctacacctcgccctgcgtctcgcccaataacggcgggcccgacgacctgtgtccgcagtttcaaaacatccctgctcattattcccccagaacctcgccaataatgtcacctcgaaccagcctcgccgaggacagctgcctgggccgccactcgcccgtgccccgtccggcctcccgctcctcatcgcctggtgccaagcggaggcattcgtgcgccgaggccttggttgccctgccgcccggagcctcaccccagcgctcccggagcccctcgccgcagccctcatctcacgtggcaccccaggaccacggctccccggctgggtacccccctgtggctggctctgccgtgatcatggatgccctgaacagcctcgccacggactcgccttgtgggatcccccccaagatgtggaagaccagccctgacccctcgccggtgtctgccgccccatccaaggccggcctgcctcgccacatctacccggccgtggagttcctggggccctgcgagcagggcgagaggagaaactcggctccagaatccatcctgctggttccgcccacttggcccaagccgctggtgcctgccattcccatctgcagcatcccagtgactgcatccctccctccacttgagtggccgctgtccagtcagtcaggctcttacgagctgcggatcgaggtgcagcccaagccacatcaccgggcccactatgagacagaaggcagccgaggggctgtcaaagctccaactggaggccaccctgtggttcagctccatggctacatggaaaacaagcctctgggacttcagatcttcattgggacagctgatgagcggatccttaagccgcacgccttctaccaggtgcaccgaatcacggggaaaactgtcaccaccaccagctatgagaagatagtgggcaacaccaaagtcctggagatacccttggagcccaaaaacaacatgagggcaaccatcgactgtgcggggatcttgaagcttagaaacgccgacattgagctgcggaaaggcgagacggacattggaagaaagaacacgcgggtgagactggttttccgagttcacatcccagagtccagtggcagaatcgtctctttacagactgcatctaaccccatcgagtgctcccagcgatctgctcacgagctgcccatggttgaaagacaagacacagacagctgcctggtctatggcggccagcaaatgatcctcacggggcagaactttacatccgagtccaaagttgtgtttactgagaagaccacagatggacagcaaatttgggagatggaagccacggtggataaggacaagagccagcccaacatgctttttgttgagatccctgaatatcggaacaagcatatccgcacacctgtaaaagtgaacttctacgtcatcaatgggaagagaaaacgaagtcagcctcagcactttacctaccacccagtcccagccatcaagacggagcccacggatgaatatgaccccactctgatctgcagccccacccatggaggcctggggagccagccttactacccccagcacccgatggtggccgagtccccctcctgcctcgtggccaccatggctccctgccagcagttccgcacggggctctcatcccctgacgcccgctaccagcaacagaacccagcggccgtactctaccagcggagcaagagcctgagccccagcctgctgggctatcagcagccggccctcatggccgccccgctgtcccttgcggacgctcaccgctctgtgctggtgcacgccggctcccagggccagagctcagccctgctccacccctctccgaccaaccagcaggcctcgcctgtgatccactactcacccaccaaccagcagctgcgctgcggaagccaccaggagttccagcacatcatgtactgcgagaatttcgcaccaggcaccaccagacctggcccgcccccggtcagtcaaggtcagaggctgagcccgggttcctaccccacagtcattcagcagcagaatgccacgagccaaagagccgccaaaaacggacccccggtcagtgaccaaaaggaagtattacctgcgggggtgaccattaaacaggagcagaacttggaccagacctacttggatgatgttaatgaaattatcaggaaggagttttcaggacctcctgccagaaatcagacgtaaaagaagccattatagcaagacaccttctgtatctgacccctcggagccctccacagcccctcaccttctgtctcctttcatgttcatctcccagcccggagtccacacgcggatcaatgtatgggcactaagcggactctcacttaaggagctcgccacctccctctaaacaccagagagaactcttcttttcggtttatgttttaaatcccagagagcatcctggttgatcttaatggtgttccgtccaaatagtaagcacctgctgaccaaaagcacattctacatgagacaggacactggaactctcctgagaacagagtgactggagcttggggggatggacgggggacagaagatgtgggcactgtgattaaaccccagcccttgcgttcgtttttccaggtcacagatacagctcctgtaccttttgaaggcaaggagttctcagagcaaccaaaggaacgtgacccaagagcccagcttacaggctgaagaaacccaaaaccctcgatagagacagaaactgaactgtcagtccttagagctcgcccagtccatgccacaactgggccacagctaaagctttatttttgaattctcattccaaaaccaaactgtcttgcccagacaagatcacctgttaagacttcttggcgttaagttatgacatgtatacgcgtttgttattattattttttctgctttaaaaggctgaccagggcacctagccctggagctgtcttggcgagctgttctttaacccctgcagcacgcagtcctgctaacacaatttccatagacttggggggctgacccaggctgcagagagcaagcacctgtctgctgcagctgtacaacctggatgctttgcaaggttccggcttgctttcttcctagcagccagagtgcttttccgtaaagcggtggagaatctcaagcatgtgcatttaattgaggaatagcagaagggctaaagcaaccaagaaaagaagtgtgggtatttttgttaagtaaaacagcccaagtgcttctggaggtgggtttctaccaagatagaggaaaagggctgaattccctctaagtgggacagccgagctcaggatgtgcttcccagcttcactggttaatttgacctgaacctatttaaagatcccttctgcccctgaagacctatccgcactcaaattctaacatgaagaaatctactcgaatgcatcctttactttgaatgagctctattcggttgcatgttatatgtgatttccttcctcccaactgtttccactgagcgcacccagtctcccctagtcttcctctgtgggtgtgatttttgtgatttttacaaacaaaacccttgaagttcttggcagatgtgtttgtttctgtttgcatgtactgcagataccccaggacaagcgggggattcatttttcagccattcagttgtttcctcaataatccgcagcaaagtgaaaatattcttagcactcagactgtacttagagtgttttctcagtccagtctgtacagtctgtaggcagaaggcctcagaagaaagtcatggccactcagtgcccactgtgggctttgtaagtcctggctctcccgtcaaggttacccagaggtaaaagcttcctgggagtggggccaggtgtgtttggcactccagatagaaggcaaaatgctcagattcgggcctgtgcacttgtatgcaacctgtcggtcgatacctagcatttatttttccctgacaatgaacgacctttccctcacccaccctaagctcaaagagtttagcaaaattctcttttaaataaacagaatgccagtaagaggttgacccctaccatggaacttctgggatgctaaatacttcctcatgaacaaaataagttccttattataagttccttatactagcagcttcacctaaagaattttctctccagcaatattgacttcactggggaaaagccaagagtgtgtggtgagtgatttgttctcactcgacctggctaggactggctaggagctgttttttgtacatgagggaatttgggctttcctcagttatctgaatgttttacccaagtgccttcctgctattgtagcaaagtagctcagcttccttgtccacagggtgaaaaaggactaatgcattttccatcagttttctaactatgttagcaaaaacggcctcctggtagctcaacctcctgtacgcgtgtgtgtgtgtaatacacacacaaataaacccctctgtttttctaagacatcttagctggatattataggaagcactttcataaacaactgtaacaaatcgcaaaggaaagagaaacaaaagcattagatttgagacataaacaggcaagagaaagtgtattaggaactgacagctatcaaggaagttttgtcagttacaaatgctaggaggaaattttgccaagaaggatggctcatgaaatatttccagtacgggaagaggcaataagatcctctaagagaatgagaaagtaggggtgtctaaatggtaaagatgggtgtgttgcacgtgtgttagaaggatctcagttgagtgaaggtttgcactgctacatctaagttaatgtaaatatgtagcactctgacaggtctaccgtgttgctgaatgtagtatatttccaaagtttgcaagtcttcctgtattgtacaaagatgctgctgcttgataatatgtatagcaatccagattagtatgttattaaattttattttcttacctgtatttttatgctttttacctgtcctcaaaatattacacccctgttggaattagatttatatttataaatggtcagaaatctttttaagtgtctctttttacacataggttgatttttttttcttaagagaaatgatgtattcttgaaacatttgttactcattccaggaaacaaaaacccatataataaaacccccactcagagcctgttagtcacctctctagaagatggcatctcaggagaaggaatggctttgtggaagaaggaatcacctttttcttgctcaagaattatgctgacttcagccctgagcctggatctggtcactgagaatcatcaagtgtctagatcctccccccaaaataactaatttagtaggtgattttgattttaaaaaattgacaccaaaaccctgcctgcattgtaatggaattcgaaaagaattcatgttcacagaactcaacgttcaggctaatatttacagaagggaccaaatctaaatcctggtagataactcctgtatgctttatccaaaggacacccacagttttccagcatagatataaccaaggatgaattgattccttcaaagaactgggaggcacggatattgcattttttgtttacatccagtagccaagacgcctcagtgagccagtcttgggcagaggctgtcacatttaggcagattggaagttggtatgttctaattctcactctggactacagtgaggctgaatttatcatgtcaaaaaaaaaaaaaaaaaaagacctttccaagtgctttctattgctcagaattgaaagaatgttttcatttcaagtttacaagaggcatggatggagttgtgacgttcttgacaagctgggctaacctttcccgaacttgtttcccggaggcaaggtgctcggtgacccagcgcatcttaaccttgggtctcctaggctcgaggctagggcattacgtttcgtggaaccaaagcagccaattgcatagcaagtattttcctgcattccaattaaatgcttaagaaaaagcagcatcctataaaattgtgatcataaacatccatttccctcagcttttgtgagtgccttgacttacagccaacatcactgtttaactcagtctgtttaaaaacaaacttttctggtggttgataacagagagttgctccctgagccatcagggtcctgggagctggaagtgaaagggttattaacattctacctttatgcagctgttggctgaccagaataaactccctgctgagttcaagctttgaatggaatggatgcaaatgatgttgtttccattagagcaggtgctcacagcattctgattggcctgagcagaccgaggctatggctgttgggacaagcttagcatcctggacatcttgtcaaagaacctcactcacccctctggcctctacagccctcagaggagagaaaaccaattctccaacaaacaggtctctccaacatggtggtgctggcaggcttaggtttagaaaatcctgactgttaaaggcgtttgaatacatcacattcctatgcaaatgtttttaatctccagtttaatgtagtttatttttcctatatgtaaagtatttttatacggcttgtatcatgatagtttagcaataaaacagttggaagcaacatcta

SEQ ID NO: 249638 - DNA, 2778 bp, Artificial Sequence
  derived and/or modified sequence
atgaacgcccctgaaaggcagccccagccagacggtggtgatgcccctgggcacgagcctggaggatccccccaagatgagctggacttttctatcctctttgattatgagtatctgaaccccaatgaggaagagcccaacgctcacaaggtggcgagcccaccaagcgggcctgcttacccggatgatgtgcttgactacggtctgaaaccttactcacccctcgctagcctgtctggtgaaccacccggtaggttcggtgagcctgatagagtgggaccccagaagttcctctcagcagccaagcccgcaggcgcttcggggctgtcccctcggattgagattaccccatctcatgaactgatccaggcagttgggcctctgaggatgcgagacgccggacttttggtcgagcagccgccattagccggtgtggccgcaagtccaagatttacgttgcccgtgccgggatttgagggttatcgggaacccctgtgtctctctccggcatctagcggatccagcgcatccttcatttccgacaccttctctccatacacatcaccctgcgtgagcccaaataatggcggacctgatgacctgtgtccacaattccagaatatccctgcccactacagccccagaacatcccctataatgagcccacggacctcattagccgaggatagttgtctggggaggcatagtcctgtcccacggcctgcatcccgatcctcctcccctggggcaaagaggcgccattcatgtgccgaagcattagtagccttacccccaggagcctctccccaaaggtcacggagcccgtctccccagccatcaagtcacgtggctccccaggatcacggaagtccagcgggatacccacctgtcgctgggtccgcagtcatcatggacgccctgaatagcctggctacagattcgccctgtgggatcccccctaaaatgtggaaaacgagcccagaccctagcccggtgtctgccgcacccagcaaagcaggtctccccagacacatataccccgcagtcgagttcttgggtccctgcgagcagggtgaaagacgaaatagtgcgccagaatccattttgctggttcctcctacgtggccaaagcctttggtacctgcaatcccgatatgctctatccccgtgactgcctccctcccccctctggagtggcctctaagttcccaatccggcagttacgaattgaggatcgaagtccagccaaagccgcaccatagggcccactatgaaaccgagggctcaaggggagcagtaaaggcccctaccgggggacaccccgtggtgcagctacacggctacatggaaaataagccactggggcttcaaatatttattggaaccgccgacgagagaattctgaagccccatgccttttaccaggttcatcgcatcactggcaagacagtgacaacaacgtcctatgaaaagatcgtcggcaacacgaaagttctggagatcccgttagagccaaaaaacaacatgcgagcaaccattgattgtgctggaatcctgaagcttcgcaacgctgacattgagctgcgcaagggcgagactgatatcggccgaaagaacacccgggttcgcctggtgttcagagtgcatatccccgagtcttctggcagaatcgtgagcctacagactgcttccaaccctatcgagtgtagccagcgctctgcgcacgaactgcccatggtagaaagacaggacaccgactcttgcctggtttacggaggccagcaaatgatcctaacgggtcaaaacttcacaagcgagagtaaggtcgtgttcacagagaaaacaacagacggccagcagatctgggagatggaggcaacagtcgacaaggacaaatcccaaccaaacatgctgttcgtggaaattcccgagtatagaaacaagcacattaggactcccgtcaaggtgaacttctacgtcatcaatggcaagagaaagcgttcgcaaccccagcacttcacataccatccagtgcccgctattaagactgagcccacggatgaatacgatcctacccttatttgcagtccaactcacggcggtcttggcagccagccttattatccacaacatcctatggtggctgagtccccaagctgcctggtagcaaccatggccccatgtcagcaatttcggacgggcctctcatcacctgatgccaggtatcaacaacaaaatcccgcagctgtcctgtaccagaggtctaagtcgctcagtccgtctctcttaggctaccagcaaccagctcttatggcagcgcctctcagtctggccgacgcgcacagatccgtacttgtccatgctggatcccaaggccagagcagcgccctgctgcacccaagcccaaccaatcagcaggcatctccagttatccattattcacctaccaaccagcagttgcgctgtggatcgcaccaagaattccaacacatcatgtattgcgagaacttcgcccctggtactacaagaccgggaccgccacctgtctctcaagggcagcgattgtcaccgggatcctacccaaccgtgattcagcagcaaaacgcaacttctcagcgggctgccaagaacggaccacctgtaagtgatcagaaggaggtgctcccagctggggtgaccattaagcaggagcagaatctagatcagacgtatcttgacgatgtaaacgaaataataaggaaggagttttccgggcctccggcaaggaaccagacatag

SEQ ID NO: 249639 - protein, 905 aa, Artificial Sequence
  derived and/or modified sequence
MPVRRGHVAPQNTYLDTIIRKFEGQSRKFLIANAQMENCAIIYCNDGFCELFGYSRVEVMQQPCTCDFLTGPNTPSSAVSRLAQALLGAEECKVDILYYRKDASSFRCLVDVVPVKNEDGAVIMFILNFEDLAQLLAKCSSRSLSQRLLSQSFLGSEGSHGRPGGPGPGTGRGKYRTISQIPQFTLNFVEFNLEKHRSSSTTEIEIIAPHKVVERTQNVTEKVTQVLSLGADVLPEYKLQAPRIHRWTILHYSPFKAVWDWLILLLVIYTAVFTPYSAAFLLSDQDESRRGACSYTCSPLTVVDLIVDIMFVVDIVINFRTTYVNTNDEVVSHPRRIAVHYFKGWFLIDMVAAIPFDLLIFRTGSDETTTLIGLLKTARLLRLVRVARKLDRYSEYGAAVLFLLMCTFALIAHWLACICSLTSVGFGNVSPNTNSEKVFSICVMLIGSLMYASIFGNVSAIIQRLYSGTARYHTQMLRVKEFIRFHQIPNPLRQRLEEYFQHAWSYTNGIDMNAVLKGFPECLQADICLHLHRALLQHCPAFSGAGKGCLRALAVKFKTTHAPPGDTLVHLGDVLSTLYFISRGSIEILRDDVVVAILGKNDIFGEPVSLHAQPGKSSADVRALTYCDLHKIQRADLLEVLDMYPAFAESFWSKLEVTFNLRDAAGGLHSSPRQAPGSQDHQGFFLSDNQSDAAPPLSISDASGLWPELLQEMPPRHSPQSPQEDPDCWPLKLGSRLEQLQAQMNRLESRVSSDLSRILQLLQKPMPQGHASYILEAPASNDLALVPIASETTSPGPRLPQGFLPPAQTPSYGDLDDCSPKHRNSSPRMPHLAVATDKTLAPSSEQEQPEGLWPPLASPLHPLEVQGLICGPCFSSLPEHLGSVPKQLDFQRHGSDPGFAGSWGH

SEQ ID NO: 249640 - DNA, 2718 bp, Artificial Sequence
  derived and/or modified sequence
atgcccgtgagaagaggccacgtggccccccagaacacctacctggacaccatcatcagaaagttcgagggccagagcagaaagttcctgatcgccaacgcccagatggagaactgcgccatcatctactgcaacgacggcttctgcgagctgttcggctacagcagagtggaggtgatgcagcagccctgcacctgcgacttcctgaccggccccaacacccccagcagcgccgtgagcagactggcccaggccctgctgggcgccgaggagtgcaaggtggacatcctgtactacagaaaggacgccagcagcttcagatgcctggtggacgtggtgcccgtgaagaacgaggacggcgccgtgatcatgttcatcctgaacttcgaggacctggcccagctgctggccaagtgcagcagcagaagcctgagccagagactgctgagccagagcttcctgggcagcgagggcagccacggcagacccggcggccccggccccggcaccggcagaggcaagtacagaaccatcagccagatcccccagttcaccctgaacttcgtggagttcaacctggagaagcacagaagcagcagcaccaccgagatcgagatcatcgccccccacaaggtggtggagagaacccagaacgtgaccgagaaggtgacccaggtgctgagcctgggcgccgacgtgctgcccgagtacaagctgcaggcccccagaatccacagatggaccatcctgcactacagccccttcaaggccgtgtgggactggctgatcctgctgctggtgatctacaccgccgtgttcaccccctacagcgccgccttcctgctgagcgaccaggacgagagcagaagaggcgcctgcagctacacctgcagccccctgaccgtggtggacctgatcgtggacatcatgttcgtggtggacatcgtgatcaacttcagaaccacctacgtgaacaccaacgacgaggtggtgagccaccccagaagaatcgccgtgcactacttcaagggctggttcctgatcgacatggtggccgccatccccttcgacctgctgatcttcagaaccggcagcgacgagaccaccaccctgatcggcctgctgaagaccgccagactgctgagactggtgagagtggccagaaagctggacagatacagcgagtacggcgccgccgtgctgttcctgctgatgtgcaccttcgccctgatcgcccactggctggcctgcatctgcagcctgaccagcgtgggcttcggcaacgtgagccccaacaccaacagcgagaaggtgttcagcatctgcgtgatgctgatcggcagcctgatgtacgccagcatcttcggcaacgtgagcgccatcatccagagactgtacagcggcaccgccagataccacacccagatgctgagagtgaaggagttcatcagattccaccagatccccaaccccctgagacagagactggaggagtacttccagcacgcctggagctacaccaacggcatcgacatgaacgccgtgctgaagggcttccccgagtgcctgcaggccgacatctgcctgcacctgcacagagccctgctgcagcactgccccgccttcagcggcgccggcaagggctgcctgagagccctggccgtgaagttcaagaccacccacgccccccccggcgacaccctggtgcacctgggcgacgtgctgagcaccctgtacttcatcagcagaggcagcatcgagatcctgagagacgacgtggtggtggccatcctgggcaagaacgacatcttcggcgagcccgtgagcctgcacgcccagcccggcaagagcagcgccgacgtgagagccctgacctactgcgacctgcacaagatccagagagccgacctgctggaggtgctggacatgtaccccgccttcgccgagagcttctggagcaagctggaggtgaccttcaacctgagagacgccgccggcggcctgcacagcagccccagacaggcccccggcagccaggaccaccagggcttcttcctgagcgacaaccagagcgacgccgccccccccctgagcatcagcgacgccagcggcctgtggcccgagctgctgcaggagatgccccccagacacagcccccagagcccccaggaggaccccgactgctggcccctgaagctgggcagcagactggagcagctgcaggcccagatgaacagactggagagcagagtgagcagcgacctgagcagaatcctgcagctgctgcagaagcccatgccccagggccacgccagctacatcctggaggcccccgccagcaacgacctggccctggtgcccatcgccagcgagaccaccagccccggccccagactgccccagggcttcctgccccccgcccagacccccagctacggcgacctggacgactgcagccccaagcacagaaacagcagccccagaatgccccacctggccgtggccaccgacaagaccctggcccccagcagcgagcaggagcagcccgagggcctgtggccccccctggccagccccctgcaccccctggaggtgcagggcctgatctgcggcccctgcttcagcagcctgcccgagcacctgggcagcgtgcccaagcagctggacttccagagacacggcagcgaccccggcttcgccggcagctggggccactag

SEQ ID NO: 249641 - DNA, 2718 bp, Artificial Sequence
  derived and/or modified sequence
atgcccgtgcggcgcgggcacgtcgccccacagaacacataccttgatactattattcgcaaattcgagggacagagcagaaagttcctcatcgccaacgcccagatggaaaattgtgctataatttactgcaatgacgggttctgcgaactgttcggatactctagggtagaagttatgcagcaaccatgcacctgtgatttcttaaccgggccaaataccccttctagcgcggtctccagattagctcaagccctgctgggcgcagaggaatgtaaagttgacatcctgtactacaggaaggacgctagttctttcaggtgcttagttgacgttgttcctgtgaaaaacgaggacggagctgtcatcatgtttatccttaacttcgaggatctggcacagttgttagctaagtgttcttcccgctcgctatcccaacgactgctgtcccagagttttcttggtagcgaaggttctcacggcaggccagggggccctggtccagggacaggtagaggcaaatatcgtactattagccagatcccacagttcacgctgaattttgtggaatttaatctggagaaacaccggtcatctagtactactgagattgagattatcgccccacataaagtggtggagagaactcaaaatgtcacagagaaggttacacaagttctttccctaggggctgacgttctcccagaatacaaacttcaagcaccccgaatccatcgatggaccatcctccattattctccatttaaggctgtgtgggattggctaatcttactcctggtgatatacactgctgtcttcacgccctatagcgcggcctttcttctcagcgatcaggatgaatcacggcgcggggcgtgttcttatacatgctcccctcttaccgttgtggatctgattgtggatatcatgttcgtcgttgatatcgttataaactttcgtactacttacgtaaacactaacgatgaggtggtctctcacccccgacggatcgcggtccattatttcaaaggctggttcctgatcgacatggtagccgccattccctttgacctgctgatttttagaactggctcagacgagaccaccactctgatagggttgcttaaaactgctcgtctgctgcggttggtgcgagttgcaaggaagttggatagatattcagagtatggcgcagcagtgctgtttctgcttatgtgtacgttcgccctgatcgctcattggctcgcttgcatttgttcactcacctccgtaggattcggcaacgtgtcaccgaacactaatagtgaaaaagtcttctctatctgtgtcatgctgatcggtagcctcatgtatgcctcgatctttggcaatgtcagcgcaattattcagagattgtactcaggtaccgctcgctatcatacccagatgctccgcgtaaaagagttcatccggtttcatcagatccccaatcccttacgccaacggttggaggagtacttccagcacgcttggtcctacacaaacggaatcgatatgaacgcagtgctgaaagggttcccagagtgccttcaagctgatatctgtctgcacctccacagggccctcctgcagcattgccctgctttctcaggagctgggaaaggatgcttaagggctttggccgtcaagttcaaaacaacccatgctcctcctggcgataccctcgtacatctgggcgatgtgctgagcaccctctatttcatctcccgcggctccattgaaatcctccgtgatgacgttgtggtggctattctcggaaaaaatgatatttttggcgagcccgtgagcttgcacgcccagcccgggaagtcaagcgctgatgtccgcgcgctgacttactgtgatctgcataaaatccagcgagcagacctcctggaagtcctagacatgtatccagccttcgccgagagtttctggagcaagctcgaagtcacattcaaccttagggatgccgcaggcgggctccacagctccccccggcaggcccccggtagtcaggaccaccagggcttttttctaagcgacaatcaaagcgacgctgcacctcccctctcgatctctgatgcctcaggattgtggcctgagctccttcaggagatgcccccgcgccactcgccacaatccccacaggaggatccggactgctggccactgaagctgggctcacgcttagagcagctgcaagcacagatgaatagactggagtcaagagtgagctcagacttgtctcgcatcctccaacttttgcaaaagccaatgcctcaaggccatgctagctacatcctggaggcgccagcctccaatgacctcgctctggtgcccatcgccagcgagaccacttcacccggacctagacttcctcaggggtttctcccgcccgcgcagactccctcctatggtgatctggatgattgcagtcccaaacacaggaattctagtcctagaatgcctcacttggctgtggccactgacaagaccttggccccatcttctgagcaggaacaaccagaagggttgtggccccctctcgcatcccccttgcaccctctggaggtgcagggactcatctgcggcccctgtttctcttcacttcccgagcacctgggttcagttccaaaacagctggactttcagaggcacgggtctgatcccgggttcgcgggatcttgggggcattag

SEQ ID NO: 249642 - DNA, 2718 bp, Artificial Sequence
  derived and/or modified sequence
atgcctgtacggcgaggtcacgtggctcctcagaatacatatctggacactattatcaggaaattcgagggccaatcaaggaagtttctgattgccaatgcccaaatggagaattgtgcaattatctactgtaatgatggcttctgcgaactcttcgggtattcaagagttgaagtcatgcaacagccctgcacttgtgactttctcaccggccccaacactccaagcagtgctgtatcgagactggcccaggccttgcttggagcagaagaatgtaaagtggatattttatactacaggaaagatgcctcttcctttagatgcttggttgatgtggtgcccgtcaaaaacgaagatggggccgtgattatgtttatcctgaatttcgaagaccttgctcagttgctcgcaaagtgctccagtcgaagcctgtctcaacgcctgctgtcacagtccttcttggggtccgaaggctcgcatggccgcccaggcggccccggacctggcaccgggcggggtaaatatcggaccatcagccagatcccccagtttactctgaatttcgtagagttcaatctggaaaagcatcggtcatcaagcactacagaaatcgagattatcgctccccacaaggtggtggaaaggactcagaacgtcacagagaaagtgacccaagtgctctctctgggcgccgacgtgttaccggaatacaagctccaggcgccgagaatccatcgctggaccatccttcattactcaccatttaaggctgtatgggattggctgatactcctattagtaatttatacagcagtgtttactccctattccgcagcctttctgttatccgaccaagacgagtcccgaaggggtgcttgttcttacacctgcagtcctctcacagtggtggatttaattgtagacattatgtttgtcgtggacatcgtgatcaactttcgcactacttacgtgaacacaaacgatgaagtggtgtctcatcccagacggatcgcagtccactattttaaggggtggtttttgattgatatggtggcagccatcccatttgacctcctgatatttagaacaggcagtgatgaaactaccactttgatcggcctcctgaagaccgccaggctgctgagactagtccgggtggcgaggaagctagatcgatactccgagtatggagccgcggtgctgttcctcctgatgtgcacctttgcactcatcgcacactggctggcgtgcatttgttctctaaccagtgtgggctttggcaacgtgagtcctaatactaattctgaaaaagttttctctatctgcgtcatgctgattggcagtctaatgtatgcaagcatctttggaaacgtgtccgctatcatccagaggctgtacagcgggaccgccaggtaccacacacagatgctgagagtcaaagagtttataaggtttcatcagattcctaacccactccgccaacgtctggaggagtactttcagcatgcatggtcctatacaaacgggatcgatatgaatgcagttctgaaggggtttcccgagtgcctgcaggccgacatatgtctccatctacatcgcgcactgctacagcattgtcctgctttcagcggcgccgggaaagggtgcctccgcgctctagcagtgaaatttaaaaccacgcacgctccaccaggggacactctggtacacctcggagacgtcttgtccacactgtatttcatctcacggggctctatagagatactgcgggacgacgtcgtggttgcaatccttggaaagaacgatatattcggcgaacccgtgtctcttcatgcccagccaggaaaatcgtctgctgacgtcagagctttgacctattgcgacctccacaagatccagagagctgacctcttagaggtacttgatatgtatcccgctttcgccgagagtttctggtcaaagttagaagtgacttttaacctccgcgatgcagcaggaggactccattcatcaccgaggcaggctcccggttctcaggatcaccagggattttttctgagcgataatcagtctgacgccgcccctccactgtcaatatcagatgcaagtgggctgtggccagagctactgcaggagatgcctccgaggcatagcccacagtctccccaagaagatcccgactgttggcctctcaagctgggctcccggcttgagcagctccaggcccagatgaatcgcctggagtcgcgcgtctcttccgacctctcacgcatccttcaactgcttcagaaacctatgccacagggtcatgcctcctatattctcgaggctcccgcatcaaatgacctggccctggtgcctatagccagcgaaacaacaagccccggcccgagattgccacagggtttcctcccacctgcccagaccccgtcttacggtgacttagacgattgttcacccaagcaccgcaactccagcccccgcatgccacatcttgctgtggctacagataaaactttagccccgtccagtgaacaggaacaacccgaaggcctttggcctccactggctagcccactgcatccattggaggtgcagggcctgatatgtggcccatgctttagctcactgcccgaacaccttggaagcgtccctaaacaactggatttccaaagacacggttccgatccagggttcgcaggatcttggggccattag

SEQ ID NO: 249643 - DNA, 2718 bp, Artificial Sequence
  derived and/or modified sequence
atgcctgtgcggcggggccacgtggccccccagaacacctacctggacaccatcatcaggaagtttgagggccagagcaggaagttcctgattgccaatgcccagatggagaactgtgccatcatctactgcaatgatggcttctgtgagctgtttggctacagccgggtggaggtgatgcagcagccctgcacctgtgacttcctgaccggccccaacacccccagcagcgctgtgtcccggctggcccaggccctgctgggcgctgaggagtgcaaggtggacatcctgtactacaggaaggatgccagcagcttccgctgcctggtggatgtggtgcctgtgaagaatgaagatggagctgtgatcatgttcatcctgaactttgaggacctggcccagctgctggccaagtgcagcagccgcagcctgagccagaggctgctgagccagagcttcctgggcagcgagggcagccacggccggcctgggggccctggccctggcaccggccggggcaagtaccgcaccatcagccagatcccccagttcaccctgaactttgtggagttcaacctggagaagcacaggagcagcagcaccacagaaattgagatcatcgccccccacaaggtggtggagaggacccagaatgtgacagagaaggtgacccaggtgctgagcctgggcgcagatgtgctgcctgagtacaagctgcaggccccccgcatccaccgctggaccatcctgcactacagccccttcaaggctgtgtgggactggctgatcctgctgctggtgatctacacagctgtgttcaccccctacagcgctgccttcctgctgagtgaccaggatgagagcagaagaggagcctgcagctacacctgcagccccctgactgtggtggacctgattgtggacatcatgtttgtggtggacatcgtcatcaacttccgcaccacctacgtgaacaccaatgatgaggtggtgagccaccccaggagaattgctgtgcactacttcaagggctggttcctgattgacatggtggccgccatcccctttgacctgctgatcttcagaactggaagtgatgagaccaccaccctcatcggcctgctgaagacagcccggctgctgcggctggtgcgggtggccaggaagctggaccgctacagtgaatatggagctgctgtgctcttcctgctgatgtgcacctttgccctgattgcccactggctggcctgcatctgcagcctgacctctgtgggctttggaaatgtgagccccaacaccaacagcgagaaggtgttcagcatctgtgtgatgctgattggcagcctgatgtatgccagcatctttggaaatgtgtctgccatcatccagaggctgtacagcggcacagcccgctaccacacccagatgctgcgggtgaaggagttcatccgcttccaccagatccccaaccccctgcggcagaggctggaggagtacttccagcacgcctggagctacaccaacggcatcgacatgaatgctgtgctgaagggcttcccagaatgtctgcaggccgacatctgcctgcacctgcaccgggccctgctgcagcactgcccagccttctctggagctgggaagggctgcctgcgggccctggccgtgaagttcaagaccacccacgcccctcctggggacaccctggtgcacctgggagatgtgctgagcaccctgtacttcatcagccggggcagcattgagatcctgagagatgatgtggtggtggccatcctgggcaagaatgacatctttggagagcctgtgtccctgcacgcccagcccgggaagagcagcgcagatgtgcgggccctgacctactgtgacctgcacaagatccagagagctgacctgctggaggtgctggacatgtacccagcctttgctgagagcttctggagcaagctggaggtgaccttcaacctgagagatgctgctgggggcctgcacagcagcccccggcaggcccctggcagccaggaccaccagggcttcttcctgagtgacaaccagagtgatgctgccccacccctgagcatcagtgatgccagcggcctgtggccagagctgctgcaggagatgccacccaggcacagcccccagagcccccaggaggaccctgactgctggcccctgaagctgggcagccggctggagcagctgcaggcccagatgaaccggctggagagccgggtgtccagtgacctgagccgcatcctgcagctgctgcagaagcccatgccccagggccacgccagctacatcctggaggccccagccagcaatgacctggccctggtgcccatcgccagcgagaccaccagccctggcccccggctgccccagggcttcctgcccccagcccagacccccagctatggagacctggatgactgcagccccaagcacaggaacagcagccccaggatgccccacctggccgtggccacagacaagaccctggcccccagcagcgagcaggagcagcctgagggcctgtggccacccctggccagccccctgcaccccctggaggtgcagggcctcatctgtggcccctgcttcagcagcctgcctgagcacctgggctctgtgcccaagcagctggacttccagagacatggcagtgaccccggctttgctggctcctggggccactag

SEQ ID NO: 249644 - DNA, 2718 bp, Artificial Sequence
  derived and/or modified sequence
atgcccgtgcggcggggccacgtggccccccagaacacctacctggatactattatcagaaagtttgaaggtcaatctaggaagttcttaattgcgaacgcacagatggaaaattgcgccatcatatattgtaacgacggcttttgcgaactgtttggatactcaagggtggaagttatgcaacagccatgcacttgtgacttcttaactgggcccaacacaccaagctctgccgtgtctcgtctcgcccaggccttactgggcgcagaggagtgcaaggttgacatcttgtactatcgaaaagatgctagtagctttcgttgtctggtggacgtagtgcctgtgaaaaacgaggacggggctgttattatgttcattcttaatttcgaggacctggcacagctgcttgccaaatgtagttctagatctctgagccagcgactccttagccagtcctttctgggaagcgagggcagtcatggccggcccggcggccccggccctgggaccggacgtggtaagtacagaaccatatctcagatcccacagttcactctgaactttgtcgagttcaacttagaaaagcaccggtcatcatccaccaccgagatcgagatcatcgccccacacaaggtggtggaaagaacacaaaacgttacagaaaaggtgacccaggtcctttctctgggcgccgacgtcctgcctgaatataagctccaggctcctaggattcacaggtggacaattctgcactactcaccattcaaggccgtgtgggattggctcattctactccttgtgatatacaccgccgtgtttacaccttatagtgccgcctttctgctctccgaccaggacgaatctaggaggggtgcttgtagctacacctgcagcccccttacagtcgtggatcttattgtggatatcatgttcgtcgtcgatattgtgatcaacttcagaactacatatgtcaacactaacgatgaagtggtatcacacccaagaagaatcgcagtgcactatttcaagggatggttcctgattgacatggtcgccgccattcccttcgacctcctgatctttaggaccggaagcgacgagacaaccactctgataggactgttaaagaccgctcgactcctgcggctagtgcgcgttgctcgaaagctggatcgttattccgaatacggagcagccgtcctctttttacttatgtgtaccttcgccctgatcgcccactggcttgcctgcatttgttcacttaccagcgtgggctttggaaatgtgtcacccaatactaattctgagaaggtattcagcatttgcgtcatgcttattggctcgttgatgtacgcgtctatctttggcaacgtatctgctatcattcagaggctgtacagcggtactgctaggtaccacacccagatgttacgagtaaaggagttcattcggtttcaccagattccaaacccccttaggcagaggctggaagagtacttccagcatgcctggtcctatacaaatggcatcgatatgaatgctgtgctgaagggatttcctgagtgtttacaggcggatatttgccttcatttgcatcgcgcactgcttcagcattgcccggccttttccggagccggcaagggatgcctgcgagccctggcagtgaagttcaaaaccactcatgcaccccctggggatactctcgtccacttaggtgatgtgctctctaccctgtacttcatttctcgagggagcatcgaaatcctgcgagatgacgtcgtagtcgcaatcttgggaaagaacgacatcttcggggagcccgttagcttgcatgctcagccggggaagtcatccgcagacgtgagggcactgacttactgcgatctgcataagatccaacgcgccgatcttctggaggtccttgatatgtaccccgcatttgccgagagtttctggtccaaactggaggtgaccttcaatttacgcgacgctgctggaggactgcactccagtccacgtcaagctcccggctcccaggatcaccagggattttttctgagcgacaatcaatctgacgccgccccgcctctatccatcagtgacgcgagtgggctctggcccgaactgctccaggagatgccaccccggcacagcccacagtcaccccaggaggacccagactgttggcccctcaagcttggcagtaggttggagcagctgcaggctcagatgaatagactagaatctcgggtgtcgtcagatctatccagaattttgcaactactccagaagccgatgccgcaagggcacgcctcctacatcttggaggctcccgcttcaaatgacttggcccttgtgccgatcgcaagcgaaactaccagtcccggcccgagactccctcaagggtttctgcctcccgcacaaacacctagctatggagacctcgatgactgctctccaaagcatagaaactcatccccccgcatgccacatctggccgtagccaccgacaaaacacttgccccctcgtccgaacaagagcaaccagaaggcctctggccccctttggcttctccacttcaccccctcgaagtgcaaggattaatttgtgggccttgcttttcaagcctccccgagcacttgggctccgtacccaaacaactggactttcagcgccatgggtctgacccggggtttgccggctcgtggggccattag

SEQ ID NO: 249645 - DNA, 2718 bp, Artificial Sequence
  derived and/or modified sequence
atgcccgtgcggcggggccacgtggccccccagaacacctacctggacacaattataagaaaatttgaagggcagtctagaaaatttttgattgctaacgcccagatggaaaactgtgccatcatctattgcaatgatggtttttgcgagctgtttggatatagcagagtcgaagttatgcagcagccatgtacttgtgactttctaacgggacccaacacgcccagttcagccgtgagtagactggctcaggccctactgggggccgaggaatgcaaggtggatatcctgtattatagaaaggatgcttcttcctttagatgcctcgtcgacgtcgtgcctgttaaaaacgaggacggagctgtaatcatgtttattctgaactttgaggacctggcacagctgctggctaaatgcagtagtagaagcctttcacagcgccttctgtcccaatcattcctgggtagcgagggatctcatggtaggccagggggccccggccccggcactggaagaggtaagtatcgcacgatcagccagatcccacagttcactctaaactttgttgaatttaatctggaaaaacatagaagttcttctacaacagaaatagaaataattgcgccgcacaaggtcgttgagcgcacccaaaacgtcacagagaaggtgacccaggtcctgtctctcggtgccgatgtgctgcccgagtacaagctgcaggcccctaggatccataggtggacaattcttcactactctcccttcaaagctgtgtgggactggcttatactactgcttgtgatctataccgcggtctttaccccttactccgctgcctttttattgagtgaccaggatgagtcacggcgtggcgcatgctcttatacctgctcccccttaacggttgtggatctcatcgtggatatcatgttcgtagttgatatagtgatcaatttccgtacaacatatgtgaataccaatgatgaagtagtttcccaccctcggcgcatcgcagtccactatttcaaggggtggttcttaatcgacatggtggctgccatcccattcgatttgctgatcttccggaccgggtccgacgagacgactaccctgattgggttgctcaagactgcccgactgcttagacttgtaagagtagcccgcaagcttgataggtacagcgaatatggagcagccgtgctgttcctgctcatgtgcacatttgctcttatcgctcactggctagcttgcatctgttctctgacttccgtaggctttgggaatgtaagcccaaatacaaactccgagaaagtgttcagcatttgcgtcatgttaattggcagcctgatgtatgccagcatcttcgggaacgtaagtgccattattcagagattgtattctggtactgctagataccacacccaaatgctcagagtaaaggaatttataaggttccaccagataccaaacccgcttcggcagagactggaggagtactttcaacatgcatggagttacaccaacggcattgacatgaacgctgtcctaaaagggtttcctgaatgccttcaggctgatatatgtctccatctgcatagagcactactgcaacattgtccagcattctcaggtgctggcaaaggctgtttgcgagccttggccgtgaagttcaagacaacacacgccccacctggcgatactctcgttcatctgggcgacgtgctctcaacgctgtattttattagtcgggggtcgattgaaattttgcgggacgacgtggttgtggcaattcttggtaaaaatgatatcttcggagagccagtgagcttgcatgcacagcctggtaagagtagcgcggacgtccgggccctgacatactgcgacttacacaagatccagagggcggacctgcttgaggtccttgacatgtacccagcattcgccgaaagcttttggtcgaagctcgaagttactttcaatctccgcgatgctgccggcggtctccattcttcgcctcgtcaagctcccggaagccaggatcatcaggggttcttcctctcagacaatcagtctgacgctgcccccccattaagcatcagcgacgctagtggtctgtggcccgagttgctccaagaaatgccaccccggcactctcctcaaagtccacaggaggacccagattgttggccccttaaattaggtagccgtctggagcagttgcaggcgcagatgaacaggctcgaaagtcgggtttcgtccgatctatctaggattctgcagctcttacagaaaccaatgccccaggggcatgcatcgtatattctggaggcacccgcctccaatgacctggcgctcgtcccaattgcttctgaaacaacttcaccaggtccaaggctgccccaaggatttttgcctccagctcagacccccagttacggggatctcgacgattgcagtccaaaacatagaaatagctccccccgaatgcctcacctcgccgtcgcaaccgacaagaccctggctccaagctcagaacaagaacaaccagaaggactgtggcctcccctagcttcccctctgcacccactggaagtacagggactcatatgcggcccttgctttagctctctgcctgagcacctcggctctgttcccaaacaacttgacttccaacggcatgggagtgatccgggcttcgctggatcatgggggcattag

SEQ ID NO: 249646 - DNA, 3017 bp, Artificial Sequence
  derived and/or modified sequence
acgctgctgagcccgaggacagacggagacgccgggagccagtggcgcctgtggctccgggcaggggccgcggccgaaagatgccggtccgcaggggccacgtcgctccccaaaacacttacctggacaccatcatccgcaagttcgagggccaaagtcggaagttcctgattgccaatgctcagatggagaactgcgccatcatttactgcaacgacggcttctgcgaactcttcggctactcccgagtggaggtgatgcagcaaccctgcacctgcgacttcctcacaggccccaacacaccaagcagcgccgtgtcccgcctagcgcaggccctgctgggggctgaggagtgcaaggtggacatcctctactaccgcaaggatgcctccagcttccgctgcctggtagatgtggtgcccgtgaagaacgaggacggggctgtcatcatgttcattctcaacttcgaggacctggcccagctcctggccaagtgcagcagccgcagcttgtcccagcgcctgttgtcccagagcttcctgggctccgagggctctcatggcaggccaggcggaccagggccaggcacaggcaggggcaagtacaggaccatcagccagatcccacagttcacgctcaacttcgtggagttcaacttggagaagcaccgctccagctccaccacggagattgagatcatcgcgccccataaggtggtggagcggacacagaacgtcactgagaaggtcacccaggtcctgtccctgggcgcggatgtgctgccggagtacaagctgcaggcgccgcgcatccaccgctggaccatcctgcactacagccccttcaaggccgtgtgggactggctcatcctgctgctggtcatctacacggctgtcttcacgccctactcagccgccttcctgctcagcgatcaggacgaatcacggcgtggggcctgcagctatacctgcagtcccctcactgtggtggatctcatcgtggacatcatgttcgtcgtggacatcgtcatcaacttccgcaccacctatgtcaacaccaatgatgaggtggtcagccacccccgccgcatcgccgtccactacttcaagggctggttcctcattgacatggtggccgccatccctttcgacctcctgatcttccgcactggctccgatgagaccacaaccctgattgggctattgaagacagcgcggctgctgcggctggtgcgcgtagcacggaagctggaccgctactctgagtatggggcggctgtgctcttcttgctcatgtgcaccttcgcgctcatagcgcactggctggcctgcatctgcagcctcaccagcgtgggcttcggcaatgtctcgcccaacaccaactccgagaaggtcttctccatctgcgtcatgctcatcggctccctgatgtacgccagcatcttcgggaacgtgtccgcgatcatccagcgcctgtactcgggcaccgcgcgctaccacacgcagatgctgcgtgtcaaggagttcatccgcttccaccagatccccaacccactgcgccagcgcctggaggagtatttccagcacgcctggtcctacaccaatggcattgacatgaacgcggtgctgaagggcttccccgagtgcctgcaggctgacatctgcctgcacctgcaccgcgcactgctgcagcactgcccagctttcagcggcgccggcaagggctgcctgcgcgcgctagccgtcaagttcaagaccacccacgcgccgcctggggacacgctggtgcacctcggcgacgtgctctccaccctctacttcatctcccgaggctccatcgagatcctgcgcgacgacgtggtcgtggccatcctaggaaagaatgacatctttggggaacccgtcagcctccatgcccagccaggcaagtccagtgcagacgtgcgggctctgacctactgcgacctgcacaagatccagcgggcagatctgctggaggtgctggacatgtacccggcctttgcggagagcttctggagtaagctggaggtcaccttcaacctgcgggacgcagccgggggtctccactcatccccccgacaggctcctggcagccaagaccaccaaggtttctttctcagtgacaaccagtcagatgcagcccctcccctgagcatctcagatgcatctggcctctggcctgagctactgcaggaaatgcccccaaggcacagcccccaaagccctcaggaagacccagattgctggcctctgaagctgggctccaggctagagcagctccaggcccagatgaacaggctggagtcccgcgtgtcctcagacctcagccgcatcttgcagctcctccagaagcccatgccccagggccacgccagctacattctggaagcccctgcctccaatgacctggccttggttcctatagcctcggagacgacgagtccagggcccaggctgccccagggctttctgcctcctgcacagaccccaagctatggagacttggatgactgtagtccaaagcacaggaactcctcccccaggatgcctcacctggctgtggcaacggacaaaactctggcaccatcctcagaacaggaacagcctgaggggctctggccacccctagcctcacctctacatcccctggaagtacaaggactcatctgtggtccctgcttctcctccctccctgaacaccttggctctgttcccaagcagctggacttccagagacatggctcagatcctggatttgcagggagttggggccactgaactccaagataaagacaccatgaggggactgaaggtgggcaaggggatttcctttagctgggcatggtggcgggcgcctgtaatcccagctactcaggaggctgaagcaagagaatcacttgaaccctaaaggcagaggttgcagtgagccgagatagtgccactgcactacagcccgggcgacagagtgagactccatctcaaaaataaaataaaatt

SEQ ID NO: 249647 - DNA, 3135 bp, Artificial Sequence
  derived and/or modified sequence
acgctgctgagcccgaggacagacggagacgccgggagccagtggcgcctgtggctccgggcaggggccgcggccgaaagatgccggtccgcaggggccacgtcgctccccaaaacacttacctggacaccatcatccgcaagttcgagggccaaagtcggaagttcctgattgccaatgctcagatggagaactgcgccatcatttactgcaacgacggcttctgcgaactcttcggctactcccgagtggaggtgatgcagcaaccctgcacctgcgacttcctcacaggccccaacacaccaagcagcgccgtgtcccgcctagcgcaggccctgctgggggctgaggagtgcaaggtggacatcctctactaccgcaaggatgcctccagcttccgctgcctggtagatgtggtgcccgtgaagaacgaggacggggctgtcatcatgttcattctcaacttcgaggacctggcccagctcctggccaagtgcagcagccgcagcttgtcccagcgcctgttgtcccagagcttcctgggctccgagggctctcatggcaggccaggcggaccagggccaggcacaggcaggggcaagtacaggaccatcagccagatcccacagttcacgctcaacttcgtggagttcaacttggagaagcaccgctccagctccaccacggagattgagatcatcgcgccccataaggtggtggagcggacacagaacgtcactgagaaggtcacccaggtcctgtccctgggcgcggatgtgctgccggagtacaagctgcaggcgccgcgcatccaccgctggaccatcctgcactacagccccttcaaggccgtgtgggactggctcatcctgctgctggtcatctacacggctgtcttcacgccctactcagccgccttcctgctcagcgatcaggacgaatcacggcgtggggcctgcagctatacctgcagtcccctcactgtggtggatctcatcgtggacatcatgttcgtcgtggacatcgtcatcaacttccgcaccacctatgtcaacaccaatgatgaggtggtcagccacccccgccgcatcgccgtccactacttcaagggctggttcctcattgacatggtggccgccatccctttcgacctcctgatcttccgcactggctccgatgagaccacaaccctgattgggctattgaagacagcgcggctgctgcggctggtgcgcgtagcacggaagctggaccgctactctgagtatggggcggctgtgctcttcttgctcatgtgcaccttcgcgctcatagcgcactggctggcctgcatctgcagcctcaccagcgtgggcttcggcaatgtctcgcccaacaccaactccgagaaggtcttctccatctgcgtcatgctcatcggctccctgatgtacgccagcatcttcgggaacgtgtccgcgatcatccagcgcctgtactcgggcaccgcgcgctaccacacgcagatgctgcgtgtcaaggagttcatccgcttccaccagatccccaacccactgcgccagcgcctggaggagtatttccagcacgcctggtcctacaccaatggcattgacatgaacgcggtgctgaagggcttccccgagtgcctgcaggctgacatctgcctgcacctgcaccgcgcactgctgcagcactgcccagctttcagcggcgccggcaagggctgcctgcgcgcgctagccgtcaagttcaagaccacccacgcgccgcctggggacacgctggtgcacctcggcgacgtgctctccaccctctacttcatctcccgaggctccatcgagatcctgcgcgacgacgtggtcgtggccatcctaggaaagaatgacatctttggggaacccgtcagcctccatgcccagccaggcaagtccagtgcagacgtgcgggctctgacctactgcgacctgcacaagatccagcgggcagatctgctggaggtgctggacatgtacccggcctttgcggagagcttctggagtaagctggaggtcaccttcaacctgcgggacgcagccgggggtctccactcatccccccgacaggctcctggcagccaagaccaccaaggtttctttctcagtgacaaccagtcagatgcagcccctcccctgagcatctcagatgcatctggcctctggcctgagctactgcaggaaatgcccccaaggcacagcccccaaagccctcaggaagacccagattgctggcctctgaagctgggctccaggctagagcagctccaggcccagatgaacaggctggagtcccgcgtgtcctcagacctcagccgcatcttgcagctcctccagaagcccatgccccagggccacgccagctacattctggaagcccctgcctccaatgacctggccttggttcctatagcctcggagacgacgagtccagggcccaggctgccccagggctttctgcctcctgcacagaccccaagctatggagacttggatgactgtagtccaaagcacaggaactcctcccccaggatgcctcacctggctgtggcaacggacaaaactctggcaccatcctcagaacaggaacagcctgaggggctctggccacccctagcctcacctctacatcccctggaagtacaaggactcatctgtggtccctgcttctcctccctccctgaacaccttggctctgttcccaagcagctggacttccagagacatggctcagatcctggatttgcagggagttggggccactgaactccaagataaagacaccatgaggggactgaaggtgggcaaggtgagagttaaggatcttggggaggtggccgggtgcagtggctcgcctgtaatcccagcactttgggaggccgaggcgggcggatcagaccatcctggctaacacggtgaaaccccacctctactaaaattaaaaaagaaaaaaaatagccgggcgtggtggcaggcgcctgtaatcccagctactggggaggctgaggcaggagaatggcatgaacccgggaggtggaggttgcagggagccgaggccgcaccactgcactccagcctgggtgacagagtgagactccaactc

SEQ ID NO: 249648 - DNA, 2718 bp, Artificial Sequence
  derived and/or modified sequence
atgccggtgcgtagaggccacgtggcaccccagaatacctatctggacactattatcaggaaatttgagggccagagccggaaatttctcatcgccaacgcccaaatggagaattgtgccatcatctattgtaatgacggcttctgcgagctgtttggctattctcgggtagaggtgatgcagcagccatgtacatgcgactttctcaccggacccaacaccccatcctctgctgtcagccggctcgctcaggccctactcggggcagaagagtgtaaggtggacatcttgtactataggaaggatgctagtagtttcagatgcctcgtcgacgtggttcccgttaaaaacgaggacggtgcagttattatgtttatcctgaacttcgaagatctggcccagctgctggccaaatgttcctctcgatccctgagtcaacgcttgctgtcacagtcctttctcggcagcgaaggatcacatggcaggcccggtggacctggtccgggaaccggcagaggaaaatatcgcactatatctcagatcccccaattcacactgaactttgtggagtttaacttagaaaagcacagatcttctagtaccacggagattgagatcattgccccacataaagtggtggagaggactcagaatgtgaccgagaaggtgacccaggtgctgtctctcggagccgacgttctccccgagtataagttacaagccccacgaattcaccgctggacaattctccactacagtcccttcaaagcagtttgggactggcttatactgttgcttgtgatttatactgccgtgtttaccccatattccgctgccttccttttgagcgaccaggacgagagcagacgcggtgcctgcagctacacatgtagccccctcactgtagttgacctgatcgtcgatatcatgtttgtggtggatattgttatcaattttcgcaccacttatgtcaacacaaatgacgaggtggtgtcccatccccgaaggattgcagtgcactacttcaagggatggttcctgatcgatatggtggccgcaatcccatttgatctgctcatattccgcactggatccgatgaaaccacaacattgatcggactgttgaagactgcgagactgctgcgcctcgtccgggttgctagaaaattagaccgctactctgagtatggcgctgctgtgctgtttctcctcatgtgcaccttcgccttgatagcccattggcttgcctgcatctgctctttaacttctgtggggtttggaaacgtcagccccaacactaactctgagaaggtgttctccatatgtgtcatgcttattgggtctctgatgtacgcatccattttcggcaacgtgtcagctatcattcaaagactctacagtggtacggccagataccacacacagatgctgagagtgaaagagttcatacggtttcaccagattcctaatcctctgcggcagagactcgaagaatacttccagcacgcttggtcatacaccaatggcattgacatgaacgccgttctcaaaggatttccagagtgtctacaagctgacatttgcttgcacctgcaccgggcactacttcaacactgcccggcattctccggggctgggaaggggtgtctacgagccctggctgtcaagtttaagactactcacgcccctcctggggataccctggtacaccttggcgatgtcctgtcaactctgtactttatctcacggggaagcattgaaatcctcagagacgatgtagtggtcgctatcctgggcaagaatgatatatttggcgagcctgtgtccttgcacgcccagcccggtaaaagttccgctgacgttagagctttgacttattgtgatctccacaaaatccagagggccgatcttttggaggtacttgacatgtatcccgctttcgctgagtccttctggagtaagttggaagtgactttcaacctgagggacgccgcaggtgggctccacagctcaccaaggcaggctcccggatcccaagatcaccagggcttttttttgtccgacaaccagtccgatgcagccccaccattatccatcagcgacgcatcaggactctggcccgagcttttgcaggaaatgcctccacgccacagcccacaatctccccaggaagaccccgactgctggcccctaaaactgggcagtcgcctggaacagctgcaggcacaaatgaataggcttgagagtcgcgtgtccagtgacttatccaggatcctgcagctgctgcagaaacccatgccacaggggcatgccagttacattctagaagccccagcttctaacgatctagccttagtgccgatcgcatccgaaactacgtcccctggcccaagattaccccaaggattcctgccccctgcacagacaccatcctacggggatcttgacgattgttcccctaagcacaggaactcctcacccaggatgccacatctcgccgtagccactgacaaaacccttgcccctagttcagagcaggagcagccggagggcctgtggccacctctggctagccctttgcatcccttagaggtgcagggcctcatctgtggcccttgcttttccagcctcccagagcatctggggtccgtgcctaagcagctcgacttccaaaggcatgggtctgatccaggtttcgccggttcgtggggtcattag

SEQ ID NO: 249649 - DNA, 2718 bp, Artificial Sequence
  derived and/or modified sequence
atgcctgtgcggaggggacacgtcgcaccgcagaatacgtacctagacactattatcagaaaatttgaggggcagtcacgcaaattcctgatcgccaacgcgcagatggaaaattgcgccatcatctactgcaatgacggcttttgtgaattgtttggttactcgcgtgtggaggtcatgcagcaaccatgcacttgcgacttcctgaccgggccaaatactccgagtagtgcagtgagtaggctggcccaggccctgttgggtgcagaggaatgtaaggtagacattctttactatagaaaggacgcatcaagctttcggtgcttggtggacgtagtgcccgttaaaaacgaggacggcgcagtcattatgttcatattaaatttcgaggacctggcccagcttctggcgaagtgtagcagtcgttcgctgtctcagcgtctcttatcccagagttttctgggatccgaaggcagtcatggacgtcctggaggacccggtcctggtactggccgagggaagtaccgtaccatcagccagataccacagttcacactcaattttgtcgagttcaatctggagaagcaccgcagcagctccaccactgaaatcgagatcatcgcgccacacaaggtggttgagcggacacagaacgtgacagagaaagtgacacaagtgttgtcattaggtgctgatgtgctgccggaatacaagctgcaagcccctaggatccatcggtggacaatcctccactattctccgttcaaggctgtgtgggactggctgattcttttattagttatctacaccgctgtgttcaccccctattctgccgcttttttactgagtgatcaggatgaaagccggaggggggcatgtagctacacatgttctcccttaacagtggttgatttgatcgttgatataatgtttgtagttgatatagtcatcaatttccgaactacttacgtcaataccaatgacgaggttgtgtctcatccacgcaggatcgccgtgcactatttcaaaggttggtttctgattgatatggtggcggcaataccattcgacctgttgatattccggaccggcagtgatgagaccacgacactgatcggcctgctaaaaaccgctcgactcctgaggctggttcgagtggcgagaaagcttgatcgttacagtgaatatggagcagcagtgttgtttttgctgatgtgtacatttgcattgatcgctcattggcttgcatgcatatgttccctgacatctgtgggctttgggaacgtatcccctaacactaacagtgagaaagtattttctatttgcgtaatgcttattggctcattgatgtatgcttctattttcggtaacgtctcagccattattcagcgcctatactctggaacagctcggtaccacacccagatgcttagggttaaagagttcattaggttccaccagataccaaatccactgcgacagcgactcgaggaatacttccagcatgcctggtcttataccaacggcatcgatatgaatgcagttttgaaaggttttcccgaatgtctgcaggccgacatctgcctgcatctgcatcgcgcactgcttcagcattgccccgcattcagtggcgctggaaaagggtgtcttcgcgcattggcagtcaaatttaagaccacacacgcaccaccgggagataccctggttcacttaggcgatgttctgagtaccctgtattttatctctcgcggaagtatcgagatactgagagacgacgtagtggttgctatcttgggcaagaacgatatttttggggaaccagtgagcctccatgctcagcccggaaagagctctgcggatgtgcgggctctgacgtactgtgatctgcataagatacagcgggcagatttactggaggtgctggacatgtatccagccttcgccgagtctttctggagcaagctcgaagtaaccttcaatctgagagatgctgccggtggactgcactccagtccacgccaagctcctgggagtcaagatcaccagggatttttcctatctgacaaccagtcagacgccgcacctccgctatctatttcagacgccagcggactatggcccgagctgctgcaggagatgcctcccaggcacagccctcaatctccgcaggaggatccagactgttggccactcaaactgggatcacgactggaacagctgcaggcccaaatgaaccggcttgagagccgagtgtctagtgatctgagcaggatcctgcaactgctccaaaagcccatgccccagggacacgccagttatatcctagaggctcccgcatcaaacgaccttgcgctggttccgattgcctctgaaacaacttctcccggacctagattgccccaggggttccttccacccgctcaaacgccctcatacggggacctggatgactgtagcccaaaacaccgcaacagctctccgcgtatgccacatctggctgtcgccaccgataagactctggcgcctagctcagaacaggagcagcctgaagggctctggccacctctggcgtctcccttgcacccactggaagtccaggggcttatatgcggtccttgttttagttcacttccggaacatcttggatctgtcccaaagcagttagattttcagagacatggatctgaccctggtttcgccggatcttgggggcactag

SEQ ID NO: 249650 - protein, 920 aa, Artificial Sequence
  derived and/or modified sequence
MAPTKPSFQQDPSRRERLQALRKEKSRDAARSRRGKENFEFYELAKLLPLPAAITSQLDKASIIRLTISYLKMRDFANQGDPPWNLRMEGPPPNTSVKGIQMWKSELCMRKTPCEVIGAQRRRSPSALAIEVFEAHLGSHILQSLDGFVFALNQEGKFLYISETVSIYLGLSQVELTGSSVFDYVHPGDHVEMAEQLGMKLPPGRGLLSQGTAEDGASSASSSSQSETPEPVESTSPSLLTTDNTLERSFFIRMKSTLTKRGVHIKSSGYKVIHITGRLRLRVSLSHGRTVPSQIMGLVVVAHALPPPTINEVRIDCHMFVTRVNMDLNIIYCENRISDYMDLTPVDIVGKRCYHFIHAEDVEGIRHSHLDLLNKGQCVTKYYRWMQKNGGYIWIQSSATIAINAKNANEKNIIWVNYLLSNPEYKDTPMDIAQLPHLPEKTSESSETSDSESDSKDTSGITEDNENSKSDEKGNQSENSEDPEPDRKKSGNACDNDMNCNDDGHSSSNPDSRDSDDSFEHSDFENPKAGEDGFGALGAMQIKVERYVESESDLRLQNCESLTSDSAKDSDSAGEAGAQASSKHQKRKKRRKRQKGGSASRRRLSSASSPGGLDAGLVEPPRLLSSPNSASVLKIKTEISEPINFDNDSSIWNYPPNREISRNESPYSMTKPPSSEHFPSPQGGGGGGGGGGGLHVAIPDSVLTPPGADGAAARKTQFGASATAALAPVASDPLSPPLSASPRDKHPGNGGGGGGGGGGAGGGGPSASNSLLYTGDLEALQRLQAGNVVLPLVHRVTGTLAATSTAAQRVYTTGTIRYAPAEVTLAMQSNLLPNAHAVNFVDVNSPGFGLDPKTPMEMLYHHVHRLNMSGPFGGAVSAASLTQMPAGNVFTTAEGLFSTLPFPVYSNGIHAAQTLERKED

SEQ ID NO: 249651 - DNA, 2763 bp, Artificial Sequence
  derived and/or modified sequence
atggctcccacgaagccatcttttcagcaagacccctctcgaagggagcggctgcaagccctgaggaaggagaaaagccgggatgcagcccgctctaggcgcggcaaggagaactttgaattttacgaactcgccaaactgctgccgttacccgcagctattacttctcagttggataaggcttcaatcattcgtctcaccattagctacttaaagatgcgcgatttcgccaaccagggcgaccccccatggaacctaagaatggagggtcccccgccaaacacatccgtaaaaggcatacagatgtggaaatctgagctttgcatgagaaagaccccttgtgaagtaattggggcccagcggcggcgctccccttcagccctggctattgaagtgttcgaggcccacctgggtagtcacattcttcagtcactggatggctttgtgtttgctttgaaccaagagggtaagtttctttacatcagtgaaacggtgtctatttacctcgggctgtcccaggtggagctaacaggcagctccgttttcgactacgtgcaccctggagatcacgtggagatggctgaacagctgggcatgaaactgccgcccggaagaggactcctgtcgcaggggaccgctgaggacggcgcgagttccgcgtcaagttcatctcagagcgagactcctgagccagtggagtctacatccccttcactgttgaccacggataatacactagaaagaagtttctttatacgaatgaaatccaccctcactaaacggggcgttcacattaaatcttccggctacaaagttatccacatcaccggaaggctgagactccgcgtaagcctgagccacggtagaactgttccgtcccagattatgggattggttgtcgttgcgcacgccctcccaccccccaccatcaatgaggtgcgcattgattgccacatgttcgtcaccagagtgaatatggatctgaatattatttactgtgagaataggatctcggactacatggatctaacacctgtggacatcgtcggtaagaggtgctaccatttcatacatgctgaagatgtggagggcatcaggcattcacatctggaccttctgaataagggacagtgtgtgaccaaatattatcgctggatgcaaaaaaacgggggctatatctggatccaatcgtccgctactatagcaatcaacgcaaagaacgctaacgaaaaaaacataatctgggtgaattacctgttgtcgaaccctgaatataaggacactccaatggatattgcccagctgccacacctgcccgagaaaacatccgagagcagcgagacttccgattccgagtccgattccaaagacacaagtggcatcaccgaggataatgagaacagcaagtctgatgagaaaggcaatcagtcggagaatagcgaagatcctgaacctgataggaagaagtctggcaacgcctgcgacaacgacatgaattgcaatgacgacggccattcctcttcaaacccggatagtagggatagtgacgattcttttgagcacagtgatttcgagaaccccaaggccggcgaagacggttttggcgcactaggggccatgcagatcaaagtggaaaggtacgtcgaatctgaatcagaccttcggctgcaaaactgcgagtccctcacaagcgacagtgctaaggactccgactctgccggcgaagccggcgcccaagccagttccaagcaccagaaacgcaagaagaggcgaaagcgtcaaaagggcggctccgcctcccgacgccgcttatcatctgcttccagccccggtggtcttgatgccgggctggttgaaccaccgaggctgttatcatcacctaatagtgcctcagtgctgaagatcaaaactgaaatcagcgaacctatcaattttgacaatgactccagcatatggaactatccgccgaatagggaaatatcgcgaaatgagagcccgtactccatgacgaagcctccctctagtgaacatttccctagtccacaaggaggtggcgggggaggggggggaggaggaggactacacgtggctatcccagactccgtgcttacacctcctggggccgacggcgctgcagctcggaaaacccagttcggcgcttctgccactgctgctctagctccagttgcatccgaccctctatccccacctctgtctgcctctcccagagacaaacatcctgggaacggcggtgggggggggggcgggggtggaggtgccgggggaggaggaccatccgcctcaaacagcctgttatataccggagacctcgaggctctgcagcgtctgcaggcaggaaacgtcgttctgcctttggtgcaccgggtcaccggaacgctggccgctacttctacagcagcccagcgggtgtataccaccggcacaatcaggtatgcgccagcggaggttaccctcgccatgcagtccaatctgctaccaaatgcccacgccgtgaactttgtcgacgtcaattcccccggcttcggcctggatcctaaaacgcctatggagatgctgtaccatcacgtccataggctgaacatgagcggcccctttggcggagctgtgagcgcggcttctctaacacagatgcccgcgggaaatgtattcacaaccgccgaaggcctgttcagcacacttccgttcccggtgtactccaatggcatacatgccgcccagacactggagaggaaggaggactag

SEQ ID NO: 249652 - DNA, 2763 bp, Artificial Sequence
  derived and/or modified sequence
atggcccccaccaagcccagcttccagcaggaccccagccggcgggagcggctgcaggccctgaggaaggagaagagcagagatgctgcccggagcagaagaggcaaggaaaattttgagttctatgagctggccaagctgctgcccctgcctgctgccatcaccagccagctggacaaggccagcatcatccggctgaccatctcctacctgaagatgagggactttgccaaccagggcgaccccccctggaacctgaggatggagggccccccacccaacacctctgtgaagggcatccagatgtggaagtctgagctgtgcatgaggaagaccccctgtgaggtgattggagcccagaggcggcgcagccccagcgccctggccatcgaggtgtttgaggcccacctgggcagccacatcctgcagagcctggatggctttgtgtttgccctgaaccaggagggcaagttcctgtacatcagcgagaccgtgtccatctacctgggcctgagccaggtggagctgaccggcagctctgtgtttgattatgtgcaccctggggaccacgtggagatggccgagcagctgggcatgaagctgcccccaggccggggcctgctgagccagggcacagcagaagatggagccagcagcgccagcagcagcagccagagcgagaccccagagcctgtggagagcaccagccccagcctgctgaccacagacaacaccctggagaggagcttcttcatccgcatgaagagcaccctgaccaagaggggcgtgcacatcaagagcagcggctacaaggtgatccacatcaccggccgcctgcggctgcgggtgtccctgagccacggccgcacagtgcccagccagatcatgggcctggtggtggtggcccacgccctgcccccacccaccatcaatgaggtgagaattgactgccacatgtttgtgaccagggtgaacatggacctgaacatcatctactgtgagaaccgcatcagtgactacatggacctgacccctgtggacatcgtgggcaagcgctgctaccacttcatccatgctgaagatgtggagggcatccgccacagccacctggacctgctgaacaagggccagtgtgtgaccaagtactaccgctggatgcagaagaatggaggctacatctggatccagagcagcgccaccatcgccatcaatgccaagaatgccaatgagaagaacatcatctgggtgaactacctgctgagcaaccctgagtacaaggacacccccatggacatcgcccagctgccccacctgcctgagaagaccagcgagagcagcgagaccagtgacagcgagagtgacagcaaggacaccagcggcatcacagaagataatgaaaacagcaagagtgatgagaagggcaaccagagcgagaacagtgaagatcctgagccagacaggaagaagtctggaaatgcctgtgacaatgacatgaactgcaatgatgatggccacagcagcagcaacccagacagccgggacagtgatgacagctttgagcacagcgactttgagaaccccaaggctggagaagatggctttggagccctgggcgccatgcagatcaaggtggagagatatgtggagagcgagagtgacctgcggctgcagaactgtgagagcctgaccagtgacagcgccaaggacagcgacagcgctggggaggccggggcccaggccagcagcaagcaccagaagaggaagaagaggaggaagaggcagaagggcggcagcgccagcagaagaaggctgagcagcgccagcagccctgggggcctggatgctggcctggtggagcccccccggctgctgagcagccccaacagcgcctctgtgctgaagatcaagacagagatcagcgagcccatcaactttgacaatgacagcagcatctggaactacccacccaaccgggagatcagcagaaatgaaagcccctacagcatgaccaagccacccagcagcgagcacttccccagcccccagggcggcggcggcggcggcggcggcggcggcggcctgcacgtggccatcccagattctgtgctgaccccacctggagcagatggagctgctgccaggaagacccagtttggagccagcgccacagctgccctggcccctgtggccagtgaccccctgagcccccccctgagcgccagcccccgggacaagcaccctggaaatggaggcggcggcggcggcggcggcggcggggccggcggcggcggccccagcgccagcaacagcctgctgtacaccggggacctggaggccctgcagaggctgcaggccggaaatgtggtgctgcccctggtgcaccgggtgacaggcaccctggccgccaccagcacagctgcccagagggtgtacaccaccggcaccatccgctatgccccagctgaggtgaccctggccatgcagagcaacctgctgcccaatgcccatgctgtgaactttgtggatgtgaacagccctggcttcggcctggaccccaagacccccatggagatgctgtaccaccacgtgcaccggctgaacatgagcggcccctttggaggagctgtgtctgctgccagcctgacccagatgcctgctggaaatgtgttcaccacagctgagggcctcttcagcaccctgcccttccctgtgtacagcaatggcatccatgctgcccagaccctggagaggaaagaagattag

SEQ ID NO: 249653 - DNA, 2763 bp, Artificial Sequence
  derived and/or modified sequence
atggcccccaccaagcccagcttccagcaggaccccagccggcgggaacgacttcaggctttgaggaaagaaaaatctcgcgatgccgctaggagccggaggggaaaggagaactttgaattctacgagcttgccaaactccttcccctccctgccgcaatcacaagccagctggacaaggcatctattattcgcctgaccatctcatacctcaagatgcgcgattttgccaatcagggcgaccccccatggaacctgagaatggaaggtccgccaccgaatacgtctgtgaagggcatccagatgtggaaatcagagctttgtatgcgtaaaacgccgtgcgaggtgattggagcccagagacggaggtcaccctccgctctagcaattgaagtttttgaggcccatttggggagtcacatcctgcagagcctggatgggttcgtgtttgcgctgaaccaagaggggaaatttctatacatctccgagactgttagcatatacttgggtctctcacaagttgagctgactgggtcgtcggtttttgactatgtccacccaggtgatcatgtggaaatggcagagcagctaggaatgaagcttcctcccgggcggggtctcctgtcgcagggaacagcggaggatggagcctcatcagcatcaagttccagtcaatctgaaactcctgagcccgtggagagtacatccccctccctcctgaccacagataacactcttgaaagatcttttttcatccgcatgaagagtacgcttacaaagcgtggggttcatattaaaagctcaggatacaaggtcattcacattaccggtcgattacggttacgtgtgtcactctctcacggccgcaccgttcctagccagatcatgggcctggtggtagtggctcatgctctgcccccccctactatcaacgaggtccgtatcgattgtcacatgtttgttactagagttaatatggatctgaatattatttactgtgagaatcggatttcagactatatggatcttactccagtagatattgtcggaaaacgatgctaccacttcatccacgctgaggacgtggagggtatcagacacagccacctggatctgttgaacaaggggcagtgcgtgacgaagtactaccgttggatgcagaaaaatggtggttatatctggattcagtctagcgcaaccatcgctatcaacgctaagaatgccaacgaaaagaatatcatttgggtcaattacctgctgtcaaaccccgagtataaggatacaccgatggatatagcccagctcccccacttgcctgagaaaaccagtgagtcttccgagacttctgacagtgaatccgacagcaaagataccagtggtatcaccgaggataatgagaacagtaagagcgacgaaaagggaaaccaatcggagaactcggaggatccagaacccgatagaaagaaaagcggaaatgcctgcgataatgacatgaactgtaatgatgacggacacagttcatctaatcccgatagcagggactctgacgatagcttcgaacacagcgatttcgaaaacccaaaggcgggcgaagatggtttcggtgcattaggcgccatgcagatcaaggtggagagatatgtggagtccgagtccgatttgcgactccagaactgcgagtcgttaacttctgactccgccaaggatagtgacagcgccggtgaggcaggcgcgcaggctagcagcaagcaccagaaaaggaagaaaagaagaaaacggcaaaaggggggctccgccagcagaaggagactttcgtcggctagtagtcccggcgggttggatgctggacttgtggaaccaccgcggctgcttagcagtccgaattctgcctcggtgctcaagattaaaactgagatctcagaacctataaatttcgataacgactcaagtatttggaactatccacccaatcgggaaatctctagaaatgaatccccttattctatgactaaacctccaagcagcgaacacttccctagtcctcaggggggaggaggcggaggaggaggaggggggggtctccatgtggccatcccagatagcgtgctcacaccaccaggcgctgacggtgccgcggccaggaagacccagtttggggccagcgctactgccgccctggccccagttgcatctgatcctcttagtccacctttaagcgctagccctcgggataaacatcccggaaacgggggcgggggcggaggcggaggcggcggcgctggagggggggggccatcagcttctaactcattactgtatactggagacttggaagccctccagcggctccaggccggaaatgtcgtgctgccgcttgtgcatagagtgactggcacattggcggccaccagcacggccgcgcagcgggtatatactaccggtactattcgttatgccccagctgaggtaaccctggccatgcagtccaacctgctccctaacgcccacgccgtcaattttgtggatgtcaactctcctggatttgggctggaccccaaaaccccaatggagatgctctaccatcatgtgcatagactcaacatgtctggaccatttggcggggctgtctccgctgcctcgcttactcagatgccggcggggaacgtgtttactaccgctgagggactgttctccactctcccattccccgtgtactccaacggtattcatgccgcccaaactctggagcgcaaggaggactag

SEQ ID NO: 249654 - DNA, 2763 bp, Artificial Sequence
  derived and/or modified sequence
atggcgcccaccaagcccagctttcagcaggatccttccaggcgagaacgtttacaagcattgagaaaggagaaatcccgagatgctgctcgctcccgccggggaaaagaaaactttgagttctatgaattggccaagttgttgcctcttcctgcagccattaccagccagctcgacaaggcatccatcattcgacttacaattagctatctgaaaatgagggactttgctaaccagggggaccctccgtggaacttgcgaatggaaggccctccacctaacacatcagtaaaagggatacaaatgtggaaatctgaactctgcatgagaaagacaccatgtgaagttataggtgcacagcgaaggagaagccccagtgcactagccattgaagtatttgaagcacatttgggaagccacattttgcagtccctggatggctttgtatttgcactaaatcaggaaggaaaatttttgtacatttccgaaacagtctccatctacctaggcctctcacaagtggagctgacaggcagcagtgtctttgactatgtccaccccggagatcacgtggagatggctgagcagctgggcatgaagctcccccctgggcggggtctcctgtcacagggcactgctgaggacggagccagctcagcatcttcctcctctcagtcggagacccccgagccagtggagtcaaccagccccagtctgctaaccactgacaacactcttgagcgttcctttttcatccgaatgaaatctactctgaccaaacgcggtgtgcacatcaaatcatcaggatataaggtgattcacataacaggccggctacgcctgagagtgtcgctgtcccacgggaggaccgtccccagccaaatcatgggtctcgtggttgttgcgcatgccttgcctccccctacgatcaatgaagtcagaattgactgccatatgttcgtcactcgagtaaatatggacctcaatatcatttactgtgaaaataggattagtgattatatggatctgacccctgtagatatcgtagggaagagatgctaccacttcatccatgctgaagacgtggagggcatcaggcacagtcacttggacttgctgaataagggtcagtgtgtgacaaagtactatcgctggatgcagaagaacggaggatatatttggatacagtccagtgccaccatagctattaatgccaagaatgcaaatgaaaagaatatcatctgggtgaattaccttcttagcaatcctgagtacaaggacacacccatggacatcgcacagctcccccatctgccggagaaaacttccgaatcctcggagacatccgactctgagtcagactctaaagacacctcaggtattacagaggacaacgagaactccaagtccgacgagaaggggaaccagtccgagaacagcgaagacccggagcccgaccggaagaagtcgggcaacgcgtgtgacaacgacatgaactgcaacgacgacggccacagctccagtaacccggacagccgcgacagcgacgacagcttcgagcactcggactttgagaaccccaaggcgggcgaggacggcttcggtgctctgggcgcgatgcagatcaaggtggagcgctacgtggagagcgagtcggacctgcggctgcagaactgcgagtcactcacgtccgacagcgccaaggactcggacagcgcaggcgaggcgggcgcgcaggcctccagcaagcaccagaagcgcaagaaaaggcggaaacggcaaaagggcggcagcgccagccgccggcgcctgtccagcgcgtcgagcccaggcggcctggacgcgggcctggtggagcccccgcggctgctgtcctcccccaacagtgcctcggtgctcaagatcaagacggagatctcagaacccatcaatttcgacaatgacagcagcatctggaactacccgcccaaccgggagatctccaggaacgagtccccctacagcatgaccaagccccccagctctgagcacttcccgtccccgcagggcggcggcggtgggggtggcggtggcggggggctgcacgtggccattcccgactcggtcctcaccccgcccggcgccgacggcgcggccgcccgcaagactcagttcggcgcctcggccaccgcggccctggcccccgtcgcctccgacccgctgtcacccccgctctcggcgtccccgcgggacaagcaccccgggaacggcggcgggggcgggggcgggggcggcggcgcggggggcggcggccccagcgcgtccaactccttgctgtacactggggacctggaggcgctgcagaggttgcaggcgggcaacgtcgtgctcccgctggtgcacagggtgaccgggaccctggccgccaccagcacggccgcgcagagggtctacaccacgggcaccatccgctacgcgcccgccgaggtgaccctggccatgcagagcaacctgctgcccaacgcgcacgctgttaacttcgtggacgttaacagccccggctttggcctcgaccccaagacgcccatggagatgctctaccaccacgtgcaccggctcaacatgtcaggaccgttcggcggcgcagtgagcgcagctagcctgacgcagatgcccgccggcaacgtgttcaccacggccgagggactcttctccacgctgcccttccccgtctacagcaacggcatccacgcggcacagactctggagcgcaaggaggactga

SEQ ID NO: 249655 - DNA, 2763 bp, Artificial Sequence
  derived and/or modified sequence
atggcacccaccaagccaagtttccagcaggatccctcaaggagggagcgccttcaagctttgcgaaaggaaaagagtcgggatgcagctagatctcggcgtggaaaagagaactttgagttttacgaactcgcgaaactcctgcctcttcccgcagccattacaagccagctggacaaggctagcattattcgtcttaccatatcttatctgaaaatgcgtgactttgccaaccagggcgaccccccttggaacttgcgcatggagggtccaccgccaaataccagcgtaaaaggcattcaaatgtggaaatctgagttatgcatgcgcaaaaccccatgcgaggtcatcggcgcacagagaagaagatccccaagcgccctggctatcgaggtgttcgaagcacatcttggatcccatatccttcagagtttggatggcttcgtctttgccctcaaccaggagggcaaatttctttacatttcagaaacagtttccatctatctgggcctctcccaggtggagctgactggcagcagcgtattcgattatgtgcaccccggagaccatgtggagatggcagagcagctaggcatgaaactgccaccaggaaggggtctgctgtctcagggcactgccgaggacggagcgtcatccgcctctagctcaagtcaatccgagactcccgaacccgtggagtctacgagcccaagcctgctgactacggataatacccttgagaggagtttcttcattcggatgaagtctacactaacaaaaaggggggtacacatcaagtcaagtggatataaggtgatccatatcacggggaggctccgcctgagagtatctctaagtcacggcaggacagtgccgtcgcagatcatgggtttggtagtggtggcacatgctttacctcctccaaccataaatgaagtgcgcatagattgccacatgttcgtgacacgggtaaatatggacctgaacattatctactgtgaaaacaggatctcggactatatggaccttacccccgtcgatatcgtggggaaacgctgttaccactttatccacgcagaggacgtggaagggattcggcactcacatctcgacctgttgaataaaggtcagtgtgtgaccaaatactacaggtggatgcagaagaacggcggatatatctggatccagagttcggccactatcgcaatcaacgccaagaatgcgaacgaaaaaaatatcatttgggtgaactacctgctttcaaatccagagtacaaggacacacctatggatatcgcacagctgccacatctgccagaaaaaaccagtgagagctctgaaacctccgattctgagtccgattccaaagacacaagtggtataaccgaagataatgaaaacagcaagtctgacgagaaagggaatcagtcagagaacagtgaggaccctgaaccggatcggaaaaagagcggtaatgcttgtgataacgacatgaattgtaacgatgatggccactctagttccaacccggacagccgggatagcgatgactcctttgaacattccgactttgaaaaccctaaagccggtgaggatggttttggtgctcttggcgcaatgcaaatcaaggtagaaagatacgtggaatccgagtcagatctacgcctacagaactgtgaaagtcttacctcagacagcgccaaagatagtgattcagcaggcgaggctggggcacaggcctcaagtaaacatcagaagcgtaagaaaaggagaaagcgtcagaaaggcggaagtgcttcccgccgtcggctgagctcagctagcagcccaggtgggctcgatgccggactggtcgaacccccaaggctgctgtcgagcccaaatagcgcttctgtcctcaaaattaagactgaaatctccgagccaatcaattttgataacgattctagtatttggaactacccacccaatcgagagatttcaaggaacgagtctccctacagtatgaccaaaccacccagcagtgagcacttcccctcgccgcagggtggcggagggggaggcggtgggggagggggtttacacgtggctatacccgattctgtgctgacgccaccgggtgcggatggagcagctgctcggaagactcagttcggagcctctgccacagcagccctggcccctgtggctagcgatcctttgtctccaccactgtcggccagcccccgtgataaacaccctggcaatggaggaggcggtggaggaggagggggaggggcagggggaggtggaccctcagcttcgaatagtcttctgtatactggagatctcgaagctcttcagaggctgcaggccggaaatgtggtgctgccactggttcaccgtgtcacagggacactagccgcaaccagcacagcagcccagcgcgtctacaccaccgggacaattagatatgcccctgcggaggtgacattagcaatgcagtccaatttgcttcccaatgcccacgccgttaactttgtcgacgtcaatagccccggtttcggcttagaccccaagactcccatggagatgctgtaccaccatgtacaccggctcaatatgtctgggcctttcggcggagcagtttcagcagcaagccttacccagatgccggcagggaacgtttttaccaccgctgagggcctattctcgaccttaccttttcctgtctatagtaacgggattcatgctgctcagactctggagagaaaagaggattag

SEQ ID NO: 249656 - DNA, 2763 bp, Artificial Sequence
  derived and/or modified sequence
atggcccccaccaagcccagcttccagcaggaccccagcagaagagagagactgcaggccctgagaaaggagaagagcagagacgccgccagaagcagaagaggcaaggagaacttcgagttctacgagctggccaagctgctgcccctgcccgccgccatcaccagccagctggacaaggccagcatcatcagactgaccatcagctacctgaagatgagagacttcgccaaccagggcgaccccccctggaacctgagaatggagggccccccccccaacaccagcgtgaagggcatccagatgtggaagagcgagctgtgcatgagaaagaccccctgcgaggtgatcggcgcccagagaagaagaagccccagcgccctggccatcgaggtgttcgaggcccacctgggcagccacatcctgcagagcctggacggcttcgtgttcgccctgaaccaggagggcaagttcctgtacatcagcgagaccgtgagcatctacctgggcctgagccaggtggagctgaccggcagcagcgtgttcgactacgtgcaccccggcgaccacgtggagatggccgagcagctgggcatgaagctgccccccggcagaggcctgctgagccagggcaccgccgaggacggcgccagcagcgccagcagcagcagccagagcgagacccccgagcccgtggagagcaccagccccagcctgctgaccaccgacaacaccctggagagaagcttcttcatcagaatgaagagcaccctgaccaagagaggcgtgcacatcaagagcagcggctacaaggtgatccacatcaccggcagactgagactgagagtgagcctgagccacggcagaaccgtgcccagccagatcatgggcctggtggtggtggcccacgccctgcccccccccaccatcaacgaggtgagaatcgactgccacatgttcgtgaccagagtgaacatggacctgaacatcatctactgcgagaacagaatcagcgactacatggacctgacccccgtggacatcgtgggcaagagatgctaccacttcatccacgccgaggacgtggagggcatcagacacagccacctggacctgctgaacaagggccagtgcgtgaccaagtactacagatggatgcagaagaacggcggctacatctggatccagagcagcgccaccatcgccatcaacgccaagaacgccaacgagaagaacatcatctgggtgaactacctgctgagcaaccccgagtacaaggacacccccatggacatcgcccagctgccccacctgcccgagaagaccagcgagagcagcgagaccagcgacagcgagagcgacagcaaggacaccagcggcatcaccgaggacaacgagaacagcaagagcgacgagaagggcaaccagagcgagaacagcgaggaccccgagcccgacagaaagaagagcggcaacgcctgcgacaacgacatgaactgcaacgacgacggccacagcagcagcaaccccgacagcagagacagcgacgacagcttcgagcacagcgacttcgagaaccccaaggccggcgaggacggcttcggcgccctgggcgccatgcagatcaaggtggagagatacgtggagagcgagagcgacctgagactgcagaactgcgagagcctgaccagcgacagcgccaaggacagcgacagcgccggcgaggccggcgcccaggccagcagcaagcaccagaagagaaagaagagaagaaagagacagaagggcggcagcgccagcagaagaagactgagcagcgccagcagccccggcggcctggacgccggcctggtggagccccccagactgctgagcagccccaacagcgccagcgtgctgaagatcaagaccgagatcagcgagcccatcaacttcgacaacgacagcagcatctggaactacccccccaacagagagatcagcagaaacgagagcccctacagcatgaccaagccccccagcagcgagcacttccccagcccccagggcggcggcggcggcggcggcggcggcggcggcctgcacgtggccatccccgacagcgtgctgaccccccccggcgccgacggcgccgccgccagaaagacccagttcggcgccagcgccaccgccgccctggcccccgtggccagcgaccccctgagcccccccctgagcgccagccccagagacaagcaccccggcaacggcggcggcggcggcggcggcggcggcggcgccggcggcggcggccccagcgccagcaacagcctgctgtacaccggcgacctggaggccctgcagagactgcaggccggcaacgtggtgctgcccctggtgcacagagtgaccggcaccctggccgccaccagcaccgccgcccagagagtgtacaccaccggcaccatcagatacgcccccgccgaggtgaccctggccatgcagagcaacctgctgcccaacgcccacgccgtgaacttcgtggacgtgaacagccccggcttcggcctggaccccaagacccccatggagatgctgtaccaccacgtgcacagactgaacatgagcggccccttcggcggcgccgtgagcgccgccagcctgacccagatgcccgccggcaacgtgttcaccaccgccgagggcctgttcagcaccctgcccttccccgtgtacagcaacggcatccacgccgcccagaccctggagagaaaggaggactag

SEQ ID NO: 249657 - protein, 732 aa, Artificial Sequence
  derived and/or modified sequence
MPVRRGHVAPQNTFLGTIIRKFEGQNKKFIIANARVQNCAIIYCNDGFCEMTGFSRPDVMQKPCTCDFLHGPETKRHDIAQIAQALLGSEERKVEVTYYHKNGSTFICNTHIIPVKNQEGVAMMFIINFEYVTDNENAATPERVNPILPIKTVNRKFFGFKFPGLRVLTYRKQSLPQEDPDVVVIDSSKHSDDSVAMKHFKSPTKESCSPSEADDTKALIQPSKCSPLVNISGPLDHSSPKRQWDRLYPDMLQSSSQLSHSRSRESLCSIRRASSVHDIEGFGVHPKNIFRDRHASEGPFNHIKSSLLGSTSDSNLNKYSTINKIPQLTLNFSEVKTEKKNSSPPSSDKTIIAPKVKDRTHNVTEKVTQVLSLGADVLPEYKLQTPRINKFTILHYSPFKAVWDWLILLLVIYTAIFTPYSAAFLLNDREEQKRRECGYSCSPLNVVDLIVDIMFIIDILINFRTTYVNQNEEVVSDPAKIAIHYFKGWFLIDMVAAIPFDLLIFGSGSDETTTLIGLLKTARLLRLVRVARKLDRYSEYGAAVLMLLMCIFALIAHWLACIWYAIGNVERPYLTDKIGWLDSLGQQIGKRYNDSDSSSGPSIKDKYVTALYFTFSSLTSVGFGNVSPNTNSEKIFSICVMLIGSLMYASIFGNVSAIIQRLYSGTARYHMQMLRVKEFIRFHQIPNPLRQRLEEYFQHAWTYTNGIDMNMVCMSVFQNESAAGIIVIAKME

SEQ ID NO: 249658 - DNA, 2199 bp, Artificial Sequence
  derived and/or modified sequence
atgcctgtaaggcgaggacacgtggctccgcagaatacgtttctgggcaccattatccggaaattcgaaggacagaataaaaagttcatcatcgcaaacgctcgggtgcaaaactgtgctattatatactgtaacgacggattctgcgagatgacgggcttttccagacctgatgtgatgcagaagccgtgcacctgtgactttctccacggacctgaaaccaagcgacatgacattgcccagattgcacaagccctgctgggctccgaagagcgcaaggtggaggtgacgtactaccacaaaaatggttcaacatttatttgtaatactcatataatccccgtgaaaaaccaggaaggagtggcgatgatgttcattattaactttgagtacgtaaccgacaacgagaatgctgccacacccgagcgcgtgaaccctattctcccgataaaaaccgtaaaccgaaagttctttggatttaagtttccgggattacgggtcctgacctatcgaaaacagagcttgcctcaggaggacccagacgtggtggtgattgatagcagcaaacattccgatgacagcgtggcaatgaagcattttaagtcacctacgaaggagtcgtgttccccctctgaggcagacgacaccaaggcactgattcagcccagtaaatgctccccactggttaatatttctgggcctctagaccattccagccccaagaggcagtgggatagattgtatcccgatatgcttcagtcttcgagccaacttagccattctcggagtagggaaagcttgtgcagtatccgccgggccagttcagttcatgatatcgaggggttcggggtccatcctaaaaatatctttcgggaccgtcacgctagcgaggggccgttcaaccacatcaagagcagccttttgggttcaacttctgacagtaatctaaataaatactcaaccatcaacaaaatcccacaactgacactcaatttttcagaggtgaagacagagaagaaaaactcttccccccccagctctgacaagaccatcattgctccaaaggtgaaagataggacgcacaacgtcaccgaaaaagtgactcaagtcctaagtcttggggcagacgtcctgcctgaatacaagcttcagacaccaagaataaacaagttcactatcctccattactctccatttaaagctgtttgggactggcttattctcttgctggtcatctacacagccatctttacgccctactccgccgcgtttcttctcaacgacagggaggagcagaagcggagagaatgtggttatagctgtagtcctctcaatgtcgtagacttgattgtcgatataatgtttattatcgatatattaattaacttcagaacgacatatgtaaatcaaaatgaggaggttgtgtctgaccccgctaaaatcgcgattcactacttcaaaggttggtttttgatcgacatggttgccgctatccccttcgacctcctgatattcggcagtggatccgatgaaacaaccacactcatcggcttgctgaagaccgccagactgttgaggctggtacgcgtggctcgtaaattggacaggtactctgaatacggggctgccgtgctgatgctgctgatgtgtatatttgctctgatcgctcactggctggcctgtatctggtacgcaatcggaaacgtagaaagaccatatctaaccgataaaatcggctggttggattcacttggccaacagattggaaagcgttacaatgacagcgattcctctagtggaccatcaatcaaggacaagtatgttactgcactgtatttcacctttagttcactaacgtccgtgggattcgggaacgtgtccccaaatactaactcagaaaaaatcttttctatctgtgtcatgctaattggctcactaatgtacgcaagtatctttggcaatgtgagcgccataatccagaggctttatagtggaacagcccgttaccacatgcagatgctacgagtcaaggaattcatccggtttcaccaaatccccaaccccttgagacagcgcctggaggaatacttccaacacgcctggacctacaccaatgggatcgatatgaatatggtttgtatgtctgtattccaaaacgaaagcgcagctggcataattgtgattgcaaagatggaatag

SEQ ID NO: 249659 - DNA, 2199 bp, Artificial Sequence
  derived and/or modified sequence
atgcctgtgcggcggggccacgtggccccccagaacaccttcctgggcaccatcatcaggaagtttgagggccagaacaagaagttcatcatcgccaatgcccgggtgcagaactgtgccatcatctactgcaatgatggcttctgtgagatgacaggcttcagcaggccagatgtgatgcagaagccctgcacctgtgacttcctgcacggccctgagaccaagagacatgacatcgcccagatcgcccaggccctgctgggcagcgaggagaggaaggtggaggtgacctactaccacaagaatggcagcaccttcatctgcaacacccacatcatccctgtgaagaaccaggagggcgtggccatgatgttcatcatcaactttgaatatgtgacagacaatgaaaatgctgccaccccagagcgggtgaaccccatcctgcccatcaagacagtgaacaggaagttcttcggcttcaagtttcctggcctgcgggtgctgacctacaggaagcagagcctgccccaggaggaccctgatgtggtggtgattgacagcagcaagcacagtgatgacagcgtggccatgaagcacttcaagagccccaccaaggagagctgcagccccagcgaggctgatgacaccaaggccctgatccagcccagcaagtgcagccccctggtgaacatcagcggccccctggaccacagcagccccaagaggcagtgggaccggctgtacccagacatgctgcagagcagcagccagctgagccacagccgcagccgggagagcctgtgcagcatcagaagagccagctctgtgcatgacatcgagggcttcggcgtgcaccccaagaacatcttccgggacagacatgccagcgagggccccttcaaccacatcaagagcagcctgctgggcagcaccagtgacagcaacctgaacaagtacagcaccatcaacaagatcccccagctgaccctgaacttcagcgaggtgaagacagagaagaagaacagcagcccccccagcagtgacaagaccatcatcgcccccaaggtgaaggacaggacccacaacgtgacagagaaggtgacccaggtgctgagcctgggcgcagatgtgctgcctgagtacaagctgcagaccccccgcatcaacaagttcaccatcctgcactacagccccttcaaggctgtgtgggactggctgatcctgctgctggtgatctacacagccatcttcaccccctacagcgctgccttcctgctgaatgaccgggaggagcagaagaggcgggagtgtggctacagctgcagccccctgaatgtggtggacctgattgtggacatcatgttcatcatcgacatcctgatcaacttccgcaccacctacgtgaaccagaatgaggaggtggtgtctgaccctgccaagatcgccatccactacttcaagggctggttcctgattgacatggtggccgccatcccctttgacctgctgatctttggaagtggcagtgatgagaccaccaccctcatcggcctgctgaagacagcccggctgctgcggctggtgcgggtggccaggaagctggaccgctacagtgaatatggagctgctgtgctgatgctgctgatgtgcatctttgccctgattgcccactggctggcctgcatctggtacgccatcggaaatgtggagcggccctacctgacagacaagattggctggctggacagcctgggccagcagatcggcaagcgctacaatgacagcgacagcagcagcggccccagcatcaaggacaagtatgtgacagccctgtacttcaccttcagcagcctgacctctgtgggctttggaaatgtgagccccaacaccaacagcgagaagatcttcagcatctgtgtgatgctgattggcagcctgatgtatgccagcatctttggaaatgtgtctgccatcatccagaggctgtacagcggcacagcccgctaccacatgcagatgctgcgggtgaaggagttcatccgcttccaccagatccccaaccccctgcggcagaggctggaggagtacttccagcacgcctggacctacaccaatggaattgacatgaacatggtgtgcatgtctgtgttccagaatgaatctgctgctggcatcatcgtcatcgccaagatggagtag

SEQ ID NO: 249660 - DNA, 2199 bp, Artificial Sequence
  derived and/or modified sequence
atgcccgtgcggcggggccacgtggccccccagaacaccttcctgggtactatcattagaaagtttgaggggcagaataaaaagttcatcatcgcaaacgcccgggttcagaactgtgcgatcatttactgcaatgacggattttgcgaaatgacggggttttcacgtccagatgttatgcagaagccctgcacatgcgactttcttcacgggcccgagacaaaacggcacgacatcgcacagatcgcacaggccctgttgggctccgaggagcgtaaagtggaggtgacctactatcataagaatggttcgacgttcatatgcaatacacatatcatcccggtcaaaaatcaagagggggtggcaatgatgtttatcattaattttgagtacgtgaccgataatgaaaacgccgctacccccgagcgagtaaaccccattttgcctataaagacagttaacagaaaattttttgggttcaagttccccgggttgagagtcctgacataccgcaagcagtcgctaccacaagaagatccagatgtagttgtcattgacagcagcaagcactccgacgacagtgtggcaatgaagcactttaaatctcccactaaggagtcttgcagtccgtctgaggctgacgacactaaggccctgatccagccttcaaaatgtagccccctggtgaacatctctggaccactcgaccactcttcgcccaaaagacagtgggataggctttaccctgatatgctccagagttcctcccaactgtctcatagtaggtctagagaaagtttatgtagcattcgacgcgcctcttccgtgcacgacattgaaggctttggggtgcacccgaaaaatatcttcagagacaggcacgccagcgagggtcccttcaatcacatcaagtcctcactcctcggctcaactagtgacagcaatttaaataagtattctactatcaataaaattccacagcttactcttaatttttcagaggtaaagaccgagaagaagaactcgagtcccccaagttccgataagactatcatcgctcctaaagtgaaggatcgcacccacaatgttaccgagaaagttacgcaagtgcttagtctgggtgctgacgtgctgcctgagtacaagctgcagacccctcgtattaacaagttcacaatccttcactacagtcccttcaaggcagtatgggattggttgatcctgctcctggtcatatataccgccatatttactccgtatagcgccgcgtttctgctgaatgaccgcgaagaacaaaagcgccgtgagtgcggatattcttgtagtccactgaacgtcgtcgacttgattgtggatatcatgtttatcatagatatcctaataaacttcaggacaacctacgtcaaccaaaatgaagaggtggtaagtgaccctgcaaaaatcgcaatccattatttcaaaggctggtttctgatcgacatggtagctgccattccattcgaccttctaatctttggatcgggaagcgacgaaaccaccacccttatcgggcttctcaagactgccaggctcctccgcctggtcagagtggcccgcaagttagaccgatacagcgagtacggtgcagcagtactgatgcttctgatgtgtatctttgccctcatagcccactggttggcttgtatttggtatgccatcgggaatgtcgaaaggccctacctgaccgataagatcggatggctcgattctttaggacagcagattggtaagcggtataacgatagcgactcgtcttcagggccgtccatcaaggacaaatacgtgaccgccctgtattttaccttcagttctctaacgtcagtggggttcggcaacgtgagccctaacacaaactcagagaagatcttctccatctgcgtgatgctgatcggcagcctgatgtacgcatccatcttcggaaatgtgtcggccatcatacagcgcctgtactcaggcactgcgcgctaccacatgcagatgttgcgcgtaaaggagttcatcaggttccaccagatacccaatcctctgcgtcagagactggaagaatacttccagcacgcttggacctacacaaacgggattgatatgaatatggtatgcatgtctgtctttcagaacgaatcagccgccgggataattgtcatcgctaaaatggaatag

SEQ ID NO: 249661 - DNA, 2434 bp, Artificial Sequence
  derived and/or modified sequence
ggccccctccggaaggtgaggggaatggattggactccggtggggaaagcgggtgtctagaagtggtgctaatgggaagagaattctggtttcaaaagaggatgctctgccacaaagagcggctcgcgcgctggcctgggctctagccgaggagagatcccgggagaactccagagctccgggggagcgctcctcggaagaccggggccaacatgcctgtgcgcagggggcatgtggcaccacaaaatacatttctggggaccatcattcggaaatttgaagggcaaaataaaaaatttatcattgcaaatgccagagtgcagaactgtgccatcatttattgcaacgatgggttctgtgagatgactggtttctccaggccagatgtcatgcaaaagccatgcacctgcgactttctccatggacccgagaccaagaggcatgatattgcccaaattgcccaggcattgctggggtcagaagagaggaaagtggaggtcacctactatcacaaaaatgggtccacttttatttgtaacactcacataattccagtgaaaaaccaagagggcgtggctatgatgttcatcattaattttgaatatgtgacggataatgaaaacgctgccaccccagagagggtaaacccaatattaccaatcaaaactgtaaaccggaaattttttgggttcaaattccctggtctgagagttctcacttacagaaagcagtccttaccacaagaagaccccgatgtggtggtcatcgattcatctaaacacagtgatgattcagtagccatgaagcattttaagtctcctacaaaagaaagctgcagcccctctgaagcagatgacacaaaagctttgatacagcccagcaaatgttctcccttggtgaatatatccggacctcttgaccattcctctcccaaaaggcaatgggaccgactctaccctgacatgctgcagtcaagttcccagctgtcccattccagatcaagggaaagcttatgtagtatacggagagcatcttcggtccatgatatagaaggattcggcgtccaccccaagaacatatttagagaccgacatgccagcgaagggccttttaatcatatcaagtcaagcctcctgggatccacatcagattcaaacctcaacaaatacagcaccattaacaagattccacagctcactctgaatttttcagaggtcaaaactgagaaaaagaattcatcacctccttcttcagataaaaccattattgcacccaaggttaaagatcgaacacacaatgtgactgagaaagtgacccaggttctctctttaggagcagatgtcctacctgaatacaaactgcagacaccacgcatcaacaagtttacgatattgcactacagccctttcaaggcagtctgggactggcttatcctgctgttggtcatatacactgctatatttactccctactctgcagccttcctcctcaatgacagagaagaacagaaaagacgagaatgtggctattcttgtagccctttgaatgtggtagacttgattgtggatattatgtttatcatagatattttaataaacttcagaacaacatatgtaaatcagaatgaagaagtggtaagtgatcccgccaaaatagcaatacactacttcaaaggctggttcctgattgacatggttgcagcaattccttttgacttgctgatttttggatcaggttctgatgagacaacaacattaattggtcttttgaagactgcccgactcctccgtcttgtgcgcgtggccaggaaactggatcgatattcagaatatggcgctgctgttctaatgctcttaatgtgcatctttgccctgattgctcactggctggcttgcatttggtatgcgattgggaatgtagaaaggccttacctgactgacaaaatcggatggttggattccttaggacagcaaattgggaaacgttacaatgacagtgactcaagttctggaccatccattaaagacaaatacgtcacagcactttattttaccttcagcagtttaaccagtgtaggattcgggaatgtgtctcctaacacgaattcggagaaaatcttttcaatttgtgtcatgttgattggctcactaatgtatgcaagcatttttgggaatgtatctgcaattatccaaagactatactcgggaactgccaggtaccacatgcagatgctgcgagtaaaagagttcattcgctttcaccaaatccccaaccctctgaggcaacgtcttgaagaatatttccagcacgcatggacttacaccaatggcattgacatgaacatggtatgtatgtctgttttccaaaatgaaagtgccgcaggcattatagtgatagccaaaatggaataaaagccggaatcaccagctttgaa

SEQ ID NO: 249662 - DNA, 2199 bp, Artificial Sequence
  derived and/or modified sequence
atgccagtaaggcgcggtcacgtcgctcctcagaatacgttcctgggtactatcatcagaaaatttgaaggacaaaacaaaaaatttattattgccaatgcccgtgtgcagaactgcgcaataatctactgcaatgatggtttctgtgaaatgacaggtttttctcgtccggacgtgatgcaaaagccatgcacttgcgactttctccatggccctgaaactaagcggcatgacattgcacagattgctcaggcccttctggggtctgaggaacggaaagtggaggtgacatactatcataagaatggctccacattcatctgcaacacacatatcatacctgtgaaaaatcaggaaggggttgctatgatgttcatcatcaatttcgagtatgtgactgacaacgaaaatgccgcaactccagagagagttaaccccatcctgcccataaagactgtcaatcgtaaatttttcggcttcaaatttccaggactgcgcgttctgacctataggaaacagtctctgccacaggaagacccagacgtggtagttatcgatagtagtaagcacagcgatgattccgtagcaatgaaacactttaagtctccaacaaaagagagttgcagccctagtgaggccgacgatactaaggccttgattcagccatccaaatgctctccattggtgaacattagtggaccactagaccactcctcaccaaaaagacagtgggaccgcctttatccagacatgctgcagtccagctcccagctgagccatagtcgctcccgagagtctttgtgttcgatccggagggcatcgagcgtccatgacattgaaggtttcggagtgcatcctaaaaatatatttcgtgacagacacgccagcgagggcccatttaatcacattaagagctcgctgctggggagtacaagcgactccaacttgaacaagtactccaccataaataaaatacctcagttaacgctgaacttcagcgaggtgaagaccgaaaagaaaaactcatcacccccatctagcgacaagacaatcatcgctcctaaggtcaaagatagaacacacaatgtgacagagaaggttactcaggtgctgagtctcggcgcagacgtgttgccagagtacaagctgcagactcccaggatcaacaagttcacaatcctccactactctccgtttaaagcggtatgggactggttaattctactacttgtaatctacaccgccatttttactccctattcagctgccttcctgttgaatgatcgggaggaacagaaacgcagggagtgtgggtatagctgctctccactgaatgttgttgacctcattgtggatatcatgttcatcatcgatatcttgatcaactttaggactacatacgttaaccagaacgaggaggtggtgtctgaccctgccaagatagcaatacattactttaaggggtggttcttgatcgatatggtcgccgcaattcctttcgatctcctgatcttcggatcaggtagcgacgagacgactaccctgattggtcttttgaaaactgctcggctgttgagactcgtgagagtcgcacgcaaattggacagatatagcgaatacggcgctgccgtgctgatgcttttaatgtgtattttcgctttaattgcacattggctagcctgtatctggtatgcgatcggaaacgtcgaacgcccatacttgaccgataaaatcggctggctggacagcttaggtcagcaaatcggcaagcgctataacgattctgactcttcttcaggcccatccattaaagataagtatgtcactgctctctattttacgttttctagtcttaccagtgtcggctttggtaacgtctccccaaacaccaactccgaaaagattttctcaatctgcgtgatgttgatcggctccttgatgtacgcaagcatcttcggtaatgttagcgccattattcagcgtctctactcaggcaccgctaggtaccacatgcagatgctgagggtgaaagaattcatcagatttcatcaaattcccaaccccctccgccagcgcttagaagaatattttcagcatgcatggacttatactaacggcattgacatgaacatggtgtgcatgagcgtctttcagaacgaaagtgccgctgggattattgtgattgcgaaaatggagtag

SEQ ID NO: 249663 - DNA, 2199 bp, Artificial Sequence
  derived and/or modified sequence
atgcccgtgagaagaggccacgtggccccccagaacaccttcctgggcaccatcatcagaaagttcgagggccagaacaagaagttcatcatcgccaacgccagagtgcagaactgcgccatcatctactgcaacgacggcttctgcgagatgaccggcttcagcagacccgacgtgatgcagaagccctgcacctgcgacttcctgcacggccccgagaccaagagacacgacatcgcccagatcgcccaggccctgctgggcagcgaggagagaaaggtggaggtgacctactaccacaagaacggcagcaccttcatctgcaacacccacatcatccccgtgaagaaccaggagggcgtggccatgatgttcatcatcaacttcgagtacgtgaccgacaacgagaacgccgccacccccgagagagtgaaccccatcctgcccatcaagaccgtgaacagaaagttcttcggcttcaagttccccggcctgagagtgctgacctacagaaagcagagcctgccccaggaggaccccgacgtggtggtgatcgacagcagcaagcacagcgacgacagcgtggccatgaagcacttcaagagccccaccaaggagagctgcagccccagcgaggccgacgacaccaaggccctgatccagcccagcaagtgcagccccctggtgaacatcagcggccccctggaccacagcagccccaagagacagtgggacagactgtaccccgacatgctgcagagcagcagccagctgagccacagcagaagcagagagagcctgtgcagcatcagaagagccagcagcgtgcacgacatcgagggcttcggcgtgcaccccaagaacatcttcagagacagacacgccagcgagggccccttcaaccacatcaagagcagcctgctgggcagcaccagcgacagcaacctgaacaagtacagcaccatcaacaagatcccccagctgaccctgaacttcagcgaggtgaagaccgagaagaagaacagcagcccccccagcagcgacaagaccatcatcgcccccaaggtgaaggacagaacccacaacgtgaccgagaaggtgacccaggtgctgagcctgggcgccgacgtgctgcccgagtacaagctgcagacccccagaatcaacaagttcaccatcctgcactacagccccttcaaggccgtgtgggactggctgatcctgctgctggtgatctacaccgccatcttcaccccctacagcgccgccttcctgctgaacgacagagaggagcagaagagaagagagtgcggctacagctgcagccccctgaacgtggtggacctgatcgtggacatcatgttcatcatcgacatcctgatcaacttcagaaccacctacgtgaaccagaacgaggaggtggtgagcgaccccgccaagatcgccatccactacttcaagggctggttcctgatcgacatggtggccgccatccccttcgacctgctgatcttcggcagcggcagcgacgagaccaccaccctgatcggcctgctgaagaccgccagactgctgagactggtgagagtggccagaaagctggacagatacagcgagtacggcgccgccgtgctgatgctgctgatgtgcatcttcgccctgatcgcccactggctggcctgcatctggtacgccatcggcaacgtggagagaccctacctgaccgacaagatcggctggctggacagcctgggccagcagatcggcaagagatacaacgacagcgacagcagcagcggccccagcatcaaggacaagtacgtgaccgccctgtacttcaccttcagcagcctgaccagcgtgggcttcggcaacgtgagccccaacaccaacagcgagaagatcttcagcatctgcgtgatgctgatcggcagcctgatgtacgccagcatcttcggcaacgtgagcgccatcatccagagactgtacagcggcaccgccagataccacatgcagatgctgagagtgaaggagttcatcagattccaccagatccccaaccccctgagacagagactggaggagtacttccagcacgcctggacctacaccaacggcatcgacatgaacatggtgtgcatgagcgtgttccagaacgagagcgccgccggcatcatcgtgatcgccaagatggagtag

SEQ ID NO: 249664 - protein, 1065 aa, Artificial Sequence
  derived and/or modified sequence
MTTANCGAHDELDFKLVFGEDGAPAPPPPGSRPADLEPDDCASIYIFNVDPPPSTLTTPLCLPHHGLPSHSSVLSPSFQLQSHKNYEGTCEIPESKYSPLGGPKPFECPSIQITSISPNCHQELDAHEDDLQINDPEREFLERPSRDHLYLPLEPSYRESSLSPSPASSISSRSWFSDASSCESLSHIYDDVDSELNEAAARFTLGSPLTSPGGSPGGCPGEETWHQQYGLGHSLSPRQSPCHSPRSSVTDENWLSPRPASGPSSRPTSPCGKRRHSSAEVCYAGSLSPHHSPVPSPGHSPRGSVTEDTWLNASVHGGSGLGPAVFPFQYCVETDIPLKTRKTSEDQAAILPGKLELCSDDQGSLSPARETSIDDGLGSQYPLKKDSCGDQFLSVPSPFTWSKPKPGHTPIFRTSSLPPLDWPLPAHFGQCELKIEVQPKTHHRAHYETEGSRGAVKASTGGHPVVKLLGYNEKPINLQMFIGTADDRYLRPHAFYQVHRITGKTVATASQEIIIASTKVLEIPLLPENNMSASIDCAGILKLRNSDIELRKGETDIGRKNTRVRLVFRVHIPQPSGKVLSLQIASIPVECSQRSAQELPHIEKYSINSCSVNGGHEMVVTGSNFLPESKIIFLEKGQDGRPQWEVEGKIIREKCQGAHIVLEVPPYHNPAVTAAVQVHFYLCNGKRKKSQSQRFTYTPVLMKQEHREEIDLSSVPSLPVPHPAQTQRPSSDSGCSHDSVLSGQRSLICSIPQTYASMVTSSHLPQLQCRDESVSKEQHMIPSPIVHQPFQVTPTPPVGSSYQPMQTNVVYNGPTCLPINAASSQEFDSVLFQQDATLSGLVNLGCQPLSSIPFHSSNSGSTGHLLAHTPHSVHTLPHLQSMGYHCSNTGQRSLSSPVADQITGQPSSQLQPITYGPSHSGSATTASPAASHPLASSPLSGPPSPQLQPMPYQSPSSGTASSPSPATRMHSGQHSTQAQSTGQGGLSAPSSLICHSLCDPASFPPDGATVSIKPEPEDREPNFATIGLQDITLDDDLFTSNNFDLLQLRPTFWPVPAGRYLRNLE

SEQ ID NO: 249665 - DNA, 3198 bp, Artificial Sequence
  derived and/or modified sequence
atgaccaccgccaactgcggcgcccacgacgagctggacttcaagctggtgttcggcgaggacggcgcccccgccccccccccccccggcagcagacccgccgacctggagcccgacgactgcgccagcatctacatcttcaacgtggaccccccccccagcaccctgaccacccccctgtgcctgccccaccacggcctgcccagccacagcagcgtgctgagccccagcttccagctgcagagccacaagaactacgagggcacctgcgagatccccgagagcaagtacagccccctgggcggccccaagcccttcgagtgccccagcatccagatcaccagcatcagccccaactgccaccaggagctggacgcccacgaggacgacctgcagatcaacgaccccgagagagagttcctggagagacccagcagagaccacctgtacctgcccctggagcccagctacagagagagcagcctgagccccagccccgccagcagcatcagcagcagaagctggttcagcgacgccagcagctgcgagagcctgagccacatctacgacgacgtggacagcgagctgaacgaggccgccgccagattcaccctgggcagccccctgaccagccccggcggcagccccggcggctgccccggcgaggagacctggcaccagcagtacggcctgggccacagcctgagccccagacagagcccctgccacagccccagaagcagcgtgaccgacgagaactggctgagccccagacccgccagcggccccagcagcagacccaccagcccctgcggcaagagaagacacagcagcgccgaggtgtgctacgccggcagcctgagcccccaccacagccccgtgcccagccccggccacagccccagaggcagcgtgaccgaggacacctggctgaacgccagcgtgcacggcggcagcggcctgggccccgccgtgttccccttccagtactgcgtggagaccgacatccccctgaagaccagaaagaccagcgaggaccaggccgccatcctgcccggcaagctggagctgtgcagcgacgaccagggcagcctgagccccgccagagagaccagcatcgacgacggcctgggcagccagtaccccctgaagaaggacagctgcggcgaccagttcctgagcgtgcccagccccttcacctggagcaagcccaagcccggccacacccccatcttcagaaccagcagcctgccccccctggactggcccctgcccgcccacttcggccagtgcgagctgaagatcgaggtgcagcccaagacccaccacagagcccactacgagaccgagggcagcagaggcgccgtgaaggccagcaccggcggccaccccgtggtgaagctgctgggctacaacgagaagcccatcaacctgcagatgttcatcggcaccgccgacgacagatacctgagaccccacgccttctaccaggtgcacagaatcaccggcaagaccgtggccaccgccagccaggagatcatcatcgccagcaccaaggtgctggagatccccctgctgcccgagaacaacatgagcgccagcatcgactgcgccggcatcctgaagctgagaaacagcgacatcgagctgagaaagggcgagaccgacatcggcagaaagaacaccagagtgagactggtgttcagagtgcacatcccccagcccagcggcaaggtgctgagcctgcagatcgccagcatccccgtggagtgcagccagagaagcgcccaggagctgccccacatcgagaagtacagcatcaacagctgcagcgtgaacggcggccacgagatggtggtgaccggcagcaacttcctgcccgagagcaagatcatcttcctggagaagggccaggacggcagaccccagtgggaggtggagggcaagatcatcagagagaagtgccagggcgcccacatcgtgctggaggtgcccccctaccacaaccccgccgtgaccgccgccgtgcaggtgcacttctacctgtgcaacggcaagagaaagaagagccagagccagagattcacctacacccccgtgctgatgaagcaggagcacagagaggagatcgacctgagcagcgtgcccagcctgcccgtgccccaccccgcccagacccagagacccagcagcgacagcggctgcagccacgacagcgtgctgagcggccagagaagcctgatctgcagcatcccccagacctacgccagcatggtgaccagcagccacctgccccagctgcagtgcagagacgagagcgtgagcaaggagcagcacatgatccccagccccatcgtgcaccagcccttccaggtgacccccaccccccccgtgggcagcagctaccagcccatgcagaccaacgtggtgtacaacggccccacctgcctgcccatcaacgccgccagcagccaggagttcgacagcgtgctgttccagcaggacgccaccctgagcggcctggtgaacctgggctgccagcccctgagcagcatccccttccacagcagcaacagcggcagcaccggccacctgctggcccacaccccccacagcgtgcacaccctgccccacctgcagagcatgggctaccactgcagcaacaccggccagagaagcctgagcagccccgtggccgaccagatcaccggccagcccagcagccagctgcagcccatcacctacggccccagccacagcggcagcgccaccaccgccagccccgccgccagccaccccctggccagcagccccctgagcggcccccccagcccccagctgcagcccatgccctaccagagccccagcagcggcaccgccagcagccccagccccgccaccagaatgcacagcggccagcacagcacccaggcccagagcaccggccagggcggcctgagcgcccccagcagcctgatctgccacagcctgtgcgaccccgccagcttcccccccgacggcgccaccgtgagcatcaagcccgagcccgaggacagagagcccaacttcgccaccatcggcctgcaggacatcaccctggacgacgacctgttcaccagcaacaacttcgacctgctgcagctgagacccaccttctggcccgtgcccgccggcagatacctgagaaacctggagtag

SEQ ID NO: 249666 - DNA, 3198 bp, Artificial Sequence
  derived and/or modified sequence
atgacaacagcaaattgcggggctcacgatgaactggactttaagttggtatttggcgaggatggagcgcctgctcctcctccacccggctctaggcccgcagatcttgagcctgacgattgcgcttccatttacatattcaatgtggatccaccgcccagtaccttgacaaccccactgtgtctgcctcatcatgggctgccatcacactcttcagtgttgtcaccatcctttcagcttcagtcccataaaaactatgaaggcacatgtgagataccagagtcaaagtacagtccgttggggggtcccaagccgttcgaatgtcctagcatccagataacctcaatcagccccaattgccaccaggagctagacgctcatgaggacgacctacaaataaacgacccagaaagggaatttctggagcggccttccagagaccacttatacctgcctctggaaccctcctaccgtgagtcaagcctttcaccttctcctgcgagctccatttcttcacgttcctggttttcagacgcaagtagctgcgaatctctaagtcacatctatgacgacgtggattctgaactgaatgaggccgcagctcggttcaccctcggatccccactgacttcaccaggcggcagtcccggtgggtgtcctggagaggagacgtggcatcaacagtacgggctgggccactccttgtctcccagacagagcccatgccactcacctcgttcaagtgtgaccgacgagaactggctgtcaccgcggcccgcgagcggcccgtctagccgtcccacctccccctgcggcaaaagaagacactcatctgcagaggtctgttacgctggatcattatcacctcaccactcgccggtgccctctccaggacactccccgagggggtccgtgactgaagacacttggctgaacgcctctgtgcatggtgggtctgggctgggtcctgccgtgtttcctttccaatactgtgttgaaaccgatattccacttaagacacgcaagacgtccgaagatcaagccgctatcctgccaggaaaacttgaactgtgttccgatgaccaggggagccttagccccgctcgggagacatctattgacgatgggctgggcagccaataccctctgaaaaaagactcatgtggcgatcagttcttatccgtgccaagtccctttacttggagtaaacccaagcccggccacaccccaatctttcggacttcaagcctgccacccttagattggcccttgcctgcccattttggtcaatgcgagctcaagattgaagttcagcccaagactcaccaccgagcccactacgagacagagggctctcgcggggcagtcaaggcttctactggcggccaccccgtggttaaactgctggggtataacgaaaaacctatcaacttgcagatgttcattggtactgcagacgaccgctacttgaggccccacgccttctaccaggtccacagaattacaggcaagaccgtggccacagcttctcaggaaattatcattgcatcgacaaaggttctggagatcccattactaccagaaaacaacatgtctgcgtccatagactgcgctggcattttaaagctgcgaaactccgacatcgaactgcgaaagggtgagacagacatcgggcgcaaaaatacacgggtgcgtttagtattcagggtccacataccccagcctagtgggaaagttttgagtctacagatagccagcatccccgtcgagtgttcacagcgcagcgcccaagagctgccacacattgagaagtactccattaacagctgttccgtcaatggcggccatgaaatggtggtaaccggctcaaatttcctgccggaaagcaaaatcatctttttggaaaagggacaggatggccggccccagtgggaggtggaaggtaaaatcatccgagagaagtgtcagggcgcccacatagttctggaggtgccaccatatcacaacccagccgttaccgctgcagttcaagtgcatttttacttatgcaacgggaagagaaagaagagccagagccagaggttcacatatacccctgtcctcatgaagcaggagcatagggaagagattgatttgagctcagtgccctctctgccagtccctcacccagcacagacgcagaggccttcatccgactccggctgcagtcatgacagcgttctgagtggccagagatccctgatatgtagcatcccacagacctatgcatctatggttaccagttctcacctgccccagctgcagtgccgcgatgagagtgtttcaaaggagcagcacatgataccttccccaatagtccaccagccattccaggtgactccaacccccccagttgggtcatcataccagccgatgcagaccaatgtcgtgtacaacggacctacctgcctgccgatcaatgccgcctctagccaggaattcgactctgtcttattccagcaggacgcaacgttaagtggattggtgaatctggggtgtcagcccctgagctctatcccttttcattcatccaattctggttccaccggtcacctgctggctcacacccctcacagcgtgcacacactcccccacttgcagtcgatgggctaccattgttccaacaccggccaacgttccctctcctctccagtcgccgatcaaataacaggtcagcctagctctcaactgcagccaatcacctacggcccttcccacagtggctcagccactacagcatctccggccgcaagtcacccacttgcatcatctcccctgtcgggccctcccagcccacagctgcaacctatgccctaccagtccccttcttccggcacagcatctagtccctctcccgcgacgagaatgcactctggccagcattctacacaagcccagagcacaggccaagggggcctgtcagcccctagtagcctcatttgtcactcgctgtgcgatcctgcatcctttcctcctgacggcgccaccgtgtcgatcaagcctgaaccggaagatcgggagcctaattttgctactattggcctccaagatatcacgcttgatgatgatctgttcacgtccaacaacttcgatttactgcagctgagacccactttctggcccgtgccagctggtcgctatctgagaaacctagaatag

SEQ ID NO: 249667 - DNA, 3198 bp, Artificial Sequence
  derived and/or modified sequence
atgaccacagccaactgtggggcccatgatgagctggacttcaagctggtgtttggagaagatggagccccagcccctcctcctcctggcagcaggcctgctgacctggagccagatgactgtgccagcatctacatcttcaacgtggaccccccacccagcaccctgaccacccccctgtgcctgccccaccacggcctgcccagccacagctctgtgctgagccccagcttccagctgcagagccacaagaactatgagggcacctgtgagatccctgagagcaagtacagccccctgggcggccccaagccctttgaatgtcccagcatccagatcaccagcatcagccccaactgccaccaggagctggatgcccatgaagatgacctgcagatcaatgaccctgagcgggagttcctggagcggcccagccgggaccacctgtacctgcccctggagcccagctaccgggagagcagcctgagccccagccctgccagcagcatcagcagccgctcctggttcagtgatgccagcagctgtgagagcctgagccacatctatgatgatgtggacagcgagctgaatgaagctgctgcccgcttcaccctgggcagccccctgaccagccctgggggcagccctgggggctgccctggagaggagacctggcaccagcagtatggcctgggccacagcctgagcccccggcagagcccctgccacagccccaggagctctgtgacagatgagaactggctgagccccaggcctgccagcggccccagcagccggcccaccagcccctgtgggaagaggaggcacagcagcgctgaggtgtgctacgccggcagcctgagcccccaccacagccctgtgcccagccctggccacagcccccggggctctgtgacagaggacacctggctgaatgcctctgtgcacggcggcagcggcctgggccctgctgtgttccccttccagtactgtgtggagacagacatccccctgaagaccaggaagaccagcgaggaccaggccgccatcctgcccgggaagctggagctgtgcagtgatgaccagggcagcctgagccctgcccgggagaccagcattgatgatggcctgggcagccagtaccccctgaagaaggacagctgtggggaccagttcctgtctgtgcccagccccttcacctggagcaagcccaagccaggccacacccccatcttccgcaccagcagcctgccccccctggactggcccctgcctgcccacttcggccagtgtgagctgaagattgaggtgcagcccaagacccaccaccgggcccactatgaaacagagggcagcagaggagctgtgaaggccagcactggaggccaccctgtggtgaagctgctgggctacaatgagaagcccatcaacctgcagatgttcatcggcacagcagatgaccgctacctgcggccccacgccttctaccaggtgcaccgcatcaccgggaagacagtggccacagccagccaggagatcatcatcgccagcaccaaggtgctggagatccccctgctgcctgagaacaacatgtctgccagcattgactgtgccggcatcctgaagctgaggaacagcgacatcgagctgaggaagggggagacagacattggaaggaagaacaccagggtgcggctggtgttccgggtgcacatcccccagcccagcggcaaggtgctgagcctgcagatcgccagcatccctgtggagtgcagccagaggtctgcccaggagctgccccacatcgagaagtacagcatcaacagctgcagcgtgaatggaggccacgagatggtggtgacaggcagcaacttcctgcctgagagcaagatcatcttcctggagaagggccaggacggccggccccagtgggaggtggagggcaagatcatccgggagaagtgccagggcgcccacatcgtgctggaggtgcccccctaccacaacccagctgtgacagctgctgtgcaggtgcacttctacctgtgcaatggcaagaggaagaagagccagagccagcgcttcacctacacccctgtgctgatgaagcaggagcaccgggaggagattgacctgagctctgtgcccagcctgcctgtgccccacccagcccagacccagaggcccagcagtgacagcggctgcagccatgattctgtgctgagcggccagaggagcctcatctgcagcatcccccagacctacgcctccatggtgaccagcagccacctgccccagctgcagtgcagagatgaatctgtgtccaaggagcagcacatgatccccagccccatcgtgcaccagcccttccaggtgacccccaccccacctgtgggcagcagctaccagcccatgcagaccaacgtggtgtacaacggccccacctgcctgcccatcaatgctgccagcagccaggagtttgattctgtgctcttccagcaggatgccaccctgagcggcctggtgaacctgggctgccagcccctgagcagcatccccttccacagcagcaacagcggcagcacaggccacctgctggcccacaccccccacagcgtgcacaccctgccccacctgcagagcatgggctaccactgcagcaacacaggccagaggagcctgagcagccctgtggccgaccagatcaccggccagcccagcagccagctgcagcccatcacctacggccccagccacagcggcagcgccaccacagccagccctgctgccagccaccccctggccagcagccccctgagcggcccccccagcccccagctgcagcccatgccctaccagagccccagcagcggcacagccagcagccccagccctgccaccaggatgcacagcggccagcacagcacccaggcccagagcacaggccagggcggcctgagcgcccccagcagcctcatctgccacagcctgtgtgaccctgccagcttccccccagatggagccaccgtgtccatcaagccagagccagaagatcgggagcccaactttgccaccatcggcctgcaggacatcaccctggatgatgacctcttcaccagcaacaactttgacctgctgcagctgcggcccaccttctggcctgtgcctgctggccgctacctgaggaacctggagtag

SEQ ID NO: 249668 - DNA, 3198 bp, Artificial Sequence
  derived and/or modified sequence
atgaccaccgccaactgcggcgcccacgacgagctggacttcaagctagtcttcggtgaagatggtgcaccagccccacccccacccgggtccaggcctgcggaccttgagcccgatgactgcgccagcatctacattttcaatgtagatccacctccgagtacactgaccaccccactgtgcttgccacaccatggcctaccctcgcacagttctgtcctgagtccctctttccaactgcagtctcacaagaattacgaggggacctgcgaaatcccagagtcgaaatacagtcccttgggaggtcctaagccgtttgaatgtcccagcattcagatcacatccatcagcccaaattgtcaccaggaactagatgcgcacgaagatgatctgcaaatcaacgaccccgagcgtgaatttctggagcggccctccagagatcatctgtacctgcccttagagccttcttatcgcgaatcatccctgtctccatcacctgcttcatcaatctcttctaggagctggttttccgatgcctcctcttgcgagagtctcagtcatatttatgatgacgtggactccgagctgaacgaagcggccgcaagatttactctgggctccccattaacgtcccccggagggtctcccgggggctgccctggggaggaaacctggcaccagcagtacggcctgggacactctctgtcccctcgccaatccccctgccattctcctagaagtagcgtgacagacgagaactggctgtctccaaggcccgcttcaggaccaagcagcagacctacttccccctgtggcaaacgcaggcatagtagcgccgaagtgtgctatgctgggtcactttcacctcaccattcaccagtgccttccccagggcactccccgaggggttcagtcaccgaggacacctggctcaatgccagcgtgcacgggggctctggcctgggccccgccgtatttccctttcaatattgtgttgagacagacatacctctgaaaacccgaaagacctcagaagatcaggcagccattctccccgggaaactggagctgtgctccgacgatcagggcagtttgagtcctgcccgcgagacctcaatcgacgacggcctggggtcccaatatccacttaagaaggattcttgcggggatcagttcttgtctgtgccgagcccttttacgtggtccaagccaaaacctggccacactcccatttttcggacctcttccctgcccccactggattggcctctgccggcacattttggacaatgcgagctgaaaatagaggtacagcccaagactcaccacagggcccattatgaaacggagggaagtagaggtgctgttaaggctagcacaggggggcaccctgttgtgaaactgctgggctataatgagaaacccatcaatctgcaaatgtttattgggactgctgacgacagatatttgagaccacatgcattctatcaggtccatcgcatcaccggcaagaccgtcgctacggcttctcaagaaataatcattgcttcaaccaaggtgctcgaaatccctcttctgcctgagaacaacatgtctgcctcaatcgactgcgcagggattctgaagctgcgcaactcagatattgaactcagaaaaggagagaccgatatcggtcgcaagaacaccagagtgcgtcttgtattccgggtacacatacctcagcctagtggcaaagttctatcccttcagattgctagtatcccagtggagtgtagccagcgtagcgcccaagaactgccccatattgagaagtacagtataaactcctgcagtgttaacgggggccatgagatggttgttactggttctaatttcttaccggagtcaaagatcatcttccttgagaagggccaagacggtcgccctcagtgggaagtggagggaaaaatcatccgcgagaagtgccagggggcccacatcgttctggaggtcccgccatatcataatcccgccgtgaccgctgcagttcaagtccatttctatctttgtaacggaaagaggaagaaaagtcagtcccagaggttcacgtacacacctgtactgatgaaacaggaacatcgggaagagatcgatctgtccagcgtgccctctctacccgttccccacccagcccagactcagagaccttccagcgatagcggctgctcccacgactcagtactctccggtcaacgatcgctgatttgttcaattcctcaaacctacgcctccatggttacgtcatcccacctcccacagctgcagtgtcgtgacgaaagcgtatccaaggaacagcacatgatcccctctcctatagtgcaccagcctttccaggttacccccactcctccagtgggatcctcataccagccaatgcagaccaacgttgtatataatgggcccacatgtctccccattaatgccgcttcatctcaggagttcgatagtgtgctgttccagcaggacgctactctgagcggactcgtgaatttgggctgtcagccgctttcctctatcccattccattcctcaaactctggctccaccggtcacctgctggctcacacacctcacagcgtccacacactgcctcacctgcagtctatgggctatcattgtagtaacacaggacagagatccttgtccagcccggtggcggaccaaatcactggccaaccttcgtcacagctgcagcctatcacttacggcccttctcattctggcagcgccaccactgcaagtcccgccgcttctcaccccttagcttccagtcccctttccggccccccttcaccccagctccaaccaatgccctatcaatcacctagcagtggtactgcctccagcccttcccccgcgactcgaatgcactctgggcaacattctacccaggcccagagcaccggccaaggcgggttgtctgctccttccagtttgatctgtcactcactatgcgaccccgcctcattcccaccagatggggcgaccgtatccatcaaacctgagcctgaggaccgtgagcccaatttcgcaactatcggattgcaggatattaccctggatgatgatctgtttacttcaaataatttcgatctcctgcaattaaggcctacattttggccagttccagccggccggtacctacgaaacctcgagtag

SEQ ID NO: 249669 - DNA, 6129 bp, Artificial Sequence
  derived and/or modified sequence
gctgcagcaccctgggccacgccgatgactactgcaaactgtggcgcccacgacgagctcgacttcaaactcgtctttggcgaggacggggcgccggcgccgccgcccccgggctcgcggcctgcagatcttgagccagatgattgtgcatccatttacatctttaatgtagatccacctccatctactttaaccacaccactttgcttaccacatcatggattaccgtctcactcttctgttttgtcaccatcgtttcagctccaaagtcacaaaaactatgaaggaacttgtgagattcctgaatctaaatatagcccattaggtggtcccaaaccctttgagtgcccaagtattcaaattacatctatctctcctaactgtcatcaagaattagatgcacatgaagatgacctacagataaatgacccagaacgggaatttttggaaaggccttctagagatcatctctatcttcctcttgagccatcctaccgggagtcttctcttagtcctagtcctgccagcagcatctcttctaggagttggttctctgatgcatcttcttgtgaatcgctttcacatatttatgatgatgtggactcagagttgaatgaagctgcagcccgatttacccttggatcccctctgacttctcctggtggctctccagggggctgccctggagaagaaacttggcatcaacagtatggacttggacactcattatcacccaggcaatctccttgccactctcctagatccagtgtcactgatgagaattggctgagccccaggccagcctcaggaccctcatcaaggcccacatccccctgtgggaaacggaggcactccagtgctgaagtttgttatgctgggtccctttcaccccatcactcacctgttccttcacctggtcactcccccaggggaagtgtgacagaagatacgtggctcaatgcttctgtccatggtgggtcaggccttggccctgcagtttttccatttcagtactgtgtagagactgacatccctctcaaaacaaggaaaacttctgaagatcaagctgccatactaccaggaaaattagagctgtgttcagatgaccaagggagtttatcaccagcccgggagacttcaatagatgatggccttggatctcagtatcctttaaagaaagattcatgtggtgatcagtttctttcagttccttcaccctttacctggagcaaaccaaagcctggccacacccctatatttcgcacatcttcattacctccactagactggcctttaccagctcattttggacaatgtgaactgaaaatagaagtgcaacctaaaactcatcatcgagcccattatgaaactgaaggtagccgaggggcagtaaaagcatctactgggggacatcctgttgtgaagctcctgggctataacgaaaagccaataaatctacaaatgtttattgggacagcagatgatcgatatttacgacctcatgcattttaccaggtgcatcgaatcactgggaagacagtcgctactgcaagccaagagataataattgccagtacaaaagttctggaaattccacttcttcctgaaaataatatgtcagccagtattgattgtgcaggtattttgaaactccgcaattcagatatagaacttcgaaaaggagaaactgatattggcagaaagaatactagagtacgacttgtgtttcgtgtacacatcccacagcccagtggaaaagtcctttctctgcagatagcctctatacccgttgagtgctcccagcggtctgctcaagaacttcctcatattgagaagtacagtatcaacagttgttctgtaaatggaggtcatgaaatggttgtgactggatctaattttcttccagaatccaaaatcatttttcttgaaaaaggacaagatggacgacctcagtgggaggtagaagggaagataatcagggaaaaatgtcaaggggctcacattgtccttgaagttcctccatatcataacccagcagttacagctgcagtgcaggtgcacttttatctttgcaatggcaagaggaaaaaaagccagtctcaacgttttacttatacaccagttttgatgaagcaagaacacagagaagagattgatttgtcttcagttccatctttgcctgtgcctcatcctgctcagacccagaggccttcctctgattcagggtgttcacatgacagtgtactgtcaggacagagaagtttgatttgctccatcccacaaacatatgcatccatggtgacctcatcccatctgccacagttgcagtgtagagatgagagtgttagtaaagaacagcatatgattccttctccaattgtacaccagccttttcaagtcacaccaacacctcctgtggggtcttcctatcagcctatgcaaactaatgttgtgtacaatggaccaacttgtcttcctattaatgctgcctctagtcaagaatttgattcagttttgtttcagcaggatgcaactctttctggtttagtgaatcttggctgtcaaccactgtcatccataccatttcattcttcaaattcaggctcaacaggacatctcttagcccatacacctcattctgtgcataccctgcctcatctgcaatcaatgggatatcattgttcaaatacaggacaaagatctctttcttctccagtggctgaccagattacaggtcagccttcgtctcagttacaacctattacatatggtccttcacattcagggtctgctacaacagcttccccagcagcttctcatcccttggctagttcaccgctttctgggccaccatctcctcagcttcagcctatgccttaccaatctcctagctcaggaactgcctcatcaccgtctccagccaccagaatgcattctggacagcactcaactcaagcacaaagtacgggccaggggggtctttctgcaccttcatccttaatatgtcacagtttgtgtgatccagcgtcatttccacctgatggggcaactgtgagcattaaacctgaaccagaagatcgagagcctaactttgcaaccattggtctgcaggacatcactttagatgatgatttgtttaccagtaataattttgacttgcttcagttgagacctacgttttggccagtcccagcaggaagatatctgaggaatctagagtgaacgagataattgggagagacatgtcccagatttctgtttcccaaggagcaggggtgagcaggcaggctcccctcccgagtcctgagtccctggatttaggaagatctgatgggctctaacagtgcttactgcagccttgtgtccaccaccaacttctcagcatgtttctctccttggaccttgggtttccaactctgcagccttcaggtctggggccaggagtgggacccaccatttgtggggaaagtagcattcctccacctcaggccttgggtagatttggcaaaagaacaggagcagcataggctgtttgagctttggggaaatgaactttgctttttatatttaactaggatacttttatatgatgggtgctttgagtgtgaatgcagcaggctctcttgtttccgaggtgctgcttttgcaggtgacctggttacttagctaggattggtgatttgtactgctttatggtcatttgaagggccctttagtttttatgataatttttaaaataggaacttttgataagaccttctagaagcaaaaaaaaaaaaaaaaaaaaaaaaaagaaaaaaaaagaaaagaaaaaaagaaaaagaaaaaaatatcccaagcccacacctatgcctcagaaagtcagcatgtgtcctgaagacgttcatagatttataggaaataaagccaaatgtagctcatacctctttataaaactaaactgttgttagataaaatgagaagagaccattccatcattgaagtgttggaatataaaaagacattccagagcatagccttttggtaactttctaggtaatcttgcaatctctccatactggctccatgttgaaattgctttttccctcaggaccctgggtaagatggctacatttaaggtgactctgaatggtggggttctagcttggtcactttcatttcttgccatcataaaaactagtaggctgtggagtgcgcttcctgtttgtgtcatctggtcgtagaaccttttccaaacagaagcatctgcctttggctgttctgtgacctttgaagccagtctcagtggtttaggcagctttgcagttctaactctagctagaggccaggctgtgtgcagagctaaagcacaaatgagcagtacatcagcatgggcagagaaaatacaggactccagatgggaaggttttaagagtcacactggcatggaaggcttatctgccattctatttatagcctgaaatgattctggcctaccctgtcctgtctgtatgatctaaaaaccagccttttccccagaaggctctgagcacatccagaagtgataacctgaccctccacaccaaagacaccctggtgctgctgctggtgagactggtgtccaaggcagggcccagcagaaactgcagcctgctgtctaccaaaggaggtacccgagttgggtactttaaaaaaaaaaaaaacctgcccttacccctctccctaatgggattttttttacctgttcctgggcccattacagagcctctgaagtttgcagtatgctttcaaatgaaataatatacttccattgattcaggaagcagattttttgagtgcctatatgtgagacagtgtgctggttgaaggcctgatgctgttattccaggagactgcaggcccttgatgccaggactctctctactaaggccagttcaggtctgggaaagggagctggcctattgcccaccacctgttgtcagtaggttaggagctgttgactcaggatgaggaagtatggtctttaaaaaaaacaaaatatattttagatttctcccctaaagttagttagagaaaaaggtctattcttcagcagatcactgtggcccctcttggagctgggtgttttcaaattttcttgaaaagtgagttgtgtcacagaatgtggatagtgagatttgcttctgggcctgtggttggacgcccacagcttcctttggaggggcaagaagttggcctctcggttgacattccagagaaatggccagacttgcccctacccttttgcccctggtgtagctgcctcacatgaggttattgcaagagttccccttgcaataccctttgtgccctcaagaattaaaagcctctatgatccagagttgctatgcaccaaattttgatgccttctaaataccttgatgcctgtagcactagaaatgctttcctatttaaaataaacattaaattttaaaatagagctttgtatactatgtaagcagttttatatcagctttgtaaaagctttggtgttaagagtcaatattttttggctttgtagataaagacttaaatttttgtgcaacatagtggtgttaaagcacacatccattggactatgcaaatcaatttctactagcagcactgagcaactgggcacgtgctagtacgcaccccctcctactctaactgtgctagctcttgggttgaggaatggaatgggtagccttctgcttactggagatgcacagagaaacatggctgaaaacagctttaaaaagaacatgtctttgggttcatgtgtggtgctgctgcccgggtgtaaactatccccacccagggccagccattatcaccagacctcttctgggcctggctgtgaagccctgtttttggtattcagaatggatctttaaggctcagatgggctcaaattgaaaccttgtgttttataaaatggatgtttagtaaaggaactggttctcagttatgtttacagcacttggaattgtgtgttcttgtacattttgtattttaaaaccttttatgggagtgcagtgctccttacacaaatacaaagggaagaagagccagcagttgaggctcctcagttttagtgctgaaataataaacagtgacaggtcaacagta

SEQ ID NO: 249670 - DNA, 3198 bp, Artificial Sequence
  derived and/or modified sequence
atgaccactgcaaactgcggagctcatgacgaactggactttaaactggtgttcggagaagacggagcacccgcaccccctcccccaggcagcaggcctgcggatttggaacccgatgactgcgctagcatctacatcttcaacgtggacccccctccttccacattgactactcccttatgtctgccccaccatgggctcccaagtcacagctccgttctttcaccgtcattccagttgcaaagccacaagaactatgaagggacctgcgagattccagagtccaagtactcccctctgggcggtcctaagccatttgaatgtccatctattcagattacctccattagtcccaattgccatcaggagttagacgctcacgaagatgacctgcagatcaacgaccccgaacgagaattccttgaacggcctagccgcgaccacctctatctgcccttagaaccaagctatagggaatcttcgctgtccccttcaccagcatccagtatcagtagcagatcttggtttagcgacgcctcctcatgtgagtccctgtcacacatttatgacgatgtggactcagagctgaacgaggccgcagccaggtttaccctgggaagccctctgacgtccccaggcggaagccctggaggatgtccaggggaagagacatggcaccaacagtatggcttgggccattctctgtctccgaggcagtccccatgccattccccacgcagttcagttaccgacgagaactggcttagccctaggcccgcatccggaccatcaagtcggcctacgagtccatgcgggaagagacgccattcgtctgctgaggtgtgttatgcaggctccctctctcctcaccactctcctgtgccaagccccggacactcacccagaggcagtgtgacagaagatacatggctcaacgcaagcgtgcatgggggtagtggcttgggaccagctgtgtttccatttcaatactgcgtagagaccgatataccactgaagaccagaaaaaccagcgaagaccaggccgctatcctgcccggaaagctagagctgtgttccgacgaccaaggttctctgtcacccgctagagaaactagcattgacgacgggttgggcagccagtacccactaaagaaggacagttgcggtgatcagttcctctccgtcccctctccttttacctggtctaaacccaagcccggacacacccctatctttcgaacttcgtccctgccaccactggactggccactgcctgcccacttcggccagtgcgaattaaaaatagaagtgcagcctaaaacccaccatcgggctcactatgagactgagggatctcggggtgccgtgaaggccagcactgggggacaccccgtcgtgaagctgctcggttataatgagaagcccattaacctacagatgttcatcggcacagccgacgatagatatctgcgccctcatgcgttctaccaggttcatcgtattaccggcaagacagtcgccaccgcctcacaggaaataattattgcctcaacgaaggttcttgagatcccattgctgcccgaaaataacatgagtgcgtccattgactgcgctggaattctgaagctccgaaatagcgatattgaactgcgaaaaggggagaccgatatcggccgtaaaaacactcgagtgagactcgtctttcgcgtacacataccacagccgtccggcaaagttctgtctcttcagatcgcctctattcccgtcgagtgtagtcagaggagcgcccaggagctcccacatatcgagaagtacagcattaattcatgttcagtgaatgggggtcacgaaatggtggtaaccggctccaactttcttcctgagtccaaaatcatatttctggaaaaaggtcaggacgggagacctcagtgggaagtggagggtaagataatccgggaaaaatgccagggcgctcacatagtgctggaggtcccaccttatcataaccctgccgtgactgccgctgtccaggtacacttctacctctgcaatggtaagcgcaaaaagtctcagagccagcgcttcacctacactcccgtgctgatgaagcaggagcacagagaggagattgatctgtcttccgtcccgtcccttccagtccctcacccagcgcagacacaacgcccttctagtgactctggctgctctcatgactcggtcctctcaggtcagcggagtcttatctgttcaataccacaaacttacgcctcaatggtgacatcttcccatcttcctcaactgcagtgtagggatgaatcagtttcaaaggaacagcacatgattccgtccccgatcgtgcaccaacctttccaggttactcccaccccaccagtgggatcctcttaccagccaatgcaaactaacgtggtttataatgggccaacctgcctgccaattaacgcggctagttcacaagagttcgactcagtgctgttccaacaagacgcgacgttgagtggacttgtaaatttgggctgtcagccactatcttctattcctttccatagctccaactctggtagcaccgggcacctactcgcccataccccccactcagttcacactttgccacatctacagtccatgggctaccattgcagcaacaccgggcagcgcagcctgagtagtcctgtggccgatcagataacaggacagccttctagccagctgcaaccaataacatatggtccatcccactctggcagcgctactaccgcttccccagccgcaagtcatcccctcgcaagtagcccactgagtggcccaccaagtccgcagcttcagccaatgccttaccagtcccccagttctggaactgcatcctcccctagtcccgcaacccggatgcatagtgggcaacatagcacgcaggcccagtctaccggccagggcggtctgtctgcccctagctccctgatctgtcattccctttgcgaccccgcttcttttccgccagacggtgctacagtctctatcaagccagaacccgaagatagggaacccaattttgctacaattgggctgcaagacatcaccctggatgatgacctattcacctcaaataacttcgatctccttcagttgcgacccaccttctggcctgtgcccgctggtagatatctgaggaacctggagtag

SEQ ID NO: 249671 - DNA, 174 bp, Artificial Sequence
  derived and/or modified sequence
atgggcaccgccgtgggcccccaccacagccccgccccccacgacagtgccctacctgctagattgcttacttcagactttccatacggacgttcatgtcagattgagcaggtgaagtatagcgtacccgacacaggcctttttcagcactgggagggcagcattccaacctag

SEQ ID NO: 249672 - DNA, 174 bp, Artificial Sequence
  derived and/or modified sequence
atgggaacagcagtggggccacatcatagccctgccccacatgattctgccctcccagccaggctgctgacctcagactttccttacgggaggtcttgtcagatcgaacaggttaaatatagtgtgcctgataccggccttttccagcattgggagggctctattccaacatag

SEQ ID NO: 249673 - protein, 1075 aa, Artificial Sequence
  derived and/or modified sequence
MTTANCGAHDELDFKLVFGEDGAPAPPPPGSRPADLEPDDCASIYIFNVDPPPSTLTTPLCLPHHGLPSHSSVLSPSFQLQSHKNYEGTCEIPESKYSPLGGPKPFECPSIQITSISPNCHQELDAHEDDLQINDPEREFLERPSRDHLYLPLEPSYRESSLSPSPASSISSRSWFSDASSCESLSHIYDDVDSELNEAAARFTLGSPLTSPGGSPGGCPGEETWHQQYGLGHSLSPRQSPCHSPRSSVTDENWLSPRPASGPSSRPTSPCGKRRHSSAEVCYAGSLSPHHSPVPSPGHSPRGSVTEDTWLNASVHGGSGLGPAVFPFQYCVETDIPLKTRKTSEDQAAILPGKLELCSDDQGSLSPARETSIDDGLGSQYPLKKDSCGDQFLSVPSPFTWSKPKPGHTPIFRTSSLPPLDWPLPAHFGQCELKIEVQPKTHHRAHYETEGSRGAVKASTGGHPVVKLLGYNEKPINLQMFIGTADDRYLRPHAFYQVHRITGKTVATASQEIIIASTKVLEIPLLPENNMSASIDCAGILKLRNSDIELRKGETDIGRKNTRVRLVFRVHIPQPSGKVLSLQIASIPVECSQRSAQELPHIEKYSINSCSVNGGHEMVVTGSNFLPESKIIFLEKGQDGRPQWEVEGKIIREKCQGAHIVLEVPPYHNPAVTAAVQVHFYLCNGKRKKSQSQRFTYTPVLMKQEHREEIDLSSVPSLPVPHPAQTQRPSSDSGCSHDSVLSGQRSLICSIPQTYASMVTSSHLPQLQCRDESVSKEQHMIPSPIVHQPFQVTPTPPVGSSYQPMQTNVVYNGPTCLPINAASSQEFDSVLFQQDATLSGLVNLGCQPLSSIPFHSSNSGSTGHLLAHTPHSVHTLPHLQSMGYHCSNTGQRSLSSPVADQITGQPSSQLQPITYGPSHSGSATTASPAASHPLASSPLSGPPSPQLQPMPYQSPSSGTASSPSPATRMHSGQHSTQAQSTGQGGLSAPSSLICHSLCDPASFPPDGATVSIKPEPEDREPNFATIGLQDITLDDVNEIIGRDMSQISVSQGAGVSRQAPLPSPESLDLGRSDGL

SEQ ID NO: 249674 - DNA, 3228 bp, Artificial Sequence
  derived and/or modified sequence
atgaccaccgccaactgcggcgcccacgacgagctggacttcaagctggtgttcggcgaggacggcgcccccgccccccccccccccggcagcagacccgccgacctggagcccgacgactgcgccagcatctacatcttcaacgtggaccccccccccagcaccctgaccacccccctgtgcctgccccaccacggcctgcccagccacagcagcgtgctgagccccagcttccagctgcagagccacaagaactacgagggcacctgcgagatccccgagagcaagtacagccccctgggcggccccaagcccttcgagtgccccagcatccagatcaccagcatcagccccaactgccaccaggagctggacgcccacgaggacgacctgcagatcaacgaccccgagagagagttcctggagagacccagcagagaccacctgtacctgcccctggagcccagctacagagagagcagcctgagccccagccccgccagcagcatcagcagcagaagctggttcagcgacgccagcagctgcgagagcctgagccacatctacgacgacgtggacagcgagctgaacgaggccgccgccagattcaccctgggcagccccctgaccagccccggcggcagccccggcggctgccccggcgaggagacctggcaccagcagtacggcctgggccacagcctgagccccagacagagcccctgccacagccccagaagcagcgtgaccgacgagaactggctgagccccagacccgccagcggccccagcagcagacccaccagcccctgcggcaagagaagacacagcagcgccgaggtgtgctacgccggcagcctgagcccccaccacagccccgtgcccagccccggccacagccccagaggcagcgtgaccgaggacacctggctgaacgccagcgtgcacggcggcagcggcctgggccccgccgtgttccccttccagtactgcgtggagaccgacatccccctgaagaccagaaagaccagcgaggaccaggccgccatcctgcccggcaagctggagctgtgcagcgacgaccagggcagcctgagccccgccagagagaccagcatcgacgacggcctgggcagccagtaccccctgaagaaggacagctgcggcgaccagttcctgagcgtgcccagccccttcacctggagcaagcccaagcccggccacacccccatcttcagaaccagcagcctgccccccctggactggcccctgcccgcccacttcggccagtgcgagctgaagatcgaggtgcagcccaagacccaccacagagcccactacgagaccgagggcagcagaggcgccgtgaaggccagcaccggcggccaccccgtggtgaagctgctgggctacaacgagaagcccatcaacctgcagatgttcatcggcaccgccgacgacagatacctgagaccccacgccttctaccaggtgcacagaatcaccggcaagaccgtggccaccgccagccaggagatcatcatcgccagcaccaaggtgctggagatccccctgctgcccgagaacaacatgagcgccagcatcgactgcgccggcatcctgaagctgagaaacagcgacatcgagctgagaaagggcgagaccgacatcggcagaaagaacaccagagtgagactggtgttcagagtgcacatcccccagcccagcggcaaggtgctgagcctgcagatcgccagcatccccgtggagtgcagccagagaagcgcccaggagctgccccacatcgagaagtacagcatcaacagctgcagcgtgaacggcggccacgagatggtggtgaccggcagcaacttcctgcccgagagcaagatcatcttcctggagaagggccaggacggcagaccccagtgggaggtggagggcaagatcatcagagagaagtgccagggcgcccacatcgtgctggaggtgcccccctaccacaaccccgccgtgaccgccgccgtgcaggtgcacttctacctgtgcaacggcaagagaaagaagagccagagccagagattcacctacacccccgtgctgatgaagcaggagcacagagaggagatcgacctgagcagcgtgcccagcctgcccgtgccccaccccgcccagacccagagacccagcagcgacagcggctgcagccacgacagcgtgctgagcggccagagaagcctgatctgcagcatcccccagacctacgccagcatggtgaccagcagccacctgccccagctgcagtgcagagacgagagcgtgagcaaggagcagcacatgatccccagccccatcgtgcaccagcccttccaggtgacccccaccccccccgtgggcagcagctaccagcccatgcagaccaacgtggtgtacaacggccccacctgcctgcccatcaacgccgccagcagccaggagttcgacagcgtgctgttccagcaggacgccaccctgagcggcctggtgaacctgggctgccagcccctgagcagcatccccttccacagcagcaacagcggcagcaccggccacctgctggcccacaccccccacagcgtgcacaccctgccccacctgcagagcatgggctaccactgcagcaacaccggccagagaagcctgagcagccccgtggccgaccagatcaccggccagcccagcagccagctgcagcccatcacctacggccccagccacagcggcagcgccaccaccgccagccccgccgccagccaccccctggccagcagccccctgagcggcccccccagcccccagctgcagcccatgccctaccagagccccagcagcggcaccgccagcagccccagccccgccaccagaatgcacagcggccagcacagcacccaggcccagagcaccggccagggcggcctgagcgcccccagcagcctgatctgccacagcctgtgcgaccccgccagcttcccccccgacggcgccaccgtgagcatcaagcccgagcccgaggacagagagcccaacttcgccaccatcggcctgcaggacatcaccctggacgacgtgaacgagatcatcggcagagacatgagccagatcagcgtgagccagggcgccggcgtgagcagacaggcccccctgcccagccccgagagcctggacctgggcagaagcgacggcctgtag

SEQ ID NO: 249675 - DNA, 3228 bp, Artificial Sequence
  derived and/or modified sequence
atgacaaccgctaattgcggtgcccacgacgaactcgatttcaagctggtgtttggcgaagatggtgcaccggctcccccaccgcccgggtcacggcctgcagaccttgagccggatgactgcgcttctatttacatctttaacgtggacccaccacccagcacactgactaccccgctctgcctgcctcaccatggcttacctagccattcaagcgttctgagccccagtttccagctgcaatctcacaagaactacgagggaacttgtgagatacctgagagcaagtacagtccccttggtggtcctaaacccttcgaatgcccgtcaattcagatcacaagcattagcccaaactgccaccaggaattagacgcacatgaagatgacctgcagatcaacgaccccgagcgggagtttttggagagacccagcagggaccacctgtacctgccgctggagccttcttatcgtgaaagcagtctgtcaccttctccggcaagcagtatttctagcaggtcgtggttcagtgacgcctcaagctgtgaatcccttagtcacatttacgacgacgtggatagtgaactaaacgaggccgcggcaaggttcacgctgggttctcctctaacaagccccggtgggtctcctggcggctgtccgggcgaggagacgtggcatcagcagtacgggttgggtcactctttgtccccaagacagagtccttgccacagcccccggagtagtgtgacggatgaaaattggctgtcccccagaccagccagcggcccatctagcaggcccacatcaccttgcggtaaacgtcgacattcatcagctgaggtgtgttatgcggggtcactgagtccccaccatagtccagttcccagccctgggcactcacctcggggctccgtgactgaagacacttggcttaatgcatcggttcatggcggaagcggcctgggccctgccgtgtttccgtttcagtattgcgttgaaaccgatattccccttaaaacaagaaagacctccgaggaccaggccgccattctgcctgggaagttggaattatgcagcgatgatcaaggctccctaagccctgctcgggagacctcaatcgacgacgggctagggagtcagtatccccttaagaaggactcctgtggtgatcagttcctttccgtgcctagcccttttacctggtcaaagcccaagcctgggcacaccccgatcttccgaaccagctcactaccccccctggactggcctctgcctgcccatttcggccaatgtgagctgaagatagaggtacaaccaaaaacgcaccacagggctcactatgagacagagggatcccgaggggcggtgaaggcatctacgggggggcaccccgtagtgaagctgttaggctacaatgagaagcctataaacctgcaaatgtttataggaaccgctgacgacaggtaccttagacctcacgctttttaccaggtccatcgcatcaccggcaagacagtcgcaacagccagccaggagataattatcgcatcgacaaaagtgttagagatccctctgttgcccgaaaataatatgtcggcaagcatcgattgtgccggaatactcaaacttagaaacagtgatattgaactcagaaaaggtgagacagacatcggtcggaagaacacccgcgtgaggttagtctttcgggtgcacattccccaaccttcggggaaagtgctgtcactgcaaatcgcctccatcccagtggaatgcagtcagaggagtgcacaggaactgccacacattgagaagtacagcattaattcctgtagcgttaatgggggacacgagatggtggtaactgggtcaaacttccttcccgagagtaagataatctttctggagaaaggacaggatggccgacctcagtgggaagtggaaggcaagattatccgagaaaagtgtcaaggggcccacatcgtgttggaagtgcccccctaccacaacccagctgtgacggccgcagtgcaggtgcatttctatttgtgcaatggtaagaggaaaaagagccagagtcagcgattcacatatacccccgtgttgatgaagcaggaacacagggaggaaatcgatctgtcttctgtgccttctttgcctgtgcctcacccagcacagacccagaggccttcctctgattctggctgcagccacgactccgtactgagtgggcagagaagcttaatctgtagcatccctcagacctatgccagcatggtgaccagtagccacctgccacagctccagtgccgggatgaaagtgtgtccaaagagcagcacatgattccttcccctatcgtacaccagcccttccaagttacgccaactccgccagtgggatcctcctaccaacccatgcagactaatgtagtttacaatgggcctacttgcctgcccatcaacgctgcctccagtcaggagttcgactccgttctattccagcaagatgctaccctcagcgggctagtaaacctagggtgtcagccccttagtagcatcccttttcattcatctaacagcggctctaccggacatctgctggcgcacactcctcactcagtgcatacattgccccacctgcagtccatgggttaccactgctccaataccgggcagcggagtcttagtagccccgtggcagaccagatcacaggtcaaccctcttcccagctgcagcctataacatatggcccttcccactcaggttctgctactaccgccagtcccgcggcgagccatcctttggcctcatcccctctctctggaccacctagcccacaactgcaacccatgccataccagtccccatcttcaggtacagcttctagtccatcacctgcaacacgaatgcatagtggtcaacacagcacccaggctcagtccacgggacagggggggttgtcagcccccagcagcctgatctgtcactcgctttgtgatccggcctcatttccaccagatggagctacagtgtcgattaaaccagagcctgaggatcgagagccaaactttgccacaatcgggcttcaagacatcaccctggacgacgtcaacgaaatcattggtagagacatgagtcagatcagtgtgtcgcagggcgcgggagtgtctagacaggcaccgctgccatctcctgaatcactggatctcggccgaagtgacggcctttag

SEQ ID NO: 249676 - DNA, 3228 bp, Artificial Sequence
  derived and/or modified sequence
atgaccacagccaactgtggggcccatgatgagctggacttcaagctggtgtttggagaagatggagccccagcccctcctcctcctggcagcaggcctgctgacctggagccagatgactgtgccagcatctacatcttcaacgtggaccccccacccagcaccctgaccacccccctgtgcctgccccaccacggcctgcccagccacagctctgtgctgagccccagcttccagctgcagagccacaagaactatgagggcacctgtgagatccctgagagcaagtacagccccctgggcggccccaagccctttgaatgtcccagcatccagatcaccagcatcagccccaactgccaccaggagctggatgcccatgaagatgacctgcagatcaatgaccctgagcgggagttcctggagcggcccagccgggaccacctgtacctgcccctggagcccagctaccgggagagcagcctgagccccagccctgccagcagcatcagcagccgctcctggttcagtgatgccagcagctgtgagagcctgagccacatctatgatgatgtggacagcgagctgaatgaagctgctgcccgcttcaccctgggcagccccctgaccagccctgggggcagccctgggggctgccctggagaggagacctggcaccagcagtatggcctgggccacagcctgagcccccggcagagcccctgccacagccccaggagctctgtgacagatgagaactggctgagccccaggcctgccagcggccccagcagccggcccaccagcccctgtgggaagaggaggcacagcagcgctgaggtgtgctacgccggcagcctgagcccccaccacagccctgtgcccagccctggccacagcccccggggctctgtgacagaggacacctggctgaatgcctctgtgcacggcggcagcggcctgggccctgctgtgttccccttccagtactgtgtggagacagacatccccctgaagaccaggaagaccagcgaggaccaggccgccatcctgcccgggaagctggagctgtgcagtgatgaccagggcagcctgagccctgcccgggagaccagcattgatgatggcctgggcagccagtaccccctgaagaaggacagctgtggggaccagttcctgtctgtgcccagccccttcacctggagcaagcccaagccaggccacacccccatcttccgcaccagcagcctgccccccctggactggcccctgcctgcccacttcggccagtgtgagctgaagattgaggtgcagcccaagacccaccaccgggcccactatgaaacagagggcagcagaggagctgtgaaggccagcactggaggccaccctgtggtgaagctgctgggctacaatgagaagcccatcaacctgcagatgttcatcggcacagcagatgaccgctacctgcggccccacgccttctaccaggtgcaccgcatcaccgggaagacagtggccacagccagccaggagatcatcatcgccagcaccaaggtgctggagatccccctgctgcctgagaacaacatgtctgccagcattgactgtgccggcatcctgaagctgaggaacagcgacatcgagctgaggaagggggagacagacattggaaggaagaacaccagggtgcggctggtgttccgggtgcacatcccccagcccagcggcaaggtgctgagcctgcagatcgccagcatccctgtggagtgcagccagaggtctgcccaggagctgccccacatcgagaagtacagcatcaacagctgcagcgtgaatggaggccacgagatggtggtgacaggcagcaacttcctgcctgagagcaagatcatcttcctggagaagggccaggacggccggccccagtgggaggtggagggcaagatcatccgggagaagtgccagggcgcccacatcgtgctggaggtgcccccctaccacaacccagctgtgacagctgctgtgcaggtgcacttctacctgtgcaatggcaagaggaagaagagccagagccagcgcttcacctacacccctgtgctgatgaagcaggagcaccgggaggagattgacctgagctctgtgcccagcctgcctgtgccccacccagcccagacccagaggcccagcagtgacagcggctgcagccatgattctgtgctgagcggccagaggagcctcatctgcagcatcccccagacctacgcctccatggtgaccagcagccacctgccccagctgcagtgcagagatgaatctgtgtccaaggagcagcacatgatccccagccccatcgtgcaccagcccttccaggtgacccccaccccacctgtgggcagcagctaccagcccatgcagaccaacgtggtgtacaacggccccacctgcctgcccatcaatgctgccagcagccaggagtttgattctgtgctcttccagcaggatgccaccctgagcggcctggtgaacctgggctgccagcccctgagcagcatccccttccacagcagcaacagcggcagcacaggccacctgctggcccacaccccccacagcgtgcacaccctgccccacctgcagagcatgggctaccactgcagcaacacaggccagaggagcctgagcagccctgtggccgaccagatcaccggccagcccagcagccagctgcagcccatcacctacggccccagccacagcggcagcgccaccacagccagccctgctgccagccaccccctggccagcagccccctgagcggcccccccagcccccagctgcagcccatgccctaccagagccccagcagcggcacagccagcagccccagccctgccaccaggatgcacagcggccagcacagcacccaggcccagagcacaggccagggcggcctgagcgcccccagcagcctcatctgccacagcctgtgtgaccctgccagcttccccccagatggagccaccgtgtccatcaagccagagccagaagatcgggagcccaactttgccaccatcggcctgcaggacatcaccctggatgatgtgaatgagatcatcggccgggacatgagccagatctctgtgtcccagggcgccggcgtgtcccggcaggcccccctgcccagccctgagagcctggacctgggccgcagtgatggcctgtag

SEQ ID NO: 249677 - DNA, 3228 bp, Artificial Sequence
  derived and/or modified sequence
atgaccaccgccaactgcggcgcccacgacgagctggacttcaagctagtgttcggagaagacggggctccagcccctccgccaccaggctcccgccccgccgacttagagcccgacgactgtgcctcaatatatatcttcaatgtggatccacctcccagcaccttaacgacacctctgtgtctaccccatcatggcctccccagtcatagtagcgtgttatccccgtcattccagcttcagagccataagaattacgagggtacatgcgagatcccagaaagtaaatattctccccttggggggccgaaaccatttgagtgcccatccatccagatcacgagcattagtcccaattgtcaccaggagctggacgcacatgaggatgatctgcagatcaacgacccagaaagggagtttttggagaggccctctcgcgaccatctgtatctaccactggaacctagttacagagaaagtagtcttagcccctccccagctagcagcatctcctcccgcagctggttcagtgatgcatcctcttgtgaatccctttctcatatttatgacgacgtcgacagcgaattgaatgaggctgcagccagattcaccctcggatccccactgacaagcccgggaggatccccaggaggttgtccaggcgaagagacatggcaccagcaatacggcctgggccattctttatcgccgcgccagagcccctgtcactcccctagatctagtgttaccgatgagaattggctgtccccccgcccagcaagtgggccatcaagccgtccaacttccccatgcggtaaacgtcgccatagctccgccgaggtttgttacgcaggatccctgagtccacatcacagccctgttccgtcacccggtcactcccctcggggctcagtgaccgaagacacatggctaaatgcctctgtccacggcggcagcggcctggggccagccgtgtttcccttccagtactgtgttgaaactgacatccccctgaaaacccgcaaaactagtgaggaccaggccgctatcctgcccggtaagctcgagttgtgtagtgatgatcagggctctctctctcccgctagggaaacctcgattgacgatggcttggggagccaataccccctaaagaaagattcatgcggtgaccagttcctgagtgtgccatcacctttcacatggagtaagccaaagccaggccatactcctatttttcggacctcttccttgcctcctcttgactggccccttcccgcccactttggacagtgtgagctcaagatcgaagtgcagcccaaaacacaccatagagcccactatgaaacagagggatcacgcggcgctgtcaaggcttccaccggaggacatcccgtcgtaaagctcctgggctacaatgagaagccgatcaatctccagatgttcataggaactgctgacgacaggtacctccgcccccatgcattctatcaagtgcaccggattacgggaaagacagtcgccaccgcttcacaggagatcattatcgccagcacaaaggttttggaaattcctctgctcccagaaaacaatatgagcgcctctattgattgcgccgggatcctcaagctgaggaatagtgacattgaactcaggaaaggcgaaacggatataggtcggaagaacaccagggtgcgtttagtgtttagagtgcatatacctcagccttccggtaaggtgttgtccctgcaaattgcctccattccagtggagtgtagccagaggagcgcacaggagttgccccacatagagaagtactctataaactcctgttccgttaatggcggacacgagatggtcgtcaccggtagtaactttctgcccgagtctaaaattatcttcctcgagaaaggtcaggatgggcgcccacagtgggaagttgagggcaaaataatccgggagaagtgtcaaggagcacacattgttctggaagtgcccccataccataatccagcagtgacggctgcagtgcaggtgcacttttatctgtgtaatggcaaaaggaaaaaatcacaatcacagcgctttacctatacaccggtgttgatgaagcaagagcaccgggaggagatcgatctaagctccgtgccctccctccctgtgccacacccggctcagactcaacggccatcaagcgacagtgggtgcagtcacgattcagtgttgtccgggcaaaggtccttaatttgctcaataccccaaacgtacgcctctatggttacttcttcacacctcccccaactgcagtgcagagacgaatccgtgagcaaagagcagcacatgattcccagccctatcgtgcatcagcccttccaggtgacacctacgcctccagtgggaagctcttatcagccaatgcagacaaatgtggtctataacgggccaacttgtttgcccatcaatgctgcttcatcacaggagttcgacagcgtgctgtttcaacaggacgcgactttgtccggacttgtcaatctggggtgccagcccctctcttcaatcccattccacagttctaattctggaagtactggacacttattggctcatactccccatagcgtgcatacactgccacacctgcagagcatgggctaccactgctctaacacagggcaacggagcctgagttccccggtcgccgaccagatcacagggcagccgtcgtcacagctgcagccgatcacctacgggccctctcatagcggcagcgctacaacagctagccccgcggctagtcatcccctcgcctcatcaccactctctggtccacccagtccccagctacaaccaatgccttaccaatccccttcaagtggcactgccagttcccccagccctgccactcgcatgcactccggtcagcacagcacccaagcgcagagtaccggacaaggaggtctgagtgcacctagttcattgatatgccacagcctctgcgatcctgcaagctttccgcctgatggggccactgtctccatcaagcctgagcctgaagaccgggagccgaattttgccactatagggctgcaggacattacccttgatgacgtgaatgagatcatagggagagatatgagtcaaatatccgtttcgcagggcgccggcgtgtctcgccaggcacccctgccttcacccgaatcgctcgacctgggcagatccgacgggctatag

SEQ ID NO: 249678 - DNA, 6040 bp, Artificial Sequence
  derived and/or modified sequence
gctgcagcaccctgggccacgccgatgactactgcaaactgtggcgcccacgacgagctcgacttcaaactcgtctttggcgaggacggggcgccggcgccgccgcccccgggctcgcggcctgcagatcttgagccagatgattgtgcatccatttacatctttaatgtagatccacctccatctactttaaccacaccactttgcttaccacatcatggattaccgtctcactcttctgttttgtcaccatcgtttcagctccaaagtcacaaaaactatgaaggaacttgtgagattcctgaatctaaatatagcccattaggtggtcccaaaccctttgagtgcccaagtattcaaattacatctatctctcctaactgtcatcaagaattagatgcacatgaagatgacctacagataaatgacccagaacgggaatttttggaaaggccttctagagatcatctctatcttcctcttgagccatcctaccgggagtcttctcttagtcctagtcctgccagcagcatctcttctaggagttggttctctgatgcatcttcttgtgaatcgctttcacatatttatgatgatgtggactcagagttgaatgaagctgcagcccgatttacccttggatcccctctgacttctcctggtggctctccagggggctgccctggagaagaaacttggcatcaacagtatggacttggacactcattatcacccaggcaatctccttgccactctcctagatccagtgtcactgatgagaattggctgagccccaggccagcctcaggaccctcatcaaggcccacatccccctgtgggaaacggaggcactccagtgctgaagtttgttatgctgggtccctttcaccccatcactcacctgttccttcacctggtcactcccccaggggaagtgtgacagaagatacgtggctcaatgcttctgtccatggtgggtcaggccttggccctgcagtttttccatttcagtactgtgtagagactgacatccctctcaaaacaaggaaaacttctgaagatcaagctgccatactaccaggaaaattagagctgtgttcagatgaccaagggagtttatcaccagcccgggagacttcaatagatgatggccttggatctcagtatcctttaaagaaagattcatgtggtgatcagtttctttcagttccttcaccctttacctggagcaaaccaaagcctggccacacccctatatttcgcacatcttcattacctccactagactggcctttaccagctcattttggacaatgtgaactgaaaatagaagtgcaacctaaaactcatcatcgagcccattatgaaactgaaggtagccgaggggcagtaaaagcatctactgggggacatcctgttgtgaagctcctgggctataacgaaaagccaataaatctacaaatgtttattgggacagcagatgatcgatatttacgacctcatgcattttaccaggtgcatcgaatcactgggaagacagtcgctactgcaagccaagagataataattgccagtacaaaagttctggaaattccacttcttcctgaaaataatatgtcagccagtattgattgtgcaggtattttgaaactccgcaattcagatatagaacttcgaaaaggagaaactgatattggcagaaagaatactagagtacgacttgtgtttcgtgtacacatcccacagcccagtggaaaagtcctttctctgcagatagcctctatacccgttgagtgctcccagcggtctgctcaagaacttcctcatattgagaagtacagtatcaacagttgttctgtaaatggaggtcatgaaatggttgtgactggatctaattttcttccagaatccaaaatcatttttcttgaaaaaggacaagatggacgacctcagtgggaggtagaagggaagataatcagggaaaaatgtcaaggggctcacattgtccttgaagttcctccatatcataacccagcagttacagctgcagtgcaggtgcacttttatctttgcaatggcaagaggaaaaaaagccagtctcaacgttttacttatacaccagttttgatgaagcaagaacacagagaagagattgatttgtcttcagttccatctttgcctgtgcctcatcctgctcagacccagaggccttcctctgattcagggtgttcacatgacagtgtactgtcaggacagagaagtttgatttgctccatcccacaaacatatgcatccatggtgacctcatcccatctgccacagttgcagtgtagagatgagagtgttagtaaagaacagcatatgattccttctccaattgtacaccagccttttcaagtcacaccaacacctcctgtggggtcttcctatcagcctatgcaaactaatgttgtgtacaatggaccaacttgtcttcctattaatgctgcctctagtcaagaatttgattcagttttgtttcagcaggatgcaactctttctggtttagtgaatcttggctgtcaaccactgtcatccataccatttcattcttcaaattcaggctcaacaggacatctcttagcccatacacctcattctgtgcataccctgcctcatctgcaatcaatgggatatcattgttcaaatacaggacaaagatctctttcttctccagtggctgaccagattacaggtcagccttcgtctcagttacaacctattacatatggtccttcacattcagggtctgctacaacagcttccccagcagcttctcatcccttggctagttcaccgctttctgggccaccatctcctcagcttcagcctatgccttaccaatctcctagctcaggaactgcctcatcaccgtctccagccaccagaatgcattctggacagcactcaactcaagcacaaagtacgggccaggggggtctttctgcaccttcatccttaatatgtcacagtttgtgtgatccagcgtcatttccacctgatggggcaactgtgagcattaaacctgaaccagaagatcgagagcctaactttgcaaccattggtctgcaggacatcactttagatgatgtgaacgagataattgggagagacatgtcccagatttctgtttcccaaggagcaggggtgagcaggcaggctcccctcccgagtcctgagtccctggatttaggaagatctgatgggctctaacagtgcttactgcagccttgtgtccaccaccaacttctcagcatgtttctctccttggaccttgggtttccaactctgcagccttcaggtctggggccaggagtgggacccaccatttgtggggaaagtagcattcctccacctcaggccttgggtagatttggcaaaagaacaggagcagcataggctgtttgagctttggggaaatgaactttgctttttatatttaactaggatacttttatatgatgggtgctttgagtgtgaatgcagcaggctctcttgtttccgaggtgctgcttttgcaggtgacctggttacttagctaggattggtgatttgtactgctttatggtcatttgaagggccctttagtttttatgataatttttaaaataggaacttttgataagaccttctagaagcaaaaaaaaaaaaaaaaaaaaaaaaaagaaaaaaaaagaaaagaaaaaaagaaaaagaaaaaaatatcccaagcccacacctatgcctcagaaagtcagcatgtgtcctgaagacgttcatagatttataggaaataaagccaaatgtagctcatacctctttataaaactaaactgttgttagataaaatgagaagagaccattccatcattgaagtgttggaatataaaaagacattccagagcatagccttttggtaactttctaggtaatcttgcaatctctccatactggctccatgttgaaattgctttttccctcaggaccctgggtaagatggctacatttaaggtgactctgaatggtggggttctagcttggtcactttcatttcttgccatcataaaaactagtaggctgtggagtgcgcttcctgtttgtgtcatctggtcgtagaaccttttccaaacagaagcatctgcctttggctgttctgtgacctttgaagccagtctcagtggtttaggcagctttgcagttctaactctagctagaggccaggctgtgtgcagagctaaagcacaaatgagcagtacatcagcatgggcagagaaaatacaggactccagatgggaaggttttaagagtcacactggcatggaaggcttatctgccattctatttatagcctgaaatgattctggcctaccctgtcctgtctgtatgatctaaaaaccagccttttccccagaaggctctgagcacatccagaagtgataacctgaccctccacaccaaagacaccctggtgctgctgctggtgagactggtgtccaaggcagggcccagcagaaactgcagcctgctgtctaccaaaggaggtacccgagttgggtactttaaaaaaaaaaaaaacctgcccttacccctctccctaatgggattttttttacctgttcctgggcccattacagagcctctgaagtttgcagtatgctttcaaatgaaataatatacttccattgattcaggaagcagattttttgagtgcctatatgtgagacagtgtgctggttgaaggcctgatgctgttattccaggagactgcaggcccttgatgccaggactctctctactaaggccagttcaggtctgggaaagggagctggcctattgcccaccacctgttgtcagtaggttaggagctgttgactcaggatgaggaagtatggtctttaaaaaaaacaaaatatattttagatttctcccctaaagttagttagagaaaaaggtctattcttcagcagatcactgtggcccctcttggagctgggtgttttcaaattttcttgaaaagtgagttgtgtcacagaatgtggatagtgagatttgcttctgggcctgtggttggacgcccacagcttcctttggaggggcaagaagttggcctctcggttgacattccagagaaatggccagacttgcccctacccttttgcccctggtgtagctgcctcacatgaggttattgcaagagttccccttgcaataccctttgtgccctcaagaattaaaagcctctatgatccagagttgctatgcaccaaattttgatgccttctaaataccttgatgcctgtagcactagaaatgctttcctatttaaaataaacattaaattttaaaatagagctttgtatactatgtaagcagttttatatcagctttgtaaaagctttggtgttaagagtcaatattttttggctttgtagataaagacttaaatttttgtgcaacatagtggtgttaaagcacacatccattggactatgcaaatcaatttctactagcagcactgagcaactgggcacgtgctagtacgcaccccctcctactctaactgtgctagctcttgggttgaggaatggaatgggtagccttctgcttactggagatgcacagagaaacatggctgaaaacagctttaaaaagaacatgtctttgggttcatgtgtggtgctgctgcccgggtgtaaactatccccacccagggccagccattatcaccagacctcttctgggcctggctgtgaagccctgtttttggtattcagaatggatctttaaggctcagatgggctcaaattgaaaccttgtgttttataaaatggatgtttagtaaaggaactggttctcagttatgtttacagcacttggaattgtgtgttcttgtacattttgtattttaaaaccttttatgggagtgcagtgctccttacacaaatacaaagggaagaagagccagcagttgaggctcctcagttttagtgctgaaataataaacagtgacaggtcaacagta

SEQ ID NO: 249679 - DNA, 3228 bp, Artificial Sequence
  derived and/or modified sequence
atgacgaccgccaactgcggcgctcacgacgagctcgacttcaaactggtttttggtgaggacggcgctcccgcacctccacctcctggcagtcggcctgcggacctagaaccagacgactgtgccagtatatacattttcaacgtggatccacctccctccaccctcacaacacccctttgtctgcctcaccatggactgccatctcatagtagtgtccttagcccctcctttcaactgcagtcgcacaagaactacgagggtacctgcgagatcccagaaagtaagtatagcccactcggaggtccgaaacccttcgagtgtccgagtattcagataacatcaataagccctaactgtcaccaggaactagacgcacacgaagacgacctgcagattaatgacccagagcgcgaatttctcgagcgaccttcccgagaccacctgtaccttccactggaacccagttatcgggagtcttcactgagccctagccctgccagtagcatatccagccggagctggttttccgacgccagctcctgtgaatcactgtctcatatttatgacgacgtcgattcagaactaaacgaagccgctgcacggtttacccttgggtcccccttgacctcccccggaggatctccaggcggatgccccggtgaggagacctggcaccagcagtatggccttgggcacagccttagtcccaggcagagcccatgccatagtccaaggtccagcgtcactgatgaaaactggctgtctccgagacctgcatccggcccatcctctaggccaaccagcccttgcggcaaaaggagacattcctcagcagaggtgtgctatgccggaagcctgtcaccacatcactcacccgtcccgtcccccggacacagccccagaggaagtgtgaccgaggacacctggttaaacgcttctgtccacggcggtagtggcttaggtcccgcagtctttccattccagtattgtgttgagacggacatcccccttaagacaagaaaaacaagcgaggaccaggccgcaatcctaccaggtaagctagagctatgttctgatgatcaaggaagtttgagtcccgctagagagaccagcatagacgatggactgggctcccagtatcccctaaagaaagatagttgcggcgatcagtttttgtctgttccaagcccgttcacctggtcaaagcccaagccaggacacaccccaatcttcagaacaagctcgttaccccctctggattggccacttccagctcactttgggcagtgcgagctcaagattgaggtccagcctaagactcaccatcgcgctcactacgagactgaagggtcccgcggtgctgttaaggccagtactgggggacacccagtggtaaagttgctgggctataatgaaaagccaataaatttacagatgtttatcgggacagcagatgaccggtacctgaggccccatgccttttaccaggtgcaccggattacgggaaagaccgtcgccacagcctcacaggaaattataatagcatccacaaaggttctggaaattcctctgctgccagagaacaatatgtccgcttccatcgattgcgctggaatcctcaagctgcgcaactccgatattgaactgcggaaaggtgaaacagacatcgggaggaagaacacaagggtgcgactagtgttccgggtccacatacctcaacctagcggtaaagttttgagtctgcaaattgcctccattcccgttgaatgtagccagagatccgcccaagaactgcctcatatcgaaaagtacagcatcaattcctgctctgtaaacggtggccatgagatggtggtcacaggcagcaactttctgcctgaatccaagataatcttcctagagaaggggcaggacggaaggccccagtgggaggtcgaggggaaaattattcgggaaaagtgtcagggcgctcacatagtcctggaggtgccgccttatcacaatcccgctgttacagccgcagtccaggtacacttctacctttgcaacggcaaacggaagaagagccagtcacagcggttcacatacacccccgtgctcatgaaacaggaacaccgagaagagatcgacctcagcagtgtgccatcattgcccgtgcctcatcctgcccagacacagagacccagctctgactccgggtgttcccatgactcagtcctgagtggacaacgcagtctcatttgctccataccccaaacatatgcgtcaatggtaacctcatcgcatctaccccaattgcagtgtagagacgagtccgtgtccaaagaacagcacatgataccctctcccatcgttcatcaacccttccaggtgacaccgaccccacccgtcgggtctagttatcagcccatgcagacgaatgtggtctataacgggccaacctgccttcccattaatgccgcatcctcacaggagttcgacagtgtgctcttccagcaggatgctaccttgtcaggccttgttaacctcggttgccagcctctgtccagcatcccatttcacagttccaattctggcagtaccggacatctgctcgcccatactccccattcagttcataccttaccccacctacagagtatgggttatcattgcagcaataccggacagcggtctctgtcttcgccagtagcggatcagattaccggccagcccagctcacaactgcaacctattacttatggtccctctcattctggatccgcaaccaccgcgtcgcctgcggcttctcaccccctggcttctagtcctctgtctggtccgccttccccacagctgcagccaatgccctatcaatccccaagctctggaacggcatcttctccgtcacccgcaacgcggatgcattcaggtcaacactcaacacaggcccagtctaccggacaaggagggcttagtgccccaagctcactgatctgccactccctctgtgatccagccagttttcctcctgacggggctactgtgagcatcaaacccgagcctgaggatcgcgagccaaacttcgcaactatcggactgcaagacattaccctcgacgacgttaatgagattatcggtcgtgatatgtcccagatttctgtgagtcaaggcgcaggagtaagcaggcaggctccattgccatccccagagtcactggacctcgggcgatcggacggcctgtag

SEQ ID NO: 249680 - protein, 931 aa, Artificial Sequence
  derived and/or modified sequence
MAEVEAVQLKEEGNRHFQLQDYKAATNSYSQALKLTKDKALLATLYRNRAACGLKTESYVQAASDASRAIDINSSDIKALYRRCQALEHLGKLDQAFKDVQRCATLEPRNQNFQEMLRRLNTSIQEKLRVQFSTDSRVQKMFEILLDENSEADKREKAANNLIVLGREEAGAEKIFQNNGVALLLQLLDTKKPELVLAAVRTLSGMCSGHQARATVILHAVRIDRICSLMAVENEEMSLAVCNLLQAIIDSLSGEDKREHRGKEEALVLDTKKDLKQITSHLLDMLVSKKVSGQGRDQALNLLNKNVPRKDLAIHDNSRTIYVVDNGLRKILKVVGQVPDLPSCLPLTDNTRMLASILINKLYDDLRCDPERDHFRKICEEYITGKFDPQDMDKNLNAIQTVSGILQGPFDLGNQLLGLKGVMEMMVALCGSERETDQLVAVEALIHASTKLSRATFIITNGVSLLKQIYKTTKNEKIKIRTLVGLCKLGSAGGTDYGLRQFAEGSTEKLAKQCRKWLCNMSIDTRTRRWAVEGLAYLTLDADVKDDFVQDVPALQAMFELAKAGTSDKTILYSVATTLVNCTNSYDVKEVIPELVQLAKFSKQHVPEEHPKDKKDFIDMRVKRLLKAGVISALACMVKADSAILTDQTKELLARVFLALCDNPKDRGTIVAQGGGKALIPLALEGTDVGKVKAAHALAKIAAVSNPDIAFPGERVYEVVRPLVRLLDTQRDGLQNYEALLGLTNLSGRSDKLRQKIFKERALPDIENYMFENHDQLRQAATECMCNMVLHKEVQERFLADGNDRLKLVVLLCGEDDDKVQNAAAGALAMLTAAHKKLCLKMTQVTTQWLEILQRLCLHDQLSVQHRGLVIAYNLLAADAELAKKLVESELLEILTVVGKQEPDEKKAEVVQTARECLIKCMDYGFIKPVS

SEQ ID NO: 249681 - DNA, 2796 bp, Artificial Sequence
  derived and/or modified sequence
atggctgaagtcgaggctgtgcagctgaaggaggaagggaacaggcattttcagctgcaagattataaagccgcgaccaacagctattcacaggccctgaaactgactaaggacaaagctctcttagccaccctttatagaaacagagccgcgtgcggtctgaaaaccgagtcatatgtgcaggctgcttccgatgcctcgagagcaattgatatcaattcgtccgacatcaaggcattataccggcggtgccaggccttggagcacttgggaaagctggaccaggccttcaaagacgtccagaggtgcgccaccctcgagccacggaaccaaaacttccaggagatgctgagacgccttaataccagcatccaggaaaagctcagggtccagttcagcacagattctcgggtccagaagatgttcgaaatcttattggacgagaactccgaggccgacaagagggagaaggctgccaacaacctcatcgtgctaggcagagaagaggccggagccgagaaaatcttccaaaataacggggtagctctgctcctgcagctcttggacactaagaaaccagagctcgtcctagccgcggttaggacactttcgggaatgtgctcagggcaccaagctagagccacggtgatcttgcatgcagttcggattgacagaatctgttccctgatggctgtagaaaacgaggagatgtctttggcagtgtgcaacctccttcaagctatcattgactctctgtctggcgaggacaaaagagagcatcgggggaaggaggaggcgcttgtgctggatactaagaaagacctaaaacaaatcacatcgcacctgctcgacatgttggtttccaagaaggtgagcgggcaggggagggatcaagcccttaatctactcaacaagaatgtgcctagaaaggacctcgctatacacgataactctcggactatatacgtggtcgacaatggcctgcgtaagatcctgaaggtcgtgggccaggtccccgatcttccctcctgtctgccactgacggataatacacggatgctcgccagcatcctgattaacaaactgtatgacgatctgcgctgcgacccagaacgagatcactttcggaagatctgcgaagaatacatcaccggtaaattcgaccctcaggatatggacaagaatctcaacgcaattcaaaccgtcagcggcatcctgcaaggacccttcgatctgggtaatcagcttctggggctgaagggagtgatggagatgatggtcgccctgtgcggatcagaacgggagaccgatcagcttgtggcagtcgaggccttaatccatgcgtccactaaactgagcagggccaccttcataataacgaacggggtgtctctgttaaaacagatctacaaaactactaagaacgaaaaaataaagatcagaacactggtcggtctttgcaaactgggttctgccggcggcaccgattacggactacgccagtttgccgaaggcagcactgagaaactggccaaacaatgccgcaagtggctctgtaatatgtctattgacactaggactaggcgatgggcagtagaagggctggcctatctgacgcttgatgcggacgtcaaagacgatttcgtccaggatgttcccgccctacaggctatgttcgaactggccaaggcagggacttccgataagaccattctctattccgtcgccactaccctagtgaattgtaccaatagctatgacgtgaaggaagtgatccccgagttagtccaactggccaaattcagcaagcagcatgtgccggaagaacaccctaaggacaaaaaagacttcatcgatatgcgtgtgaagcgcctcctcaaagctggcgtcatttctgccctggcatgtatggtgaaggccgattctgccattctaactgatcagaccaaagagttgctggcccgcgtcttccttgctctttgcgataacccgaaggatcggggcacaattgtggcccaggggggtggcaaggcgcttatccccttggcccttgaaggcactgacgttgggaaagtaaaggctgctcatgctttagccaagattgcggcagtgtcaaacccagacatcgccttcccgggtgagagggtctatgaagttgtgcggcctctggtgcgcttgctggacacccaaagggatggactacagaattacgaagcactcttgggcctgaccaacttaagtgggcggagcgataaattgcgacagaagatctttaaggaaagggccttgccagatattgagaactatatgttcgaaaatcatgaccagctgcgccaggcggccaccgagtgtatgtgcaacatggttctccacaaagaagtgcaggagcgctttctggctgatggtaatgataggctcaagctcgtggttctgctctgcggcgaggacgatgacaaggtgcaaaatgccgctgccggagctctggccatgctgaccgccgcgcataagaagctgtgtttgaagatgactcaggtaaccactcagtggttggaaatcctccaacggttgtgtctccacgaccaactctccgtccagcaccgcggcctggtgatcgcttacaatctgttggccgctgatgcagagctagcaaagaagctggtagagtccgagctgcttgagattctgaccgtggttggcaaacaggaacctgacgagaaaaaggctgaagtagtgcaaacagcgcgggaatgtctgataaagtgtatggactatggttttatcaagcccgtctcttag

SEQ ID NO: 249682 - DNA, 2796 bp, Artificial Sequence
  derived and/or modified sequence
atggcggaggtggaggccgtccagttgaaggaggaaggcaatcgccattttcaattgcaggattacaaagccgcgacaaactcctactctcaggccctgaagctgacaaaggacaaagccttactggccaccttgtaccggaacagggccgcttgtggcctgaagaccgaatcctacgtgcaagctgcctcagatgcgagtagggcaatagatatcaatagctccgacattaaggccctttatcgtagatgccaggcgctggagcatctgggcaaactggaccaggccttcaaggatgttcagaggtgcgctaccctggaacctcggaatcagaacttccaagaaatgctgcgtcgactgaataccagcattcaagagaaactgcgggtgcagttctccactgactcgagagtacagaagatgttcgaaatccttctcgacgagaactcagaagctgacaaaagagagaaagccgccaataacctgatcgtgctgggacgagaagaagcaggggcagaaaagatttttcagaacaatggcgttgccctgctgctccagctgctagatacgaagaagcccgaactggttctcgcagccgtgagaactctctctggcatgtgctcaggccaccaagcaagggcgactgtcattcttcacgccgtgagaattgataggatctgcagtctgatggccgtggaaaacgaagaaatgtcactagccgtctgtaacctcttgcaggccatcatcgattcgctgtccggagaagataaacgagaacacagggggaaagaagaggctttagtcttagacactaagaaggacctcaagcaaatcacgagccacttattggatatgcttgtcagcaaaaaagtttccggccagggaagagaccaggctctgaacctgcttaataagaacgtgcctaggaaggatcttgcgatccacgacaacagcagaacaatttacgttgtcgacaacggactgagaaaaatcttgaaggtggttggccaagtgcctgacctaccaagttgcctgcccctcactgataacacacgcatgttggcgtccatccttatcaacaagctctacgatgacctgagatgtgacccagagcgtgatcattttaggaaaatttgcgaagagtacatcactgggaagttcgacccccaagatatggacaagaacctaaacgctattcagacggtttcaggaattcttcagggcccttttgatctcgggaatcaactgttgggcctgaaaggggtaatggaaatgatggtggccctctgcggatcagaacgagaaacggaccagttagtcgcagtcgaagctttaatacatgcttcaaccaaactgtcccgtgcaacgttcattatcactaacggagtgagcctgcttaaacagatttataagactactaagaacgaaaagattaagatccgtacgctggtggggctctgcaagttaggctctgcaggcgggacagattatggattgcggcagttcgccgaaggatctacggaaaaacttgcaaagcagtgtagaaaatggctctgtaacatgtcgatcgacacccgcaccaggcgatgggcggtggaggggttagcgtatctgacactcgacgctgatgtcaaagatgatttcgtgcaggacgtgccagctctccaggccatgttcgaacttgccaaagccggcacgtctgataaaacaatactgtacagtgtggccaccactcttgtcaactgcacgaattcgtatgatgtgaaagaggtgattccggagcttgtgcaactggcaaaattcagcaaacaacacgtccctgaggagcaccctaaggacaaaaaggatttcatagatatgagagtgaagagattgctgaaggccggcgttatctcggcgttggcctgtatggtgaaagctgattctgcaatcctaacagaccaaacaaaagaactgctggcccgggtcttcctggccctgtgcgataacccgaaggatagaggaactattgtggcgcagggaggcgggaaagcattgatccctctagccttggagggaactgacgtggggaaagtgaaggcggcccacgccctggcgaaaatcgccgccgtgtcaaacccagatatcgcatttccaggggagagagtgtatgaggttgtgcggcctctcgtgcggctgctggacactcagcgcgacgggctccagaattacgaggctctgctaggattgacaaacctctccggcagatctgacaaacttcggcagaaaatattcaaggaaagggctttaccagacatcgagaattatatgttcgaaaatcacgatcagttaagacaagccgcaacggagtgcatgtgtaatatggtgctgcacaaggaggtgcaggaacgattcctagccgacggcaacgaccgcttaaaactggttgtgctgctctgtggcgaagacgatgacaaagtgcagaatgccgccgccggcgccctggcgatgctgacagctgctcacaagaagctctgtttaaagatgactcaggttaccacccagtggctggagatcctacagcgcctatgtcttcacgatcagctgagtgtgcagcatagaggcctggtcattgcctacaacctgctggcagcggatgccgaacttgccaagaaacttgtcgaatccgagctgctggaaatccttaccgtcgtgggaaagcaggagcccgacgagaaaaaggccgaggtggtgcagactgcccgggaatgcctgatcaagtgtatggactacggctttattaagccagttagctag

SEQ ID NO: 249683 - DNA, 2796 bp, Artificial Sequence
  derived and/or modified sequence
atggccgaggtggaggccgtgcagctgaaggaggagggcaacagacacttccagctgcaggactacaaggccgccaccaacagctacagccaggccctgaagctgaccaaggacaaggccctgctggccaccctgtacagaaacagagctgcctgtggcctgaagacagagagctatgtgcaggccgccagtgatgccagccgggccatcgacatcaacagcagtgacatcaaggccctgtaccgccgctgccaggccctggagcacctgggcaagctggaccaggccttcaaggatgtgcagagatgtgccaccctggagcccaggaaccagaacttccaggagatgctgcggcggctgaacaccagcatccaggagaagctgcgggtgcagttcagcacagacagccgggtgcagaagatgtttgagatcctgctggatgagaacagcgaggccgacaagcgggagaaggccgccaacaacctgattgtgctgggccgggaggaggccggggctgagaagatcttccagaacaatggagtggccctgctgctgcagctgctggacaccaagaagccagagctggtgctggccgctgtgaggaccctgagcggcatgtgcagcggccaccaggcccgggccaccgtcatcctgcatgctgtgagaattgaccgcatctgcagcctgatggctgtggagaatgaggagatgagcctggccgtgtgcaacctgctgcaggccatcatcgacagcctgtctggagaggacaagcgggagcaccggggcaaggaggaggccctggtgctggacaccaagaaggacctgaagcagatcaccagccacctgctggacatgctggtgtccaagaaggtgtctggccagggccgggaccaggccctgaacctgctgaacaagaatgtgcccaggaaggacctggccatccatgacaacagcaggaccatctacgtggtggacaatggcctgaggaagatcctgaaggtggtgggccaggtgcctgacctgcccagctgcctgcccctgacagacaacaccaggatgctggccagcatcctgatcaacaagctgtatgatgacctgcgctgtgaccctgagcgggaccacttcaggaagatctgtgaggagtacatcaccgggaagtttgacccccaggacatggacaagaacctgaatgccatccagacagtgtctggcatcctgcagggcccctttgacctgggcaaccagctgctgggcctgaagggcgtgatggagatgatggtggccctgtgtggcagcgagcgggagacagaccagctggtggccgtggaggccctgattcatgccagcaccaagctgagccgggccaccttcatcatcaccaatggagtgtccctgctgaagcagatctacaagaccaccaagaatgagaagatcaagatccgcaccctggtgggcctgtgcaagctgggcagcgctgggggcacagattatggcctgcggcagtttgctgagggcagcacagagaagctggccaagcagtgcaggaagtggctgtgcaacatgagcattgacaccaggacccggcgctgggccgtggagggcctggcctacctgaccctggatgctgatgtgaaggatgactttgtgcaggatgtgcctgccctgcaggccatgtttgagctggccaaggccggcaccagtgacaagaccatcctgtacagcgtggccaccaccctggtgaactgcaccaacagctatgatgtgaaggaggtgattcctgagctggtgcagctggccaagttcagcaagcagcacgtgcctgaggagcaccccaaggacaagaaggacttcatcgacatgagggtgaagaggctgctgaaggccggggtcatcagcgccctggcctgcatggtgaaggctgacagcgccatcctgacagaccagaccaaggagctgctggcccgggtcttcctggccctgtgtgacaaccccaaggaccggggcaccatcgtggcccagggcggcggcaaggccctgatccccctggccctggagggcacagatgtgggcaaggtgaaggccgcccacgccctggccaagattgctgctgtgagcaacccagacatcgccttccctggagagcgggtgtatgaggtggtgcggcccctggtgcggctgctggacacccagagagatggcctgcagaactatgaggccctgctgggcctgaccaacctgagcggccgcagtgacaagctgcggcagaagatcttcaaggagcgggccctgcctgacatcgagaactacatgtttgagaaccacgaccagctgcggcaggccgccacagagtgcatgtgcaacatggtgctgcacaaggaggtgcaggagcgcttcctggctgatggaaatgaccggctgaagctggtggtgctgctgtgtggagaagatgatgacaaggtgcagaatgctgctgctggggccctggccatgctgacagctgcccacaagaagctgtgcctgaagatgacccaggtgaccacccagtggctggagatcctgcagaggctgtgcctgcatgaccagctgtctgtgcagcaccggggcctggtgattgcctacaacctgctggccgcagatgctgagctggccaagaagctggtggagagcgagctgctggagatcctgactgtggtgggcaagcaggagccagatgagaagaaggccgaggtggtgcagacagcccgggagtgcctgatcaagtgcatggactatggcttcatcaagcctgtgtcctag

SEQ ID NO: 249684 - DNA, 2796 bp, Artificial Sequence
  derived and/or modified sequence
atggccgaggtggaggccgtgcagctgaaggaggagggcaaccggcacttccagcttcaggactacaaggcagccaccaacagttactcccaggctctcaagctgacaaaggataaggccctactcgccactctgtatagaaaccgggccgcctgtggtctgaagacagaaagctacgtgcaggccgctagcgacgctagccgggctatcgatattaattcttccgatatcaaagctttgtatcgccggtgtcaggccttggagcatttaggtaaactcgaccaggcattcaaagatgtccagcgctgcgcaaccctggagcctagaaatcaaaattttcaggagatgctccgtaggttaaacaccagcattcaggagaagttgcgggtacagttctctaccgactctcgagttcagaagatgttcgaaatccttctggacgagaactcggaagccgacaaaagagaaaaagcagccaataacctgatcgtgctcggaagggaggaagctggggctgaaaaaatcttccaaaacaacggcgtggctctgctccttcagctgctcgatacgaagaagccagagctggttctggccgcggttcgcacattatcgggcatgtgttccggtcatcaggcacgagctaccgtgatcctgcacgccgttcgcattgaccggatatgctcactgatggcggttgaaaacgaggagatgtcactggctgtgtgtaatctgctgcaggccataatagactctttatctggtgaagataagagagaacaccgaggaaaagaagaggcattagtgcttgatactaaaaaagatctcaagcagatcacaagccacttactagacatgctagtaagcaaaaaggtctcgggccagggcagggaccaggccttgaatttgctcaacaagaacgttccaagaaaagacctggccatacacgacaactccagaacaatctatgtggtggacaatggactccgcaaaatactcaaggtagtgggccaggttccagaccttcctagctgtctacctcttacggataatacaagaatgttggcctccatactgattaacaagctatatgatgatctgcgatgcgatccagaacgagatcactttcggaagatctgcgaggagtacatcactggaaaatttgaccctcaggacatggacaagaacctgaatgctatccagaccgtaagcgggatcctgcaggggccgttcgacctcggcaatcaattgctgggtcttaaaggggtgatggagatgatggttgcactctgcggctcagagagggagactgatcagctggtggccgtggaggctcttattcacgcatctacaaaactgagtagagccacgtttataatcacaaacggagtctctctcctgaagcagatttataaaaccacaaagaatgagaagattaaaattagaacgctggttgggctctgcaagcttggatctgcaggcgggaccgactacgggctgcggcagtttgccgaaggctctacggaaaaactggccaagcaatgccggaagtggttgtgcaacatgtccatcgatactaggacacgccgatgggccgtcgagggtcttgcctatctgaccctggatgcagacgtgaaggatgacttcgtacaggatgtccccgctctccaggctatgtttgagctggctaaagccggtacaagtgacaagaccattctgtacagcgtcgccaccaccctagttaactgcaccaacagttacgacgtgaaagaggtcattccagaattagtacagctggccaagttttccaagcagcacgtaccagaagaacatcccaaagataagaaagattttatcgacatgcgagtgaaaagactgcttaaggccggggtgatcagcgccctcgcctgtatggtgaaggccgacagcgcgattctcacagaccagactaaggaactgttagcccgcgtcttcctcgccttgtgtgataatcctaaagatcgtgggacaattgtggctcaggggggcggcaaggcattaatcccattagccctggaaggcacagatgtcggtaaagtcaaagccgcccacgcgttagcaaagatcgctgcagtgagcaatcccgatattgcctttcctggagaacgagtttacgaggtggtacggcccctagtgcgtctgctcgacacacagagagacggactacagaattacgaggcactgctagggctcaccaacctgtctggcaggtctgacaaactgcggcagaagatctttaaagaaagggctctccctgatatcgagaattacatgtttgagaatcatgaccaactgcgccaagctgcaacggagtgtatgtgtaatatggttctgcataaagaagtgcaggaacggttcttggccgatggcaacgatcgcctcaaactggtggtgttactgtgcggagaggacgacgacaaggtgcagaatgccgctgcgggcgccctagcaatgctaaccgcagcacataagaagctgtgcctaaagatgacgcaggtcactacgcagtggctggaaatcttgcagaggctgtgccttcacgatcagctgagtgtgcaacaccgcgggttggtcatcgcctacaaccttctggccgccgatgcggagttggctaagaaattggtggaaagtgagctgctggaaattctgacggttgttgggaagcaggagccagacgaaaagaaagctgaggtagtccaaaccgccagagaatgcctgattaagtgtatggattacgggttcataaagcccgttagttag

SEQ ID NO: 249685 - DNA, 6029 bp, Artificial Sequence
  derived and/or modified sequence
agactgaggctggctggctggaggttgacacaggagtgctcaggggagcagcatcacaagagggcagatcgaaagcatcgtccttgctgaaaaagtgagcatgggcctggggtgtgccctggactggggagggagacggcaaacttctaagacctgcaatgagagttcaggcctttggcacaaactaagcagcttcgcctgctcaggctgggagggacagagagtgaggcacagggactctcaacttgggccaagctctgagcaaatgctataatgtcctcatggggcaatagatttgggggttctgggggtgggtcccttccaggcagaatccccaccatcctctctggtgtgaggggaccctggagctccggacctcaggccaggagcccagccctgggtctgcagtgaggggctgaccagacagagcttctcctgtcccagcagatggcagaggtggaagcggtacagctgaaggaggaaggaaaccggcatttccagctccaggactacaaggccgccacaaatagctacagccaggccctgaagctgaccaaggacaaggccctgctggccacgctttatcggaaccgggcagcctgtggcctgaaaacggagagctacgtccaggcagcttcagatgcctccagagccatcgacatcaactcctcggacatcaaggctctgtatcggcgatgccaggcactggagcacctggggaagctggaccaggccttcaaagacgtgcagcgttgtgccaccctcgagccacggaaccagaacttccaggagatgctgaggagactcaacaccagcattcaggagaagctccgagtgcagttctccacagactcgagggtacagaagatgtttgagatcctcttggatgaaaacagtgaggctgataagcgggaaaaggctgccaacaatctcattgtcctaggccgtgaggaagcaggggctgagaagatcttccagaacaatggagtagccttgctactgcagcttctggacactaagaagcctgagctggtgctggctgcagtgcggaccctgtcgggcatgtgcagcggccaccaagccagagccacagtgattctgcatgcagtgcggatagaccgaatctgtagcctcatggccgtggagaatgaggagatgtctctggctgtctgcaacctgctccaagccatcattgactccttgtctggggaggacaagcgggagcatcgagggaaggaggaggccctggttctagacaccaagaaggacctgaagcagatcaccagccacctgctggacatgctagtcagcaagaaggtgtctggccagggcagggatcaggcgctgaacctgctcaataagaatgttcccaggaaggaccttgccattcatgacaactcacgtaccatctatgtggtggataatggtctgaggaagatcctgaaggttgtggggcaggttccagatctgccatcctgcctgcccctgactgacaacacccgcatgctggcctctatcctcatcaacaagctctatgatgacctgcgctgtgacccggagcgcgatcacttccgcaagatctgtgaggaatatatcacgggcaagtttgacccccaggacatggacaagaacttgaatgccatccagacagtgtcagggatcctgcagggcccctttgacctgggcaaccagctgctgggactgaaaggtgtgatggagatgatggtggcactatgtggctcagagcgcgagacggaccagctggtggccgtggaggccctcatccatgcctccacgaagctcagccgcgccaccttcatcatcaccaatggagtgtcactgctcaaacagatctacaagaccaccaaaaatgagaagatcaagatccgcacactggtgggactctgtaagctcggctctgcaggtggcacagactacggtctcaggcagtttgcggaagggtcgacagaaaaactggccaaacagtgtcgcaagtggctgtgcaatatgtccatagacactcggacccgacgctgggcagtggagggcctggcctacctcacgctggacgctgatgtgaaggacgactttgtccaggacgtccctgccctgcaggccatgtttgagctggccaaggcaggtaccagtgacaagaccatcctgtactcggtggccaccaccctggtgaactgcaccaacagctacgatgtcaaggaggtcatcccagagcttgtccagctcgccaagttctccaagcagcatgtgcccgaggaacaccccaaggacaagaaggactttatagacatgcgggtgaagcggcttctgaaggcgggtgtcatctctgccctggcttgcatggtgaaagcagatagtgccatcctcactgaccagaccaaggagctgctggccagggtattcctggcactgtgtgacaacccaaaggaccgaggcaccattgtggctcaaggtggtggcaaggccctgattcccctggctttggagggcacagatgtgggcaaggtgaaggcagcccacgctctagcaaagatcgctgctgtctccaatccggacattgcttttcctggggagcgggtgtatgaggtggtgcggccccttgtaagactcttggacacacagagggatgggcttcagaactatgaggctctcctaggcctcaccaacctgtctgggcggagtgacaaactccggcagaagatctttaaggagagggccttgccagacatcgagaactacatgtttgagaatcatgatcagctgcggcaggcggccaccgagtgcatgtgcaacatggtgctccacaaggaggtacaggaaaggttcttggctgacgggaatgaccggctgaagctggtggtgctgctctgcggggaggatgatgataaggtgcagaatgcggctgcaggggctctggccatgctgacagcagcacacaagaaactgtgcctcaagatgactcaagtgacaacccagtggttggagatcctccagcggctttgcctgcacgaccagctgtctgtccaacaccggggcctggtcattgcctacaacctactggcagccgatgctgagctggccaagaagctggtggagagtgagctgctggagatcctgactgtggtgggcaaacaggagccagatgagaagaaggcagaagtggttcagacagcccgagaatgtctcatcaagtgcatggattatggtttcattaaaccagtgtcttagacagcgaccctcagggatgctgggagtggtcctgtactgtgcagagtcctgggttggttgggttctcctgaagagtcaggtcatctagggatcatagcagtgacaatgaagtctcaatataaaggaaagacttgattgttctctgagttgtgagtcttctcctttgtcctgacagagtttggatgtttcactctctctcttgcttcctgtctccttatatttgtcatgtttcagaaattcccagaataattttcacccatgattagaaataggttggatcattctttctgtacccattctgaaggccaggataataggttgaagttctttatattttggaaaatggattttgtggtaaggtaggaactaacgggtgtgtgcatataaaggttaatgctgttgtatttggatgctgatctgtgctgttttcatgacctctctcccacactatttgaatcagtctgttcagaactgtgtgtttcacctgcagtgctctgtcccagtcccatgcccattcccatcacttcactgtgatggaaatagagtttatgttcaacagtggggcatgacctctgcaatttgcttgggaaagtcttccaagcaagatggacatgatgaatacaaataagatctactcaaagtacttcaaacaaaaaataaataattcattggctcatgtatcttggccacccagggaaggtctgacattgttagttagatccagagtttcaaatgtcatcaccatggatgtgtctttttctctctctcatttcccctccccatatcttgtcttttatttattataggtttgtctcattccctggcaggctctctccctgtgataggaaagagagtccccagcagccccagggtgacatagttgttatagttcattatggaatagaagagagaagagcattctcaataacccggcaaagttcccagggatgactctgatatgtctatgtctcaggtcacatttccatctatgaaccaatcatattcagaggtggaatgctaattggccaggcctgggtcatatatacaagtctagggaagaaatgagcttcatccctgtccaattgacatggactgattaggggtattaatggaagaggtgtgccaccacaaaagaatgtaccctgggcagatcaaagaacatattctgtatgtcaggcttggccacaaaagaatgacacaagtaatatgctgtagatcagaacctctctgctaatattgcctttttagcatggttaagatagctaagatctagtactgtcactccagtatgtcccaattctacctacgtttattgaagggtcaacagttctgatctcagcattgggtaaagggtgggacattcagatttacggtccttgataaaaacaatttacaacgttccgttgtgtaataaatgtaagtgtacatatgcctgggacatcagctggaaaagggacagactatcagagagttgcactgttgcggtatgggccaaatccaacataatacccgctgtacctctagagaactaaaaccttaatttctcagatcttttctgcactaatggtctttacatacagcctacattttaactaactcttgcatgggcttgtttcacagcaggaaactatattcatcatatccttattatgatagagaatgacaacattcaaaagggtgtggtgcttctgaaaatatacacaataaatggcatgatttgacctctgtcaaattcttctttcctgctttcctcatatgtgggcttgagtgggtgtatttagctcctttaaaggaaactctttcacaggcagggccacactcttactcgttttgatctcatgaggttacatctgccagtggcgttcagggccagttagataaagttcatcttgtttggattggagagactttttttttttttttttttgagacagggtcttgctctgtaacctaggctcaagtgcagtgcagtggtgcagtcatggctcaccgcagccttggtctcctgggctcaagtgatctttctacttcagcctcctcaatagctgggactacaggcacacaccaccacccccaggtaattaaaaaatttttttttgtagagacagggtctcactatgttgcccagtctgggagaccacattctttaacatgaatattttgtaaatagtccaagaagatctagaggaaagctgaattccttcatctgatttttgccactgggctgcctcccattgtctggctaagtcttcatgggaggcctttaagaaaagctgtgacaaatacctttgtttcccactgcctaggttacataagtagttggcttttccagcctagactcttatattgttgcttgtaagagggcccttctttgcagatttcttttttttttcatctatgctttcaaataggcagatgctagcctgagatcatctctttattgaggtagtttgcccaaaaacagcaaggaacagccaatacctgccaactttctaggtttttccaaccaattctcttacagaaaatctataaatatcttagaggtatgtttcttagtttcccaacatataatgggaaaattcatcatttatattattacttttaactgaagtatgttgttatcagagaacttggtctgtgtcatattaatcctttgccatttgagaagcatacagttttaaagtttatatctccaaaaggatattttgtaaaaatttaacccctttgactcttagtcttctcatttgtgaaaggtaaataataaagaatttctgttcctagtaaga

SEQ ID NO: 249686 - DNA, 2796 bp, Artificial Sequence
  derived and/or modified sequence
atggccgaggtggaggccgtgcagctgaaggaggagggcaaccggcatttccaactgcaagattacaaagcggccactaacagctactcgcaggctctgaagttgactaaagacaaggcgctgctggctaccctctaccggaatagagcagcatgtggtcttaaaaccgaaagttacgtccaggctgcaagcgacgcatctcgtgcaatagacattaactcgtctgatatcaaagcattgtatcgaaggtgtcaagccttggaacacttgggaaaacttgaccaggccttcaaagatgtccagaggtgtgctacccttgagcccaggaatcagaatttccaggaaatgttgcgaaggctgaacacctccattcaagaaaaattacgtgtacaattttccacagatagcagagtacaaaagatgtttgagattttactagacgagaacagtgaagctgacaaacgtgagaaggccgcaaacaatctgattgttttgggacgcgaggaagccggtgctgagaaaattttccagaataacggggtcgctctgctgctgcagctgctggacaccaaaaaaccagagttggttctggcagccgtgagaacactcagtgggatgtgtagcggccaccaggccagagctactgttatattgcacgctgtgcgcatagatcgaatttgttccttgatggccgttgagaacgaggagatgtcgttggccgtgtgcaacctgttgcaggctatcatagactcattatctggcgaagataagcgcgagcacagagggaaagaagaggccctcgtgttagatacaaagaaggacctgaagcagattacatcccatttgctggacatgctggtcagcaagaaggtctcaggacagggcagagaccaagccctaaacctgctaaacaaaaacgtcccccggaaggatttagcgatacatgacaacagcaggacaatctacgttgtcgataacggcctgaggaaaatcctcaaggttgtcgggcaggtaccggatctccccagctgtttgcctttgaccgacaatacccgcatgctcgcctccattctaattaataaactgtacgacgatctgaggtgtgatcctgagagagatcacttccggaagatctgcgaagaatacatcactggtaagtttgacccacaggacatggacaaaaacctgaacgcgatccagacagtctcaggaatcctgcaggggccttttgatcttggaaaccagctccttggtttgaaaggagtgatggagatgatggttgcactgtgtggatcggaacgggaaacggaccagctggtggccgtggaagcccttattcacgccagcaccaaactgagtagggcgacattcattattacaaatggagtgtctctgctaaagcagatctataagacaacaaagaatgagaaaatcaaaatcaggaccctcgtggggctttgtaaactgggcagtgcaggaggcactgattatggcctcagacaatttgcggaaggtagtacggagaagctggctaaacagtgccgaaaatggctgtgcaatatgtccatcgatacccggacacggcggtgggcagtggaaggattagcctacctgacactggatgcagacgtcaaggatgacttcgtgcaggatgtgccagccttgcaagccatgtttgagctcgcaaaagctggaacgagcgataaaactatcctgtattccgtggcaacaacccttgttaactgcaccaactcatacgacgtgaaggaagtcatccccgagttagtgcagttggcgaagttttccaagcaacacgtccctgaagaacaccctaaagacaaaaaggactttatcgacatgcgggttaagaggctgctgaaagctggcgtgatctcagcgctggcctgcatggttaaggcagacagcgccatactaaccgaccagactaaagaactcttggcccgagttttcttggccctctgtgacaaccctaaagacagagggaccatcgttgcccagggaggtgggaaggcacttatcccattggccctggaagggaccgatgtgggcaaagttaaggcagcccatgccctggccaagattgccgctgtttccaacccagacatcgcatttccaggggaacgcgtgtatgaagtcgtgcgaccgttggtgcgacttctcgatacacaaagggatggtcttcagaactacgaagctctcctcggacttactaacctgagcggcaggagtgacaaacttaggcagaaaatcttcaaagagcgcgcactacccgacatcgagaattacatgttcgagaaccatgatcaactccgtcaggctgccactgagtgcatgtgtaatatggtactgcataaggaagtgcaagagagattcctggctgatggaaacgatcgcctcaaactggttgtgctgctgtgtggagaggacgacgacaaggtgcagaacgcagccgcaggggcccttgccatgctgacagcagcacacaagaagctatgtttaaagatgacccaggtcacaacacaatggctcgagatcttacagaggctgtgcctgcacgatcaactgagtgttcagcatcgcggcttagtcatcgcttacaacctgctcgctgcagacgccgagctcgcaaaaaagttagtggaaagtgaattgttggaaatcctgactgtggtcggcaaacaggagccagacgaaaagaaggcggaggtggttcagactgcccgagagtgcctcatcaagtgtatggactatggctttatcaaaccggtaagctag

SEQ ID NO: 249687 - DNA, 2796 bp, Artificial Sequence
  derived and/or modified sequence
atggccgaagtggaagcagtacaacttaaagaagaaggcaacaggcacttccaattgcaggattacaaagcagccactaatagttattctcaggcactgaaattgacaaaggacaaagccctgctcgccactctttaccgtaacagagccgcatgtggtctcaagaccgaaagctacgtgcaggctgcctccgatgcgtcacgcgctattgatattaattccagtgatatcaaggccttataccgcagatgtcaagccctagaacatttgggaaagcttgatcaagcatttaaagatgtgcagagatgcgcaacgctggaaccacgaaaccagaatttccaggagatgctcaggcggcttaataccagcatccaggagaaactgcgggtgcaatttagtacagattcccgagtgcagaagatgtttgagattctgttggacgagaactccgaagcagacaagagagagaaagcagcaaataatctaattgtgctgggcagggaggaagcaggagccgaaaagattttccagaacaatggcgtggccctgctcttacagcttctggacacaaagaagcccgaactggtcctggcagccgtaagaaccctctcaggtatgtgcagcggacaccaggccagagctaccgtcattctccacgctgtgcgtatcgatcgcatctgctctttaatggcagttgagaatgaagaaatgtccttagccgtctgcaatctactacaagccatcatcgactctctttctggggaagataagagggagcatcgcggtaaagaagaggccctggtcttggacactaaaaaagacctgaaacaaataacctctcacctcctggatatgttagtgagcaagaaggttagcggacaaggtagggaccaggctctgaacctactgaataaaaatgtgcccaggaaggatttagccatccatgataactctagaaccatctacgtcgtcgataacggacttcgcaagatactgaaggtggttggacaggtgccggatttgccttcctgccttcctctcaccgacaatacccgcatgttggccagcatcctcattaataagctgtacgacgatctgcgctgtgaccccgaacgggaccactttaggaagatatgcgaagagtatataaccggcaagttcgacccccaggacatggacaaaaacttaaatgctatccaaaccgtgtcaggaatacttcagggtccctttgacctcggcaaccagctcctcggactgaagggggttatggagatgatggtggcattatgcgggtccgaacgagagacagaccaactcgttgcagtcgaagcactgattcacgcttccacgaagctcagtagagctaccttcataattaccaatggcgtctccctcttaaagcagatctacaagactacgaaaaatgaaaagattaagatcagaacccttgtaggcctgtgcaaactgggatccgccggaggcactgactacggcctcaggcagtttgccgagggttccactgaaaaactcgcaaaacagtgtcggaaatggctgtgtaacatgagtatcgacacgagaacaaggaggtgggcggtggagggcctcgcatatctgacgttagatgccgatgttaaagatgatttcgttcaggacgtgcctgccttgcaggctatgttcgagctagccaaggccggtaccagcgataaaacaatcctgtactcagtggcaactaccttagttaactgtactaatagttatgatgtgaaggaagttatccctgaactggttcagctggctaagttctctaagcagcacgtcccggaggagcatccaaaagacaagaaggatttcattgatatgcgcgtgaagcgtcttttaaaggccggtgttatctctgcactcgcatgcatggtgaaggctgatagcgcgatactcactgaccaaacaaaagaactgctggcaagagtgtttctggccctgtgtgataacccaaaagaccgtggcacaattgtcgcccagggcggaggaaaggccctcatacctcttgcgttggaaggaaccgacgtcggtaaagttaaagccgctcatgccctggctaaaattgccgctgtctccaacccagacatcgcctttccaggtgagcgcgtctacgaagttgtgcgaccgcttgtgaggctgctggacacccagagagacgggcttcagaactatgaagcgttgctggggctcactaacctctccggcaggtccgacaagctgcggcaaaaaatctttaaagagagggcccttcccgatattgagaactacatgtttgagaatcacgaccaactgagacaggccgctaccgagtgcatgtgtaacatggttctgcataaggaggtgcaggaaaggttccttgccgatggcaacgaccggctgaaactggtcgtgctgctgtgcggcgaggatgacgataaggttcagaatgcagccgcaggggctctggcgatgctgaccgccgcacacaaaaagttgtgcctgaagatgacacaggtgaccacacagtggttagaaatattacagaggctgtgtctgcacgatcagctatcggtgcagcatagaggcctggtaatagcctacaacctgttagctgccgacgccgagcttgccaagaaactcgtggagtccgagctgttggagattctgactgtggtcggaaaacaggaacctgacgaaaagaaggcggaggtggtgcaaactgccagagaatgtctgattaaatgcatggattacggtttcatcaagcccgtgtcttag

SEQ ID NO: 249688 - DNA, 2796 bp, Artificial Sequence
  derived and/or modified sequence
atggctgaagtggaggctgtgcagctgaaagaggagggaaacaggcatttccagctgcaggactacaaggccgctacaaattcttacagtcaggcgctaaaattaaccaaagataaggcgctactggctaccctttacaggaacagagctgcttgtggtctgaaaactgagtcttatgtgcaggccgcatcagacgcctctagagccatagacattaactcctcagacatcaaggccctgtaccgcaggtgccaggcactagagcacctcggaaagctagaccaggcctttaaagatgtgcagaggtgtgctaccttggaaccgaggaatcagaattttcaggagatgttacgtcgcctgaacacatcaatccaagaaaaactgcgagttcagtttagcaccgatagcagggtacagaagatgttcgagatcctgttggacgaaaattccgaggcagataaacgcgaaaaggctgcaaacaatctcatagtcctgggacgggaggaagctggcgctgagaaaatttttcagaataacggcgtggccctactgctccagctccttgacactaagaagccggagcttgtcctggcggctgtgcggactctgagtggcatgtgtagcggtcaccaagccagggccactgtgatcctacatgctgtgagaattgaccgtatctgctcactaatggccgtggagaatgaagaaatgagtctagccgtttgcaatctgcttcaggccatcattgactctctcagtggtgaggacaagagggaacacagaggaaaagaagaggctctggtactggacacgaagaaggacctgaagcagattaccagtcatctcttggacatgctcgtgtctaagaaggtctcagggcaaggtcgggaccaggccttaaacctgctgaataaaaatgtgccaaggaaggacctggcgattcatgacaactcccgtacaatatatgtggtcgataacggcctcagaaaaattctgaaggtcgttgggcaagtgcccgacctcccatcttgccttcccctaacagataatacgcgcatgctcgcttccattcttattaataagttatacgacgatctgcggtgtgaccctgagagggaccatttcagaaagatctgtgaggaatatatcacagggaagtttgatcctcaggatatggacaaaaacctgaatgctattcaaacagtttctggaatcctgcagggaccttttgacttaggcaaccaattgctggggctgaaaggagtcatggaaatgatggttgccttgtgtggcagcgagcgggagaccgatcaacttgttgctgtcgaagccctcatacacgcatctaccaagctctcaagggcaacgttcatcatcactaacggagtaagtctgctgaagcagatttacaaaacaacaaagaacgagaagatcaagattcgaacccttgttggcctgtgtaagctaggctcagctgggggaaccgactacggcctgcgacagtttgcagagggcagcaccgagaaactggccaagcagtgcagaaagtggttatgcaacatgtccatcgacactcgtactcgccgatgggctgtggaaggactggcttatctaaccctggacgctgatgttaaggacgattttgttcaggacgtgcctgccctgcaggcgatgtttgagctggccaaggctggtacgtcagacaagacaatactctatagcgtcgcgaccactctcgtgaactgtaccaatagttatgacgttaaggaagtgattcccgagttagtgcagctcgcaaaattttcaaaacagcacgttccagaggaacaccccaaggataagaaggattttatagacatgcgggtgaagagactgctgaaagccggagtcatctctgccctggcttgcatggtcaaagcagatagcgcaatattgactgatcagactaaggagctcctggcccgtgtgttccttgccctgtgtgacaatcccaaggatagaggcacaatagttgctcaggggggaggcaaggccctaataccccttgcattggagggaaccgatgtgggaaaagtcaaggctgcgcatgcactcgccaagatagccgcagtctccaatccggatattgcttttcctggtgagagagtatacgaggtagtcagaccgctggtgcgcttgcttgatacacagcgggacggcctccagaactatgaggccctgcttggactgacaaacctcagcggacggtctgataagctgagacagaaaatatttaaggagcgcgctctaccagatatcgaaaattacatgttcgagaaccatgaccagttgcgccaagccgctacagaatgtatgtgcaatatggtgcttcacaaggaagtccaagaacgattcctggccgatggcaatgatcgcctgaagctggtagtcttgctatgcggcgaagatgatgataaggttcagaacgccgcagctggagccttagctatgctgaccgcggctcacaagaagctgtgtctaaaaatgacacaagtgactactcagtggctagaaatccttcagcgactctgtctgcacgatcagctgagcgttcagcaccgcggattggttattgcttacaatttgctagccgctgatgccgagctggctaagaagctggttgaatccgagctactggaaatcttgacggtggtaggcaaacaggagcccgacgaaaaaaaggctgaggtggttcagaccgctcgagagtgtcttatcaaatgcatggattacggttttataaagcccgtcagctag

SEQ ID NO: 249689 - DNA, 5675 bp, Artificial Sequence
  derived and/or modified sequence
agactgaggctggctggctggaggttgacacaggagtgctcaggggagcagcatcacaagagggcagatcgaaagcatcgtccttgctgaaaaacagatggcagaggtggaagcggtacagctgaaggaggaaggaaaccggcatttccagctccaggactacaaggccgccacaaatagctacagccaggccctgaagctgaccaaggacaaggccctgctggccacgctttatcggaaccgggcagcctgtggcctgaaaacggagagctacgtccaggcagcttcagatgcctccagagccatcgacatcaactcctcggacatcaaggctctgtatcggcgatgccaggcactggagcacctggggaagctggaccaggccttcaaagacgtgcagcgttgtgccaccctcgagccacggaaccagaacttccaggagatgctgaggagactcaacaccagcattcaggagaagctccgagtgcagttctccacagactcgagggtacagaagatgtttgagatcctcttggatgaaaacagtgaggctgataagcgggaaaaggctgccaacaatctcattgtcctaggccgtgaggaagcaggggctgagaagatcttccagaacaatggagtagccttgctactgcagcttctggacactaagaagcctgagctggtgctggctgcagtgcggaccctgtcgggcatgtgcagcggccaccaagccagagccacagtgattctgcatgcagtgcggatagaccgaatctgtagcctcatggccgtggagaatgaggagatgtctctggctgtctgcaacctgctccaagccatcattgactccttgtctggggaggacaagcgggagcatcgagggaaggaggaggccctggttctagacaccaagaaggacctgaagcagatcaccagccacctgctggacatgctagtcagcaagaaggtgtctggccagggcagggatcaggcgctgaacctgctcaataagaatgttcccaggaaggaccttgccattcatgacaactcacgtaccatctatgtggtggataatggtctgaggaagatcctgaaggttgtggggcaggttccagatctgccatcctgcctgcccctgactgacaacacccgcatgctggcctctatcctcatcaacaagctctatgatgacctgcgctgtgacccggagcgcgatcacttccgcaagatctgtgaggaatatatcacgggcaagtttgacccccaggacatggacaagaacttgaatgccatccagacagtgtcagggatcctgcagggcccctttgacctgggcaaccagctgctgggactgaaaggtgtgatggagatgatggtggcactatgtggctcagagcgcgagacggaccagctggtggccgtggaggccctcatccatgcctccacgaagctcagccgcgccaccttcatcatcaccaatggagtgtcactgctcaaacagatctacaagaccaccaaaaatgagaagatcaagatccgcacactggtgggactctgtaagctcggctctgcaggtggcacagactacggtctcaggcagtttgcggaagggtcgacagaaaaactggccaaacagtgtcgcaagtggctgtgcaatatgtccatagacactcggacccgacgctgggcagtggagggcctggcctacctcacgctggacgctgatgtgaaggacgactttgtccaggacgtccctgccctgcaggccatgtttgagctggccaaggcaggtaccagtgacaagaccatcctgtactcggtggccaccaccctggtgaactgcaccaacagctacgatgtcaaggaggtcatcccagagcttgtccagctcgccaagttctccaagcagcatgtgcccgaggaacaccccaaggacaagaaggactttatagacatgcgggtgaagcggcttctgaaggcgggtgtcatctctgccctggcttgcatggtgaaagcagatagtgccatcctcactgaccagaccaaggagctgctggccagggtattcctggcactgtgtgacaacccaaaggaccgaggcaccattgtggctcaaggtggtggcaaggccctgattcccctggctttggagggcacagatgtgggcaaggtgaaggcagcccacgctctagcaaagatcgctgctgtctccaatccggacattgcttttcctggggagcgggtgtatgaggtggtgcggccccttgtaagactcttggacacacagagggatgggcttcagaactatgaggctctcctaggcctcaccaacctgtctgggcggagtgacaaactccggcagaagatctttaaggagagggccttgccagacatcgagaactacatgtttgagaatcatgatcagctgcggcaggcggccaccgagtgcatgtgcaacatggtgctccacaaggaggtacaggaaaggttcttggctgacgggaatgaccggctgaagctggtggtgctgctctgcggggaggatgatgataaggtgcagaatgcggctgcaggggctctggccatgctgacagcagcacacaagaaactgtgcctcaagatgactcaagtgacaacccagtggttggagatcctccagcggctttgcctgcacgaccagctgtctgtccaacaccggggcctggtcattgcctacaacctactggcagccgatgctgagctggccaagaagctggtggagagtgagctgctggagatcctgactgtggtgggcaaacaggagccagatgagaagaaggcagaagtggttcagacagcccgagaatgtctcatcaagtgcatggattatggtttcattaaaccagtgtcttagacagcgaccctcagggatgctgggagtggtcctgtactgtgcagagtcctgggttggttgggttctcctgaagagtcaggtcatctagggatcatagcagtgacaatgaagtctcaatataaaggaaagacttgattgttctctgagttgtgagtcttctcctttgtcctgacagagtttggatgtttcactctctctcttgcttcctgtctccttatatttgtcatgtttcagaaattcccagaataattttcacccatgattagaaataggttggatcattctttctgtacccattctgaaggccaggataataggttgaagttctttatattttggaaaatggattttgtggtaaggtaggaactaacgggtgtgtgcatataaaggttaatgctgttgtatttggatgctgatctgtgctgttttcatgacctctctcccacactatttgaatcagtctgttcagaactgtgtgtttcacctgcagtgctctgtcccagtcccatgcccattcccatcacttcactgtgatggaaatagagtttatgttcaacagtggggcatgacctctgcaatttgcttgggaaagtcttccaagcaagatggacatgatgaatacaaataagatctactcaaagtacttcaaacaaaaaataaataattcattggctcatgtatcttggccacccagggaaggtctgacattgttagttagatccagagtttcaaatgtcatcaccatggatgtgtctttttctctctctcatttcccctccccatatcttgtcttttatttattataggtttgtctcattccctggcaggctctctccctgtgataggaaagagagtccccagcagccccagggtgacatagttgttatagttcattatggaatagaagagagaagagcattctcaataacccggcaaagttcccagggatgactctgatatgtctatgtctcaggtcacatttccatctatgaaccaatcatattcagaggtggaatgctaattggccaggcctgggtcatatatacaagtctagggaagaaatgagcttcatccctgtccaattgacatggactgattaggggtattaatggaagaggtgtgccaccacaaaagaatgtaccctgggcagatcaaagaacatattctgtatgtcaggcttggccacaaaagaatgacacaagtaatatgctgtagatcagaacctctctgctaatattgcctttttagcatggttaagatagctaagatctagtactgtcactccagtatgtcccaattctacctacgtttattgaagggtcaacagttctgatctcagcattgggtaaagggtgggacattcagatttacggtccttgataaaaacaatttacaacgttccgttgtgtaataaatgtaagtgtacatatgcctgggacatcagctggaaaagggacagactatcagagagttgcactgttgcggtatgggccaaatccaacataatacccgctgtacctctagagaactaaaaccttaatttctcagatcttttctgcactaatggtctttacatacagcctacattttaactaactcttgcatgggcttgtttcacagcaggaaactatattcatcatatccttattatgatagagaatgacaacattcaaaagggtgtggtgcttctgaaaatatacacaataaatggcatgatttgacctctgtcaaattcttctttcctgctttcctcatatgtgggcttgagtgggtgtatttagctcctttaaaggaaactctttcacaggcagggccacactcttactcgttttgatctcatgaggttacatctgccagtggcgttcagggccagttagataaagttcatcttgtttggattggagagactttttttttttttttttttgagacagggtcttgctctgtaacctaggctcaagtgcagtgcagtggtgcagtcatggctcaccgcagccttggtctcctgggctcaagtgatctttctacttcagcctcctcaatagctgggactacaggcacacaccaccacccccaggtaattaaaaaatttttttttgtagagacagggtctcactatgttgcccagtctgggagaccacattctttaacatgaatattttgtaaatagtccaagaagatctagaggaaagctgaattccttcatctgatttttgccactgggctgcctcccattgtctggctaagtcttcatgggaggcctttaagaaaagctgtgacaaatacctttgtttcccactgcctaggttacataagtagttggcttttccagcctagactcttatattgttgcttgtaagagggcccttctttgcagatttcttttttttttcatctatgctttcaaataggcagatgctagcctgagatcatctctttattgaggtagtttgcccaaaaacagcaaggaacagccaatacctgccaactttctaggtttttccaaccaattctcttacagaaaatctataaatatcttagaggtatgtttcttagtttcccaacatataatgggaaaattcatcatttatattattacttttaactgaagtatgttgttatcagagaacttggtctgtgtcatattaatcctttgccatttgagaagcatacagttttaaagtttatatctccaaaaggatattttgtaaaaatttaacccctttgactcttagtcttctcatttgtgaaaggtaaataataaagaatttctgttcctagt

SEQ ID NO: 249690 - DNA, 2796 bp, Artificial Sequence
  derived and/or modified sequence
atggccgaggtggaggccgtgcagctgaaggaggagggcaacagacacttccagctgcaggactacaaggccgccaccaacagctacagccaggccctgaagctgaccaaggacaaggccctgctggccaccctgtacagaaacagagccgcctgcggcctgaagaccgagagctacgtgcaggccgccagcgacgccagcagagccatcgacatcaacagcagcgacatcaaggccctgtacagaagatgccaggccctggagcacctgggcaagctggaccaggccttcaaggacgtgcagagatgcgccaccctggagcccagaaaccagaacttccaggagatgctgagaagactgaacaccagcatccaggagaagctgagagtgcagttcagcaccgacagcagagtgcagaagatgttcgagatcctgctggacgagaacagcgaggccgacaagagagagaaggccgccaacaacctgatcgtgctgggcagagaggaggccggcgccgagaagatcttccagaacaacggcgtggccctgctgctgcagctgctggacaccaagaagcccgagctggtgctggccgccgtgagaaccctgagcggcatgtgcagcggccaccaggccagagccaccgtgatcctgcacgccgtgagaatcgacagaatctgcagcctgatggccgtggagaacgaggagatgagcctggccgtgtgcaacctgctgcaggccatcatcgacagcctgagcggcgaggacaagagagagcacagaggcaaggaggaggccctggtgctggacaccaagaaggacctgaagcagatcaccagccacctgctggacatgctggtgagcaagaaggtgagcggccagggcagagaccaggccctgaacctgctgaacaagaacgtgcccagaaaggacctggccatccacgacaacagcagaaccatctacgtggtggacaacggcctgagaaagatcctgaaggtggtgggccaggtgcccgacctgcccagctgcctgcccctgaccgacaacaccagaatgctggccagcatcctgatcaacaagctgtacgacgacctgagatgcgaccccgagagagaccacttcagaaagatctgcgaggagtacatcaccggcaagttcgacccccaggacatggacaagaacctgaacgccatccagaccgtgagcggcatcctgcagggccccttcgacctgggcaaccagctgctgggcctgaagggcgtgatggagatgatggtggccctgtgcggcagcgagagagagaccgaccagctggtggccgtggaggccctgatccacgccagcaccaagctgagcagagccaccttcatcatcaccaacggcgtgagcctgctgaagcagatctacaagaccaccaagaacgagaagatcaagatcagaaccctggtgggcctgtgcaagctgggcagcgccggcggcaccgactacggcctgagacagttcgccgagggcagcaccgagaagctggccaagcagtgcagaaagtggctgtgcaacatgagcatcgacaccagaaccagaagatgggccgtggagggcctggcctacctgaccctggacgccgacgtgaaggacgacttcgtgcaggacgtgcccgccctgcaggccatgttcgagctggccaaggccggcaccagcgacaagaccatcctgtacagcgtggccaccaccctggtgaactgcaccaacagctacgacgtgaaggaggtgatccccgagctggtgcagctggccaagttcagcaagcagcacgtgcccgaggagcaccccaaggacaagaaggacttcatcgacatgagagtgaagagactgctgaaggccggcgtgatcagcgccctggcctgcatggtgaaggccgacagcgccatcctgaccgaccagaccaaggagctgctggccagagtgttcctggccctgtgcgacaaccccaaggacagaggcaccatcgtggcccagggcggcggcaaggccctgatccccctggccctggagggcaccgacgtgggcaaggtgaaggccgcccacgccctggccaagatcgccgccgtgagcaaccccgacatcgccttccccggcgagagagtgtacgaggtggtgagacccctggtgagactgctggacacccagagagacggcctgcagaactacgaggccctgctgggcctgaccaacctgagcggcagaagcgacaagctgagacagaagatcttcaaggagagagccctgcccgacatcgagaactacatgttcgagaaccacgaccagctgagacaggccgccaccgagtgcatgtgcaacatggtgctgcacaaggaggtgcaggagagattcctggccgacggcaacgacagactgaagctggtggtgctgctgtgcggcgaggacgacgacaaggtgcagaacgccgccgccggcgccctggccatgctgaccgccgcccacaagaagctgtgcctgaagatgacccaggtgaccacccagtggctggagatcctgcagagactgtgcctgcacgaccagctgagcgtgcagcacagaggcctggtgatcgcctacaacctgctggccgccgacgccgagctggccaagaagctggtggagagcgagctgctggagatcctgaccgtggtgggcaagcaggagcccgacgagaagaaggccgaggtggtgcagaccgccagagagtgcctgatcaagtgcatggactacggcttcatcaagcccgtgagctag

SEQ ID NO: 249691 - protein, 155 aa, Artificial Sequence
  derived and/or modified sequence
MVLSGALCFRMKDSALKVLYLHNNQLLAGGLHAGKVIKGEEISVVPNRWLDASLSPVILGVQGGSQCLSCGVGQEPTLTLEPVNIMELYLGAKESKSFTFYRRDMGLTSSFESAAYPGWFLCTVPEADQPVRLTQLPENGGWNAPITDFYFQQCD

SEQ ID NO: 249692 - protein, 117 aa, Artificial Sequence
  derived and/or modified sequence
MVLSGALCFRMKDSALKVLYLHNNQLLAGGLHAGKVIKGEEISVVPNRWLDASLSPVILGVQGGSQCLSCGVGQEPTLTLEPVNIMELYLGAKESKSFTFYRRDMGLTSSFESAAYP

SEQ ID NO: 249693 - DNA, 468 bp, Artificial Sequence
  derived and/or modified sequence
atggtgttgagcggcgctctgtgctttcggatgaaagattccgcactcaaggtcctgtatcttcacaataaccagctcctcgcaggagggctgcacgctggtaaagtgataaagggcgaagaaatctccgtggtcccaaaccgatggttagacgccagtttatctcccgttatcctcggcgtgcagggcggcagtcagtgcttgtcttgcggggtgggccaggagcctactctgactcttgagcccgttaacatcatggagctctacttaggagcaaaggagagcaagtcctttacattttacaggagagatatgggtttaaccagctccttcgagtcagctgcctaccccggatggtttctgtgcaccgtacccgaggccgaccagcccgtcagactcacgcagctgccagaaaatggcggttggaacgcacccatcaccgatttttatttccagcagtgtgattag

SEQ ID NO: 249694 - DNA, 468 bp, Artificial Sequence
  derived and/or modified sequence
atggtgttgtcgggcgctctgtgcttcagaatgaaggattcagcactgaaggtgttatatcttcacaataaccagttactggcgggtgggctccacgccggaaaagtgattaaaggggaagaaatcagcgtcgtgccgaacagatggctcgacgcgtcactgtctccggtcatcctcggagtgcagggcggcagccagtgcctctcctgcggcgtagggcaagaaccgaccctgacccttgagccggtaaacattatggagctgtacctgggagcaaaagaaagtaaaagctttaccttctatcgccgagacatggggctgacctctagttttgaatcagccgcgtatcctggctggtttctctgcactgtcccggaagcggaccagcccgtgaggttgactcagcttccagaaaacgggggctggaacgcacccataacagacttttactttcagcagtgcgactag

SEQ ID NO: 249695 - DNA, 354 bp, Artificial Sequence
  derived and/or modified sequence
atggtgctcagcggcgcgttgtgtttcaggatgaaagactccgctctgaaagtcctgtatttgcacaataaccagttgctggctggaggcctccacgccggaaaggtcatcaaaggcgaggaaatctctgtggtcccaaacaggtggctggacgcatcattgtcgcccgtgatcctgggcgttcaggggggatcccaatgcctgtcctgtggcgttggccaggaaccaactcttaccctggagccagttaatatcatggaactctacctgggagctaaggaatccaaatcttttacattttacagacgcgacatggggcttacgagctcatttgagagcgccgcgtacccatag

SEQ ID NO: 249696 - DNA, 2672 bp, Artificial Sequence
  derived and/or modified sequence
ggagagtcccacctctaacatctcctgtaggcctggcaatggcaggcaggaaagacagaggaaggaaggagggagaagggaaggagtgaaggaaggagtgaaaaaggggagtctacaccctgtggagctcaagatggtcctgagtggggcgctgtgcttccgaatgaaggactcggcattgaaggtgctttatctgcataataaccagcttctagctggagggctgcatgcagggaaggtcattaaaggtgaagagatcagcgtggtccccaatcggtggctggatgccagcctgtcccccgtcatcctgggtgtccagggtggaagccagtgcctgtcatgtggggtggggcaggagccgactctaacactagagccagtgaacatcatggagctctatcttggtgccaaggaatccaagagcttcaccttctaccggcgggacatggggctcacctccagcttcgagtcggctgcctacccgggctggttcctgtgcacggtgcctgaagccgatcagcctgtcagactcacccagcttcccgagaatggtggctggaatgcccccatcacagacttctacttccagcagtgtgactagggcaacgtgccccccagaactccctgggcagagccagctcgggtgaggggtgagtggaggagacccatggcggacaatcactctctctgctctcaggacccccacgtctgacttagtgggcacctgaccactttgtcttctggttcccagtttggataaattctgagatttggagctcagtccacggtcctcccccactggatggtgctactgctgtggaatcttgtaaaaaccatgtggggtaaactgggaataacatgaaaagatttctgtggaggtggggtgggggagtggtgggaatcattcctgcttaatggtaactgaccagtgttaccctgagccccgcaggccaacccatccccagttgagccttatagggtcagtagctctccacatgaagacctgtcactcaccactatgcaggagagggaggtggtcatagagtcagggatctatggcccttggcccagccccacctccttccctttaatcctgccactgtcatatgctacctttcctatctcttccctcatcatcttgttgtgggcatgaggaggtgctgatgtcagaagaaatggctcgagctcagaagataaaagataagtagggtatgctgatcctcttttaaaaacccaagatacaatcaaaatcccagatgctggtctctattcccatgaaaaagtgctcatgacatattgagaagacctacttacaaagtggcatatattgcaatttattttaattaaaagatacctatttatatatttctttatagaaaaaagtctggaagagtttacttcaattgtagcaatgtcagggtggtggcagtataggtgatttttcttttaattctgttaatttacctgtatttcctaatttttctacaatgaagatgaattccttgtataaaaataagaaaagaaattaatcttgaggtaagcagagtagacatcatctctgattgtcctcagcctccacttccccagagtaaattcaaattgaatcgagctctgctgctctggttggttgtagtagtgatcaggaaacagatctcagcaaagccactgaggaggaggctgtgctgagtttgtgtggctggaatctctgggtaaggaacttaaagaacaaaaatcatctggtaattctttcctagaaggatcacagcccctgggattccaaggcattggatccagtctctaagaaggctgctgtactggttgaattgtgtccccctcaaattcacatccttcttggaatctcagtctgtgagtttatttggagataaggtctctgcagatgtagttagttaagacaaggtcatgctggatgaaggtagacctaaattcaatatgactggtttccttgtatgaaaaggagaggacacagagacagaggagatgcggggaagactatgtaaagatgaaggcagagatcggagttttgcagccacaagctaagaaacaccaaggattgtggcaaccatcagaagcttggaagaggcaaagaagaattcttccctagaggctttagagggataacggctctgctgaaaccttaatctcagacttccagcctcctgaacgaagaaagaataaatttcggctgttttaagccaccaaggataattggttacagcagctctaggaaactaatacagctgctaaaatgatccctgtctcctcgtgtttacattctgtgtgtgtcccctcccacaatgtaccaaagttgtctttgtgaccaatagaatatggcagaagtgatggcatgccacttccaagattaggttataaaagacactgcagcttctacttgagccctctctctctgccacccaccgcccccaatctatcttggctcactcgctctgggggaagctagctgccatgctatgagcaggcctataaagagacttacgtggtaaaaaatgaagtctcctgcccacagccacattagtgaacctagaagcagagactctgtgagataatcgatgtttgttgttttaagttgctcagttttggtctaacttgttatgcagcaatagataaataatatgcagagaaagagaaacaaa

SEQ ID NO: 249697 - DNA, 2700 bp, Artificial Sequence
  derived and/or modified sequence
cgctgggaatcctgctcctcctcaggtcctggcagtttcagggcccctccctaggccttacttaaaaggctgaggcatccttggaggaacaggcagactccacagctcccgccaggagaaaggaacattctgaggggagtctacaccctgtggagctcaagatggtcctgagtggggcgctgtgcttccgaatgaaggactcggcattgaaggtgctttatctgcataataaccagcttctagctggagggctgcatgcagggaaggtcattaaaggtgaagagatcagcgtggtccccaatcggtggctggatgccagcctgtcccccgtcatcctgggtgtccagggtggaagccagtgcctgtcatgtggggtggggcaggagccgactctaacactagagccagtgaacatcatggagctctatcttggtgccaaggaatccaagagcttcaccttctaccggcgggacatggggctcacctccagcttcgagtcggctgcctacccgggctggttcctgtgcacggtgcctgaagccgatcagcctgtcagactcacccagcttcccgagaatggtggctggaatgcccccatcacagacttctacttccagcagtgtgactagggcaacgtgccccccagaactccctgggcagagccagctcgggtgaggggtgagtggaggagacccatggcggacaatcactctctctgctctcaggacccccacgtctgacttagtgggcacctgaccactttgtcttctggttcccagtttggataaattctgagatttggagctcagtccacggtcctcccccactggatggtgctactgctgtggaatcttgtaaaaaccatgtggggtaaactgggaataacatgaaaagatttctgtggaggtggggtgggggagtggtgggaatcattcctgcttaatggtaactgaccagtgttaccctgagccccgcaggccaacccatccccagttgagccttatagggtcagtagctctccacatgaagacctgtcactcaccactatgcaggagagggaggtggtcatagagtcagggatctatggcccttggcccagccccacctccttccctttaatcctgccactgtcatatgctacctttcctatctcttccctcatcatcttgttgtgggcatgaggaggtgctgatgtcagaagaaatggctcgagctcagaagataaaagataagtagggtatgctgatcctcttttaaaaacccaagatacaatcaaaatcccagatgctggtctctattcccatgaaaaagtgctcatgacatattgagaagacctacttacaaagtggcatatattgcaatttattttaattaaaagatacctatttatatatttctttatagaaaaaagtctggaagagtttacttcaattgtagcaatgtcagggtggtggcagtataggtgatttttcttttaattctgttaatttacctgtatttcctaatttttctacaatgaagatgaattccttgtataaaaataagaaaagaaattaatcttgaggtaagcagagtagacatcatctctgattgtcctcagcctccacttccccagagtaaattcaaattgaatcgagctctgctgctctggttggttgtagtagtgatcaggaaacagatctcagcaaagccactgaggaggaggctgtgctgagtttgtgtggctggaatctctgggtaaggaacttaaagaacaaaaatcatctggtaattctttcctagaaggatcacagcccctgggattccaaggcattggatccagtctctaagaaggctgctgtactggttgaattgtgtccccctcaaattcacatccttcttggaatctcagtctgtgagtttatttggagataaggtctctgcagatgtagttagttaagacaaggtcatgctggatgaaggtagacctaaattcaatatgactggtttccttgtatgaaaaggagaggacacagagacagaggagatgcggggaagactatgtaaagatgaaggcagagatcggagttttgcagccacaagctaagaaacaccaaggattgtggcaaccatcagaagcttggaagaggcaaagaagaattcttccctagaggctttagagggataacggctctgctgaaaccttaatctcagacttccagcctcctgaacgaagaaagaataaatttcggctgttttaagccaccaaggataattggttacagcagctctaggaaactaatacagctgctaaaatgatccctgtctcctcgtgtttacattctgtgtgtgtcccctcccacaatgtaccaaagttgtctttgtgaccaatagaatatggcagaagtgatggcatgccacttccaagattaggttataaaagacactgcagcttctacttgagccctctctctctgccacccaccgcccccaatctatcttggctcactcgctctgggggaagctagctgccatgctatgagcaggcctataaagagacttacgtggtaaaaaatgaagtctcctgcccacagccacattagtgaacctagaagcagagactctgtgagataatcgatgtttgttgttttaagttgctcagttttggtctaacttgttatgcagcaatagataaataatatgcagagaaagagaaacaaa

SEQ ID NO: 249698 - DNA, 403 bp, Artificial Sequence
  derived and/or modified sequence
ttttctgttgtttattccaaaataggggagtctacaccctgtggagctcaagatggtcctgagtggggcgctgtgcttccgaatgaaggactcggcattgaaggtgctttatctgcataataaccagcttctagctggagggctgcatgcagggaaggtcattaaaggtgaagagatcagcgtggtccccaatcggtggctggatgccagcctgtcccccgtcatcctgggtgtccagggtggaagccagtgcctgtcatgtggggtggggcaggagccgactctaacactagagccagtgaacatcatggagctctatcttggtgccaaggaatccaagagcttcaccttctaccggcgggacatggggctcacctccagcttcgagtcggctgcctacccg

SEQ ID NO: 249699 - DNA, 468 bp, Artificial Sequence
  derived and/or modified sequence
atggtgctgagcggggccctgtgcttcaggatgaaggacagcgccctgaaggtgctgtacctgcacaacaaccagctgctggccggcggcctgcatgctgggaaggtgatcaagggggaggagatctctgtggtgcccaaccgctggctggatgccagcctgagccctgtgatcctgggcgtgcagggcggcagccagtgcctgagctgtggggtgggccaggagcccaccctgaccctggagcctgtgaacatcatggagctgtacctgggcgccaaggagagcaagagcttcaccttctaccgccgggacatgggcctgaccagcagctttgaatctgctgcctacccaggctggttcctgtgcaccgtgcctgaggccgaccagcctgtgcggctgacccagctgcctgaaaatggaggctggaatgcccccatcacagacttctacttccagcagtgtgactag

SEQ ID NO: 249700 - DNA, 354 bp, Artificial Sequence
  derived and/or modified sequence
atggtgctgagcggggccctgtgcttcaggatgaaggacagcgccctgaaggtgctgtacctgcacaacaaccagctgctggccggcggcctgcatgctgggaaggtgatcaagggggaggagatctctgtggtgcccaaccgctggctggatgccagcctgagccctgtgatcctgggcgtgcagggcggcagccagtgcctgagctgtggggtgggccaggagcccaccctgaccctggagcctgtgaacatcatggagctgtacctgggcgccaaggagagcaagagcttcaccttctaccgccgggacatgggcctgaccagcagctttgaatctgctgcctacccctag

SEQ ID NO: 249701 - DNA, 468 bp, Artificial Sequence
  derived and/or modified sequence
atggtgctgagcggcgccctgtgcttccggatgaaggacagcgccttgaaagttctgtacttacacaacaatcaactgttagcaggagggctgcacgcaggcaaggtcatcaagggcgaggaaattagcgtcgttccaaacaggtggctggatgcctcactgagccccgtcatcctgggagtgcagggcggaagccagtgcctatcttgcggtgtggggcaggaacccactctgacattagagcctgtcaacattatggaactgtatctgggagctaaggaatccaagtcctttaccttttacaggcgggacatgggactgacctcgtcatttgaatcggcggcttatcccggttggtttctctgtacagtgcctgaggcagaccagcccgtgcgtttgacacagctccccgagaatggcggctggaacgcgccaattacagatttttactttcagcagtgcgattag

SEQ ID NO: 249702 - DNA, 468 bp, Artificial Sequence
  derived and/or modified sequence
atggtgctgagcggcgccctgtgcttccggatgaaggacagcgccttgaaggtattgtatctccacaacaaccagctgttagcagggggactccatgcaggcaaggtgattaaaggagaagaaatcagcgtggtgcctaacagatggctggatgcttctctgtcacctgttatccttggcgtgcaaggaggcagccagtgcctaagttgtggggtcgggcaggaacccactctcacccttgagccagtgaatatcatggagctatatcttggagccaaggagtctaagtcctttaccttctaccggagggacatgggactgacctcctcattcgagagcgctgcctacccaggatggttcctttgcactgtgcccgaggcagatcagcctgtgaggctcacccagctgccagaaaatggcggctggaatgcccccatcactgatttctattttcagcaatgtgactag

SEQ ID NO: 249703 - DNA, 354 bp, Artificial Sequence
  derived and/or modified sequence
atggtgctgagcggcgccctgtgcttccggatgaaggacagcgccctcaaggtgctgtatctgcataataaccagctcttggccggaggcttgcacgcaggcaaggtgataaagggggaggaaatctctgtagtgcccaacagatggctagatgctagcctctcccccgtgatcctcggcgtccagggggggtctcagtgcctttcatgtggggtgggacaggaacccacactgactttggagcctgtgaacattatggaactttatctgggcgcaaaagaaagtaagtcattcacattttaccgtcgagatatggggcttaccagcagctttgaaagcgctgcgtatccctag

SEQ ID NO: 249704 - DNA, 468 bp, Artificial Sequence
  derived and/or modified sequence
atggtgctctctggcgctctttgctttaggatgaaagattcagctctgaaagtgctctacctacacaacaatcagctacttgccggaggcctgcatgcgggtaaagtcattaagggcgaggagatcagcgtggttccaaaccgatggctggacgctagcctgagcccagtgatcctcggggttcaaggcggaagtcagtgtctgtcatgcggagttggccaggagccaaccctgaccttggagcccgtcaacataatggagctgtacctgggtgccaaggagagtaaatcctttactttctatcgccgtgacatgggcctgactagttctttcgagtccgccgcatatcccggatggttcctctgtactgtgccagaggcggaccagcccgtcaggcttacccagctgccggaaaatgggggatggaatgccccaatcaccgacttctactttcagcagtgcgattag

SEQ ID NO: 249705 - DNA, 468 bp, Artificial Sequence
  derived and/or modified sequence
atggtcctgtctggggcattgtgttttcggatgaaggattccgcactgaaggtcctttatctccataataaccagctgctcgccggagggcttcacgccggtaaggtgatcaagggagaggagataagcgtggtgccaaatcggtggctggacgcatcactgtcccctgtcattctcggagtgcaggggggttctcagtgcttatcatgcggcgtcggacaggaaccgaccctcacactggagccagtgaacatcatggagctctacctgggcgcaaaggaatctaagagtttcaccttttaccgcagagatatgggtctgaccagcagttttgagtccgctgcgtatccaggctggttcttgtgtacagtgccagaagctgaccagcccgtaaggttgactcagctgcccgaaaatggcggatggaacgcaccaattacagatttttattttcagcaatgtgactag

SEQ ID NO: 249706 - DNA, 354 bp, Artificial Sequence
  derived and/or modified sequence
atggtgttaagtggtgccctctgttttcgtatgaaagactccgccctaaaagtgctgtatttgcataacaaccagctgttggccggaggcttacacgctgggaaggtaattaagggcgaggagatttccgttgtgcccaaccggtggctcgacgcgtcattgagcccagtgattctcggggtgcaaggcggttcacaatgtctgagctgtggtgtgggacaggaacctaccctgactttggaacctgttaacataatggaactttacctcggtgcaaaagagtcaaagagctttacattttatcgccgagacatggggttgacctcctcatttgagtctgccgcatatccctag

SEQ ID NO: 249707 - DNA, 468 bp, Artificial Sequence
  derived and/or modified sequence
atggtgctgagcggcgccctgtgcttcagaatgaaggacagcgccctgaaggtgctgtacctgcacaacaaccagctgctggccggcggcctgcacgccggcaaggtgatcaagggcgaggagatcagcgtggtgcccaacagatggctggacgccagcctgagccccgtgatcctgggcgtgcagggcggcagccagtgcctgagctgcggcgtgggccaggagcccaccctgaccctggagcccgtgaacatcatggagctgtacctgggcgccaaggagagcaagagcttcaccttctacagaagagacatgggcctgaccagcagcttcgagagcgccgcctaccccggctggttcctgtgcaccgtgcccgaggccgaccagcccgtgagactgacccagctgcccgagaacggcggctggaacgcccccatcaccgacttctacttccagcagtgcgactag

SEQ ID NO: 249708 - DNA, 354 bp, Artificial Sequence
  derived and/or modified sequence
atggtgctgagcggcgccctgtgcttcagaatgaaggacagcgccctgaaggtgctgtacctgcacaacaaccagctgctggccggcggcctgcacgccggcaaggtgatcaagggcgaggagatcagcgtggtgcccaacagatggctggacgccagcctgagccccgtgatcctgggcgtgcagggcggcagccagtgcctgagctgcggcgtgggccaggagcccaccctgaccctggagcccgtgaacatcatggagctgtacctgggcgccaaggagagcaagagcttcaccttctacagaagagacatgggcctgaccagcagcttcgagagcgccgcctacccctag

SEQ ID NO: 249709 - protein, 967 aa, Artificial Sequence
  derived and/or modified sequence
MSGVSEPLSRVKLGTLRRPEGPAEPMVVVPVDVEKEDVRILKVCFYSNSFNPGKNFKLVKCTVQTEIREIITSILLSGRIGPNIRLAECYGLRLKHMKSDEIHWLHPQMTVGEVQDKYECLHVEAEWRYDLQIRYLPEDFMESLKEDRTTLLYFYQQLRNDYMQRYASKVSEGMALQLGCLELRRFFKDMPHNALDKKSNFELLEKEVGLDLFFPKQMQENLKPKQFRKMIQQTFQQYASLREEECVMKFFNTLAGFANIDQETYRCELIQGWNITVDLVIGPKGIRQLTSQDAKPTCLAEFKQIRSIRCLPLEEGQAVLQLGIEGAPQALSIKTSSLAEAENMADLIDGYCRLQGEHQGSLIIHPRKDGEKRNSLPQIPMLNLEARRSHLSESCSIESDIYAEIPDETLRRPGGPQYGIAREDVVLNRILGEGFFGEVYEGVYTNHKGEKINVAVKTCKKDCTLDNKEKFMSEAVIMKNLDHPHIVKLIGIIEEEPTWIIMELYPYGELGHYLERNKNSLKVLTLVLYSLQICKAMAYLESINCVHRDIAVRNILVASPECVKLGDFGLSRYIEDEDYYKASVTRLPIKWMSPESINFRRFTTASDVWMFAVCMWEILSFGKQPFFWLENKDVIGVLEKGDRLPKPDLCPPVLYTLMTRCWDYDPSDRPRFTELVCSLSDVYQMEKDIAMEQERNARYRTPKILEPTAFQEPPPKPSRPKYRPPPQTNLLAPKLQFQEEDFIQPSSREEAQQLWEAEKVKMRQILDKQQKQMVEDYQWLRQEEKSLDPMVYMNDKSPLTPEKEVGYLEFTGPPQKPPRLGAQSIQPTANLDRTDDLVYLNVMELVRAVLELKNELCQLPPEGYVVVVKNVGLTLRKLIGSVDDLLPSLPSSSRTEIEGTQKLLNKDLAELINKMRLAQQNAVTSLSEECKRQMLTASHTLAVDAKNLLDAVDQAKVLANLAHPPAE

SEQ ID NO: 249710 - DNA, 2904 bp, Artificial Sequence
  derived and/or modified sequence
atgagcggcgtgagcgagcccctgagcagagtgaagctgggcaccctgagaagacccgagggccccgccgagcccatggtggtggtgcccgtggacgtggagaaggaggacgtgagaatcctgaaggtgtgcttctacagcaacagcttcaaccccggcaagaacttcaagctggtgaagtgcaccgtgcagaccgagatcagagagatcatcaccagcatcctgctgagcggcagaatcggccccaacatcagactggccgagtgctacggcctgagactgaagcacatgaagagcgacgagatccactggctgcacccccagatgaccgtgggcgaggtgcaggacaagtacgagtgcctgcacgtggaggccgagtggagatacgacctgcagatcagatacctgcccgaggacttcatggagagcctgaaggaggacagaaccaccctgctgtacttctaccagcagctgagaaacgactacatgcagagatacgccagcaaggtgagcgagggcatggccctgcagctgggctgcctggagctgagaagattcttcaaggacatgccccacaacgccctggacaagaagagcaacttcgagctgctggagaaggaggtgggcctggacctgttcttccccaagcagatgcaggagaacctgaagcccaagcagttcagaaagatgatccagcagaccttccagcagtacgccagcctgagagaggaggagtgcgtgatgaagttcttcaacaccctggccggcttcgccaacatcgaccaggagacctacagatgcgagctgatccagggctggaacatcaccgtggacctggtgatcggccccaagggcatcagacagctgaccagccaggacgccaagcccacctgcctggccgagttcaagcagatcagaagcatcagatgcctgcccctggaggagggccaggccgtgctgcagctgggcatcgagggcgccccccaggccctgagcatcaagaccagcagcctggccgaggccgagaacatggccgacctgatcgacggctactgcagactgcagggcgagcaccagggcagcctgatcatccaccccagaaaggacggcgagaagagaaacagcctgccccagatccccatgctgaacctggaggccagaagaagccacctgagcgagagctgcagcatcgagagcgacatctacgccgagatccccgacgagaccctgagaagacccggcggcccccagtacggcatcgccagagaggacgtggtgctgaacagaatcctgggcgagggcttcttcggcgaggtgtacgagggcgtgtacaccaaccacaagggcgagaagatcaacgtggccgtgaagacctgcaagaaggactgcaccctggacaacaaggagaagttcatgagcgaggccgtgatcatgaagaacctggaccacccccacatcgtgaagctgatcggcatcatcgaggaggagcccacctggatcatcatggagctgtacccctacggcgagctgggccactacctggagagaaacaagaacagcctgaaggtgctgaccctggtgctgtacagcctgcagatctgcaaggccatggcctacctggagagcatcaactgcgtgcacagagacatcgccgtgagaaacatcctggtggccagccccgagtgcgtgaagctgggcgacttcggcctgagcagatacatcgaggacgaggactactacaaggccagcgtgaccagactgcccatcaagtggatgagccccgagagcatcaacttcagaagattcaccaccgccagcgacgtgtggatgttcgccgtgtgcatgtgggagatcctgagcttcggcaagcagcccttcttctggctggagaacaaggacgtgatcggcgtgctggagaagggcgacagactgcccaagcccgacctgtgcccccccgtgctgtacaccctgatgaccagatgctgggactacgaccccagcgacagacccagattcaccgagctggtgtgcagcctgagcgacgtgtaccagatggagaaggacatcgccatggagcaggagagaaacgccagatacagaacccccaagatcctggagcccaccgccttccaggagcccccccccaagcccagcagacccaagtacagaccccccccccagaccaacctgctggcccccaagctgcagttccaggaggaggacttcatccagcccagcagcagagaggaggcccagcagctgtgggaggccgagaaggtgaagatgagacagatcctggacaagcagcagaagcagatggtggaggactaccagtggctgagacaggaggagaagagcctggaccccatggtgtacatgaacgacaagagccccctgacccccgagaaggaggtgggctacctggagttcaccggccccccccagaagccccccagactgggcgcccagagcatccagcccaccgccaacctggacagaaccgacgacctggtgtacctgaacgtgatggagctggtgagagccgtgctggagctgaagaacgagctgtgccagctgccccccgagggctacgtggtggtggtgaagaacgtgggcctgaccctgagaaagctgatcggcagcgtggacgacctgctgcccagcctgcccagcagcagcagaaccgagatcgagggcacccagaagctgctgaacaaggacctggccgagctgatcaacaagatgagactggcccagcagaacgccgtgaccagcctgagcgaggagtgcaagagacagatgctgaccgccagccacaccctggccgtggacgccaagaacctgctggacgccgtggaccaggccaaggtgctggccaacctggcccacccccccgccgagtag

SEQ ID NO: 249711 - DNA, 2904 bp, Artificial Sequence
  derived and/or modified sequence
atgtccggagtctccgaacctcttagtcgggtgaaattagggacccttagaaggccagaagggccagcagaacctatggttgtggtgccagtcgatgtggaaaaagaggacgttaggattctcaaggtatgcttttacagtaattcctttaatcctggcaaaaattttaaactggttaagtgcacagtgcagactgagattcgcgagatcataacctcgatactactcagcggcaggattgggcccaatatccgactcgctgagtgctatggactgcgattgaaacatatgaagtccgacgagatccactggctgcatcctcagatgactgtgggcgaagttcaggacaagtacgaatgcctacacgtagaggcagagtggcgctacgatcttcaaatccgctatctacctgaggacttcatggagtcacttaaagaggaccgcacaacgcttctctatttttatcaacagctgcggaacgactatatgcagagatacgcgagtaaggtctccgagggcatggctctacaattgggttgcctcgaattaaggagattctttaaagatatgccccataacgccctggacaaaaagtcaaactttgagctcctggagaaagaggtgggccttgacctgtttttccccaaacaaatgcaagaaaacttaaagccaaagcagttccggaagatgatacagcagacatttcagcaatatgcttcactgcgggaagaggagtgtgttatgaagttcttcaataccctggccggcttcgctaacattgaccaggaaacctatcggtgcgagctcatccagggatggaatattactgtggacctggtgataggaccgaaaggcattaggcagctgaccagccaggacgccaaacctacatgccttgcagaatttaagcagatcagaagtataaggtgcctgccacttgaggagggacaggctgtactgcagctgggaattgagggcgccccgcaagcgctgagcattaagacaagtagcctagcagaagctgaaaacatggcggatctgatcgatgggtactgtaggcttcagggcgagcaccagggcagccttataatccaccccagaaaagacggagagaagaggaactcactacctcaaattcctatgctcaacctcgaggcaagacggagtcacttaagcgagagctgcagtatcgagtctgacatttatgccgagatccctgacgagaccctgcgacgtcctgggggcccccagtatggtatcgctagagaagacgttgtccttaatcgcatcttgggggaggggttctttggggaggtttacgagggggtctataccaaccataaaggagagaaaattaacgtcgccgtcaagacatgtaagaaggattgcaccctggacaacaaagagaagttcatgagcgaggccgtcatcatgaaaaatcttgatcacccgcatatcgttaagttaattggaataattgaggaggagcctacatggatcatcatggagctttacccgtacggtgaactgggacactatttagagcggaacaagaactctctgaaagtgctgaccctggtgctatactccctgcagatttgcaaggctatggcatatctcgaatcaatcaattgcgtgcacagagatatcgccgtgagaaatatactggtggccagtccagagtgcgtgaagttgggcgatttcggtctctcccgctacatcgaggacgaagactactataaggccagcgtcacccgcctgcccataaagtggatgtctcccgaatctatcaacttccgccgtttcaccacagcctccgatgtttggatgtttgccgtttgcatgtgggaaatactttctttcggcaagcagccatttttttggctggagaacaaggacgtcatcggcgtcctggagaagggcgatagactccctaagcccgatctttgcccaccagtgctgtatacgttgatgacccgctgctgggattacgacccgagcgacagacccaggtttacagagctcgtttgtagtctatcggacgtgtatcagatggaaaaagacattgcaatggaacaagagcggaatgctcggtacaggaccccgaagatcttagagccaacagctttccaggagcccccaccaaaaccatcacgtcccaagtatcgcccccctcctcagaccaacctgctagcccccaagctccagtttcaggaagaggactttattcagccatcttcaagggaggaagctcagcaactgtgggaggcggagaaagtcaagatgcgccagattttggacaaacagcagaagcagatggtggaagactaccagtggttgcggcaggaggagaaatcactggatccgatggtgtacatgaacgacaaatcccctctgacaccagaaaaggaagttggctatctggaattcaccggccctcctcagaagcccccgagactcggcgcacaaagcattcagcccactgcaaacctggatcgcactgatgaccttgtgtacctgaatgttatggaactggttagggctgttcttgagctgaaaaatgagctatgtcagttgccacccgagggctacgttgttgtggttaaaaatgtagggcttacattgcgaaagctgatcggaagtgtggatgacctgttgccttctctcccctcatcctcacgtacagagattgaaggcactcagaagctgctgaacaaggacctggctgaattaattaataagatgaggttggcgcagcagaatgcagtgacctctctctccgaagagtgcaagcgccagatgttaacagccagtcacacactcgcagttgatgcgaaaaacctgctcgatgcagtggaccaggccaaggtgctggctaatctggcacacccccccgcagaatag

SEQ ID NO: 249712 - DNA, 2904 bp, Artificial Sequence
  derived and/or modified sequence
atgtctggggtgtcagagcctctctcgcgggtaaagttaggaacgctgcgcagaccagaggggcctgctgagcccatggtagtggtacccgtggatgttgaaaaagaggacgtccggatcctgaaggtctgcttctatagtaattcctttaacccaggcaaaaactttaaattagtgaagtgtaccgttcagaccgagattagggagattattacgtctatccttctttcgggtcgaatcggacctaacattcgcctcgccgagtgttacgggctaagactgaagcatatgaagtctgacgagattcactggctccacccgcagatgaccgttggtgaagttcaggataagtacgagtgtctgcacgtggaagcagagtggaggtacgatctgcaaatccgatatctgccggaggattttatggaatccctaaaagaagataggactactctgctgtatttctaccagcagctgaggaatgattacatgcagcggtatgccagtaaggtgtctgaaggtatggctctgcagctcggctgtctcgaactgcgccgcttttttaaggatatgccgcataacgctttggataagaagagcaatttcgagctgctcgaaaaagaagtcggcctggatctgttttttccaaagcaaatgcaggaaaatttgaagccaaaacagttcagaaagatgattcagcaaacgttccagcagtatgcctcgctgagagaggaggaatgcgtgatgaaattcttcaatactttggcgggcttcgcaaacatcgatcaggaaacttacagatgtgagcttatccaagggtggaacataacagtggacctggttattgggccaaagggaattcggcaactgacttcacaggacgcaaagcccacatgtctcgcagagttcaaacagattagaagcatcagatgcctgcccctggaagagggacaggctgtcctgcagcttggtatcgagggagctccccaggccctgagcatcaagaccagctccctggccgaagccgagaacatggcggacttgatagacggctactgtagactgcagggcgagcatcagggctcacttatcatccatccaagaaaggatggcgagaagcgcaattccttaccacagatacccatgctgaacctcgaagccagaaggtctcacctgtctgagagctgttctattgagtccgacatctatgcagaaattcctgacgaaaccctgcgtcgccccggcgggcctcaatatggtatcgcccgggaggacgtcgtactaaatagaatcctgggcgaaggcttcttcggggaagtttacgaaggagtttacacgaaccacaagggagaaaaaattaatgtggcagtcaagacttgcaagaaagattgtactcttgataataaagagaaattcatgtccgaggccgtgataatgaagaatctcgatcacccccacatcgtgaagttgattggaattatcgaagaggagcctacatggatcattatggaactttatccttacggtgaattggggcattacctcgaacgcaataaaaacagcctgaaggtgctcaccttggtgttgtatagtttacaaatctgcaaggccatggcttatctggagtccattaattgcgtccacagggacattgcggtgcggaacattctagtagctagccccgagtgcgtgaaattaggggactttggcctgtccaggtacattgaagatgaagactactataaggcttctgtcacgagactgccaattaagtggatgtcacctgaatcaataaatttccgtagattcacaactgctagtgatgtctggatgtttgccgtctgtatgtgggagatcctatcctttggaaaacagccgttcttttggctggagaacaaagatgtaatcggcgtcctagagaagggcgacagactgccaaagcccgacctatgtccacccgtgttgtacaccctgatgactagatgctgggattatgatccttccgacaggcctcgctttaccgagctggtttgcagcttgagcgatgtgtaccaaatggagaaagatatcgcgatggaacaagaacgcaacgcacgttaccgaaccccaaagatattagagccaacagctttccaggaaccaccgcccaagccatcccgaccaaaataccgaccgcctccccagaccaacttgctggccccaaaactccaattccaggaagaggattttattcaaccatcctctcgggaggaagcccagcagctttgggaggccgagaaagtgaagatgcgtcaaattctggataaacagcagaagcagatggtagaagattatcaatggctacgacaggaagagaagtcattagacccaatggtgtatatgaacgacaagagtccgctgactccagaaaaagaagttggttacctggagtttacgggaccgccgcaaaaaccccctcgtctgggcgcacagagtatacagccgactgccaatcttgatcgaaccgatgacctcgtgtatctgaacgtcatggaactagtcagagcggtcctggagctgaagaatgagctttgccagcttccccccgagggctacgtggtggtcgtcaagaacgttggcctgaccctccgcaagcttataggaagcgtggatgacctccttcccagcctgcctagctcgtcaaggacagaaatcgagggcacccagaaactgttgaacaaggatctcgcggagctgattaataagatgaggctggcacagcagaacgcggtcacgagcctgtcggaggagtgtaaacgccaaatgctgacagccagtcatacgcttgcggtggacgccaagaatctacttgacgctgttgaccaagctaaggtgcttgcaaatctcgcacacccacccgccgaatag

SEQ ID NO: 249713 - DNA, 2904 bp, Artificial Sequence
  derived and/or modified sequence
atgtccggggtgagcgagccactgagtagagtaaaactggggacattaagaaggccagaaggcccagctgagccgatggtggtggtaccagttgatgtggaaaaggaggacgttcggattctgaaggtatgtttctacagtaactcattcaaccccggaaagaattttaagttggtaaaatgtactgtacaaacagaaatccgggaaatcattacttccatcctgctcagcgggaggatcgggccaaacatccgcctggccgagtgttacggcctacggctgaaacacatgaaatccgatgagatccactggcttcatccccagatgacagtgggcgaggtgcaggacaagtacgagtgccttcacgtggaggccgaatggagatacgacttacaaatcaggtatttgcccgaggatttcatggagtccctgaaagaagataggaccactctcctctacttctaccagcagctccgaaatgattacatgcagcgctatgcctccaaggtttctgaaggcatggccttgcagctgggctgtctggaactaagacggtttttcaaagacatgccccacaatgcattagacaagaaaagcaactttgagcttctggagaaagaggtgggcctcgatctgttttttccgaaacaaatgcaggagaatcttaaaccgaagcagtttaggaaaatgatccagcaaacttttcagcagtacgcgagcctgcgcgaggaagagtgcgttatgaaatttttcaacactcttgctggctttgctaacatcgatcaggaaacgtatcgatgcgagctcatacaggggtggaacattacggtcgatctggttattggtcccaaggggattagacagctgaccagccaggatgctaagcccacttgcctggcagagttcaagcaaatcaggagcataaggtgccttcccctagaagaagggcaggccgtccttcagcttggtatagagggagcgcctcaggctttatccattaagacatcttcactcgcagaggctgagaacatggccgatttaatagatgggtattgccggctgcagggggagcatcaggggtcactgatcatacaccccagaaaggacggtgagaaacggaattccttaccacagattcctatgctgaacctggaggcaaggcgcagtcacctttctgagtcttgttctattgagtctgacatctatgctgagataccagacgaaacccttcggagacctggcgggccccagtacggcatagccagagaagacgtggtgttgaaccgaattctgggagaaggcttttttggggaagtgtatgagggcgtgtacactaatcacaagggagagaaaatcaacgtggccgttaaaacatgtaaaaaggattgtaccctcgacaataaggaaaaattcatgtcagaggcggttatcatgaaaaacctcgaccacccccatatagtgaagctgattggaatcatcgaagaagaacctacatggatcatcatggaactgtatccctacggcgagctgggacactatctggagagaaataaaaattcccttaaagtcctgacactagtgctttactcccttcagatctgtaaggccatggcctatctggagtcaattaattgtgtgcaccgcgatattgccgtccgcaacatcctggttgccagcccggaatgcgtaaaactgggggatttcgggctgtctcgctatattgaagatgaagactattataaggcctccgtaaccaggttgcccattaagtggatgtcaccggagagcatcaattttagacgcttcacaacagcaagtgacgtgtggatgtttgccgtctgcatgtgggaaatcctgagcttcgggaagcagcctttcttctggctggagaataaggacgtgattggggtgctggagaagggtgataggttaccaaaaccggacttatgccctcccgtgctatatacccttatgacccgttgctgggactacgatccctctgatcgccctcgtttcaccgagctggtctgctctctgtccgatgtgtatcaaatggagaaggacatcgccatggagcaggagcggaacgcccgttaccgcacgcccaagatattagagccgacggccttccaggagccaccccccaagccttctaggcctaagtataggcctcccccgcaaaccaaccttcttgcacccaagctgcaattccaggaggaggatttcatccagccttcgtccagagaggaggcccagcagctgtgggaggcagagaaagtaaagatgcggcaaattctcgacaagcaacagaagcagatggtagaggattaccaatggttacgccaggaggaaaagtccctcgaccccatggtgtacatgaatgacaaatccccactgacgccggaaaaggaggtaggctatctggagttcacaggacccccccagaagccgccccgcctcggcgcacagtccattcagcctactgccaacttagataggaccgacgatctggtgtacctaaatgtgatggagctggtgcgcgcagtgttggagctcaagaacgaactttgtcagctgcctcctgagggatacgtcgtggtagtgaagaacgtcggcctgactctgcggaagttgattggatccgtggacgacctcctgcctagtctcccaagtagctctcgtacggaaatagaaggaacacagaaactgctgaataaagacctggctgaattaatcaacaagatgagactggctcagcagaacgccgttacctccctctcagaagaatgtaagaggcaaatgctcacggcatctcacacacttgcagtggatgctaaaaacctgctggacgccgtcgatcaggctaaggttctggccaatctcgcacatccaccagcggagtag

SEQ ID NO: 249714 - DNA, 2904 bp, Artificial Sequence
  derived and/or modified sequence
atgtctggagtgtctgagcccctgagccgggtgaagctgggcaccctgcggcggcctgagggccctgctgagcccatggtggtggtgcctgtggatgtggagaaggaggatgtgcgcatcctgaaggtgtgcttctacagcaacagcttcaaccctgggaagaacttcaagctggtgaagtgcaccgtgcagacagagatccgggagatcatcaccagcatcctgctgagcggccgcatcggccccaacatccggctggccgagtgctacggcctgcggctgaagcacatgaagagtgatgagatccactggctgcacccccagatgacagtgggggaggtgcaggacaagtatgaatgtctgcacgtggaggccgagtggaggtatgacctgcagatccgctacctgcctgaggacttcatggagagcctgaaggaggacaggaccaccctgctgtacttctaccagcagctgagaaatgactacatgcagagatatgccagcaaggtgtctgagggcatggccctgcagctgggctgcctggagctgcggcgcttcttcaaggacatgccccacaatgccctggacaagaagagcaactttgagctgctggagaaggaggtgggcctggacctcttcttccccaagcagatgcaggagaacctgaagcccaagcagttcaggaagatgatccagcagaccttccagcagtatgccagcctgcgggaggaggagtgtgtgatgaagttcttcaacaccctggccggctttgccaacatcgaccaggagacctaccgctgtgagctgatccagggctggaacatcaccgtggacctggtgattggccccaagggcatccggcagctgaccagccaggatgccaagcccacctgcctggccgagttcaagcagatccgcagcatccgctgcctgcccctggaggagggccaggccgtgctgcagctgggcatcgagggcgccccccaggccctgagcatcaagaccagcagcctggccgaggccgagaacatggctgacctgattgatggctactgccgcctgcagggcgagcaccagggcagcctcatcatccaccccaggaaggatggagagaagaggaacagcctgccccagatccccatgctgaacctggaggcccggcgcagccacctgtctgagagctgcagcattgaaagtgacatctatgcagagatcccagatgagaccctgcggcggcctgggggcccccagtatggcatcgccagagaagatgtggtgctgaaccgcatcctgggggagggcttcttcggggaggtgtatgagggcgtgtacaccaaccacaagggggagaagatcaacgtggccgtgaagacctgcaagaaggactgcaccctggacaacaaggagaagttcatgtctgaggccgtcatcatgaagaacctggaccacccccacatcgtgaagctgattggcatcatcgaggaggagcccacctggatcatcatggagctgtacccctatggagagctgggccactacctggagaggaacaagaacagcctgaaggtgctgaccctggtgctgtacagcctgcagatctgcaaggccatggcctacctggagagcatcaactgtgtgcaccgggacattgctgtgaggaacatcctggtggccagcccagaatgtgtgaagctgggggactttggcctgagccgctacattgaagatgaggactactacaaggcctctgtgacccggctgcccatcaagtggatgagccctgagagcatcaacttccgccgcttcaccacagccagtgatgtgtggatgtttgctgtgtgcatgtgggagatcctgagctttgggaagcagcccttcttctggctggagaacaaggatgtgattggagtgctggagaagggggaccggctgcccaagccagacctgtgcccccctgtgctgtacaccctgatgacccgctgctgggactatgaccccagcgaccggccccgcttcacagagctggtgtgcagcctgagtgatgtgtaccagatggagaaggacatcgccatggagcaggagagaaatgcccgctaccgcacccccaagatcctggagcccacagccttccaggagcccccacccaagcccagccggcccaagtaccggcccccaccccagaccaacctgctggcccccaagctgcagttccaggaggaggacttcatccagcccagcagccgggaggaggcccagcagctgtgggaggccgagaaggtgaagatgaggcagatcctggacaagcagcagaagcagatggtggaggactaccagtggctgcggcaggaggagaagagcctggaccccatggtgtacatgaatgacaagagccccctgaccccagagaaggaggtgggctacctggagttcaccggccccccccagaagccaccccggctgggcgcccagagcatccagcccacagccaacctggacagaacagatgacctggtgtacctgaatgtgatggagctggtgcgggctgtgctggagctgaagaatgagctgtgccagctgcccccagagggctacgtggtggtggtgaagaatgtgggcctgaccctgaggaagctgattggctctgtggatgacctgctgcccagcctgcccagcagcagcaggacagaaattgagggcacccagaagctgctgaacaaggacctggccgagctgatcaacaagatgaggctggcccagcagaatgctgtgaccagcctgtctgaggagtgcaagaggcagatgctgacagccagccacaccctggccgtggatgccaagaacctgctggatgctgtggaccaggccaaggtgctggccaacctggcccaccccccagctgagtag

SEQ ID NO: 249715 - DNA, 2904 bp, Artificial Sequence
  derived and/or modified sequence
atgagcggcgtgagcgagcccctgagccgggtgaagctgggcaccctgcggagacccgagggccctgctgagcctatggtggtggtacctgtcgacgtcgaaaaggaggatgtgcggattttgaaggtgtgtttctattccaattcttttaaccctggtaagaacttcaaattggttaaatgcactgtgcagactgagattcgcgagataatcacctctatccttctctctgggcggataggccccaatattagactggccgagtgttacggactgcgcttgaaacacatgaagtcagatgaaattcattggcttcatcctcagatgaccgtgggtgaagtgcaagataagtacgagtgtctgcacgtggaagccgaatggcgctacgatttgcagatccgatatctcccagaagactttatggagagcctgaaagaggaccgtacaaccctgctgtacttctaccagcagctccgaaacgattatatgcaacgctacgccagtaaagtgagtgaagggatggccctccagcttggatgtttggagcttaggcgattctttaaggacatgccccataacgctctggacaagaagagcaactttgaattgctcgaaaaggaggtgggcctcgacttattcttccccaagcagatgcaggagaaccttaagccaaaacaatttcgcaagatgatccagcagaccttccagcaatatgcgtcattacgtgaggaggaatgtgtcatgaagttcttcaacactctggccgggtttgctaatatcgatcaggagacgtacaggtgcgagcttatccagggctggaacattactgtcgatctggtcatcggcccaaagggaatcagacaattaaccagtcaggacgctaaacctacatgtctggccgagtttaaacaaatcagatcaattcgatgccttccacttgaggaaggacaagcagtgctccagctgggcattgaaggagcacctcaggctctctcaattaaaacatcgtccctggcagaggccgaaaacatggccgacttaatcgacgggtattgtaggctgcaaggcgaacaccagggaagcctgataattcaccctcgcaaagatggcgaaaaaaggaatagcctgccccagatccctatgcttaatctcgaggccagaaggtcccacctgtccgagtcttgttctatcgaatcagacatatatgcagaaatccctgacgagaccctccggagacctgggggtcctcaatatgggatcgcgcgcgaagacgttgtgctgaaccgcatactgggcgaggggttcttcggcgaggtgtacgagggggtttatacaaaccacaagggagaaaaaatcaacgtggccgtcaagacttgcaaaaaggactgtacactggacaacaaggaaaaattcatgtcggaggccgtgataatgaagaacctcgatcatccccacatcgttaaactgatcggcataatcgaagaagaacccacgtggatcatcatggaattatacccttacggggagttgggccattaccttgaaagaaacaaaaatagtctgaaagtgcttactctcgtgctgtatagcctccagatatgcaaggctatggcctacctagaatcgatcaactgcgttcatcgcgatattgcagtgaggaatatccttgtcgccagccctgagtgtgtgaagctgggggacttcggtctctctaggtatatcgaagatgaggactattacaaagcaagcgtgaccagactcccaatcaagtggatgtctcctgagtcgatcaatttcagaagatttaccactgcctctgatgtctggatgttcgctgtttgcatgtgggaaatactctcattcggcaagcagccatttttttggctcgaaaataaggatgtgatcggcgtgctggaaaagggcgacagacttccaaaaccagacctttgccccccagtgctgtatacgcttatgacccggtgctgggactatgaccccagtgatcgaccaagattcaccgaactggtctgctcactgtctgacgtgtaccagatggaaaaggacatagcaatggagcaggaacggaatgcccgctaccgaaccccaaaaatactggagcctacagctttccaggagccacctcccaaaccttctaggcccaagtatcgacctccgccccagacaaacctcctggcgccaaagcttcagttccaggaggaggatttcattcagccttcgtccagagaagaggcccaacagctttgggaagctgagaaggtgaagatgcgccagattctcgataagcaacagaagcagatggttgaggactaccagtggttgaggcaagaggagaaatcgttggatccaatggtatacatgaacgataagagtcccctgacacctgaaaaagaagtgggctacctggagtttacaggcccccctcaaaagcccccccgcttgggtgcacagagtatccaacctactgccaacttggatagaaccgatgacttggtttacctgaacgtgatggagctggtgagggcagtactggagttgaagaacgagctgtgtcaactgccacctgagggatacgtggtagtagttaaaaatgtggggttgacattgaggaaactgatcgggtccgtagacgatcttctgccctctctgccaagtagcagcaggacagagattgagggcacacaaaagctgcttaacaaagaccttgctgagttgataaacaagatgagattagcacagcagaatgctgtcacctccttaagcgaagagtgcaagagacagatgctgacagctagtcatactcttgctgtggatgctaagaacctcctggacgccgtggatcaagcaaaagtgctggccaacctcgcacatcctcctgctgagtag

SEQ ID NO: 249716 - DNA, 2904 bp, Artificial Sequence
  derived and/or modified sequence
atgagcggcgtgagcgagcccctgagccgggtgaagctgggcaccctacgacggcccgagggaccagccgaacccatggtggtggtgcctgttgacgttgagaaagaggatgtgcggatcttaaaggtttgcttttattcaaacagcttcaaccccggtaagaactttaagcttgtcaagtgtacagttcagacagagatccgcgaaatcatcacttccatccttctgtcaggccgaatcggcccgaacatcagactggcggagtgctacggcctccgcctgaaacatatgaagagcgacgagatccactggctgcaccctcaaatgactgtgggtgaagtgcaggataagtatgaatgtctgcacgtggaagcagaatggcgctatgacttgcagattcgatacctgcctgaagactttatggagtccttaaaagaagatagaacgacccttttgtacttttatcaacagctacgcaacgactatatgcagcgttatgccagcaaggtctctgagggcatggcgctccagttgggctgtctggagttgagaaggttcttcaaggatatgcctcataatgctctagacaaaaaatcaaatttcgagctgttagagaaggaggtgggcctggatctgttctttccaaagcagatgcaggagaatctgaagccaaaacaattccggaagatgattcaacagacatttcaacagtacgcttccttgagggaagaagagtgcgttatgaaattcttcaacactcttgcaggctttgcaaatatcgaccaggagacatacaggtgcgagctgattcagggatggaatataactgtcgaccttgtgatcgggcccaagggtatccgccagctgacatcccaggacgccaagcccacatgtttggccgaattcaagcagatcaggtcaataagatgcctgccactggaggaggggcaggccgtgctgcagttaggaatagagggtgccccccaggccttgtctatcaaaacgagttctctggccgaagctgagaatatggccgacctgatcgacggctactgtcgcctgcagggggagcatcagggttccctgattatccaccccaggaaagacggagagaaacgcaactcactgcctcagatcccgatgctcaatctggaggcaagacggtcgcatctgtcagagtcatgtagcatcgagtccgacatctacgccgaaattcctgacgagacgctgagaagaccaggaggacctcagtacggcatcgccagggaagatgttgttttgaatagaatcctgggagagggcttcttcggcgaagtctacgagggtgtttacaccaatcacaagggggaaaaaattaacgtggccgttaagacatgcaaaaaagactgcacactcgataacaaagaaaaattcatgtccgaggcagtgatcatgaagaatttagatcatcctcacatagtgaagctgatagggatcatcgaggaggagccaacttggatcattatggaactttacccctatggagagctgggacattatttggaacgaaataaaaatagcctcaaagtgctgacccttgtgctgtactcactccagatatgtaaggcgatggcctacctggagtccataaattgcgttcatcgggacattgccgtgaggaacatactggtggcttctcccgagtgcgtgaagcttggcgacttcgggcttagtagatacatcgaggatgaggattattataaggcgagcgtaactcgcctgcccatcaagtggatgagtcctgaatccattaactttcgacgcttcacaaccgcctccgacgtttggatgtttgccgtgtgtatgtgggaaatattatccttcggcaagcaaccctttttctggctcgaaaacaaagatgtgatcggagtgctggagaagggagaccggcttccgaagccagacttatgccctccagttctttacacactcatgaccaggtgctgggactacgatcccagcgacaggccccgatttaccgaactagtctgttctctgtcagacgtatatcagatggagaaggatattgccatggagcaggagcggaacgccaggtaccgcacacctaagattcttgagccaaccgccttccaggaaccacctcctaagcccagcagaccaaagtaccgaccaccgcctcagactaacctactggccccaaagctgcaattccaggaagaagactttattcagccatcaagcagggaggaagcacagcagctctgggaagcggaaaaggtaaagatgcgacagatcttagataaacagcagaagcagatggtcgaggattaccagtggttgagacaggaggagaaatctctggatccaatggtgtacatgaacgacaagagccctctcacaccagaaaaagaggtcgggtatctggagttcacggggccacctcagaagccaccccgcttgggtgctcagtctattcaacccaccgccaatctcgatcgcacagatgatctggtctacctgaatgtcatggagttagtgcgggccgtactagaactgaaaaatgagctgtgtcagcttcctccagagggatatgtggtggtggtgaaaaatgtgggactcacattacgcaaactcattggctccgtagatgatcttttaccgagtctgccctctagcagtcgaaccgaaattgaggggacccagaagctgctgaacaaggatctggccgaactgatcaacaagatgaggttggctcagcagaacgccgttacttccctgagcgaggaatgcaagcgccagatgttaaccgcctctcacaccctggccgtggacgcgaagaatctgctggatgctgtggaccaggccaaggtcctcgccaacctggcacatccaccagccgagtag

SEQ ID NO: 249717 - DNA, 2904 bp, Artificial Sequence
  derived and/or modified sequence
atgagcggcgtgagcgagcccctgagccgggtgaagctgggcaccctgcgacgaccggaaggtccagctgagccaatggtcgttgttcctgttgacgtcgagaaagaggatgtgcggattctgaaagtttgtttctatagtaacagctttaaccctggaaagaactttaaacttgtcaaatgtacagtccagactgaaatcagagagattatcactagtattctattaagtggccggattgggccaaacatccggttggctgagtgttatgggcttaggctaaaacacatgaagtcggacgaaatccactggcttcatccacagatgaccgtcggggaggttcaagataaatacgaatgtctgcacgtggaggccgaatggagatacgaccttcagatcagatacctgcctgaagattttatggagtcgctgaaggaggatcggactaccctgctgtacttctatcaacagctgagaaacgattacatgcaaaggtatgccagtaaggtgtccgaaggaatggctctacagctgggttgtcttgagttacgtcgattctttaaggacatgccccacaatgctcttgacaaaaaatcaaacttcgagctgttagagaaggaggtaggactcgatctcttctttccaaaacagatgcaggagaacctgaaacccaagcagtttaggaagatgatccagcaaacattccagcagtatgcgagtctgagggaagaggaatgcgtgatgaagttcttcaatactttagctggattcgctaacatagaccaggaaacgtacaggtgcgaacttattcagggatggaacattacagtcgatcttgtgattggccctaaagggatcagacagttaacgagccaggacgctaagccaacatgcctcgcagaatttaagcaaatcagaagtatcaggtgcctcccgttggaggaaggccaagcagttttgcagctcgggatagagggtgctccacaagccctgagcatcaaaaccagcagtctggccgaggcagaaaatatggcagatctgatagacgggtactgtagattacagggcgagcatcagggttctctcatcattcatccgcgcaaagatggcgagaaaagaaactccttgccgcagatacccatgctcaatttagaagctagacgtagtcacctaagcgaaagctgctccattgagtcagatatctacgctgaaatcccagatgagacactcagaaggccaggaggcccgcaatacggcatagcccgggaagatgtggtgctgaacagaattctgggagaaggcttcttcggcgaagtgtatgagggcgtgtacacaaatcacaaaggcgagaagataaacgtggccgtcaagacttgcaaaaaagactgtacactagacaacaaggagaaattcatgagtgaggccgtcataatgaaaaacctggatcatccacacatcgttaagctcattggcataatcgaagaagaacctacctggatcatcatggaactgtacccttacggcgagcttggacattatctcgaaaggaacaagaacagcctcaaagtgctcactctagtgctgtatagtctccaaatctgcaaagcgatggcttacctcgagagcatcaattgcgttcatagagacatagcagtgcgtaacatattagtggcgtcccctgagtgtgtgaagttaggggacttcggccttagcaggtatatcgaggacgaagactactataaggcatccgtgacaagactgccaatcaaatggatgtcccctgagtccattaacttcagacggtttaccaccgcctctgacgtgtggatgtttgctgtatgtatgtgggagatactgagcttcggaaaacagccttttttttggctggaaaacaaggatgttatcggcgtgcttgaaaaaggtgataggctaccaaaaccggacctgtgccccccagttctctacaccctgatgacaaggtgttgggactacgacccaagcgacaggccacgctttacagagttggtgtgttctttgtcagatgtataccaaatggagaaggatattgctatggagcaggagcgcaatgcccgctaccggacacccaagatcttggaacccacagccttccaggagcccccccccaagcccagccgacccaagtaccgacctcccccccaaaccaacctgcttgcccccaagcttcagttccaggaggaggacttcatacagccgagtagccgtgaggaggcgcagcagctgtgggaggcagaaaaggttaagatgcggcaaattctcgataaacagcagaagcaaatggtggaagattaccagtggctgcggcaggaggagaagagcctggaccccatggtgtacatgaacgacaaatccccccttactcccgagaaagaggtgggctacctcgaatttacaggcccaccccaaaaaccacctcggttgggagcccagagtatccagcctaccgcaaatctggatcgaaccgacgacctggtctatctgaacgtcatggaattggtccgcgccgttctcgagctcaaaaatgaactgtgtcagttgcctccagagggatatgtggtggtggtcaagaacgtcggcctcactctgaggaaattaattgggtcggtggacgacctgctgcccagcctgccatctagctcccgcacggaaatcgaagggacgcagaagctgctgaacaaggatctggctgaattaatcaacaagatgagattagctcagcagaacgccgtgaccagtttgtctgaagagtgtaagagacagatgctaactgcctcacataccctcgcggtcgatgcaaaaaacctcctggacgcggtggaccaggccaaggttttggccaatcttgctcaccctcctgccgagtag

SEQ ID NO: 249718 - DNA, 2904 bp, Artificial Sequence
  derived and/or modified sequence
atgagtggcgttagtgagccactgtcaagagtcaaactgggcactctacgcagacctgaaggacctgccgagcctatggttgtcgttccagtggacgtggagaaggaggatgtgaggattctgaaggtgtgtttctatagcaattccttcaacccaggaaagaatttcaagctagtcaagtgtaccgtgcaaacggagataagagaaattattacatcaatcctgttgtccggtcggattggaccaaacatccggctggctgaatgttatggccttcgactcaagcatatgaaatccgacgaaatacactggcttcatccccagatgaccgtgggagaagtccaggataagtacgaatgcctgcacgtggaagcagaatggagatacgacctccaaattagatacctgccagaggacttcatggagtccttaaaagaggaccggactacactcctgtacttttatcagcagttgaggaacgactatatgcagaggtacgcctcgaaggtctcggagggtatggccctgcagctgggttgcttagagctgcgacgcttttttaaggatatgcctcataatgctctggataagaagtccaattttgagctgcttgagaaggaggtcggcttagatctattctttcctaagcagatgcaggaaaatctcaagcccaagcagtttcgtaagatgatccagcagaccttccagcagtacgcatctctgcgcgaggaggagtgcgtgatgaagttctttaacaccctcgccggatttgcgaacatcgaccaggagacctaccggtgcgaactgatacagggatggaatattactgttgacttggttattggtcccaaaggcatcaggcaactgacaagtcaggatgctaagccgacatgcctcgctgaatttaaacagataagatcaataaggtgcctgcctctcgaggaaggccaggcagtcctgcagctcggaatagagggtgctccgcaggccctttcaattaaaacttcctcacttgcggaggcggaaaatatggccgatctgatcgatgggtattgccggctccagggcgagcaccagggctccctgatcatccatcctagaaaggatggagagaagaggaacagcctgccccaaatcccaatgctgaatctggaggctagaagatcccacctgtcggagtcttgtagcatcgaatccgatatctacgccgaaattcctgatgagacgttgcggagaccaggcggacctcagtatggtattgccagagaggacgtcgtcttgaatagaatcctgggggagggcttcttcggggaagtgtacgagggtgtctacacaaaccacaagggagaaaagattaatgtggcagtcaagacatgcaaaaaagattgcacactagacaacaaagagaaattcatgtccgaggctgttattatgaagaacctcgatcacccgcatattgttaaactgatcgggatcattgaagaggagccaacgtggatcattatggagctgtatccatacggagaacttggccattacttggagaggaataaaaacagtctgaaagttcttactctggttctgtactctctacaaatctgcaaagcaatggcgtaccttgagtctattaattgcgtacaccgggacatcgctgtaagaaacatactggtggcttcacccgaatgtgtgaaattaggcgacttcggactgagccgatatatcgaggatgaagactattataaggccagcgtgacccggttaccaataaaatggatgtcgcctgagagtatcaactttaggcgtttcactaccgcctcagatgtttggatgttcgccgtgtgcatgtgggagatactttctttcggcaaacagcctttcttttggctggagaacaaggatgtgatcggggtgcttgagaagggcgaccggctgcccaaacccgacttatgccctcctgtgctgtataccctgatgacaaggtgctgggattacgacccaagcgaccgacctcgcttcacggagctggtgtgttccctgtctgacgtgtatcaaatggaaaaggacatagcaatggagcaggaacgaaatgcacgctatagaacaccaaagattttggaaccaacagcatttcaggagccaccacccaagccctctcggccaaagtaccgacctcctccgcagaccaaccttcttgcccctaagctccagtttcaggaggaagactttatccaaccttcatccagggaagaggctcagcagctgtgggaggctgaaaaggttaaaatgcgtcaaattctggacaagcagcagaaacagatggttgaggattaccaatggttgaggcaggaagagaagtctttagatcccatggtctatatgaacgataagagtcctcttacccccgagaaggaggttggctatctggagttcactggccctccccaaaagcctccccgtctgggggctcagagtattcaacccactgctaatctggacaggactgacgacctggtgtacttaaacgtgatggagttggtgagagctgtccttgagctgaagaatgaattatgccagctcccgcctgaggggtatgtggtggtggttaaaaacgtcggcctgactcttcgcaagctgataggaagcgtggatgatttgttaccatccttgccatcttcctctcgtacagaaatcgaaggaacgcagaagctgcttaataaggacctcgcagaactgattaacaagatgcgtctcgcccagcagaatgccgtgacctcgctcagcgaggagtgcaaacgacagatgctaaccgcctcgcataccctggctgtggacgctaagaaccttctggacgccgtggaccaagctaaagttctcgccaatctcgctcacccccctgctgagtag

SEQ ID NO: 249719 - DNA, 2904 bp, Artificial Sequence
  derived and/or modified sequence
atgagcggggtgagcgaacccctgagtcgggtgaaacttggcaccctgagacgaccagaagggcctgccgagcccatggtggttgtgcctgtggacgttgagaaggaagatgtgaggattctgaaggtgtgcttttactccaactccttcaatccaggaaagaatttcaaattagtcaagtgcacggtgcagaccgaaatccgggaaatcatcacatctattttactgtcgggcaggattgggcctaatattcgcttggcagaatgttacggtctcagactgaagcatatgaagtcagatgagatccactggctacaccctcagatgacagtgggcgaggtccaagataagtatgagtgccttcacgtggaagcggagtggcgctacgatttgcagatccgttatctgcccgaggattttatggagtccctgaaagaagatcgcacgacattactgtacttctaccagcagctccggaatgactatatgcagagatacgcttcaaaggtgagcgagggcatggccctgcaattggggtgtctggagctccgcaggttcttcaaggatatgccccacaatgccctggataagaagagcaactttgaactcctggaaaaagaggtggggcttgatctcttcttcccgaaacagatgcaggaaaatctgaagccaaaacaatttcgtaagatgattcagcagaccttccagcagtacgccagcctgagggaggaggagtgtgtcatgaagttcttcaatacactggcgggattcgcaaatatagaccaggaaacatacagatgcgaattaatccagggctggaatatcacagtggacctcgtgatcggaccaaaaggaatacgacagttaacctcccaggatgctaagccaacttgcctggccgagtttaagcagataagatccattagatgtcttccactcgaggaagggcaggctgtgctgcagctggggatcgaaggtgctccccaggccctgagcattaagacatcctccctggccgaggctgaaaatatggccgacctgatcgacggctactgccgtctgcaaggtgagcatcagggttcccttatcatccacccacgcaaagacggggagaaacggaatagtctgcctcagatacctatgctgaatcttgaggctagacgatcgcacctcagtgagtcttgcagtatcgaatccgacatttatgctgaaattccagatgaaactttacgcaggcccggtgggcctcagtatggtatcgcacgagaagatgtggttctgaaccggattttgggagagggtttcttcggtgaggtgtacgaaggcgtgtacactaatcataaaggtgagaagatcaacgtcgccgttaagacctgcaagaaagattgtacccttgacaataaagagaaattcatgtctgaagctgtaatcatgaagaacctggaccatccacacattgtcaagctcattgggatcattgaggaagagccaacctggattatcatggagttgtacccttatggcgagctaggtcactatttagaacgtaataaaaattcactcaaggttcttactttggtcctatacagtttacagatatgtaaagcaatggcctatctggaaagtatcaattgcgttcatcgcgacatcgctgtgcgcaatattctggtggcatcaccggaatgcgtgaaactgggtgattttggtctgtctcgctatattgaagacgaggactattacaaggcatctgtgaccagactgcccatcaaatggatgagccctgagtctatcaatttcagacgtttcaccacagccagtgacgtttggatgtttgccgtatgtatgtgggagatcctcagctttgggaagcagcctttcttttggctagagaataaggacgtaattggagtgcttgaaaaaggagacagattaccaaagcccgatctctgccctccagttctttacaccctgatgactcggtgttgggattatgacccaagcgaccgccctcggttcacggagctcgtttgcagtctgtctgatgtgtaccaaatggaaaaagacattgccatggagcaggaacgtaatgccaggtaccgaacccccaaaatcctcgagcctacagccttccaggagcctccccctaagccaagtagacccaagtatagacctccgccacagactaacctcctggctcctaaattacagttccaggaagaggatttcattcaaccgagcagtcgggaggaggcccaacaactgtgggaggctgagaaggtgaaaatgagacagattttggataaacagcagaagcaaatggtcgaagactaccagtggttaaggcaggaagagaaatcgctggacccaatggtgtacatgaatgataaaagtcctcttactcccgagaaagaagtaggatatttagagtttaccggcccaccacaaaagccccctaggctaggtgcccagtcaatccaaccgacagcaaacctggaccgcactgatgacctagtttatcttaacgtaatggaactcgtcagagccgtgttagaactaaaaaacgagctctgccagctgccaccggaggggtatgtcgtagttgtgaagaatgtgggtctcaccttgaggaagttgattggaagcgtagatgacctgcttccttcgctgcctagctcctccaggacagagattgaaggcacccagaagctgctgaataaagaccttgcagaattgattaacaagatgcgactggctcagcagaacgcggtgaccagcctcagcgaggaatgcaaaagacaaatgttgacggccagtcacacgctggccgtggatgccaagaaccttctagatgccgtggaccaagctaaagtgttggcgaatttagcccatcccccagctgagtag

SEQ ID NO: 249720 - DNA, 2904 bp, Artificial Sequence
  derived and/or modified sequence
atgagcggcgtctctgaacctctctccagagtaaagcttgggacccttcgacgacccgagggacccgctgagccaatggttgtggtgccagtggatgtggagaaagaggatgtccgtattctgaaggtctgcttctactccaacagtttcaaccccggaaaaaatttcaagttagtgaagtgtaccgtgcagaccgagatccgagaaattattacaagcattttactgtccgggcgaattgggccaaacatcagactggcagagtgttacggccttcgcctaaagcatatgaaatcagacgagatccactggttgcacccccaaatgacggtcggagaggtgcaagacaagtacgaatgccttcacgtagaggcagaatggcggtacgaccttcaaatcagatacctgccggaagatttcatggaatccttaaaggaggatcgcaccaccctactgtatttttaccagcagctcagaaatgactacatgcagagatacgcatccaaggtgtctgaagggatggcccttcagcttgggtgtctcgagcttcgcagattcttcaaggacatgcctcataatgcgctcgacaagaagagcaattttgaactcttggaaaaagaggtgggactcgacctctttttcccaaagcagatgcaggaaaatttgaaacctaagcagtttagaaagatgattcagcagaccttccagcagtatgctagtttacgggaggaagagtgtgtcatgaaattctttaacacactcgcgggattcgccaacatcgatcaggaaacataccgctgcgaattgattcagggctggaacatcactgtagatctcgtgattggcccaaaagggatccgtcagctgacaagccaggacgccaagcctacctgcctggctgagtttaagcagattaggtctatcaggtgtcttcctctcgaagagggacaggctgtcttgcagctgggcatcgaaggcgctccacaggctctgtcaataaagaccagctcactggcggaggccgagaacatggctgatctgatagacgggtattgtaggctccaaggtgaacatcaaggctctctaatcatacacccaagaaaggacggcgagaaaaggaattcccttccacagattcccatgctgaacctggaagcaaggcggtcccacctgtccgagtcctgctcaatcgagtccgacatttatgcagaaattcccgacgagaccttgaggaggccaggcggacctcagtacgggattgcccgagaggacgtggtgctgaataggatcctcggcgaagggttttttggtgaagtatacgaaggcgtttataccaaccataagggagaaaaaataaatgtggccgtcaagacctgcaagaaagattgcacattagacaacaaagaaaaattcatgtcagaggcggtgatcatgaagaacctggatcatccacacattgtcaaacttattggcataatcgaagaagaacccacctggatcattatggagctctatccttatggtgagctgggccactacctggagcggaacaaaaacagcctcaaagttctcacactggtcttgtacagtctgcagatttgcaaagctatggcctaccttgagagcataaactgtgtgcacagggacattgccgttcggaatatcctggtagcctccccggagtgtgtaaagttaggggactttggcctctcacgctacatcgaagatgaagattattacaaggcatcagttacaagactccccattaagtggatgtcacccgaatcgatcaatttcagacgcttcactactgccagcgatgtctggatgtttgccgtctgcatgtgggagattctgtcctttggaaaacaaccctttttttggctcgaaaataaagacgttattggcgttcttgagaagggcgatcggctgccaaaacctgacctctgtccccctgtgctatataccctgatgaccagatgctgggactacgatccaagtgatagacctcgcttcacagaattagtttgctctctgtccgacgtctatcaaatggaaaaagatattgccatggaacaagagcggaatgctaggtataggactccaaaaatcctagagcctaccgccttccaggagcctccaccaaaaccctcccgacctaaatacagaccccctcctcagaccaacctcttggcacccaagctacagttccaagaagaagacttcatccaaccatcctcccgagaggaggcgcagcagctctgggaagcagagaaggtgaagatgaggcagatcctggacaaacagcagaaacagatggtagaagattatcaatggctgcgccaggaggagaagagcctggacccgatggtctacatgaacgacaaaagcccattgaccccagagaaggaagtgggctatctcgagtttactggtccaccacagaagcctcccaggctcggggctcagagcatccagcccaccgcaaacctagaccgaaccgacgatctcgtgtaccttaacgttatggaactggtgcgcgcagtgctagaattaaagaatgagttgtgccagctgccaccagaagggtatgtcgtcgtggtcaaaaacgtcggtctcactttgcggaagctgatcggatccgttgacgacctgttgccaagtctgcccagctccagtcgaaccgaaatcgaaggcacccagaagctgttaaataaagacctcgccgagctcattaacaagatgagactagcacaacaaaatgcggttactagtttgagcgaggagtgcaaaagacaaatgttaaccgcttcgcataccctggctgtggacgccaaaaatctgttagacgcagtcgaccaggcgaaggttctcgccaacctggcgcatcctccggctgagtag

SEQ ID NO: 249721 - DNA, 4589 bp, Artificial Sequence
  derived and/or modified sequence
gcagttcccgcctcctcaggtccgggcgggtccctggccggggtagcacggaagggtctcccaggcggcgtagtagggcttccgtgttactggaaacctacttccggctgcaaatgggaaaaggagcctctaccttaaccaatccccgggaacctcaggcccgcggatgggagaaaccagagatgccaacttcctgcttccgaagtagtggctgggtcttaaagcaccgatgtttctgcattgaatagccctggaagacagaattcttgtctctccaaagatctggcagacttattcccaattataagagatccttgcaaaggaggtgtcttgcttcaccttcaccttccactgtgattgtaagttttctgaggcctcgccagccatgcggaactgaataggactagcaacttcatagacggttgtgaagacaagctagacggcagatgaaagttcttggcacagagtgaacacttgataaactatatggcagggagggctggaacggggcttgtttgaagagcaatatgagccagggttatagacctgagtttggggtaagagtggaacatccaaatggaagagtccagcagctgaaaggacatttgttcaaaggcctttttcattacagttttctccttcttctgatccagccacagcctccggagccgttgcacacctacctgcccggccgacttacctgtacttgccgccgtcccggctcacctggcggtgcccgaggagtagtcgctggagtccgcgcctccctgggactgcaatgtgccgatcttagctgctgcctgagaggatgtctggggtgtccgagcccctgagtcgagtaaagttgggcacgttacgccggcctgaaggccctgcagagcccatggtggtggtaccagtagatgtggaaaaggaggacgtgcgtatcctcaaggtctgcttctatagcaacagcttcaatcctgggaaaaacttcaaactggtcaaatgcactgtccagacggagatccgggagatcatcacctccatcctgctgagcgggcggatcgggcccaacatccggttggctgagtgctatgggctgaggctgaagcacatgaagtccgatgagatccactggctgcacccacagatgacggtgggtgaggtgcaggacaagtatgagtgtctgcacgtggaagccgagtggaggtatgaccttcaaatccgctacttgccagaagacttcatggagagcctgaaggaggacaggaccacgctgctctatttttaccaacagctccggaacgactacatgcagcgctacgccagcaaggtcagcgagggcatggccctgcagctgggctgcctggagctcaggcggttcttcaaggatatgccccacaatgcacttgacaagaagtccaacttcgagctcctagaaaaggaagtggggctggacttgtttttcccaaagcagatgcaggagaacttaaagcccaaacagttccggaagatgatccagcagaccttccagcagtacgcctcgctcagggaggaggagtgcgtcatgaagttcttcaacactctcgccggcttcgccaacatcgaccaggagacctaccgctgtgaactcattcaaggatggaacattactgtggacctggtcattggccctaaagggatccgccagctgactagtcaggacgcaaagcccacctgcctggccgagttcaagcagatcaggtccatcaggtgcctcccgctggaggagggccaggcagtacttcagctgggcattgaaggtgccccccaggccttgtccatcaaaacctcatccctagcagaggctgagaacatggctgacctcatagacggctactgccggctgcagggtgagcaccaaggctctctcatcatccatcctaggaaagatggtgagaagcggaacagcctgccccagatccccatgctaaacctggaggcccggcggtcccacctctcagagagctgcagcatagagtcagacatctacgcagagattcccgacgaaaccctgcgaaggcccggaggtccacagtatggcattgcccgtgaagatgtggtcctgaatcgtattcttggggaaggcttttttggggaggtctatgaaggtgtctacacaaatcacaaaggggagaaaatcaatgtagctgtcaagacctgcaagaaagactgcactctggacaacaaggagaagttcatgagcgaggcagtgatcatgaagaacctcgaccacccgcacatcgtgaagctgatcggcatcattgaagaggagcccacctggatcatcatggaattgtatccctatggggagctgggccactacctggagcggaacaagaactccctgaaggtgctcaccctcgtgctgtactcactgcagatatgcaaagccatggcctacctggagagcatcaactgcgtgcacagggacattgctgtccggaacatcctggtggcctcccctgagtgtgtgaagctgggggactttggtctttcccggtacattgaggacgaggactattacaaagcctctgtgactcgtctccccatcaaatggatgtccccagagtccattaacttccgacgcttcacgacagccagtgacgtctggatgttcgccgtgtgcatgtgggagatcctgagctttgggaagcagcccttcttctggctggagaacaaggatgtcatcggggtgctggagaaaggagaccggctgcccaagcctgatctctgtccaccggtcctttataccctcatgacccgctgctgggactacgaccccagtgaccggccccgcttcaccgagctggtgtgcagcctcagtgacgtttatcagatggagaaggacattgccatggagcaagagaggaatgctcgctaccgaacccccaaaatcttggagcccacagccttccaggaacccccacccaagcccagccgacctaagtacagaccccctccgcaaaccaacctcctggctccaaagctgcagttccaggaggaggacttcatccaacccagcagccgagaagaggcccagcagctgtgggaggctgaaaaggtcaaaatgcggcaaatcctggacaaacagcagaagcagatggtggaggactaccagtggctcaggcaggaggagaagtccctggaccccatggtttatatgaatgataagtccccattgacgccagagaaggaggtcggctacctggagttcacagggcccccacagaagcccccgaggctgggcgcacagtccatccagcccacagctaacctggaccggactgatgacctggtgtacctcaatgtcatggagctggtgcgggccgtgctggagctcaagaatgagctctgtcagctgccccccgagggctacgtggtggtggtgaagaatgtggggctgaccctgcggaagctcatcgggagcgtggatgatctcctgccttccttgccgtcatcttcacggacagagatcgagggcacccagaaactgctcaacaaagacctggcagagctcatcaacaagatgcggctggcacagcagaacgccgtgacctccctaagtgaggagtgcaagaggcagatgctgacggcttcacacaccctggctgtggacgccaagaacctgctcgacgctgtggaccaggccaaggttctggccaatctggcccacccacctgcagagtgacggagggtgggggccacctgcctgcgtcttccgcccctgcctgccatgtacctcccctgccttgctgttggtcatgtgggtcttccagggggaaggccaaggggagtcaccttcccttgccactttgcacgacgccctctccccacccctacccctggctgtactgctcaggctgcagctggacagaggggactctgggctatggacacagggtgacggtgacaaagatggctcagagggggactgctgctgcctggccactgctccctaagccagcctggtccatgcagggggctcctgggggtggggaggtgtcacatggtgcccctagctttatatatggacatggcaggccgatttgggaaccaagctattcctttcccttcctcttcggccctcagatgtcccttgatgcacagagaagctggggaggagctttgttttgggggtcaggcagccagtgagatgagggatgggcctggcattcttgtacagtgtatattgaaatttatttaatgtgagtttggtctggactgacagcatgtgccctcctgagggaggacctggggcacagtccaggaacaagctaattgggagtccaggcacaggatgctgtgttgtcaacaaaccaagcatcagggggaagaagcagagagatgcggccaagataggaccttgggccaaatccgctctcttcctgcccctctttctctttcttcctttactttcccttgcttttccctcttttcttactcctcctctttctctccccaacccccattctcatctgcacccttcttttctcatgtgtttgcataaacattcttttaacttctttctatttgacttgtggttgaattaaaattgtcccatttgc

SEQ ID NO: 249722 - DNA, 3936 bp, Artificial Sequence
  derived and/or modified sequence
ccacagcctccggagccgttgcacacctacctgcccggccgacttacctgtacttgccgccgtcccggctcacctggcggtgcccgaggagtagtcgctggagtccgcgcctccctgggactgcaatgtgccgatcttagctgctgcctgagaggatgtctggggtgtccgagcccctgagtcgagtaaagttgggcacgttacgccggcctgaaggccctgcagagcccatggtggtggtaccagtagatgtggaaaaggaggacgtgcgtatcctcaaggtctgcttctatagcaacagcttcaatcctgggaaaaacttcaaactggtcaaatgcactgtccagacggagatccgggagatcatcacctccatcctgctgagcgggcggatcgggcccaacatccggttggctgagtgctatgggctgaggctgaagcacatgaagtccgatgagatccactggctgcacccacagatgacggtgggtgaggtgcaggacaagtatgagtgtctgcacgtggaagccgagtggaggtatgaccttcaaatccgctacttgccagaagacttcatggagagcctgaaggaggacaggaccacgctgctctatttttaccaacagctccggaacgactacatgcagcgctacgccagcaaggtcagcgagggcatggccctgcagctgggctgcctggagctcaggcggttcttcaaggatatgccccacaatgcacttgacaagaagtccaacttcgagctcctagaaaaggaagtggggctggacttgtttttcccaaagcagatgcaggagaacttaaagcccaaacagttccggaagatgatccagcagaccttccagcagtacgcctcgctcagggaggaggagtgcgtcatgaagttcttcaacactctcgccggcttcgccaacatcgaccaggagacctaccgctgtgaactcattcaaggatggaacattactgtggacctggtcattggccctaaagggatccgccagctgactagtcaggacgcaaagcccacctgcctggccgagttcaagcagatcaggtccatcaggtgcctcccgctggaggagggccaggcagtacttcagctgggcattgaaggtgccccccaggccttgtccatcaaaacctcatccctagcagaggctgagaacatggctgacctcatagacggctactgccggctgcagggtgagcaccaaggctctctcatcatccatcctaggaaagatggtgagaagcggaacagcctgccccagatccccatgctaaacctggaggcccggcggtcccacctctcagagagctgcagcatagagtcagacatctacgcagagattcccgacgaaaccctgcgaaggcccggaggtccacagtatggcattgcccgtgaagatgtggtcctgaatcgtattcttggggaaggcttttttggggaggtctatgaaggtgtctacacaaatcacaaaggggagaaaatcaatgtagctgtcaagacctgcaagaaagactgcactctggacaacaaggagaagttcatgagcgaggcagtgatcatgaagaacctcgaccacccgcacatcgtgaagctgatcggcatcattgaagaggagcccacctggatcatcatggaattgtatccctatggggagctgggccactacctggagcggaacaagaactccctgaaggtgctcaccctcgtgctgtactcactgcagatatgcaaagccatggcctacctggagagcatcaactgcgtgcacagggacattgctgtccggaacatcctggtggcctcccctgagtgtgtgaagctgggggactttggtctttcccggtacattgaggacgaggactattacaaagcctctgtgactcgtctccccatcaaatggatgtccccagagtccattaacttccgacgcttcacgacagccagtgacgtctggatgttcgccgtgtgcatgtgggagatcctgagctttgggaagcagcccttcttctggctggagaacaaggatgtcatcggggtgctggagaaaggagaccggctgcccaagcctgatctctgtccaccggtcctttataccctcatgacccgctgctgggactacgaccccagtgaccggccccgcttcaccgagctggtgtgcagcctcagtgacgtttatcagatggagaaggacattgccatggagcaagagaggaatgctcgctaccgaacccccaaaatcttggagcccacagccttccaggaacccccacccaagcccagccgacctaagtacagaccccctccgcaaaccaacctcctggctccaaagctgcagttccaggaggaggacttcatccaacccagcagccgagaagaggcccagcagctgtgggaggctgaaaaggtcaaaatgcggcaaatcctggacaaacagcagaagcagatggtggaggactaccagtggctcaggcaggaggagaagtccctggaccccatggtttatatgaatgataagtccccattgacgccagagaaggaggtcggctacctggagttcacagggcccccacagaagcccccgaggctgggcgcacagtccatccagcccacagctaacctggaccggactgatgacctggtgtacctcaatgtcatggagctggtgcgggccgtgctggagctcaagaatgagctctgtcagctgccccccgagggctacgtggtggtggtgaagaatgtggggctgaccctgcggaagctcatcgggagcgtggatgatctcctgccttccttgccgtcatcttcacggacagagatcgagggcacccagaaactgctcaacaaagacctggcagagctcatcaacaagatgcggctggcacagcagaacgccgtgacctccctaagtgaggagtgcaagaggcagatgctgacggcttcacacaccctggctgtggacgccaagaacctgctcgacgctgtggaccaggccaaggttctggccaatctggcccacccacctgcagagtgacggagggtgggggccacctgcctgcgtcttccgcccctgcctgccatgtacctcccctgccttgctgttggtcatgtgggtcttccagggggaaggccaaggggagtcaccttcccttgccactttgcacgacgccctctccccacccctacccctggctgtactgctcaggctgcagctggacagaggggactctgggctatggacacagggtgacggtgacaaagatggctcagagggggactgctgctgcctggccactgctccctaagccagcctggtccatgcagggggctcctgggggtggggaggtgtcacatggtgcccctagctttatatatggacatggcaggccgatttgggaaccaagctattcctttcccttcctcttcggccctcagatgtcccttgatgcacagagaagctggggaggagctttgttttgggggtcaggcagccagtgagatgagggatgggcctggcattcttgtacagtgtatattgaaatttatttaatgtgagtttggtctggactgacagcatgtgccctcctgagggaggacctggggcacagtccaggaacaagctaattgggagtccaggcacaggatgctgtgttgtcaacaaaccaagcatcagggggaagaagcagagagatgcggccaagataggaccttgggccaaatccgctctcttcctgcccctctttctctttcttcctttactttcccttgcttttccctcttttcttactcctcctctttctctccccaacccccattctcatctgcacccttcttttctcatgtgtttgcataaacattcttttaacttctttctatttgacttgtggttgaattaaaattgtcccatttgc

SEQ ID NO: 249723 - DNA, 3914 bp, Artificial Sequence
  derived and/or modified sequence
tctgtcttggagctcggtgggtgctgtccctggggccatgaggtatgtgggcctgtgtggggctctttcagggctgaccctctgctgtctctgcaggactgcaatgtgccgatcttagctgctgcctgagaggatgtctggggtgtccgagcccctgagtcgagtaaagttgggcacgttacgccggcctgaaggccctgcagagcccatggtggtggtaccagtagatgtggaaaaggaggacgtgcgtatcctcaaggtctgcttctatagcaacagcttcaatcctgggaaaaacttcaaactggtcaaatgcactgtccagacggagatccgggagatcatcacctccatcctgctgagcgggcggatcgggcccaacatccggttggctgagtgctatgggctgaggctgaagcacatgaagtccgatgagatccactggctgcacccacagatgacggtgggtgaggtgcaggacaagtatgagtgtctgcacgtggaagccgagtggaggtatgaccttcaaatccgctacttgccagaagacttcatggagagcctgaaggaggacaggaccacgctgctctatttttaccaacagctccggaacgactacatgcagcgctacgccagcaaggtcagcgagggcatggccctgcagctgggctgcctggagctcaggcggttcttcaaggatatgccccacaatgcacttgacaagaagtccaacttcgagctcctagaaaaggaagtggggctggacttgtttttcccaaagcagatgcaggagaacttaaagcccaaacagttccggaagatgatccagcagaccttccagcagtacgcctcgctcagggaggaggagtgcgtcatgaagttcttcaacactctcgccggcttcgccaacatcgaccaggagacctaccgctgtgaactcattcaaggatggaacattactgtggacctggtcattggccctaaagggatccgccagctgactagtcaggacgcaaagcccacctgcctggccgagttcaagcagatcaggtccatcaggtgcctcccgctggaggagggccaggcagtacttcagctgggcattgaaggtgccccccaggccttgtccatcaaaacctcatccctagcagaggctgagaacatggctgacctcatagacggctactgccggctgcagggtgagcaccaaggctctctcatcatccatcctaggaaagatggtgagaagcggaacagcctgccccagatccccatgctaaacctggaggcccggcggtcccacctctcagagagctgcagcatagagtcagacatctacgcagagattcccgacgaaaccctgcgaaggcccggaggtccacagtatggcattgcccgtgaagatgtggtcctgaatcgtattcttggggaaggcttttttggggaggtctatgaaggtgtctacacaaatcacaaaggggagaaaatcaatgtagctgtcaagacctgcaagaaagactgcactctggacaacaaggagaagttcatgagcgaggcagtgatcatgaagaacctcgaccacccgcacatcgtgaagctgatcggcatcattgaagaggagcccacctggatcatcatggaattgtatccctatggggagctgggccactacctggagcggaacaagaactccctgaaggtgctcaccctcgtgctgtactcactgcagatatgcaaagccatggcctacctggagagcatcaactgcgtgcacagggacattgctgtccggaacatcctggtggcctcccctgagtgtgtgaagctgggggactttggtctttcccggtacattgaggacgaggactattacaaagcctctgtgactcgtctccccatcaaatggatgtccccagagtccattaacttccgacgcttcacgacagccagtgacgtctggatgttcgccgtgtgcatgtgggagatcctgagctttgggaagcagcccttcttctggctggagaacaaggatgtcatcggggtgctggagaaaggagaccggctgcccaagcctgatctctgtccaccggtcctttataccctcatgacccgctgctgggactacgaccccagtgaccggccccgcttcaccgagctggtgtgcagcctcagtgacgtttatcagatggagaaggacattgccatggagcaagagaggaatgctcgctaccgaacccccaaaatcttggagcccacagccttccaggaacccccacccaagcccagccgacctaagtacagaccccctccgcaaaccaacctcctggctccaaagctgcagttccaggaggaggacttcatccaacccagcagccgagaagaggcccagcagctgtgggaggctgaaaaggtcaaaatgcggcaaatcctggacaaacagcagaagcagatggtggaggactaccagtggctcaggcaggaggagaagtccctggaccccatggtttatatgaatgataagtccccattgacgccagagaaggaggtcggctacctggagttcacagggcccccacagaagcccccgaggctgggcgcacagtccatccagcccacagctaacctggaccggactgatgacctggtgtacctcaatgtcatggagctggtgcgggccgtgctggagctcaagaatgagctctgtcagctgccccccgagggctacgtggtggtggtgaagaatgtggggctgaccctgcggaagctcatcgggagcgtggatgatctcctgccttccttgccgtcatcttcacggacagagatcgagggcacccagaaactgctcaacaaagacctggcagagctcatcaacaagatgcggctggcacagcagaacgccgtgacctccctaagtgaggagtgcaagaggcagatgctgacggcttcacacaccctggctgtggacgccaagaacctgctcgacgctgtggaccaggccaaggttctggccaatctggcccacccacctgcagagtgacggagggtgggggccacctgcctgcgtcttccgcccctgcctgccatgtacctcccctgccttgctgttggtcatgtgggtcttccagggggaaggccaaggggagtcaccttcccttgccactttgcacgacgccctctccccacccctacccctggctgtactgctcaggctgcagctggacagaggggactctgggctatggacacagggtgacggtgacaaagatggctcagagggggactgctgctgcctggccactgctccctaagccagcctggtccatgcagggggctcctgggggtggggaggtgtcacatggtgcccctagctttatatatggacatggcaggccgatttgggaaccaagctattcctttcccttcctcttcggccctcagatgtcccttgatgcacagagaagctggggaggagctttgttttgggggtcaggcagccagtgagatgagggatgggcctggcattcttgtacagtgtatattgaaatttatttaatgtgagtttggtctggactgacagcatgtgccctcctgagggaggacctggggcacagtccaggaacaagctaattgggagtccaggcacaggatgctgtgttgtcaacaaaccaagcatcagggggaagaagcagagagatgcggccaagataggaccttgggccaaatccgctctcttcctgcccctctttctctttcttcctttactttcccttgcttttccctcttttcttactcctcctctttctctccccaacccccattctcatctgcacccttcttttctcatgtgtttgcataaacattcttttaacttctttctatttgacttgtggttgaattaaaattgtcccatttgc

SEQ ID NO: 249724 - protein, 141 aa, Artificial Sequence
  derived and/or modified sequence
MAGEEINEDYPVEIHEYLSAFENSIGAVDEMLKTMMSVSRNELLQKLDPLEQAKVDLVSAYTLNSMFWVYLATQGVNPKEHPVKQELERIRVYMNRVKEITDKKKAGKLDRGAASRFVKNALWEPKSKNASKVANKGKSKS

SEQ ID NO: 249725 - protein, 180 aa, Artificial Sequence
  derived and/or modified sequence
MPSPSVSTSAASVLEGVCGRARSTYRTPEEGEEQSWSAIMAGEEINEDYPVEIHEYLSAFENSIGAVDEMLKTMMSVSRNELLQKLDPLEQAKVDLVSAYTLNSMFWVYLATQGVNPKEHPVKQELERIRVYMNRVKEITDKKKAGKLDRGAASRFVKNALWEPKSKNASKVANKGKSKS

SEQ ID NO: 249726 - DNA, 426 bp, Artificial Sequence
  derived and/or modified sequence
atggccggtgaggagatcaatgaggactatcccgtagagattcacgaatacctgtccgcttttgagaatagcataggcgccgtcgatgaaatgctgaagactatgatgtcagttagccgcaatgagctgctgcaaaagttggaccctttggagcaggccaaagtcgacttggtatccgcatacaccctcaattctatgttttgggtgtacctggccacgcagggggtgaacccaaaagagcatcctgtgaaacaggaactggagcgaattcgagtctatatgaatagagtgaaggaaatcacagacaagaagaaagcgggaaagctggatagaggcgccgcatcaagattcgtgaagaatgcgctctgggagccgaaatccaagaatgcatctaaagtggctaacaaaggtaaaagcaagagctag

SEQ ID NO: 249727 - DNA, 543 bp, Artificial Sequence
  derived and/or modified sequence
atgcccagcccgagcgtgtcaacatccgcagccagcgtgcttgaaggggtttgtggacgagcaagatccacataccggacgccagaagagggcgaggaacagagttggagcgccatcatggctggcgaggagattaacgaagactatccggtggaaatccacgaatatctgagcgctttcgagaacagcattggcgctgttgacgaaatgctgaagactatgatgagcgtaagtcgaaatgaacttctgcagaagctggatccgttagagcaggcaaaagtagacttagtctcagcctacaccctcaattctatgttttgggtgtacttggcgacccagggcgtcaatccgaaggagcatccagtgaagcaggagctggagaggatccgcgtgtacatgaatcgtgtgaaggagatcacagataaaaaaaaggctgggaaactcgatcggggcgccgcgagccggtttgtcaaaaatgcgctgtgggagccaaaaagtaaaaacgctagcaaagtggccaacaaaggcaagagtaaatcctag

SEQ ID NO: 249728 - DNA, 426 bp, Artificial Sequence
  derived and/or modified sequence
atggcaggcgaagagataaacgaggattatcccgttgagatccatgaatatctcagcgcattcgaaaattctatcggtgccgtggacgagatgttaaaaaccatgatgagtgtgtcacggaatgagctgctgcagaagctggatcccttggaacaggcaaaggtggatctggtatccgcctacactctgaacagcatgttttgggtatacctagctactcagggagtaaatcctaaagaacacccggtcaaacaggaattggagcgcatccgtgtgtatatgaatcgtgtgaaggagataactgacaaaaaaaaggccgggaagttggataggggcgccgctagccgtttcgttaagaacgccctatgggagccgaaatccaagaatgcctctaaagtcgctaataaaggaaagtccaagtcctag

SEQ ID NO: 249729 - DNA, 426 bp, Artificial Sequence
  derived and/or modified sequence
atggcgggcgaggagatcaacgaagattatcccgtcgagatccacgagtacctgtctgcttttgaaaatagcattggcgctgtggatgagatgctgaagaccatgatgagtgtatccaggaatgagctcctgcagaaactagatcccctagaacaggcgaaggtggacctggtgtctgcgtatacacttaattctatgttttgggtttatctcgctactcagggggtcaatcccaaggagcaccccgtgaaacaggaattggaaagaatacgagtctacatgaaccgagtgaaggaaattacggacaagaaaaaggccgggaaactggatagaggcgccgcgagcaggtttgtgaaaaacgcactgtgggagcccaagtccaaaaacgcctctaaggtggctaataagggtaagtccaagtcatag

SEQ ID NO: 249730 - DNA, 426 bp, Artificial Sequence
  derived and/or modified sequence
atggccggggaggagatcaatgaagactaccctgtggagatccacgagtacctgagcgcctttgagaacagcattggagctgtggatgagatgctgaagaccatgatgtctgtgtccagaaatgagctgctgcagaagctggaccccctggagcaggccaaggtggacctggtgtctgcctacaccctgaacagcatgttctgggtgtacctggccacccagggcgtgaaccccaaggagcaccctgtgaagcaggagctggagcgcatccgggtgtacatgaacagagtgaaggagatcacagacaagaagaaggccggcaagctggacagaggagctgccagcagatttgtgaagaatgccctgtgggagcccaagagcaagaatgccagcaaggtggccaacaagggcaagagcaagagctag

SEQ ID NO: 249731 - DNA, 543 bp, Artificial Sequence
  derived and/or modified sequence
atgcccagccccagcgtgtccaccagcgctgcctctgtgctggagggcgtgtgtggccgggcccggagcacctaccgcaccccagaggagggggaggagcagagctggagcgccatcatggccggggaggagatcaatgaagactaccctgtggagatccacgagtacctgagcgcctttgaaaattccatcggggctgtggatgagatgctgaagaccatgatgtctgtgtccagaaatgagctgctgcagaagctggaccccctggagcaggccaaggtggacctggtgtctgcctacaccctgaacagcatgttctgggtgtacctggccacccagggcgtgaaccccaaggagcaccctgtgaagcaggagctggagcgcatccgggtgtacatgaacagagtgaaggagatcacagacaagaagaaggccggcaagctggacagaggagctgccagcagatttgtgaagaatgccctgtgggagcccaagagcaagaatgccagcaaggtggccaacaagggcaagagcaagagctag

SEQ ID NO: 249732 - DNA, 426 bp, Artificial Sequence
  derived and/or modified sequence
atggccggcgaggagatcaacgaggactaccccgtggagatccacgagtacttaagtgcttttgaaaatagcattggcgctgtggatgaaatgctgaagactatgatgtctgtgagtcgcaacgagctcctgcagaagctggatcctctcgagcaggccaaagtggatctggtttccgcctacactctgaattctatgttctgggtgtatttggctacacagggcgtgaatcccaaggaacatcctgtcaagcaggaattggagcgcattagagtctatatgaatagagtcaaggagataacagacaagaagaaggctggaaagctggatcgaggggccgctagtaggtttgtgaagaacgccctgtgggagcctaaatctaagaacgcaagtaaggtagccaacaagggcaagagcaaatcttag

SEQ ID NO: 249733 - DNA, 543 bp, Artificial Sequence
  derived and/or modified sequence
atgcccagccccagcgtgagcaccagcgccgccagcgtgctggagggcgtatgtggaagggccagaagtacctaccggactcccgaagagggcgaggaacaaagttggagtgcaatcatggctggggaagagatcaatgaggactatccagtcgaaatccacgaatatttgagtgctttcgagaacagcataggcgcagtggacgagatgctcaagaccatgatgtcagtctcaaggaacgaactgttgcagaagctcgatccacttgagcaggctaaggttgatcttgtctctgcctatactttaaatagcatgttctgggtctaccttgccacacagggggttaacccgaaagagcaccctgttaaacaggagctcgagcgtatccgggtgtacatgaatagagtgaaggagatcaccgacaaaaagaaagccggaaaactggatcggggcgctgcctctcgttttgtaaaaaatgccctctgggagccaaaatccaaaaacgcctctaaagtggccaacaagggcaaaagcaaaagctag

SEQ ID NO: 249734 - DNA, 426 bp, Artificial Sequence
  derived and/or modified sequence
atggccggcgaggagatcaacgaggactaccccgtggagatccacgagtatctgtccgccttcgaaaactctataggagcagtcgacgagatgctgaaaacgatgatgtccgtaagtagaaacgagctcctccaaaagctcgaccctctggaacaggctaaggtagacctggtgtctgcatatacccttaattccatgttctgggtgtatctggctacccaaggcgtcaatcccaaggagcatccggtgaagcaggaactcgagcggattagggtctatatgaatcgggtcaaagagattacagacaaaaaaaaggcgggcaaattggacagaggagccgccagcaggttcgtgaaaaatgccttgtgggagccgaagtccaaaaatgcgtctaaagtcgctaacaaaggtaaaagcaagagttag

SEQ ID NO: 249735 - DNA, 426 bp, Artificial Sequence
  derived and/or modified sequence
atggccggcgaggagatcaacgaggactaccccgtggagatccacgaatatctgagtgcattcgaaaactcaattggagctgtggacgagatgctaaagaccatgatgagtgtttctcggaatgagctgcttcagaaactggatcccttggaacaggccaaagtggacctggtctcagcctatactctcaactcgatgttctgggtgtatttagcgacacaaggcgtcaaccctaaggaacaccccgtgaagcaggaactcgagagaatcagagtctacatgaacagggtcaaagagattaccgataaaaagaaagccggaaagctggaccgaggcgccgccagcaggtttgttaaaaacgccctttgggagcccaaaagcaaaaatgcctccaaagtcgcaaacaaggggaaaagcaaatcttag

SEQ ID NO: 249736 - DNA, 426 bp, Artificial Sequence
  derived and/or modified sequence
atggccggtgaagagattaacgaggattatcccgttgagattcatgagtacttgagtgcctttgagaactctatcggtgccgtcgacgagatgctgaaaacaatgatgtccgtgtccagaaacgagttgctccaaaaactagatcccctggaacaagccaaggttgacctggtcagcgcctatacactgaatagcatgttttgggtgtacctggcaacacagggcgtaaatccgaaggaacaccccgtgaaacaagaactcgagcgcattcgcgtgtacatgaatcgcgtaaaggagatcactgataagaaaaaagctggcaagcttgacagaggcgctgcctcccgcttcgtgaagaacgctctgtgggaaccgaaatcaaaaaatgcaagtaaagtcgccaacaagggcaaaagtaagagttag

SEQ ID NO: 249737 - DNA, 543 bp, Artificial Sequence
  derived and/or modified sequence
atgcccagtccttctgtgtcaaccagcgcagccagtgtgctggagggtgtttgcggcagagcccgttctacataccgtactccagaagagggagaagagcagtcgtggagcgccataatggctggcgaggagatcaatgaagattaccccgtggaaattcacgagtacctgtccgcattcgaaaattcgatcggagcagtggacgagatgctgaaaaccatgatgagtgtgtctcgcaatgagcttctgcaaaagctggaccctctggaacaggccaaggtggatctggtgtctgcctacacattaaactctatgttctgggtgtacctcgccacccagggggtaaatccaaaagaacaccctgtcaaacaggaactggagagaatcagggtatatatgaaccgagtcaaagagatcaccgataaaaagaaggcaggcaaactggatcggggtgcagcctcgcgatttgtgaagaacgcattgtgggaacctaagagcaaaaatgcctcaaaagtagcaaataagggaaaaagtaaaagttag

SEQ ID NO: 249738 - DNA, 426 bp, Artificial Sequence
  derived and/or modified sequence
atggccggagaggagatcaacgaagactaccccgtggagatccacgagtatcttagtgcctttgaaaattctattggcgctgtggacgaaatgctgaagacaatgatgtccgtgagcagaaatgaactccttcagaaattagacccactcgaacaagcaaaagtcgatctggtgtcagcctacactcttaattccatgttctgggtttatttagcgactcagggcgtaaaccctaaagaacacccagtcaagcaggagttagagcgaattcgcgtgtacatgaatcgggtgaaggagattacagataagaagaaggctggaaaactggacagaggcgctgcctcccggtttgtgaagaatgctttgtgggagccaaaatccaaaaatgctagcaaagtcgccaataaggggaagtcaaagtcgtag

SEQ ID NO: 249739 - DNA, 426 bp, Artificial Sequence
  derived and/or modified sequence
atggccggagaggagattaacgaggattacccagtggaaatccatgagtatctgagtgcctttgagaacagtattggcgcagtggacgagatgctgaagacgatgatgtcagtgtctcggaacgagttgcttcagaaactcgaccctttggagcaggccaaggtggaccttgtgagcgcatacaccctgaactccatgttctgggtctacctagcaacccagggagttaaccccaaggagcatccagtcaagcaggaacttgagcgaatcagagtctacatgaatagagtcaaagaaattacagataaaaagaaagccggaaagctggacagaggagcagcctctcgatttgtgaagaacgcattatgggagccaaagagcaaaaacgcgtccaaggtcgctaataagggcaagtccaagagctag

SEQ ID NO: 249740 - DNA, 2233 bp, Artificial Sequence
  derived and/or modified sequence
gggagactggagtcgaaggccgtgaggtatttttctaagtcagccataatggcaggtgaagaaattaatgaagactatccagtagaaattcacgagtatttgtcagcgtttgagaattccattggtgctgtggatgagatgctgaagaccatgatgtctgtttctagaaatgagttgttgcagaagttggatccacttgaacaagcaaaagtggatttggtttctgcatacacattaaattcaatgttttgggtttatttggcaacccaaggagttaatcctaaggaacatccagtaaaacaggaattggaaagaatcagagtatatatgaacagagtcaaggaaataacagacaagaaaaaggctggcaagctggacagaggtgcagcttcaagatttgtaaaaaatgccctctgggaaccaaaatcgaaaaatgcatcaaaagttgccaataaaggaaaaagtaaaagttaactttttggttttgatgtacacatattcaaaaagtacatcttcccccccccccccccccccgcaaaataattctgtggcagggcaaggtttaaatgtgtttcttattaatatgtaaattcacagtaaatatgtaaagctaaatactttcctctccaaagatcattatctttattgattagcactgaggattttaacattgtgatatattatatatttataatttaccatctcttgatgagactcttatttctttatataggtcagtcttgcaagtaccattttataagcagctgtgaaatttaagtgaaatgttctttgtaaacatttgtactattttaaatgaataatgaccttatgaagtatgctatctgtaggctgaaattataggtacatctgttttcactatatgatattaagaaagcgtgaaatgacttaaatgttcatttttttctgtatagatactttatcatgttttcatgattttaggaattactgctttgttgatattcaaagtgtgaaactaaaactttatggttgtactttaattcttggcatgttgcctctatgtcccatttaaaataaaatacattctcattaactttagatgggaaataaggttgtatgttgatggatgaattttggcatgatgactgtactctcaataaaggctgaaaatgttgtataactgacctgtgtatttttatcttttgagtaaatttgccttccaaattaggaagataggttttagaagtcatcacaaatagagaaattcttgagtttttgttcctgatgcatggtgtccacagttcttttcatctcattttttttcagattttttttatttcatgtttttgaggctgtatcaagtacatacaagtgttttggaacaacttcttaagttacctaatgccacttaagcagatgagaagtccaaaggagattacactgtgtttgtattgtggtttatttttctggaatattagttacagagagtactacatagtaaacctttttttaaatgtctaagcccatgaattttaattatatgcccttaatgctttcagtgtttgaatccatatcattatgtgtaggaatgccaagtatagtaaagtactttaatttttgaaaaaggagttgttaaaattttctgtgtgattaattctccataagtaaccttgaataaatggatttcttgatttatgatagcagatattggaaatggtcttaaaatgtaatggattttgtaaagcatgttgaactctttctatgacacatgaagaggaagtcactgatagacgcagaaggtcttttctgtctctgatgtcagtttttgaagtggaagaacattagtgaacatttatagttattttactcctttttttgcctttgtctccaaatttctagctatttttaaaaataacctcttcatgagagaaatgtgttactgttaagatcaagtgtagtgtacctgtctttgtgttatttattgcaaagaaatttatttggatttctgtatattttctaatttcataaaagaaaaacagcttaaatgaaaaatgttatacaattgcagaaaatcattattggttttagctaagttattggtttatgaaagtgcacctctacgttctgttaaattgtgtaacttttaagtgagtaattctttcattattaggtagaaataaaagtttgagtatattccattttattatgtataattttaaatacttagcacgtaataaggagctgaatggctgta

SEQ ID NO: 249741 - DNA, 1379 bp, Artificial Sequence
  derived and/or modified sequence
ggagactggagtcgaaggccgtgaggtatttttctaagtgagaggaaggactgagtggcagtaacatctgttagggttactgggcagcatccccgcaacccaggtactcagtctcagccacaccttactgagtggtgaagagaagcaagttttctcatgccctctccgtctgtctctacctctgcagccagtgttttagaaggagtatgtggaagggcaaggagtacctatagaaccccggaggagggtgaggagcagagctggtcagccataatggcaggtgaagaaattaatgaagactatccagtagaaattcacgagtatttgtcagcgtttgagaattccattggtgctgtggatgagatgctgaagaccatgatgtctgtttctagaaatgagttgttgcagaagttggatccacttgaacaagcaaaagtggatttggtttctgcatacacattaaattcaatgttttgggtttatttggcaacccaaggagttaatcctaaggaacatccagtaaaacaggaattggaaagaatcagagtatatatgaacagagtcaaggaaataacagacaagaaaaaggctggcaagctggacagaggtgcagcttcaagatttgtaaaaaatgccctctgggaaccaaaatcgaaaaatgcatcaaaagttgccaataaaggaaaaagtaaaagttaactttttggttttgatgtacacatattcaaaaagtacatcttcccccccccccccccccccgcaaaataattctgtggcagggcaaggtttaaatgtgtttcttattaatatgtaaattcacagtaaatatgtaaagctaaatactttcctctccaaagatcattatctttattgattagcactgaggattttaacattgtgatatattatatatttataatttaccatctcttgatgagactcttatttctttatataggtcagtcttgcaagtaccattttataagcagctgtgaaatttaagtgaaatgttctttgtaaacatttgtactattttaaatgaataatgaccttatgaagtatgctatctgtaggctgaaattataggtacatctgttttcactatatgatattaagaaagcgtgaaatgacttaaatgttcatttttttctgtatagatactttatcatgttttcatgattttaggaattactgctttgttgatattcaaagtgtgaaactaaaactttatggttgtactttaattcttggcatgttgcctctatgtcccatttaaaataaaatacattctcattaactttagatgggaaataaggttgtatgttgatggatgaattttggcatgatgactgtactctcaataaaggctgaaaatgttg

SEQ ID NO: 249742 - DNA, 772 bp, Artificial Sequence
  derived and/or modified sequence
tcgtcatcgttgcccgaccgctttccgggagactggagtcgaaggccgtgagccagtgttttagaaggagtatgtggaagggcaaggagtacctatagaaccccggaggagggtgaggagcagagctggccataatggcaggtgaagaaattaatgaagactatccagtagaaattcacgagtatttgtcagcgtttgagaattccattggtgctgtggatgagatgctgaagaccatgatgtctgtttctagaaatgagttgttgcagaagttggatccacttgaacaagcaaaagtggatttggtttctgcatacacattaaattcaatgttttgggtttatttggcaacccaaggagttaatcctaaggaacatccagtaaaacaggaattggaaagaatcagagtatatatgaacagagtcaaggaaataacagacaagaaaaaggctggcaagctggacagaggtgcagcttcaagatttgtaaaaaatgccctctgggaaccaaaatcgaaaaatgcatcaaaagttgccaataaaggaaaaagtaaaagttaactttttggttttgatgtacacatattcaaaaagtacatcttcccccccccccccccccccgcaaaataattctgtggcagggcaaggtttaaatgtgtttcttattaatatgtaaattcacagtaaatatgtaaagctaaatactttcctctccaaagatcattatctttattgattagcactgaggattttaacattgtgatatattatat

SEQ ID NO: 249743 - DNA, 736 bp, Artificial Sequence
  derived and/or modified sequence
agccggcgcgtcattgtcgtcatcgttgcccgaccgctttccgggagactggagtcgaaggccgtgagtcagccataatggcaggtgaagaaattaatgaagactatccagtagaaattcacgagtatttgtcagcgtttgagaattccattggtgctgtggatgagatgctgaagaccatgatgtctgtttctagaaatgagttgttgcagaagttggatccacttgaacaagcaaaagtggatttggtttctgcatacacattaaattcaatgttttgggtttatttggcaacccaaggagttaatcctaaggaacatccagtaaaacaggaattggaaagaatcagagtatatatgaacagagtcaaggaaataacagacaagaaaaaggctggcaagctggacagaggtgcagcttcaagatttgtaaaaaatgccctctgggaaccaaaatcgaaaaatgcatcaaaagttgccaataaaggaaaaagtaaaagttaactttttggttttgatgtacacatattcaaaaagtacatcttcccccccccccccccccccgcaaaataattctgtggcagggcaaggtttaaatgtgtttcttattaatatgtaaattcacagtaaatatgtaaagctaaatactttcctctccaaagatcattatctttattgattagcactgaggattttaacattgtgatatattatatatttataatttaccatctctt

SEQ ID NO: 249744 - DNA, 426 bp, Artificial Sequence
  derived and/or modified sequence
atggccggcgaggagatcaacgaggactaccccgtggagatccacgagtacctgagcgccttcgagaacagcatcggcgccgtggacgagatgctgaagaccatgatgagcgtgagcagaaacgagctgctgcagaagctggaccccctggagcaggccaaggtggacctggtgagcgcctacaccctgaacagcatgttctgggtgtacctggccacccagggcgtgaaccccaaggagcaccccgtgaagcaggagctggagagaatcagagtgtacatgaacagagtgaaggagatcaccgacaagaagaaggccggcaagctggacagaggcgccgccagcagattcgtgaagaacgccctgtgggagcccaagagcaagaacgccagcaaggtggccaacaagggcaagagcaagagctag

SEQ ID NO: 249745 - DNA, 543 bp, Artificial Sequence
  derived and/or modified sequence
atgcccagccccagcgtgagcaccagcgccgccagcgtgctggagggcgtgtgcggcagagccagaagcacctacagaacccccgaggagggcgaggagcagagctggagcgccatcatggccggcgaggagatcaacgaggactaccccgtggagatccacgagtacctgagcgccttcgagaacagcatcggcgccgtggacgagatgctgaagaccatgatgagcgtgagcagaaacgagctgctgcagaagctggaccccctggagcaggccaaggtggacctggtgagcgcctacaccctgaacagcatgttctgggtgtacctggccacccagggcgtgaaccccaaggagcaccccgtgaagcaggagctggagagaatcagagtgtacatgaacagagtgaaggagatcaccgacaagaagaaggccggcaagctggacagaggcgccgccagcagattcgtgaagaacgccctgtgggagcccaagagcaagaacgccagcaaggtggccaacaagggcaagagcaagagctag

SEQ ID NO: 249746 - protein, 157 aa, Artificial Sequence
  derived and/or modified sequence
MNPQREAAPKSYAIRDSRQMVWVLSGNSLIAAPLSRSIKPVTLHLIACRDTEFSDKEKGNMVYLGIKGKDLCLFCAEIQGKPTLQLKEKNIMDLYVEKKAQKPFLFFHNKEGSTSVFQSVSYPGWFIATSTTSGQPIFLTKERGITNNTNFYLDSVE

SEQ ID NO: 249747 - DNA, 474 bp, Artificial Sequence
  derived and/or modified sequence
atgaacccccagagagaggccgcccccaagagctacgccatcagagacagcagacagatggtgtgggtgctgagcggcaacagcctgatcgccgcccccctgagcagaagcatcaagcccgtgaccctgcacctgatcgcctgcagagacaccgagttcagcgacaaggagaagggcaacatggtgtacctgggcatcaagggcaaggacctgtgcctgttctgcgccgagatccagggcaagcccaccctgcagctgaaggagaagaacatcatggacctgtacgtggagaagaaggcccagaagcccttcctgttcttccacaacaaggagggcagcaccagcgtgttccagagcgtgagctaccccggctggttcatcgccaccagcaccaccagcggccagcccatcttcctgaccaaggagagaggcatcaccaacaacaccaacttctacctggacagcgtggagtag

SEQ ID NO: 249748 - DNA, 474 bp, Artificial Sequence
  derived and/or modified sequence
atgaatccgcagagggaggccgcccctaaatcgtacgcaatccgcgatagtcgacagatggtatgggtgcttagtggaaatagcttaattgctgcacctctgtctaggagcatcaagcccgtgacattacacctcatcgcatgtagggataccgaattcagcgataaagaaaaagggaatatggtgtatctggggatcaaggggaaggacctgtgcctattctgtgctgaaattcaggggaaacccacgctccagctaaaggaaaaaaacattatggacctgtacgtcgagaaaaaagcacaaaagccatttctgttcttccacaataaagagggctctacctctgtattccagtctgtaagttaccccggatggtttatcgccacctccaccactagtggccagccaatctttttgaccaaggagaggggaataacaaataacacaaacttttacctggacagtgttgaatag

SEQ ID NO: 249749 - DNA, 474 bp, Artificial Sequence
  derived and/or modified sequence
atgaacccccagcgggaggccgcccccaagagctatgccatccgggacagccggcagatggtgtgggtgctgagcggcaacagcctgattgctgcccccctgagccgcagcatcaagcctgtgaccctgcacctgattgcctgccgggacacagagttcagtgacaaggagaagggcaacatggtgtacctgggcatcaagggcaaggacctgtgcctcttctgtgccgagatccagggcaagcccaccctgcagctgaaggagaagaacatcatggacctgtatgtggagaagaaggcccagaagcccttcctgttcttccacaacaaggagggcagcacctctgtgttccagagcgtgtcctacccaggctggttcatcgccaccagcaccaccagcggccagcccatcttcctgaccaaggagcggggcatcaccaacaacaccaacttctacctggacagcgtggagtag

SEQ ID NO: 249750 - DNA, 474 bp, Artificial Sequence
  derived and/or modified sequence
atgaacccccagcgggaggccgcccccaagagctacgccatccgggacagtcggcagatggtctgggttctgagcggcaattcactgattgcggccccgctgtcaaggtcgatcaaacctgtgactctgcacttgattgcctgcagagatacagagttcagcgataaggagaaggggaatatggtctacctcgggatcaagggcaaagacctgtgcctgttctgtgccgaaatccagggtaagcctaccttgcaattaaaagaaaaaaacatcatggatttgtatgtcgagaagaaagctcagaagccgtttctatttttccacaataaggagggcagtacctccgtcttccaaagcgtgtcttatccaggctggtttattgctacttctacgaccagcggccagcctatttttttgacgaaggagcggggcattactaacaatacgaatttctacctcgacagcgtcgagtag

SEQ ID NO: 249751 - DNA, 474 bp, Artificial Sequence
  derived and/or modified sequence
atgaatccacagagggaagcagccccaaaatcctacgctatccgcgacagcagacagatggtgtgggtactgtccggtaactcccttattgccgctcctcttagccggtcaatcaaaccggtgactctgcacctaattgcttgtcgggacacagagttctctgacaaagagaagggaaacatggtttatctgggtattaagggtaaggacctatgcctcttttgcgcagagatacaggggaaacctaccctgcagctgaaagagaagaacattatggatctatatgtggaaaagaaagcccagaagcccttcctctttttccataataaggagggatccaccagtgtttttcagagcgttagttacccaggttggttcattgcaacctccacaacatcaggccaacccatatttctcacgaaggagcgtggaattactaataacacaaatttttaccttgacagtgtcgaatag

SEQ ID NO: 249752 - DNA, 1052 bp, Artificial Sequence
  derived and/or modified sequence
cacgggttcctccccactctgtctttctcacctctccttcacttttcctagcctcctcaccaccatctgatctatcttgttctcttcacaaaaggctctgaagacatcatgaacccacaacgggaggcagcacccaaatcctatgctattcgtgattctcgacagatggtgtgggtcctgagtggaaattctttaatagcagctcctcttagccgcagcattaagcctgtcactcttcatttaatagcctgtagagacacagaattcagtgacaaggaaaagggtaatatggtttacctgggaatcaagggaaaagatctctgtctcttctgtgcagaaattcagggcaagcctactttgcagcttaaggaaaaaaatatcatggacctgtatgtggagaagaaagcacagaagccctttctctttttccacaataaagaaggctccacttctgtctttcagtcagtctcttaccctggctggttcatagccacctccaccacatcaggacagcccatctttctcaccaaggagagaggcataactaataacactaacttctacttagattctgtggaataaatccagcctaggctgtgggtggctggttccaggatagagaatcaagctgtcagagtcatcttaacagatcattatgcgactgagttcactagcagttcagcccatccatagcttacctcattcttactatccaaaagccacctcctcctccaaacatccatttctgtaccaagaccctcactcgaatgtcactatcccaagatgaaacctaaaaatcactttccattctttcttgatcttaccccaccatccactcagctgccatgcccagtttagtcaaccccccaaatgctgcttcatgcaaccttccattcctattccttttgccaacccatgatgtagagatgtggattcatgacattttgttcatacaacttcttcaataaaacattataatatgtgccccaaagataaagctgaagaatgagatgaatgtgaaattaaaggtttgcatgtctttctaatcctaa

SEQ ID NO: 249753 - protein, 270 aa, Artificial Sequence
  derived and/or modified sequence
MRGQGRKESLSDSRDLDGSYDQLTGHPPGPTKKALKQRFLKLLPCCGPQALPSVSETLAAPASLRPHRPRLLDPDSVDDEFELSTVCHRPEGLEQLQEQTKFTRKELQVLYRGFKNECPSGIVNEENFKQIYSQFFPQGDSSTYATFLFNAFDTNHDGSVSFEDFVAGLSVILRGTVDDRLNWAFNLYDLNKDGCITKEEMLDIMKSIYDMMGKYTYPALREEAPREHVESFFQKMDRNKDGVVTIEEFIESCQKDENIMRSMQLFDNVI

SEQ ID NO: 249754 - DNA, 813 bp, Artificial Sequence
  derived and/or modified sequence
atgagaggccagggacgcaaggagtctttgtcagactcccgggacctggatgggagctatgatcaactgaccggtcacccccctggtcctaccaaaaaagctcttaagcagcgattcctcaaactcctcccctgttgtggaccgcaggccctgcctagcgtgtcggaaacattggctgcccctgcatcattgcggccacaccggccacggctgctggaccctgacagcgtcgacgatgagtttgagttaagcaccgtttgccacagacctgaaggactcgagcaattacaggagcaaaccaaattcactagaaaagaattgcaagtgctctaccggggatttaagaacgagtgcccatctggaatcgtgaacgaggagaattttaaacaaatttacagccagtttttccctcagggagactcttcgacatacgccacctttctgtttaacgcattcgacaccaaccacgatggttctgttagtttcgaggacttcgtcgccggtttgagcgtcatcctgagaggtacagtcgacgaccgactcaattgggcattcaatctgtacgacctgaataaagatgggtgtatcaccaaggaggagatgctggatatcatgaaaagtatctacgacatgatggggaaatacacatacccggctttgcgtgaggaggccccacgggagcatgttgaaagctttttccagaagatggatcgaaataaggatggggtggttactattgaagagtttatcgaatcttgtcaaaaggacgagaacatcatgcgctccatgcagctgttcgacaacgtaatctag

SEQ ID NO: 249755 - DNA, 813 bp, Artificial Sequence
  derived and/or modified sequence
atgaggggtcaagggcgaaaagagtctctctctgactccagagatcttgatggctcctacgatcagctgaccggccatcccccaggccccacaaaaaaagctctgaagcaacggtttcttaaacttcttccgtgctgcggacctcaggccctgccttcagtaagcgagaccctggccgctccggcctcactaagaccacaccgcccccggttactcgacccagactctgtagatgacgagtttgaactgtctactgtgtgtcacagaccggaaggactcgaacagcttcaggaacagacaaagtttactagaaaagaattacaggtcctgtaccggggtttcaaaaacgagtgcccctccgggattgtcaacgaggagaatttcaagcagatttactcacagtttttcccgcaaggcgatagctcaacgtatgcaacattcctgttcaatgcttttgatacaaaccacgacggttctgtgtccttcgaggacttcgtggcaggcctttccgtgatcctgcgcggtacagtcgatgataggctcaattgggcatttaatctctacgacctcaacaaagacgggtgcatcacgaaggaggagatgcttgacatcatgaaaagcatatatgatatgatgggaaagtacacttacccagcactgcgcgaagaagccccacgagagcatgtggaatctttttttcagaagatggacagaaacaaggatggggtagtgacgatcgaagaattcatagagtcatgtcagaaagacgagaacatcatgcgttctatgcaactattcgacaacgtgatttag

SEQ ID NO: 249756 - DNA, 813 bp, Artificial Sequence
  derived and/or modified sequence
atgagaggacagggcagaaaggaatccctgagcgattcacgcgaccttgacgggagttatgatcagctgacagggcacccccccggacccactaagaaagcactgaagcagagatttttaaagctactgccttgctgtggtccccaggctttaccctccgtgtccgaaacccttgctgcccccgcttccctcagaccccatcgcccaaggttactggatcccgatagcgtggacgatgaattcgaacttagtactgtatgtcatcgccctgagggtttagagcagttgcaggaacagacaaagttcactagaaaggagttgcaggtcctgtatagaggtttcaaaaacgaatgtcctagtgggatcgtgaacgaagaaaattttaagcaaatttatagtcagttcttcccccagggcgactcatctacatatgccactttcctgttcaatgcttttgacaccaatcacgacggttctgtctcattcgaagattttgttgccggcttatccgtcatactacgagggaccgtagacgatcgactgaactgggcttttaacctgtatgatctgaacaaggatggctgcatcacgaaggaggaaatgctcgatattatgaagagtatttatgacatgatgggcaaatacacttaccccgccctgcgcgaggaagccccacgtgaacatgtggaatcgttctttcaaaaaatggacagaaacaaagacggggtcgtcaccattgaagagttcatagaatcctgccaaaaagatgagaatatcatgcgctcaatgcagctgtttgacaacgttatttag

SEQ ID NO: 249757 - DNA, 813 bp, Artificial Sequence
  derived and/or modified sequence
atgagaggccagggcagaaaggagagcctgagcgacagcagagacctggacggcagctacgaccagctgaccggccacccccccggccccaccaagaaggccctgaagcagagattcctgaagctgctgccctgctgcggcccccaggccctgcccagcgtgagcgagaccctggccgcccccgccagcctgagaccccacagacccagactgctggaccccgacagcgtggacgacgagttcgagctgagcaccgtgtgccacagacccgagggcctggagcagctgcaggagcagaccaagttcaccagaaaggagctgcaggtgctgtacagaggcttcaagaacgagtgccccagcggcatcgtgaacgaggagaacttcaagcagatctacagccagttcttcccccagggcgacagcagcacctacgccaccttcctgttcaacgccttcgacaccaaccacgacggcagcgtgagcttcgaggacttcgtggccggcctgagcgtgatcctgagaggcaccgtggacgacagactgaactgggccttcaacctgtacgacctgaacaaggacggctgcatcaccaaggaggagatgctggacatcatgaagagcatctacgacatgatgggcaagtacacctaccccgccctgagagaggaggcccccagagagcacgtggagagcttcttccagaagatggacagaaacaaggacggcgtggtgaccatcgaggagttcatcgagagctgccagaaggacgagaacatcatgagaagcatgcagctgttcgacaacgtgatctag

SEQ ID NO: 249758 - DNA, 813 bp, Artificial Sequence
  derived and/or modified sequence
atgcgtggccagggacgcaaagaatccctgagcgatagtcgggacctggacggaagctacgatcagctcaccggacaccccccgggtcccacaaagaaagcactgaagcagcgctttcttaagttgttaccctgctgtgggcctcaggcacttccgtctgtgtctgagactctcgccgcacccgcttcactacgtcctcatagaccacgcctccttgaccctgactccgtggatgacgagttcgaattgtctactgtttgtcacagacccgaagggctggagcagctccaggagcagactaagttcacccggaaggagctccaggtcctataccggggtttcaagaacgagtgcccatcagggattgttaacgaggagaacttcaagcaaatatattcacagtttttccctcagggtgattcctccacatatgccaccttcttatttaatgcctttgacacaaaccacgacgggagcgtgtccttcgaggatttcgtcgccggtctgagcgttattctcagggggactgtcgacgaccgcttgaactgggccttcaatctgtacgatctgaacaaagacgggtgcatcacaaaggaagagatgctggatatcatgaaatccatatatgacatgatgggaaagtatacttaccctgccctgagggaagaagctccaagggaacacgtagagtcgttctttcaaaagatggacagaaataaagacggcgttgtgaccatcgaggaattcatcgagtcatgtcagaaagatgagaatattatgcgatccatgcagcttttcgacaatgttatctag

SEQ ID NO: 249759 - DNA, 1989 bp, Artificial Sequence
  derived and/or modified sequence
gagggggcgggaggagagaggcagctcggctcggctccgcgctcagctccgctctgcctccggctctgcgctcacctgctgcctagtgttccctctcctgctccaggacctccgggtagacctcagaccccgggcccattcccagactcagcctcagcccggacttccccagccccgacagcacagtaggccgccagggggcgccgtgtgagcgccctatcccggccacccggcgccccctcccacggcccgggcgggagcggggcgccgggggccatgcggggccagggccgcaaggagagtttgtccgattcccgagacctggacggctcctacgaccagctcacgggccaccctccagggcccactaaaaaagcgctgaagcagcgattcctcaagctgctgccgtgctgcgggccccaagccctgccctcagtcagtgaaacattagccgccccagcctccctccgcccccacagaccccgcctgctggacccagacagcgtggacgatgaatttgaattgtccaccgtgtgtcaccggcctgagggtctggagcagctgcaggagcaaaccaaattcacgcgcaaggagttgcaggtcctgtaccggggcttcaagaacgaatgtcccagcggaattgtcaatgaggagaacttcaagcagatttactcccagttctttcctcaaggagactccagcacctatgccacttttctcttcaatgcctttgacaccaaccatgatggctcggtcagttttgaggactttgtggctggtttgtccgtgattcttcggggaactgtagatgacaggcttaattgggccttcaacctgtatgaccttaacaaggacggctgcatcaccaaggaggaaatgcttgacatcatgaagtccatctatgacatgatgggcaagtacacgtaccctgcactccgggaggaggccccaagggaacacgtggagagcttcttccagaagatggacagaaacaaggatggtgtggtgaccattgaggaattcattgagtcttgtcaaaaggatgagaacatcatgaggtccatgcagctctttgacaatgtcatctagcccccaggagagggggtcagtgtttcctggggggaccatgctctaaccctagtccaggcggacctcacccttctcttcccaggtctatcctcatcctacgcctccctgggggctggagggatccaagagcttggggattcagtagtccagatctctggagctgaaggggccagagagtgggcagagtgcatctcggggggtgttcccaactcccaccagctctcacccccttcctgcctgacacccagtgttgagagtgcccctcctgtaggaattgagcggttccccacctcctacccctactctagaaacacactagacagatgtctcctgctatggtgcttcccccatccctgacctcataaacatttcccctaagactcccctctcagagagaatgctccattcttggcactggctggcttctcagaccagccattgagagccctgtgggagggggacaagaatgtatagggagaaatcttgggcctgagtcaatggataggtcctaggaggtggctggggttgagaatagaagggcctggacagattatgattgctcaggcataccaggttatagctccaagttccacaggtctgctaccacaggccatcaaaatataagtttccaggctttgcagaagaccttgtctccttagaaatgccccagaaattttccacaccctcctcggtatccatggagagcctggggccagatatctggctcatctctggcattgcttcctctccttccttcctgcatgtgttggtggtggttgtggtgggggaatgtggatgggggatgtcctggctgatgcctgccaaaatttcatcccaccctccttgcttatcgtccctgttttgagggctatgacttgagtttttgtttcccatgttctc

SEQ ID NO: 249760 - DNA, 813 bp, Artificial Sequence
  derived and/or modified sequence
atgaggggccagggcaggaaggagagcctgagtgacagccgggacctggatggcagctatgaccagctgaccggccaccccccaggccccaccaagaaggccctgaagcagcgcttcctgaagctgctgccctgctgcggcccccaggccctgcccagcgtgtctgagaccctggccgccccagccagcctgcggccccaccggccccggctgctggaccctgacagcgtggatgatgaatttgagctgagcacagtgtgccacaggcctgagggcctggagcagctgcaggagcagaccaagttcaccaggaaggagctgcaggtgctgtaccggggcttcaagaatgaatgtcccagcggcatcgtgaatgaggagaacttcaagcagatctacagccagttcttcccccagggcgacagcagcacctacgccaccttcctgttcaatgcctttgacaccaaccatgatggctctgtgtcctttgaagattttgtggccggcctgagcgtcatcctgcggggcaccgtggatgaccggctgaactgggccttcaacctgtatgacctgaacaaggatggctgcatcaccaaggaggagatgctggacatcatgaagagcatctatgacatgatgggcaagtacacctacccagccctgcgggaggaggccccccgggagcacgtggagagcttcttccagaagatggacaggaacaaggatggagtggtgaccatcgaggagttcatcgagagctgccagaaggatgagaacatcatgaggtccatgcagctgtttgacaacgtcatctag

SEQ ID NO: 249761 - DNA, 813 bp, Artificial Sequence
  derived and/or modified sequence
atgcggggccagggccggaaggagagcctgagcgacagccgggacctggacggttcatatgaccagctgactgggcacccccccggacccactaaaaaggctcttaaacagagattcctgaaactgctgccctgctgcggccctcaggcactgcccagcgtcagcgaaactcttgccgcccccgcgagcctcagaccccacagaccgcgtttgttagaccctgattccgtcgacgatgaattcgagctgtcaaccgtctgtcacagacctgaggggctggaacagctgcaagaacagacaaagttcacacgcaaggaactgcaggtactgtaccggggattcaagaacgaatgtccatcgggaatcgtgaacgaggaaaattttaaacagatctatagccagttctttccgcaaggcgattcctccacctacgccacttttctttttaacgcatttgatacaaaccacgacggctctgtaagtttcgaggattttgtcgcaggtttgagtgtcattttgcgaggaaccgtagacgataggttaaattgggctttcaacctctacgacctgaacaaggatgggtgcatcaccaaggaagaaatgttggatattatgaaatctatttacgacatgatgggaaagtacacctaccccgccctcagggaggaagctccaagggagcatgtcgagagtttctttcaaaaaatggaccgcaacaaggatggcgttgtcacaattgaggaatttattgaaagctgccagaaagacgaaaacatcatgcgatccatgcagttgttcgacaacgtcatctag

SEQ ID NO: 249762 - RNA, 813 nt, Artificial Sequence
  derived and/or modified sequence
augaggggucaagggcgaaaagagucucucucugacuccagagaucuugauggcuccuacgaucagcugaccggccaucccccaggccccacaaaaaaagcucugaagcaacgguuucuuaaacuucuuccgugcugcggaccucaggcccugccuucaguaagcgagacccuggccgcuccggccucacuaagaccacaccgcccccgguuacucgacccagacucuguagaugacgaguuugaacugucuacugugugucacagaccggaaggacucgaacagcuucaggaacagacaaaguuuacuagaaaagaauuacagguccuguaccgggguuucaaaaacgagugccccuccgggauugucaacgaggagaauuucaagcagauuuacucacaguuuuucccgcaaggcgauagcucaacguaugcaacauuccuguucaaugcuuuugauacaaaccacgacgguucuguguccuucgaggacuucguggcaggccuuuccgugauccugcgcgguacagucgaugauaggcucaauugggcauuuaaucucuacgaccucaacaaagacgggugcaucacgaaggaggagaugcuugacaucaugaaaagcauauaugauaugaugggaaaguacacuuacccagcacugcgcgaagaagccccacgagagcauguggaaucuuuuuuucagaagauggacagaaacaaggaugggguagugacgaucgaagaauucauagagucaugucagaaagacgagaacaucaugcguucuaugcaacuauucgacaacgugauuuag

SEQ ID NO: 249763 - RNA, 813 nt, Artificial Sequence
  derived and/or modified sequence
augagaggacagggcagaaaggaaucccugagcgauucacgcgaccuugacgggaguuaugaucagcugacagggcacccccccggacccacuaagaaagcacugaagcagagauuuuuaaagcuacugccuugcugugguccccaggcuuuacccuccguguccgaaacccuugcugcccccgcuucccucagaccccaucgcccaagguuacuggaucccgauagcguggacgaugaauucgaacuuaguacuguaugucaucgcccugaggguuuagagcaguugcaggaacagacaaaguucacuagaaaggaguugcagguccuguauagagguuucaaaaacgaauguccuagugggaucgugaacgaagaaaauuuuaagcaaauuuauagucaguucuucccccagggcgacucaucuacauaugccacuuuccuguucaaugcuuuugacaccaaucacgacgguucugucucauucgaagauuuuguugccggcuuauccgucauacuacgagggaccguagacgaucgacugaacugggcuuuuaaccuguaugaucugaacaaggauggcugcaucacgaaggaggaaaugcucgauauuaugaagaguauuuaugacaugaugggcaaauacacuuaccccgcccugcgcgaggaagccccacgugaacauguggaaucguucuuucaaaaaauggacagaaacaaagacggggucgucaccauugaagaguucauagaauccugccaaaaagaugagaauaucaugcgcucaaugcagcuguuugacaacguuauuuag

SEQ ID NO: 249764 - protein, 252 aa, Artificial Sequence
  derived and/or modified sequence
MRGQGRKESLSDSRDLDGSYDQLTGHPPGPTKKALKQRFLKLLPCCGPQALPSVSENSVDDEFELSTVCHRPEGLEQLQEQTKFTRKELQVLYRGFKNECPSGIVNEENFKQIYSQFFPQGDSSTYATFLFNAFDTNHDGSVSFEDFVAGLSVILRGTVDDRLNWAFNLYDLNKDGCITKEEMLDIMKSIYDMMGKYTYPALREEAPREHVESFFQKMDRNKDGVVTIEEFIESCQKDENIMRSMQLFDNVI

SEQ ID NO: 249765 - protein, 252 aa, Artificial Sequence [sequence omitted]

SEQ ID NO: 249766 - DNA, 759 bp, Artificial Sequence
  derived and/or modified sequence
atgagggggcaaggcagaaaagaaagcctcagcgatagcagggacctggatggcagctatgatcagctcacagggcatcccccaggtccgactaaaaaagctttaaaacagcggttcttaaagcttcttccatgctgcggcccacaggctctgccgtccgtgtccgaaaactcagtcgacgacgagtttgaactctcaaccgtgtgtcaccgcccagaaggcctcgagcagttgcaagaacagacaaaatttacccggaaggagctgcaggttttgtacagaggattcaagaacgagtgtccctcaggcatcgtgaatgaggagaactttaagcagatatacagccagttcttcccacagggtgattctagcacctacgcgacattcctatttaatgctttcgacacaaaccatgacggtagcgtgtcgttcgaagatttcgtggccggtctctcggtgatccttcggggtaccgttgacgaccggctgaattgggcatttaacctgtatgacctgaataaagatggttgcatcacaaaggaggagatgcttgacataatgaaaagcatttatgatatgatggggaaatacacctaccccgcactgagggaagaggcacctcgcgaacatgttgagtcctttttccagaaaatggataggaataaagatggcgtggtgacgatcgaagagttcatcgaatcctgtcagaaagatgaaaacatcatgcggtccatgcagttgttcgacaatgtgatttag

SEQ ID NO: 249767 - DNA, 759 bp, Artificial Sequence
  derived and/or modified sequence
atgcggggacaaggacggaaagagagcctttccgactcccgagatctcgatgggagctacgatcaacttaccgggcatccccctggtcctacaaaaaaagctttaaagcagaggttcctgaaactgctgccatgctgtgggccacaagccctcccatcagttagtgagtctaacgtcgacgacgagtttgagctttccacggtgtgccaccgacctgagggattagagcagctacaggagcagacaaaatttactaggaaagaactgcaagtcctgtaccggggatttaaaaatgaatgtccttccggcattgtgaacgaggaaaatttcaagcagatctacagtcaattctttcctcagggagattcttcaacatatgctacttttctgtttaacgcttttgacacaaaccatgatggatcagtgtcttttgaggactttgtggccggtctgagcgttatcttacggggaactgtagacgacagacttaattgggctttcaacctgtatgatcttaacaaggacggctgcattactaaagaggaaatgttagacataatgaaaagcatctacgacatgatgggcaagtatacctacccagcgttacgagaagaagcaccccgagaacacgtcgaatcattctttcagaagatggaccggaacaaggacggggtggtgactatcgaggagtttatagagtcctgccagaaagacgaaaatatcatgcgaagcatgcagctgtttgataacgtcatctag

SEQ ID NO: 249768 - DNA, 759 bp, Artificial Sequence
  derived and/or modified sequence
atgcgtggacagggcaggaaagaaagcctgtctgattcccgtgaccttgacggttcctacgatcagctcaccggccaccctccaggccctaccaagaaggccttgaaacagcgcttccttaaactgctcccatgttgcggaccacaggccctgccgtccgtctccgagaattccgtggatgatgaatttgaactctcaactgtatgtcatcgacctgaggggctggaacagctccaagagcaaacaaagtttacgcgcaaagagctgcaggtcctgtacaggggtttcaaaaacgaatgtccgagcggcatagtgaacgaggaaaatttcaagcaaatctacagtcagttctttccccagggtgactcgtccacctacgcaaccttcctgtttaacgcattcgacaccaaccatgatggctctgtctccttcgaagacttcgtcgccggactcagcgtgattttaaggggaaccgttgacgatcggctgaactgggcctttaatctctacgacttgaataaagatggctgcataaccaaggaggagatgctggatatcatgaagtctatctacgacatgatggggaaatacacataccctgccctcagagaggaagcacctcgagaacacgtggagtcctttttccagaagatggataggaataaggatggagtcgtaactattgaggaattcatcgaatcatgccagaaagatgaaaacataatgaggtcaatgcaactgttcgacaatgtgatttag

SEQ ID NO: 249769 - DNA, 759 bp, Artificial Sequence
  derived and/or modified sequence
atgaggggccaaggccgaaaggaaagcctttccgactcgagggacctggacggctcatacgaccagctgactgggcaccctcccggccccactaaaaaagcgttgaaacagagattcctgaagctattaccttgttgtgggccccaggcactgccatcagtgagtgaatcaaacgtagacgacgagtttgaactcagtacagtgtgtcaccggcccgaaggccttgagcagcttcaagaacagaccaagttcactcgcaaagagctccaggtgctgtacaggggctttaaaaatgagtgtccaagcggcatcgtgaatgaagaaaactttaaacagatttattcccaatttttcccacagggagacagttccacatatgcaacatttttgttcaacgcgttcgatacaaatcacgacggaagcgtcagctttgaagattttgtggctggtctcagcgtaattctccgcggcacagtcgacgaccgtttgaattgggctttcaacctgtatgacttaaacaaggacggttgcattactaaagaagaaatgcttgatattatgaaatcaatttacgacatgatggggaagtatacatacccagccctgagagaggaggctccgagagagcatgtcgaatcatttttccaaaagatggataggaataaggatggggtagtgacaatagaagaattcatagagagctgccagaaagacgagaatatcatgcgatcaatgcaacttttcgacaacgtcatttag

SEQ ID NO: 249770 - DNA, 759 bp, Artificial Sequence
  derived and/or modified sequence
atgcgcggacaggggcggaaagaatctctgagtgactcacgcgacttagatggatcttacgatcagctaaccggccatcctcccgggcctacgaagaaagccctaaagcaacgctttctgaaactcctgccctgttgtgggcctcaggctttgccatccgtgtccgaaaatagtgtggacgacgaattcgaattaagcacagtttgtcatcgccccgagggtctggaacagcttcaggagcagactaaatttacaagaaaggagctgcaggtgctgtacaggggatttaagaatgaatgccccagcggcatcgttaacgaagaaaatttcaagcagatttactcccaattcttcccccagggtgactcttctacctacgccacatttttattcaacgctttcgacactaaccacgatggatcagtgtcattcgaagactttgttgccggactaagtgtgatcctgagagggaccgtggatgatagacttaactgggccttcaacctctatgatctcaacaaagacggctgtatcactaaggaggaaatgctggatattatgaaatcaatttatgacatgatggggaaatatacatatcctgctctccgcgaagaggcaccaagagagcacgtagagagtttttttcagaagatggaccggaataaagatggcgtggtgaccattgaggaattcatagaatcttgccagaaggacgagaacataatgcgctcaatgcaattattcgataatgtcatttag

SEQ ID NO: 249771 - DNA, 759 bp, Artificial Sequence
  derived and/or modified sequence
atgcgtgggcagggaagaaaggagagtctgagcgattcccgagacctggatggatcttacgaccagctcactggacacccaccaggccccactaagaaggctcttaagcaaagattcctcaaactgctcccgtgttgcggtccacaggctctcccctcggtttcagaaagcaatgtggacgacgaattcgagctaagtactgtgtgccacaggccggaagggctggaacagctgcaggaacagactaagtttaccaggaaagagttacaagtgctgtatcgtggctttaaaaatgaatgtccaagcggcatcgtgaatgaagaaaactttaaacagatttattcccaatttttcccacagggagacagttccacatatgcaacatttttgttcaacgcgttcgatacaaatcacgacggaagcgtcagctttgaagattttgtggctggtctcagcgtaattctccgcggcacagtcgacgaccgtttgaattgggctttcaacctgtatgacttaaacaaggacggttgcattactaaagaagaaatgcttgatattatgaaatcaatttacgacatgatggggaagtatacatacccagcactcagagaagaggctcccagagaacacgtggaatcattttttcagaagatggatcggaataaagatggcgtggtgaccattgaagaatttatcgaatcctgccagaaggacgagaacattatgagaagtatgcagctgtttgacaacgtcatctag

SEQ ID NO: 249772 - DNA, 759 bp, Artificial Sequence
  derived and/or modified sequence
atgagaggccagggcagaaaggagagcctgagcgacagcagagacctggacggcagctacgaccagctgaccggccacccccccggccccaccaagaaggccctgaagcagagattcctgaagctgctgccctgctgcggcccccaggccctgcccagcgtgagcgagaacagcgtggacgacgagttcgagctgagcaccgtgtgccacagacccgagggcctggagcagctgcaggagcagaccaagttcaccagaaaggagctgcaggtgctgtacagaggcttcaagaacgagtgccccagcggcatcgtgaacgaggagaacttcaagcagatctacagccagttcttcccccagggcgacagcagcacctacgccaccttcctgttcaacgccttcgacaccaaccacgacggcagcgtgagcttcgaggacttcgtggccggcctgagcgtgatcctgagaggcaccgtggacgacagactgaactgggccttcaacctgtacgacctgaacaaggacggctgcatcaccaaggaggagatgctggacatcatgaagagcatctacgacatgatgggcaagtacacctaccccgccctgagagaggaggcccccagagagcacgtggagagcttcttccagaagatggacagaaacaaggacggcgtggtgaccatcgaggagttcatcgagagctgccagaaggacgagaacatcatgagaagcatgcagctgttcgacaacgtgatctag

SEQ ID NO: 249773 - DNA, 759 bp, Artificial Sequence
  derived and/or modified sequence
atgagaggccagggcagaaaggagagcctgagcgacagcagagacctggacggcagctacgaccagctgaccggccacccccccggccccaccaagaaggccctgaagcagagattcctgaagctgctgccctgctgcggcccccaggccctgcccagcgtgagcgagagcaacgtggacgacgagttcgagctgagcaccgtgtgccacagacccgagggcctggagcagctgcaggagcagaccaagttcaccagaaaggagctgcaggtgctgtacagaggcttcaagaacgagtgccccagcggcatcgtgaacgaggagaacttcaagcagatctacagccagttcttcccccagggcgacagcagcacctacgccaccttcctgttcaacgccttcgacaccaaccacgacggcagcgtgagcttcgaggacttcgtggccggcctgagcgtgatcctgagaggcaccgtggacgacagactgaactgggccttcaacctgtacgacctgaacaaggacggctgcatcaccaaggaggagatgctggacatcatgaagagcatctacgacatgatgggcaagtacacctaccccgccctgagagaggaggcccccagagagcacgtggagagcttcttccagaagatggacagaaacaaggacggcgtggtgaccatcgaggagttcatcgagagctgccagaaggacgagaacatcatgagaagcatgcagctgttcgacaacgtgatctag

SEQ ID NO: 249774 - DNA, 759 bp, Artificial Sequence
  derived and/or modified sequence
atgaggggacaaggacggaaagagtctctcagcgattctcgagacttggatggatcatacgaccagctgacaggacatcctcctgggcctaccaaaaaagcactgaaacaaagattcctgaaattgttgccttgctgtggtcctcaggccctccccagcgtgtccgagaactcagttgatgatgaattcgaactgtctaccgtctgccacaggccggagggcctcgaacagctacaagagcagaccaaatttacaaggaaggagctgcaagtactctatcgggggttcaaaaatgagtgcccaagcggcatagtcaacgaggagaattttaaacagatttattctcagttttttcctcagggagacagtagcacttacgccacgtttctgttcaacgcctttgacaccaatcacgacggttccgtgagcttcgaagatttcgtcgcaggtttaagtgtgattcttagaggaaccgtggatgataggctgaattgggcctttaacctgtatgatctgaacaaagatggctgcataaccaaagaagagatgttggatatcatgaagtccatctacgacatgatgggcaagtacacatatcccgccctccgcgaagaggcaccccgcgaacatgttgaatcatttttccaaaagatggacagaaacaaagacggggtcgttactatcgaagaattcatcgaatcttgtcagaaagacgagaatataatgcgatccatgcagttgttcgataatgtcatctag

SEQ ID NO: 249775 - DNA, 759 bp, Artificial Sequence
  derived and/or modified sequence
atgcggggtcaggggcgcaaggagtctctatctgattcccgtgatctggacggatcctatgaccaactaacgggccatccaccagggccaacaaagaaggctctgaagcagcgattcctaaaactgttgccctgctgcggtccacaggcactgcccagcgtgagcgagtccaacgtggacgacgagttcgagctatcaactgtctgccaccgacccgaaggtctggagcaacttcaagagcagacaaagttcacacgcaaggagctccaggtcctatacaggggctttaagaacgaatgcccttctggaatcgtgaacgaagaaaattttaaacagatttacagtcaatttttcccccagggggactcatctacctatgcgacatttctctttaatgcctttgatactaaccatgatggcagtgttagctttgaggacttcgtggccggactaagcgtgatccttagggggaccgttgatgaccgcctgaattgggcttttaacctgtacgacctgaacaaggacgggtgcatcaccaaagaagagatgctagatatcatgaaatccatctatgatatgatgggcaaatacacatatccggcactgagggaggaggcacctcgcgagcatgtcgagtcattcttccagaagatggaccgcaacaaagatggggtagtgacgattgaggaatttattgagtcttgtcagaaagatgagaacattatgaggagcatgcagctgttcgacaacgtcatctag

SEQ ID NO: 249776 - DNA, 2489 bp, Artificial Sequence
  derived and/or modified sequence
aaagggtggggggcgggggtagggggagccaatcccggcagcgccaaagaggggaggaggcggtgacagccgcggggagggggcgggaggagagaggcagctcggctcggctccgcgctcagctccgctctgcctccggctctgcgctcacctgctgcctagtgttccctctcctgctccaggacctccgggtagacctcagaccccgggcccattcccagactcagcctcagcccggacttccccagccccgacagcacagtaggccgccagggggcgccgtgtgagcgccctatcccggccacccggcgccccctcccacggcccgggcgggagcggggcgccgggggccatgcggggccagggccgcaaggagagtttgtccgattcccgagacctggacggctcctacgaccagctcacgggccaccctccagggcccactaaaaaagcgctgaagcagcgattcctcaagctgctgccgtgctgcgggccccaagccctgccctcagtcagtgaaaacagcgtggacgatgaatttgaattgtccaccgtgtgtcaccggcctgagggtctggagcagctgcaggagcaaaccaaattcacgcgcaaggagttgcaggtcctgtaccggggcttcaagaacgaatgtcccagcggaattgtcaatgaggagaacttcaagcagatttactcccagttctttcctcaaggagactccagcacctatgccacttttctcttcaatgcctttgacaccaaccatgatggctcggtcagttttgaggactttgtggctggtttgtccgtgattcttcggggaactgtagatgacaggcttaattgggccttcaacctgtatgaccttaacaaggacggctgcatcaccaaggaggaaatgcttgacatcatgaagtccatctatgacatgatgggcaagtacacgtaccctgcactccgggaggaggccccaagggaacacgtggagagcttcttccagaagatggacagaaacaaggatggtgtggtgaccattgaggaattcattgagtcttgtcaaaaggatgagaacatcatgaggtccatgcagctctttgacaatgtcatctagcccccaggagagggggtcagtgtttcctggggggaccatgctctaaccctagtccaggcggacctcacccttctcttcccaggtctatcctcatcctacgcctccctgggggctggagggatccaagagcttggggattcagtagtccagatctctggagctgaaggggccagagagtgggcagagtgcatctcggggggtgttcccaactcccaccagctctcacccccttcctgcctgacacccagtgttgagagtgcccctcctgtaggaattgagcggttccccacctcctacccctactctagaaacacactagacagatgtctcctgctatggtgcttcccccatccctgacctcataaacatttcccctaagactcccctctcagagagaatgctccattcttggcactggctggcttctcagaccagccattgagagccctgtgggagggggacaagaatgtatagggagaaatcttgggcctgagtcaatggataggtcctaggaggtggctggggttgagaatagaagggcctggacagattatgattgctcaggcataccaggttatagctccaagttccacaggtctgctaccacaggccatcaaaatataagtttccaggctttgcagaagaccttgtctccttagaaatgccccagaaattttccacaccctcctcggtatccatggagagcctggggccagatatctggctcatctctggcattgcttcctctccttccttcctgcatgtgttggtggtggttgtggtgggggaatgtggatgggggatgtcctggctgatgcctgccaaaatttcatcccaccctccttgcttatcgtccctgttttgagggctatgacttgagtttttgtttcccatgttctctatagacttgggaccttcctgaacttggggcctatcactccccacagtggatgccttagaagggagagggaaggagggaggcaggcatagcatctgaacccagtgtgggggcattcactagaatcttcaatcaacctgggctctccccaccccaccccagataacctcctcagttccctagggtctcttcttgcttgactcaatctacccagagatgccccttagcacacctagagggcagggaccataggacccaggttccaaccccattgtcagcaccccagccatgcggccaccccttagcacacctgctcgtcccatttagcttaccctcccagttggccagaatctgaggggagagcccccagagagcccccttccccatcagaagactgttgactgctttgcattttgggctcttctatatattttgtaaagtaagaaatataccagatctaataaaacacaatggctatgc

SEQ ID NO: 249777 - DNA, 759 bp, Artificial Sequence
  derived and/or modified sequence
atgaggggccagggcaggaaggagagcctgagtgacagccgggacctggatggcagctatgaccagctgaccggccaccccccaggccccaccaagaaggccctgaagcagcgcttcctgaagctgctgccctgctgcggcccccaggccctgcccagcgtgtctgagaacagcgtggatgatgaatttgagctgagcacagtgtgccacaggcctgagggcctggagcagctgcaggagcagaccaagttcaccaggaaggagctgcaggtgctgtaccggggcttcaagaatgaatgtcccagcggcatcgtgaatgaggagaacttcaagcagatctacagccagttcttcccccagggcgacagcagcacctacgccaccttcctgttcaatgcctttgacaccaaccatgatggctctgtgtcctttgaagattttgtggccggcctgagcgtcatcctgcggggcaccgtggatgaccggctgaactgggccttcaacctgtatgacctgaacaaggatggctgcatcaccaaggaggagatgctggacatcatgaagagcatctatgacatgatgggcaagtacacctacccagccctgcgggaggaggccccccgggagcacgtggagagcttcttccagaagatggacaggaacaaggatggagtggtgaccatcgaggagttcatcgagagctgccagaaggatgagaacatcatgaggtccatgcagctgtttgacaacgtcatctag

SEQ ID NO: 249778 - DNA, 2351 bp, Artificial Sequence
  derived and/or modified sequence
ggctctgcgctcacctgctgcctagtgttccctctcctgctccaggacctccgggtagacctcagaccccgggcccattcccagactcagcctcagcccggacttccccagccccgacagcacagtaggccgccagggggcgccgtgtgagcgccctatcccggccacccggcgccccctcccacggcccgggcgggagcggggcgccgggggccatgcggggccagggccgcaaggagagtttgtccgattcccgagacctggacggctcctacgaccagctcacgggccaccctccagggcccactaaaaaagcgctgaagcagcgattcctcaagctgctgccgtgctgcgggccccaagccctgccctcagtcagtgaaagcaacgtggacgatgaatttgaattgtccaccgtgtgtcaccggcctgagggtctggagcagctgcaggagcaaaccaaattcacgcgcaaggagttgcaggtcctgtaccggggcttcaagaacgaatgtcccagcggaattgtcaatgaggagaacttcaagcagatttactcccagttctttcctcaaggagactccagcacctatgccacttttctcttcaatgcctttgacaccaaccatgatggctcggtcagttttgaggactttgtggctggtttgtccgtgattcttcggggaactgtagatgacaggcttaattgggccttcaacctgtatgaccttaacaaggacggctgcatcaccaaggaggaaatgcttgacatcatgaagtccatctatgacatgatgggcaagtacacgtaccctgcactccgggaggaggccccaagggaacacgtggagagcttcttccagaagatggacagaaacaaggatggtgtggtgaccattgaggaattcattgagtcttgtcaaaaggatgagaacatcatgaggtccatgcagctctttgacaatgtcatctagcccccaggagagggggtcagtgtttcctggggggaccatgctctaaccctagtccaggcggacctcacccttctcttcccaggtctatcctcatcctacgcctccctgggggctggagggatccaagagcttggggattcagtagtccagatctctggagctgaaggggccagagagtgggcagagtgcatctcggggggtgttcccaactcccaccagctctcacccccttcctgcctgacacccagtgttgagagtgcccctcctgtaggaattgagcggttccccacctcctacccctactctagaaacacactagacagatgtctcctgctatggtgcttcccccatccctgacctcataaacatttcccctaagactcccctctcagagagaatgctccattcttggcactggctggcttctcagaccagccattgagagccctgtgggagggggacaagaatgtatagggagaaatcttgggcctgagtcaatggataggtcctaggaggtggctggggttgagaatagaagggcctggacagattatgattgctcaggcataccaggttatagctccaagttccacaggtctgctaccacaggccatcaaaatataagtttccaggctttgcagaagaccttgtctccttagaaatgccccagaaattttccacaccctcctcggtatccatggagagcctggggccagatatctggctcatctctggcattgcttcctctccttccttcctgcatgtgttggtggtggttgtggtgggggaatgtggatgggggatgtcctggctgatgcctgccaaaatttcatcccaccctccttgcttatcgtccctgttttgagggctatgacttgagtttttgtttcccatgttctctatagacttgggaccttcctgaacttggggcctatcactccccacagtggatgccttagaagggagagggaaggagggaggcaggcatagcatctgaacccagtgtgggggcattcactagaatcttcaatcaacctgggctctccccaccccaccccagataacctcctcagttccctagggtctcttcttgcttgactcaatctacccagagatgccccttagcacacctagagggcagggaccataggacccaggttccaaccccattgtcagcaccccagccatgcggccaccccttagcacacctgctcgtcccatttagcttaccctcccagttggccagaatctgaggggagagcccccagagagcccccttccccatcagaagactgttgactgctttgcattttgggctcttctatatattttgtaaagtaagaaatataccagatctaataaaacacaatggctatg

SEQ ID NO: 249779 - DNA, 759 bp, Artificial Sequence
  derived and/or modified sequence
atgaggggccagggcaggaaggagagcctgagtgacagccgggacctggatggcagctatgaccagctgaccggccaccccccaggccccaccaagaaggccctgaagcagcgcttcctgaagctgctgccctgctgcggcccccaggccctgcccagcgtgtctgagagcaatgtggatgatgaatttgagctgagcacagtgtgccacaggcctgagggcctggagcagctgcaggagcagaccaagttcaccaggaaggagctgcaggtgctgtaccggggcttcaagaatgaatgtcccagcggcatcgtgaatgaggagaacttcaagcagatctacagccagttcttcccccagggcgacagcagcacctacgccaccttcctgttcaatgcctttgacaccaaccatgatggctctgtgtcctttgaagattttgtggccggcctgagcgtcatcctgcggggcaccgtggatgaccggctgaactgggccttcaacctgtatgacctgaacaaggatggctgcatcaccaaggaggagatgctggacatcatgaagagcatctatgacatgatgggcaagtacacctacccagccctgcgggaggaggccccccgggagcacgtggagagcttcttccagaagatggacaggaacaaggatggagtggtgaccatcgaggagttcatcgagagctgccagaaggatgagaacatcatgaggtccatgcagctgtttgacaacgtcatctag

SEQ ID NO: 249780 - DNA, 759 bp, Artificial Sequence
  derived and/or modified sequence
atgcggggccagggccggaaggagagcctgagcgacagccgggaccttgacggctcatatgaccagcttacagggcaccccccagggcccaccaaaaaagccctgaagcagcggtttctcaagctgcttccatgttgtggaccgcaggctcttccctctgtctccgaaaactccgtggatgatgagtttgagctctcaaccgtgtgccacagacctgaagggttggagcaattgcaggagcagacgaaatttaccaggaaggagctgcaagtgttgtaccgcggcttcaagaacgagtgcccatccgggattgtcaacgaggagaattttaagcaaatttattcccaattctttcctcagggggatagcagcacctatgcaacttttctcttcaatgcctttgacactaatcacgacggctccgtgagtttcgaggatttcgttgctggcctcagtgtgatccttaggggcaccgtcgatgaccgcctgaactgggcttttaatctttacgatcttaacaaggatgggtgtatcaccaaggaagaaatgctcgatattatgaaatcaatttacgatatgatgggcaaatacacatacccggcccttcgtgaagaagctccccgagaacatgtggaatccttctttcagaaaatggaccgaaacaaagatggcgtggtcacaattgaggagttcatcgaatcatgccaaaaagatgagaatatcatgcgttccatgcagttgttcgacaatgtcatatag

SEQ ID NO: 249781 - DNA, 759 bp, Artificial Sequence
  derived and/or modified sequence
atgcggggccagggccggaaggagagcctgagcgacagccgggacctcgacggaagctacgaccaactcacggggcacccgcccgggcccaccaaaaaagcgctgaaacagaggtttctgaaactgctgccctgttgcggaccccaggcgctcccctccgtgtcagagtctaacgtggacgatgaatttgaactctcaaccgtgtgccatagacccgagggcctggaacagctgcaggagcagactaaattcaccagaaaagaactgcaggtcttgtatcgagggttcaaaaatgagtgtccttccgggatcgtaaacgaggagaactttaaacagatctacagtcagttctttcctcagggcgattcaagcacttatgccacctttctgttcaacgcttttgacaccaatcacgacggctccgtaagcttcgaagactttgttgctggcctttctgtgattctccgcggaactgtcgatgacagactgaattgggctttcaatctgtatgacttgaacaaagatggatgtatcaccaaggaagagatgctcgatataatgaagtcaatctatgatatgatgggaaagtatacctaccccgctctgagagaggaagcaccacgggaacacgtggagtctttttttcagaagatggacagaaataaagacggggtggtcaccatcgaagaatttatagagagctgtcagaaggatgagaatattatgcgtagcatgcagttgttcgataatgtgatttag

SEQ ID NO: 249782 - RNA, 759 nt, Artificial Sequence
  derived and/or modified sequence
augcguggacagggcaggaaagaaagccugucugauucccgugaccuugacgguuccuacgaucagcucaccggccacccuccaggcccuaccaagaaggccuugaaacagcgcuuccuuaaacugcucccauguugcggaccacaggcccugccguccgucuccgagaauuccguggaugaugaauuugaacucucaacuguaugucaucgaccugaggggcuggaacagcuccaagagcaaacaaaguuuacgcgcaaagagcugcagguccuguacagggguuucaaaaacgaauguccgagcggcauagugaacgaggaaaauuucaagcaaaucuacagucaguucuuuccccagggugacucguccaccuacgcaaccuuccuguuuaacgcauucgacaccaaccaugauggcucugucuccuucgaagacuucgucgccggacucagcgugauuuuaaggggaaccguugacgaucggcugaacugggccuuuaaucucuacgacuugaauaaagauggcugcauaaccaaggaggagaugcuggauaucaugaagucuaucuacgacaugauggggaaauacacauacccugcccucagagaggaagcaccucgagaacacguggaguccuuuuuccagaagauggauaggaauaaggauggagucguaacuauugaggaauucaucgaaucaugccagaaagaugaaaacauaaugaggucaaugcaacuguucgacaaugugauuuag

SEQ ID NO: 249783 - RNA, 759 nt, Artificial Sequence
  derived and/or modified sequence
augaggggccaaggccgaaaggaaagccuuuccgacucgagggaccuggacggcucauacgaccagcugacugggcacccucccggccccacuaaaaaagcguugaaacagagauuccugaagcuauuaccuuguugugggccccaggcacugccaucagugagugaaucaaacguagacgacgaguuugaacucaguacagugugucaccggcccgaaggccuugagcagcuucaagaacagaccaaguucacucgcaaagagcuccaggugcuguacaggggcuuuaaaaaugaguguccaagcggcaucgugaaugaagaaaacuuuaaacagauuuauucccaauuuuucccacagggagacaguuccacauaugcaacauuuuuguucaacgcguucgauacaaaucacgacggaagcgucagcuuugaagauuuuguggcuggucucagcguaauucuccgcggcacagucgacgaccguuugaauugggcuuucaaccuguaugacuuaaacaaggacgguugcauuacuaaagaagaaaugcuugauauuaugaaaucaauuuacgacaugauggggaaguauacauacccagcccugagagaggaggcuccgagagagcaugucgaaucauuuuuccaaaagauggauaggaauaaggaugggguagugacaauagaagaauucauagagagcugccagaaagacgagaauaucaugcgaucaaugcaacuuuucgacaacgucauuuag

SEQ ID NO: 249784 - RNA, 759 nt, Artificial Sequence
  derived and/or modified sequence
augcgcggacaggggcggaaagaaucucugagugacucacgcgacuuagauggaucuuacgaucagcuaaccggccauccucccgggccuacgaagaaagcccuaaagcaacgcuuucugaaacuccugcccuguugugggccucaggcuuugccauccguguccgaaaauaguguggacgacgaauucgaauuaagcacaguuugucaucgccccgagggucuggaacagcuucaggagcagacuaaauuuacaagaaaggagcugcaggugcuguacaggggauuuaagaaugaaugccccagcggcaucguuaacgaagaaaauuucaagcagauuuacucccaauucuucccccagggugacucuucuaccuacgccacauuuuuauucaacgcuuucgacacuaaccacgauggaucagugucauucgaagacuuuguugccggacuaagugugauccugagagggaccguggaugauagacuuaacugggccuucaaccucuaugaucucaacaaagacggcuguaucacuaaggaggaaaugcuggauauuaugaaaucaauuuaugacaugauggggaaauauacauauccugcucuccgcgaagaggcaccaagagagcacguagagaguuuuuuucagaagauggaccggaauaaagauggcguggugaccauugaggaauucauagaaucuugccagaaggacgagaacauaaugcgcucaaugcaauuauucgauaaugucauuuag

SEQ ID NO: 249785 - RNA, 759 nt, Artificial Sequence
  derived and/or modified sequence
augcgugggcagggaagaaaggagagucugagcgauucccgagaccuggauggaucuuacgaccagcucacuggacacccaccaggccccacuaagaaggcucuuaagcaaagauuccucaaacugcucccguguugcgguccacaggcucuccccucgguuucagaaagcaauguggacgacgaauucgagcuaaguacugugugccacaggccggaagggcuggaacagcugcaggaacagacuaaguuuaccaggaaagaguuacaagugcuguaucguggcuuuaaaaaugaauguccaagcggcaucgugaaugaagaaaacuuuaaacagauuuauucccaauuuuucccacagggagacaguuccacauaugcaacauuuuuguucaacgcguucgauacaaaucacgacggaagcgucagcuuugaagauuuuguggcuggucucagcguaauucuccgcggcacagucgacgaccguuugaauugggcuuucaaccuguaugacuuaaacaaggacgguugcauuacuaaagaagaaaugcuugauauuaugaaaucaauuuacgacaugauggggaaguauacauacccagcacucagagaagaggcucccagagaacacguggaaucauuuuuucagaagauggaucggaauaaagauggcguggugaccauugaagaauuuaucgaauccugccagaaggacgagaacauuaugagaaguaugcagcuguuugacaacgucaucuag

SEQ ID NO: 249786 - protein, 227 aa, Artificial Sequence
  derived and/or modified sequence
MRGQGRKESLSDSRDLDGSYDQLTDSVDDEFELSTVCHRPEGLEQLQEQTKFTRKELQVLYRGFKNPGALSFQECPSGIVNEENFKQIYSQFFPQGDSSTYATFLFNAFDTNHDGSVSFEDFVAGLSVILRGTVDDRLNWAFNLYDLNKDGCITKEEMLDIMKSIYDMMGKYTYPALREEAPREHVESFFQKMDRNKDGVVTIEEFIESCQKDENIMRSMQLFDNVI

SEQ ID NO: 249787 - protein, 201 aa, Artificial Sequence
  derived and/or modified sequence
MNLNCPPCVTGLRVWSSCRSKPNSRARSCRSCTGASRTLPSHHMSHVECPSGIVNEENFKQIYSQFFPQGDSSTYATFLFNAFDTNHDGSVSFEDFVAGLSVILRGTVDDRLNWAFNLYDLNKDGCITKEEMLDIMKSIYDMMGKYTYPALREEAPREHVESFFQKMDRNKDGVVTIEEFIESCQKDENIMRSMQLFDNVI

SEQ ID NO: 249788 - DNA, 684 bp, Artificial Sequence
  derived and/or modified sequence
atgagaggccaaggtagaaaggaatccttgtccgactcaagagatttagatggcagttacgatcagttaacagattcggtcgatgatgaattcgagctgagcaccgtttgccatcgaccagagggcctcgagcagttgcaggagcagacaaaatttacgcgcaaggaactgcaggttctgtataggggatttaagaatcctggcgcactgagcttccaggagtgcccttccggaattgtcaacgaagagaattttaagcaaatttacagtcagttttttccgcaaggggattcgtccacttatgccacgttcctgttcaacgcctttgataccaaccacgacggttccgtgagtttcgaggatttcgtggcaggcctcagcgttatactgagggggacggtagatgatagacttaactgggcgttcaacctctacgatctcaataaagacggctgcatcacgaaagaggaaatgctagatataatgaagtcaatctatgacatgatggggaagtacacctaccctgctttacgcgaggaagcaccccgagagcatgttgagagtttcttccagaaaatggatcgcaacaaggatggcgttgtgacaattgaggaatttattgaatcttgtcaaaaggacgagaatatcatgcgctccatgcagctgttcgataatgttatctag

SEQ ID NO: 249789 - DNA, 606 bp, Artificial Sequence
  derived and/or modified sequence
atgaacctgaattgcccaccttgcgtaaccggcttaagagtctggtcaagttgccgctctaagccaaattctagggctcgaagctgtcgtagctgcacaggggctagtcgcaccctgccttctcaccatatgagccacgtggaatgtcctagcggcattgtgaacgaagaaaattttaagcaaatttacagccagtttttcccacagggagacagcagtacctacgctaccttcctgtttaatgcctttgataccaaccatgacgggtcagtgtcattcgaggactttgtggccggactcagtgtgatcctgcgcggaacagtggatgaccggctgaattgggccttcaatctctatgacttaaacaaggacggctgtatcaccaaggaagagatgctggacatcatgaagagtatctacgatatgatggggaaatatacatatccggctctgagggaggaagcccctagagaacatgtggaatcgttctttcagaagatggatagaaacaaggatggggtagtgacaatagaagaattcatcgagtcttgtcagaaggatgaaaacatcatgcgcagtatgcagctctttgacaacgttatctag

SEQ ID NO: 249790 - DNA, 684 bp, Artificial Sequence
  derived and/or modified sequence
atgagaggccagggaagaaaagagagcctgagtgacagtcgtgatctggacggatcctacgaccagctaaccgatagtgtggatgacgagttcgaactgagcacggtttgccacaggcccgaaggactggaacaactccaagagcagacaaaatttacaagaaaggaattacaagtgctgtatcgcggatttaaaaacccaggtgcgcttagtttccaggaatgcccaagcggtatcgtgaacgaggaaaacttcaaacagatctatagccagttctttccacagggggacagtagcacatacgccacctttctctttaatgcttttgacacaaaccacgatggctctgtgtcctttgaagatttcgttgctggtttgagcgtgatactccggggcactgtcgatgaccgcctcaattgggccttcaacctttacgatctgaacaaagacggctgcatcacaaaggaggagatgctggacatcatgaaaagcatttacgacatgatggggaagtatacctacccagcgctgagggaggaggcacctagagagcatgtggaatctttttttcagaaaatggacagaaacaaggatggggtggtgaccattgaagagtttattgaatcatgtcagaaggatgaaaatattatgagaagcatgcagctttttgacaacgtgatctag

SEQ ID NO: 249791 - DNA, 606 bp, Artificial Sequence
  derived and/or modified sequence
atgaatctaaactgccccccctgtgtcaccgggctgagagtatggtccagctgtcgctccaaacccaattctagggcgcgtagctgtaggagttgtaccggagcttctcgaacattaccaagccaccacatgtctcatgttgaatgcccaagcggcatcgtcaatgaagaaaattttaaacagatctattctcaattcttcccacagggtgactcaagtacgtacgccacatttctcttcaatgcattcgataccaatcatgatgggagtgtatcctttgaggacttcgtggccggactgtctgtaatattgagggggactgttgacgataggttgaactgggcctttaatctgtacgacctgaataaggatgggtgtatcacaaaagaagaaatgctcgatatcatgaaatccatctatgatatgatgggtaagtatacctacccggctctccgcgaagaggcaccaagagagcacgtcgagtccttttttcagaaaatggaccggaacaaagatggagttgtcaccatagaggaattcattgagagctgccagaaagatgaaaatataatgagatccatgcagttgtttgacaacgtgatctag

SEQ ID NO: 249792 - DNA, 684 bp, Artificial Sequence
  derived and/or modified sequence
atgagaggccagggaagaaaagagagcctgagtgacagtcgtgatctggacggatcctacgaccagctaaccgatagtgtggatgacgagttcgaactgagcacggtttgccacaggcccgaaggactggaacaactccaagagcagacaaaatttacaagaaaggaattacaagtgctgtatcgcggatttaaaaacccaggtgcgcttagtttccaggaatgcccaagcggtatcgtgaacgaggaaaacttcaaacagatctatagccagttctttccacagggggacagtagcacatatgctacgttcctgtttaacgcatttgacaccaatcacgacggctccgtttccttcgaagattttgttgccggattgtcagtaattctgaggggcaccgtggacgacagattgaattgggcattcaatctttatgatctgaataaagacggctgtattactaaggaagaaatgctggacattatgaaatccatttacgatatgatgggcaagtatacatacccagcgttacgggaggaagcccctagagaacatgtagaaagttttttccaaaaaatggatcggaacaaggacggggtcgttactattgaggagtttattgagagttgccagaaggacgagaacatcatgaggtcgatgcagttatttgataacgtcatttag

SEQ ID NO: 249793 - DNA, 606 bp, Artificial Sequence
  derived and/or modified sequence
atgaatctcaactgtcccccttgcgttactggactaagggtatggtcttcctgccgatccaaacctaacagccgagcgcggagctgcagatcttgtacaggagcttccagaacacttccctctcaccatatgtcgcatgtcgaatgcccgtcaggtatcgttaatgaggaaaattttaaacagatctacagccagttttttccacagggagactccagcacatatgcaaccttcttatttaacgcttttgatacgaatcatgatggctccgtgtccttcgaagactttgtcgctgggctgtccgtaatattacgagggaccgtagatgatagactgaactgggcctttaatctgtacgatctgaataaggatggatgtataacaaaagaggagatgctcgacatcatgaaaagtatatacgacatgatgggtaagtacacataccccgccctgcgcgaggaagctcctcgagaacatgtggagtctttttttcaaaaaatggacaggaataaagacggggttgtaactatcgaagaattcatagagagttgccaaaaagatgaaaacattatgagatcaatgcaactattcgacaatgtgatttag

SEQ ID NO: 249794 - DNA, 684 bp, Artificial Sequence
  derived and/or modified sequence
atgagaggccagggcagaaaggagagcctgagcgacagcagagacctggacggcagctacgaccagctgaccgacagcgtggacgacgagttcgagctgagcaccgtgtgccacagacccgagggcctggagcagctgcaggagcagaccaagttcaccagaaaggagctgcaggtgctgtacagaggcttcaagaaccccggcgccctgagcttccaggagtgccccagcggcatcgtgaacgaggagaacttcaagcagatctacagccagttcttcccccagggcgacagcagcacctacgccaccttcctgttcaacgccttcgacaccaaccacgacggcagcgtgagcttcgaggacttcgtggccggcctgagcgtgatcctgagaggcaccgtggacgacagactgaactgggccttcaacctgtacgacctgaacaaggacggctgcatcaccaaggaggagatgctggacatcatgaagagcatctacgacatgatgggcaagtacacctaccccgccctgagagaggaggcccccagagagcacgtggagagcttcttccagaagatggacagaaacaaggacggcgtggtgaccatcgaggagttcatcgagagctgccagaaggacgagaacatcatgagaagcatgcagctgttcgacaacgtgatctag

SEQ ID NO: 249795 - DNA, 606 bp, Artificial Sequence
  derived and/or modified sequence
atgaacctgaactgccccccctgcgtgaccggcctgagagtgtggagcagctgcagaagcaagcccaacagcagagccagaagctgcagaagctgcaccggcgccagcagaaccctgcccagccaccacatgagccacgtggagtgccccagcggcatcgtgaacgaggagaacttcaagcagatctacagccagttcttcccccagggcgacagcagcacctacgccaccttcctgttcaacgccttcgacaccaaccacgacggcagcgtgagcttcgaggacttcgtggccggcctgagcgtgatcctgagaggcaccgtggacgacagactgaactgggccttcaacctgtacgacctgaacaaggacggctgcatcaccaaggaggagatgctggacatcatgaagagcatctacgacatgatgggcaagtacacctaccccgccctgagagaggaggcccccagagagcacgtggagagcttcttccagaagatggacagaaacaaggacggcgtggtgaccatcgaggagttcatcgagagctgccagaaggacgagaacatcatgagaagcatgcagctgttcgacaacgtgatctag

SEQ ID NO: 249796 - DNA, 684 bp, Artificial Sequence
  derived and/or modified sequence
atgcgcggtcagggacgtaaagaatctctgtctgactctcgcgatttggacggatcgtatgatcagctgaccgactccgttgatgatgaattcgagctctccacagtgtgccacaggcccgaggggctagagcagcttcaagaacagaccaagttcactagaaaggaactgcaggtcctgtatcgtggctttaagaatcctggggccctttcctttcaggagtgcccaagcggaatcgtcaacgaagaaaatttcaagcagatttactctcagttttttcctcagggcgactctagtacttatgcaaccttcctgttcaacgctttcgatactaaccacgatggttcagtttcctttgaggactttgtcgctggcctgtcggtcatcctgcgggggaccgttgacgacagacttaattgggccttcaacctctatgacctgaacaaggacggatgcattaccaaagaagaaatgcttgatattatgaagtccatttacgatatgatgggaaaatacacataccctgccctgagagaggaggctccacgagagcatgtcgaatcgttcttccaaaagatggataggaataaagacggcgtcgtgacgatcgaagagttcatagaatcttgccagaaagacgagaacatcatgagaagcatgcagctctttgataacgttatatag

SEQ ID NO: 249797 - DNA, 606 bp, Artificial Sequence
  derived and/or modified sequence
atgaacttaaattgcccaccttgtgtgacgggtctgagggtgtggtcctcatgtcgctcgaaaccaaactcacgcgcgcgatcttgccgaagctgtaccggagcttctaggacactgccctcccaccatatgagccacgttgaatgcccgagtggcatagtcaacgaggaaaacttcaagcaaatttactcgcaattctttccacagggcgattctagtacttacgcaacattcctttttaatgctttcgacacaaatcacgacggctcagtttcgtttgaggactttgtagctggcctgtccgtcatcctgagaggcacagtggacgaccgactcaattgggcatttaacctgtatgacttgaacaaagacgggtgcatcaccaaagaggaaatgttggacattatgaagtcaatatacgacatgatgggaaagtatacgtatccagccctcagggaggaagccccaagagagcatgtggagtccttcttccaaaagatggatcgaaacaaagacggcgtagttactatcgaggaatttattgaaagctgtcagaaagatgagaatattatgaggtcaatgcaactgttcgacaatgttatatag

SEQ ID NO: 249798 - DNA, 684 bp, Artificial Sequence
  derived and/or modified sequence
atgcggggccagggccgcaaggagagtttgtccgattcccgagacctggacggctcctacgaccagctcacggacagcgtggacgatgaatttgaattgtccaccgtgtgtcaccggcctgagggtctggagcagctgcaggagcaaaccaaattcacgcgcaaggagttgcaggtcctgtaccggggcttcaagaaccctggtgccctctccttccaggaatgtcccagcggaattgtcaatgaggagaacttcaagcagatttactcccagttctttcctcaaggagactccagcacctatgccacttttctcttcaatgcctttgacaccaaccatgatggctcggtcagttttgaggactttgtggctggtttgtccgtgattcttcggggaactgtagatgacaggcttaattgggccttcaacctgtatgaccttaacaaggacggctgcatcaccaaggaggaaatgcttgacatcatgaagtccatctatgacatgatgggcaagtacacgtaccctgcactccgggaggaggccccaagggaacacgtggagagcttcttccagaagatggacagaaacaaggatggtgtggtgaccattgaggaattcattgagtcttgtcaaaaggatgagaacatcatgaggtccatgcagctctttgacaatgtcatctag

SEQ ID NO: 249799 - DNA, 684 bp, Artificial Sequence
  derived and/or modified sequence
atgaggggccagggcaggaaggagagcctgagtgacagccgggacctggatggcagctatgaccagctgacagacagcgtggatgatgaatttgagctgagcacagtgtgccacaggcctgagggcctggagcagctgcaggagcagaccaagttcaccaggaaggagctgcaggtgctgtaccggggcttcaagaaccctggggccctgtccttccaggagtgccccagcggcatcgtgaatgaggagaacttcaagcagatctacagccagttcttcccccagggcgacagcagcacctacgccaccttcctgttcaatgcctttgacaccaaccatgatggctctgtgtcctttgaggactttgtggccggcctgagcgtcatcctgcggggcaccgtggatgaccggctgaactgggccttcaacctgtatgacctgaacaaggatggctgcatcaccaaggaggagatgctggacatcatgaagagcatctatgacatgatgggcaagtacacctacccagccctgcgggaggaggccccccgggagcacgtggagagcttcttccagaagatggacaggaacaaggatggagtggtgaccatcgaggagttcatcgagagctgccagaaggatgagaacatcatgaggtccatgcagctgtttgacaacgtcatctag

SEQ ID NO: 249800 - DNA, 606 bp, Artificial Sequence
  derived and/or modified sequence
atgaacctgaactgccccccctgtgtgacaggcctgcgggtgtggagcagctgccgcagcaagcccaacagccgggcccggagctgccgcagctgcacaggagccagcaggaccctgcccagccaccacatgagccacgtggagtgccccagcggcatcgtgaatgaggagaacttcaagcagatctacagccagttcttcccccagggcgacagcagcacctacgccaccttcctgttcaatgcctttgacaccaaccatgatggctctgtgtcctttgaggactttgtggccggcctgagcgtcatcctgcggggcaccgtggatgaccggctgaactgggccttcaacctgtatgacctgaacaaggatggctgcatcaccaaggaggagatgctggacatcatgaagagcatctatgacatgatgggcaagtacacctacccagccctgcgggaggaggccccccgggagcacgtggagagcttcttccagaagatggacaggaacaaggatggagtggtgaccatcgaggagttcatcgagagctgccagaaggatgagaacatcatgaggtccatgcagctgtttgacaacgtcatctag

SEQ ID NO: 249801 - DNA, 684 bp, Artificial Sequence
  derived and/or modified sequence
atgcggggccagggccggaaggagagcctgagcgacagccgggacttggatggctcgtacgaccaattgactgatagcgtggacgatgagttcgagctgagcaccgtctgtcacagaccggaaggcctcgaacagctccaagaacagacaaagtttaccagaaaagagttgcaggtactgtatcgggggtttaaaaatcctggcgcgctgtctttccaggaatgcccatccggaatcgtcaacgaagaaaacttcaagcagatctattcgcagttctttccacagggagatagttccacttacgcaacattcctttttaatgcatttgataccaatcacgacggttcagtctcatttgaagacttcgtcgccggtctgtctgttatcctgcgcggcaccgtggacgatcgtctgaactgggcatttaacttgtatgaccttaacaaggacgggtgcattacaaaagaagaaatgctcgatatcatgaagtctatctacgacatgatgggaaaatacacgtaccccgctctccgagaagaggctccacgagagcacgtggaatcgtttttccagaagatggaccggaataaggacggcgtcgttacaatagaggaattcatcgaaagttgtcagaaggatgaaaacatcatgaggtcgatgcagttgttcgacaatgtgatatag

SEQ ID NO: 249802 - DNA, 606 bp, Artificial Sequence
  derived and/or modified sequence
atgaacctgaactgccccccctgcgtgaccggcctgcgggtgtggagctcatgtcgctcaaagccaaatagccgcgcccgctcttgccggagttgtacaggcgcttcaagaaccctgccttcgcatcacatgtctcacgtagagtgtccatctggaatcgtgaacgaggagaactttaagcagatctatagccaatttttcccacagggtgattcatccacttacgccacctttttgttcaatgccttcgataccaaccacgacggttcagtgagcttcgaggactttgtggctggtctgagcgtcatcctgcgtggcacggtagacgatagacttaattgggccttcaatctttacgatcttaataaggatggctgtatcacaaaggaggagatgctggatatcatgaaaagtatctatgacatgatgggcaaatatacataccccgctctaagagaggaagctcctcgggagcacgtcgagagctttttccagaaaatggacaggaataaagacggagttgttaccatcgaggagtttattgagagctgtcagaaggatgagaatattatgagatcaatgcaactcttcgacaacgtaatctag

SEQ ID NO: 249803 - RNA, 684 nt, Artificial Sequence
  derived and/or modified sequence
augagaggccagggaagaaaagagagccugagugacagucgugaucuggacggauccuacgaccagcuaaccgauaguguggaugacgaguucgaacugagcacgguuugccacaggcccgaaggacuggaacaacuccaagagcagacaaaauuuacaagaaaggaauuacaagugcuguaucgcggauuuaaaaacccaggugcgcuuaguuuccaggaaugcccaagcgguaucgugaacgaggaaaacuucaaacagaucuauagccaguucuuuccacagggggacaguagcacauacgccaccuuucucuuuaaugcuuuugacacaaaccacgauggcucuguguccuuugaagauuucguugcugguuugagcgugauacuccggggcacugucgaugaccgccucaauugggccuucaaccuuuacgaucugaacaaagacggcugcaucacaaaggaggagaugcuggacaucaugaaaagcauuuacgacaugauggggaaguauaccuacccagcgcugagggaggaggcaccuagagagcauguggaaucuuuuuuucagaaaauggacagaaacaaggaugggguggugaccauugaagaguuuauugaaucaugucagaaggaugaaaauauuaugagaagcaugcagcuuuuugacaacgugaucuag

SEQ ID NO: 249804 - RNA, 606 nt, Artificial Sequence
  derived and/or modified sequence
augaaucuaaacugcccccccugugucaccgggcugagaguaugguccagcugucgcuccaaacccaauucuagggcgcguagcuguaggaguuguaccggagcuucucgaacauuaccaagccaccacaugucucauguugaaugcccaagcggcaucgucaaugaagaaaauuuuaaacagaucuauucucaauucuucccacagggugacucaaguacguacgccacauuucucuucaaugcauucgauaccaaucaugaugggaguguauccuuugaggacuucguggccggacugucuguaauauugagggggacuguugacgauagguugaacugggccuuuaaucuguacgaccugaauaaggauggguguaucacaaaagaagaaaugcucgauaucaugaaauccaucuaugauaugauggguaaguauaccuacccggcucuccgcgaagaggcaccaagagagcacgucgaguccuuuuuucagaaaauggaccggaacaaagauggaguugucaccauagaggaauucauugagagcugccagaaagaugaaaauauaaugagauccaugcaguuguuugacaacgugaucuag

SEQ ID NO: 249805 - RNA, 684 nt, Artificial Sequence
  derived and/or modified sequence
augagaggccagggaagaaaagagagccugagugacagucgugaucuggacggauccuacgaccagcuaaccgauaguguggaugacgaguucgaacugagcacgguuugccacaggcccgaaggacuggaacaacuccaagagcagacaaaauuuacaagaaaggaauuacaagugcuguaucgcggauuuaaaaacccaggugcgcuuaguuuccaggaaugcccaagcgguaucgugaacgaggaaaacuucaaacagaucuauagccaguucuuuccacagggggacaguagcacauaugcuacguuccuguuuaacgcauuugacaccaaucacgacggcuccguuuccuucgaagauuuuguugccggauugucaguaauucugaggggcaccguggacgacagauugaauugggcauucaaucuuuaugaucugaauaaagacggcuguauuacuaaggaagaaaugcuggacauuaugaaauccauuuacgauaugaugggcaaguauacauacccagcguuacgggaggaagccccuagagaacauguagaaaguuuuuuccaaaaaauggaucggaacaaggacggggucguuacuauugaggaguuuauugagaguugccagaaggacgagaacaucaugaggucgaugcaguuauuugauaacgucauuuag

SEQ ID NO: 249806 - RNA, 606 nt, Artificial Sequence
  derived and/or modified sequence
augaaucucaacugucccccuugcguuacuggacuaaggguauggucuuccugccgauccaaaccuaacagccgagcgcggagcugcagaucuuguacaggagcuuccagaacacuucccucucaccauaugucgcaugucgaaugcccgucagguaucguuaaugaggaaaauuuuaaacagaucuacagccaguuuuuuccacagggagacuccagcacauaugcaaccuucuuauuuaacgcuuuugauacgaaucaugauggcuccguguccuucgaagacuuugucgcugggcuguccguaauauuacgagggaccguagaugauagacugaacugggccuuuaaucuguacgaucugaauaaggauggauguauaacaaaagaggagaugcucgacaucaugaaaaguauauacgacaugauggguaaguacacauaccccgcccugcgcgaggaagcuccucgagaacauguggagucuuuuuuucaaaaaauggacaggaauaaagacgggguuguaacuaucgaagaauucauagagaguugccaaaaagaugaaaacauuaugagaucaaugcaacuauucgacaaugugauuuag

SEQ ID NO: 249807 - protein, 225 aa, Artificial Sequence
  derived and/or modified sequence
MNRCPRRCRSPLGQAARSLYQLVTGSLSPDSVDDEFELSTVCHRPEGLEQLQEQTKFTRKELQVLYRGFKNECPSGIVNEENFKQIYSQFFPQGDSSTYATFLFNAFDTNHDGSVSFEDFVAGLSVILRGTVDDRLNWAFNLYDLNKDGCITKEEMLDIMKSIYDMMGKYTYPALREEAPREHVESFFQKMDRNKDGVVTIEEFIESCQKDENIMRSMQLFDNVI

SEQ ID NO: 249808 - DNA, 678 bp, Artificial Sequence
  derived and/or modified sequence
atgaaccggtgccccagaaggtgccggtcccctttaggtcaagccgctcgttcactctatcagctagtaacgggctcattgagcccggatagtgtggatgacgaatttgagctgtcaactgtttgccatagaccagagggcctggagcagttgcaggaacaaacaaagtttacccgtaaagagctgcaagtactgtatcggggatttaaaaacgagtgtcctagcggaatcgttaatgaagaaaattttaaacagatttacagccagtttttcccccagggtgattcatccacctacgccaccttcttattcaatgcatttgacacaaaccacgatgggagcgttagctttgaagacttcgtcgctgggctttcagttatactccgaggcactgtggatgatcgcctcaactgggcgtttaatctctatgatttgaacaaggatgggtgtataacaaaggaggagatgctcgatatcatgaagtcaatctacgatatgatgggcaagtacacatatcctgctctgcgcgaagaggctcctagggaacatgtggagagcttcttccagaagatggaccggaataaagacggggtcgtgaccattgaggaatttattgaatcatgccagaaggatgagaacattatgcgttcgatgcaactcttcgacaatgtcatttag

SEQ ID NO: 249809 - DNA, 678 bp, Artificial Sequence
  derived and/or modified sequence
atgaatagatgtccccggcgatgccgatctccccttgggcaagccgccaggagtctctatcaacttgtgacaggtagtttgtcccccgattccgtggatgatgagtttgagctgtcaacagtttgccacagaccagaaggactcgagcaactgcaggagcagactaaattcactaggaaagagcttcaggtgctataccgcggttttaagaacgagtgtccctccggaatagtaaacgaggaaaattttaaacagatttactctcagtttttccctcagggcgattcgtctacctatgcaacattcctgtttaacgcattcgataccaatcacgacgggtcagtcagttttgaggactttgtggctggcctttctgtgatccttagaggaacagtcgatgaccgtctgaattgggccttcaatctctacgaccttaacaaagatggatgtatcaccaaggaggaaatgctggatatcatgaagtcaatttatgacatgatgggaaagtacacttatccggcgttgagagaagaggcacctcgcgagcatgtggagagcttctttcagaaaatggacagaaataaagacggcgttgtaactattgaggaattcattgagtcttgccaaaaagatgagaatatcatgcgatccatgcaactattcgacaatgtgatctag

SEQ ID NO: 249810 - DNA, 678 bp, Artificial Sequence
  derived and/or modified sequence
atgaacaggtgtccccgcagatgtcgatctcccctcggtcaagctgcacgttcattataccagcttgttaccgggtcactgagtcccgacagtgtggatgacgagtttgaactgtctacagtgtgccacagaccagagggactagaacagctacaggagcagacaaaatttacgcgaaaggaactgcaggttttatatcgaggattcaagaacgaatgcccctccggcatcgtaaacgaagaaaacttcaaacagatctactcccaattttttccccaaggcgactcatccacatatgccacgtttctgttcaacgcatttgacaccaatcacgatggctcagtgtcctttgaagacttcgttgccgggctttctgtcattttacgaggaactgtggacgatcggctcaattgggcatttaatctctatgacctgaataaggacggctgcattacgaaggaagagatgctcgacataatgaagtccatctatgacatgatgggtaaatatacgtatccagctttgcgcgaagaggccccccgagagcacgtagaatccttttttcagaagatggatagaaataaggacggggtggtgactatcgaagaatttattgaatcttgccaaaaagatgaaaacattatgagaagtatgcagctgttcgacaacgtgatctag

SEQ ID NO: 249811 - DNA, 678 bp, Artificial Sequence
  derived and/or modified sequence
atgaacagatgccccagaagatgcagaagccccctgggccaggccgccagaagcctgtaccagctggtgaccggcagcctgagccccgacagcgtggacgacgagttcgagctgagcaccgtgtgccacagacccgagggcctggagcagctgcaggagcagaccaagttcaccagaaaggagctgcaggtgctgtacagaggcttcaagaacgagtgccccagcggcatcgtgaacgaggagaacttcaagcagatctacagccagttcttcccccagggcgacagcagcacctacgccaccttcctgttcaacgccttcgacaccaaccacgacggcagcgtgagcttcgaggacttcgtggccggcctgagcgtgatcctgagaggcaccgtggacgacagactgaactgggccttcaacctgtacgacctgaacaaggacggctgcatcaccaaggaggagatgctggacatcatgaagagcatctacgacatgatgggcaagtacacctaccccgccctgagagaggaggcccccagagagcacgtggagagcttcttccagaagatggacagaaacaaggacggcgtggtgaccatcgaggagttcatcgagagctgccagaaggacgagaacatcatgagaagcatgcagctgttcgacaacgtgatctag

SEQ ID NO: 249812 - DNA, 678 bp, Artificial Sequence
  derived and/or modified sequence
atgaaccggtgcccaagaaggtgcaggagtcccttgggacaggccgcccgcagcctgtaccagctggtcaccggcagcctgagtcctgatagcgtcgacgatgaattcgaactttctaccgtctgtcataggccagaaggcttagagcagctgcaggaacaaacaaaatttacaagaaaggagttgcaagttctgtacagaggatttaaaaatgagtgcccatccggcatcgtgaatgaagagaactttaagcagatatactcgcaattctttccacagggggactccagcacttacgccacgtttctgttcaacgcgtttgacactaaccatgacggcagcgtgagctttgaggattttgtggccggcctgtcagttattctgcgcggaacggtggacgacaggctgaattgggcatttaacctgtacgatctcaataaagacgggtgtattaccaaggaggagatgctggatatcatgaaatcaatatacgatatgatgggtaagtatacatacccagctctgagggaggaggccccaagggagcatgtggagagcttctttcagaagatggacaggaacaaggacggcgtggtgacaattgaagaattcattgaatcttgtcagaaggatgagaacatcatgaggagcatgcaattgtttgataatgtaatctag

SEQ ID NO: 249813 - DNA, 2089 bp, Artificial Sequence
  derived and/or modified sequence
tggagcttagacgccgagctcgccgccaaaccatgaaccgatgcccccgcaggtgccggagcccgctggggcaggcagcgcgatccctctaccagctggtgactgggtcgctgtccccagacagcgtggacgatgaatttgaattgtccaccgtgtgtcaccggcctgagggtctggagcagctgcaggagcaaaccaaattcacgcgcaaggagttgcaggtcctgtaccggggcttcaagaacgaatgtcccagcggaattgtcaatgaggagaacttcaagcagatttactcccagttctttcctcaaggagactccagcacctatgccacttttctcttcaatgcctttgacaccaaccatgatggctcggtcagttttgaggactttgtggctggtttgtccgtgattcttcggggaactgtagatgacaggcttaattgggccttcaacctgtatgaccttaacaaggacggctgcatcaccaaggaggaaatgcttgacatcatgaagtccatctatgacatgatgggcaagtacacgtaccctgcactccgggaggaggccccaagggaacacgtggagagcttcttccagaagatggacagaaacaaggatggtgtggtgaccattgaggaattcattgagtcttgtcaaaaggatgagaacatcatgaggtccatgcagctctttgacaatgtcatctagcccccaggagagggggtcagtgtttcctggggggaccatgctctaaccctagtccaggcggacctcacccttctcttcccaggtctatcctcatcctacgcctccctgggggctggagggatccaagagcttggggattcagtagtccagatctctggagctgaaggggccagagagtgggcagagtgcatctcggggggtgttcccaactcccaccagctctcacccccttcctgcctgacacccagtgttgagagtgcccctcctgtaggaattgagcggttccccacctcctacccctactctagaaacacactagacagatgtctcctgctatggtgcttcccccatccctgacctcataaacatttcccctaagactcccctctcagagagaatgctccattcttggcactggctggcttctcagaccagccattgagagccctgtgggagggggacaagaatgtatagggagaaatcttgggcctgagtcaatggataggtcctaggaggtggctggggttgagaatagaagggcctggacagattatgattgctcaggcataccaggttatagctccaagttccacaggtctgctaccacaggccatcaaaatataagtttccaggctttgcagaagaccttgtctccttagaaatgccccagaaattttccacaccctcctcggtatccatggagagcctggggccagatatctggctcatctctggcattgcttcctctccttccttcctgcatgtgttggtggtggttgtggtgggggaatgtggatgggggatgtcctggctgatgcctgccaaaatttcatcccaccctccttgcttatcgtccctgttttgagggctatgacttgagtttttgtttcccatgttctctatagacttgggaccttcctgaacttggggcctatcactccccacagtggatgccttagaagggagagggaaggagggaggcaggcatagcatctgaacccagtgtgggggcattcactagaatcttcaatcaacctgggctctccccaccccaccccagataacctcctcagttccctagggtctcttcttgcttgactcaatctacccagagatgccccttagcacacctagagggcagggaccataggacccaggttccaaccccattgtcagcaccccagccatgcggccaccccttagcacacctgctcgtcccatttagcttaccctcccagttggccagaatctgaggggagagcccccagagagcccccttccccatcagaagactgttgactgctttgcattttgggctcttctatatattttgtaaagtaagaaatataccagatctaataaaacacaatggctatgca

SEQ ID NO: 249814 - DNA, 678 bp, Artificial Sequence
  derived and/or modified sequence
atgaaccgctgcccccggcgctgccgcagccccctgggccaggccgcccggagcctgtaccagctggtgacaggcagcctgagcccagattctgtggatgatgaatttgagctgagcacagtgtgccacaggcctgagggcctggagcagctgcaggagcagaccaagttcaccaggaaggagctgcaggtgctgtaccggggcttcaagaatgaatgtccttctggaattgtgaatgaggagaacttcaagcagatctacagccagttcttcccccagggcgacagcagcacctacgccaccttcctgttcaatgcctttgacaccaaccatgatggctctgtgtcctttgaggactttgtggccggcctgagcgtcatcctgcggggcaccgtggatgaccggctgaactgggccttcaacctgtatgacctgaacaaggatggctgcatcaccaaggaggagatgctggacatcatgaagagcatctatgacatgatgggcaagtacacctacccagccctgcgggaggaggccccccgggagcacgtggagagcttcttccagaagatggacaggaacaaggatggagtggtgaccatcgaggagttcatcgagagctgccagaaggatgagaacatcatgaggtccatgcagctgtttgacaacgtcatctag

SEQ ID NO: 249815 - DNA, 678 bp, Artificial Sequence
  derived and/or modified sequence
atgaaccggtgcccccggcggtgccggagccccctgggccaggccgcacggtccctctaccaactggttaccgggtctttgagtccggatagcgtggacgatgagttcgaacttagtactgtctgtcacaggcccgaaggcctcgaacaactacaagaacagacaaaattcactcgaaaggaactgcaagtgttgtaccggggattcaaaaacgagtgcccctcaggcatcgttaatgaggaaaactttaaacagatctactcacagttctttccacagggagattcctcgacatacgccacgttccttttcaatgcctttgacaccaaccatgacgggtcagtgagttttgaagacttcgtcgctggactcagcgtgattctaaggggcaccgtggatgaccggttgaattgggcttttaatctctatgatctcaataaagatggttgcattacgaaagaggagatgctggatatcatgaagtcaatatacgatatgatgggcaaatatacctacccggccctgcgggaagaagctcctcgcgagcatgtcgaaagcttttttcagaaaatggaccgcaacaaggatggagtggtgaccatagaggaatttattgagtcttgccaaaaagatgaaaacatcatgcggagtatgcagttgttcgacaacgtgatctag

SEQ ID NO: 249816 - RNA, 678 nt, Artificial Sequence
  derived and/or modified sequence
augaauagauguccccggcgaugccgaucuccccuugggcaagccgccaggagucucuaucaacuugugacagguaguuugucccccgauuccguggaugaugaguuugagcugucaacaguuugccacagaccagaaggacucgagcaacugcaggagcagacuaaauucacuaggaaagagcuucaggugcuauaccgcgguuuuaagaacgagugucccuccggaauaguaaacgaggaaaauuuuaaacagauuuacucucaguuuuucccucagggcgauucgucuaccuaugcaacauuccuguuuaacgcauucgauaccaaucacgacgggucagucaguuuugaggacuuuguggcuggccuuucugugauccuuagaggaacagucgaugaccgucugaauugggccuucaaucucuacgaccuuaacaaagauggauguaucaccaaggaggaaaugcuggauaucaugaagucaauuuaugacaugaugggaaaguacacuuauccggcguugagagaagaggcaccucgcgagcauguggagagcuucuuucagaaaauggacagaaauaaagacggcguuguaacuauugaggaauucauugagucuugccaaaaagaugagaauaucaugcgauccaugcaacuauucgacaaugugaucuag

SEQ ID NO: 249817 - RNA, 678 nt, Artificial Sequence
  derived and/or modified sequence
augaacagguguccccgcagaugucgaucuccccucggucaagcugcacguucauuauaccagcuuguuaccgggucacugagucccgacaguguggaugacgaguuugaacugucuacagugugccacagaccagagggacuagaacagcuacaggagcagacaaaauuuacgcgaaaggaacugcagguuuuauaucgaggauucaagaacgaaugccccuccggcaucguaaacgaagaaaacuucaaacagaucuacucccaauuuuuuccccaaggcgacucauccacauaugccacguuucuguucaacgcauuugacaccaaucacgauggcucaguguccuuugaagacuucguugccgggcuuucugucauuuuacgaggaacuguggacgaucggcucaauugggcauuuaaucucuaugaccugaauaaggacggcugcauuacgaaggaagagaugcucgacauaaugaaguccaucuaugacaugauggguaaauauacguauccagcuuugcgcgaagaggccccccgagagcacguagaauccuuuuuucagaagauggauagaaauaaggacgggguggugacuaucgaagaauuuauugaaucuugccaaaaagaugaaaacauuaugagaaguaugcagcuguucgacaacgugaucuag

SEQ ID NO: 249818 - protein, 220 aa, Artificial Sequence
  derived and/or modified sequence
MRGQGRKESLSDSRDLDGSYDQLTDSVDDEFELSTVCHRPEGLEQLQEQTKFTRKELQVLYRGFKNECPSGIVNEENFKQIYSQFFPQGDSSTYATFLFNAFDTNHDGSVSFEDFVAGLSVILRGTVDDRLNWAFNLYDLNKDGCITKEEMLDIMKSIYDMMGKYTYPALREEAPREHVESFFQKMDRNKDGVVTIEEFIESCQKDENIMRSMQLFDNVI

SEQ ID NO: 249819 - protein, 184 aa, Artificial Sequence
  derived and/or modified sequence
MRGQGRKESLSDSRDLDGSYDQLTDSVDDEFELSTVCHRPEGLEQLQEQTKFTRKELQVLYRGFKNECPSGIVNEENFKQIYSQFFPQGDSSTYATFLFNAFDTNHDGSVSFEEMLDIMKSIYDMMGKYTYPALREEAPREHVESFFQKMDRNKDGVVTIEEFIESCQKDENIMRSMQLFDNVI

SEQ ID NO: 249820 - DNA, 663 bp, Artificial Sequence
  derived and/or modified sequence
atgagaggacagggcaggaaagagtctctttcagatagtcgcgatctcgatggaagctacgatcagctgactgattccgtcgatgatgagttcgagctttctacagtctgccatcgacctgagggactcgagcagctacaggagcaaacaaagtttactaggaaggagctgcaggtgctttataggggctttaaaaatgagtgtccatcaggtattgtgaacgaagaaaatttcaagcagatctactctcagtttttccctcagggcgactcaagcacttacgcaacattcctgtttaacgcctttgacactaatcatgacggcagcgtgagtttcgaagatttcgtcgccggactttccgtgattttgaggggaaccgtggatgatcgattaaattgggcctttaacctttacgatcttaataaggacgggtgcattaccaaagaggaaatgctggacattatgaaaagcatttatgacatgatgggcaagtacacatacccggcactgcgggaggaggccccacgggagcatgtcgagagcttcttccagaagatggatcgtaacaaggacggagtcgtaactatcgaggaattcatcgagagttgccagaaagacgaaaatataatgaggtctatgcaacttttcgacaacgtgatttag

SEQ ID NO: 249821 - DNA, 555 bp, Artificial Sequence
  derived and/or modified sequence
atgaggggacaaggcagaaaagagtccctgtctgactctagggatttagacgggagttatgaccagctcactgacagcgtggacgatgaattcgagctgagtaccgtgtgtcacaggccagagggtctggaacagctccaggaacagactaaattcacaagaaaggagttacaagtactgtatagaggcttcaagaacgagtgtccttccggcattgtaaatgaggagaatttcaagcagatctattcccagtttttccctcagggagactcatccacctatgctacatttctctttaacgctttcgataccaatcatgacggctcagtgagctttgaggagatgctggacataatgaagtccatctatgatatgatgggaaaatacacctatccagcattgcgtgaggaagcccctcgcgagcacgtggagagcttctttcagaagatggaccggaacaaggatggagtcgtgaccatcgaagaatttatcgagagttgccagaaggatgagaacattatgcggtcaatgcagctctttgacaacgtcatctag

SEQ ID NO: 249822 - DNA, 663 bp, Artificial Sequence
  derived and/or modified sequence
atgcgaggccagggcagaaaagaatctctgtcagattctagggacttggacgggtcctatgatcaactcaccgattcagtcgacgatgagtttgagctgtcaaccgtttgccacaggccagaaggacttgaacagttacaggaacagacaaaatttacccggaaggagctgcaggttctctacagaggtttcaaaaatgagtgcccttctggcattgtgaatgaggaaaattttaagcagatctacagtcagttctttccacagggagattctagcacctatgcaacctttcttttcaacgcattcgataccaaccacgatgggtctgtgagcttcgaagactttgtcgccggcttgtctgtgatactgagggggacggtggacgatagactcaactgggcctttaacctctatgatctaaataaagacggatgcatcactaaagaggagatgcttgatattatgaaatctatctacgacatgatgggcaaatatacgtatcccgcattgagggaggaagctccaagggaacatgtggagagtttctttcaaaagatggacaggaataaagacggtgtggtaacaattgaagaatttatcgagtcttgtcagaaggacgagaacattatgcggagcatgcaactctttgataacgttatatag

SEQ ID NO: 249823 - DNA, 555 bp, Artificial Sequence
  derived and/or modified sequence
atgcggggccagggaagaaaggaatcccttagcgattctagggatcttgatggcagctatgatcagcttaccgactctgtcgatgatgagttcgagctttcaacagtctgtcaccggccagagggactggagcaactgcaggaacaaaccaagtttacacggaaagaactgcaagtgctgtacaggggatttaagaacgaatgtcctagtggaatagttaacgaagagaacttcaagcagatttattcccagttttttccacagggcgatagcagtacctatgccacattcctgtttaacgcatttgataccaatcatgacggctcagttagttttgaggaaatgcttgacattatgaaatccatttacgacatgatggggaagtatacctatcccgccctgcgcgaggaggcacccagagaacatgttgagtctttctttcagaagatggatagaaacaaagatggggtcgtgaccatagaagaatttatcgaatcttgccagaaggacgagaacatcatgcgtagcatgcagctatttgataatgtgatctag

SEQ ID NO: 249824 - DNA, 663 bp, Artificial Sequence
  derived and/or modified sequence
atgagaggccagggaagaaaagagtcactgagtgattctcgcgatctcgatggctcatacgaccagctaaccgatagcgttgatgatgagtttgagctatctactgtatgccatagacctgagggcctggagcagttgcaagagcaaaccaaatttacgcgaaaagagttgcaggtcctgtacaggggctttaaaaacgaatgccctagcggaatagtcaacgaagagaacttcaaacagatctatagtcagttctttccccaaggtgattcaagtacttacgctacattcctttttaatgctttcgatactaaccatgatggctccgtcagctttgaggatttcgtcgcaggtctgtccgtgattttgcgaggaacagtagacgatagattgaattgggcctttaacctctatgatctgaacaaggacggatgcattacaaaagaggaaatgcttgatatcatgaagtccatctacgatatgatgggcaaatatacataccctgcattgcgagaagaggcaccccgcgagcatgttgaatcattctttcaaaaaatggaccgtaataaagatggcgtggtgaccattgaggaattcattgagtcgtgccagaaagacgagaatattatgcgctccatgcaactcttcgacaatgtgatttag

SEQ ID NO: 249825 - DNA, 555 bp, Artificial Sequence
  derived and/or modified sequence
atgagaggccaggggcgtaaagaatccctgagcgattcacgcgatctagatgggtcttacgatcaactgacagattctgtggatgacgaatttgagctctcaacagtgtgccataggccagaaggactcgaacagctgcaggaacagactaagttcaccagaaaggagctgcaggtgctatatcgcgggtttaagaacgaatgcccgagcggcattgtgaatgaggaaaacttcaaacaaatatacagccagtttttccctcaaggcgactcatcaacctacgctacatttttgtttaacgcattcgacaccaaccatgacggctccgtttcctttgaggaaatgctggacatcatgaagtctatttacgatatgatgggcaagtacacctaccctgcactgcgcgaagaggcccctcgagaacacgtcgagagtttttttcaaaaaatggatcgtaataaggacggcgtagtaactattgaagaatttatcgagtcttgtcagaaagatgagaacatcatgagatcaatgcagctctttgataacgtgatctag

SEQ ID NO: 249826 - DNA, 663 bp, Artificial Sequence
  derived and/or modified sequence
atgagaggccagggcagaaaggagagcctgagcgacagcagagacctggacggcagctacgaccagctgaccgacagcgtggacgacgagttcgagctgagcaccgtgtgccacagacccgagggcctggagcagctgcaggagcagaccaagttcaccagaaaggagctgcaggtgctgtacagaggcttcaagaacgagtgccccagcggcatcgtgaacgaggagaacttcaagcagatctacagccagttcttcccccagggcgacagcagcacctacgccaccttcctgttcaacgccttcgacaccaaccacgacggcagcgtgagcttcgaggacttcgtggccggcctgagcgtgatcctgagaggcaccgtggacgacagactgaactgggccttcaacctgtacgacctgaacaaggacggctgcatcaccaaggaggagatgctggacatcatgaagagcatctacgacatgatgggcaagtacacctaccccgccctgagagaggaggcccccagagagcacgtggagagcttcttccagaagatggacagaaacaaggacggcgtggtgaccatcgaggagttcatcgagagctgccagaaggacgagaacatcatgagaagcatgcagctgttcgacaacgtgatctag

SEQ ID NO: 249827 - DNA, 555 bp, Artificial Sequence
  derived and/or modified sequence
atgagaggccagggcagaaaggagagcctgagcgacagcagagacctggacggcagctacgaccagctgaccgacagcgtggacgacgagttcgagctgagcaccgtgtgccacagacccgagggcctggagcagctgcaggagcagaccaagttcaccagaaaggagctgcaggtgctgtacagaggcttcaagaacgagtgccccagcggcatcgtgaacgaggagaacttcaagcagatctacagccagttcttcccccagggcgacagcagcacctacgccaccttcctgttcaacgccttcgacaccaaccacgacggcagcgtgagcttcgaggagatgctggacatcatgaagagcatctacgacatgatgggcaagtacacctaccccgccctgagagaggaggcccccagagagcacgtggagagcttcttccagaagatggacagaaacaaggacggcgtggtgaccatcgaggagttcatcgagagctgccagaaggacgagaacatcatgagaagcatgcagctgttcgacaacgtgatctag

SEQ ID NO: 249828 - DNA, 663 bp, Artificial Sequence
  derived and/or modified sequence
atgcgtggacaaggaaggaaagagagtctttccgacagccgagatttagacggctcttatgaccagttgaccgactctgtggacgacgagttcgagctgagcacagtgtgtcaccgcccagaggggctggagcaactccaggagcaaaccaagttcactcgcaaagagctgcaagtcctgtacaggggcttcaaaaatgagtgtccgtcaggtattgtcaatgaagagaattttaaacagatctatagtcagttctttccgcaaggcgattcctcaacctacgccacatttctgtttaacgcctttgacaccaaccacgacgggagtgtgagcttcgaggacttcgtcgccggcctcagtgtcattctgcgaggtacggttgatgaccgccttaactgggcttttaatttatatgatctgaacaaagatgggtgtattacaaaggaagagatgttggacattatgaagtcaatttatgacatgatgggaaagtatacataccctgctctgagagaagaggctcccagggagcacgtcgagagtttcttccaaaagatggatcggaacaaggacggcgtagtcaccatcgaggaattcatcgagtcttgccagaaggatgagaatataatgaggtccatgcagctgtttgacaacgtaatatag

SEQ ID NO: 249829 - DNA, 555 bp, Artificial Sequence
  derived and/or modified sequence
atgagagggcagggccggaaggagtccctcagtgattccagagacctggacggctcctacgaccaactgacagacagcgtggatgatgagtttgagctaagcacagtatgtcaccgacctgaaggactcgagcagctccaagagcagacgaagttcacgcgcaaggaactgcaggtcctgtatcgcggtttcaaaaacgagtgcccgagtgggatcgtgaatgaggagaacttcaagcagatttatagtcagttcttcccccagggagacagcagcacgtatgccactttccttttcaatgcgttcgataccaatcatgatggttctgtgagcttcgaggagatgttagatattatgaaatcaatctatgatatgatgggcaagtacacctaccccgcactcagggaggaagcacctcgggagcacgtggaatcttttttccaaaaaatggacagaaacaaggatggtgtggtcaccatcgaggaattcatcgaaagttgccagaaagacgagaatataatgagaagcatgcagctgtttgacaacgtgatatag

SEQ ID NO: 249830 - DNA, 663 bp, Artificial Sequence
  derived and/or modified sequence
atgcggggccagggccgcaaggagagtttgtccgattcccgagacctggacggctcctacgaccagctcacggacagcgtggacgatgaatttgaattgtccaccgtgtgtcaccggcctgagggtctggagcagctgcaggagcaaaccaaattcacgcgcaaggagttgcaggtcctgtaccggggcttcaagaacgaatgtcccagcggaattgtcaatgaggagaacttcaagcagatttactcccagttctttcctcaaggagactccagcacctatgccacttttctcttcaatgcctttgacaccaaccatgatggctcggtcagttttgaggactttgtggctggtttgtccgtgattcttcggggaactgtagatgacaggcttaattgggccttcaacctgtatgaccttaacaaggacggctgcatcaccaaggaggaaatgcttgacatcatgaagtccatctatgacatgatgggcaagtacacgtaccctgcactccgggaggaggccccaagggaacacgtggagagcttcttccagaagatggacagaaacaaggatggtgtggtgaccattgaggaattcattgagtcttgtcaaaaggatgagaacatcatgaggtccatgcagctctttgacaatgtcatctag

SEQ ID NO: 249831 - DNA, 663 bp, Artificial Sequence
  derived and/or modified sequence
atgaggggccagggcaggaaggagagcctgagtgacagccgggacctggatggcagctatgaccagctgacagacagcgtggatgatgaatttgagctgagcacagtgtgccacaggcctgagggcctggagcagctgcaggagcagaccaagttcaccaggaaggagctgcaggtgctgtaccggggcttcaagaatgaatgtcccagcggcatcgtgaatgaggagaacttcaagcagatctacagccagttcttcccccagggcgacagcagcacctacgccaccttcctgttcaatgcctttgacaccaaccatgatggctctgtgtcctttgaagattttgtggccggcctgagcgtcatcctgcggggcaccgtggatgaccggctgaactgggccttcaacctgtatgacctgaacaaggatggctgcatcaccaaggaggagatgctggacatcatgaagagcatctatgacatgatgggcaagtacacctacccagccctgcgggaggaggccccccgggagcacgtggagagcttcttccagaagatggacaggaacaaggatggagtggtgaccatcgaggagttcatcgagagctgccagaaggatgagaacatcatgaggtccatgcagctgtttgacaacgtcatctag

SEQ ID NO: 249832 - DNA, 923 bp, Artificial Sequence
  derived and/or modified sequence
ctgctgcctagtgttccctctcctgctccaggacctccgggtagacctcagaccccgggcccattcccagactcagcctcagcccggacttccccagccccgacagcacagtaggccgccagggggcgccgtgtgagcgccctatcccggccacccggcgccccctcccacggcccgggcgggagcggggcgccgggggccatgcggggccagggccgcaaggagagtttgtccgattcccgagacctggacggctcctacgaccagctcacggacagcgtggacgatgaatttgaattgtccaccgtgtgtcaccggcctgagggtctggagcagctgcaggagcaaaccaaattcacgcgcaaggagttgcaggtcctgtaccggggcttcaagaacgaatgtcccagcggaattgtcaatgaggagaacttcaagcagatttactcccagttctttcctcaaggagactccagcacctatgccacttttctcttcaatgcctttgacaccaaccatgatggctcggtcagttttgaggaaatgcttgacatcatgaagtccatctatgacatgatgggcaagtacacgtaccctgcactccgggaggaggccccaagggaacacgtggagagcttcttccagaagatggacagaaacaaggatggtgtggtgaccattgaggaattcattgagtcttgtcaaaaggatgagaacatcatgaggtccatgcagctctttgacaatgtcatctagcccccaggagagggggtcagtgtttcctggggggaccatgctctaaccctagtccaggcggacctcacccttctcttcccaggtctatcctcatcctacgcctccctgggggctggagggatccaagagcttggggattcagtagtccagatctctggagctgaagg

SEQ ID NO: 249833 - DNA, 555 bp, Artificial Sequence
  derived and/or modified sequence
atgaggggccagggcaggaaggagagcctgagtgacagccgggacctggatggcagctatgaccagctgacagacagcgtggatgatgaatttgagctgagcacagtgtgccacaggcctgagggcctggagcagctgcaggagcagaccaagttcaccaggaaggagctgcaggtgctgtaccggggcttcaagaatgaatgtcccagcggcatcgtgaatgaggagaacttcaagcagatctacagccagttcttcccccagggcgacagcagcacctacgccaccttcctgttcaatgcctttgacaccaaccatgatggctctgtgtcctttgaggagatgctggacatcatgaagagcatctatgacatgatgggcaagtacacctacccagccctgcgggaggaggccccccgggagcacgtggagagcttcttccagaagatggacaggaacaaggatggagtggtgaccatcgaggagttcatcgagagctgccagaaggatgagaacatcatgaggtccatgcagctgtttgacaacgtcatctag

SEQ ID NO: 249834 - DNA, 663 bp, Artificial Sequence
  derived and/or modified sequence
atgcggggccagggccggaaggagagcctgagcgacagccgggacctagacggctcttacgatcagctgactgacagtgtagatgatgagtttgagttatccacggtgtgtcatcggccagagggtctggagcagctgcaggagcagaccaagttcactagaaaggagctccaggtgctttatcggggattcaaaaacgaatgccccagcggcattgtaaacgaagaaaattttaagcagatttacagtcaattctttccacagggcgattccagcacctacgccacgttcctgtttaatgctttcgataccaatcatgacggatccgtgtcatttgaggactttgttgctggcctatccgtgatactgagggggacagtcgacgataggctgaactgggcctttaatctttacgatctgaacaaggacggctgtatcacaaaagaggaaatgctggacattatgaagtccatctacgacatgatgggaaagtacacgtaccccgcccttcgggaggaagctcctagggagcacgtggaatccttctttcagaaaatggataggaacaaggatggggttgtgaccatagaagagttcatagagtcctgtcagaaggacgagaacattatgaggtctatgcagctgtttgataatgtgatttag

SEQ ID NO: 249835 - DNA, 555 bp, Artificial Sequence
  derived and/or modified sequence
atgcggggccagggccggaaggagagcctgagcgacagccgggacttggacggctcttatgatcagctgaccgattcggtggacgacgagttcgaattgagtaccgtctgtcaccgcccagaaggcttggaacagctgcaggagcagactaagttcacccgcaaagaacttcaggtgctctacagagggttcaagaacgagtgcccctcaggtatagttaacgaagagaacttcaagcagatctactcccagttttttccccagggagattcatctacttatgctacattcctgttcaatgcctttgacactaatcacgacggttctgtctcctttgaagagatgctggatattatgaaatcgatctatgacatgatggggaagtatacgtatcccgcccttcgcgaagaagcacccagagaacatgtggagagttttttccagaagatggacagaaacaaagacggtgtggtcacaattgaagagtttatagaatcttgccagaaggacgagaacatcatgcggagcatgcagttatttgacaacgtgatttag

SEQ ID NO: 249836 - RNA, 663 nt, Artificial Sequence
  derived and/or modified sequence
augcgaggccagggcagaaaagaaucucugucagauucuagggacuuggacggguccuaugaucaacucaccgauucagucgacgaugaguuugagcugucaaccguuugccacaggccagaaggacuugaacaguuacaggaacagacaaaauuuacccggaaggagcugcagguucucuacagagguuucaaaaaugagugcccuucuggcauugugaaugaggaaaauuuuaagcagaucuacagucaguucuuuccacagggagauucuagcaccuaugcaaccuuucuuuucaacgcauucgauaccaaccacgaugggucugugagcuucgaagacuuugucgccggcuugucugugauacugagggggacgguggacgauagacucaacugggccuuuaaccucuaugaucuaaauaaagacggaugcaucacuaaagaggagaugcuugauauuaugaaaucuaucuacgacaugaugggcaaauauacguaucccgcauugagggaggaagcuccaagggaacauguggagaguuucuuucaaaagauggacaggaauaaagacggugugguaacaauugaagaauuuaucgagucuugucagaaggacgagaacauuaugcggagcaugcaacucuuugauaacguuauauag

SEQ ID NO: 249837 - RNA, 555 nt, Artificial Sequence
  derived and/or modified sequence
augcggggccagggaagaaaggaaucccuuagcgauucuagggaucuugauggcagcuaugaucagcuuaccgacucugucgaugaugaguucgagcuuucaacagucugucaccggccagagggacuggagcaacugcaggaacaaaccaaguuuacacggaaagaacugcaagugcuguacaggggauuuaagaacgaauguccuaguggaauaguuaacgaagagaacuucaagcagauuuauucccaguuuuuuccacagggcgauagcaguaccuaugccacauuccuguuuaacgcauuugauaccaaucaugacggcucaguuaguuuugaggaaaugcuugacauuaugaaauccauuuacgacaugauggggaaguauaccuaucccgcccugcgcgaggaggcacccagagaacauguugagucuuucuuucagaagauggauagaaacaaagauggggucgugaccauagaagaauuuaucgaaucuugccagaaggacgagaacaucaugcguagcaugcagcuauuugauaaugugaucuag

SEQ ID NO: 249838 - RNA, 663 nt, Artificial Sequence
  derived and/or modified sequence
augagaggccagggaagaaaagagucacugagugauucucgcgaucucgauggcucauacgaccagcuaaccgauagcguugaugaugaguuugagcuaucuacuguaugccauagaccugagggccuggagcaguugcaagagcaaaccaaauuuacgcgaaaagaguugcagguccuguacaggggcuuuaaaaacgaaugcccuagcggaauagucaacgaagagaacuucaaacagaucuauagucaguucuuuccccaaggugauucaaguacuuacgcuacauuccuuuuuaaugcuuucgauacuaaccaugauggcuccgucagcuuugaggauuucgucgcaggucuguccgugauuuugcgaggaacaguagacgauagauugaauugggccuuuaaccucuaugaucugaacaaggacggaugcauuacaaaagaggaaaugcuugauaucaugaaguccaucuacgauaugaugggcaaauauacauacccugcauugcgagaagaggcaccccgcgagcauguugaaucauucuuucaaaaaauggaccguaauaaagauggcguggugaccauugaggaauucauugagucgugccagaaagacgagaauauuaugcgcuccaugcaacucuucgacaaugugauuuag

SEQ ID NO: 249839 - RNA, 555 nt, Artificial Sequence
  derived and/or modified sequence
augagaggccaggggcguaaagaaucccugagcgauucacgcgaucuagaugggucuuacgaucaacugacagauucuguggaugacgaauuugagcucucaacagugugccauaggccagaaggacucgaacagcugcaggaacagacuaaguucaccagaaaggagcugcaggugcuauaucgcggguuuaagaacgaaugcccgagcggcauugugaaugaggaaaacuucaaacaaauauacagccaguuuuucccucaaggcgacucaucaaccuacgcuacauuuuuguuuaacgcauucgacaccaaccaugacggcuccguuuccuuugaggaaaugcuggacaucaugaagucuauuuacgauaugaugggcaaguacaccuacccugcacugcgcgaagaggccccucgagaacacgucgagaguuuuuuucaaaaaauggaucguaauaaggacggcguaguaacuauugaagaauuuaucgagucuugucagaaagaugagaacaucaugagaucaaugcagcucuuugauaacgugaucuag

SEQ ID NO: 249840 - protein, 184 aa, Artificial Sequence
  derived and/or modified sequence
MRGQGRKESLSDSRDLDGSYDQLTDSVDDEFELSTVCHRPEGLEQLQEQTKFTRKELQVLYRGFKNECPSGIVNEENFKQIYSQFFPQGDSSTYATFLFNAFDTNHDGSVSFEEMLDIMKSIYDMMGKYTYPALREEAPREHVESFFQKMDRNKDGVVTIEEFIESCQKVQLPALYITLTWTQA

SEQ ID NO: 249841 - DNA, 555 bp, Artificial Sequence
  derived and/or modified sequence
atgaggggacaggggaggaaggaatccctttccgattcgcgggacctagatggctcctatgatcagcttactgattcagttgacgatgagtttgagcttagcacagtgtgtcaccggcctgaaggtctggagcagttacaagagcagaccaagttcacccgaaaagaactgcaggtactctatcgaggatttaaaaatgagtgtccctccggcatcgtgaacgaagagaactttaagcagatctatagccagttctttccacagggggatagttccacctatgccacattcctcttcaatgcatttgacaccaatcacgacggctccgtgagctttgaggaaatgctggacatcatgaaaagtatctacgatatgatgggtaagtatacctacccggcactgcgcgaggaggctcccagagagcatgtagaatcttttttccagaagatggatagaaacaaggatggtgtggtgacgatagaggagttcatcgagtcctgtcagaaggtccagctccctgcgttgtacatcactttaacctggactcaggcttag

SEQ ID NO: 249842 - DNA, 555 bp, Artificial Sequence
  derived and/or modified sequence
atgagggggcagggcaggaaagagagtctaagtgattccagagatcttgatggatcctatgatcagcttacggatagtgtggacgacgaattcgaactaagtaccgtatgccataggccagagggcctagaacagttgcaagagcagacaaaattcacgagaaaagaacttcaggtgctgtatcgaggtttcaagaacgagtgtccatccgggattgttaacgaggagaatttcaaacagatttactcccaattttttcctcagggagatagtagcacttacgcgacctttctgttcaatgcattcgatactaatcacgacggatcagtgagctttgaagaaatgctcgatattatgaagagcatatacgatatgatgggcaagtacacataccctgcactcagggaggaagcacctcgcgagcacgtcgaaagtttctttcagaagatggaccggaataaggatggggtggtgacgatcgaggaattcatagagagttgtcagaaggtgcagctgcctgcactgtatatcacattaacatggacacaagcctag

SEQ ID NO: 249843 - DNA, 555 bp, Artificial Sequence
  derived and/or modified sequence
atgagggggcagggcaggaaagagagtctaagtgattccagagatcttgatggatcctatgatcagcttacggatagtgtggacgacgaattcgaactaagtaccgtatgccataggccagagggcctagaacagttgcaagagcagacaaaattcacgagaaaagaacttcaggtgctgtatcgaggtttcaagaacgagtgtccatccgggattgttaacgaggagaatttcaaacagatttactcccaattttttcctcagggagatagtagcacttacgcgacctttctgttcaatgctttcgatactaatcatgacggttccgtgagcttcgaagaaatgttggatatcatgaagagcatctacgacatgatgggcaaatatacgtatccggcgctgcgggaagaagcccctcgggagcacgtggaaagtttttttcagaaaatggatcgtaataaagatggagtggtcacaatagaggagttcatcgagagttgtcagaaggtacaactacccgccctttacattacgttaacctggacacaagcctag

SEQ ID NO: 249844 - DNA, 555 bp, Artificial Sequence
  derived and/or modified sequence
atgcggggccagggccgcaaggagagtttgtccgattcccgagacctggacggctcctacgaccagctcacggacagcgtggacgatgaatttgaattgtccaccgtgtgtcaccggcctgagggtctggagcagctgcaggagcaaaccaaattcacgcgcaaggagttgcaggtcctgtaccggggcttcaagaacgaatgtcccagcggaattgtcaatgaggagaacttcaagcagatttactcccagttctttcctcaaggagactccagcacctatgccacttttctcttcaatgcctttgacaccaaccatgatggctcggtcagttttgaggaaatgcttgacatcatgaagtccatctatgacatgatgggcaagtacacgtaccctgcactccgggaggaggccccaagggaacacgtggagagcttcttccagaagatggacagaaacaaggatggtgtggtgaccattgaggaattcattgagtcttgtcaaaaggtacagctccctgccctctacattaccctgacctggactcaggcctga

SEQ ID NO: 249845 - DNA, 555 bp, Artificial Sequence
  derived and/or modified sequence
atgagaggccagggcagaaaggagagcctgagcgacagcagagacctggacggcagctacgaccagctgaccgacagcgtggacgacgagttcgagctgagcaccgtgtgccacagacccgagggcctggagcagctgcaggagcagaccaagttcaccagaaaggagctgcaggtgctgtacagaggcttcaagaacgagtgccccagcggcatcgtgaacgaggagaacttcaagcagatctacagccagttcttcccccagggcgacagcagcacctacgccaccttcctgttcaacgccttcgacaccaaccacgacggcagcgtgagcttcgaggagatgctggacatcatgaagagcatctacgacatgatgggcaagtacacctaccccgccctgagagaggaggcccccagagagcacgtggagagcttcttccagaagatggacagaaacaaggacggcgtggtgaccatcgaggagttcatcgagagctgccagaaggtgcagctgcccgccctgtacatcaccctgacctggacccaggcctag

SEQ ID NO: 249846 - DNA, 555 bp, Artificial Sequence
  derived and/or modified sequence
atgaggggacagggccgcaaagagtctctgtcagactcccgagacctcgatgggtcttacgaccaactgacggacagcgtggacgacgagtttgagctcagcacggtttgccatcgtccagaaggcctggaacagcttcaggaacagaccaagttcactcgcaaggagctgcaagtgctttaccgaggttttaagaatgaatgtccgtctggcatagtgaacgaagagaactttaaacagatttactcacagttctttcctcagggggacagttccacatacgccacgttcctcttcaacgctttcgacacaaaccacgatggatccgtgtcctttgaggagatgctggacatcatgaaaagcatttacgatatgatggggaagtacacttaccccgcgctgagggaggaagcccccagagagcacgttgagtcctttttccagaaaatggaccgaaacaaggatggcgtcgtgactattgaggagttcattgagtcatgccagaaggtccagcttccagctctctatataactctgacttggacacaggcgtag

SEQ ID NO: 249847 - DNA, 555 bp, Artificial Sequence
  derived and/or modified sequence
atgaggggccagggcaggaaggagagcctgagtgacagccgggacctggatggcagctatgaccagctgacagacagcgtggatgatgaatttgagctgagcacagtgtgccacaggcctgagggcctggagcagctgcaggagcagaccaagttcaccaggaaggagctgcaggtgctgtaccggggcttcaagaatgaatgtcccagcggcatcgtgaatgaggagaacttcaagcagatctacagccagttcttcccccagggcgacagcagcacctacgccaccttcctgttcaatgcctttgacaccaaccatgatggctctgtgtcctttgaggagatgctggacatcatgaagagcatctatgacatgatgggcaagtacacctacccagccctgcgggaggaggccccccgggagcacgtggagagcttcttccagaagatggacaggaacaaggatggagtggtgaccatcgaggagttcatcgagagctgccagaaggtgcagctgcctgccctgtacatcaccctgacctggacccaggcctag

SEQ ID NO: 249848 - DNA, 555 bp, Artificial Sequence
  derived and/or modified sequence
atgcggggccagggccggaaggagagcctgagcgacagccgggacctagacgggagctatgaccagttgactgattcagtagacgacgagttcgagctgagtacagtttgccacaggcctgaagggctggaacaattgcaggagcagaccaaattcacaaggaaagaactgcaggtgctgtaccggggattcaagaatgagtgccccagcggaattgtcaatgaggagaattttaaacagatctattcacagttttttccccagggagattcctccacgtatgcgacatttctcttcaacgctttcgacaccaaccatgatggaagtgtatcatttgaggaaatgctcgatatcatgaagagcatctacgatatgatggggaaatatacctatcccgccctcagagaggaagcacctcgggaacatgtcgagtcctttttccagaaaatggacagaaataaagacggagtggtgacgattgaggaatttatcgagtcatgccagaaggtgcagctgccagccctctacatcacccttacctggacccaggcatag

SEQ ID NO: 249849 - RNA, 555 nt, Artificial Sequence
  derived and/or modified sequence
augagggggcagggcaggaaagagagucuaagugauuccagagaucuugauggauccuaugaucagcuuacggauaguguggacgacgaauucgaacuaaguaccguaugccauaggccagagggccuagaacaguugcaagagcagacaaaauucacgagaaaagaacuucaggugcuguaucgagguuucaagaacgaguguccauccgggauuguuaacgaggagaauuucaaacagauuuacucccaauuuuuuccucagggagauaguagcacuuacgcgaccuuucuguucaaugcauucgauacuaaucacgacggaucagugagcuuugaagaaaugcucgauauuaugaagagcauauacgauaugaugggcaaguacacauacccugcacucagggaggaagcaccucgcgagcacgucgaaaguuucuuucagaagauggaccggaauaaggaugggguggugacgaucgaggaauucauagagaguugucagaaggugcagcugccugcacuguauaucacauuaacauggacacaagccuag

SEQ ID NO: 249850 - RNA, 555 nt, Artificial Sequence
  derived and/or modified sequence
augagggggcagggcaggaaagagagucuaagugauuccagagaucuugauggauccuaugaucagcuuacggauaguguggacgacgaauucgaacuaaguaccguaugccauaggccagagggccuagaacaguugcaagagcagacaaaauucacgagaaaagaacuucaggugcuguaucgagguuucaagaacgaguguccauccgggauuguuaacgaggagaauuucaaacagauuuacucccaauuuuuuccucagggagauaguagcacuuacgcgaccuuucuguucaaugcuuucgauacuaaucaugacgguuccgugagcuucgaagaaauguuggauaucaugaagagcaucuacgacaugaugggcaaauauacguauccggcgcugcgggaagaagccccucgggagcacguggaaaguuuuuuucagaaaauggaucguaauaaagauggaguggucacaauagaggaguucaucgagaguugucagaagguacaacuacccgcccuuuacauuacguuaaccuggacacaagccuag

SEQ ID NO: 249851 - protein, 443 aa, Artificial Sequence
  derived and/or modified sequence
MPCVQAQYSPSPPGSSYAAQTYSSEYTTEIMNPDYTKLTMDLGSTEITATATTSLPSISTFVEGYSSNYELKPSCVYQMQRPLIKVEEGRAPSYHHHHHHHHHHHHHHQQQHQQPSIPPASSPEDEVLPSTSMYFKQSPPSTPTTPAFPPQAGALWDEALPSAPGCIAPGPLLDPPMKAVPTVAGARFPLFHFKPSPPHPPAPSPAGGHHLGYDPTAAAALSLPLGAAAAAGSQAAALESHPYGLPLAKRAAPLAFPPLGLTPSPTASSLLGESPSLPSPPSRSSSSGEGTCAVCGDNAACQHYGVRTCEGCKGFFKRTVQKNAKYVCLANKNCPVDKRRRNRCQYCRFQKCLSVGMVKEVVRTDSLKGRRGRLPSKPKSPLQQEPSQPSPPSPPICMMNALVRALTDSTPRDLDYSRVSFMISCFQMNDQGLYLWLLVIRVD

SEQ ID NO: 249852 - protein, 297 aa, Artificial Sequence
  derived and/or modified sequence
MKAVPTVAGARFPLFHFKPSPPHPPAPSPAGGHHLGYDPTAAAALSLPLGAAAAAGSQAAALESHPYGLPLAKRAAPLAFPPLGLTPSPTASSLLGESPSLPSPPSRSSSSGEGTCAVCGDNAACQHYGVRTCEGCKGFFKRTVQKNAKYVCLANKNCPVDKRRRNRCQYCRFQKCLSVGMVKEVVRTDSLKGRRGRLPSKPKSPLQQEPSQPSPPSPPICMMNALVRALTDSTPRDLDYSRVSFMISCFQMNDQGLYLWLLVIRVLDSFHTFSIFLASFSNSVHPLQQIIFALLNL

SEQ ID NO: 249853 - DNA, 1332 bp, Artificial Sequence
  derived and/or modified sequence
atgccctgcgtgcaggcccagtacagccccagcccccccggcagcagctacgccgcccagacctacagcagcgagtacaccaccgagatcatgaaccccgactacaccaagctgaccatggacctgggcagcaccgagatcaccgccaccgccaccaccagcctgcccagcatcagcaccttcgtggagggctacagcagcaactacgagctgaagcccagctgcgtgtaccagatgcagagacccctgatcaaggtggaggagggcagagcccccagctaccaccaccaccaccaccaccaccaccaccaccaccaccaccaccagcagcagcaccagcagcccagcatcccccccgccagcagccccgaggacgaggtgctgcccagcaccagcatgtacttcaagcagagcccccccagcacccccaccacccccgccttccccccccaggccggcgccctgtgggacgaggccctgcccagcgcccccggctgcatcgcccccggccccctgctggacccccccatgaaggccgtgcccaccgtggccggcgccagattccccctgttccacttcaagcccagccccccccacccccccgcccccagccccgccggcggccaccacctgggctacgaccccaccgccgccgccgccctgagcctgcccctgggcgccgccgccgccgccggcagccaggccgccgccctggagagccacccctacggcctgcccctggccaagagagccgcccccctggccttcccccccctgggcctgacccccagccccaccgccagcagcctgctgggcgagagccccagcctgcccagcccccccagcagaagcagcagcagcggcgagggcacctgcgccgtgtgcggcgacaacgccgcctgccagcactacggcgtgagaacctgcgagggctgcaagggcttcttcaagagaaccgtgcagaagaacgccaagtacgtgtgcctggccaacaagaactgccccgtggacaagagaagaagaaacagatgccagtactgcagattccagaagtgcctgagcgtgggcatggtgaaggaggtggtgagaaccgacagcctgaagggcagaagaggcagactgcccagcaagcccaagagccccctgcagcaggagcccagccagcccagcccccccagcccccccatctgcatgatgaacgccctggtgagagccctgaccgacagcacccccagagacctggactacagcagagtgagcttcatgatcagctgcttccagatgaacgaccagggcctgtacctgtggctgctggtgatcagagtggactag

SEQ ID NO: 249854 - DNA, 894 bp, Artificial Sequence
  derived and/or modified sequence
atgaaggccgtgcccaccgtggccggcgccagattccccctgttccacttcaagcccagccccccccacccccccgcccccagccccgccggcggccaccacctgggctacgaccccaccgccgccgccgccctgagcctgcccctgggcgccgccgccgccgccggcagccaggccgccgccctggagagccacccctacggcctgcccctggccaagagagccgcccccctggccttcccccccctgggcctgacccccagccccaccgccagcagcctgctgggcgagagccccagcctgcccagcccccccagcagaagcagcagcagcggcgagggcacctgcgccgtgtgcggcgacaacgccgcctgccagcactacggcgtgagaacctgcgagggctgcaagggcttcttcaagagaaccgtgcagaagaacgccaagtacgtgtgcctggccaacaagaactgccccgtggacaagagaagaagaaacagatgccagtactgcagattccagaagtgcctgagcgtgggcatggtgaaggaggtggtgagaaccgacagcctgaagggcagaagaggcagactgcccagcaagcccaagagccccctgcagcaggagcccagccagcccagcccccccagcccccccatctgcatgatgaacgccctggtgagagccctgaccgacagcacccccagagacctggactacagcagagtgagcttcatgatcagctgcttccagatgaacgaccagggcctgtacctgtggctgctggtgatcagagtgctggacagcttccacaccttcagcatcttcctggccagcttcagcaacagcgtgcaccccctgcagcagatcatcttcgccctgctgaacctgtag

SEQ ID NO: 249855 - DNA, 1332 bp, Artificial Sequence
  derived and/or modified sequence
atgccatgcgtacaggcacagtattctccgtcccccccaggaagttcttacgcagcccagacttactccagtgaatataccacagagatcatgaaccccgactacacgaagctaaccatggatcttgggtcaaccgaaatcacagctacagccactactagcctgccgtcaatttcaaccttcgtggagggctactcctctaattacgaactgaagccctcgtgcgtgtaccagatgcaacggccactgatcaaggtcgaagaaggaagggcaccaagttatcatcaccaccaccaccaccaccatcaccatcaccaccaccatcaacagcaacaccagcagccaagtatccctccggcaagctcccctgaggatgaggtgttgccctcaacttcaatgtatttcaagcagtccccaccgtccacgccaaccacaccggctttcccgccgcaggccggtgccctgtgggatgaagccctcccgagtgcccccgggtgcatcgccccaggacctttgctagatcccccaatgaaggctgtgcctacagttgccggcgcacgattcccccttttccacttcaagccgagtcctccccatccgccggctccctcaccagccggcgggcaccacctggggtacgacccaacagctgctgccgccctgtcgctgcccctgggcgccgccgctgccgctgggtctcaagccgctgcactcgagagtcatccttatggccttcccttagccaaaagggcagctcctctggccttcccccccttgggattgaccccgtcacctactgcctcatctctgctcggggaaagcccttctctaccgagccctccatccaggagctctagcagtggcgagggaacatgcgctgtctgtggagacaacgctgcatgccaacactacggcgtgcggacttgtgaaggctgcaaagggtttttcaagcgaacagtccagaaaaacgcgaagtacgtgtgcctcgcaaataaaaactgccccgtggacaaacggaggcgcaataggtgccagtactgtaggttccagaagtgcctgtcagttgggatggtgaaagaggtcgtccgaactgactccctgaagggcaggaggggacggctgccttctaaacccaaatctcccttgcagcaggaacctagccagccttctcccccttctcccccaatttgtatgatgaacgctctggtgcgggctctgactgatagcacgccgcgggacttggactactctcgggtctcatttatgatctcctgcttccagatgaacgatcagggcctgtatctttggctgttggtcatcagggtcgactag

SEQ ID NO: 249856 - DNA, 894 bp, Artificial Sequence
  derived and/or modified sequence
atgaaagcggtccccactgtggccggcgcccgattccccctgttccacttcaaacctagccccccacatccccctgcaccatccccagcgggaggacatcatctcggttatgatccaactgctgccgccgccctgtctctgccactcggcgccgccgcggcagctggtagccaggctgctgcactcgaatctcatccttacgggttaccactggctaagcgcgctgctccgctggccttccctcctctcggattaacgccatcccccactgcatccagcttgttgggcgaatcgccctccttgccaagccctccctcccggtctagcagttcaggggaggggacatgtgctgtctgcggagataacgcagcctgccagcattatggtgttagaacctgtgagggatgtaaagggttcttcaagagaacagtccagaaaaacgctaagtatgtctgcttagctaacaagaattgtccggttgacaaaagacgacgcaatcggtgccagtactgtcgctttcaaaagtgtctcagcgttggaatggtgaaagaagttgtgcgtactgatagtctgaaaggtcgccggggacgattacccagcaagcccaagtctcccctgcagcaggaacccagccaaccatcccccccttctcccccaatctgcatgatgaatgcactcgtgagagccttaacagattccactccccgagaccttgattactcaagggtttctttcatgatctcttgcttccagatgaacgaccagggcctttatctctggctactcgtgatacgagtgctggactcttttcacacattctccatctttttagcatcattctctaacagcgtacatcccctgcagcaaatcatcttcgccctattaaacctgtag

SEQ ID NO: 249857 - DNA, 1332 bp, Artificial Sequence
  derived and/or modified sequence
atgccctgtgtgcaggcccagtacagccccagccccccaggcagcagctatgctgcccagacctacagcagcgagtacaccacagagatcatgaacccagactacaccaagctgaccatggacctgggcagcacagagatcacagccacagccaccaccagcctgcccagcatcagcacctttgtggagggctacagcagcaactatgagctgaagcccagctgtgtgtaccagatgcagaggcccctcatcaaggtggaggagggccgggcccccagctaccaccaccaccaccaccaccaccaccaccaccaccaccaccaccagcagcagcaccagcagcccagcatccccccagccagcagcccagaagatgaggtgctgcccagcacctccatgtacttcaagcagagcccccccagcacccccaccaccccagccttccccccccaggccggggccctgtgggatgaggccctgcccagcgcccctggctgcatcgcccctggccccctgctggacccccccatgaaggctgtgcccaccgtggccggggcccgcttccccctcttccacttcaagcccagccccccccaccccccagcccccagccctgctgggggccaccacctgggctatgaccccacagctgctgctgccctgagcctgcccctgggcgctgctgctgctgctggcagccaggccgccgccctggagagccacccctacggcctgcccctggccaagagagctgcccccctggccttcccccccctgggcctgacccccagccccacagccagcagcctgctgggggagagccccagcctgcccagcccccccagccgcagcagcagcagtggagagggcacctgtgctgtgtgtggggacaatgctgcctgccagcactacggcgtgaggacctgtgagggctgcaagggcttcttcaagaggacagtgcagaagaatgccaagtatgtgtgcctggccaacaagaactgccctgtggacaagagaagaagaaaccgctgccagtactgccgcttccagaagtgcctgtctgtgggcatggtgaaggaggtggtgaggacagacagcctgaagggccggcggggccgcctgcccagcaagcccaagagccccctgcagcaggagcccagccagcccagcccccccagcccccccatctgcatgatgaatgccctggtgcgggccctgacagacagcaccccccgggacctggactacagccgggtgtccttcatgatcagctgcttccagatgaatgaccagggcctgtacctgtggctgctggtgatccgggtggactag

SEQ ID NO: 249858 - DNA, 894 bp, Artificial Sequence
  derived and/or modified sequence
atgaaggctgtgcccaccgtggccggggcccgcttccccctcttccacttcaagcccagccccccccaccccccagcccccagccctgctgggggccaccacctgggctatgaccccacagctgctgctgccctgagcctgcccctgggcgctgctgctgctgctggcagccaggccgccgccctggagagccacccctacggcctgcccctggccaagagagctgcccccctggccttcccccccctgggcctgacccccagccccacagccagcagcctgctgggggagagccccagcctgcccagcccccccagccgcagcagcagcagtggagagggcacctgtgctgtgtgtggggacaatgctgcctgccagcactacggcgtgaggacctgtgagggctgcaagggcttcttcaagaggacagtgcagaagaatgccaagtatgtgtgcctggccaacaagaactgccctgtggacaagagaagaagaaaccgctgccagtactgccgcttccagaagtgcctgtctgtgggcatggtgaaggaggtggtgaggacagacagcctgaagggccggcggggccgcctgcccagcaagcccaagagccccctgcagcaggagcccagccagcccagcccccccagcccccccatctgcatgatgaatgccctggtgcgggccctgacagacagcaccccccgggacctggactacagccgggtgtccttcatgatcagctgcttccagatgaatgaccagggcctgtacctgtggctgctggtgatccgggtgctggacagcttccacaccttcagcatcttcctggccagcttcagcaacagcgtgcaccccctgcagcagatcatctttgccctgctgaacctgtag

SEQ ID NO: 249859 - DNA, 1332 bp, Artificial Sequence
  derived and/or modified sequence
atgccctgcgtgcaggcccagtacagccccagcccccccggcagcagctatgcggcccagacttactcgagtgagtataccaccgaaatcatgaaccccgattatactaaacttacgatggacctcggctcaacagaaattacagccacggccacaacctctttgcctagcatcagcacattcgtcgaaggatacagcagtaattacgaactcaaaccctcttgtgtctatcaaatgcaaaggccgttgataaaagtggaggaagggagggccccatcataccaccatcaccaccatcatcaccaccaccatcatcatcaccaccaacagcagcatcaacagcctagcattcctccagcatcatctccagaggacgaggtactcccaagtacaagcatgtattttaaacaaagtcctcctagcacccccaccaccccagctttcccaccccaggctggcgcactctgggatgaggctctccccagcgccccaggatgcatcgcacctgggccactgcttgaccccccgatgaaagctgtacctaccgtagctggcgcacggttccctctcttccactttaagccaagccccccacacccccctgctccaagccctgccggtggccatcatctggggtatgaccccactgcagccgcggcgctctccctccccttgggagccgctgccgccgccgggtcccaggcagctgctcttgagagccacccttatggcctaccactggctaagcgggctgctcccctggcattccccccactgggcctcacaccgagtccaacagccagtagcctccttggggagagtccaagcctgcctagccctccttcacgtagctcaagcagtggggagggaacctgtgcggtttgtggtgacaacgcggcttgccaacactatggtgtgaggacttgtgaaggctgtaaaggcttctttaagcggacagtgcagaaaaacgcgaaatatgtgtgtctggccaacaaaaactgccctgtagacaaacgccgacgcaataggtgccagtactgcaggttccagaaatgtctgtccgttggaatggtgaaggaggtggtgagaactgattcgctgaagggacggcggggcaggctccctagcaaacctaaatccccactgcagcaggagccctcccagcctagccctcccagtcccccaatctgcatgatgaacgcattggttcgggcgctgacagatagcacccctcgtgacctggactacagtcgggtctccttcatgatctcatgcttccagatgaacgaccaagggctttatctgtggctcctcgtgatccgcgtggactag

SEQ ID NO: 249860 - DNA, 894 bp, Artificial Sequence
  derived and/or modified sequence
atgaaggccgtgcccaccgtggccggcgcccggttccccctgttccacttcaagccgagccctccgcatccccctgccccaagcccagccggcgggcaccaccttggctatgatcccactgcagctgccgcgctttcactgccactaggggccgcagctgccgctggatcgcaggcggctgcattggagagccatccttatggccttccgctagcaaaaagagctgcccctctggctttcccaccactaggattgacaccttcgcctacagccagtagtctgttgggcgaaagcccttctttgcctagtccccctagccgatcatcttcctccggtgaagggacctgtgcagtctgtggagacaatgctgcatgtcagcactatggggtccgaacctgcgagggttgtaagggattttttaagcgcacagtccaaaagaacgccaaatacgtctgtctggcaaacaaaaattgtcccgtggacaaacggaggcgtaatcgctgccaatactgtagattccagaaatgtctatccgtggggatggtgaaggaggtcgtgaggaccgatagtctgaaggggcgcaggggaaggcttccatcgaagccaaagagcccattgcagcaagagccaagtcagccgtcacccccctcgccaccaatctgtatgatgaacgctctggttcgggccttgaccgactctacacctcgggatttagactatagtagagtttcgttcatgatcagttgctttcagatgaatgatcaaggcctttacctgtggctgctggttattagggtgctggattcctttcacacctttagcatttttctggcctctttctccaattcggtccatcctctccaacagataatctttgcccttctgaatttatag

SEQ ID NO: 249861 - DNA, 2588 bp, Artificial Sequence
  derived and/or modified sequence
ataaatgacgtgccgagagagcgagcgaacgcgcagccgggagagcggagtctcctgcctcccgccccccacccctccagctcctgctcctcctccgctccccatacacagacgcgctcacacccgctccctcactcgcacacacagacacaagcgcgcacacaggctccgcacacacacttcgctctcccgcgcgctcacacccctcttgccctgagcccttgccggtgcagcgcggcgccgcagctggacgcccctcccgggctcactttgcaacgctgacggtgccggcagtggccgtggaggtgggaacagcggcggcatcctcccccctggtcacagcccaagccaggacgcccgcggaacctctcggctgtgctctcccatgagtcgggatcgcagcatcccccaccagccgctcaccgcctccgggagccgctgggcttgtacaccgcagcccttccgggacagcagctgtgactcccccccagtgcagatttcgggacagctctctagaaactcgctctaaagacggaaccgccacagcactcaaagcccactgcggaagagggcagcccggcaagcccgggccctgagcctggacccttagcggtgccgggcagcactgccggcgcttcgcctcgccggacgtccgctcctcctacactctcagcctccgctggagagacccccagccccaccattcagcgcgcaagataccctccagatatgccctgcgtccaagcccaatatagcccttcccctccaggttccagttatgcggcgcagacatacagctcggaatacaccacggagatcatgaaccccgactacaccaagctgaccatggaccttggcagcactgagatcacggctacagccaccacgtccctgcccagcatcagtaccttcgtggagggctactcgagcaactacgaactcaagccttcctgcgtgtaccaaatgcagcggcccttgatcaaagtggaggaggggcgggcgcccagctaccatcaccatcaccaccaccaccaccaccaccaccaccatcaccagcagcagcatcagcagccatccattcctccagcctccagcccggaggacgaggtgctgcccagcacctccatgtacttcaagcagtccccaccgtccacccccaccacgccggccttccccccgcaggcgggggcgttatgggacgaggcactgccctcggcgcccggctgcatcgcacccggcccgctgctggacccgccgatgaaggcggtccccacggtggccggcgcgcgcttcccgctcttccacttcaagccctcgccgccgcatccccccgcgcccagcccggccggcggccaccacctcggctacgacccgacggccgctgccgcgctcagcctgccgctgggagccgcagccgccgcgggcagccaggccgccgcgcttgagagccacccgtacgggctgccgctggccaagagggcggccccgctggccttcccgcctctcggcctcacgccctcccctaccgcgtccagcctgctgggcgagagtcccagcctgccgtcgccgcccagcaggagctcgtcgtctggcgagggcacgtgtgccgtgtgcggggacaacgccgcctgccagcactacggcgtgcgaacctgcgagggctgcaagggctttttcaagagaacagtgcagaaaaatgcaaaatatgtttgcctggcaaataaaaactgcccagtagacaagagacgtcgaaaccgatgtcagtactgtcgatttcagaagtgtctcagtgttggaatggtaaaagaagttgtccgtacagatagtctgaaagggaggagaggtcgtctgccttccaaaccaaagagcccattacaacaggaaccttctcagccctctccaccttctcctccaatctgcatgatgaatgcccttgtccgagctttaacagactcaacacccagagatcttgattattccagagtaagttttatgatttcctgctttcaaatgaatgatcagggtctctatttatggctactagtaataagagttgattgaatgattttgtgtctggcaccatgttagacagttttcatactttttctatatttctcgcttcatttagcaattcagtgcatccattgcagcaaataatttttgccttattgaatctctaaatgccttaacaagtgaccctgacagtgctgcacctgtcatacacattgttgcaggattcctggtggttgtgccaatgaaaatctgcacagacaaactacaatttgtagatttatctcgtgatctagacaaagtgactactgttttttttcatattgtgttcaaaccatctgggtgagcctcaagttattactaagcagtttatccaattgcatcagcattgattgacctgctgcttattcagagggattagaccattggtggagagaagcgagctctggctgtgacatcagttgtcaggagaactgggatggaacgccacctctgctacttcctgcctgtgtcacctggttcctgcttttggctctctcctgcctacagtggaaatggctacaatatttaacctcaga

SEQ ID NO: 249862 - DNA, 2133 bp, Artificial Sequence
  derived and/or modified sequence
gagcgagcgaacgcgcagccgggagagcggagtctcctgcctcccgccccccacccctccagctcctgctcctcctccgctccccatacacagacgcgctcacacccgctccctcactcgcacacacagacacaagcgcgcacacaggctccgcacacacacttcgctctcccgcgcgctcacacccctcttgccctgagcccttgccggtgcagcgcggcgccgcagctggacgcccctcccgggctcactttgcaacgctgacggtgccggcagtggccgtggaggtgggaacagcggcggcatcctcccccctggtcacagcccaagccaggacgcccgcggaacctctcggctgtgctctcccatgagtcgggatcgcagcatcccccaccagccgctcaccgcctccgggagccgctgggcttgtacaccgcagcccttccgggacagcagctgtgactcccccccagtgcagatttcgggacagctctctagaaactcgctctaaagacggaaccgccacagcactcaaagcccactgcggaagagggcagcccggcaagcccgggccctgagcctggacccttagcggtgccgggcagcactgccggcgcttcgcctcgccggacgtccgctcctcctacactctcagcctccgctggagagacccccagccccaccattcagcgcgcaagataccctccagatatgccctgcgtccaagcccaatatagcccttcccctccaggttccagttatgcggcgcagacatacagctcggaatacaccacggagatcatgaaccccgactacaccaagctgaccatggaccttggcagcactgagatcacggctacagccaccacgtccctgcccagcatcagtaccttcgtggagggctactcgagcaactacgaactcaagccttcctgcgtgtaccaaatgcagcggcccttgatcaaagtggaggaggggcgggcgcccagctaccatcaccatcaccaccaccaccaccaccaccaccaccatcaccagcagcagcatcagcagccatccattcctccagcctccagcccggaggacgaggtgctgcccagcacctccatgtacttcaagcagtccccaccgtccacccccaccacgccggccttccccccgcaggcgggggcgttatgggacgaggcactgccctcggcgcccggctgcatcgcacccggcccgctgctggacccgccgatgaaggcggtccccacggtggccggcgcgcgcttcccgctcttccacttcaagccctcgccgccgcatccccccgcgcccagcccggccggcggccaccacctcggctacgacccgacggccgctgccgcgctcagcctgccgctgggagccgcagccgccgcgggcagccaggccgccgcgcttgagagccacccgtacgggctgccgctggccaagagggcggccccgctggccttcccgcctctcggcctcacgccctcccctaccgcgtccagcctgctgggcgagagtcccagcctgccgtcgccgcccagcaggagctcgtcgtctggcgagggcacgtgtgccgtgtgcggggacaacgccgcctgccagcactacggcgtgcgaacctgcgagggctgcaagggctttttcaagagaacagtgcagaaaaatgcaaaatatgtttgcctggcaaataaaaactgcccagtagacaagagacgtcgaaaccgatgtcagtactgtcgatttcagaagtgtctcagtgttggaatggtaaaagaagttgtccgtacagatagtctgaaagggaggagaggtcgtctgccttccaaaccaaagagcccattacaacaggaaccttctcagccctctccaccttctcctccaatctgcatgatgaatgcccttgtccgagctttaacagactcaacacccagagatcttgattattccagagtaagttttatgatttcctgctttcaaatgaatgatcagggtctctatttatggctactagtaataagagtgttagacagttttcatactttttctatatttctcgcttcatttagcaattcagtgcatccattgcagcaaataatttttgccttattgaatctctaa

SEQ ID NO: 249863 - DNA, 1332 bp, Artificial Sequence
  derived and/or modified sequence
atgccttgcgtgcaggcgcagtacagcccatctccgccagggagtagttacgctgctcagacctactcaagtgagtatacaacggaaattatgaatcccgactatactaagctgacgatggatctcggttcaaccgagattactgcaaccgcaacaactagtctgccgtctatcagcacttttgttgagggatacagttctaattatgagctaaaaccgtcgtgtgtctaccaaatgcaacggcctctgattaaagtggaagaaggacgcgctccaagctaccatcatcatcatcaccaccaccatcaccaccatcaccatcaccagcaacagcatcagcagccctctattccacctgcctccagtcccgaggatgaggttctccctagcaccagtatgtacttcaaacagagtccacccagtaccccaacaacgcctgcctttccacctcaggccggagcactgtgggacgaagcgctgccttctgcaccaggctgtatcgccccaggacctcttttagacccccctatgaaggcagtgcctacggtggccggtgcacggtttccgctgtttcatttcaagccttctcctccacaccctccagccccatccccagctggtggacaccacctggggtatgacccaactgccgcagccgctctgtcacttcccctgggggctgcagcggcagcgggaagccaggctgccgcactggaaagtcacccctatgggctgcccctcgcaaaacgagctgcgccactggcctttcctccactcgggctgacacctagcccgacagcatcctcattgctcggcgagagcccaagcctgcccagccctccctcccgtagtagctcaagcggagaggggacttgtgccgtctgtggggataacgcggcatgtcagcactatggtgtgcgaacctgcgaggggtgcaaaggctttttcaaaaggacagtacagaagaacgctaagtacgtctgtctggccaacaagaattgccctgtggataagcggaggaggaaccggtgtcaatactgccgctttcagaagtgcctgtctgtgggtatggtgaaagaagtggtaagaactgacagtctgaagggcaggaggggacgcctgccatcaaagccaaaaagtccgctgcaacaggagccctcccagccttctcccccatcaccccctatctgcatgatgaacgcactcgtaagggcacttacagattccacaccgcgagacctcgactactcacgagtctcctttatgatctcttgcttccagatgaacgaccaaggcctttacttatggctgttggtgatacgggttgattag

SEQ ID NO: 249864 - DNA, 894 bp, Artificial Sequence
  derived and/or modified sequence
atgaaagcggtaccaaccgtagccggagcacggtttcctctgtttcacttcaagccatccccacctcatcccccagcccctagtccggcaggcggtcaccacctcgggtacgaccctacagccgcagccgcattatcgctccccctgggagcagctgcagctgccggttcacaggccgctgctcttgaaagtcacccatatgggttgccgctggcaaagcgagctgcgcctctggcatttccacctcttggcctgacaccttcccccaccgcctcttcactgctaggcgagagcccaagccttccctcccccccttcccgatcctcgtcctccggggagggtacctgcgctgtctgtggcgataacgccgcttgtcagcactatggagtgagaacttgcgaaggttgtaaaggtttttttaaacggacagttcagaagaacgctaagtacgtctgtcttgccaacaaaaactgtcctgtggataagcggagacggaacaggtgtcagtattgccgattccaaaagtgcctctctgtcggaatggtgaaagaagtggtgaggactgactcgctgaaaggcagacggggaaggctgcccagtaagcccaagagcccgctgcagcaggagccttcccagccgagcccaccaagccccccaatttgtatgatgaacgcgcttgtgagagccctgacggacagcactcccagagacctcgactactctagggtctcattcatgatctcctgcttccagatgaatgaccaggggttgtacctgtggctcctagtgatccgcgtactcgacagctttcacacgtttagcatctttctcgctagcttcagcaactccgtgcatccactacagcaaatcatttttgcccttctgaacctgtag

SEQ ID NO: 249865 - protein, 637 aa, Artificial Sequence
  derived and/or modified sequence
MHDSIRFGNVDMPCVQAQYSPSPPGSSYAAQTYSSEYTTEIMNPDYTKLTMDLGSTEITATATTSLPSISTFVEGYSSNYELKPSCVYQMQRPLIKVEEGRAPSYHHHHHHHHHHHHHHQQQHQQPSIPPASSPEDEVLPSTSMYFKQSPPSTPTTPAFPPQAGALWDEALPSAPGCIAPGPLLDPPMKAVPTVAGARFPLFHFKPSPPHPPAPSPAGGHHLGYDPTAAAALSLPLGAAAAAGSQAAALESHPYGLPLAKRAAPLAFPPLGLTPSPTASSLLGESPSLPSPPSRSSSSGEGTCAVCGDNAACQHYGVRTCEGCKGFFKRTVQKNAKYVCLANKNCPVDKRRRNRCQYCRFQKCLSVGMVKEVVRTDSLKGRRGRLPSKPKSPLQQEPSQPSPPSPPICMMNALVRALTDSTPRDLDYSRYCPTDQAAAGTDAEHVQQFYNLLTASIDVSRSWAEKIPGFTDLPKEDQTLLIESAFLELFVLRLSIRSNTAEDKFVFCNGLVLHRLQCLRGFGEWLDSIKDFSLNLQSLNLDIQALACLSALSMITERHGLKEPKRVEELCNKITSSLKDHQSKGQALEPTESKVLGALVELRKICTLGLQRIFYLKLEDLVSPPSIIDKLFLDTLPF

SEQ ID NO: 249866 - DNA, 5635 bp, Artificial Sequence
  derived and/or modified sequence
ataaatgacgtgccgagagagcgagcgaacgcgcagccgggagagcggagtctcctgcctcccgccccccacccctccagctcctgctcctcctccgctccccatacacagacgcgctcacacccgctccctcactcgcacacacagacacaagcgcgcacacaggctccgcacacacacttcgctctcccgcgcgctcacacccctcttgccctgagcccttgccggtgcagcgcggcgccgcagctggacgcccctcccgggctcactttgcaacgctgacggtgccggcagtggccgtggaggtgggaacagcggcggcatcctcccccctggtcacagcccaagccaggacgcccgcggaacctctcggctgtgctctcccatgagtcgggatcgcagcatcccccaccagccgctcaccgcctccgggagccgctgggcttgtacaccgcagcccttccgggacagcagctgtgactcccccccagtgcagatttcgggacagctctctagaaactcgctctaaagacggaaccgccacagcactcaaagcccactgcggaagagggcagcccggcaagcccgggccctgagcctggacccttagcggtgccgggcagcactgccggcgcttcgcctcgccggacgtccgctcctcctacactctcagcctccgctggagagacccccagccccaccattcagcgcgcaagataccctgcagatatgccctgcgtccaagcccaatatagcccttcccctccaggttccagttatgcggcgcagacatacagctcggaatacaccacggagatcatgaaccccgactacaccaagctgaccatggaccttggcagcactgagatcacggctacagccaccacgtccctgcccagcatcagtaccttcgtggagggctactcgagcaactacgaactcaagccttcctgcgtgtaccaaatgcagcggcccttgatcaaagtggaggaggggcgggcgcccagctaccatcaccatcaccaccaccaccaccaccaccaccaccatcaccagcagcagcatcagcagccatccattcctccagcctccagcccggaggacgaggtgctgcccagcacctccatgtacttcaagcagtccccaccgtccacccccaccacgccggccttccccccgcaggcgggggcgttatgggacgaggcactgccctcggcgcccggctgcatcgcacccggcccgctgctggacccgccgatgaaggcggtccccacggtggccggcgcgcgcttcccgctcttccacttcaagccctcgccgccgcatccccccgcgcccagcccggccggcggccaccacctcggctacgacccgacggccgctgccgcgctcagcctgccgctgggagccgcagccgccgcgggcagccaggccgccgcgcttgagagccacccgtacgggctgccgctggccaagagggcggccccgctggccttcccgcctctcggcctcacgccctcccctaccgcgtccagcctgctgggcgagagtcccagcctgccgtcgccgcccagcaggagctcgtcgtctggcgagggcacgtgtgccgtgtgcggggacaacgccgcctgccagcactacggcgtgcgaacctgcgagggctgcaagggctttttcaagagaacagtgcagaaaaatgcaaaatatgtttgcctggcaaataaaaactgcccagtagacaagagacgtcgaaaccgatgtcagtactgtcgatttcagaagtgtctcagtgttggaatggtaaaagaagttgtccgtacagatagtctgaaagggaggagaggtcgtctgccttccaaaccaaagagcccattacaacaggaaccttctcagccctctccaccttctcctccaatctgcatgatgaatgcccttgtccgagctttaacagactcaacacccagagatcttgattattccagatactgtcccactgaccaggctgctgcaggcacagatgctgagcatgtgcaacaattctacaacctcctgacagcctccattgatgtatccagaagctgggcagaaaagattccgggatttactgatctccccaaagaagatcagacattacttattgaatcagcctttttggagctgtttgtcctcagactttccatcaggtcaaacactgctgaagataagtttgtgttctgcaatggacttgtcctgcatcgacttcagtgccttcgtggatttggggagtggctcgactctattaaagacttttccttaaatttgcagagcctgaaccttgatatccaagccttagcctgcctgtcagcactgagcatgatcacagaaagacatgggttaaaagaaccaaagagagtcgaagagctatgcaacaagatcacaagcagtttaaaagaccaccagagtaagggacaggctctggagcccaccgagtccaaggtcctgggtgccctggtagaactgaggaagatctgcaccctgggcctccagcgcatcttctacctgaagctggaagacttggtgtctccaccttccatcattgacaagctcttcctggacaccctacctttctaatcaggagcagtggagcagtgagctgcctcctctcctagcacctgcttgctacgcagcaaagggataggtttggaaacctatcatttcctgtccttccttaagaggaaaagcagctcctgtagaaagcaaagactttcttttttttctggctcttttccttacaacctaaagccagaaaacttgcagagtattgtgttggggttgtgttttatatttaggcattgggggatggggtgggagggggttatagttcatgagggttttctaagaaattgctaacaaagcacttttggacaatgctatcccagcaggaaaaaaaaggataatataactgttttaaaactctttctggggaatccaattatagttgctttgtatttaaaaacaagaacagccaagggttgttcgccagggtaggatgtgtcttaaagattggtcccttgaaaatatgcttcctgtatcaaaggtacgtatgtggtgcaaacaaggcagaaacttccttttaatttccttcttcctttattttaacaaatggtgaaagatggaggattacctacaaatcagacatggcaaaacaataatggctgtttgcttccataaacaagtgcaattttttaaagtgctgtcttactaagtcttgtttattaactctcctttattctatatggaaataaaaaggaggcagtcatgttagcaaatgacacgttaatatccctagcagaggctgtgttcaccttccctgtcgatcccttctgaggtatggcccatccaagacttttaggccattcttgatggaaccagatccctgccctgactgtccagctatcctgaaagtggatcagattataaactggattacatgtaactgttttggttgtgttctatcaaccccaccagagttccctaaacttgcttcagttatagtaactgactggtatattcattcagaagcgccataagtcagttgagtatttgatccctagataagaacatgcaaatcagcaggaactggtcatacagggtaagcaccagggacaataaggatttttatagatataatttaatttttgttattggttaaggagacaattttggagagcaagcaaatctttttaaaaaatagtatgaatgtgaatactagaaaagatttaaaaaatagtatgagtgtgagtactaggaaggattagtgggctgcgtttcaacattccgtgttcgtactcccttttgtatgtttctactgttaatgccatattactatgagataatttgttgcatagtgtccttatttgtataaacatttgtatgcacgttatattgtaatagctttgcctgtatttattgcaagaccaccagctcctggaagctgagttacagagtaattaaatggggtgttcacagtgacttggatacaccaattagaaattaaataagcaaatatatatatatatataaatatagcaggttacatatatatatttataatgtgtctttttattaaccatttgtacaataaatgtcacttcccatgccgttattttatggttcatttgcagtgacttttaaggcagtactgtttagcactttgatattaaaattttgcttatgttttgctaaattcgaataatgtttgaagatttttaggtctaaaagtctttatattatatactctgtatcaagtcaaaatatctttggccattttgctaagaaacaaactttgaatgtcaaactgatgtcacagtagtttttgttagctttaaatcatttttgctttagtctttttaaaggaaaataacaaaactatgctgtttatattgtcattaaattatacaatcaaacaaatgccaaatgaattgcctaattgctgcaaagtataacccagataggaaatcatatgtttttttccaagagtcattctaatatttgattatgttatgtgtgcttttatgaaagattgttatttttatatatcaagatgatagaacctggaatgttaggattttgaaatgttagacttggaaggggcctggtctgtcaactagtccaaccccttaaaattcatagaggagcaaactggggcccattgaagggtgaagagttactcaaggtcaaacagctggtaacagaatcaagactaagacctaatttacctttccatactctttttttttctcaacttcatctatataaaatcaggcttttaaacataaccactaatatttacctgaagataaccatgagtaaagtatacttttgcattaattttttgagcttatatgcaaacataataaatattattaaatatcaggaaagctaacatttcatacaagatagcttcagaccaaattcaaattgaatttgaataaattagaaatactgtgcatacataaccttcttgtgcaccatgagtatttggaaagttaatccttgtttttgtcgtgtctataaaggaagaacaaaacaaaataaaaacagagccctagagaaatgctgttactttttatttttacacccatcagatttaaggaaaagactttttagccattataatctagtggttggaaggaatgaagaagcttttttagtaataggtccagatatgagtgctaaaaataaagatgatagcatgttcttctgtcttccatagttattacaactatgagagcctcccaagtcatcttatcaactcaactcccttttttttgtcttaatgttgcacataagtttatacagagtggatgaccacactagcacagaagagaacaacatgtattaaagcaggtgattcctccccttggcgggagagctctctcagtgtgaacatgccttctgtgggcggaaatcaggaagccaccagctgttaatggagagtgccttgcttttatttcagacagcagagttttccaaagtttctctgctcctctaacagcattgctctttagtgtgtgttaacctgtggtttgaaagaaatgctcttgtacattaacaatgtaaatttaaatgattaaattacattttatcaatggca

SEQ ID NO: 249867 - DNA, 1914 bp, Artificial Sequence
  derived and/or modified sequence
atgcacgacagcatcagattcggcaacgtggacatgccctgcgtgcaggcccagtacagccccagcccccccggcagcagctacgccgcccagacctacagcagcgagtacaccaccgagatcatgaaccccgactacaccaagctgaccatggacctgggcagcaccgagatcaccgccaccgccaccaccagcctgcccagcatcagcaccttcgtggagggctacagcagcaactacgagctgaagcccagctgcgtgtaccagatgcagagacccctgatcaaggtggaggagggcagagcccccagctaccaccaccaccaccaccaccaccaccaccaccaccaccaccaccagcagcagcaccagcagcccagcatcccccccgccagcagccccgaggacgaggtgctgcccagcaccagcatgtacttcaagcagagcccccccagcacccccaccacccccgccttccccccccaggccggcgccctgtgggacgaggccctgcccagcgcccccggctgcatcgcccccggccccctgctggacccccccatgaaggccgtgcccaccgtggccggcgccagattccccctgttccacttcaagcccagccccccccacccccccgcccccagccccgccggcggccaccacctgggctacgaccccaccgccgccgccgccctgagcctgcccctgggcgccgccgccgccgccggcagccaggccgccgccctggagagccacccctacggcctgcccctggccaagagagccgcccccctggccttcccccccctgggcctgacccccagccccaccgccagcagcctgctgggcgagagccccagcctgcccagcccccccagcagaagcagcagcagcggcgagggcacctgcgccgtgtgcggcgacaacgccgcctgccagcactacggcgtgagaacctgcgagggctgcaagggcttcttcaagagaaccgtgcagaagaacgccaagtacgtgtgcctggccaacaagaactgccccgtggacaagagaagaagaaacagatgccagtactgcagattccagaagtgcctgagcgtgggcatggtgaaggaggtggtgagaaccgacagcctgaagggcagaagaggcagactgcccagcaagcccaagagccccctgcagcaggagcccagccagcccagcccccccagcccccccatctgcatgatgaacgccctggtgagagccctgaccgacagcacccccagagacctggactacagcagatactgccccaccgaccaggccgccgccggcaccgacgccgagcacgtgcagcagttctacaacctgctgaccgccagcatcgacgtgagcagaagctgggccgagaagatccccggcttcaccgacctgcccaaggaggaccagaccctgctgatcgagagcgccttcctggagctgttcgtgctgagactgagcatcagaagcaacaccgccgaggacaagttcgtgttctgcaacggcctggtgctgcacagactgcagtgcctgagaggcttcggcgagtggctggacagcatcaaggacttcagcctgaacctgcagagcctgaacctggacatccaggccctggcctgcctgagcgccctgagcatgatcaccgagagacacggcctgaaggagcccaagagagtggaggagctgtgcaacaagatcaccagcagcctgaaggaccaccagagcaagggccaggccctggagcccaccgagagcaaggtgctgggcgccctggtggagctgagaaagatctgcaccctgggcctgcagagaatcttctacctgaagctggaggacctggtgagcccccccagcatcatcgacaagctgttcctggacaccctgcccttctag

SEQ ID NO: 249868 - DNA, 1881 bp, Artificial Sequence
  derived and/or modified sequence
atgccctgcgtgcaggcccagtacagccccagcccccccggcagcagctacgccgcccagacctacagcagcgagtacaccaccgagatcatgaaccccgactacaccaagctgaccatggacctgggcagcaccgagatcaccgccaccgccaccaccagcctgcccagcatcagcaccttcgtggagggctacagcagcaactacgagctgaagcccagctgcgtgtaccagatgcagagacccctgatcaaggtggaggagggcagagcccccagctaccaccaccaccaccaccaccaccaccaccaccaccaccaccaccagcagcagcaccagcagcccagcatcccccccgccagcagccccgaggacgaggtgctgcccagcaccagcatgtacttcaagcagagcccccccagcacccccaccacccccgccttccccccccaggccggcgccctgtgggacgaggccctgcccagcgcccccggctgcatcgcccccggccccctgctggacccccccatgaaggccgtgcccaccgtggccggcgccagattccccctgttccacttcaagcccagccccccccacccccccgcccccagccccgccggcggccaccacctgggctacgaccccaccgccgccgccgccctgagcctgcccctgggcgccgccgccgccgccggcagccaggccgccgccctggagagccacccctacggcctgcccctggccaagagagccgcccccctggccttcccccccctgggcctgacccccagccccaccgccagcagcctgctgggcgagagccccagcctgcccagcccccccagcagaagcagcagcagcggcgagggcacctgcgccgtgtgcggcgacaacgccgcctgccagcactacggcgtgagaacctgcgagggctgcaagggcttcttcaagagaaccgtgcagaagaacgccaagtacgtgtgcctggccaacaagaactgccccgtggacaagagaagaagaaacagatgccagtactgcagattccagaagtgcctgagcgtgggcatggtgaaggaggtggtgagaaccgacagcctgaagggcagaagaggcagactgcccagcaagcccaagagccccctgcagcaggagcccagccagcccagcccccccagcccccccatctgcatgatgaacgccctggtgagagccctgaccgacagcacccccagagacctggactacagcagatactgccccaccgaccaggccgccgccggcaccgacgccgagcacgtgcagcagttctacaacctgctgaccgccagcatcgacgtgagcagaagctgggccgagaagatccccggcttcaccgacctgcccaaggaggaccagaccctgctgatcgagagcgccttcctggagctgttcgtgctgagactgagcatcagaagcaacaccgccgaggacaagttcgtgttctgcaacggcctggtgctgcacagactgcagtgcctgagaggcttcggcgagtggctggacagcatcaaggacttcagcctgaacctgcagagcctgaacctggacatccaggccctggcctgcctgagcgccctgagcatgatcaccgagagacacggcctgaaggagcccaagagagtggaggagctgtgcaacaagatcaccagcagcctgaaggaccaccagagcaagggccaggccctggagcccaccgagagcaaggtgctgggcgccctggtggagctgagaaagatctgcaccctgggcctgcagagaatcttctacctgaagctggaggacctggtgagcccccccagcatcatcgacaagctgttcctggacaccctgcccttctag

SEQ ID NO: 249869 - DNA, 1914 bp, Artificial Sequence
  derived and/or modified sequence
atgcacgattcaattcgcttcggaaatgtggacatgccatgcgtgcaggctcagtacagccccagtcccccaggatcttcatacgctgcccaaacctacagttctgagtacacaactgagattatgaacccggactatacaaaactgacaatggacttaggttctacagaaatcactgctacagccaccaccagcctcccatccatttccaccttcgtggagggatacagcagcaactatgaactgaagcccagctgcgtgtatcaaatgcagaggcctctgattaaagtggaagagggaagggccccttcataccaccaccaccatcaccaccatcatcatcaccaccatcaccaccagcagcagcatcagcaaccctcgatcccacccgcctccagtccagaagatgaggtgctgccgagtacatctatgtatttcaaacaatctccaccaagtacaccgaccaccccagcttttccccctcaggccggagccctgtgggatgaagcactcccaagtgctcccggctgcattgccccaggcccactgctggacccgcctatgaaagcagttcctacagtggctggagcccgctttcctctgttccattttaaaccatcccccccgcaccctcccgcaccatctcctgccggagggcatcacctggggtacgaccctacagccgccgcggctctatctctaccactgggagctgcagcagccgctgggtcacaggcggcagcgctggaaagccatccttatggcctacctctggccaagagagccgccccattagctttccccccgcttggcctaactccttcgcccacagcatctagtctgcttggcgaatccccatcactgccgagtccaccttccagaagctcttcctctggtgaggggacatgtgctgtgtgcggagacaatgccgcttgtcaacactacggagtaaggacttgcgagggctgtaaagggttttttaaaagaacagtccagaagaatgctaagtatgtttgccttgccaataaaaactgtccagtggataagaggagacggaatcggtgtcaatactgccgctttcagaagtgtctctctgtaggaatggtcaaagaggtggtgcgaaccgattcactgaaggggaggcggggccggctgccaagcaaaccaaaatccccattacagcaggagcccagccaaccatcacctccaagccccccaatctgtatgatgaatgctttagtacgcgcactaaccgactctacccctcgtgatctggactactcgcggtattgtcccacggatcaagcggccgcggggacggacgctgagcatgtgcagcagttctataacttgctgaccgcttcaatcgatgtgtcaagatcctgggcagaaaaaattcccggtttcactgacctgcccaaggaggaccagacactgctcatcgagagcgctttcctcgagttattcgtcttgcggctatctatcagaagcaacaccgccgaggacaaattcgtattctgtaacggcctggtgctgcatcggctgcaatgcctcagagggttcggcgaatggctggactccatcaaagacttctcactcaaccttcaaagtcttaaccttgatattcaagctctcgcttgcttatcagcacttagcatgataaccgaaaggcatgggctgaaggaacccaagcgcgtcgaggaactttgcaataaaataacaagctccttaaaggaccaccagagcaaaggccaggccctggaacccactgagagtaaagttttaggcgccctggtggagctgcggaagatctgtactctgggcctgcagaggatcttttatctaaagttggaggatttggtgagccccccatcgatcattgataagttgtttctggacactctgccattctag

SEQ ID NO: 249870 - DNA, 1881 bp, Artificial Sequence
  derived and/or modified sequence
atgccctgtgtacaagcgcaatactcaccgtctccccccggaagtagctatgctgctcagacttattcttcagaatatacgacagaaatcatgaacccggattacacgaagctgaccatggatctcggatctaccgagatcaccgcaacagcgaccacgtcacttccatcaatttctacctttgtcgaaggatactcatctaactatgagctaaagccatcatgcgtgtaccagatgcagaggcctcttattaaggtcgaggagggtcgcgctccgagttatcaccatcatcaccaccaccatcaccatcatcatcaccatcatcagcaacaacaccagcagccatctataccccccgcgagctcccctgaggatgaagtgttgcccagcaccagcatgtactttaagcagtctccccccagtacgcctacgacaccggccttccccccacaggctggggccctgtgggacgaagcattaccaagcgcccccggctgtattgcgcccggcccgttgcttgacccccctatgaaagcagtacctacagtggctggggctcgtttccctctctttcacttcaagcccagccccccacatccccccgcgccttctcccgcaggcggccaccaccttggatacgacccgacggctgcggctgctttgagcttaccactgggggctgctgccgcagctgggtcacaggcagccgccctggagagtcacccttacggactgcctctggccaaaagggctgcaccactcgcctttccaccactgggcctcacccccagccccacagcctcgtccctgctgggggaatcaccaagcctgccctcccctccatcacggagttcctcatccggagagggaacttgcgcagtctgtggcgacaatgctgcttgtcagcattatggcgtgagaacatgcgaaggatgcaaagggttcttcaaaagaacagtgcaaaagaacgcaaaatatgtgtgcctggccaataagaactgtcctgtagataagcgccgcagaaatagatgtcagtattgtaggtttcagaaatgtctgagcgtgggaatggtgaaagaagtcgtgagaactgactcactcaaaggcagacgggggcggttgccctctaagccgaaatcacccctgcaacaggagcccagccagccctcacccccaagtcctcctatttgcatgatgaatgcgcttgttcgcgccctgaccgactcaaccccgagagatctggattacagcaggtactgtcccaccgatcaggccgcagctgggactgacgcggagcacgtccaacagttttacaatttgctgaccgcttcaatagacgtatcccgcagttgggccgaaaagataccagggtttactgatttacccaaggaggaccagaccttactgatcgagtcagcttttctggagctctttgtactgcggttgtctatccggtccaacaccgccgaggataaatttgtgttttgtaacggattggtgctgcaccgactccagtgtctgagggggtttggcgagtggctggattcaataaaggacttttcactaaatttgcagagtctgaatctggatatacaggctctagcctgtctgagcgccctgagcatgatcaccgagaggcatgggctgaaggaacctaaaagggtggaggagctgtgtaacaagattacaagttcactcaaagaccatcagtctaaaggacaagcccttgagcctacagaatccaaggtgctcggcgctctcgttgaacttagaaagatctgtaccctgggactgcagaggatcttctatctgaagctcgaggacctggtctctccaccgagcataatagacaagctgttcctggataccttaccattctag

SEQ ID NO: 249871 - DNA, 1914 bp, Artificial Sequence
  derived and/or modified sequence
atgcatgacagcatccgctttggaaatgtggacatgccctgtgtgcaggcccagtacagccccagccccccaggcagcagctatgctgcccagacctacagcagcgagtacaccacagagatcatgaacccagactacaccaagctgaccatggacctgggcagcacagagatcacagccacagccaccaccagcctgcccagcatcagcacctttgtggagggctacagcagcaactatgagctgaagcccagctgtgtgtaccagatgcagaggcccctcatcaaggtggaggagggccgggcccccagctaccaccaccaccaccaccaccaccaccaccaccaccaccaccaccagcagcagcaccagcagcccagcatccccccagccagcagcccagaagatgaggtgctgcccagcacctccatgtacttcaagcagagcccccccagcacccccaccaccccagccttccccccccaggccggggccctgtgggatgaggccctgcccagcgcccctggctgcatcgcccctggccccctgctggacccccccatgaaggctgtgcccaccgtggccggggcccgcttccccctcttccacttcaagcccagccccccccaccccccagcccccagccctgctgggggccaccacctgggctatgaccccacagctgctgctgccctgagcctgcccctgggcgctgctgctgctgctggcagccaggccgccgccctggagagccacccctacggcctgcccctggccaagagagctgcccccctggccttcccccccctgggcctgacccccagccccacagccagcagcctgctgggggagagccccagcctgcccagcccccccagccgcagcagcagcagcggggagggcacctgtgctgtgtgtggggacaatgctgcctgccagcactatggagtgaggacctgtgagggctgcaagggcttcttcaagaggacagtgcagaagaatgccaagtatgtgtgcctggccaacaagaactgccctgtggacaagagaagaagaaaccgctgccagtactgccgcttccagaagtgcctgtctgtgggcatggtgaaggaggtggtgaggacagacagcctgaagggcagaagaggccgcctgcccagcaagcccaagagccccctgcagcaggagcccagccagcccagcccccccagcccccccatctgcatgatgaatgccctggtgcgggccctgacagacagcaccccccgggacctggactacagccgctactgccccacagaccaggccgccgccggcacagatgctgagcacgtgcagcagttctacaacctgctgacagccagcattgatgtgagccgctcctgggccgagaagatccctggcttcacagacctgcccaaggaggaccagaccctgctgattgaaagtgccttcctggagctgtttgtgctgcggctgagcatccgcagcaacacagctgaggacaagtttgtgttctgcaatggcctggtgctgcaccggctgcagtgcctgcggggctttggagagtggctggacagcatcaaggacttcagcctgaacctgcagagcctgaacctggacatccaggccctggcctgcctgagcgccctgtccatgatcacagagcggcacggcctgaaggagcccaagagggtggaggagctgtgcaacaagatcaccagcagcctgaaggaccaccagagcaagggccaggccctggagcccacagagagcaaggtgctgggcgccctggtggagctgaggaagatctgcaccctgggcctgcagaggatcttctacctgaagctggaggacctggtgtccccacccagcatcatcgacaagctgttcctggacaccctgcccttctag

SEQ ID NO: 249872 - DNA, 1881 bp, Artificial Sequence
  derived and/or modified sequence
atgccctgtgtgcaggcccagtacagccccagccccccaggcagcagctatgctgcccagacctacagcagcgagtacaccacagagatcatgaacccagactacaccaagctgaccatggacctgggcagcacagagatcacagccacagccaccaccagcctgcccagcatcagcacctttgtggagggctacagcagcaactatgagctgaagcccagctgtgtgtaccagatgcagaggcccctcatcaaggtggaggagggccgggcccccagctaccaccaccaccaccaccaccaccaccaccaccaccaccaccaccagcagcagcaccagcagcccagcatccccccagccagcagcccagaagatgaggtgctgcccagcacctccatgtacttcaagcagagcccccccagcacccccaccaccccagccttccccccccaggccggggccctgtgggatgaggccctgcccagcgcccctggctgcatcgcccctggccccctgctggacccccccatgaaggctgtgcccaccgtggccggggcccgcttccccctcttccacttcaagcccagccccccccaccccccagcccccagccctgctgggggccaccacctgggctatgaccccacagctgctgctgccctgagcctgcccctgggcgctgctgctgctgctggcagccaggccgccgccctggagagccacccctacggcctgcccctggccaagagagctgcccccctggccttcccccccctgggcctgacccccagccccacagccagcagcctgctgggggagagccccagcctgcccagcccccccagccgcagcagcagcagtggagagggcacctgtgctgtgtgtggggacaatgctgcctgccagcactacggcgtgaggacctgtgagggctgcaagggcttcttcaagaggacagtgcagaagaatgccaagtatgtgtgcctggccaacaagaactgccctgtggacaagagaagaagaaaccgctgccagtactgccgcttccagaagtgcctgtctgtgggcatggtgaaggaggtggtgaggacagacagcctgaagggccggcggggccgcctgcccagcaagcccaagagccccctgcagcaggagcccagccagcccagcccccccagcccccccatctgcatgatgaatgccctggtgcgggccctgacagacagcaccccccgggacctggactacagccgctactgccccacagaccaggccgctgctggaacagatgctgagcacgtgcagcagttctacaacctgctgacagccagcattgatgtgagccgctcctgggccgagaagatccctggcttcacagacctgcccaaggaggaccagaccctgctgattgagagcgccttcctggagctgtttgtgctgcggctgagcatccgcagcaacacagctgaggacaagtttgtgttctgcaatggcctggtgctgcaccggctgcagtgcctgcggggctttggagagtggctggacagcatcaaggacttcagcctgaacctgcagagcctgaacctggacatccaggccctggcctgcctgagcgccctgtccatgatcacagaaagacatggcctgaaggagcccaagagggtggaggagctgtgcaacaagatcaccagcagcctgaaggaccaccagagcaagggccaggccctggagcccacagagagcaaggtgctgggcgccctggtggagctgaggaagatctgcaccctgggcctgcagaggatcttctacctgaagctggaggacctggtgagcccccccagcatcatcgacaagctgttcctggacaccctgcccttctag

SEQ ID NO: 249873 - DNA, 1914 bp, Artificial Sequence
  derived and/or modified sequence
atgcacgacagcatccggttcggcaacgtggacatgccctgcgtgcaggcgcagtactcaccgtcacccccaggatcaagctatgcggctcagacatattcatctgaatacactacggaaattatgaacccagactataccaagctcactatggatctaggatcaacagagattacggcaactgcaaccacatctctcccctccatcagcaccttcgtggagggatattctagtaactatgagttgaaaccaagttgcgtataccagatgcagagaccattgatcaaggtcgaggaaggccgcgccccctcctatcaccaccaccaccaccatcaccaccatcaccaccaccaccaccagcagcagcaccaacagccatccatcccacctgcttcatctcccgaagatgaggttctgccctccacctccatgtatttcaagcagagccccccaagcacgcccacaactccagcttttccacctcaagccggagccctgtgggacgaggcccttccaagcgctccaggctgtattgcgcccggtcccctgttggaccctccgatgaaagcagttcctactgttgctggagcgcgattccccctattccattttaagccctctcccccgcaccctcctgcaccgtcccccgcagggggccatcacttaggttatgatcccaccgctgctgctgcgctgtctttacctttgggagccgccgctgccgcggggtctcaggcagcagctcttgagtcccatccctatggcctgccactggctaagcgcgcggccccattagcatttcccccactcggcctcacgccatccccgaccgcatcctccctgctaggagaatctcctagcctgccatcaccgccatctcgcagtagcagcagtggcgaggggacctgcgccgtgtgtggagacaatgctgcttgtcagcactacggggtgcgcacgtgtgaagggtgcaaaggttttttcaaacgcaccgtgcagaaaaacgcaaaatatgtttgcctggctaacaaaaattgtcccgttgacaaacgcaggcggaataggtgtcagtactgccggtttcagaagtgcctgagcgtgggtatggtgaaggaagtggtgcgtaccgactctctgaagggacggcgagggagactcccatctaagcccaaatcccctctgcagcaggagccatctcagccttccccccccagccccccaatttgtatgatgaacgcattggtccgggctctgaccgactctactccaagggatctggactacagtaggtactgcccaacagatcaggccgccgcggggactgatgcggagcacgtgcagcagttctacaacctacttacagcctccatcgacgtctccaggtcttgggcagagaaaataccaggattcactgacttaccaaaagaagatcaaactttgctgattgagagcgcctttttggaactgttcgtcctgcggctaagcattaggagtaataccgcggaggataaatttgtgttttgtaatggtctagtgctacaccgcctgcaatgtctgcggggattcggagagtggctggacagcatcaaagatttctcattgaatcttcagagtctgaacctggatatccaggcgcttgcatgcttgtccgctctttccatgatcaccgaacggcacggcctgaaggagcccaaacgcgtggaggagctctgcaataagataacttccagcctgaaggaccaccagtccaagggtcaggctctggagcccacggagtctaaggtcctgggcgcactggtggaactgaggaaaatctgtaccttgggcctgcagagaatcttctacctgaagctggaagacctagtctctcctccaagcattattgacaaactttttctcgataccctgccgttttag

SEQ ID NO: 249874 - DNA, 1881 bp, Artificial Sequence
  derived and/or modified sequence
atgccctgcgtgcaggcccagtacagccccagcccccccggcagctcgtatgctgcgcaaacatatagtagcgagtatactaccgaaataatgaatcccgactataccaaactcacaatggatcttggctccacggagattactgccacagccacgacctcccttccctcgatatcaaccttcgtcgaaggctacagttccaattatgagctgaagccaagttgtgtataccagatgcaaagacctttgattaaggtagaggaaggacgagcccccagctaccaccaccatcaccatcaccaccatcaccaccaccaccatcaccagcagcagcatcagcagcctagcatccctcccgccagcagtccggaagatgaagtgttaccctctacatcgatgtattttaaacaatccccaccgtctacccctactacccccgcctttcccccacaggcaggtgccctctgggatgaagccttaccctccgcaccaggctgtatcgctcctggaccattattggacccccctatgaaagccgttccaaccgtggccggagcccggtttcccctgttccacttcaagccatcaccgcctcacccccctgcccccagccctgctggcgggcatcatctgggctacgaccccactgctgctgccgcattatccctgcccctgggagccgctgctgccgcgggctcacaggcagccgccctggaaagccacccctatggattacccttggcaaagagagccgcaccactggccttcccccccctaggactcactccgagccccacagcaagcagtctactcggcgagagtccatcgctgccttcccctcccagcaggagttccagtagcggtgagggtacctgcgctgtatgtggggataacgcagcttgtcagcactacggcgtgcggacctgcgagggttgcaaaggcttcttcaagcgcacagtccagaaaaatgctaagtacgtgtgcctggcaaacaagaactgcccagtcgacaagcgaaggcgtaatcgttgccagtactgccgctttcagaagtgcttatcagttgggatggtgaaggaggttgtccgcacggattcattgaagggccggcgcggaagattgccgtcaaagccgaaaagtcccttacagcaagagccgagtcagccctcccctccatccccacccatttgcatgatgaacgctctggtgagagcccttaccgattccactccccgggacttagattacagcagatactgtcccaccgaccaagccgcggccggtaccgacgctgagcacgttcagcagttttataacctgttgacagccagcatcgacgtctcgcgttcgtgggccgagaaaattcccggctttactgacctgcccaaggaggaccaaactctcctgatcgagagtgcctttctggagctgttcgtgctcagattaagtatcagaagcaatacggctgaagataaatttgtcttctgcaacggtttggtgctgcaccgcctacagtgcttgcgcgggttcggagaatggttagactctataaaagatttttccctaaacctccaaagcttgaacctcgacatccaggctcttgcctgcctttctgctttgtccatgattacagagcgccacggccttaaagaacctaaaagggtcgaagagctgtgtaataagataacttcgagcctcaaggaccatcaatccaaaggtcaggccctagagcctaccgagagcaaggtgctgggcgcattggttgagctgagaaaaatctgcacgcttggactccaacggattttctacctcaagctagaggatctcgtgtctccaccttccatcatcgacaaactgttcctggacacccttcccttctag

SEQ ID NO: 249875 - DNA, 4982 bp, Artificial Sequence
  derived and/or modified sequence
caggccctcatcaccttttttcaagtcaagatttcatcccatacatgcatgactcaatcagatttggaaatgtggatatgccctgcgtccaagcccaatatagcccttcccctccaggttccagttatgcggcgcagacatacagctcggaatacaccacggagatcatgaaccccgactacaccaagctgaccatggaccttggcagcactgagatcacggctacagccaccacgtccctgcccagcatcagtaccttcgtggagggctactcgagcaactacgaactcaagccttcctgcgtgtaccaaatgcagcggcccttgatcaaagtggaggaggggcgggcgcccagctaccatcaccatcaccaccaccaccaccaccaccaccaccatcaccagcagcagcatcagcagccatccattcctccagcctccagcccggaggacgaggtgctgcccagcacctccatgtacttcaagcagtccccaccgtccacccccaccacgccggccttccccccgcaggcgggggcgttatgggacgaggcactgccctcggcgcccggctgcatcgcacccggcccgctgctggacccgccgatgaaggcggtccccacggtggccggcgcgcgcttcccgctcttccacttcaagccctcgccgccgcatccccccgcgcccagcccggccggcggccaccacctcggctacgacccgacggccgctgccgcgctcagcctgccgctgggagccgcagccgccgcgggcagccaggccgccgcgcttgagagccacccgtacgggctgccgctggccaagagggcggccccgctggccttcccgcctctcggcctcacgccctcccctaccgcgtccagcctgctgggcgagagtcccagcctgccgtcgccgcccagcaggagctcgtcgtctggcgagggcacgtgtgccgtgtgcggggacaacgccgcctgccagcactacggcgtgcgaacctgcgagggctgcaagggctttttcaagagaacagtgcagaaaaatgcaaaatatgtttgcctggcaaataaaaactgcccagtagacaagagacgtcgaaaccgatgtcagtactgtcgatttcagaagtgtctcagtgttggaatggtaaaagaagttgtccgtacagatagtctgaaagggaggagaggtcgtctgccttccaaaccaaagagcccattacaacaggaaccttctcagccctctccaccttctcctccaatctgcatgatgaatgcccttgtccgagctttaacagactcaacacccagagatcttgattattccagatactgtcccactgaccaggctgctgcaggcacagatgctgagcatgtgcaacaattctacaacctcctgacagcctccattgatgtatccagaagctgggcagaaaagattccgggatttactgatctccccaaagaagatcagacattacttattgaatcagcctttttggagctgtttgtcctcagactttccatcaggtcaaacactgctgaagataagtttgtgttctgcaatggacttgtcctgcatcgacttcagtgccttcgtggatttggggagtggctcgactctattaaagacttttccttaaatttgcagagcctgaaccttgatatccaagccttagcctgcctgtcagcactgagcatgatcacagaaagacatgggttaaaagaaccaaagagagtcgaagagctatgcaacaagatcacaagcagtttaaaagaccaccagagtaagggacaggctctggagcccaccgagtccaaggtcctgggtgccctggtagaactgaggaagatctgcaccctgggcctccagcgcatcttctacctgaagctggaagacttggtgtctccaccttccatcattgacaagctcttcctggacaccctacctttctaatcaggagcagtggagcagtgagctgcctcctctcctagcacctgcttgctacgcagcaaagggataggtttggaaacctatcatttcctgtccttccttaagaggaaaagcagctcctgtagaaagcaaagactttcttttttttctggctcttttccttacaacctaaagccagaaaacttgcagagtattgtgttggggttgtgttttatatttaggcattgggggatggggtgggagggggttatagttcatgagggttttctaagaaattgctaacaaagcacttttggacaatgctatcccagcaggaaaaaaaaggataatataactgttttaaaactctttctggggaatccaattatagttgctttgtatttaaaaacaagaacagccaagggttgttcgccagggtaggatgtgtcttaaagattggtcccttgaaaatatgcttcctgtatcaaaggtacgtatgtggtgcaaacaaggcagaaacttccttttaatttccttcttcctttattttaacaaatggtgaaagatggaggattacctacaaatcagacatggcaaaacaataatggctgtttgcttccataaacaagtgcaattttttaaagtgctgtcttactaagtcttgtttattaactctcctttattctatatggaaataaaaaggaggcagtcatgttagcaaatgacacgttaatatccctagcagaggctgtgttcaccttccctgtcgatcccttctgaggtatggcccatccaagacttttaggccattcttgatggaaccagatccctgccctgactgtccagctatcctgaaagtggatcagattataaactggattacatgtaactgttttggttgtgttctatcaaccccaccagagttccctaaacttgcttcagttatagtaactgactggtatattcattcagaagcgccataagtcagttgagtatttgatccctagataagaacatgcaaatcagcaggaactggtcatacagggtaagcaccagggacaataaggatttttatagatataatttaatttttgttattggttaaggagacaattttggagagcaagcaaatctttttaaaaaatagtatgaatgtgaatactagaaaagatttaaaaaatagtatgagtgtgagtactaggaaggattagtgggctgcgtttcaacattccgtgttcgtactcccttttgtatgtttctactgttaatgccatattactatgagataatttgttgcatagtgtccttatttgtataaacatttgtatgcacgttatattgtaatagctttgcctgtatttattgcaagaccaccagctcctggaagctgagttacagagtaattaaatggggtgttcacagtgacttggatacaccaattagaaattaaataagcaaatatatatatatatataaatatagcaggttacatatatatatttataatgtgtctttttattaaccatttgtacaataaatgtcacttcccatgccgttattttatggttcatttgcagtgacttttaaggcagtactgtttagcactttgatattaaaattttgcttatgttttgctaaattcgaataatgtttgaagatttttaggtctaaaagtctttatattatatactctgtatcaagtcaaaatatctttggccattttgctaagaaacaaactttgaatgtcaaactgatgtcacagtagtttttgttagctttaaatcatttttgctttagtctttttaaaggaaaataacaaaactatgctgtttatattgtcattaaattatacaatcaaacaaatgccaaatgaattgcctaattgctgcaaagtataacccagataggaaatcatatgtttttttccaagagtcattctaatatttgattatgttatgtgtgcttttatgaaagattgttatttttatatatcaagatgatagaacctggaatgttaggattttgaaatgttagacttggaaggggcctggtctgtcaactagtccaaccccttaaaattcatagaggagcaaactggggcccattgaagggtgaagagttactcaaggtcaaacagctggtaacagaatcaagactaagacctaatttacctttccatactctttttttttctcaacttcatctatataaaatcaggcttttaaacataaccactaatatttacctgaagataaccatgagtaaagtatacttttgcattaattttttgagcttatatgcaaacataataaatattattaaatatcaggaaagctaacatttcatacaagatagcttcagaccaaattcaaattgaatttgaataaattagaaatactgtgcatacataaccttcttgtgcaccatgagtatttggaaagttaatccttgtttttgtcgtgtctataaaggaagaacaaaacaaaataaaaacagagccctagagaaatgctgttactttttatttttacacccatcagatttaaggaaaagactttttagccattataatctagtggttggaaggaatgaagaagcttttttagtaataggtccagatatgagtgctaaaaataaagatgatagcatgttcttctgtcttccatagttattacaactatgagagcctcccaagtcatcttatcaactcaactcccttttttttgtcttaatgttgcacataagtttatacagagtggatgaccacactagcacagaagagaacaacatgtattaaagcaggtgattcctccccttggcgggagagctctctcagtgtgaacatgccttctgtgggcggaaatcaggaagccaccagctgttaatggagagtgccttgcttttatttcagacagcagagttttccaaagtttctctgctcctctaacagcattgctctttagtgtgtgttaacctgtggtttgaaagaaatgctcttgtacattaacaatgtaaatttaaatgattaaattacattttatcaatggc

SEQ ID NO: 249876 - DNA, 3794 bp, Artificial Sequence
  derived and/or modified sequence
ataaatgacgtgccgagagagcgagcgaacgcgcagccgggagagcggagtctcctgcctcccgccccccacccctccagctcctgctcctcctccgctccccatacacagacgcgctcacacccgctccctcactcgcacacacagacacaagcgcgcacacaggctccgcacacacacttcgctctcccgcgcgctcacacccctcttgccctgagcccttgccggtgcagcgcggcgccgcagctggacgcccctcccgggctcactttgcaacgctgacggtgccggcagtggccgtggaggtgggaacagcggcggcatcctcccccctggtcacagcccaagccaggacgcccgcggaacctctcggctgtgctctcccatgagtcgggatcgcagcatcccccaccagccgctcaccgcctccgggagccgctgggcttgtacaccgcagcccttccgggacagcagctgtgactcccccccagtgcagatttcgggacagctctctagaaactcgctctaaagacggaaccgccacagcactcaaagcccactgcggaagagggcagcccggcaagcccgggccctgagcctggacccttagcggtgccgggcagcactgccggcgcttcgcctcgccggacgtccgctcctcctacactctcagcctccgctggagagacccccagccccaccattcagcgcgcaagataccctccagatatgccctgcgtccaagcccaatatagcccttcccctccaggttccagttatgcggcgcagacatacagctcggaatacaccacggagatcatgaaccccgactacaccaagctgaccatggaccttggcagcactgagatcacggctacagccaccacgtccctgcccagcatcagtaccttcgtggagggctactcgagcaactacgaactcaagccttcctgcgtgtaccaaatgcagcggcccttgatcaaagtggaggaggggcgggcgcccagctaccatcaccatcaccaccaccaccaccaccaccaccaccatcaccagcagcagcatcagcagccatccattcctccagcctccagcccggaggacgaggtgctgcccagcacctccatgtacttcaagcagtccccaccgtccacccccaccacgccggccttccccccgcaggcgggggcgttatgggacgaggcactgccctcggcgcccggctgcatcgcacccggcccgctgctggacccgccgatgaaggcggtccccacggtggccggcgcgcgcttcccgctcttccacttcaagccctcgccgccgcatccccccgcgcccagcccggccggcggccaccacctcggctacgacccgacggccgctgccgcgctcagcctgccgctgggagccgcagccgccgcgggcagccaggccgccgcgcttgagagccacccgtacgggctgccgctggccaagagggcggccccgctggccttcccgcctctcggcctcacgccctcccctaccgcgtccagcctgctgggcgagagtcccagcctgccgtcgccgcccagcaggagctcgtcgtctggcgagggcacgtgtgccgtgtgcggggacaacgccgcctgccagcactacggcgtgcgaacctgcgagggctgcaagggctttttcaagagaacagtgcagaaaaatgcaaaatatgtttgcctggcaaataaaaactgcccagtagacaagagacgtcgaaaccgatgtcagtactgtcgatttcagaagtgtctcagtgttggaatggtaaaagaagttgtccgtacagatagtctgaaagggaggagaggtcgtctgccttccaaaccaaagagcccattacaacaggaaccttctcagccctctccaccttctcctccaatctgcatgatgaatgcccttgtccgagctttaacagactcaacacccagagatcttgattattccagatactgtcccactgaccaggctgctgcaggcacagatgctgagcatgtgcaacaattctacaacctcctgacagcctccattgatgtatccagaagctgggcagaaaagattccgggatttactgatctccccaaagaagatcagacattacttattgaatcagcctttttggagctgtttgtcctcagactttccatcaggtcaaacactgctgaagataagtttgtgttctgcaatggacttgtcctgcatcgacttcagtgccttcgtggatttggggagtggctcgactctattaaagacttttccttaaatttgcagagcctgaaccttgatatccaagccttagcctgcctgtcagcactgagcatgatcacagaaagacatgggttaaaagaaccaaagagagtcgaagagctatgcaacaagatcacaagcagtttaaaagaccaccagagtaagggacaggctctggagcccaccgagtccaaggtcctgggtgccctggtagaactgaggaagatctgcaccctgggcctccagcgcatcttctacctgaagctggaagacttggtgtctccaccttccatcattgacaagctcttcctggacaccctacctttctaatcaggagcagtggagcagtgagctgcctcctctcctagcacctgcttgctacgcagcaaagggataggtttggaaacctatcatttcctgtccttccttaagaggaaaagcagctcctgtagaaagcaaagactttcttttttttctggctcttttccttacaacctaaagccagaaaacttgcagagtattgtgttggggttgtgttttatatttaggcattgggggatggggtgggagggggttatagttcatgagggttttctaagaaattgctaacaaagcacttttggacaatgctatcccagcaggaaaaaaaaggataatataactgttttaaaactctttctggggaatccaattatagttgctttgtatttaaaaacaagaacagccaagggttgttcgccagggtaggatgtgtcttaaagattggtcccttgaaaatatgcttcctgtatcaaaggtacgtatgtggtgcaaacaaggcagaaacttccttttaatttccttcttcctttattttaacaaatggtgaaagatggaggattacctacaaatcagacatggcaaaacaataatggctgtttgcttccataaacaagtgcaattttttaaagtgctgtcttactaagtcttgtttattaactctcctttattctatatggaaataaaaaggaggcagtcatgttagcaaatgacacgttaatatccctagcagaggctgtgttcaccttccctgtcgatcccttctgaggtatggcccatccaagacttttaggccattcttgatggaaccagatccctgccctgactgtccagctatcctgaaagtggatcagattataaactggattacatgtaactgttttggttgtgttctatcaaccccaccagagttccctaaacttgcttcagttatagtaactgactggtatattcattcagaagcgccataagtcagttgagtatttgatccctagataagaacatgcaaatcagcaggaactggtcatacagggtaagcaccagggacaataaggatttttatagatataatttaatttttgttattggttaaggagacaattttggagagcaagcaaatctttttaaaaaatagtatgaatgtgaatactagaaaagatttaaaaaatagtatgagtgtgagtactaggaaggat

SEQ ID NO: 249877 - DNA, 1914 bp, Artificial Sequence
  derived and/or modified sequence
atgcatgactctattaggttcggcaatgtcgacatgccatgcgtccaagcccagtacagcccttcacccccagggagcagctacgcggctcaaacctatagtagtgaatatactactgaaatcatgaatcctgactacactaaactgactatggatctcggttccaccgagattactgcaactgcgacaactagcctcccaagcatttcaaccttcgtggaaggctactcttccaattatgaactgaaaccttcttgcgtgtaccaaatgcagagaccactaataaaggtggaggaaggcagggctcctagttaccaccaccatcatcatcaccaccatcaccatcatcatcaccaccagcagcagcaccagcagccatctattccccctgccagttctcctgaggacgaggtattaccctctacttctatgtactttaagcagagcccaccttcaaccccgactactcccgcattccctccacaagccggtgcactctgggatgaagcgctaccctccgctcccggatgtatcgctccaggccctctgctcgaccctccaatgaaggccgttcccacggtcgccggagcacgctttcccctgttccattttaaaccatctcctcctcatcctcccgcaccgtcgcccgctggaggccaccacctgggatacgaccccactgccgcagcagccctttccctgcccctcggtgctgccgctgccgctggatctcaggccgcagcgctcgaaagtcacccttacgggctcccacttgcaaagcgggctgctccgctggcgtttcctcccctgggtttgaccccttccccaacagcgagttctttactgggtgaatctcctagtctgccatcccccccatcacggtctagctcatccggtgaggggacctgtgctgtctgtggagacaacgccgcatgccagcattatggcgtgcgcacctgcgaggggtgtaagggcttcttcaaaaggaccgtacaaaagaacgcaaagtacgtctgcctcgcaaataaaaactgtccagtagacaagaggcgaaggaataggtgtcaatattgccggttccagaagtgcctatctgttggcatggtaaaggaagtagttcggactgatagtctgaaaggacggagaggtagactccctagcaagcctaagtcccccctgcagcaggagccaagtcagccatcccctccatcacctccaatatgcatgatgaacgctctggtgcgcgctctgacggactccacccccagagacctggactactctagatactgccccaccgatcaagcggctgctgggacggacgcagaacacgtacaacaattctataatcttctgacggcaagcattgacgtctctcgcagctgggctgaaaagattcccggttttacagatttgcctaaggaggatcagacgttgttgatcgaaagcgccttcttggaactgttcgtcctgcggctctctatccgatccaacacagctgaagacaaatttgtgttctgtaatggacttgtattacaccgcctccagtgcctgagaggattcggggagtggctggacagcatcaaggatttctcactaaatctgcagtcactcaaccttgacatccaggctctggcctgccttagcgcattgagcatgatcactgaacgacacggcctgaaggagccaaaacgggtagaggagctgtgcaataagattacttcttcactaaaagaccaccaaagtaaaggccaggccctggagcccacggagtctaaggtgctcggcgctctggtagagcttagaaaaatttgcaccttgggactgcaaagaatattctacctcaagttagaggacctggttagccccccttccattatagacaagctattcctggacactctccccttttag

SEQ ID NO: 249878 - DNA, 1881 bp, Artificial Sequence
  derived and/or modified sequence
atgccttgtgttcaggcccagtatagtccctctccacccggttcttcctatgccgcacagacctacagctccgaatacactaccgaaattatgaacccggactacacaaagcttacgatggatcttggaagcacagagattactgcaacagctacaacttctctcccatcaatctcgacatttgtcgagggctacagttcgaattatgagctgaagccatcatgtgtttaccagatgcaaagaccgctgataaaggttgaggagggacgagccccttcctatcatcaccaccatcatcatcaccaccatcaccaccatcaccaccagcaacagcatcagcagccttcgattccgcctgcatccagccctgaggacgaggtactcccttccacttcaatgtattttaagcagtcccctccaagtacccccacaactccagctttcccaccacaggctggtgcactatgggatgaggccctgccaagcgccccagggtgtattgccccagggcctctgctggatcctcccatgaaggctgttcctactgtggccggtgcccgatttcccctgttccacttcaagccatccccaccccatccccctgctccaagtcctgccggtggccatcacctcggctacgacccaaccgctgcagcggcactcagtctcccccttggcgcagctgctgcggctggttcccaggcagctgccctggagtctcatccctacggactgcctctggccaagagagccgctcctctcgcatttcctccccttggtttaacccccagtcccactgccagttcattactcggtgagtcaccaagcctgccatcccctccttcaaggagcagctcttctggtgagggcacttgcgctgtttgtggcgataatgccgcatgtcagcactatggcgtgaggacatgcgaggggtgtaaaggattcttcaaaaggacagtacaaaagaatgccaaatacgtgtgccttgcaaacaagaactgcccagtcgacaagcgacggagaaaccggtgccagtactgtcgctttcagaaatgtttgtcggtgggaatggttaaggaagtagtcaggacagacagcctgaagggtcgaagaggtcgcttgccatccaaaccaaagagccccttgcagcaggaacccagccaacccagccctccctcgcctcccatttgtatgatgaatgcactggtacgcgctctcactgacagtaccccacgagacttagattacagccgctactgccctactgaccaggcagccgcaggtacggacgcagagcacgtacagcagttttataacctgctcaccgcttccatagatgtctcgcgcagctgggctgaaaaaatccctggcttcaccgatcttccaaaagaagaccagactctgctgatagaatctgcatttcttgagctgttcgtactgcggttgtcaatccgtagcaatacagctgaagacaagtttgtgttctgtaacggcctagtgctgcataggctccagtgtttgcgcggtttcggggagtggctagattctataaaggacttctccctgaatctgcagagcctgaacctggacatccaggctttagcttgtttaagcgcactaagtatgattactgaaagacacgggctgaaggagcccaaacgggtggaggagctttgcaataagatcacaagcagtctgaaagatcaccagtccaaagggcaggccctggaaccgaccgaatctaaggtgctaggggcactggtcgagttgaggaaaatctgtaccttagggctccagcgcattttctacttaaaacttgaggacctggtatcccctccttcaataattgataaactctttctcgacacactccctttttag

SEQ ID NO: 249879 - protein, 1001 aa, Artificial Sequence
  derived and/or modified sequence
MEAAHAKTTEECLAYFGVSETTGLTPDQVKRNLEKYGLNELPAEEGKTLWELVIEQFEDLLVRILLLAACISFVLAWFEEGEETITAFVEPFVILLILIANAIVGVWQERNAENAIEALKEYEPEMGKVYRADRKSVQRIKARDIVPGDIVEVAVGDKVPADIRILAIKSTTLRVDQSILTGESVSVIKHTEPVPDPRAVNQDKKNMLFSGTNIAAGKALGIVATTGVGTEIGKIRDQMAATEQDKTPLQQKLDEFGEQLSKVISLICVAVWLINIGHFNDPVHGGSWFRGAIYYFKIAVALAVAAIPEGLPAVITTCLALGTRRMAKKNAIVRSLPSVETLGCTSVICSDKTGTLTTNQMSVCKMFIIDKVDGDICLLNEFSITGSTYAPEGEVLKNDKPVRPGQYDGLVELATICALCNDSSLDFNEAKGVYEKVGEATETALTTLVEKMNVFNTDVRSLSKVERANACNSVIRQLMKKEFTLEFSRDRKSMSVYCSPAKSSRAAVGNKMFVKGAPEGVIDRCNYVRVGTTRVPLTGPVKEKIMAVIKEWGTGRDTLRCLALATRDTPPKREEMVLDDSARFLEYETDLTFVGVVGMLDPPRKEVTGSIQLCRDAGIRVIMITGDNKGTAIAICRRIGIFGENEEVADRAYTGREFDDLPLAEQREACRRACCFARVEPSHKSKIVEYLQSYDEITAMTGDGVNDAPALKKAEIGIAMGSGTAVAKTASEMVLADDNFSTIVAAVEEGRAIYNNMKQFIRYLISSNVGEVVCIFLTAALGLPEALIPVQLLWVNLVTDGLPATALGFNPPDLDIMDRPPRSPKEPLISGWLFFRYMAIGGYVGAATVGAAAWWFLYAEDGPHVNYSQLTHFMQCTEDNTHFEGIDCEVFEAPEPMTMALSVLVTIEMCNALNSLSENQSLLRMPPWVNIWLLGSICLSMSLHFLILYVDPLPMIFKLRALDLTQWLMVLKISLPVIGLDEILKFVARNYLEDPEDERRK

SEQ ID NO: 249880 - protein, 844 aa, Artificial Sequence
  derived and/or modified sequence
KRRNPGRQAVGHTEEDPPRVGTPWKEHTGPGPQEGSTMEAAHAKTTEECLAYFGVSETTGLTPDQVKRNLEKYGLNELPAEEGKTLWELVIEQFEDLLVRILLLAACISFVLAWFEEGEETITAFVEPFVILLILIANAIVGVWQERNAENAIEALKEYEPEMGKVYRADRKSVQRIKARDIVPGDIVEVAVGDKVPADIRILAIKSTTLRVDQSILTGESVSVIKHTEPVPDPRAVNQDKKNMLFSGTNIAAGKALGIVATTGVGTEIGKIRDQMAATEQDKTPLQQKLDEFGEQLSKVISLICVAVWLINIGHFNDPVHGGSWFRGAIYYFKIAVALAVAAIPEGLPAVITTCLALGTRRMAKKNAIVRSLPSVETLGCTSVICSDKTGTLTTNQMSVCKMFIIDKVDGDICLLNEFSITGSTYAPEGEVLKNDKPVRPGQYDGLVELATICALCNDSSLDFNEAKGVYEKVGEATETALTTLVEKMNVFNTDVRSLSKVERANACNSVIRQLMKKEFTLEFSRDRKSMSVYCSPAKSSRAAVGNKMFVKGAPEGVIDRCNYVRVGTTRVPLTGPVKEKIMAVIKEWGTGRDTLRCLALATRDTPPKREEMVLDDSARFLEYETDLTFVGVVGMLDPPRKEVTGSIQLCRDAGIRVIMITGDNKGTAIAICRRIGIFGENEEVADRAYTGREFDDLPLAEQREACRRACCFARVEPSHKSKIVEYLQSYDEITAMTGDGVNDAPALKKAEIGIAMGSGTAVAKTASEMVLADDNFSTIVAAVEEGRAIYNNMKQFIRYLISSNVGEVVCIFLTAALGLPEALIPVQLLWVNLVTDCAELLIY

SEQ ID NO: 249881 - DNA, 3528 bp, Artificial Sequence
  derived and/or modified sequence
ggccggctgctcaagtgggacgggggtcagagctttgtggagggaagaaaaacctggagggggcaggagagtaaaaagaagaaacccaggcagacaggcagttggacacactgaggaagaccccccacgagtgggaaccccctggaaggaacacaccggccccggcccccaggaagggagcacaatggaggccgctcatgctaaaaccacggaggaatgtttggcctattttggggtgagtgagaccacgggcctcaccccggaccaagttaagcggaatctggagaaatacggcctcaatgagctccctgctgaggaagggaagaccctgtgggagctggtgatagagcagtttgaagacctcctggtgcggattctcctcctggccgcatgcatttccttcgtgctggcctggtttgaggaaggtgaagagaccatcactgcctttgttgaaccctttgtcatcctcttgatcctcattgccaatgccatcgtgggggtttggcaggagcggaacgcagagaacgccatcgaggccctgaaggagtatgagccagagatggggaaggtctaccgggctgaccgcaagtcagtgcaaaggatcaaggctcgggacatcgtccctggggacatcgtggaggtggctgtgggggacaaagtccctgcagacatccgaatcctcgccatcaaatccaccacgctgcgggttgaccagtccatcctgacaggcgagtctgtatctgtcatcaaacacacggagcccgttcctgacccccgagctgtcaaccaggacaagaagaacatgcttttctcgggcaccaacattgcagccggcaaggccttgggcatcgtggccaccactggtgtgggcaccgagattgggaagatccgagaccaaatggctgccacagaacaggacaagacccccttgcagcagaagctggatgagtttggggagcagctctccaaggtcatctccctcatctgtgtggctgtctggcttatcaacattggccacttcaacgaccccgtccatgggggctcctggttccgcggggccatctactactttaagattgccgtggccttggctgtggctgccatccccgaaggtcttcctgcagtcatcaccacctgcctggccctgggtacccgtcggatggcaaagaagaatgccattgtaagaagcttgccctccgtagagaccctgggctgcacctctgtcatctgttccgacaagacaggcaccctcaccaccaaccagatgtctgtctgcaagatgtttatcattgacaaggtggatggggacatctgcctcctgaatgagttctccatcaccggctccacttacgctccagagggagaggtcttgaagaatgataagccagtccggccagggcagtatgacgggctggtggagctggccaccatctgtgccctctgcaatgactcctccttggacttcaacgaggccaaaggtgtctatgagaaggtcggcgaggccaccgagacagcactcaccaccctggtggagaagatgaatgtgttcaacacggatgtgagaagcctctcgaaggtggagagagccaacgcctgcaactcggtgatccgccagctaatgaagaaggaattcaccctggagttctcccgagacagaaagtccatgtctgtctattgctccccagccaaatcttcccgggctgctgtgggcaacaagatgtttgtcaagggtgcccctgagggcgtcatcgaccgctgtaactatgtgcgagttggcaccacccgggtgccactgacggggccggtgaaggaaaagatcatggcggtgatcaaggagtggggcactggccgggacaccctgcgctgcttggccctggccacccgggacacccccccgaagcgagaggaaatggtcctggatgactctgccaggttcctggagtatgagacggacctgacattcgtgggtgtagtgggcatgctggaccctccgcgcaaggaggtcacgggctccatccagctgtgccgtgacgccgggatccgggtgatcatgatcactggggacaacaagggcacagccattgccatctgccggcgaattggcatctttggggagaacgaggaggtggccgatcgcgcctacacgggccgagagttcgacgacctgcccctggctgaacagcgggaagcctgccgacgtgcctgctgcttcgcccgtgtggagccctcgcacaagtccaagattgtggagtacctgcagtcctacgatgagatcacagccatgacaggtgatggcgtcaatgacgcccctgccctgaagaaggctgagattggcattgccatgggatctggcactgccgtggccaagactgcctctgagatggtgctggctgacgacaacttctccaccatcgtagctgctgtggaggagggccgcgccatctacaacaacatgaagcagttcatccgctacctcatttcctccaacgtgggcgaggtggtctgtatcttcctgaccgctgccctggggctgcctgaggccctgatcccggtgcagctgctatgggtgaacttggtgaccgacgggctcccagccacagccctgggcttcaacccaccagacctggacatcatggaccgccccccccggagccccaaggagcccctcatcagtggctggctcttcttccgctacatggcaatcgggggctatgtgggtgcagccaccgtgggagcagctgcctggtggttcctgtacgctgaggatgggcctcatgtcaactacagccagctgactcacttcatgcagtgcaccgaggacaacacccactttgagggcatagactgtgaggtcttcgaggcccccgagcccatgaccatggccctgtccgtgctggtgaccatcgagatgtgcaatgcactgaacagcctgtccgagaaccagtccctgctgcggatgccaccctgggtgaacatctggctgctgggctccatctgcctctccatgtccctgcacttcctcatcctctatgttgaccccctgccgatgatcttcaagctccgggccctggacctcacccagtggctcatggtcctcaagatctcactgccagtcattgggctcgacgaaatcctcaagttcgttgctcggaactacctagaggatccagaagatgaaagaaggaagtgagcatccttttgctctgtcctccccaccccgatagtgacacatcttcaggcagagctgtggcacagacccccgtcctgtcccccacacccgtgtcatgtgtctgtttataaacatgtccccttccctttccttccccctcggccacccgcctccctctcaaccttgtaaattccccttcccaaccccgaggggcttgcagggacaaggcgaccgactgcgctgagctgcttatttattgaaaataaacgacggaaaagtctggccttgcctctgtgcaagcttggaggcctgggtcgccgctgtgaaaaaaaaaaaaaaaaaaaaaaaaaaaaaaaaaa

SEQ ID NO: 249882 - DNA, 3570 bp, Artificial Sequence
  derived and/or modified sequence
ggccggctgctcaagtgggacgggggtcagagctttgtggagggaagaaaaacctggagggggcaggagagtaaaaagaagaaacccaggcagacaggcagttggacacactgaggaagaccccccacgagtgggaaccccctggaaggaacacaccggccccggcccccaggaagggagcacaatggaggccgctcatgctaaaaccacggaggaatgtttggcctattttggggtgagtgagaccacgggcctcaccccggaccaagttaagcggaatctggagaaatacggcctcaatgagctccctgctgaggaagggaagaccctgtgggagctggtgatagagcagtttgaagacctcctggtgcggattctcctcctggccgcatgcatttccttcgtgctggcctggtttgaggaaggtgaagagaccatcactgcctttgttgaaccctttgtcatcctcttgatcctcattgccaatgccatcgtgggggtttggcaggagcggaacgcagagaacgccatcgaggccctgaaggagtatgagccagagatggggaaggtctaccgggctgaccgcaagtcagtgcaaaggatcaaggctcgggacatcgtccctggggacatcgtggaggtggctgtgggggacaaagtccctgcagacatccgaatcctcgccatcaaatccaccacgctgcgggttgaccagtccatcctgacaggcgagtctgtatctgtcatcaaacacacggagcccgttcctgacccccgagctgtcaaccaggacaagaagaacatgcttttctcgggcaccaacattgcagccggcaaggccttgggcatcgtggccaccactggtgtgggcaccgagattgggaagatccgagaccaaatggctgccacagaacaggacaagacccccttgcagcagaagctggatgagtttggggagcagctctccaaggtcatctccctcatctgtgtggctgtctggcttatcaacattggccacttcaacgaccccgtccatgggggctcctggttccgcggggccatctactactttaagattgccgtggccttggctgtggctgccatccccgaaggtcttcctgcagtcatcaccacctgcctggccctgggtacccgtcggatggcaaagaagaatgccattgtaagaagcttgccctccgtagagaccctgggctgcacctctgtcatctgttccgacaagacaggcaccctcaccaccaaccagatgtctgtctgcaagatgtttatcattgacaaggtggatggggacatctgcctcctgaatgagttctccatcaccggctccacttacgctccagagggagaggtcttgaagaatgataagccagtccggccagggcagtatgacgggctggtggagctggccaccatctgtgccctctgcaatgactcctccttggacttcaacgaggccaaaggtgtctatgagaaggtcggcgaggccaccgagacagcactcaccaccctggtggagaagatgaatgtgttcaacacggatgtgagaagcctctcgaaggtggagagagccaacgcctgcaactcggtgatccgccagctaatgaagaaggaattcaccctggagttctcccgagacagaaagtccatgtctgtctattgctccccagccaaatcttcccgggctgctgtgggcaacaagatgtttgtcaagggtgcccctgagggcgtcatcgaccgctgtaactatgtgcgagttggcaccacccgggtgccactgacggggccggtgaaggaaaagatcatggcggtgatcaaggagtggggcactggccgggacaccctgcgctgcttggccctggccacccgggacacccccccgaagcgagaggaaatggtcctggatgactctgccaggttcctggagtatgagacggacctgacattcgtgggtgtagtgggcatgctggaccctccgcgcaaggaggtcacgggctccatccagctgtgccgtgacgccgggatccgggtgatcatgatcactggggacaacaagggcacagccattgccatctgccggcgaattggcatctttggggagaacgaggaggtggccgatcgcgcctacacgggccgagagttcgacgacctgcccctggctgaacagcgggaagcctgccgacgtgcctgctgcttcgcccgtgtggagccctcgcacaagtccaagattgtggagtacctgcagtcctacgatgagatcacagccatgacaggtgatggcgtcaatgacgcccctgccctgaagaaggctgagattggcattgccatgggatctggcactgccgtggccaagactgcctctgagatggtgctggctgacgacaacttctccaccatcgtagctgctgtggaggagggccgcgccatctacaacaacatgaagcagttcatccgctacctcatttcctccaacgtgggcgaggtggtctgtatcttcctgaccgctgccctggggctgcctgaggccctgatcccggtgcagctgctatgggtgaacttggtgaccgacgggctcccagccacagccctgggcttcaacccaccagacctggacatcatggaccgccccccccggagccccaaggagcccctcatcagtggctggctcttcttccgctacatggcaatcgggggctatgtgggtgcagccaccgtgggagcagctgcctggtggttcctgtacgctgaggatgggcctcatgtcaactacagccagctgactcacttcatgcagtgcaccgaggacaacacccactttgagggcatagactgtgaggtcttcgaggcccccgagcccatgaccatggccctgtccgtgctggtgaccatcgagatgtgcaatgcactgaacagcctgtccgagaaccagtccctgctgcggatgccaccctgggtgaacatctggctgctgggctccatctgcctctccatgtccctgcacttcctcatcctctatgttgaccccctgccgatgatcttcaagctccgggccctggacctcacccagtggctcatggtcctcaagatctcactgccagtcattgggctcgacgaaatcctcaagttcgttgctcggaactacctagagggataactgttccccctcctccatctctgagcccgtgtcacagatccagaagatgaaagaaggaagtgagcatccttttgctctgtcctccccaccccgatagtgacacatcttcaggcagagctgtggcacagacccccgtcctgtcccccacacccgtgtcatgtgtctgtttataaacatgtccccttccctttccttccccctcggccacccgcctccctctcaaccttgtaaattccccttcccaaccccgaggggcttgcagggacaaggcgaccgactgcgctgagctgcttatttattgaaaataaacgacggaaaagtctggccttgcctctgtgcaagcttggaggcctgggtcgccgctgtgaaaaaaaaaaaaaaaaaaaaaaaaaaaaaaaaaa

SEQ ID NO: 249883 - DNA, 3006 bp, Artificial Sequence
  derived and/or modified sequence
atggaggcggctcatgctaagaccactgaagagtgtctagcctattttggcgtcagcgagactactggtctgacaccggaccaggtaaagagaaacttagagaaatacggattgaacgagctccccgcagaggagggtaagacactgtgggaactggtgatcgagcaattcgaggatttgcttgtgcggatactgctgctggccgcatgtatctccttcgtgctggcatggttcgaggagggggaggaaacgatcaccgcgtttgtcgagcctttcgtgatcctgcttatcttgattgccaacgcaatcgtgggcgtatggcaggagcgcaatgcggagaacgctattgaagcgctgaaggagtacgaaccagagatgggaaaggtgtatcgagcagaccgaaaatccgttcagcgcatcaaagctcgcgatattgttccgggcgatatcgttgaagttgccgtcggggataaggtccccgccgacatacgaatcctggctatcaagtccaccacactgcgagtcgaccagtcaattcttaccggcgagtccgtgagtgttattaaacacaccgaaccagtgcccgatccgagagctgtgaatcaagataagaaaaacatgctgttttcaggcactaatattgccgccgggaaagccctggggatcgtcgccaccacgggtgtgggcacagaaattgggaaaattcgcgatcaaatggccgccactgagcaggataaaaccccccttcagcaaaagctggacgagtttggggagcagctatctaaggtcatttctctcatctgcgtggccgtttggctgatcaatattgggcacttcaatgaccctgtgcacggggggagttggttccgaggggctatttactactttaagattgcagttgctctggcagtggccgcgatccctgaagggctgcctgctgttataactacatgcttggcattgggtacgcgaaggatggccaagaagaacgctatagtcagatctctgcccagtgtagagacattgggttgcaccagcgttatttgtagtgacaaaacaggtacgctgaccacaaaccaaatgtccgtttgtaaaatgttcatcatcgacaaagtggacggagacatatgtctgctgaatgaattttccatcactgggagcacatatgctccagagggtgaagtgctcaaaaacgacaaaccagtgagacctggacagtacgacgggctagtcgagctggcaacaatctgcgctctttgtaacgattcctcacttgatttcaatgaggcgaagggtgtttacgagaaagtcggagaagccacagaaacggcattaaccaccctggttgagaagatgaacgtcttcaataccgacgtgaggagtctgagtaaggttgaaagggccaacgcctgtaatagtgtgatccgacaactcatgaaaaaggagttcaccctggaattctctcgggatagaaaatccatgagcgtctactgttctcccgcgaagtcaagtcgcgccgccgtgggcaacaagatgttcgtcaaaggggcacctgagggtgtgatcgatagatgtaactacgtgcgggtcggaactacgcgagtacctctgacaggaccagtgaaggaaaaaatcatggctgtgatcaaagaatgggggacaggccgcgatactttgagatgtctggccctggcaactagagacactcctcctaagcgggaagagatggtgctcgacgattcagcacggtttcttgagtacgagacagatcttacgttcgtgggcgttgtaggcatgttggatccacccaggaaagaagttaccgggtccattcaactgtgtagagacgcaggcatcagagtcatcatgatcactggagataataaggggacagcgattgccatctgcaggcggattgggatcttcggagagaatgaggaagtcgccgaccgggcctacactggcagagaatttgacgacttaccacttgcggaacagagggaggcctgcaggagagcctgctgctttgccagagtcgaaccctcgcataaatcgaaaatcgtggagtatctgcaaagttatgatgagataacagccatgaccggcgatggcgtcaatgacgcccccgccttgaagaaagccgagatcgggatagctatgggttccggaaccgctgttgctaaaacggcgagtgaaatggtactcgccgacgataacttctctaccatcgtagccgcggtcgaggagggtcgggcaatctataacaatatgaaacagttcattcgctacctgatttcgtccaatgtcggggaagtagtttgcatattcctgactgcagcccttggtctcccggaggcactgatccccgtgcagcttttgtgggtaaacttggtaacggatgggctgcccgccaccgctctgggctttaaccctcctgatctggacatcatggatcgacccccacgcagtcccaaggaacctctcatttctggttggctgttctttaggtatatggccataggtggatatgtgggcgccgcaactgtgggggccgccgcctggtggtttctttacgctgaggacgggcctcatgtgaactacagccagctgacacattttatgcagtgcaccgaagacaatacccattttgaggggatcgattgtgaagtgtttgaggcgcctgaacctatgactatggcgctctccgtcctggtgacaatcgagatgtgtaacgccctgaactctctctctgaaaatcagtctctgctccggatgccaccctgggtgaatatttggttattgggcagtatttgcctgagcatgtccctgcactttctcatcctttacgttgatcccctgcccatgatcttcaagctcagagccctcgatctgactcagtggctcatggtacttaagattagcctgccagtgataggattagatgaaattttgaaattcgtggcacggaattacttagaggaccctgaagatgagagaaggaaatag

SEQ ID NO: 249884 - DNA, 2535 bp, Artificial Sequence
  derived and/or modified sequence
aaacggcgcaatcccgggcggcaggcagtaggtcacaccgaggaggatccaccgagagttggtacaccctggaaagaacataccggcccaggcccacaagaaggtagcactatggaagcagctcatgcaaagaccaccgaggagtgcctagcgtactttggcgtgagcgagactaccgggctaacaccagaccaggtgaaacggaatctggagaagtatgggttgaatgaactccctgcagaggaaggcaagactttatgggaactcgtgattgagcagttcgaggacctgttagtaagaatcctgctgctcgcagcttgcatttcctttgtcctagcgtggtttgaggagggggaggagaccatcacagcattcgtagagcccttcgttattctgctcatacttatcgcaaacgctatcgtcggtgtgtggcaggaacgtaatgccgaaaacgcaattgaagcactgaaggagtatgaaccagagatgggcaaggtatatagggctgatcggaagtccgtgcagcggatcaaagccagagacatcgtcccaggtgatatcgttgaagtcgccgtgggagataaagtccccgctgatatccgcatccttgccattaagtccaccacactgagagtggaccagtcaattctaaccggggagtctgtgtcagtgattaagcacaccgaaccggtgcctgacccaagagctgttaaccaggacaaaaagaacatgcttttctcggggactaatattgccgctggaaaggccctgggaatcgtcgccactactggagttggcaccgagatcggtaaaatccgcgatcaaatggcggccacagagcaggataagacacccctgcagcagaaactggatgaatttggtgaacaactcagtaaggttatctctttgatttgcgtcgcagtctggctgatcaatatcggccactttaatgaccccgtacacggagggtcctggttcaggggcgctatttattatttcaagattgccgtggctttggccgtagctgccatcccagagggcctccccgctgtcattacgacttgcttagctcttggaacacggcggatggccaagaagaatgcgattgtgcgaagcctgccaagcgtcgaaaccctggggtgtacgagcgtgatttgttccgacaaaactgggacactcactacaaatcaaatgagcgtgtgcaaaatgttcatcatcgataaggtggatggtgatatctgtctattaaacgaattcagtattacggggagcacatatgccccagagggagaggtactgaagaatgacaagccagtacggcctggacagtacgacggcctggtggaactcgctacaatctgcgcactgtgtaatgattcttcactggacttcaacgaagctaagggcgtgtatgagaaggtgggagaagccactgagaccgccctaactactctggttgagaaaatgaatgtttttaacaccgacgttaggtccttgtctaaggtggaaagggccaatgcatgcaacagtgtgattcgccagctaatgaaaaaggagtttactctcgagtttagccgtgacagaaagagtatgtcagtctactgctcaccagccaaaagctctagggccgccgtgggtaataaaatgttcgtcaagggcgcacccgagggggtgatagacagatgcaactatgtccgagtcggcactacacgtgttccgctcactgggccggtcaaggagaagatcatggcagttataaaggaatggggcactgggagagacacccttaggtgtctggccctggcaactcgcgataccccgcctaagcgagaggagatggtcctagatgactcagcacgtttcctcgagtatgagaccgatctgactttcgtcggggtggtcgggatgctcgaccccccacgcaaagaggtgacaggctccatccagctgtgccgggatgctggcataagggtgataatgatcacaggcgacaacaaaggcacagctattgccatctgtcgtcgcatcggcatatttggcgaaaacgaggaagtcgcagatcgagcctatactgggcgtgaattcgatgaccttccccttgcagaacagcgcgaagcatgccgtcgggcttgctgtttcgcccgagtggaaccttctcacaagtcaaagatcgtggagtatctccaatcttacgatgaaatcaccgccatgaccggcgatggtgtcaacgacgccccagcgctgaagaaggcagaaatcgggatcgctatggggtctggtacagcagtggcgaagaccgcatccgagatggtgctcgctgatgataatttctctaccatcgttgctgctgtggaagaggggcgagctatttacaacaatatgaaacagtttattcgttacctgatctcatctaatgtgggagaggttgtttgcatttttctgacagctgccctgggcttgcctgaggccttaatccctgtgcagctgttgtgggtaaatctggttacggactgtgccgaactgttaatctattag

SEQ ID NO: 249885 - DNA, 3006 bp, Artificial Sequence
  derived and/or modified sequence
atggaggccgcccacgccaagaccacagaagaatgtctggcctactttggagtgtctgagaccaccggcctgaccccagaccaggtgaagaggaacctggagaagtatggcctgaatgagctgcctgctgaggagggcaagaccctgtgggagctggtgattgagcagtttgaggacctgctggtgcgcatcctgctgctggccgcctgcatcagctttgtgctggcctggtttgaggagggggaggagaccatcacagcctttgtggagcccttcgtcatcctgctgatcctgattgccaatgccatcgtgggcgtgtggcaggagagaaatgcagaaaatgccatcgaggccctgaaggagtatgagcctgagatgggcaaggtgtacagagctgacaggaagtctgtgcagaggatcaaggcccgggacatcgtgcctggggacatcgtggaggtggccgtgggggacaaggtgcctgctgacatccgcatcctggccatcaagagcaccaccctgcgggtggaccagagcatcctgactggagagagcgtgtctgtcatcaagcacacagagcctgtgcctgaccccagggctgtgaaccaggacaagaagaacatgctgttcagcggcaccaacattgctgctgggaaggccctgggcatcgtggccaccaccggggtgggcacagagatcggcaagatccgggaccagatggccgccacagagcaggacaagacccccctgcagcagaagctggatgaatttggagagcagctgagcaaggtgatcagcctcatctgtgtggccgtgtggctgatcaacatcggccacttcaatgaccctgtgcacggcggctcctggttccggggggccatctactacttcaagattgctgtggccctggccgtggccgccatccctgagggcctgcctgctgtgatcaccacctgcctggccctgggcaccaggaggatggccaagaagaatgccatcgtgcgcagcctgcccagcgtggagaccctgggctgcaccagcgtcatctgcagcgacaagacaggcaccctgaccaccaaccagatgtctgtgtgcaagatgttcatcatcgacaaggtggatggagacatctgcctgctgaatgagttcagcatcaccggcagcacctacgcccctgagggggaggtgctgaagaatgacaagcctgtgcggcccggccagtatgatggcctggtggagctggccaccatctgtgccctgtgcaatgacagcagcctggacttcaatgaggccaagggcgtgtatgagaaggtgggggaggccacagaaacagccctgaccaccctggtggagaagatgaatgtgttcaacacagatgtgcgcagcctgagcaaggtggagcgggccaatgcctgcaacagcgtcatccggcagctgatgaagaaggagttcaccctggagttcagccgggacaggaagtccatgtctgtgtactgcagccctgccaagagcagcagagctgctgtgggcaacaagatgtttgtgaagggggcccctgagggcgtcatcgaccgctgcaactacgtgcgggtgggcaccaccagggtgcccctgaccggccctgtgaaggagaagatcatggctgtgatcaaggagtggggcaccggccgggacaccctgcgctgcctggccctggccacccgggacaccccacccaagcgggaggagatggtgctggatgattctgcccgcttcctggagtatgaaacagacctgacctttgtgggcgtggtgggcatgctggacccccccaggaaggaggtgacaggcagcatccagctgtgcagagatgctggcatccgggtcatcatgatcactggagacaacaagggcacagccatcgccatctgcagaagaattggcatctttggagaaaatgaggaggtggccgaccgggcctacacaggccgggagtttgatgacctgcccctggccgagcagcgggaggcctgcagaagagcctgctgctttgcccgggtggagcccagccacaagagcaagatcgtggagtacctgcagagctatgatgagatcacagccatgactggagatggagtgaatgatgccccagccctgaagaaggccgagatcggcatcgccatgggcagcggcacagctgtggccaagacagccagcgagatggtgctggctgatgacaacttcagcaccatcgtggccgctgtggaggagggccgggccatctacaacaacatgaagcagttcatccgctacctgatcagcagcaatgtgggggaggtggtgtgcatcttcctgacagctgccctgggcctgcctgaggccctgatccctgtgcagctgctgtgggtgaacctggtgacagatggcctgcctgccacagccctgggcttcaaccccccagacctggacatcatggaccggccccccaggagccccaaggagcccctcatcagcggctggctgttcttccgctacatggccatcggcggctacgtgggcgccgccaccgtgggcgccgccgcctggtggttcctgtatgcagaagatggcccccacgtgaactacagccagctgacccacttcatgcagtgcacagaggacaacacccactttgagggcatcgactgtgaggtgtttgaggcccctgagcccatgaccatggccctgtctgtgctggtgaccatcgagatgtgcaatgccctgaacagcctgtctgagaaccagagcctgctgaggatgccaccctgggtgaacatctggctgctgggcagcatctgcctgtccatgagcctgcacttcctgatcctgtatgtggaccccctgcccatgatcttcaagctgcgggccctggacctgacccagtggctgatggtgctgaagatcagcctgcccgtcatcggcctggatgagatcctgaagtttgtggccaggaactacctggaggaccctgaagatgaaagaaggaagtag

SEQ ID NO: 249886 - DNA, 2535 bp, Artificial Sequence
  derived and/or modified sequence
aagagaagaaatcctggccggcaggccgtgggccacacagaagaagatcctccccgggtgggcaccccctggaaggagcacacaggccctggcccccaggagggcagcaccatggaggccgcccacgccaagaccacagaggagtgcctggcctactttggagtgtctgagaccaccggcctgaccccagaccaggtgaagaggaacctggagaagtatggcctgaatgagctgcctgctgaggagggcaagaccctgtgggagctggtgattgagcagtttgaggacctgctggtgcgcatcctgctgctggccgcctgcatcagctttgtgctggcctggtttgaggagggggaggagaccatcacagcctttgtggagccctttgtgatcctgctgatcctgattgccaatgccatcgtgggcgtgtggcaggagagaaatgcagaaaatgccatcgaggccctgaaggagtatgagcctgagatgggcaaggtgtacagagctgacaggaagtctgtgcagaggatcaaggcccgggacatcgtgcctggggacatcgtggaggtggccgtgggggacaaggtgcctgctgacatccgcatcctggccatcaagagcaccaccctgcgggtggaccagagcatcctgaccggggagagcgtgtctgtcatcaagcacacagagcctgtgcctgaccccagggctgtgaaccaggacaagaagaacatgctgttcagcggcaccaacattgctgctgggaaggccctgggcatcgtggccaccactggagtgggcacagaaattggcaagatccgggaccagatggccgccacagagcaggacaagacccccctgcagcagaagctggatgaatttggagagcagctgagcaaggtgatcagcctcatctgtgtggccgtgtggctgatcaacatcggccacttcaatgaccctgtgcatggaggctcctggttccggggggccatctactacttcaagattgctgtggccctggccgtggccgccatccctgagggcctgcctgctgtgatcaccacctgcctggccctgggcaccaggaggatggccaagaagaatgccatcgtgcgcagcctgcccagcgtggagaccctgggctgcaccagcgtcatctgcagcgacaagacaggcaccctgaccaccaaccagatgtctgtgtgcaagatgttcatcatcgacaaggtggatggagacatctgcctgctgaatgagttcagcatcaccggcagcacctacgcccctgagggggaggtgctgaagaatgacaagcctgtgcggcccggccagtatgatggcctggtggagctggccaccatctgtgccctgtgcaatgacagcagcctggacttcaatgaggccaagggcgtgtatgagaaggtgggggaggccacagaaacagccctgaccaccctggtggagaagatgaatgtgttcaacacagatgtgcgcagcctgagcaaggtggagcgggccaatgcctgcaacagcgtcatccggcagctgatgaagaaggagttcaccctggagttcagccgggacaggaagtccatgtctgtgtactgcagccctgccaagagcagcagagctgctgtgggcaacaagatgtttgtgaagggggcccctgagggcgtgattgaccgctgcaactacgtgcgggtgggcaccaccagggtgcccctgactggacctgtgaaggagaagatcatggccgtcatcaaggagtggggcaccggccgggacaccctgcgctgcctggccctggccacccgggacaccccacccaagcgggaggagatggtgctggatgacagcgcccgcttcctggagtatgaaacagacctgacctttgtgggcgtggtgggcatgctggacccccccaggaaggaggtgacaggcagcatccagctgtgcagagatgctggcatccgggtcatcatgatcaccggggacaacaagggcacagccatcgccatctgccgccgcatcggcatctttggagaaaatgaggaggtggccgaccgggcctacacaggccgggagtttgatgacctgcccctggccgagcagcgggaggcctgccggcgggcctgctgctttgcccgggtggagcccagccacaagagcaagatcgtggagtacctgcagagctatgatgagatcacagccatgactggagatggagtgaatgatgccccagccctgaagaaggccgagattggaattgccatgggcagcggcacagctgtggccaagacagccagcgagatggtgctggctgatgacaacttcagcaccatcgtggccgctgtggaggagggccgggccatctacaacaacatgaagcagttcatccgctacctgatcagcagcaatgtgggggaggtggtgtgcatcttcctgacagctgccctgggcctgcctgaggccctgatccctgtgcagctgctgtgggtgaacctggtgacagactgtgccgagctgctgatctactag

SEQ ID NO: 249887 - DNA, 3006 bp, Artificial Sequence
  derived and/or modified sequence
atggaggccgcccacgccaagaccaccgaggagtgcctggcctactttggagtgtcggagacaaccggtttaacccctgatcaggtgaagcggaacctcgagaaatacgggctcaacgaactgcccgctgaagaaggaaagaccctatgggagctggtcattgaacagtttgaagatctcctggttaggatcctgctgctggctgcctgcatctccttcgtcctggcttggttcgaggagggcgaagagaccattaccgcgttcgtggaacccttcgtcatactgctgatccttatcgcgaacgcaattgtgggcgtctggcaggagaggaacgctgaaaacgcgattgaagccctcaaggaatatgaaccagaaatgggaaaagtttatagggccgaccggaaatccgttcagagaattaaggcccgcgatattgtgcctggcgatatagtggaggtcgcagtgggagacaaggtacccgccgatatccgcattctggccatcaaatcaactactctcagggtcgaccagtctatcttgaccggtgagtccgtgtctgtgattaaacacacagagcctgttcctgacccgcgggctgtgaaccaggacaaaaaaaacatgctgttttcagggaccaatattgcggccggcaaagccttgggaatagtggccactactggtgtgggcactgaaattggcaaaatccgcgatcaaatggctgcaactgagcaagacaaaactcctctgcagcaaaagttagacgagtttggtgagcagctatccaaagtgatctccctcatctgcgttgctgtgtggctaatcaacattggtcacttcaacgacccggtgcacggcgggagttggttcagaggcgccatctactacttcaaaatagccgtcgccttagcagtcgcagccatacctgaaggactcccggcagtaatcacaacttgtttggcgctgggcactcgaagaatggccaagaaaaatgccattgtccgttctcttccctccgtggagacgctggggtgcacatctgttatttgtagcgacaaaactggaaccctgactaccaaccagatgagcgtatgtaagatgttcattatagacaaggtggatggggacatttgtctcctcaacgagttttctataaccggttctacctatgcaccagagggcgaggttctgaagaacgacaagcccgtccgtcctggtcaatacgacggtctcgttgaattagccaccatctgcgccctgtgtaacgattcctctctggactttaatgaggccaagggagtatatgagaaagttggggaggctaccgaaacagccctcaccacgctggtggagaaaatgaatgtattcaacaccgacgtacgaagcctcagcaaggtagagagagccaacgcctgcaattccgtgataagacagctcatgaaaaaggagttcactctcgagtttagccgggaccggaagagtatgagcgtatattgctcccctgccaaatcttctcgggctgcagtaggcaacaagatgtttgttaaaggtgccccagagggcgtaatcgaccgatgtaactacgtacgcgtgggtacgacaagagtccccctaaccggtcctgtgaaggaaaaaatcatggctgtgatcaaagaatggggaactggacgtgacaccttgcgctgtctggccctggctacaagagacacaccacctaagcgggaggaaatggtactggatgactctgcccgattcttagagtacgagaccgacctgactttcgtaggggtcgttggcatgctggatccgccaagaaaagaagtgacaggctctatacagctttgtagggacgccggtattcgggtaataatgattacaggggataacaaagggaccgcgatcgctatctgcagacgtatcggtatttttggcgaaaatgaagaagtggcggacagagcctatactgggcgggaatttgacgacctgccattggccgagcaacgcgaggcctgcaggagagcttgctgcttcgcgcgagtggaaccctcgcacaagtccaaaatcgtggagtatttacagtcatacgatgaaatcaccgctatgaccggagacggggtgaatgatgcgccggccctcaagaaagccgagatcggaatcgcaatggggtctggcacagccgtcgccaagacagcaagcgagatggtgctcgcggacgacaatttttccaccattgtggctgctgttgaggaaggacgggctatatataacaacatgaaacagttcattcggtacttaattagttcaaacgtgggagaggtcgtgtgtatcttcctgacggcagccctgggcctacctgaagccttaatccctgttcagctgctatgggttaatctggttacggacggcctacccgcgaccgcccttgggttcaacccccctgatctggacatcatggaccggcctccacgcagcccaaaagagcccttaattagcggatggctcttctttaggtatatggcaattggcggatatgtgggcgccgccaccgtcggagctgcggcttggtggtttctgtacgctgaggatgggccccatgttaactacagccagctgacacatttcatgcagtgtaccgaggataacacccactttgagggaattgattgcgaagtgttcgaagctcctgaacccatgacaatggcacttagcgtgctggtcacaattgagatgtgcaatgctctaaatagcctgtcagagaatcagagcctcctacgcatgcctccttgggtcaatatctggctcttaggctctatctgcttgtctatgtcacttcactttctgatcttgtatgtggatcctctcccaatgatctttaaactgcgggcgctggatcttacacagtggctgatggtgctgaaaattagcctacccgttattggactggacgaaattctaaagtttgtcgcccgtaactacctggaagacccagaagacgagcgtagaaagtag

SEQ ID NO: 249888 - DNA, 2535 bp, Artificial Sequence
  derived and/or modified sequence
aagcggcggaaccccggccggcaggccgtgggccacaccgaggaggatcctcctcgggtggggactccgtggaaggagcacaccggtcccggcccacaggagggctccacgatggaagcggcgcacgccaagaccaccgaggaatgcctggcttattttggcgtctccgaaactaccggacttacccccgaccaggttaaacggaacctcgagaaatacggacttaatgaactgcccgccgaagaaggtaagaccctgtgggagctggttatagagcagtttgaggatttgctggtgcgcatcctcctccttgcagcctgtatttcttttgtcctagcgtggttcgaggagggcgaagaaaccatcaccgcctttgtagaaccttttgttattttgttaattctgatagcaaacgccatcgttggcgtatggcaggagcggaacgctgaaaacgcgattgaagccctcaaggagtatgagcctgaaatgggcaaggtctaccgagccgaccgcaagtcggtccagcgtattaaggccagggacattgtgccaggcgatattgttgaagtcgccgttggcgataaggtccccgcagatattcggatcctggctattaagtctactaccttaagggtagatcagagtattttaacaggggaatctgttagcgttattaagcacacagagccagtcccagatccaagggctgtcaatcaagacaaaaaaaatatgctgttctccggcacaaatatcgctgcagggaaagctctgggcatagtggccacgactggagtggggaccgaaataggaaagatcagagatcagatggcagctacggagcaggacaagaccccgctccagcagaaactggacgaattcggggaacaactgtctaaggttatttctctcatctgtgtggcagtgtggctcataaacattggacactttaatgaccctgttcatgggggtagctggttccgaggcgctatctattatttcaaaatcgccgtggcattggccgtcgcagccattcccgaaggcctgcctgctgttatcaccacatgcctggctttgggcactagacggatggccaagaagaatgctatcgtgcgcagcttaccatctgtggaaacattgggttgtacgtctgtgatatgctccgacaagacaggcacgctgacaacaaatcaaatgagtgtctgcaagatgtttatcatcgacaaggtggacggtgatatttgcctgctaaacgaattttcaatcactggctcgacttacgccccagagggcgaggtgctcaaaaacgacaagcccgtgagaccaggacaatacgatgggctggtggagctggcgaccatttgcgccctctgcaacgacagctcactagactttaacgaagcaaaaggcgtttacgagaaagtgggcgaggctacagaaaccgcactgaccactcttgtcgagaagatgaacgttttcaataccgacgttcggtccctttcaaaagtagaacgcgccaacgcctgcaacagcgtgataaggcagcttatgaaaaaggagttcactctggagtttagtcgcgacaggaaaagcatgtctgtgtattgttcccctgccaaaagttcacgtgcagccgtgggcaacaagatgttcgtgaagggggcccctgagggtgtgattgatagatgcaactatgtcagagtgggcactacccgggtgcctctcacgggccctgtgaaagaaaaaataatggcagtgatcaaagagtggggcactggaagggacactctaagatgccttgcacttgccacaagggacactccgcctaaaagagaggaaatggtgttggacgacagtgcacgcttcctcgagtatgagacagacttgacttttgtgggcgtagtcggcatgttggacccaccaaggaaggaagtgactggatccatccagctctgtagagatgctggaattcgggtgatcatgatcacgggcgataacaagggtactgcgatagctatttgtcgaagaattggaatttttggagaaaatgaggaagtggccgatcgggcttacaccggtcgggagttcgacgacctcccccttgccgaacagagggaagcctgtcgccgggcatgctgctttgctcgagtcgaaccctcccacaagtctaaaatagtggagtatttacagtcatacgatgagattaccgccatgaccggcgatggagttaacgacgctcctgccctcaaaaaggctgagatcggcatcgcaatgggatccggtaccgctgtagccaagactgcaagcgagatggtactcgctgacgataactttagtacgatagtggcagccgttgaggagggacgcgccatctataacaacatgaaacagtttattcgatatctgatatcttcgaatgttggggaggttgtatgtatcttcctgactgcagccctggggctccccgaagctcttattcctgtgcagctgctgtgggtaaatctggtgaccgactgtgctgagcttcttatttactag

SEQ ID NO: 249889 - DNA, 3006 bp, Artificial Sequence
  derived and/or modified sequence
atggaagcagcacacgctaagaccaccgaagaatgcctcgcatactttggcgtctctgaaactacaggtcttacccctgatcaagtcaagcgaaaccttgagaagtatggactgaatgagctccccgctgaggagggcaagacactgtgggaactggttattgaacagttcgaagacctcctagttcggattctactgttagccgcatgtatttcatttgtgctcgcctggtttgaagagggagaggaaactattaccgcttttgtggagccttttgtgattttactgatcttaatcgccaatgccattgtaggtgtgtggcaggagcggaacgccgaaaacgcaattgaagcactcaaagagtacgagccggagatgggcaaagtttacagggctgaccggaagtctgtgcaacggatcaaagctcgcgacatagtacccggagacatagtggaagtcgctgtgggcgacaaagtccctgctgatattcgaatcttggcaatcaagagcacaactctccgggtcgaccagtcgatcctgaccggtgagtcagtctctgtcatcaagcacacagagccagtgccagaccctcgggctgttaaccaggacaaaaagaacatgttgttttctggtacaaatattgcagctggcaaggcgttagggatcgtggcaacaacaggcgtcggcaccgagattggtaaaattcgtgaccagatggccgctacggagcaggacaaaacacccctgcagcagaagctagacgaattcggagagcagctcagcaaggtgattagtctgatctgcgtagccgtatggctaatcaacattggacattttaacgaccctgtgcatggagggtcatggtttcggggagcgatctattatttcaagatagccgtggccctggcagtcgccgctatcccagagggcctacccgcagtgatcaccacctgtcttgccctgggcaccagaaggatggcaaagaagaacgccatcgtccgcagtttgccttctgtggaaacgttgggatgcacgagcgtaatttgttccgacaagaccggtacactgaccactaaccaaatgtctgtctgcaagatgtttattatcgacaaggtggacggagacatctgcttgctgaatgagttttccattaccggatccacctacgctcctgaaggggaggtcctcaaaaacgacaaaccggttcgcccaggtcaatatgacgggcttgtggagcttgcaactatttgcgcactgtgtaatgactcctcactcgacttcaatgaagctaagggagtgtatgaaaaagtcggcgaagcaacggagacagcactgacgacattagtagagaagatgaacgtgtttaatacggatgtgcgaagtctgtccaaagtcgaacgcgcaaacgcttgcaactccgtgatccgccagctcatgaaaaaagagttcaccctcgagttcagtcgggataggaagtccatgtctgtgtactgctcgcctgccaaatcatctagagctgcagtgggcaacaagatgtttgtgaagggcgctcccgagggcgtaattgatagatgcaactatgtcagagttggaactaccagggtccctttgacaggcccagtcaaagaaaaaataatggctgtgatcaaggagtggggcactggaagagatactcttcgttgtctggcacttgccactcgggatactcctcctaagcgtgaagaaatggttctcgacgacagcgccagattcctggaatatgagacggacctcacatttgtaggggttgtagggatgcttgatccaccaagaaaggaggtgactggaagcatccagttgtgcagagatgccggtatccgtgtgataatgattaccggggataataaagggacggcgattgccatttgtcggcgtattgggatcttcggagaaaacgaagaagtggcggaccgggcatatacagggagagagttcgatgatctgcccttagccgagcaacgcgaggcatgccgtcgtgcctgctgctttgccagggtcgaaccttcgcataagagcaagattgtagaatatctgcagtcgtacgacgagataaccgccatgacaggagatggtgtgaatgacgctcctgccctgaagaaagcagagatcggcatcgctatgggcagcggtaccgcagtagcgaaaaccgcttctgagatggtacttgccgacgacaatttctcgacaatcgtagccgcagtggaagagggacgcgctatctataacaacatgaagcagtttataagatatctcatctcaagtaatgtgggagaggtggtatgtatcttcctgacagcggctttgggactcccagaagcccttatcccggtccaacttctctgggtaaacctggtgactgacggccttccggctacagcacttggcttcaacccccctgatctggacatcatggacagacccccacgttcacctaaggagcctctgatatcagggtggttattttttcgatatatggccatcggcggttatgtcggtgcagctaccgtgggcgctgccgcttggtggttcctgtacgccgaagatgggcctcacgtcaattatagtcagttaacccatttcatgcagtgtacagaagacaacactcatttcgaaggcatagactgcgaggtcttcgaagcacccgagccaatgactatggccctgtccgttctggttaccattgagatgtgcaacgcgctgaactccctctcggagaatcaatctctccttaggatgccaccgtgggttaatatttggctgctggggagcatttgtctgagtatgagcctgcacttcttaatattgtacgtcgacccactacccatgattttcaagctgagagcccttgatcttactcagtggttgatggttcttaagattagccttccagttatcggacttgacgagatcctgaaatttgttgctaggaattatctcgaggacccagaggatgagcgaaggaagtag

SEQ ID NO: 249890 - DNA, 2535 bp, Artificial Sequence
  derived and/or modified sequence
aaaaggaggaaccctgggaggcaggccgttggtcatactgaagaggacccccctagggttggaactccatggaaagaacacacaggtcccggaccccaggaaggatctacgatggaagctgctcatgctaagacaaccgaagagtgtttagcctactttggcgtcagtgagaccaccggtctgacccccgatcaggtcaaacggaacctggaaaagtacggactgaatgagctgcccgctgaggaggggaaaacgctgtgggaattggtgatagagcagtttgaggatctgctggtgaggattttgctgctagcagcatgcatatctttcgtgctcgcgtggtttgaagagggcgaggagactattaccgcgtttgtggaaccattcgtgattctgctgatcctgatagccaacgcaattgtgggggtgtggcaggagagaaatgctgagaatgccatcgaggcccttaaggaatatgagcccgaaatgggcaaggtctatcgagctgatagaaagtctgtgcaaagaataaaagccagagatatcgtgcccggagacatagttgaagttgcggttggggacaaagtaccagccgacattagaatcctggccattaaatccacaaccctgcgagtggatcagagcattctcaccggcgaatccgtcagcgtcattaaacatacggagccagtccctgaccccagggccgttaatcaagataaaaagaacatgctgtttagcggaactaacattgccgcagggaaagctctggggatcgtggcaactacgggagtcggcacagaaattggaaaaatccgggatcaaatggcagccacggagcaggacaagaccccactgcagcaaaagctcgacgagtttggcgagcagctgtcaaaggtgatttccctgatatgcgtggccgtctggctgataaacatcgggcattttaacgaccccgtacacgggggatcctggtttaggggcgcaatctactattttaaaattgccgtcgctcttgccgtagcagccataccagagggcctccccgctgtgatcacaacctgccttgccctcggtacgagacgcatggccaaaaaaaatgccatcgtgaggagcctacccagtgtggagacattaggctgcacctccgtgatatgctcagataaaacaggcacattgacaacgaatcagatgtcagtgtgcaaaatgttcatcatcgataaggtagatggagacatctgtctcttgaatgagttctccattacggggagtacctacgctcccgagggcgaggtcttaaagaatgacaagccagtgagacctggacagtatgatggtttggtcgagctggccaccatatgtgcgctctgcaatgacagtagcttagatttcaacgaagccaagggcgtgtacgagaaggtaggcgaagccacagaaacggctctcacgacactggttgaaaagatgaatgtgtttaatacagatgtccgctcactgtcgaaggtggagcgcgctaatgcatgcaactcggtgattaggcagcttatgaaaaaggaattcaccctggaattcagtagggatagaaagtcaatgtccgtgtattgcagtcccgctaagtcgagtcgcgcagctgtagggaacaagatgttcgtgaagggggctcctgaaggggtgatcgatcgctgtaactacgtccgtgttgggacgaccagagtccccctcaccgggcctgttaaagagaagattatggcagtaatcaaagaatggggtacggggagagacacccttcgatgccttgccctggctacccgggatacacctcctaaacgggaggagatggtcttggacgattcagcacggtttcttgagtacgagacagacctgactttcgtcggcgttgtagggatgctcgaccccccaagaaaagaggtcactgggtccatccagctctgtagggacgccggaatcagggtgattatgattaccggagataataaaggaacagccatcgccatctgtcggaggattggcatctttggagaaaatgaggaagtcgcagatcgggcatatacgggacgcgaatttgacgatcttcctcttgccgaacagcgggaagcctgcagaagagcttgctgcttcgctcgtgtggaaccttcgcacaaaagcaaaatagtcgagtacctgcagtcctatgacgaaattactgctatgactggcgatggagtaaatgatgccccagctttgaagaaggccgagataggcatcgccatgggctcagggacggccgtcgctaagacagcatcagagatggtgttagccgacgacaacttctctaccatcgtggccgctgtcgaagagggaagagctatatacaacaacatgaaacagtttatccggtacctgatttccagtaacgttggagaggttgtgtgcatctttttgacagcagcattagggctccctgaggcccttatcccagtgcagctactttgggttaacctggtgactgattgcgccgagctacttatatactag

SEQ ID NO: 249891 - DNA, 3456 bp, Artificial Sequence
  derived and/or modified sequence
ggggtggccggctgctcaagtgggacgggggtcagagctttgtggagggaagaaaaacctggagggggcaggagagtaaaaagaagaaacccaggcagacaggcagttggacacactgaggaagaccccccacgagtgggaaccccctggaaggaacacaccggccccggcccccaggaagggagcacaatggaggccgctcatgctaaaaccacggaggaatgtttggcctattttggggtgagtgagaccacgggcctcaccccggaccaagttaagcggaatctggagaaatacggcctcaatgagctccctgctgaggaagggaagaccctgtgggagctggtgatagagcagtttgaagacctcctggtgcggattctcctcctggccgcatgcatttccttcgtgctggcctggtttgaggaaggtgaagagaccatcactgcctttgttgaaccctttgtcatcctcttgatcctcattgccaatgccatcgtgggggtttggcaggagcggaacgcagagaacgccatcgaggccctgaaggagtatgagccagagatggggaaggtctaccgggctgaccgcaagtcagtgcaaaggatcaaggctcgggacatcgtccctggggacatcgtggaggtggctgtgggggacaaagtccctgcagacatccgaatcctcgccatcaaatccaccacgctgcgggttgaccagtccatcctgacaggcgagtctgtatctgtcatcaaacacacggagcccgttcctgacccccgagctgtcaaccaggacaagaagaacatgcttttctcgggcaccaacattgcagccggcaaggccttgggcatcgtggccaccactggtgtgggcaccgagattgggaagatccgagaccaaatggctgccacagaacaggacaagacccccttgcagcagaagctggatgagtttggggagcagctctccaaggtcatctccctcatctgtgtggctgtctggcttatcaacattggccacttcaacgaccccgtccatgggggctcctggttccgcggggccatctactactttaagattgccgtggccttggctgtggctgccatccccgaaggtcttcctgcagtcatcaccacctgcctggccctgggtacccgtcggatggcaaagaagaatgccattgtaagaagcttgccctccgtagagaccctgggctgcacctctgtcatctgttccgacaagacaggcaccctcaccaccaaccagatgtctgtctgcaagatgtttatcattgacaaggtggatggggacatctgcctcctgaatgagttctccatcaccggctccacttacgctccagagggagaggtcttgaagaatgataagccagtccggccagggcagtatgacgggctggtggagctggccaccatctgtgccctctgcaatgactcctccttggacttcaacgaggccaaaggtgtctatgagaaggtcggcgaggccaccgagacagcactcaccaccctggtggagaagatgaatgtgttcaacacggatgtgagaagcctctcgaaggtggagagagccaacgcctgcaactcggtgatccgccagctaatgaagaaggaattcaccctggagttctcccgagacagaaagtccatgtctgtctattgctccccagccaaatcttcccgggctgctgtgggcaacaagatgtttgtcaagggtgcccctgagggcgtcatcgaccgctgtaactatgtgcgagttggcaccacccgggtgccactgacggggccggtgaaggaaaagatcatggcggtgatcaaggagtggggcactggccgggacaccctgcgctgcttggccctggccacccgggacacccccccgaagcgagaggaaatggtcctggatgactctgccaggttcctggagtatgagacggacctgacattcgtgggtgtagtgggcatgctggaccctccgcgcaaggaggtcacgggctccatccagctgtgccgtgacgccgggatccgggtgatcatgatcactggggacaacaagggcacagccattgccatctgccggcgaattggcatctttggggagaacgaggaggtggccgatcgcgcctacacgggccgagagttcgacgacctgcccctggctgaacagcgggaagcctgccgacgtgcctgctgcttcgcccgtgtggagccctcgcacaagtccaagattgtggagtacctgcagtcctacgatgagatcacagccatgacaggtgatggcgtcaatgacgcccctgccctgaagaaggctgagattggcattgccatgggatctggcactgccgtggccaagactgcctctgagatggtgctggctgacgacaacttctccaccatcgtagctgctgtggaggagggccgcgccatctacaacaacatgaagcagttcatccgctacctcatttcctccaacgtgggcgaggtggtctgtatcttcctgaccgctgccctggggctgcctgaggccctgatcccggtgcagctgctatgggtgaacttggtgaccgacgggctcccagccacagccctgggcttcaacccaccagacctggacatcatggaccgccccccccggagccccaaggagcccctcatcagtggctggctcttcttccgctacatggcaatcgggggctatgtgggtgcagccaccgtgggagcagctgcctggtggttcctgtacgctgaggatgggcctcatgtcaactacagccagctgactcacttcatgcagtgcaccgaggacaacacccactttgagggcatagactgtgaggtcttcgaggcccccgagcccatgaccatggccctgtccgtgctggtgaccatcgagatgtgcaatgcactgaacagcctgtccgagaaccagtccctgctgcggatgccaccctgggtgaacatctggctgctgggctccatctgcctctccatgtccctgcacttcctcatcctctatgttgaccccctgccgatgatcttcaagctccgggccctggacctcacccagtggctcatggtcctcaagatctcactgccagtcattgggctcgacgaaatcctcaagttcgttgctcggaactacctagaggatccagaagatgaaagaaggaagtgagcatccttttgctctgtcctccccaccccgatagtgacacatcttcaggcagagctgtggcacagacccccgtcctgtcccccacacccgtgtcatgtgtctgtttataaacatgtccccttccctttccttccccctcggccacccgcctccctctcaaccttgtaaattccccttcccaaccccgaggggcttgcagggacaaggcgaccgactgcgctgagctgcttatttattgaaaataaacgacggaaaagtctg

SEQ ID NO: 249892 - DNA, 2608 bp, Artificial Sequence
  derived and/or modified sequence
ggccggctgctcaagtgggacgggggtcagagctttgtggagggaagaaaaacctggagggggcaggagagtaaaaagaagaaacccaggcagacaggcagttggacacactgaggaagaccccccacgagtgggaaccccctggaaggaacacaccggccccggcccccaggaagggagcacaatggaggccgctcatgctaaaaccacggaggaatgtttggcctattttggggtgagtgagaccacgggcctcaccccggaccaagttaagcggaatctggagaaatacggcctcaatgagctccctgctgaggaagggaagaccctgtgggagctggtgatagagcagtttgaagacctcctggtgcggattctcctcctggccgcatgcatttccttcgtgctggcctggtttgaggaaggtgaagagaccatcactgcctttgttgaaccctttgtcatcctcttgatcctcattgccaatgccatcgtgggggtttggcaggagcggaacgcagagaacgccatcgaggccctgaaggagtatgagccagagatggggaaggtctaccgggctgaccgcaagtcagtgcaaaggatcaaggctcgggacatcgtccctggggacatcgtggaggtggctgtgggggacaaagtccctgcagacatccgaatcctcgccatcaaatccaccacgctgcgggttgaccagtccatcctgacaggcgagtctgtatctgtcatcaaacacacggagcccgttcctgacccccgagctgtcaaccaggacaagaagaacatgcttttctcgggcaccaacattgcagccggcaaggccttgggcatcgtggccaccactggtgtgggcaccgagattgggaagatccgagaccaaatggctgccacagaacaggacaagacccccttgcagcagaagctggatgagtttggggagcagctctccaaggtcatctccctcatctgtgtggctgtctggcttatcaacattggccacttcaacgaccccgtccatgggggctcctggttccgcggggccatctactactttaagattgccgtggccttggctgtggctgccatccccgaaggtcttcctgcagtcatcaccacctgcctggccctgggtacccgtcggatggcaaagaagaatgccattgtaagaagcttgccctccgtagagaccctgggctgcacctctgtcatctgttccgacaagacaggcaccctcaccaccaaccagatgtctgtctgcaagatgtttatcattgacaaggtggatggggacatctgcctcctgaatgagttctccatcaccggctccacttacgctccagagggagaggtcttgaagaatgataagccagtccggccagggcagtatgacgggctggtggagctggccaccatctgtgccctctgcaatgactcctccttggacttcaacgaggccaaaggtgtctatgagaaggtcggcgaggccaccgagacagcactcaccaccctggtggagaagatgaatgtgttcaacacggatgtgagaagcctctcgaaggtggagagagccaacgcctgcaactcggtgatccgccagctaatgaagaaggaattcaccctggagttctcccgagacagaaagtccatgtctgtctattgctccccagccaaatcttcccgggctgctgtgggcaacaagatgtttgtcaagggtgcccctgagggcgtcatcgaccgctgtaactatgtgcgagttggcaccacccgggtgccactgacggggccggtgaaggaaaagatcatggcggtgatcaaggagtggggcactggccgggacaccctgcgctgcttggccctggccacccgggacacccccccgaagcgagaggaaatggtcctggatgactctgccaggttcctggagtatgagacggacctgacattcgtgggtgtagtgggcatgctggaccctccgcgcaaggaggtcacgggctccatccagctgtgccgtgacgccgggatccgggtgatcatgatcactggggacaacaagggcacagccattgccatctgccggcgaattggcatctttggggagaacgaggaggtggccgatcgcgcctacacgggccgagagttcgacgacctgcccctggctgaacagcgggaagcctgccgacgtgcctgctgcttcgcccgtgtggagccctcgcacaagtccaagattgtggagtacctgcagtcctacgatgagatcacagccatgacaggtgatggcgtcaatgacgcccctgccctgaagaaggctgagattggcattgccatgggatctggcactgccgtggccaagactgcctctgagatggtgctggctgacgacaacttctccaccatcgtagctgctgtggaggagggccgcgccatctacaacaacatgaagcagttcatccgctacctcatttcctccaacgtgggcgaggtggtctgtatcttcctgaccgctgccctggggctgcctgaggccctgatcccggtgcagctgctatgggtgaacttggtgaccgactgcgctgagctgcttatttattga

SEQ ID NO: 249893 - DNA, 3493 bp, Artificial Sequence
  derived and/or modified sequence
ggccggctgctcaagtgggacgggggtcagagctttgtggagggaagaaaaacctggagggggcaggagagtaaaaagaagaaacccaggcagacaggcagttggacacactgaggaagaccccccacgagtgggaaccccctggaaggaacacaccggccccggcccccaggaagggagcacaatggaggccgctcatgctaaaaccacggaggaatgtttggcctattttggggtgagtgagaccacgggcctcaccccggaccaagttaagcggaatctggagaaatacggcctcaatgagctccctgctgaggaagggaagaccctgtgggagctggtgatagagcagtttgaagacctcctggtgcggattctcctcctggccgcatgcatttccttcgtgctggcctggtttgaggaaggtgaagagaccatcactgcctttgttgaaccctttgtcatcctcttgatcctcattgccaatgccatcgtgggggtttggcaggagcggaacgcagagaacgccatcgaggccctgaaggagtatgagccagagatggggaaggtctaccgggctgaccgcaagtcagtgcaaaggatcaaggctcgggacatcgtccctggggacatcgtggaggtggctgtgggggacaaagtccctgcagacatccgaatcctcgccatcaaatccaccacgctgcgggttgaccagtccatcctgacaggcgagtctgtatctgtcatcaaacacacggagcccgttcctgacccccgagctgtcaaccaggacaagaagaacatgcttttctcgggcaccaacattgcagccggcaaggccttgggcatcgtggccaccactggtgtgggcaccgagattgggaagatccgagaccaaatggctgccacagaacaggacaagacccccttgcagcagaagctggatgagtttggggagcagctctccaaggtcatctccctcatctgtgtggctgtctggcttatcaacattggccacttcaacgaccccgtccatgggggctcctggttccgcggggccatctactactttaagattgccgtggccttggctgtggctgccatccccgaaggtcttcctgcagtcatcaccacctgcctggccctgggtacccgtcggatggcaaagaagaatgccattgtaagaagcttgccctccgtagagaccctgggctgcacctctgtcatctgttccgacaagacaggcaccctcaccaccaaccagatgtctgtctgcaagatgtttatcattgacaaggtggatggggacatctgcctcctgaatgagttctccatcaccggctccacttacgctccagagggagaggtcttgaagaatgataagccagtccggccagggcagtatgacgggctggtggagctggccaccatctgtgccctctgcaatgactcctccttggacttcaacgaggccaaaggtgtctatgagaaggtcggcgaggccaccgagacagcactcaccaccctggtggagaagatgaatgtgttcaacacggatgtgagaagcctctcgaaggtggagagagccaacgcctgcaactcggtgatccgccagctaatgaagaaggaattcaccctggagttctcccgagacagaaagtccatgtctgtctattgctccccagccaaatcttcccgggctgctgtgggcaacaagatgtttgtcaagggtgcccctgagggcgtcatcgaccgctgtaactatgtgcgagttggcaccacccgggtgccactgacggggccggtgaaggaaaagatcatggcggtgatcaaggagtggggcactggccgggacaccctgcgctgcttggccctggccacccgggacacccccccgaagcgagaggaaatggtcctggatgactctgccaggttcctggagtatgagacggacctgacattcgtgggtgtagtgggcatgctggaccctccgcgcaaggaggtcacgggctccatccagctgtgccgtgacgccgggatccgggtgatcatgatcactggggacaacaagggcacagccattgccatctgccggcgaattggcatctttggggagaacgaggaggtggccgatcgcgcctacacgggccgagagttcgacgacctgcccctggctgaacagcgggaagcctgccgacgtgcctgctgcttcgcccgtgtggagccctcgcacaagtccaagattgtggagtacctgcagtcctacgatgagatcacagccatgacaggtgatggcgtcaatgacgcccctgccctgaagaaggctgagattggcattgccatgggatctggcactgccgtggccaagactgcctctgagatggtgctggctgacgacaacttctccaccatcgtagctgctgtggaggagggccgcgccatctacaacaacatgaagcagttcatccgctacctcatttcctccaacgtgggcgaggtggtctgtatcttcctgaccgctgccctggggctgcctgaggccctgatcccggtgcagctgctatgggtgaacttggtgaccgacgggctcccagccacagccctgggcttcaacccaccagacctggacatcatggaccgccccccccggagccccaaggagcccctcatcagtggctggctcttcttccgctacatggcaatcgggggctatgtgggtgcagccaccgtgggagcagctgcctggtggttcctgtacgctgaggatgggcctcatgtcaactacagccagctgactcacttcatgcagtgcaccgaggacaacacccactttgagggcatagactgtgaggtcttcgaggcccccgagcccatgaccatggccctgtccgtgctggtgaccatcgagatgtgcaatgcactgaacagcctgtccgagaaccagtccctgctgcggatgccaccctgggtgaacatctggctgctgggctccatctgcctctccatgtccctgcacttcctcatcctctatgttgaccccctgccgatgatcttcaagctccgggccctggacctcacccagtggctcatggtcctcaagatctcactgccagtcattgggctcgacgaaatcctcaagttcgttgctcggaactacctagagggataactgttccccctcctccatctctgagcccgtgtcacagatccagaagatgaaagaaggaagtgagcatccttttgctctgtcctccccaccccgatagtgacacatcttcaggcagagctgtggcacagacccccgtcctgtcccccacacccgtgtcatgtgtctgtttataaacatgtccccttccctttccttccccctcggccacccgcctccctctcaaccttgtaaattccccttcccaaccccgaggggcttgcagggacaaggcgaccgactgcgctgagctgcttatttattgaaaataaacgacggaaaagtctg

SEQ ID NO: 249894 - DNA, 3130 bp, Artificial Sequence
  derived and/or modified sequence
agcgcggcggtgtgatgatgactccaaggagcccggcgcccggtgctggcctggtttgaggaaggtgaagagaccatcactgcctttgttgaaccctttgtcatcctcttgatcctcattgccaatgccatcgtgggggtttggcaggagcggaacgcagagaacgccatcgaggccctgaaggagtatgagccagagatggggaaggtctaccgggctgaccgcaagtcagtgcaaaggatcaaggctcgggacatcgtccctggggacatcgtggaggtggctgtgggggacaaagtccctgcagacatccgaatcctcgccatcaaatccaccacgctgcgggttgaccagtccatcctgacaggcgagtctgtatctgtcatcaaacacacggagcccgttcctgacccccgagctgtcaaccaggacaagaagaacatgcttttctcgggcaccaacattgcagccggcaaggccttgggcatcgtggccaccactggtgtgggcaccgagattgggaagatccgagaccaaatggctgccacagaacaggacaagacccccttgcagcagaagctggatgagtttggggagcagctctccaaggtcatctccctcatctgtgtggctgtctggcttatcaacattggccacttcaacgaccccgtccatgggggctcctggttccgcggggccatctactactttaagattgccgtggccttggctgtggctgccatccccgaaggtcttcctgcagtcatcaccacctgcctggccctgggtacccgtcggatggcaaagaagaatgccattgtaagaagcttgccctccgtagagaccctgggctgcacctctgtcatctgttccgacaagacaggcaccctcaccaccaaccagatgtctgtctgcaagatgtttatcattgacaaggtggatggggacatctgcctcctgaatgagttctccatcaccggctccacttacgctccagagggagaggtcttgaagaatgataagccagtccggccagggcagtatgacgggctggtggagctggccaccatctgtgccctctgcaatgactcctccttggacttcaacgaggccaaaggtgtctatgagaaggtcggcgaggccaccgagacagcactcaccaccctggtggagaagatgaatgtgttcaacacggatgtgagaagcctctcgaaggtggagagagccaacgcctgcaactcggtgatccgccagctaatgaagaaggaattcaccctggagttctcccgagacagaaagtccatgtctgtctattgctccccagccaaatcttcccgggctgctgtgggcaacaagatgtttgtcaagggtgcccctgagggcgtcatcgaccgctgtaactatgtgcgagttggcaccacccgggtgccactgacggggccggtgaaggaaaagatcatggcggtgatcaaggagtggggcactggccgggacaccctgcgctgcttggccctggccacccgggacacccccccgaagcgagaggaaatggtcctggatgactctgccaggttcctggagtatgagacggacctgacattcgtgggtgtagtgggcatgctggaccctccgcgcaaggaggtcacgggctccatccagctgtgccgtgacgccgggatccgggtgatcatgatcactggggacaacaagggcacagccattgccatctgccggcgaattggcatctttggggagaacgaggaggtggccgatcgcgcctacacgggccgagagttcgacgacctgcccctggctgaacagcgggaagcctgccgacgtgcctgctgcttcgcccgtgtggagccctcgcacaagtccaagattgtggagtacctgcagtcctacgatgagatcacagccatgacaggtgatggcgtcaatgacgcccctgccctgaagaaggctgagattggcattgccatgggatctggcactgccgtggccaagactgcctctgagatggtgctggctgacgacaacttctccaccatcgtagctgctgtggaggagggccgcgccatctacaacaacatgaagcagttcatccgctacctcatttcctccaacgtgggcgaggtggtctgtatcttcctgaccgctgccctggggctgcctgaggccctgatcccggtgcagctgctatgggtgaacttggtgaccgacgggctcccagccacagccctgggcttcaacccaccagacctggacatcatggaccgccccccccggagccccaaggagcccctcatcagtggctggctcttcttccgctacatggcaatcgggggctatgtgggtgcagccaccgtgggagcagctgcctggtggttcctgtacgctgaggatgggcctcatgtcaactacagccagctgactcacttcatgcagtgcaccgaggacaacacccactttgagggcatagactgtgaggtcttcgaggcccccgagcccatgaccatggccctgtccgtgctggtgaccatcgagatgtgcaatgcactgaacagcctgtccgagaaccagtccctgctgcggatgccaccctgggtgaacatctggctgctgggctccatctgcctctccatgtccctgcacttcctcatcctctatgttgaccccctgccgatgatcttcaagctccgggccctggacctcacccagtggctcatggtcctcaagatctcactgccagtcattgggctcgacgaaatcctcaagttcgttgctcggaactacctagagggataactgttccccctcctccatctctgagcccgtgtcacagatccagaagatgaaagaaggaagtgagcatccttttgctctgtcctccccaccccgatagtgacacatcttcaggcagagctgtggcacagacccccgtcctgtcccccacacccgtgtcatgtgtctgtttataaacatgtccccttccctttccttccccctcggccacccgcctccctctcaaccttgtaaattccccttcccaaccccgaggggcttgcagggacaaggcgaccgactgcgctgagctgcttatttattgaaaataaacgacggaaaagtc

SEQ ID NO: 249895 - DNA, 3006 bp, Artificial Sequence
  derived and/or modified sequence
atggaggccgcccacgccaagaccaccgaggagtgcctggcctacttcggcgtgagcgagaccaccggcctgacccccgaccaggtgaagagaaacctggagaagtacggcctgaacgagctgcccgccgaggagggcaagaccctgtgggagctggtgatcgagcagttcgaggacctgctggtgagaatcctgctgctggccgcctgcatcagcttcgtgctggcctggttcgaggagggcgaggagaccatcaccgccttcgtggagcccttcgtgatcctgctgatcctgatcgccaacgccatcgtgggcgtgtggcaggagagaaacgccgagaacgccatcgaggccctgaaggagtacgagcccgagatgggcaaggtgtacagagccgacagaaagagcgtgcagagaatcaaggccagagacatcgtgcccggcgacatcgtggaggtggccgtgggcgacaaggtgcccgccgacatcagaatcctggccatcaagagcaccaccctgagagtggaccagagcatcctgaccggcgagagcgtgagcgtgatcaagcacaccgagcccgtgcccgaccccagagccgtgaaccaggacaagaagaacatgctgttcagcggcaccaacatcgccgccggcaaggccctgggcatcgtggccaccaccggcgtgggcaccgagatcggcaagatcagagaccagatggccgccaccgagcaggacaagacccccctgcagcagaagctggacgagttcggcgagcagctgagcaaggtgatcagcctgatctgcgtggccgtgtggctgatcaacatcggccacttcaacgaccccgtgcacggcggcagctggttcagaggcgccatctactacttcaagatcgccgtggccctggccgtggccgccatccccgagggcctgcccgccgtgatcaccacctgcctggccctgggcaccagaagaatggccaagaagaacgccatcgtgagaagcctgcccagcgtggagaccctgggctgcaccagcgtgatctgcagcgacaagaccggcaccctgaccaccaaccagatgagcgtgtgcaagatgttcatcatcgacaaggtggacggcgacatctgcctgctgaacgagttcagcatcaccggcagcacctacgcccccgagggcgaggtgctgaagaacgacaagcccgtgagacccggccagtacgacggcctggtggagctggccaccatctgcgccctgtgcaacgacagcagcctggacttcaacgaggccaagggcgtgtacgagaaggtgggcgaggccaccgagaccgccctgaccaccctggtggagaagatgaacgtgttcaacaccgacgtgagaagcctgagcaaggtggagagagccaacgcctgcaacagcgtgatcagacagctgatgaagaaggagttcaccctggagttcagcagagacagaaagagcatgagcgtgtactgcagccccgccaagagcagcagagccgccgtgggcaacaagatgttcgtgaagggcgcccccgagggcgtgatcgacagatgcaactacgtgagagtgggcaccaccagagtgcccctgaccggccccgtgaaggagaagatcatggccgtgatcaaggagtggggcaccggcagagacaccctgagatgcctggccctggccaccagagacaccccccccaagagagaggagatggtgctggacgacagcgccagattcctggagtacgagaccgacctgaccttcgtgggcgtggtgggcatgctggacccccccagaaaggaggtgaccggcagcatccagctgtgcagagacgccggcatcagagtgatcatgatcaccggcgacaacaagggcaccgccatcgccatctgcagaagaatcggcatcttcggcgagaacgaggaggtggccgacagagcctacaccggcagagagttcgacgacctgcccctggccgagcagagagaggcctgcagaagagcctgctgcttcgccagagtggagcccagccacaagagcaagatcgtggagtacctgcagagctacgacgagatcaccgccatgaccggcgacggcgtgaacgacgcccccgccctgaagaaggccgagatcggcatcgccatgggcagcggcaccgccgtggccaagaccgccagcgagatggtgctggccgacgacaacttcagcaccatcgtggccgccgtggaggagggcagagccatctacaacaacatgaagcagttcatcagatacctgatcagcagcaacgtgggcgaggtggtgtgcatcttcctgaccgccgccctgggcctgcccgaggccctgatccccgtgcagctgctgtgggtgaacctggtgaccgacggcctgcccgccaccgccctgggcttcaacccccccgacctggacatcatggacagaccccccagaagccccaaggagcccctgatcagcggctggctgttcttcagatacatggccatcggcggctacgtgggcgccgccaccgtgggcgccgccgcctggtggttcctgtacgccgaggacggcccccacgtgaactacagccagctgacccacttcatgcagtgcaccgaggacaacacccacttcgagggcatcgactgcgaggtgttcgaggcccccgagcccatgaccatggccctgagcgtgctggtgaccatcgagatgtgcaacgccctgaacagcctgagcgagaaccagagcctgctgagaatgcccccctgggtgaacatctggctgctgggcagcatctgcctgagcatgagcctgcacttcctgatcctgtacgtggaccccctgcccatgatcttcaagctgagagccctggacctgacccagtggctgatggtgctgaagatcagcctgcccgtgatcggcctggacgagatcctgaagttcgtggccagaaactacctggaggaccccgaggacgagagaagaaagtag

SEQ ID NO: 249896 - DNA, 2535 bp, Artificial Sequence
  derived and/or modified sequence
aagagaagaaaccccggcagacaggccgtgggccacaccgaggaggacccccccagagtgggcaccccctggaaggagcacaccggccccggcccccaggagggcagcaccatggaggccgcccacgccaagaccaccgaggagtgcctggcctacttcggcgtgagcgagaccaccggcctgacccccgaccaggtgaagagaaacctggagaagtacggcctgaacgagctgcccgccgaggagggcaagaccctgtgggagctggtgatcgagcagttcgaggacctgctggtgagaatcctgctgctggccgcctgcatcagcttcgtgctggcctggttcgaggagggcgaggagaccatcaccgccttcgtggagcccttcgtgatcctgctgatcctgatcgccaacgccatcgtgggcgtgtggcaggagagaaacgccgagaacgccatcgaggccctgaaggagtacgagcccgagatgggcaaggtgtacagagccgacagaaagagcgtgcagagaatcaaggccagagacatcgtgcccggcgacatcgtggaggtggccgtgggcgacaaggtgcccgccgacatcagaatcctggccatcaagagcaccaccctgagagtggaccagagcatcctgaccggcgagagcgtgagcgtgatcaagcacaccgagcccgtgcccgaccccagagccgtgaaccaggacaagaagaacatgctgttcagcggcaccaacatcgccgccggcaaggccctgggcatcgtggccaccaccggcgtgggcaccgagatcggcaagatcagagaccagatggccgccaccgagcaggacaagacccccctgcagcagaagctggacgagttcggcgagcagctgagcaaggtgatcagcctgatctgcgtggccgtgtggctgatcaacatcggccacttcaacgaccccgtgcacggcggcagctggttcagaggcgccatctactacttcaagatcgccgtggccctggccgtggccgccatccccgagggcctgcccgccgtgatcaccacctgcctggccctgggcaccagaagaatggccaagaagaacgccatcgtgagaagcctgcccagcgtggagaccctgggctgcaccagcgtgatctgcagcgacaagaccggcaccctgaccaccaaccagatgagcgtgtgcaagatgttcatcatcgacaaggtggacggcgacatctgcctgctgaacgagttcagcatcaccggcagcacctacgcccccgagggcgaggtgctgaagaacgacaagcccgtgagacccggccagtacgacggcctggtggagctggccaccatctgcgccctgtgcaacgacagcagcctggacttcaacgaggccaagggcgtgtacgagaaggtgggcgaggccaccgagaccgccctgaccaccctggtggagaagatgaacgtgttcaacaccgacgtgagaagcctgagcaaggtggagagagccaacgcctgcaacagcgtgatcagacagctgatgaagaaggagttcaccctggagttcagcagagacagaaagagcatgagcgtgtactgcagccccgccaagagcagcagagccgccgtgggcaacaagatgttcgtgaagggcgcccccgagggcgtgatcgacagatgcaactacgtgagagtgggcaccaccagagtgcccctgaccggccccgtgaaggagaagatcatggccgtgatcaaggagtggggcaccggcagagacaccctgagatgcctggccctggccaccagagacaccccccccaagagagaggagatggtgctggacgacagcgccagattcctggagtacgagaccgacctgaccttcgtgggcgtggtgggcatgctggacccccccagaaaggaggtgaccggcagcatccagctgtgcagagacgccggcatcagagtgatcatgatcaccggcgacaacaagggcaccgccatcgccatctgcagaagaatcggcatcttcggcgagaacgaggaggtggccgacagagcctacaccggcagagagttcgacgacctgcccctggccgagcagagagaggcctgcagaagagcctgctgcttcgccagagtggagcccagccacaagagcaagatcgtggagtacctgcagagctacgacgagatcaccgccatgaccggcgacggcgtgaacgacgcccccgccctgaagaaggccgagatcggcatcgccatgggcagcggcaccgccgtggccaagaccgccagcgagatggtgctggccgacgacaacttcagcaccatcgtggccgccgtggaggagggcagagccatctacaacaacatgaagcagttcatcagatacctgatcagcagcaacgtgggcgaggtggtgtgcatcttcctgaccgccgccctgggcctgcccgaggccctgatccccgtgcagctgctgtgggtgaacctggtgaccgactgcgccgagctgctgatctactag

SEQ ID NO: 249897 - protein, 197 aa, Artificial Sequence
  derived and/or modified sequence
MSFVGENSGVKMGSEDWEKDEPQCCLEGPKVKNLNPKKFSIHDQDHKVLVLDSGNLIAVPDKNYIRPEIFFALASSLSSASAEKGSPILLGVSKGEFCLYCDKDKGQSHPSLQLKKEKLMKLAAQKESARRPFIFYRAQVGSWNMLESAAHPGWFICTSCNCNEPVGVTDKFENRKHIEFSFQPVCKAEMSPSEVSD

SEQ ID NO: 249898 - DNA, 594 bp, Artificial Sequence
  derived and/or modified sequence
atgagcttcgtgggcgagaacagcggcgtgaagatgggcagcgaggactgggagaaggacgagccccagtgctgcctggagggccccaaggtgaagaacctgaaccccaagaagttcagcatccacgaccaggaccacaaggtgctggtgctggacagcggcaacctgatcgccgtgcccgacaagaactacatcagacccgagatcttcttcgccctggccagcagcctgagcagcgccagcgccgagaagggcagccccatcctgctgggcgtgagcaagggcgagttctgcctgtactgcgacaaggacaagggccagagccaccccagcctgcagctgaagaaggagaagctgatgaagctggccgcccagaaggagagcgccagaagacccttcatcttctacagagcccaggtgggcagctggaacatgctggagagcgccgcccaccccggctggttcatctgcaccagctgcaactgcaacgagcccgtgggcgtgaccgacaagttcgagaacagaaagcacatcgagttcagcttccagcccgtgtgcaaggccgagatgagccccagcgaggtgagcgactag

SEQ ID NO: 249899 - DNA, 594 bp, Artificial Sequence
  derived and/or modified sequence
atgagctttgtcggtgaaaacagcggagtcaagatgggctccgaagactgggaaaaagacgaacctcagtgctgcctcgaaggtccaaaggtcaaaaatttaaatcccaaaaaatttagcattcacgaccaggatcataaagtgcttgtcctcgactcgggaaacctgatcgcagtccccgataaaaattacattcggcctgaaatcttttttgccttagctagctcactcagttcagcctccgccgagaaggggtccccaattctacttggagtgtcgaagggtgagttctgcttatattgcgacaaggacaaggggcagagccatccctcactgcagttaaaaaaggagaaactgatgaaactagcagcccaaaaggagagcgcgcgcaggcccttcatcttctaccgagcgcaggtcggatcttggaacatgctggaatctgccgctcatcccggatggttcatttgcacatcctgcaactgcaatgagccggtcggtgtaacagacaaattcgaaaaccgtaaacatatcgagttctcctttcaacccgtgtgcaaagccgagatgagcccctctgaggtgtccgactag

SEQ ID NO: 249900 - DNA, 594 bp, Artificial Sequence
  derived and/or modified sequence
atgagctttgtgggggagaacagcggcgtgaagatgggcagcgaggactgggagaaggatgagccccagtgctgcctggagggccccaaggtgaagaacctgaaccccaagaagttcagcatccatgaccaggaccacaaggtgctggtgctggacagcggcaacctgattgctgtgcctgacaagaactacatccggcctgagatcttctttgccctggccagcagcctgagcagcgccagcgctgagaagggcagccccatcctgctgggcgtgtccaagggggagttctgcctgtactgtgacaaggacaagggccagagccaccccagcctgcagctgaagaaggagaagctgatgaagctggccgcccagaaggagagcgcccggcggcccttcatcttctaccgggcccaggtgggctcctggaacatgctggagagcgctgcccaccctggctggttcatctgcaccagctgcaactgcaatgaacctgtgggcgtgacagacaagtttgaaaataggaagcacatcgagttctccttccagcctgtgtgcaaggccgagatgagccccagcgaggtgtctgactag

SEQ ID NO: 249901 - DNA, 594 bp, Artificial Sequence
  derived and/or modified sequence
atgagcttcgtgggcgagaacagcggcgtgaagatgggcagcgaggattgggagaaggacgagccacaatgctgcctagaagggccaaaggtcaaaaacctcaatcctaaaaaattttcaatacacgaccaggaccacaaagtgctcgtgctggactcaggaaatttgattgcagtccccgataaaaattacattcggcccgagatctttttcgcattagcgagttcactgagttcagcctccgccgagaaaggaagtcccatactgcttggagttagcaaaggcgaattctgtctgtactgtgataaagacaaaggccagagtcacccttccttgcagctgaagaaagagaagttgatgaagttggccgcacagaaggaatccgcacgccggccttttatattttatagagctcaggtgggaagttggaatatgctggaatctgccgctcacccaggatggtttatttgcacaagttgtaattgtaatgagcctgtgggcgtgacagacaaatttgaaaatagaaaacacattgaattcagctttcaaccagtgtgtaaggctgagatgagcccttccgaagtcagcgactag

SEQ ID NO: 249902 - DNA, 594 bp, Artificial Sequence
  derived and/or modified sequence
atgtctttcgtcggcgagaattccggcgttaagatgggctccgaggactgggagaaagacgagccccagtgctgtttagaaggacctaaagtgaaaaacctcaatccaaagaaatttagcatccatgaccaggatcataaagttctagtgctggactccggcaatttgatcgccgtgcctgataagaactacattaggcctgaaatatttttcgctctggcttcaagtctgtccagcgcaagcgccgaaaagggttctccaatcctgttaggagtctccaaaggagagttctgtctgtactgtgataaggataaggggcagtctcacccatctttacagttgaagaaggagaagctgatgaagctcgccgcacagaaggagtccgcccgtcgacctttcattttctatagggctcaggttggttcttggaacatgttggagtccgcagcccacccaggctggttcatttgtacatcctgcaattgcaatgagcctgtaggcgttaccgataaattcgagaacagaaaacatatcgaattctctttccaacccgtgtgtaaggcggagatgagcccctccgaagtctctgattag

SEQ ID NO: 249903 - DNA, 709 bp, Artificial Sequence
  derived and/or modified sequence
cttcattccattttctgttgagtaataaactcaacgttgaaaatgtcctttgtgggggagaactcaggagtgaaaatgggctctgaggactgggaaaaagatgaaccccagtgctgcttagaaggtccaaaggtgaagaacttaaacccgaagaaattcagcattcatgaccaggatcacaaagtactggtcctggactctgggaatctcatagcagttccagataaaaactacatacgcccagagatcttctttgcattagcctcatccttgagctcagcctctgcggagaaaggaagtccgattctcctgggggtctctaaaggggagttttgtctctactgtgacaaggataaaggacaaagtcatccatcccttcagctgaagaaggagaaactgatgaagctggctgcccaaaaggaatcagcacgccggcccttcatcttttatagggctcaggtgggctcctggaacatgctggagtcggcggctcaccccggatggttcatctgcacctcctgcaattgtaatgagcctgttggggtgacagataaatttgagaacaggaaacacattgaattttcatttcaaccagtttgcaaagctgaaatgagccccagtgaggtcagcgattaggaaactgccccattgaacgccttcctcgctaatttgaactaattgtataaaaacaccaaacctgctcactaaa

SEQ ID NO: 249904 - protein, 157 aa, Artificial Sequence
  derived and/or modified sequence
MSFVGENSGVKMGSEDWEKDEPQCCLEEIFFALASSLSSASAEKGSPILLGVSKGEFCLYCDKDKGQSHPSLQLKKEKLMKLAAQKESARRPFIFYRAQVGSWNMLESAAHPGWFICTSCNCNEPVGVTDKFENRKHIEFSFQPVCKAEMSPSEVSD

SEQ ID NO: 249905 - DNA, 474 bp, Artificial Sequence
  derived and/or modified sequence
atgagcttcgtgggcgagaacagcggcgtgaagatgggcagcgaggactgggagaaggacgagccccagtgctgcctggaggagatcttcttcgccctggccagcagcctgagcagcgccagcgccgagaagggcagccccatcctgctgggcgtgagcaagggcgagttctgcctgtactgcgacaaggacaagggccagagccaccccagcctgcagctgaagaaggagaagctgatgaagctggccgcccagaaggagagcgccagaagacccttcatcttctacagagcccaggtgggcagctggaacatgctggagagcgccgcccaccccggctggttcatctgcaccagctgcaactgcaacgagcccgtgggcgtgaccgacaagttcgagaacagaaagcacatcgagttcagcttccagcccgtgtgcaaggccgagatgagccccagcgaggtgagcgactag

SEQ ID NO: 249906 - DNA, 474 bp, Artificial Sequence
  derived and/or modified sequence
atgtctttcgtcggtgaaaattccggggtgaagatgggttcggaagactgggaaaaggatgaaccacagtgctgcctggaagaaattttctttgctctggcatcttctttatccagtgcatccgctgagaaagggagcccgatcctcctcggcgtttctaaaggagagttttgtctgtactgcgataaagacaaaggacagagtcatccctcattacaactgaaaaaagaaaagctgatgaagttagccgcccagaaggaatccgcgaggcgtcccttcatattctatagagcccaggttggctcttggaatatgcttgagagcgcagcacatccagggtggttcatctgtacatcttgcaactgtaacgagcccgtgggcgtcacagataaatttgaaaaccggaagcacattgaattctcctttcagcccgtgtgtaaggccgagatgtcgccttctgaagtctccgattag

SEQ ID NO: 249907 - DNA, 474 bp, Artificial Sequence
  derived and/or modified sequence
atgagctttgtgggggagaacagcggcgtgaagatgggcagcgaggactgggagaaggatgagccccagtgctgcctggaggagatcttctttgccctggccagcagcctgagcagcgccagcgctgagaagggcagccccatcctgctgggcgtgtccaagggggagttctgcctgtactgtgacaaggacaagggccagagccaccccagcctgcagctgaagaaggagaagctgatgaagctggccgcccagaaggagagcgcccggcggcccttcatcttctaccgggcccaggtgggctcctggaacatgctggagagcgctgcccaccctggctggttcatctgcaccagctgcaactgcaatgaacctgtgggcgtgacagacaagtttgaaaataggaagcacatcgagttctccttccagcctgtgtgcaaggccgagatgagccccagcgaggtgtctgactag

SEQ ID NO: 249908 - DNA, 474 bp, Artificial Sequence
  derived and/or modified sequence
atgagcttcgtgggcgagaacagcggcgtgaagatgggcagcgaggactgggaaaaagacgagccgcagtgttgcctcgaagaaattttctttgcgctggcatcatccttatcgtccgcatccgcggaaaagggaagcccaatccttctgggagtgtctaaaggggagttttgcctttattgcgacaaagacaaggggcagtcacatccatcactgcaactcaaaaaagagaagctgatgaaactggctgcccagaaggagtcagctagaaggccatttatattttaccgggcccaggtcggctcctggaatatgctcgaatcggccgcacaccccggttggtttatttgtacttcatgcaattgtaacgaacccgtcggcgtaactgataagttcgaaaaccgaaagcacattgaatttagctttcagcctgtttgtaaggcagagatgagccccagcgaggtctctgactag

SEQ ID NO: 249909 - DNA, 474 bp, Artificial Sequence
  derived and/or modified sequence
atgtccttcgtcggcgagaacagcggcgtgaagatgggctctgaggactgggagaaggacgaaccacagtgttgtttagaagagatcttttttgctctcgcctccagccttagcagcgctagcgccgagaaaggaagtccaatcctgctgggcgtgagcaaaggagaattctgcttgtattgcgacaaggataaaggacagagtcaccccagcctgcagcttaagaaagagaaactgatgaaactcgctgcacaaaaggagtcagcccgacgtcccttcatcttttatagggctcaggtaggctcttggaatatgctggaatccgctgcccaccccggttggttcatctgtactagctgcaattgcaacgagcccgtaggggtcacagacaagttcgaaaacagaaaacatattgagttttcatttcagcccgtgtgcaaagccgagatgagcccctcagaggtgtcagactag

SEQ ID NO: 249910 - DNA, 589 bp, Artificial Sequence
  derived and/or modified sequence
cttcattccattttctgttgagtaataaactcaacgttgaaaatgtcctttgtgggggagaactcaggagtgaaaatgggctctgaggactgggaaaaagatgaaccccagtgctgcttagaagagatcttctttgcattagcctcatccttgagctcagcctctgcggagaaaggaagtccgattctcctgggggtctctaaaggggagttttgtctctactgtgacaaggataaaggacaaagtcatccatcccttcagctgaagaaggagaaactgatgaagctggctgcccaaaaggaatcagcacgccggcccttcatcttttatagggctcaggtgggctcctggaacatgctggagtcggcggctcaccccggatggttcatctgcacctcctgcaattgtaatgagcctgttggggtgacagataaatttgagaacaggaaacacattgaattttcatttcaaccagtttgcaaagctgaaatgagccccagtgaggtcagcgattaggaaactgccccattgaacgccttcctcgctaatttgaactaattgtataaaaacaccaaacctgctcactaaa

SEQ ID NO: 249911 - protein, 178 aa, Artificial Sequence
  derived and/or modified sequence
MSFVGENSGVKMGSEDWEKDEPQCCLEDPAGSPLEPGPSLPTMNFVHTKIFFALASSLSSASAEKGSPILLGVSKGEFCLYCDKDKGQSHPSLQLKKEKLMKLAAQKESARRPFIFYRAQVGSWNMLESAAHPGWFICTSCNCNEPVGVTDKFENRKHIEFSFQPVCKAEMSPSEVSD

SEQ ID NO: 249912 - DNA, 537 bp, Artificial Sequence
  derived and/or modified sequence
atgagcttcgtgggcgagaacagcggcgtgaagatgggcagcgaggactgggagaaggacgagccccagtgctgcctggaggaccccgccggcagccccctggagcccggccccagcctgcccaccatgaacttcgtgcacaccaagatcttcttcgccctggccagcagcctgagcagcgccagcgccgagaagggcagccccatcctgctgggcgtgagcaagggcgagttctgcctgtactgcgacaaggacaagggccagagccaccccagcctgcagctgaagaaggagaagctgatgaagctggccgcccagaaggagagcgccagaagacccttcatcttctacagagcccaggtgggcagctggaacatgctggagagcgccgcccaccccggctggttcatctgcaccagctgcaactgcaacgagcccgtgggcgtgaccgacaagttcgagaacagaaagcacatcgagttcagcttccagcccgtgtgcaaggccgagatgagccccagcgaggtgagcgactag

SEQ ID NO: 249913 - DNA, 537 bp, Artificial Sequence
  derived and/or modified sequence
atgtctttcgtgggcgagaattcgggcgtgaagatgggttccgaagactgggagaaagatgaacctcagtgctgtttggaggaccccgcagggagcccccttgaacccggtcccagcctacccaccatgaacttcgtacacactaagatattcttcgccctggcttcctccctttcatcagccagcgcagagaagggctcacccattctcctgggcgtgtcgaaaggcgagttttgcctgtactgcgataaggacaaaggccagagtcatccgagcctccaactcaagaaagaaaagctgatgaagctggctgcccagaaggagtcagcccgaaggccatttatattctaccgagctcaggtcggatcgtggaatatgctcgaaagcgccgcccatccagggtggttcatttgcacctcctgtaattgcaacgagcctgttggggtgaccgacaagttcgagaaccggaagcacatcgagtttagtttccagcctgtttgcaaggcagagatgagccctagtgaggtttccgattag

SEQ ID NO: 249914 - DNA, 537 bp, Artificial Sequence
  derived and/or modified sequence
atgagctttgtgggggagaacagcggcgtgaagatgggcagcgaggactgggagaaggatgagccccagtgctgcctggaggaccctgctggcagccccctggagcccggccccagcctgcccaccatgaactttgtgcacaccaagatcttctttgccctggccagcagcctgagcagcgccagcgctgagaagggcagccccatcctgctgggcgtgtccaaaggagagttctgcctgtactgtgacaaggacaagggccagagccaccccagcctgcagctgaagaaggagaagctgatgaagctggccgcccagaaggagagcgcccggcggcccttcatcttctaccgggcccaggtgggctcctggaacatgctggagagcgctgcccaccctggctggttcatctgcaccagctgcaactgcaatgaacctgtgggcgtgacagacaagtttgagaacaggaagcacatcgagttctccttccagcctgtgtgcaaggccgagatgagccccagcgaggtgtctgactag

SEQ ID NO: 249915 - DNA, 537 bp, Artificial Sequence
  derived and/or modified sequence
atgagcttcgtgggcgagaacagcggcgtgaagatgggcagcgaggattgggagaaagacgaaccacagtgttgcctggaagaccctgcaggctcccctcttgaacccgggccgtcacttcctaccatgaatttcgtccacacgaagatcttttttgcacttgccagctctctcagtagcgcttcagctgaaaaggggagtccaatactcctcggagttagcaagggtgaattctgcctgtattgtgataaagataaaggacagagtcacccttccctgcagctgaagaaggagaagttaatgaaattagcagcacagaaagagagcgcgcgccgcccttttattttttaccgggcacaggtaggctcttggaacatgctggagagtgcagctcaccccggatggtttatttgtaccagttgtaactgtaacgagccagttggcgtgaccgacaaatttgagaacaggaaacacatagagttcagtttccagccggtttgtaaggcagagatgtccccgtccgaggtgtcggattag

SEQ ID NO: 249916 - DNA, 537 bp, Artificial Sequence
  derived and/or modified sequence
atgtcatttgtcggggagaattccggcgtcaagatggggagtgaggattgggaaaaggacgaacctcagtgctgtctcgaagatcccgcaggctcacccctcgagcccggtccttcactgcccacaatgaacttcgtgcacacaaagattttctttgcgctggcctcgagcttgtcaagtgcgagcgcagagaaggggtcacccatcctactcggggtgtcgaagggagaattttgcctttattgtgataaggataaagggcaatcgcatcccagcctgcagttgaagaaggagaagctgatgaaattggcggctcagaaggaaagtgctagacgcccttttattttctacagggcccaggtgggctcatggaatatgctggaatctgctgctcaccccggttggtttatatgtacctcatgcaattgcaatgagcctgtgggcgtcactgacaaattcgaaaaccgaaagcacattgaattcagcttccagcctgtgtgcaaggccgagatgagtcctagcgaggtgtcggactag

SEQ ID NO: 249917 - DNA, 652 bp, Artificial Sequence
  derived and/or modified sequence
cttcattccattttctgttgagtaataaactcaacgttgaaaatgtcctttgtgggggagaactcaggagtgaaaatgggctctgaggactgggaaaaagatgaaccccagtgctgcttagaagacccggctggaagccccctggaaccaggcccaagcctccccaccatgaattttgttcacacaaagatcttctttgcattagcctcatccttgagctcagcctctgcggagaaaggaagtccgattctcctgggggtctctaaaggggagttttgtctctactgtgacaaggataaaggacaaagtcatccatcccttcagctgaagaaggagaaactgatgaagctggctgcccaaaaggaatcagcacgccggcccttcatcttttatagggctcaggtgggctcctggaacatgctggagtcggcggctcaccccggatggttcatctgcacctcctgcaattgtaatgagcctgttggggtgacagataaatttgagaacaggaaacacattgaattttcatttcaaccagtttgcaaagctgaaatgagccccagtgaggtcagcgattaggaaactgccccattgaacgccttcctcgctaatttgaactaattgtataaaaacaccaaacctgctcactaaa

SEQ ID NO: 249918 - protein, 192 aa, Artificial Sequence
  derived and/or modified sequence
MSGCDRRETETKGKNSFKKRLRGPKVKNLNPKKFSIHDQDHKVLVLDSGNLIAVPDKNYIRPEIFFALASSLSSASAEKGSPILLGVSKGEFCLYCDKDKGQSHPSLQLKKEKLMKLAAQKESARRPFIFYRAQVGSWNMLESAAHPGWFICTSCNCNEPVGVTDKFENRKHIEFSFQPVCKAEMSPSEVSD

SEQ ID NO: 249919 - DNA, 579 bp, Artificial Sequence
  derived and/or modified sequence
atgagcggctgcgacagaagagagaccgagaccaagggcaagaacagcttcaagaagagactgagaggccccaaggtgaagaacctgaaccccaagaagttcagcatccacgaccaggaccacaaggtgctggtgctggacagcggcaacctgatcgccgtgcccgacaagaactacatcagacccgagatcttcttcgccctggccagcagcctgagcagcgccagcgccgagaagggcagccccatcctgctgggcgtgagcaagggcgagttctgcctgtactgcgacaaggacaagggccagagccaccccagcctgcagctgaagaaggagaagctgatgaagctggccgcccagaaggagagcgccagaagacccttcatcttctacagagcccaggtgggcagctggaacatgctggagagcgccgcccaccccggctggttcatctgcaccagctgcaactgcaacgagcccgtgggcgtgaccgacaagttcgagaacagaaagcacatcgagttcagcttccagcccgtgtgcaaggccgagatgagccccagcgaggtgagcgactag

SEQ ID NO: 249920 - DNA, 579 bp, Artificial Sequence
  derived and/or modified sequence
atgtccggttgtgacagaagggaaactgaaaccaaaggaaaaaatagctttaagaaacggttacgcggacctaaggtgaagaatctcaatccaaagaaattcagcattcacgatcaggaccataaggtcctcgttctggactccggtaatctgattgctgtccctgacaagaactacatccggcctgagatcttcttcgccctggcttcatctcttagttcagccagcgccgaaaaaggctctcccattttgctaggagtgtctaagggagaattctgtctgtactgtgataaagacaaaggccaatcacacccttcgctccagttaaagaaagaaaaattaatgaagctggccgcacaaaaggagtccgcacgccgcccgtttatcttttatagggcacaggtcgggtcctggaatatgctagaatcagcagctcaccccggttggttcatctgtacatcttgtaattgtaatgagcccgtcggcgtaaccgataagtttgaaaaccgcaagcatattgaattctcattccagccagtatgcaaggcggaaatgtcgcccagtgaggtgtccgattag

SEQ ID NO: 249921 - DNA, 579 bp, Artificial Sequence
  derived and/or modified sequence
atgagcggctgtgaccggcgggagacagagaccaagggcaagaacagcttcaagaagaggctgcggggccccaaggtgaagaacctgaaccccaagaagttcagcatccatgaccaggaccacaaggtgctggtgctggacagcggcaacctgattgctgtgcctgacaagaactacatccggcctgagatcttctttgccctggccagcagcctgagcagcgccagcgctgagaagggcagccccatcctgctgggcgtgtccaaaggagagttctgcctgtactgtgacaaggacaagggccagagccaccccagcctgcagctgaagaaggagaagctgatgaagctggccgcccagaaggagagcgcccggcggcccttcatcttctaccgggcccaggtgggctcctggaacatgctggagagcgctgcccaccctggctggttcatctgcaccagctgcaactgcaatgaacctgtgggcgtgacagacaagtttgagaacaggaagcacatcgagttctccttccagcctgtgtgcaaggccgagatgagccccagcgaggtgtctgactag

SEQ ID NO: 249922 - DNA, 579 bp, Artificial Sequence
  derived and/or modified sequence
atgagcggctgcgaccggcgggagaccgagaccaagggcaagaacagcttcaaaaaaaggctgcgtggccccaaggtgaaaaacctaaaccctaaaaagtttagtattcatgaccaggatcataaagtgttggtactggacagcgggaacttgatcgctgtgccggacaaaaactacattcgacccgaaatattctttgccctggctagttctcttagttctgcaagtgccgagaagggatccccgatactgctgggcgtgagtaagggcgagttctgcctgtattgcgacaaagacaagggtcaaagccatccctcactccagctgaagaaagagaaactgatgaagctggcagctcagaaagaatcggcccgtcgccccttcatattctatcgggcccaagtgggctcctggaatatgttggagagtgccgcccaccccggctggtttatttgcacctcttgtaactgcaacgaacctgtaggtgtaacggacaaattcgagaataggaagcacattgaattctccttccagccggtttgcaaagctgagatgagcccaagcgaggtgagtgattag

SEQ ID NO: 249923 - DNA, 579 bp, Artificial Sequence
  derived and/or modified sequence
atgagcgggtgcgacaggagagagactgaaaccaagggcaaaaattcttttaagaaacgactaaggggaccaaaagtgaagaatcttaaccctaaaaagtttagcattcacgaccaagaccataaagttttagtgctggattcagggaacctgattgccgtacccgacaaaaactacatcagacctgagattttttttgcactggccagtagcctgtcctctgccagcgctgaaaaggggtctccaatccttttgggtgttagcaaaggcgaattctgcttgtactgcgacaaagataagggccagtctcaccctagcctacaactgaagaaggagaaactaatgaaactggccgcacagaaagagtccgccagaagaccattcattttttatcgggctcaggttggtagttggaacatgttagaaagtgccgctcatccaggttggtttatttgcacctcctgtaattgcaacgagcccgtgggtgtaactgacaaatttgagaatcgcaagcacatcgaattttcttttcagcccgtttgtaaggctgaaatgagtccctcagaggtttctgattag

SEQ ID NO: 249924 - DNA, 652 bp, Artificial Sequence
  derived and/or modified sequence
atgtcaggctgtgataggagggaaacagaaaccaaaggaaagaacagctttaagaagcgcttaagaggtccaaaggtgaagaacttaaacccgaagaaattcagcattcatgaccaggatcacaaagtactggtcctggactctgggaatctcatagcagttccagataaaaactacatacgcccagagatcttctttgcattagcctcatccttgagctcagcctctgcggagaaaggaagtccgattctcctgggggtctctaaaggggagttttgtctctactgtgacaaggataaaggacaaagtcatccatcccttcagctgaagaaggagaaactgatgaagctggctgcccaaaaggaatcagcacgccggcccttcatcttttatagggctcaggtgggctcctggaacatgctggagtcggcggctcaccccggatggttcatctgcacctcctgcaattgtaatgagcctgttggggtgacagataaatttgagaacaggaaacacattgaattttcatttcaaccagtttgcaaagctgaaatgagccccagtgaggtcagcgattaggaaactgccccattgaacgccttcctcgctaatttgaactaattgtataaaaacaccaaacctgctcactaaa

SEQ ID NO: 249925 - protein, 572 aa, Artificial Sequence
  derived and/or modified sequence
MADFEELRNMVSSFRVSELQVLLGFAGRNKSGRKHDLLMRALHLLKSGCSPAVQIKIRELYRRRYPRTLEGLSDLSTIKSSVFSLDGGSSPVEPDLAVAGIHSLPSTSVTPHSPSSPVGSVLLQDTKPTFEMQQPSPPIPPVHPDVQLKNLPFYDVLDVLIKPTSLVQSSIQRFQEKFFIFALTPQQVREICISRDFLPGGRRDYTVQVQLRLCLAETSCPQEDNYPNSLCIKVNGKLFPLPGYAPPPKNGIEQKRPGRPLNITSLVRLSSAVPNQISISWASEIGKNYSMSVYLVRQLTSAMLLQRLKMKGIRNPDHSRALIKEKLTADPDSEIATTSLRVSLMCPLGKMRLTIPCRAVTCTHLQCFDAALYLQMNEKKPTWICPVCDKKAAYESLILDGLFMEILNDCSDVDEIKFQEDGSWCPMRPKKEAMKVSSQPCTKIESSSVLSKPCSVTVASEASKKKVDVIDLTIESSSDEEEDPPAKRKCIFMSETQSSPTKGVLMYQPSSVRVPSVTSVDPAAIPPSLTDYSVPFHHTPISSMSSDLPGEQRRNDINNELKLGTSSDTVQQ

SEQ ID NO: 249926 - DNA, 1719 bp, Artificial Sequence
  derived and/or modified sequence
atggctgattttgaggagcttcggaatatggtgagtagctttagagtgtccgagctccaggtactcttgggcttcgcagggcgtaacaaaagcggcaggaaacacgacctgttaatgagagcccttcatttgctaaaaagcggatgtagtcccgctgtacaaatcaaaattcgcgagctgtataggaggcggtatcctcgaacccttgaagggctttccgatctaagcaccatcaagagttcagtgttttcactggatggaggatcaagtcctgttgaacccgacttggccgtggcaggcatccacagtctcccaagtacttctgtgaccccccacagtccatcttcacctgtggggtccgtgttgttgcaggacactaagccaactttcgaaatgcagcagccaagtccacctattcctccagttcacccggatgtccaactaaaaaacctgccgttctacgacgtcctcgacgtcctgatcaagccaacaagcttagtccagtcttccatacaaaggttccaggagaagttttttatcttcgctctcacaccacagcaagtcagggaaatatgcatcagtagagacttcctgcctggaggccgaagagactacacagtccaggtgcagctgagactgtgcctggcggagacgagttgcccacaagaagacaactatccaaactctctatgtatcaaagtgaatggaaagctctttccactccccggatacgccccccctccaaaaaacggcattgagcagaagaggcccggaaggccactcaatatcacgtccctcgtcagactctcctctgcagtgccaaaccaaatcagcatctcttgggcttcagagatcggtaagaactactctatgagcgtttacctggtgcgccagttaacaagtgcaatgctccttcagcgattaaaaatgaaggggattagaaatcccgatcactcccgggcactgattaaggaaaagttgactgctgaccctgacagcgaaatagccaccacatccctgcgagtttcgctgatgtgcccgttgggaaagatgcgcctgacgatcccttgtcgggcggtgacctgtacacatctccaatgcttcgacgccgctctatacctgcagatgaacgaaaaaaaaccaacttggatttgccccgtgtgcgacaagaaagctgcgtacgaatctcttattcttgacgggttgtttatggagattctcaatgattgcagcgatgttgacgagataaagttccaagaagatggatcttggtgcccaatgcgaccaaagaaggaagccatgaaagtgtcctcccaaccctgcaccaaaatcgagagctcctccgtcctaagtaaaccttgttcagtcacggtagcctccgaagcttctaaaaaaaaagttgatgtgatcgacctaacaatcgaatccagctccgatgaagaagaggatcctcctgccaaacgaaagtgcattttcatgtctgagacacagtcgtctcccacaaagggagtattaatgtaccagccgagttcggtgagggtgccctcagtgacgtccgtggatcctgccgccattcccccatctctcaccgattattcggtccctttccaccacaccccaattagcagtatgagttcggacttacctggcgagcaaaggcgtaatgatatcaacaatgaactaaaactgggcacttcttcagacactgtccaacagtag

SEQ ID NO: 249927 - DNA, 849 bp, Artificial Sequence
  derived and/or modified sequence
atgtctgtatatctcgtcaggcagctcactagtgctatgttacttcagaggctgaagatgaagggcataaggaatcctgaccactctagagctctgatcaaggaaaaacttactgccgatcctgattcagaaatcgccaccacctccctgagggtatcgctgatgtgccccttgggcaagatgcgcctcacaatcccctgccgcgccgtcacctgtacccacctgcagtgcttcgacgccgccctgtacttacagatgaatgagaagaaaccaacctggatctgccccgtctgtgataagaaggcagcttatgaatctctgatactcgatggtctctttatggagatccttaacgactgttccgatgtggacgaaataaaatttcaagaggatggcagctggtgtcctatgaggcctaaaaaggaagcaatgaaagtaagctctcaaccatgtaccaagatcgagagtagttccgtgttgagcaagccctgttccgtgactgtagcttccgaggcctcaaagaaaaaagtggatgtgattgacctgaccatcgagagttcctcagacgaagaggaggaccccccagcgaagcgcaagtgcatctttatgtccgaaactcagagcagccccactaagggagtccttatgtaccagccttcctcagtccgtgtgcccagtgtgacttccgtggatcccgcagcaatcccacccagcttaacagattattcagtgcccttccaccacacgcctatcagttccatgtcatctgacctgccgggagagcagaggagaaatgatatcaacaatgagctcaaattgggaactagctctgatacagtgcagcagtag

SEQ ID NO: 249928 - DNA, 1719 bp, Artificial Sequence
  derived and/or modified sequence
atggctgactttgaggagctgaggaacatggtgtcctccttccgggtgtctgagctgcaggtgctgctgggctttgctggcaggaacaagagcggcaggaagcatgacctgctgatgagggccctgcacctgctgaagagcggctgcagccctgctgtgcagatcaagatccgggagctgtacagaagacgctaccccaggaccctggagggcctgagtgacctgagcaccatcaagagctctgtgttcagcctggatggcggcagcagccctgtggagccagacctggccgtggccggcatccacagcctgcccagcacctctgtgaccccccacagccccagcagccctgtgggctctgtgctgctgcaggacaccaagcccacctttgagatgcagcagcccagcccccccatcccccctgtgcacccagatgtgcagctgaagaacctgcccttctatgatgtgctggatgtgctgatcaagcccaccagcctggtgcagagcagcatccagcgcttccaggagaagttcttcatctttgccctgaccccccagcaggtgcgggagatctgcatcagccgggacttcctgcccggcggccggcgggactacacagtgcaggtgcagctgcggctgtgcctggccgagaccagctgcccccaggaggacaactaccccaacagcctgtgcatcaaggtgaatggcaagctgttccccctgcccggctacgcccccccacccaagaatggcatcgagcagaagaggcctggccggcccctgaacatcaccagcctggtgcggctgagcagcgctgtgcccaaccagatcagcatctcctgggccagcgagatcggcaagaactacagcatgtctgtgtacctggtgcggcagctgaccagcgccatgctgctgcagaggctgaagatgaagggcatccggaacccagaccacagccgggccctgatcaaggagaagctgacagctgaccctgattctgaaattgccaccaccagcctgcgggtgtccctgatgtgccccctgggcaagatgaggctgaccatcccctgcagagctgtgacctgcacccacctgcagtgctttgatgctgccctgtacctgcagatgaatgagaagaagcccacctggatctgccctgtgtgtgacaagaaggccgcctatgagagcctcatcctggatggcctcttcatggagatcctgaatgactgcagtgatgtggatgagatcaagttccaggaggatggctcctggtgccccatgaggcccaagaaggaggccatgaaggtgagcagccagccctgcaccaagattgagagcagctctgtgctgagcaagccctgcagcgtgacagtggccagcgaggccagcaagaagaaggtggatgtgattgacctgaccatcgagagcagcagtgatgaggaggaggaccccccagccaagaggaagtgcatcttcatgtctgagacccagagcagccccaccaagggcgtgctgatgtaccagcccagctctgtgcgggtgcccagcgtgacctctgtggaccctgctgccatcccccccagcctgacagactacagcgtgcccttccaccacacccccatcagctccatgagcagtgacctgcctggagagcagaggagaaatgacatcaacaatgagctgaagctgggcaccagcagtgacacagtgcagcagtag

SEQ ID NO: 249929 - DNA, 849 bp, Artificial Sequence
  derived and/or modified sequence
atgtctgtgtacctggtgcggcagctgaccagcgccatgctgctgcagaggctgaagatgaagggcatccggaacccagaccacagccgggccctgatcaaggagaagctgacagctgaccctgattctgaaattgccaccaccagcctgcgggtgtccctgatgtgccccctgggcaagatgaggctgaccatcccctgcagagctgtgacctgcacccacctgcagtgctttgatgctgccctgtacctgcagatgaatgagaagaagcccacctggatctgccctgtgtgtgacaagaaggccgcctatgagagcctcatcctggatggcctcttcatggagatcctgaatgactgcagtgatgtggatgagatcaagttccaggaggatggctcctggtgccccatgaggcccaagaaggaggccatgaaggtgagcagccagccctgcaccaagattgagagcagctctgtgctgagcaagccctgcagcgtgacagtggccagcgaggccagcaagaagaaggtggatgtgattgacctgaccatcgagagcagcagtgatgaggaggaggaccccccagccaagaggaagtgcatcttcatgtctgagacccagagcagccccaccaagggcgtgctgatgtaccagcccagctctgtgcgggtgcccagcgtgacctctgtggaccctgctgccatcccccccagcctgacagactacagcgtgcccttccaccacacccccatcagctccatgagcagtgacctgcctggagagcagaggagaaatgacatcaacaatgagctgaagctgggcaccagcagtgacacagtgcagcagtag

SEQ ID NO: 249930 - DNA, 1902 bp, Artificial Sequence
  derived and/or modified sequence
gacgggcccggctgtagcggcggcggccgcggcgtcttaagcggcgcccagtgcaggatggtgctggaggcggcggcggccgtggtggcggcagcgtcgttggcggcagcgggagtgggtgcggcggcagcggcggcggcgcccgcgggtggtataaaatggcggatttcgaagagttgaggaatatggtttctagttttagggtttctgaactacaagtattactaggctttgctggacggaataaaagtggacgcaagcatgacctcctgatgagggcgctgcatttattgaagagcggctgcagccctgcggttcagattaaaatccgagaattgtatagacgccgatatccacgaactcttgaaggactttctgatttatccacaatcaaatcatcggttttcagtttggatggtggctcatcacctgtagaacctgacttggccgtggctggaatccactcgttgccttccacttcagttacacctcactcaccatcctctcctgttggttctgtgctgcttcaagatactaagcccacatttgagatgcagcagccatctcccccaattcctcctgtccatcctgatgtgcagttaaaaaatctgcccttttatgatgtccttgatgttctcatcaagcccacgagtttagttcaaagcagtattcagcgatttcaagagaagttttttatttttgctttgacacctcaacaagttagagagatatgcatatccagggattttttgccaggtggtaggagagattatacagtccaagttcagttgagactttgcctggcagagacaagttgccctcaagaagataactatccaaatagtctatgtataaaagtaaatgggaagctatttcctttgcctggctatgcaccaccgcctaaaaatgggattgaacagaagcgccctggacgccccttgaatattacatctttagttaggttatcttcagctgtgccaaaccaaatttccatttcttgggcatcagaaattgggaagaattactctatgtctgtatatcttgtacggcagcttacatcagccatgttattacagagattaaaaatgaaaggtattagaaaccctgatcattccagagcactaattaaagaaaaacttactgcagatcctgatagtgaaattgctacaactagccttcgggtatccttgatgtgccctttaggaaaaatgaggctgacaatcccatgccgtgcagtgacttgtacacatctgcagtgttttgatgctgccctctatctacaaatgaatgagaaaaagcccacctggatttgtcctgtgtgtgacaaaaaagctgcctatgaaagtctaatattagatgggctttttatggaaattctcaatgactgttctgatgtagatgagatcaaattccaagaagatggttcttggtgtccaatgagaccgaagaaagaagctatgaaagtatccagccaaccgtgtacaaaaatagaaagttcaagcgtcctcagtaagccttgttcagtgactgtagccagtgaggcaagcaagaagaaagtagatgttattgatcttacaatagaaagctcttctgacgaagaggaagaccctcctgccaaaaggaaatgcatctttatgtcagaaacacaaagcagcccaaccaaaggggttctcatgtatcagccatcttctgtaagggtgcccagtgtgacttcggttgatcctgctgctattccgccttcattaacagactactcagtaccattccaccatacgccaatatcaagcatgtcatcagatttgccaggagaacaaagaagaaatgatattaataatgaactgaagcttggaacatcttctgatactgtgcaacagtgaatacaaaataaaacaaataatttgt

SEQ ID NO: 249931 - DNA, 1590 bp, Artificial Sequence
  derived and/or modified sequence
gtgacgggcccggctgtagcggcggcggccgcggcgtcttaagcggcgcccagtgcaggatggtgctggaggcggcggcggccgtggtggcggcagcgtcgttggcggcagcgggagtgggtgcggcggcagcggcggcggcgcccgcgggtggtataaaatggcggatttcgaagagttgaggttcaaagcagtattcagcgatttcaagagaagttttttatttttgctttgacacctcaacaagttagagagatatgcatatccagggattttttgccaggtggtaggagagattatacagtccaagttcagttgagactttgcctggcagagacaagttgccctcaagaagataactatccaaatagtctatgtataaaagtaaatgggaagctatttcctttgcctggctatgcaccaccgcctaaaaatgggattgaacagaagcgccctggacgccccttgaatattacatctttagttaggttatcttcagctgtgccaaaccaaatttccatttcttgggcatcagaaattgggaagaattactctatgtctgtatatcttgtacggcagcttacatcagccatgttattacagagattaaaaatgaaaggtattagaaaccctgatcattccagagcactaattaaagaaaaacttactgcagatcctgatagtgaaattgctacaactagccttcgggtatccttgatgtgccctttaggaaaaatgaggctgacaatcccatgccgtgcagtgacttgtacacatctgcagtgttttgatgctgccctctatctacaaatgaatgagaaaaagcccacctggatttgtcctgtgtgtgacaaaaaagctgcctatgaaagtctaatattagatgggctttttatggaaattctcaatgactgttctgatgtagatgagatcaaattccaagaagatggttcttggtgtccaatgagaccgaagaaagaagctatgaaagtatccagccaaccgtgtacaaaaatagaaagttcaagcgtcctcagtaagccttgttcagtgactgtagccagtgaggcaagcaagaagaaagtagatgttattgatcttacaatagaaagctcttctgacgaagaggaagaccctcctgccaaaaggaaatgcatctttatgtcagaaacacaaagcagcccaaccaaaggggttctcatgtatcagccatcttctgtaagggtgcccagtgtgacttcggttgatcctgctgctattccgccttcattaacagactactcagtaccattccaccatacgccaatatcaagcatgtcatcagatttgccaggagaacaaagaagaaatgatattaataatgaactgaagcttggaacatcttctgatactgtgcaacagtgaatacaaaataaaacaaataatttgtatttatggagtggaaaacagcttatttcaaggaaaaatatgactgccttattattgctagtgccatattgtcaggtgcgaatggtgctcaaaagttgtatcattaaaatttgaaagtgctaaacatttacatatttaatcatgtagcagttatgttttgtt

SEQ ID NO: 249932 - DNA, 1719 bp, Artificial Sequence
  derived and/or modified sequence
atggccgacttcgaggagctgcggaacatggtgagcagcttccgggtcagcgaacttcaggtgctcttgggatttgccggtcgtaataagtccgggcgtaaacacgacctccttatgagagctctccacctgttaaagtcaggctgcagccctgctgtccagatcaagattcgtgagttgtacagaagacgttaccctcgaacactcgaaggcctttctgacctgagcacaattaagtcatccgtgttctcgttagatgggggctcgagtcctgtggagccggacctggccgtcgcaggcattcattctctcccctcaactagcgtaactccccatagtccatcatcacctgtcggaagcgtactactccaggataccaagccaacattcgaaatgcagcagcccagtccgccaattcctcctgtacatccagatgtacagctgaaaaacttaccattttatgacgtactcgatgtgttgattaagccgacctcactggtgcagtcgtccatccagcgcttccaagagaagtttttcatcttcgcactaacgccccagcaagtgcgagaaatctgtatctcccgcgactttctccccggcgggaggcgcgattatacagtccaggtccagctaaggctatgcctcgcagagacttcatgcccacaggaagacaattaccccaattccctttgtatcaaagttaacggcaagctgttccctctcccagggtacgcacctcctcccaaaaacggcattgagcaaaagcgtcctggtcgtcctctcaacatcacaagtcttgtgaggctgagctcagctgttcccaatcagatcagcatatcttgggcttcagagatcggtaaaaattattctatgagtgtttacctggtcaggcaactgacatccgccatgctcctgcaacgcctgaagatgaagggaattagaaatcctgaccactcacgcgcattgattaaggaaaagctgacagccgaccctgactccgagattgcaactaccagcctccgagttagcctcatgtgccccctggggaaaatgaggctgacaattccatgccgggcagttacatgtacgcacctacagtgttttgacgctgcactctacctccaaatgaatgagaaaaaaccaacctggatctgtcccgtctgtgacaagaaggccgcctatgaatccctgattttggatggcctgttcatggagatcctcaacgattgctcagatgtggacgaaatcaagttccaggaggacggtagttggtgccctatgcggcccaagaaagaagcgatgaaagtgagttcacagccctgcacaaagatagagtcatccagcgtgctgtcaaaaccttgctcagtcacggttgcctctgaggccagcaagaagaaggtggatgtaatcgatctgactatcgagtcctcctcagacgaggaggaggaccctccagctaagcgaaagtgtatctttatgtctgagacccaatctagtccaaccaagggggttctgatgtaccaacccagcagcgttagggtgccttccgtgacttcggttgatcctgcggcgatcccgcccagccttaccgactactcagttccattccaccacacccccattagcagcatgtcatctgacttgcctggcgagcagcgaagaaatgacatcaataatgagcttaagcttggcacttccagtgacaccgtgcagcagtag

SEQ ID NO: 249933 - DNA, 849 bp, Artificial Sequence
  derived and/or modified sequence
atgagcgtgtacctggtgcggcagctgaccagcgccatgctgctgcagcggctgaaaatgaagggtatccgcaacccagaccatagccgtgctcttattaaagagaagctcaccgctgatccagactcggagattgccactacatctctgagggtgtccctcatgtgtcccctgggaaagatgcggcttaccatcccctgcagagctgtgacttgtacacacttgcaatgttttgatgcggccctctatctgcaaatgaatgagaagaagcccacatggatttgtccagtgtgcgataagaaggccgcttatgagtctctaatcctcgacggactgttcatggaaattttgaacgactgtagtgacgtggatgagatcaaatttcaggaagacggttcttggtgcccaatgcgccccaagaaagaagcgatgaaggtgagttcacagccatgtactaagattgagtcgagttcagtgctgtccaaaccttgctccgtgaccgtggcctccgaagcttctaagaaaaaagtagacgtaatcgacctcaccattgaatctagctctgacgaagaagaagatccccccgcaaaacgtaagtgcatcttcatgtccgagacacaaagttcacctacaaagggggtactgatgtaccagccctctagcgtacgcgtgccatcagtgacgtccgtggatcccgccgcgatacctccgtcgttaacagactactcagtgccctttcaccacacccccatatcttcaatgagctcagacttacctggcgagcagcgcagaaatgatataaataatgagcttaaacttggaaccagttcagatactgtgcagcagtag

SEQ ID NO: 249934 - DNA, 1719 bp, Artificial Sequence
  derived and/or modified sequence
atggctgatttcgaggagcttcgtaatatggtcagctcttttagagtctcggaactgcaggtactcctcggattcgcgggtcgtaacaaaagcggcagaaaacacgacctgctgatgagagctcttcacctgttgaagtctgggtgtagccctgccgttcagatcaagataagagagctatatcggcgaagatacccgcgaactctcgaaggattgtccgatctgtccactattaagtcctcggtgttttccctcgacggcggatcatctcccgttgaacctgacctggcagtggctggaatacattcattgccgtccactagcgtcaccccccatagcccttcctcccccgttgggagcgtgctactgcaggacaccaagcctacattcgagatgcagcagcccagtccaccaatccccccagttcatccagacgtgcagctcaaaaacctgcctttctacgatgttttggatgtcctgattaagcctacgtccctggtgcagagcagcatacagcgatttcaggaaaagttctttatcttcgcattgacccctcaacaggtgcgggaaatctgcatcagtagggattttctgccaggaggtagacgcgattatacagttcaggttcagctgcggctctgtctggccgagacttcctgcccacaggaagacaactatcccaattcattgtgcattaaagttaatgggaagctgtttcccctgccgggatacgctcctccaccaaagaacggaattgagcaaaagaggccaggtaggccgcttaacattacttccttagtacgactgagcagcgcggtgccaaatcagatcagtatctcttgggctagtgaaataggaaaaaattacagcatgtctgtttacctggtccgacagttaacgtcagcaatgcttctgcagagattgaaaatgaagggcattcgcaaccccgaccactcaagggccctgataaaggaaaagctgactgctgatcctgacagcgagattgcaaccacctcccttcgagtatccctgatgtgtccgttagggaaaatgcgcctaaccattccttgtcgggcagtcacgtgtactcatcttcagtgttttgatgccgcactgtatctgcagatgaatgagaaaaagcctacctggatctgccccgtctgtgacaaaaaagcagcctatgaatctctgatcctcgacggacttttcatggagatcctaaacgactgctccgatgtcgacgagatcaagtttcaggaggacgggtcatggtgtcccatgcggccaaagaaagaggccatgaaggtctcaagtcagccttgcacaaagatcgagtcgtcgtccgtcctctcaaaaccttgctctgtcaccgttgcctccgaggcctccaaaaaaaaggtggatgtgatagacctcacgatcgaaagttcgtcagatgaagaagaggacccaccagccaagcggaagtgcatcttcatgtccgaaactcagtctagccccaccaagggagtattaatgtatcaacctagcagtgtgagagttccatccgtgacctcagtagatcctgccgctatacctccttcccttacggattactctgtcccctttcaccatacccccatcagctccatgtccagtgacctgccaggagaacagaggcgtaacgatattaataatgaacttaagcttggtacctctagcgatacagttcagcagtag

SEQ ID NO: 249935 - DNA, 849 bp, Artificial Sequence
  derived and/or modified sequence
atgtccgtgtatttggtccgccagcttacaagtgcaatgctgctgcagcggctgaaaatgaaaggcattagaaaccccgaccattcccgtgctctgatcaaagagaaactaacagccgatcctgattccgaaatagcaacaacatctctcagagtaagtctgatgtgtcccttgggtaagatgagactgacaatcccatgtcgcgcagtcacatgcacgcatctccagtgtttcgacgcggctctatacctgcaaatgaatgaaaagaaacctacctggatctgcccggtgtgtgacaagaaagccgcatacgagtcactaattcttgatggcctgtttatggagattctgaatgactgttctgatgtagacgaaataaaattccaggaggatggttcctggtgtccaatgagaccaaagaaggaggcgatgaaggtgtcaagccagccttgtacaaaaattgagtctagcagcgttctgtctaaaccttgttccgtgactgtggcatctgaggcctctaagaagaaggtggatgtgatcgacttgaccattgagtcgtcatccgacgaagaggaggaccccccagccaaaagaaagtgcatctttatgtctgaaacacagtcctccccgactaagggcgttctgatgtatcagccatcttcggtgagggtacccagcgtaactagcgttgatccagccgctattccaccctctctaactgattacagcgtgcctttccaccacactcccatcagttccatgtcttctgacctgcccggagagcaacggcgaaacgacatcaataatgagctcaagctcggtacatctagcgacactgtgcagcagtag

SEQ ID NO: 249936 - DNA, 1719 bp, Artificial Sequence
  derived and/or modified sequence
atggccgacttcgaggagctgagaaacatggtgagcagcttcagagtgagcgagctgcaggtgctgctgggcttcgccggcagaaacaagagcggcagaaagcacgacctgctgatgagagccctgcacctgctgaagagcggctgcagccccgccgtgcagatcaagatcagagagctgtacagaagaagataccccagaaccctggagggcctgagcgacctgagcaccatcaagagcagcgtgttcagcctggacggcggcagcagccccgtggagcccgacctggccgtggccggcatccacagcctgcccagcaccagcgtgaccccccacagccccagcagccccgtgggcagcgtgctgctgcaggacaccaagcccaccttcgagatgcagcagcccagcccccccatcccccccgtgcaccccgacgtgcagctgaagaacctgcccttctacgacgtgctggacgtgctgatcaagcccaccagcctggtgcagagcagcatccagagattccaggagaagttcttcatcttcgccctgaccccccagcaggtgagagagatctgcatcagcagagacttcctgcccggcggcagaagagactacaccgtgcaggtgcagctgagactgtgcctggccgagaccagctgcccccaggaggacaactaccccaacagcctgtgcatcaaggtgaacggcaagctgttccccctgcccggctacgcccccccccccaagaacggcatcgagcagaagagacccggcagacccctgaacatcaccagcctggtgagactgagcagcgccgtgcccaaccagatcagcatcagctgggccagcgagatcggcaagaactacagcatgagcgtgtacctggtgagacagctgaccagcgccatgctgctgcagagactgaagatgaagggcatcagaaaccccgaccacagcagagccctgatcaaggagaagctgaccgccgaccccgacagcgagatcgccaccaccagcctgagagtgagcctgatgtgccccctgggcaagatgagactgaccatcccctgcagagccgtgacctgcacccacctgcagtgcttcgacgccgccctgtacctgcagatgaacgagaagaagcccacctggatctgccccgtgtgcgacaagaaggccgcctacgagagcctgatcctggacggcctgttcatggagatcctgaacgactgcagcgacgtggacgagatcaagttccaggaggacggcagctggtgccccatgagacccaagaaggaggccatgaaggtgagcagccagccctgcaccaagatcgagagcagcagcgtgctgagcaagccctgcagcgtgaccgtggccagcgaggccagcaagaagaaggtggacgtgatcgacctgaccatcgagagcagcagcgacgaggaggaggacccccccgccaagagaaagtgcatcttcatgagcgagacccagagcagccccaccaagggcgtgctgatgtaccagcccagcagcgtgagagtgcccagcgtgaccagcgtggaccccgccgccatcccccccagcctgaccgactacagcgtgcccttccaccacacccccatcagcagcatgagcagcgacctgcccggcgagcagagaagaaacgacatcaacaacgagctgaagctgggcaccagcagcgacaccgtgcagcagtag

SEQ ID NO: 249937 - DNA, 849 bp, Artificial Sequence
  derived and/or modified sequence
atgagcgtgtacctggtgagacagctgaccagcgccatgctgctgcagagactgaagatgaagggcatcagaaaccccgaccacagcagagccctgatcaaggagaagctgaccgccgaccccgacagcgagatcgccaccaccagcctgagagtgagcctgatgtgccccctgggcaagatgagactgaccatcccctgcagagccgtgacctgcacccacctgcagtgcttcgacgccgccctgtacctgcagatgaacgagaagaagcccacctggatctgccccgtgtgcgacaagaaggccgcctacgagagcctgatcctggacggcctgttcatggagatcctgaacgactgcagcgacgtggacgagatcaagttccaggaggacggcagctggtgccccatgagacccaagaaggaggccatgaaggtgagcagccagccctgcaccaagatcgagagcagcagcgtgctgagcaagccctgcagcgtgaccgtggccagcgaggccagcaagaagaaggtggacgtgatcgacctgaccatcgagagcagcagcgacgaggaggaggacccccccgccaagagaaagtgcatcttcatgagcgagacccagagcagccccaccaagggcgtgctgatgtaccagcccagcagcgtgagagtgcccagcgtgaccagcgtggaccccgccgccatcccccccagcctgaccgactacagcgtgcccttccaccacacccccatcagcagcatgagcagcgacctgcccggcgagcagagaagaaacgacatcaacaacgagctgaagctgggcaccagcagcgacaccgtgcagcagtag

SEQ ID NO: 249938 - protein, 252 aa, Artificial Sequence
  derived and/or modified sequence
MDIPLDLSSSAGSGKRRRRGNLPKESVQILRDWLYEHRYNAYPSEQEKALLSQQTHLSTLQVCNWFINARRRLLPDMLRKDGKDPNQFTISRRGAKISETSSVESVMGIKNFMPALEETPFHSCTAGPNPTLGRPLSPKPSSPGSVLARPSVICHTTVTALKDVPFSLCQSVGVGQNTDIQQIAAKNFTDTSLMYPEDTCKSGPSTNTQSGLFNTPPPTPPDLNQDFSGFQLLVDVALKRAAEMELQAKLTA

SEQ ID NO: 249939 - protein, 286 aa, Artificial Sequence
  derived and/or modified sequence
MTCSGKSCALARSSLTSSQGIVAASGSETEDEDSMDIPLDLSSSAGSGKRRRRGNLPKESVQILRDWLYEHRYNAYPSEQEKALLSQQTHLSTLQVCNWFINARRRLLPDMLRKDGKDPNQFTISRRGAKISETSSVESVMGIKNFMPALEETPFHSCTAGPNPTLGRPLSPKPSSPGSVLARPSVICHTTVTALKDVPFSLCQSVGVGQNTDIQQIAAKNFTDTSLMYPEDTCKSGPSTNTQSGLFNTPPPTPPDLNQDFSGFQLLVDVALKRAAEMELQAKLTA

SEQ ID NO: 249940 - protein, 92 aa, Artificial Sequence
  derived and/or modified sequence
MDIPLDLSSSAGSGKRRRRGNLPKESVQILRDWLYEHRYNAYPSEQEKALLSQQTHLSTLQVCNWFINARRRLLPDMLRKDGKDPNQFTISR

SEQ ID NO: 249941 - protein, 133 aa, Artificial Sequence
  derived and/or modified sequence
MDIPLDLSSSAGSGKRRRRGNLPKESVQILRDWLYEHRYNAYPSEQEKALLSQQTHLSTLQVCNWFINARRRLLPDMLRKDGKDPNQFTISRRGAKISETSSVESVMGIKNFMPALEETPFHSCTAGPNPTLG

SEQ ID NO: 249942 - protein, 246 aa, Artificial Sequence
  derived and/or modified sequence
MDIPLDLSSSAGSGKRRRRGNLPKESVQILRDWLYEHRYNAYPSEQEKALLSQQTHLSTLQVCNWFINARRRLLPDMLRKDGKDPNQFTISRRGAKISETSSVESVMGIKNFMPALEETPFHSCTAGPNPTLGRPLSPKPSSPGSVLARPSVICHTTVTALKDVPFSLCQSVGVGQNTDIQQIAAKNFTDTSLMYPEDTCKSGPSTNTQSGLFNTPPPTPPDLNQDFSGFQLLVDVALKRAAEMEL

SEQ ID NO: 249943 - protein, 219 aa, Artificial Sequence
  derived and/or modified sequence
MDIPLDLSSSAGSGKRRRRGNLPKESVQILRDWLYEHRYNAYPSEQEKALLSQQTHLSTLQVCNWFINARRRLLPDMLRKDGKDPNQFTISRRGAKISETSSVESVMGIKNFMPALEETPFHSCTAGPNPTLGRPLSPKPSSPGSVLARPSVICHTTVTALKDVPFSLCQSVGVGQNTDIQQIAAKNFTDTSLMYPEDTCKSGPSTNTQSGLFNTPPPT

SEQ ID NO: 249944 - protein, 131 aa, Artificial Sequence
  derived and/or modified sequence
MDIPLDLSSSAGSGKRRRRGNLPKESVQILRDWLYEHRYNAYPSEQEKALLSQQTHLSTLQVCNWFINARRRLLPDMLRKDGKDPNQFTISRRGAKISETSSVESVMGIKNFMPALEETPFHSCTAGPNPT

SEQ ID NO: 249945 - protein, 138 aa, Artificial Sequence
  derived and/or modified sequence
MDIPLDLSSSAGSGKRRRRGNLPKESVQILRDWLYEHRYNAYPSEQEKALLSQQTHLSTLQVCNWFINARRRLLPDMLRKDGKDPNQFTISRRGAKISETSSVESVMGIKNFMPALEETPFHSCTAGPNPTLGRPLSP

SEQ ID NO: 249946 - protein, 168 aa, Artificial Sequence
  derived and/or modified sequence
MDIPLDLSSSAGSGKRRRRGNLPKESVQILRDWLYEHRYNAYPSEQEKALLSQQTHLSTLQVCNWFINARRRLLPDMLRKDGKDPNQFTISRRGAKISETSSVESVMGIKNFMPALEETPFHSCTAGPNPTLGRPLSPKPSSPGSVLARPSVICHTTVTALKDVPFSL

SEQ ID NO: 249947 - DNA, 861 bp, Artificial Sequence
  derived and/or modified sequence
atgacgtgtagtgggaaaagttgcgccttggccaggagtagcctgacttcctcacagggcattgtcgccgcctccggcagcgagacggaagatgaggacagcatggatatacctctcgatctgtcctcctctgccggctctggaaaaaggagaaggagaggtaatctgcctaaagagagtgtgcagattcttcgggactggctgtacgaacacagatacaacgcatatccttctgaacaggagaaggcactgctttcccagcagacacacctgtcgaccttacaggtgtgtaactggtttatcaatgcgcgacggaggctcctcccagacatgctgcgaaaagacggcaaggaccccaatcaatttaccatcagccgcaggggtgccaagatctcagaaacttcatccgtcgagtcagtcatgggcataaagaatttcatgcctgctctcgaggagacccctttccactcctgcaccgctggtccaaatcccactctagggcggcctctctctccaaaacccagctccccagggtccgtactcgcccgaccctcagtgatctgccataccacagtcaccgccctgaaggacgtcccattctcactgtgtcagagcgtgggagtcggtcagaacacagacatacaacaaatagctgcgaagaattttacagacaccagtctgatgtaccctgaagatacttgtaagtccgggccctcgacaaacacacagtcgggcctgttcaacactccaccaccaacccctcccgacctgaatcaggacttctctgggtttcaacttctcgtggatgttgccctgaaacgcgcagccgagatggagttgcaggcaaagctgactgcttag

SEQ ID NO: 249948 - DNA, 861 bp, Artificial Sequence
  derived and/or modified sequence
atgacctgcagcggcaagagctgtgccctggcccggagcagcctgaccagcagccagggcatcgtggccgccagcggcagcgagacagaagatgaggacagcatggacatccccctggacctgagcagcagcgctggcagcggcaagagaagaagaagaggcaacctgcccaaggagagcgtgcagatcctgcgggactggctgtatgagcaccgctacaatgcctaccccagcgagcaggagaaggccctgctgagccagcagacccacctgagcaccctgcaggtgtgcaactggttcatcaatgcccggcggcggctgctgcctgacatgctgaggaaggatggcaaggaccccaaccagttcaccatcagccggcggggggccaagatcagcgagaccagctctgtggagagcgtgatgggcatcaagaacttcatgcctgccctggaggagacccccttccacagctgcacagctggccccaaccccaccctgggccggcccctgagccccaagcccagcagccctggctctgtgctggcccggcccagcgtcatctgccacaccaccgtgacagccctgaaggatgtgcccttcagcctgtgccagagcgtgggcgtgggccagaacacagacatccagcagattgctgccaagaacttcacagacaccagcctgatgtacccagaggacacctgcaagagcggccccagcaccaacacccagagcggcctcttcaacaccccaccacccaccccaccagacctgaaccaggacttcagcggcttccagctgctggtggatgtggccctgaagagagctgctgagatggagctgcaggccaagctgacagcctag

SEQ ID NO: 249949 - DNA, 861 bp, Artificial Sequence
  derived and/or modified sequence
atgacctgcagcggcaagagctgcgccctggcccggagcagcctgactagttcccaaggtatcgtggccgctagcggatccgaaactgaagatgaagatagcatggacatcccacttgatttgtctagcagtgctggatccggaaagagaaggcgtagaggaaacctgcccaaggagagcgttcagattctgagagactggctatacgagcataggtataatgcctaccctagcgagcaggagaaggccctgctcagtcagcagacccacctaagtaccttgcaggtgtgcaactggttcattaacgcacgaaggaggctgctgcctgacatgctgagaaaagatggtaaggatcctaaccagttcacaatttcccgtagaggtgcgaaaatttcagagacttcttctgttgagagcgtcatgggcattaagaattttatgcccgctttggaagagaccccatttcactcttgtaccgccggccccaatccaacgctgggtagaccattgagccctaagccctcatctccagggagcgttctcgcccggccttcggtcatctgccacacaaccgtcaccgcactgaaagacgttcccttttccctctgtcagagcgtgggggtcggccagaacactgatatccagcagatagccgcaaagaactttaccgacacaagcttgatgtaccccgaggacacttgtaagtcagggccttcaaccaacactcaatctggcctttttaatacaccacctcccacgccccccgacctaaaccaggacttctccggttttcagctgttggtcgatgtagccctgaaacgcgccgccgaaatggagctgcaggccaaactgacggcctag

SEQ ID NO: 249950 - DNA, 1088 bp, Artificial Sequence
  derived and/or modified sequence
tttctgtgggaggccctgaaacgcgcggagcttccctctgcctccaggctttcccagcgagagtgaaattaaacttgaaactcggatcaactggcagtcgttgtattgttgcagcatctggcagtgagactgaggatgaggacagcatggacattcccttggacctttcttcatccgctggctcaggcaagagaaggagaaggggcaacctacccaaggagtctgtgcagattcttcgggattggctgtatgagcaccgttacaatgcctatccttcagagcaagaaaaagcgttgctgtcccagcaaacacacctgtctacgctacaggtctgtaactggttcatcaacgcccgccgcaggctcctccctgacatgctgagaaaggatggcaaagatccaaatcagttcacaatttcccgccgtggggccaagatttctgaaacgagctctgtggagtccgtgatgggcatcaaaaacttcatgccagctctagaggagaccccatttcattcctgtacagctgggccaaacccaaccctagggaggccactgtctcctaagccgtcatccccgggatcagttttggctcgtccatcagtgatctgccataccactgtgactgcattgaaagatgtccctttctctctctgccagtcggtcggtgtgggacaaaacacagatatacagcagatagcggccaaaaacttcacagacacctctctcatgtacccagaggacacttgtaaatctggaccaagtacgaatacacagagtggtcttttcaacactcctccccctactccaccggacctcaaccaggacttcagtggatttcagcttctagtggatgttgcactcaaacgggctgcagagatggagcttcaggcaaaacttacagcttaacccattttcaagcaaaacagttctcagaaatgtcatgattgccggggtgaaggcaagagatgaattgcattattttatatattttttattaatatttgcacatgggattgctaaaacagcttcctgttactgagatgtcttcaatggaatacagtcattccaagaactataaacttaaagcta

SEQ ID NO: 249951 - DNA, 1523 bp, Artificial Sequence
  derived and/or modified sequence
caaaggccaggcctgacggaagagcccagccttcgccgagggccgcagggagccagagactcgagcctgcggttccagccccgccgcggttccggccccgccgcgatcccgaggcctgcgcatgctcggtgctgcgcggggctccctccttaccgcaggagctcctcatcgagaaacccaggttggtgtcttttccacgtggtagaagctggctaacctccacttccacattccagcccaagggaaagtccaaggtattgttgcagcatctggcagtgagactgaggatgaggacagcatggacattcccttggacctttcttcatccgctggctcaggcaagagaaggagaaggggcaacctacccaaggagtctgtgcagattcttcgggattggctgtatgagcaccgttacaatgcctatccttcagagcaagaaaaagcgttgctgtcccagcaaacacacctgtctacgctacaggtctgtaactggttcatcaacgcccgccgcaggctcctccctgacatgctgagaaaggatggcaaagatccaaatcagttcacaatttcccgccgtggggccaagatttctgaaacgagctctgtggagtccgtgatgggcatcaaaaacttcatgccagctctagaggagaccccatttcattcctgtacagctgggccaaacccaaccctagggaggccactgtctcctaagccgtcatccccgggatcagttttggctcgtccatcagtgatctgccataccactgtgactgcattgaaagatgtccctttctctctctgccagtcggtcggtgtgggacaaaacacagatatacagcagatagcggccaaaaacttcacagacacctctctcatgtacccagaggacacttgtaaatctggaccaagtacgaatacacagagtggtcttttcaacactcctccccctactccaccggacctcaaccaggacttcagtggatttcagcttctagtggatgttgcactcaaacgggctgcagagatggagcttcaggcaaaacttacagcttaacccattttcaagcaaaacagttctcagaaatgtcatgattgccggggtgaaggcaagagatgaattgcattattttatatattttttattaatatttgcacatgggattgctaaaacagcttcctgttactgagatgtcttcaatggaatacagtcattccaagaactataaacttaaagctactgtagaaacaaagggttttcttttttaaatgtttcttggtagattattcataatgtgagatggttcccaatatcatgtgattttttttttcctccccttccctttttttgttattttttcagactgtgcaatacttagagaacctatagcatcttctcattcccatgtggaacaggatgcccacatactgtctaattaataaattttccattttttttcaaacaagtatgaatctagttggttgatgccttttttttcatgacataataaagtattttcttt

SEQ ID NO: 249952 - DNA, 3030 bp, Artificial Sequence
  derived and/or modified sequence
cagcgttggctggggggaggcagtgggggtgcatctacgggagcggttgggctgtaagctttcgctacatcacagaattgtgccagtgtttctctttggagtgcctcgccagctttaacaaccgtttggatatgacttgctcgggcaaaagttgtgcattggcccgatcaagcctgacttctagccaaggtattgttgcagcatctggcagtgagactgaggatgaggacagcatggacattcccttggacctttcttcatccgctggctcaggcaagagaaggagaaggggcaacctacccaaggagtctgtgcagattcttcgggattggctgtatgagcaccgttacaatgcctatccttcagagcaagaaaaagcgttgctgtcccagcaaacacacctgtctacgctacaggtctgtaactggttcatcaacgcccgccgcaggctcctccctgacatgctgagaaaggatggcaaagatccaaatcagttcacaatttcccgccgtggggccaagatttctgaaacgagctctgtggagtccgtgatgggcatcaaaaacttcatgccagctctagaggagaccccatttcattcctgtacagctgggccaaacccaaccctagggaggccactgtctcctaagccgtcatccccgggatcagttttggctcgtccatcagtgatctgccataccactgtgactgcattgaaagatgtccctttctctctctgccagtcggtcggtgtgggacaaaacacagatatacagcagatagcggccaaaaacttcacagacacctctctcatgtacccagaggacacttgtaaatctggaccaagtacgaatacacagagtggtcttttcaacactcctccccctactccaccggacctcaaccaggacttcagtggatttcagcttctagtggatgttgcactcaaacgggctgcagagatggagcttcaggcaaaacttacagcttaacccattttcaagcaaaacagttctcagaaatgtcatgattgccggggtgaaggcaagagatgaattgcattattttatatattttttattaatatttgcacatgggattgctaaaacagcttcctgttactgagatgtcttcaatggaatacagtcattccaagaactataaacttaaagctactgtagaaacaaagggttttcttttttaaatgtttcttggtagattattcataatgtgagatggttcccaatatcatgtgattttttttttcctccccttccctttttttgttattttttcagactgtgcaatacttagagaacctatagcatcttctcattcccatgtggaacaggatgcccacatactgtctaattaataaattttccattttttttcaaacaagtatgaatctagttggttgatgccttttttttcatgacataataaagtattttctttaaaaattgttgtaattcagagtatttctgttgagggaggtgcttcttaaaaataagtaggaatatagcaccccagtgagcaggaagctgggggggtagggtgcagtgttagggggtgtcaccagctctttgaaaacctgtggacaacaagccagtttgcataaacaggatgtgtgatatttactcttgataggaggcatagcaggcccttagagctttacttaaactgcatggcaaattgaaatgaatcattttagtgtttagctagccactaaatcccttgctgatctgtcctgcgtagtttaaaacgtggccatgttataaagaaaagtcttgaagcatccggttattgctgagttttcagaagaaaacaacgcaagcaatctcttgccctttttccacgttaccctttaaaataacctttgttcagtggtacatttagttaaggcatttgtattcaaatgtagcatagtatttgcagagaaattaccttttaaaacatctcaaaagtgttttctaaaatgatgaaataaacggtggggttctgtctatggtgggattgtcagtttattaggtgagtattttccaaggtctcagtttgtgaaaaaatggtgctatgtacaagtggagtttgttgggatagacaatcacttacaaagcccagatggccagaagggaattggtgttgctcctttcacttgtatggttgagcagatttgtcacatgccacaaaaccattctttgtagtcatgcttagtatgagcttgctttgttgttacggtcatgttctttccagccctgccccagctatgaattgtctaagtgtgagggagcatcagagcttcagtattgtttaaagaatgtagaaaaatacaaatttgtctaattttgaaactattttagaaagtccctactgtagaaagagctaaactcaaagactttccttgtaagtgaaagaaaaaaactgctgatgattaccaagaggcgtaagaaaattaggtgagggaatgttgtgctctagcctgtggggtgcagcttcgtagggcacatcagcttagaatggtctggcctcacctcagagagtcacagaaatagacaaaaacccaaaaagtactagtaaagtaaatacaaggaacaaaataaacattaataaaaatgaatgacgcaaaggtgatccagaatcattacttgctccaacagctagatcaaaggctgaacattttgctttagtatagatgagggaaatgagcaagtcctaaaaggtttgccctgttacggtgtttcatcactcatactggaaggagaaggaaaggagccatatgactcatttaaaagaaaaactgtaagtcaccttaaattccctatgttttacttcattttttccctattgaggttgttacaggtcatggttgataatagttggtgttgaatgaatgtaatccattatttaaaaacaggtacatttaagtgaaaagataaatgtaaaaagctgttcatatcaaagccaaatagaaatgatttttatgcttataatttacatggtgcaatatatctttttaatttgtttactttt

SEQ ID NO: 249953 - DNA, 706 bp, Artificial Sequence
  derived and/or modified sequence
taagaaaataaaatattagccgagtgtggcgtcacacgcctgtagtcctatctacttgggaggctgagacaggaggatctcttgagctcaggagttcaagactgcagtgagctgtgatggcgtcactgcactccagcctgggcgacaaaacgaggctctgtccccaaacaccaaaaacctcacaaggctcttccaggttggtgtcttttccacgtggtagaagctggctaacctccacttccacattccagcccaagggaaagtccaaggtattgttgcagcatctggcagtgagactgaggatgaggacagcatggacattcccttggacctttcttcatccgctggctcaggcaagagaaggagaaggggcaacctacccaaggagtctgtgcagattcttcgggattggctgtatgagcaccgttacaatgcctatccttcagagcaagaaaaagcgttgctgtcccagcaaacacacctgtctacgctacaggtctgtaactggttcatcaacgcccgccgcaggctcctccctgacatgctgagaaaggatggcaaagatccaaatcagttcacaatttcccgccgtggggccaagatttctgaaacgagctctgtggagtccgtgatgggcatcaaaaacttcatgccagctctagaggagaccccatttcattcctgtacagctgggccaaacccaacc

SEQ ID NO: 249954 - DNA, 1267 bp, Artificial Sequence
  derived and/or modified sequence
ctctcgctcttgccctctggggacccaaaaggcccctggtcctcaagtcagccacctctgtgtcttcctccatccaaaagacctgcaggagcttctgagcctggtgacacttgctggggaccaagaccatcctactccgccccagccacgctgcatgacctcatctcagcccaaaaacagacattgggaacatctgaccatccatcccgttcccccgctctttttggctacctgcagtgaccccagcagcaggggcgggagttgcctgccctcttccagcctggaagagcatctgtcctacgctcctccttccgggagtgactcccgcccgcatctcggggtgggaagggttcaggaaacacagaccagcttatcttaaggaagcctggtcgggaatctttcaaaaacacatctgttacaagggggaaagacacctccaggacaacagtgatttgcctcagcggggcaaaggccaggcctgacggaagagcccagccttcgccgagggccgcagggagccagagactcgagcctgcggttccagccccgccgcggttccggccccgccgcgatcccgaggcctgcgcatgctcggtgctgcgcggggctccctccttaccgcaggagctcctcatcgagaaacccaggttggtgtcttttccacgtggtagaagctggctaacctccacttccacattccagcccaagggaaagtccaaggtattgttgcagcatctggcagtgagactgaggatgaggacagcatggacattcccttggacctttcttcatccgctggctcaggcaagagaaggagaaggggcaacctacccaaggagtctgtgcagattcttcgggattggctgtatgagcaccgttacaatgcctatccttcagagcaagaaaaagcgttgctgtcccagcaaacacacctgtctacgctacaggtctgtaactggttcatcaacgcccgccgcaggctcctccctgacatgctgagaaaggatggcaaagatccaaatcagttcacaatttcccgccgtggggccaagatttctgaaacgagctctgtggagtccgtgatgggcatcaaaaacttcatgccagctctagaggagaccccatttcattcctgtacagctgggccaaacccaaccctagggaggccactgtctcctaagccgtcatccccgggatcagttttggctcgtccatcagtgatctgccataccactgtgactgcattgaaagatgtccctttctctct

SEQ ID NO: 249955 - DNA, 861 bp, Artificial Sequence
  derived and/or modified sequence
atgacctgctccggaaagtcttgcgctctcgcccgatcttcactcacctcaagccaagggatcgtggccgcatctggctctgagactgaagatgaagactccatggatatcccattggatctgtcttcttctgcgggatccgggaagcgcaggagacgaggtaatctgcctaaggaaagtgtgcagatactgcgagattggttatacgagcatcgctataatgcctatcccagtgaacaggaaaaggccctgttgtctcagcagacgcacctgtctacgctgcaggtgtgcaattggttcatcaacgccaggcgacgcctgcttccagacatgctgaggaaagatggcaaggacccaaatcaatttactatatcgcgaagaggcgctaagatcagtgagaccagctccgtggaatccgtcatgggaattaagaattttatgccggctttagaggaaacgccattccattcatgtacagctggccctaaccccacactggggaggcccctgtcccctaagccatcaagtcctggatccgtcctggcacgcccttccgtgatatgtcacactacagtcactgcactcaaggacgtccctttctcactgtgtcagagcgtgggggtgggccagaatactgacattcaacaaatcgccgctaaaaattttaccgacacttctttgatgtaccccgaggatacctgtaagagcggaccttccacaaacacacagtcagggttatttaacacccccccaccaacccctccagacctaaaccaggacttttcaggctttcaactcctggtggacgtggccctcaaacgcgcagcagagatggaactgcaggctaagctgacagcctag

SEQ ID NO: 249956 - DNA, 861 bp, Artificial Sequence
  derived and/or modified sequence
atgacctgcagcggcaagagctgcgccctggccagaagcagcctgaccagcagccagggcatcgtggccgccagcggcagcgagaccgaggacgaggacagcatggacatccccctggacctgagcagcagcgccggcagcggcaagagaagaagaagaggcaacctgcccaaggagagcgtgcagatcctgagagactggctgtacgagcacagatacaacgcctaccccagcgagcaggagaaggccctgctgagccagcagacccacctgagcaccctgcaggtgtgcaactggttcatcaacgccagaagaagactgctgcccgacatgctgagaaaggacggcaaggaccccaaccagttcaccatcagcagaagaggcgccaagatcagcgagaccagcagcgtggagagcgtgatgggcatcaagaacttcatgcccgccctggaggagacccccttccacagctgcaccgccggccccaaccccaccctgggcagacccctgagccccaagcccagcagccccggcagcgtgctggccagacccagcgtgatctgccacaccaccgtgaccgccctgaaggacgtgcccttcagcctgtgccagagcgtgggcgtgggccagaacaccgacatccagcagatcgccgccaagaacttcaccgacaccagcctgatgtaccccgaggacacctgcaagagcggccccagcaccaacacccagagcggcctgttcaacacccccccccccaccccccccgacctgaaccaggacttcagcggcttccagctgctggtggacgtggccctgaagagagccgccgagatggagctgcaggccaagctgaccgcctag

SEQ ID NO: 249957 - protein, 406 aa, Artificial Sequence
  derived and/or modified sequence
MIHTNLKKKFSCCVLVFLLFAVICVWKEKKKGSYYDSFKLQTKEFQVLKSLGKLAMGSDSQSVSSSSTQDPHRGRQTLGSLRGLAKAKPEASFQVWNKDSSSKNLIPRLQKIWKNYLSMNKYKVSYKGPGPGIKFSAEALRCHLRDHVNVSMVEVTDFPFNTSEWEGYLPKESIRTKAGPWGRCAVVSSAGSLKSSQLGREIDDHDAVLRFNGAPTANFQQDVGTKTTIRLMNSQLVTTEKRFLKDSLYNEGILIVWDPSVYHSDIPKWYQNPDYNFFNNYKTYRKLHPNQPFYILKPQMPWELWDILQEISPEEIQPNPPSSGMLGIIIMMTLCDQVDIYEFLPSKRKTDVCYYYQKFFDSACTMGAYHPLLYEKNLVKHLNQGTDEDIYLLGKATLPGFRTIHC

SEQ ID NO: 249958 - protein, 75 aa, Artificial Sequence
  derived and/or modified sequence
MIHTNLKKKFSCCVLVFLLFAVICVWKEKKKGSYYDSFKLQTKEFQVLKSLGKLAMGSDSQSVSSSSTQDPHRGR

SEQ ID NO: 249959 - protein, 113 aa, Artificial Sequence
  derived and/or modified sequence
MIHTNLKKKFSCCVLVFLLFAVICVWKEKKKGSYYDSFKLQTKEFQVLKSLGKLAMGSDSQSVSSSSTQDPHRGRQTLGSLRGLAKAKPEASFQVWNKDSSSKNLIPRLQKIW

SEQ ID NO: 249960 - protein, 127 aa, Artificial Sequence
  derived and/or modified sequence
MIHTNLKKKFSCCVLVFLLFAVICVWKEKKKGSYYDSFKLQTKEFQVLKSLGKLAMGSDSQSVSSSSTQDPHRGRQTLGSLRGLAKAKPEASFQVWNKDSSSKNLIPRLQKIWKNYLSMNKYKVSYK

SEQ ID NO: 249961 - protein, 42 aa, Artificial Sequence
  derived and/or modified sequence
MIHTNLKKKFSCCVLVFLLFAVICVWKEKKKGSYYDSFKLQT

SEQ ID NO: 249962 - protein, 97 aa, Artificial Sequence
  derived and/or modified sequence
MIHTNLKKKFSCCVLVFLLFAVICVWKEKKKGSYYDSFKLQTKEFQVLKSLGKLAMGSDSQSVSSSSTQDPHRGRQTLGSLRGLAKAKPEASFQVWN

SEQ ID NO: 249963 - protein, 45 aa, Artificial Sequence
  derived and/or modified sequence
MIHTNLKKKFSCCVLVFLLFAVICVWKEKKKGSYYDSFKLQTKEF

SEQ ID NO: 249964 - protein, 91 aa, Artificial Sequence
  derived and/or modified sequence
MIHTNLKKKFSCCVLVFLLFAVICVWKEKKKGSYYDSFKLQTKEFQVLKSLGKLAMGSDSQSVSSSSTQDPHRGRQTLGSLRGLAKAKPEA

SEQ ID NO: 249965 - protein, 98 aa, Artificial Sequence
  derived and/or modified sequence
MIHTNLKKKFSCCVLVFLLFAVICVWKEKKKGSYYDSFKLQTKEFQVLKSLGKLAMGSDSQSVSSSSTQDPHRGRQTLGSLRGLAKAKPEASFQVWNK

SEQ ID NO: 249966 - protein, 175 aa, Artificial Sequence
  derived and/or modified sequence
MNSQLVTTEKRFLKDSLYNEGILIVWDPSVYHSDIPKWYQNPDYNFFNNYKTYRKLHPNQPFYILKPQMPWELWDILQEISPEEIQPNPPSSGMLGIIIMMTLCDQVDIYEFLPSKRKTDVCYYYQKFFDSACTMGAYHPLLYEKNLVKHLNQGTDEDIYLLGKATLPGFRTIHC

SEQ ID NO: 249967 - protein, 25 aa, Artificial Sequence
  derived and/or modified sequence
MIHTNLKKKFSCCVLVFLLFAVICV

SEQ ID NO: 249968 - DNA, 1221 bp, Artificial Sequence
  derived and/or modified sequence
atgatccacaccaacctgaagaagaagttcagctgctgcgtgctggtgttcctgctgttcgccgtgatctgcgtgtggaaggagaagaagaagggcagctactacgacagcttcaagctgcagaccaaggagttccaggtgctgaagagcctgggcaagctggccatgggcagcgacagccagagcgtgagcagcagcagcacccaggacccccacagaggcagacagaccctgggcagcctgagaggcctggccaaggccaagcccgaggccagcttccaggtgtggaacaaggacagcagcagcaagaacctgatccccagactgcagaagatctggaagaactacctgagcatgaacaagtacaaggtgagctacaagggccccggccccggcatcaagttcagcgccgaggccctgagatgccacctgagagaccacgtgaacgtgagcatggtggaggtgaccgacttccccttcaacaccagcgagtgggagggctacctgcccaaggagagcatcagaaccaaggccggcccctggggcagatgcgccgtggtgagcagcgccggcagcctgaagagcagccagctgggcagagagatcgacgaccacgacgccgtgctgagattcaacggcgcccccaccgccaacttccagcaggacgtgggcaccaagaccaccatcagactgatgaacagccagctggtgaccaccgagaagagattcctgaaggacagcctgtacaacgagggcatcctgatcgtgtgggaccccagcgtgtaccacagcgacatccccaagtggtaccagaaccccgactacaacttcttcaacaactacaagacctacagaaagctgcaccccaaccagcccttctacatcctgaagccccagatgccctgggagctgtgggacatcctgcaggagatcagccccgaggagatccagcccaacccccccagcagcggcatgctgggcatcatcatcatgatgaccctgtgcgaccaggtggacatctacgagttcctgcccagcaagagaaagaccgacgtgtgctactactaccagaagttcttcgacagcgcctgcaccatgggcgcctaccaccccctgctgtacgagaagaacctggtgaagcacctgaaccagggcaccgacgaggacatctacctgctgggcaaggccaccctgcccggcttcagaaccatccactgctag

SEQ ID NO: 249969 - DNA, 228 bp, Artificial Sequence
  derived and/or modified sequence
atgatccacaccaacctgaagaagaagttcagctgctgcgtgctggtgttcctgctgttcgccgtgatctgcgtgtggaaggagaagaagaagggcagctactacgacagcttcaagctgcagaccaaggagttccaggtgctgaagagcctgggcaagctggccatgggcagcgacagccagagcgtgagcagcagcagcacccaggacccccacagaggcagatag

SEQ ID NO: 249970 - DNA, 342 bp, Artificial Sequence
  derived and/or modified sequence
atgatccacaccaacctgaagaagaagttcagctgctgcgtgctggtgttcctgctgttcgccgtgatctgcgtgtggaaggagaagaagaagggcagctactacgacagcttcaagctgcagaccaaggagttccaggtgctgaagagcctgggcaagctggccatgggcagcgacagccagagcgtgagcagcagcagcacccaggacccccacagaggcagacagaccctgggcagcctgagaggcctggccaaggccaagcccgaggccagcttccaggtgtggaacaaggacagcagcagcaagaacctgatccccagactgcagaagatctggtag

SEQ ID NO: 249971 - DNA, 384 bp, Artificial Sequence
  derived and/or modified sequence
atgatccacaccaacctgaagaagaagttcagctgctgcgtgctggtgttcctgctgttcgccgtgatctgcgtgtggaaggagaagaagaagggcagctactacgacagcttcaagctgcagaccaaggagttccaggtgctgaagagcctgggcaagctggccatgggcagcgacagccagagcgtgagcagcagcagcacccaggacccccacagaggcagacagaccctgggcagcctgagaggcctggccaaggccaagcccgaggccagcttccaggtgtggaacaaggacagcagcagcaagaacctgatccccagactgcagaagatctggaagaactacctgagcatgaacaagtacaaggtgagctacaagtag

SEQ ID NO: 249972 - DNA, 129 bp, Artificial Sequence
  derived and/or modified sequence
atgatccacaccaacctgaagaagaagttcagctgctgcgtgctggtgttcctgctgttcgccgtgatctgcgtgtggaaggagaagaagaagggcagctactacgacagcttcaagctgcagacctag

SEQ ID NO: 249973 - DNA, 294 bp, Artificial Sequence
  derived and/or modified sequence
atgatccacaccaacctgaagaagaagttcagctgctgcgtgctggtgttcctgctgttcgccgtgatctgcgtgtggaaggagaagaagaagggcagctactacgacagcttcaagctgcagaccaaggagttccaggtgctgaagagcctgggcaagctggccatgggcagcgacagccagagcgtgagcagcagcagcacccaggacccccacagaggcagacagaccctgggcagcctgagaggcctggccaaggccaagcccgaggccagcttccaggtgtggaactag

SEQ ID NO: 249974 - DNA, 138 bp, Artificial Sequence
  derived and/or modified sequence
atgatccacaccaacctgaagaagaagttcagctgctgcgtgctggtgttcctgctgttcgccgtgatctgcgtgtggaaggagaagaagaagggcagctactacgacagcttcaagctgcagaccaaggagttctag

SEQ ID NO: 249975 - DNA, 276 bp, Artificial Sequence
  derived and/or modified sequence
atgatccacaccaacctgaagaagaagttcagctgctgcgtgctggtgttcctgctgttcgccgtgatctgcgtgtggaaggagaagaagaagggcagctactacgacagcttcaagctgcagaccaaggagttccaggtgctgaagagcctgggcaagctggccatgggcagcgacagccagagcgtgagcagcagcagcacccaggacccccacagaggcagacagaccctgggcagcctgagaggcctggccaaggccaagcccgaggcctag

SEQ ID NO: 249976 - DNA, 297 bp, Artificial Sequence
  derived and/or modified sequence
atgatccacaccaacctgaagaagaagttcagctgctgcgtgctggtgttcctgctgttcgccgtgatctgcgtgtggaaggagaagaagaagggcagctactacgacagcttcaagctgcagaccaaggagttccaggtgctgaagagcctgggcaagctggccatgggcagcgacagccagagcgtgagcagcagcagcacccaggacccccacagaggcagacagaccctgggcagcctgagaggcctggccaaggccaagcccgaggccagcttccaggtgtggaacaagtag

SEQ ID NO: 249977 - DNA, 78 bp, Artificial Sequence
  derived and/or modified sequence
atgatccacaccaacctgaagaagaagttcagctgctgcgtgctggtgttcctgctgttcgccgtgatctgcgtgtag

SEQ ID NO: 249978 - DNA, 1221 bp, Artificial Sequence
  derived and/or modified sequence
atgatacacacaaaccttaaaaagaaattttcttgctgcgtgctcgtgttcctgctttttgctgtgatctgcgtgtggaaagaaaagaaaaagggaagttactatgacagcttcaaattacagaccaaggagtttcaggtgttaaaatcattaggaaaactggcaatgggatctgattcacagtccgtgtcctcgtcatccacccaggatcctcaccgcggccgtcaaacgctcgggtccttgcgcggactggcgaaagcaaaaccagaggcctcctttcaggtttggaataaagatagctccagtaaaaatctaattcctcgcctccaaaagatctggaaaaactacttgagcatgaataagtacaaagtatcatacaaaggccctggtcccggcattaaattctccgccgaggctttacggtgtcacctgagggatcacgtgaatgtatctatggtggaggtcaccgattttccctttaatacatctgagtgggagggttacttgcctaaagaaagcattcggacgaaagcagggccatggggccggtgcgccgttgtgtcttctgccggctctttaaagtccagccagttggggcgagagattgacgaccatgacgccgtcctgagattcaacggcgcccctactgctaactttcagcaggacgttggcaccaagactacaattcgattaatgaattctcaacttgtgacaaccgagaaaagattcctgaaggactccctgtacaacgagggtatactcattgtctgggatccgtctgtgtaccatagcgacattccaaaatggtaccagaacccagattataatttctttaataattataaaacttatcgtaagctccaccccaaccagcctttttatattctgaaaccacagatgccctgggagctctgggatatcctacaggaaatttccccagaagagatccagcccaaccccccatcaagtggcatgctgggtatcataattatgatgaccttatgtgatcaggtggatatttatgagtttctgccaagcaaaaggaaaaccgatgtgtgctactattaccaaaagtttttcgattctgcctgcacaatgggagcctatcatcctttactgtacgagaagaatctggtaaaacacctgaatcaaggcaccgatgaggatatttatctgctcggaaaggctaccctgcccgggtttcgaactattcattgctag

SEQ ID NO: 249979 - DNA, 228 bp, Artificial Sequence
  derived and/or modified sequence
atgattcacaccaatttaaagaagaaattctcctgttgcgtgctagttttcctactgtttgccgttatttgtgtctggaaagaaaagaaaaaaggtagttactatgactcgtttaaactccagacaaaggaatttcaggtgcttaaatctctgggaaaactggctatgggatcagactcccaaagtgtttccagctcttctacacaggatccacaccgaggacggtag

SEQ ID NO: 249980 - DNA, 342 bp, Artificial Sequence
  derived and/or modified sequence
atgattcacactaatctaaagaaaaagtttagctgctgtgtgctcgtctttctgctcttcgcagtaatctgcgtgtggaaggaaaagaaaaaagggtcatactatgatagtttcaaacttcaaacaaaagagttccaggttctgaaatcccttgggaagttagcgatgggctctgactctcagagcgtaagttccagctcaactcaggacccacacagggggagacagaccctgggcagtctgcggggcctcgccaaggccaagccagaggcaagcttccaggtttggaacaaagattccagttcaaaaaatctcatacccaggctgcagaagatatggtag

SEQ ID NO: 249981 - DNA, 384 bp, Artificial Sequence
  derived and/or modified sequence
atgatccacacaaacctaaagaaaaaattttcctgctgtgtgctcgtttttctgttgtttgcggtgatatgcgtgtggaaagagaagaagaagggcagctactacgacagctttaagctccaaaccaaggagttccaggtactgaaaagtctgggaaagctagccatgggctcagactcccagtctgtgtcgtcctcttccactcaggaccctcacaggggccgccaaactttgggatcactgcgaggactggctaaggcaaagcccgaagccagtttccaagtatggaacaaggatagtagctccaaaaatttgatcccacggctgcaaaagatatggaaaaactacctgagtatgaacaagtataaggttagctacaaatag

SEQ ID NO: 249982 - DNA, 129 bp, Artificial Sequence
  derived and/or modified sequence
atgattcacactaatttaaagaagaagttttcatgctgtgtcttggttttcctgctattcgccgtcatctgtgtgtggaaggaaaagaaaaaggggtcttactacgactcattcaaactgcagacgtag

SEQ ID NO: 249983 - DNA, 294 bp, Artificial Sequence
  derived and/or modified sequence
atgatccacactaatctgaaaaagaagtttagctgctgcgtgctcgtgtttctactttttgccgtgatctgtgtttggaaagagaagaagaaaggaagttactatgacagtttcaagctgcagaccaaagagtttcaggtgctgaaatcattgggcaagctggccatgggctccgattctcaatctgtcagttcctctagcacccaggacccccatagaggacgacagacattgggtagcctgaggggcttagctaaggctaagccagaggcttcgttccaggtgtggaactag

SEQ ID NO: 249984 - DNA, 138 bp, Artificial Sequence
  derived and/or modified sequence
atgattcacacgaacttaaagaaaaagttttcctgctgcgttctcgtcttcctgctgtttgcagtgatatgcgtctggaaggagaagaaaaaaggctcctattatgatagcttcaaactgcaaaccaaggagttttag

SEQ ID NO: 249985 - DNA, 276 bp, Artificial Sequence
  derived and/or modified sequence
atgatacatactaaccttaaaaagaagttctcctgttgcgtcctagtgttcctgctctttgcagtaatttgtgtctggaaggagaaaaagaaaggttcctattacgacagcttcaagctccagacgaaggagtttcaggttttgaagagcttagggaaattagcaatggggagcgatagccaatctgtctctagttcctccactcaagatcctcacagaggcagacagactctcggttccctccgcgggctagccaaagccaagccagaagcctag

SEQ ID NO: 249986 - DNA, 1221 bp, Artificial Sequence
  derived and/or modified sequence
atgatacacactaatctgaagaagaaattttcgtgttgcgtgcttgtctttctgttgtttgctgtgatatgcgtctggaaagagaaaaagaagggttcttactacgattcgtttaaactccaaacaaaggaattccaggtgctaaagtctcttggcaaactagctatggggagcgacagccaatcagtgagctcctcctcaacacaagatcctcaccggggacgccaaacgttaggtagcctccgcgggctggccaaagctaaacctgaagcctctttccaggtctggaacaaggacagctcctcaaaaaaccttataccccgtctgcagaaaatctggaaaaactacctttccatgaacaaatacaaggtttcttataaagggccgggaccaggaataaagttttcggccgaggcccttcggtgtcacttaagagaccacgtcaatgtgtcaatggtggaggtgaccgacttcccgttcaacacaagtgaatgggagggctatctacctaaagagtcaataagaactaaggctggcccttgggggcggtgcgccgtcgtgtcatctgccggaagcctcaaatcatctcaactggggagggaaatagatgaccatgacgccgtgctccgcttcaacggcgctccaaccgcaaacttccagcaggacgtgggaaccaagactaccattagacttatgaattcccagttagttacaacagagaaaagattccttaaggatagtttatataacgagggcatcctaatcgtttgggatccgagcgtttaccactccgacattcccaaatggtatcaaaatcccgactacaatttctttaataactataagacttaccggaagctacaccccaatcagcccttttacattctgaaaccccaaatgccctgggaactgtgggatatcctgcaggaaatttcacctgaggaaattcagccgaacccaccatcatccgggatgctcggtattatcattatgatgaccctgtgtgatcaggtggacatttacgaattcttaccctccaagcggaagaccgacgtttgctactattaccagaaatttttcgactccgcatgcactatgggagcataccatccattgctgtacgagaagaatctagtaaaacatcttaatcagggaaccgatgaagatatttacctgctaggcaaggctacgctcccaggtttccgcacgattcactgttag

SEQ ID NO: 249987 - DNA, 297 bp, Artificial Sequence
  derived and/or modified sequence
atgatccatactaacctgaagaagaagttctcctgctgtgtgctggtctttctcttgttcgcagtgatctgtgtatggaaggaaaaaaagaaaggatcttactacgattcctttaagcttcagaccaaagaatttcaagtcctgaaatctctcggaaaactcgcgatgggatccgatagtcagagcgtgtcatcatccagcactcaggacccacaccgcgggcgccaaaccctcggcagcctgcgtggccttgccaaagccaaacctgaggcgtctttccaggtttggaataaatag

SEQ ID NO: 249988 - DNA, 78 bp, Artificial Sequence
  derived and/or modified sequence
atgattcatacaaacttgaaaaaaaagtttagttgctgcgtgcttgtgttcctcctcttcgccgtgatctgcgtctag

SEQ ID NO: 249989 - DNA, 1221 bp, Artificial Sequence
  derived and/or modified sequence
atgatccacaccaacctgaagaagaagttcagctgctgcgtgctggtgttcctgctgtttgctgtgatctgtgtgtggaaggagaagaagaagggcagctactatgacagcttcaagctgcagaccaaggagttccaggtgctgaagagcctgggcaagctggccatgggcagtgacagccagagcgtgagcagcagcagcacccaggacccccaccggggccggcagaccctgggcagcctgcggggcctggccaaggccaagccagaggccagcttccaggtgtggaacaaggacagcagcagcaagaacctgatcccccggctgcagaagatctggaagaactacctgtccatgaacaagtacaaggtgtcctacaagggccctggccctggcatcaagttctctgctgaggccctgcgctgccacctgcgggaccacgtgaatgtgtccatggtggaggtgacagacttccccttcaacaccagcgagtgggagggctacctgcccaaggagagcatccgcaccaaggccggcccctggggccgctgtgctgtggtgtcctctgctggcagcctgaagagcagccagctgggccgggagattgatgaccatgatgctgtgctgcgcttcaacggggcccccacagccaacttccagcaggatgtgggcaccaagaccaccatccggctgatgaacagccagctggtgaccacagagaagcgcttcctgaaggacagcctgtacaatgaaggcatcctgattgtgtgggaccccagcgtgtaccacagcgacatccccaagtggtaccagaacccagactacaacttcttcaacaactacaagacctacaggaagctgcaccccaaccagcccttctacatcctgaagccccagatgccctgggagctgtgggacatcctgcaggagatcagccctgaggagatccagcccaacccccccagcagcggcatgctgggcatcatcatcatgatgaccctgtgtgaccaggtggacatctatgagttcctgcccagcaagaggaagacagatgtgtgctactactaccagaagttctttgacagcgcctgcaccatgggcgcctaccaccccctgctgtatgagaagaacctggtgaagcacctgaaccagggcacagatgaggacatctacctgctgggcaaggccaccctgcccggcttccgcaccatccactgctag

SEQ ID NO: 249990 - DNA, 228 bp, Artificial Sequence
  derived and/or modified sequence
atgatccacaccaacctgaagaagaagttcagctgctgcgtgctggtgttcctgctgtttgctgtgatctgtgtgtggaaggagaagaagaagggcagctactatgacagcttcaagctgcagaccaaggagttccaggtgctgaagagcctgggcaagctggccatgggcagtgacagccagagcgtgagcagcagcagcacccaggacccccaccggggccgctag

SEQ ID NO: 249991 - DNA, 342 bp, Artificial Sequence
  derived and/or modified sequence
atgatccacaccaacctgaagaagaagttcagctgctgcgtgctggtgttcctgctgtttgctgtgatctgtgtgtggaaggagaagaagaagggcagctactatgacagcttcaagctgcagaccaaggagttccaggtgctgaagagcctgggcaagctggccatgggcagtgacagccagagcgtgagcagcagcagcacccaggacccccaccggggccggcagaccctgggcagcctgcggggcctggccaaggccaagccagaggccagcttccaggtgtggaacaaggacagcagcagcaagaacctgatcccccggctgcagaagatctggtag

SEQ ID NO: 249992 - DNA, 384 bp, Artificial Sequence
  derived and/or modified sequence
atgatccacaccaacctgaagaagaagttcagctgctgcgtgctggtgttcctgctgtttgctgtgatctgtgtgtggaaggagaagaagaagggcagctactatgacagcttcaagctgcagaccaaggagttccaggtgctgaagagcctgggcaagctggccatgggcagtgacagccagagcgtgagcagcagcagcacccaggacccccaccggggccggcagaccctgggcagcctgcggggcctggccaaggccaagccagaggccagcttccaggtgtggaacaaggacagcagcagcaagaacctgatcccccggctgcagaagatctggaagaactacctgtccatgaacaagtacaaggtgtcctacaagtag

SEQ ID NO: 249993 - DNA, 129 bp, Artificial Sequence
  derived and/or modified sequence
atgatccacaccaacctgaagaagaagttcagctgctgcgtgctggtgttcctgctgtttgctgtgatctgtgtgtggaaggagaagaagaagggcagctactatgacagcttcaagctgcagacctag

SEQ ID NO: 249994 - DNA, 294 bp, Artificial Sequence
  derived and/or modified sequence
atgatccacaccaacctgaagaagaagttcagctgctgcgtgctggtgttcctgctgtttgctgtgatctgtgtgtggaaggagaagaagaagggcagctactatgacagcttcaagctgcagaccaaggagttccaggtgctgaagagcctgggcaagctggccatgggcagtgacagccagagcgtgagcagcagcagcacccaggacccccaccggggccggcagaccctgggcagcctgcggggcctggccaaggccaagccagaggccagcttccaggtgtggaactag

SEQ ID NO: 249995 - DNA, 138 bp, Artificial Sequence
  derived and/or modified sequence
atgatccacaccaacctgaagaagaagttcagctgctgcgtgctggtgttcctgctgtttgctgtgatctgtgtgtggaaggagaagaagaagggcagctactatgacagcttcaagctgcagaccaaggagttctag

SEQ ID NO: 249996 - DNA, 276 bp, Artificial Sequence
  derived and/or modified sequence
atgatccacaccaacctgaagaagaagttcagctgctgcgtgctggtgttcctgctgtttgctgtgatctgtgtgtggaaggagaagaagaagggcagctactatgacagcttcaagctgcagaccaaggagttccaggtgctgaagagcctgggcaagctggccatgggcagtgacagccagagcgtgagcagcagcagcacccaggacccccaccggggccggcagaccctgggcagcctgcggggcctggccaaggccaagccagaggcctag

SEQ ID NO: 249997 - DNA, 297 bp, Artificial Sequence
  derived and/or modified sequence
atgatccacaccaacctgaagaagaagttcagctgctgcgtgctggtgttcctgctgtttgctgtgatctgtgtgtggaaggagaagaagaagggcagctactatgacagcttcaagctgcagaccaaggagttccaggtgctgaagagcctgggcaagctggccatgggcagtgacagccagagcgtgagcagcagcagcacccaggacccccaccggggccggcagaccctgggcagcctgcggggcctggccaaggccaagccagaggccagcttccaggtgtggaacaagtag

SEQ ID NO: 249998 - DNA, 78 bp, Artificial Sequence
  derived and/or modified sequence
atgatccacaccaacctgaagaagaagttcagctgctgcgtgctggtgttcctgctgtttgctgtgatctgtgtgtag

SEQ ID NO: 249999 - DNA, 1221 bp, Artificial Sequence
  derived and/or modified sequence
atgatccacaccaacctgaagaagaagttcagctgctgcgtgctggtctttctgctctttgcggtgatctgtgtgtggaaagagaaaaagaagggttcctattatgactcttttaagctccagacaaaagagtttcaggtgctgaagtctcttggaaaacttgccatgggtagtgattcacagtccgtgagcagcagcagcacacaggacccccaccgtgggaggcagaccctcggctccctaagaggcctggcaaaggccaaacctgaggcatcctttcaggtgtggaataaagattcctcaagcaagaacctcatcccccgcttacagaagatctggaagaattacctttcgatgaacaaatacaaggtctcttacaagggcccaggtcccgggataaagtttagcgccgaagccctcaggtgtcacttgagagaccacgtgaatgtcagcatggttgaggtgacagactttccatttaataccagtgaatgggagggatacctccctaaagagtcaatcaggacaaaggctggtccttggggcaggtgcgcggtcgtcagcagtgccggcagcttgaagtctagtcagttaggacgagaaatcgatgaccacgatgccgtgcttcggttcaacggggcaccaacagcgaatttccaacaggatgtgggcaccaaaaccactattagactaatgaattcccagctggttactacagagaagcggttccttaaagatagcttatataatgaaggaatactcatcgtgtgggatccctcagtctaccactccgacatccccaaatggtaccagaatcccgactacaatttctttaacaactacaaaacctataggaaactacaccccaaccagccattctacattttgaaaccacagatgccatgggagttatgggatattctgcaggagatctcccccgaggagattcagcccaaccctccctctagcggtatgctaggtatcattattatgatgaccctttgtgatcaggtcgatatctatgagtttctgcccagcaaacgcaaaactgatgtctgctattattatcaaaaattctttgattctgcctgtaccatgggagcttaccacccactgttatacgagaagaatctggtgaaacatttgaatcagggaactgatgaggatatttatctcctaggcaaagccaccctacccggctttagaacgattcactgctag

SEQ ID NO: 250000 - DNA, 228 bp, Artificial Sequence
  derived and/or modified sequence
atgatccacaccaacctgaagaagaagttcagctgctgcgtgctggtgtttctcctcttcgctgtcatttgtgtgtggaaggaaaagaaaaagggatcctattatgattcttttaagctgcaaacgaaggaattccaggttttgaaaagcctcggtaaactggctatggggagtgactcacagagcgtgagtagctcaagcacccaagatcctcaccgcggacggtag

SEQ ID NO: 250001 - DNA, 342 bp, Artificial Sequence
  derived and/or modified sequence
atgatccacaccaacctgaagaagaagttcagctgctgcgtgctggtgtttctgctgtttgcagttatatgcgtatggaaggaaaagaaaaaagggtcctactacgacagcttcaaactacagaccaaggaatttcaggttctaaagtccctcggaaagttagccatgggtagcgactcacagagcgtgtcaagctcgtcaacacaggaccctcaccgaggtcgccagaccctgggttcactccgcggcctagcaaaagccaaaccagaggcctcattccaggtgtggaacaaggacagctccagtaagaacctgattcccaggctccaaaaaatatggtag

SEQ ID NO: 250002 - DNA, 384 bp, Artificial Sequence
  derived and/or modified sequence
atgatccacaccaacctgaagaagaagttcagctgctgcgtgctggtcttcctgctcttcgcagtgatctgcgtctggaaggaaaaaaaaaaaggctcctattacgacagctttaaactgcagacaaaagagtttcaagttttgaagtcactcggaaagttggcgatgggttccgacagccagagcgtgagctcatctagcacacaagatccccaccgcggacgccagaccctgggctcactccgcggtcttgcaaaagctaaacccgaagcgagcttccaggtctggaacaaggatagctcaagtaagaaccttattcccagactccaaaagatctggaagaactacttgtctatgaataaatataaggtgtcttataaatag

SEQ ID NO: 250003 - DNA, 129 bp, Artificial Sequence
  derived and/or modified sequence
atgatccacaccaacctgaagaagaagttcagctgctgcgtgctggtgtttctgctatttgccgttatctgcgtttggaaagaaaagaagaagggctcatactatgattccttcaaactgcagacctag

SEQ ID NO: 250004 - DNA, 294 bp, Artificial Sequence
  derived and/or modified sequence
atgatccacaccaacctgaagaagaagttcagctgctgcgtgctggtctttctcctgtttgccgtaatctgcgtatggaaagaaaagaagaagggctcctactacgactcctttaagctgcagacaaaggagttccaggtcctgaagtcactgggaaaactggccatgggctctgatagtcaaagtgtcagctcctctagtacccaggatccacacagggggagacagactctaggctccctgcgcggcctggcaaaagctaaaccagaagccagttttcaggtgtggaactag

SEQ ID NO: 250005 - DNA, 138 bp, Artificial Sequence
  derived and/or modified sequence
atgatccacaccaacctgaagaagaagttcagctgctgcgtgctggtgttcttgctctttgccgtgatttgtgtgtggaaggaaaagaaaaaagggagttactatgactccttcaaactgcagacaaaagagttttag

SEQ ID NO: 250006 - DNA, 276 bp, Artificial Sequence
  derived and/or modified sequence
atgatccacaccaacctgaagaagaagttcagctgctgcgtgctggtcttcctgctttttgcagtcatttgcgtgtggaaagaaaaaaaaaaaggctcatactacgactcctttaagctgcagactaaagagtttcaagtcctgaagtcactgggaaaactcgctatgggaagtgatagccagtccgtgtccagttccagcactcaggatccccatcgcggtcgtcaaaccttgggctccctcaggggattggccaaagctaagcctgaagcctag

SEQ ID NO: 250007 - DNA, 1221 bp, Artificial Sequence
  derived and/or modified sequence
atgatccacaccaacctgaagaagaagttcagctgctgcgtgctggtgttcttactgtttgctgtgatatgtgtatggaaggagaagaagaaaggaagctactatgattcttttaaactccaaaccaaggaattccaggtgctcaagtcactggggaaattggctatgggctcagattctcaatccgtgtcatccagcagcactcaggatccgcaccgcgggcgccagacgctgggttcattgaggggcctggctaaagccaagcctgaggccagcttccaggtgtggaacaaagactcttcgtcaaagaatctgattccacggctgcagaagatatggaaaaactacctgtcgatgaacaagtacaaggtttcatacaagggtccaggccccggaataaaatttagcgctgaggccctgcggtgccaccttagagaccacgtaaacgtgagcatggttgaggtaacagatttcccgttcaacacatctgaatgggaaggctacttacccaaggagagcatcaggacaaaggcgggcccctgggggaggtgtgccgtggtgtcaagtgctggaagcctgaagagctcgcagctggggcgcgagatagatgatcacgacgccgtcttgaggtttaatggtgctccaactgccaactttcagcaggacgtgggcacaaaaactactattagactgatgaattcgcagttggtgaccactgagaagcgttttcttaaggatagtctgtacaatgaaggtatacttatagtttgggacccctcagtgtaccactccgatatacctaaatggtaccaaaatcccgattataattttttcaacaattacaagacctaccggaaacttcatcctaaccagccattctatattttgaaacctcagatgccatgggaactgtgggatattctgcaggagatttcaccagaagagatccagcccaaccccccttcttcagggatgctgggtattatcattatgatgaccctgtgcgatcaggtggacatttatgagtttctgccatccaaacgtaagaccgatgtttgctattactatcagaagttcttcgacagcgcctgtacgatgggcgcttaccaccctcttctgtacgagaagaacctagtgaaacacctgaaccagggcacagacgaggatatctatctgctgggaaaggctaccctgccaggatttaggacaatccattgctag

SEQ ID NO: 250008 - DNA, 297 bp, Artificial Sequence
  derived and/or modified sequence
atgatccacaccaacctgaagaagaagttcagctgctgcgtgctggtgtttctcctctttgccgttatatgcgtttggaaggaaaagaagaaaggaagctactacgactctttcaagctgcagactaaggaattccaggtgctgaagagcttgggcaaattagccatgggctccgacagccagagcgtaagctcctctagtacacaggatccgcatcgcggcagacagacactgggttcactgagagggctcgctaaggcaaaacccgaggcctctttccaggtatggaataagtag

SEQ ID NO: 250009 - DNA, 78 bp, Artificial Sequence
  derived and/or modified sequence
atgatccacaccaacctgaagaagaagttcagctgctgcgtgctggtttttttgctgtttgcagttatatgtgtgtag

SEQ ID NO: 250010 - DNA, 1221 bp, Artificial Sequence
  derived and/or modified sequence
atgattcatactaacctgaaaaagaaattctcgtgttgcgtgctggtgtttctactgtttgctgtcatttgcgtgtggaaggaaaagaagaagggttcgtactacgattcattcaagcttcaaactaaggagttccaggtgctcaagtctctcgggaaactcgctatggggtctgactcccagagcgtttccagtagctccacacaggacccccacagaggcaggcaaacgctaggtagcctgcgaggcctggctaaggcaaaacctgaggcatcatttcaagtgtggaataaagatagctcctcgaaaaatctcatccctcgattacaaaagatttggaaaaactacttatcaatgaataaatacaaggtgagctataagggcccaggacccggtatcaagttcagcgctgaggccctccgatgccacctacgcgaccacgttaatgtgtctatggtagaagttacagatttccctttcaacacttcggagtgggagggctatttgcctaaagagtccatcaggactaaagccggtccatgggggagatgtgctgtggttagcagcgccggtagtctcaaatcctcgcagctgggcagagagatcgacgaccacgatgctgttctgcggttcaacggagctcctactgccaatttccagcaggatgtcggtacgaaaactacaatcagactgatgaatagtcagctcgtcaccacagagaaacggttcttgaaggattccctatacaatgagggcattctgattgtgtgggacccatcagtataccactcagatatccctaagtggtaccagaaccccgattataacttcttcaataattacaagacatatcgcaagttgcaccccaatcagcccttttacatactgaagcctcagatgccatgggaactgtgggacattctacaggagatcagccccgaggaaatacagcctaaccccccatcctccgggatgctcggaatcattatcatgatgacactgtgcgatcaggtggacatttatgagtttctcccaagcaaacgtaagacagatgtatgttattactaccaaaagttctttgactcagcctgcacaatgggcgcataccaccccctgctgtacgaaaagaatttggttaaacacctgaatcagggtaccgatgaagacatttatctgctgggaaaagccacactgcctgggtttaggaccattcattgttag

SEQ ID NO: 250011 - DNA, 228 bp, Artificial Sequence
  derived and/or modified sequence
atgatacacaccaacctcaaaaagaagttctcatgctgtgttctggtcttcctgctgtttgctgtgatttgcgtgtggaaagagaaaaaaaagggctcctactatgatagtttcaagctccaaacaaaagagttccaggtgctgaagtctctcgggaagttggcaatgggatccgactcccagtcggtttctagctcgagtacacaagaccctcataggggcagatag

SEQ ID NO: 250012 - DNA, 342 bp, Artificial Sequence
  derived and/or modified sequence
atgatccataccaatctcaaaaagaagttttcttgttgcgtgcttgtgtttttgcttttcgctgtaatttgcgtgtggaaggaaaagaagaagggaagttactatgacagcttcaagctgcagactaaagagtttcaagtgttaaaatctctcggaaagcttgccatgggcagtgacagccagtcagtgtccagttctagcacccaggatccccatcgaggtcgtcagactctgggctcacttaggggattagccaaagcaaaaccagaagcttcctttcaggtgtggaacaaagacagcagctccaagaatctcattccacggttacaaaagatttggtag

SEQ ID NO: 250013 - DNA, 384 bp, Artificial Sequence
  derived and/or modified sequence
atgatacacaccaacctgaaaaagaagtttagctgctgcgtcctcgttttcttgctgtttgctgttatctgtgtttggaaggagaagaagaaaggaagctactatgacagcttcaagctgcagacaaaagagttccaggtgctgaagtctctgggtaagctcgctatgggatctgattctcagtccgtatcttcgtccagcactcaggatccccaccgcggtaggcagacattaggctcactccgcggtcttgccaaggcaaagccggaggcctctttccaggtgtggaacaaggactcaagttcaaagaacctgatacctcgactgcagaaaatctggaagaattatctgtccatgaataaatacaaagtctcttataaatag

SEQ ID NO: 250014 - DNA, 129 bp, Artificial Sequence
  derived and/or modified sequence
atgatccataccaacctcaagaaaaagttctcatgctgtgtattggtcttcctcctgtttgctgtgatctgtgtgtggaaggagaagaaaaagggttcttactatgactctttcaagctccagacttag

SEQ ID NO: 250015 - DNA, 294 bp, Artificial Sequence
  derived and/or modified sequence
atgatccataccaatctgaaaaagaagttcagttgctgcgtgctggtcttcctgctgttcgccgtgatttgcgtatggaaggagaaaaaaaagggatcatactacgattcatttaaacttcagacaaaggagtttcaggttctgaaatcgctgggaaagctcgcaatggggtcagacagccagagcgtcagcagtagctctacccaggatccgcatagagggaggcagacattgggctccctgcggggtctggctaaggctaagcccgaggcatctttccaagtgtggaattag

SEQ ID NO: 250016 - DNA, 138 bp, Artificial Sequence
  derived and/or modified sequence
atgatacacaccaatctaaagaaaaagttttcttgctgcgttctcgtgttcctcctgttcgctgtgatttgcgtgtggaaggagaagaagaaaggatcatattatgattcattcaagctgcagacaaaggagttctag

SEQ ID NO: 250017 - DNA, 276 bp, Artificial Sequence
  derived and/or modified sequence
atgatccacaccaacctgaagaagaagttctcctgctgtgtcctggtcttcctcctctttgctgttatctgtgtgtggaaagagaagaagaaaggatcatattatgactcgtttaaactccagaccaaagagtttcaggtcctcaagagcctgggcaaattagctatgggatcagactcacaatctgtgagttcatccagcacccaagacccgcaccgcggtagacagaccctaggcagtttgaggggtctggcaaaggctaaacctgaagcctag

SEQ ID NO: 250018 - DNA, 1221 bp, Artificial Sequence
  derived and/or modified sequence
atgatccatacaaaccttaagaaaaagttctcatgttgcgtgctagtgtttctactgttcgcggtgatctgcgtgtggaaggagaagaaaaagggaagctactatgactcattcaagctccaaacaaaggaatttcaggtgcttaagagcctgggaaaattagccatggggtccgattcccagagcgtgagttcatcctccactcaagatccacacaggggccgtcagaccctgggaagtctgcgcggattagccaaagcaaagcccgaggccagcttccaggtctggaataaagacagctcaagtaagaacttaattccccgattacaaaagatttggaaaaactacctctccatgaataagtacaaggtgtcttacaaagggcctgggcctggaataaagttcagtgctgaggcactgcggtgccacctgagggatcacgtcaatgtgtctatggtggaggtaacggatttcccgtttaacacatccgagtgggaaggatacctccctaaagagagcattcgaacaaaagcaggtccctggggtaggtgtgcagtggttagttctgcgggaagtttaaagtcttcccagttgggcagagaaatcgacgatcacgacgccgtgcttaggtttaacggtgccccaaccgccaatttccagcaagacgtaggtactaaaactaccatccgattgatgaactcccaactggttactaccgagaagcgctttctgaaggactccctgtacaacgaaggcattctgattgtgtgggatccatcagtctatcattctgatattcccaagtggtaccagaatccggattataattttttcaataactacaaaacttacagaaagctgcaccctaaccagcctttctatatcttaaagccccagatgccatgggagctatgggacatcttacaggagatctcgcccgaagagattcagcccaatcctccctccagcggaatgctgggaattataataatgatgacactgtgcgaccaggtggacatctacgaattcctgcctagcaagcggaagaccgatgtctgttactactaccagaaattctttgactctgcatgcacgatgggcgcttaccatcccctgctctacgagaagaatctggttaagcatctcaatcaggggacggatgaggatatatatcttctgggaaaagccactctgccagggttccggaccatccactgttag

SEQ ID NO: 250019 - DNA, 297 bp, Artificial Sequence
  derived and/or modified sequence
atgatccataccaatctcaaaaagaaatttagttgctgcgttctcgtgttcctgctgtttgccgttatttgtgtgtggaaggagaaaaagaagggcagctactacgacagttttaagcttcaaaccaaagagttccaagtgttgaagtcactaggcaaactagccatgggttcagactctcagagcgtgagttctagttccacccaggacccgcaccgcggtcggcagactcttggcagtcttcgcggtttggctaaagccaagcccgaggcgtcgtttcaggtgtggaacaagtag

SEQ ID NO: 250020 - DNA, 78 bp, Artificial Sequence
  derived and/or modified sequence
atgatccacacaaatctcaaaaagaagttctcatgttgtgtattggtgttcctcctgttcgccgtcatttgtgtatag

SEQ ID NO: 250021 - DNA, 1221 bp, Artificial Sequence
  derived and/or modified sequence
atgatccacacaaatctcaaaaagaagttctcgtgctgtgtgttggtgttcttgttatttgccgtcatctgcgtgtggaaggaaaagaagaagggcagttattatgactccttcaaattgcagacgaaagagtttcaggtattgaaatcgctcggaaagctggcaatggggtcagatagtcaatccgtcagctcgagttccacccaggatccccatagaggcagacaaaccttgggttccctacggggtctcgctaaggccaagcctgaagcctctttccaagtgtggaacaaggactccagcagtaagaatcttattcctagactccaaaaaatctggaagaattacttatcgatgaacaagtacaaggttagctacaaggggccaggtcctggcatcaaattttccgcagaggctctgagatgccatcttcgagaccacgttaacgtgtcgatggtggaagttacagactttcccttcaacaccagtgagtgggagggatatctcccaaaagaatccatcaggactaaagctgggccttgggggcgctgtgctgtggtgagctcggcaggttcccttaagagcagccagcttgggagagaaatcgacgatcacgacgccgttctccggtttaatggagctcccactgcaaactttcagcaggatgtaggcactaagactactatcagactgatgaactctcaattagtgacaacagagaagagatttttaaaagacagtctctataacgagggcatacttatcgtgtgggacccatcggtctaccactctgatattcccaaatggtatcaaaaccctgattataacttcttcaacaactataagacctatcgcaagctgcaccctaatcagccattttacatactcaaaccacaaatgccatgggagctgtgggatatacttcaagaaatctcgcccgaggagattcagcccaatccccctagtagtggtatgctggggattatcattatgatgacactgtgtgaccaagtcgatatttacgaattcctgccatctaaacgaaagaccgatgtttgttattattatcaaaagttttttgacagcgcctgcacaatgggagcctatcacccactgctgtatgagaagaatttggtgaagcacctcaatcaagggacagatgaagatatctacctacttggaaaggctacactgccaggatttcgcactatacattgttag

SEQ ID NO: 250022 - DNA, 228 bp, Artificial Sequence
  derived and/or modified sequence
atgatccatacaaatctaaaaaaaaaattttcttgctgtgtactagtgttcttgcttttcgctgtgatttgcgtgtggaaagagaagaaaaagggttcctattacgactcatttaagctacagacaaaagagttccaggtactaaaatcactggggaagttggccatgggatcagactcacagagtgtatcgtctagctcaactcaggatcctcatcgcggccgctag

SEQ ID NO: 250023 - DNA, 342 bp, Artificial Sequence
  derived and/or modified sequence
atgatccacactaatctgaaaaagaaattctcttgttgcgtgcttgtgttcttattattcgcagttatttgtgtgtggaaggaaaagaaaaagggatcttactacgacagttttaagctgcagacaaaggagtttcaggtgttaaagtcacttggtaaattggctatgggatccgactcacaatcagtatccagcagcagcacacaagacccacatagggggcgccagactctcggctctctgaggggtttggctaaggcaaaaccggaagcttcctttcaagtgtggaacaaagatagttcttctaaaaatttaattcctagacttcaaaaaatttggtag

SEQ ID NO: 250024 - DNA, 384 bp, Artificial Sequence
  derived and/or modified sequence
atgattcatactaacctcaaaaaaaagttctcttgttgtgtccttgtctttttactttttgccgtgatatgcgtctggaaagagaaaaagaaaggatcatactacgactcctttaaactccagacaaaagaatttcaagtgcttaagtctcttgggaaactcgcaatgggttcagattcccaatccgtttcctcatcctcaacccaggatcctcaccggggaagacagactctagggtccctccgtggcctggctaaggccaaacccgaggcaagctttcaagtgtggaacaaagacagctcttccaaaaacctgatacccagactccagaagatttggaagaattatctgagcatgaataagtataaggtgtcatacaagtag

SEQ ID NO: 250025 - DNA, 129 bp, Artificial Sequence
  derived and/or modified sequence
atgattcacaccaacctcaaaaagaagttctcttgctgcgttctcgtttttctcctgtttgccgttatttgtgtgtggaaagaaaaaaagaaaggaagctactacgacagtttcaaactgcagacctag

SEQ ID NO: 250026 - DNA, 294 bp, Artificial Sequence
  derived and/or modified sequence
atgatacatacaaacttaaaaaaaaagttcagttgttgtgtgctggttttcctcttattcgccgtgatctgcgtctggaaagagaaaaaaaaaggcagctattacgacagctttaaattgcagaccaaggagtttcaggtcctgaaatccctgggaaagttggcaatgggttcagattcacaaagcgtctctagctcctccacacaagatccccaccgaggccgtcagacactgggctccctgcgcggattggccaaagctaagccagaggcaagttttcaggtgtggaactag

SEQ ID NO: 250027 - DNA, 138 bp, Artificial Sequence
  derived and/or modified sequence
atgattcacacaaacctcaaaaaaaagttctcatgctgcgtcctcgtattcctgctgtttgccgtcatttgtgtttggaaggagaaaaaaaagggctcatactacgattcatttaagctccagactaaggaattttag

SEQ ID NO: 250028 - DNA, 276 bp, Artificial Sequence
  derived and/or modified sequence
atgatacacactaatttaaaaaaaaaatttagctgctgcgtactcgttttcctactatttgccgtgatttgcgtgtggaaagagaaaaagaaaggaagttattatgactcattcaagttacagaccaaagaatttcaggttttaaagtcactgggcaagctggctatgggctctgactcccagtccgtgtcaagttcttcaacacaagatccccaccggggcaggcagacgctgggttctctgcggggactcgccaaggccaagccagaggcttag

SEQ ID NO: 250029 - DNA, 1221 bp, Artificial Sequence
  derived and/or modified sequence
atgattcatacaaatcttaagaaaaagttttcatgctgcgtactggtgtttctcttgtttgctgtaatttgcgtttggaaagagaaaaaaaaggggtcctactacgacagcttcaagttacagacaaaggagtttcaagtgctgaagtcgctggggaagctggcaatgggaagtgattctcagagtgtgtctagcagctctacacaagacccccacagggggaggcagacactgggctccctccggggcttggcaaaagctaaacccgaagccagctttcaagtttggaataaggacagcagttcgaagaatctgatccctagactacaaaagatttggaagaattacttaagtatgaacaagtacaaagtgtcctacaagggtcccggacctggtatcaaattttctgcagaggctctgaggtgtcacctaagggatcatgtcaatgtctcaatggtggaggtgaccgatttccctttcaacacctccgagtgggaaggctatctcccaaaagagtccattcgcacaaaagcaggaccatggggacggtgcgcagtcgtgtcctccgcaggttccctcaaatcatctcagttgggtagagaaatagatgaccatgacgcagtgctccgcttcaacggcgcacctaccgccaactttcagcaagatgttggcactaagacaaccatcagactgatgaactcacagttggtgaccaccgagaaacgattccttaaagattcactatataacgaaggcatcctgatagtgtgggatccttcagtctatcatagcgacatcccaaaatggtaccaaaatcccgactacaacttttttaacaactacaagacttacaggaagctccaccctaaccagccattctatattttaaagccacagatgccctgggagctgtgggatatactgcaggagatctctcccgaagagatccaacccaaccctccttctagtggaatgctgggcattatcataatgatgaccctgtgcgatcaggttgacatctacgaattcctcccctctaaacgaaaaacagacgtttgctactactaccaaaagttttttgacagcgcttgtactatgggcgcctatcaccctctgctctatgaaaagaatctggtgaagcacctcaatcaagggaccgatgaagacatctatcttctggggaaggctactctgccggggttcagaacaattcactgttag

SEQ ID NO: 250030 - DNA, 297 bp, Artificial Sequence
  derived and/or modified sequence
atgatacatacgaatttaaaaaaaaagttcagttgttgtgtgctcgtttttttactgtttgcagtgatctgcgtttggaaagagaagaagaagggctcgtactatgactcatttaaacttcagaccaaagagtttcaggtcctgaagtcacttggtaaactggcaatgggtagcgattctcagagtgtctcatctagctccacacaggatccacataggggtaggcagacgctggggtcactaaggggacttgccaaggccaaacccgaagcctccttccaggtttggaataaatag

SEQ ID NO: 250031 - DNA, 78 bp, Artificial Sequence
  derived and/or modified sequence
atgatccatactaatctgaaaaaaaaattctcttgttgtgtcctcgtgtttctgctctttgctgtcatttgcgtgtag

SEQ ID NO: 250032 - DNA, 1221 bp, Artificial Sequence
  derived and/or modified sequence
atgatacacacaaatctgaaaaagaaattttcttgctgcgtgctggtgttcttactcttcgccgtgatctgcgtttggaaagagaaaaagaaaggctcctattacgacagttttaagttgcagaccaaagaattccaggtcctcaagtccctcgggaaactggctatgggatcagacagtcagtcggtaagctcaagttcaactcaggatcctcatcggggcaggcagacgctgggctcactccgaggtcttgcaaaggcaaagccagaggcaagctttcaggtgtggaataaggatagtagttctaagaacctcattcctcgtctacaaaaaatttggaagaactacctgagtatgaataagtataaagtttcctataaaggacccgggccaggcattaagttctccgccgaggcgctacggtgtcacctgcgagatcatgtgaacgtaagcatggtggaagtgaccgattttccatttaacacctcagagtgggagggatacctaccaaaagagtctatccggacaaaagcaggaccatggggtcgatgtgctgttgtgtcctcggccggcagcctgaagagctctcagttaggcagagaaattgacgaccatgacgctgttcttagatttaatggagcacccaccgccaattttcaacaagacgtaggtactaagacaactattagactcatgaatagccagctcgttactacagaaaagaggttcttgaaagactcactttataatgagggaattctgatcgtgtgggatcctagtgtatatcacagtgacattccgaagtggtatcagaaccccgactacaacttcttcaacaactataaaacatatcgcaagttgcacccaaatcagccattttatatactcaaacctcaaatgccctgggagctctgggatatactgcaagagattagtcctgaggagatccagcccaatccaccttcttccggcatgcttggaataatcattatgatgaccctgtgcgaccaagttgatatctacgaatttttgcctagcaaacggaaaactgatgtatgctactactatcagaaattcttcgacagcgcgtgtacgatgggcgcctaccaccctctgctatatgagaaaaatttagtgaagcatttgaaccagggaaccgatgaagatatctatctcttggggaaggccactttgcccggtttcaggacgattcattgctag

SEQ ID NO: 250033 - DNA, 342 bp, Artificial Sequence
  derived and/or modified sequence
atgatacacacaaacctcaaaaagaagttttcttgctgcgtcttagtttttctgctctttgccgtcatctgcgtgtggaaagaaaaaaagaagggtagctattacgatagttttaaactacagaccaaagaattccaggttttaaagagtcttggtaagcttgcaatgggctcggacagccagtcagtgagctcttcctccacccaggatcctcatcgcggaagacagactctgggttctttacgtggcctggccaaagcaaagcccgaggcctctttccaggtttggaacaaggacagctcttctaaaaatttaattcctagacttcaaaaaatttggtag

SEQ ID NO: 250034 - DNA, 384 bp, Artificial Sequence
  derived and/or modified sequence
atgattcatactaacctcaaaaaaaagttctcttgttgtgtccttgtctttttactttttgccgtgatatgcgtctggaaagagaaaaagaaaggatcatactacgactcctttaaactccagacaaaagaatttcaagtgcttaagtctcttgggaaactcgcaatgggttcagattcccaatccgtttcctcatcctcaacccaggatcctcaccggggaagacagactctagggtccctccgtggcctggctaaggccaaacccgaggcaagctttcaagtgtggaacaaagacagctcctccaaaaatctcatccctcgcctgcagaaaatatggaagaattatctcagcatgaacaagtacaaagtatcttataagtag

SEQ ID NO: 250035 - DNA, 1221 bp, Artificial Sequence
  derived and/or modified sequence
atgatacacactaatttaaagaagaagtttagctgctgcgtcctggtgttcttactgttcgcagtcatttgcgtgtggaaggaaaagaagaaagggtcctattacgattcattcaagctccaaaccaaggagtttcaggttctcaaaagtctcggtaagttggccatgggtagcgatagtcagagcgtttcatcttcttcaactcaagatccacaccgaggtagacaaacactggggtctctgcgtgggctcgctaaggccaaaccggaagccagctttcaggtgtggaacaaagactccagcagcaaaaacttaattccacgactccagaaaatctggaagaactacctctctatgaataagtacaaagtctcctataaaggcccaggccccggtatcaaattcagcgccgaagcactgcgttgccatctgcgcgaccatgtcaacgtcagtatggttgaggtgacagacttcccctttaacacttcggagtgggaaggctatttgcctaaagaaagcatccgtactaaagcaggaccttggggcaggtgtgccgtggtatcatccgccgggagtttaaagtcttctcaactcggccgtgaaatagacgaccatgatgccgtcctgcggtttaatggcgcccccacagccaattttcaacaggacgtgggaacgaagacaacaatccgcctcatgaattcacagctggtcaccacagaaaaacgctttcttaaagactcactgtataacgagggaattttgattgtgtgggaccccagtgtttatcacagcgacattccaaaatggtaccaaaacccagattataacttttttaacaactacaaaacctaccgaaaactgcatcccaatcagcccttttacatcttaaaaccccaaatgccatgggaattgtgggacatactgcaggagattagtcccgaagagatccaacctaacccaccgtccagcggcatgctaggaataataattatgatgaccttgtgcgatcaagtagacatctatgagttcttgccttccaagcgaaagacagatgtttgttactactatcaaaaattttttgacagcgcctgtaccatgggagcataccacccacttctgtacgagaagaatctggttaaacatctgaatcagggcaccgacgaggacatatacttactgggaaaagccacgctccctggctttaggaccattcattgctag

SEQ ID NO: 250036 - DNA, 4645 bp, Artificial Sequence
  derived and/or modified sequence
gcatacggaggcgactcgcttccttcccgcccctccgccgcgctcttcttccttccttctccagtcccttccactgtgcgtcttctgtcccccgttcttccccagcggacccctctttcgagactccctagtggggtccccagctcccgggcgatcctgcccttgccgagcgcgttttctggagtcacctgggggaggggagtcctgggcagggccgggctggggaagacgcctggggcactgcccggcgttaacaaagggagccgataccgaccggcgtgggcgcggagcgggcggccgccaccgagcgtgctgagcaaccgcagcctccgcggccgagagtgcagcgagcaaggggagagccagttgcgcagagccctgcaaccagcagtccagggagaagtggtgaatgtcatggagcccagctgaaatggactggcccccttgagcctgtcccaagccctggtgccaggtgtccatccccgtgctgagatgagttttgatcatcctgagaaaaatgggccttggcctgcagacccaataaaccttccctcccatggataatagtgctaattcctgaggacctgaagggcctgccgcccctgggggattagccagaagcaggcttgttttcctgctcagaacaaagtgacttccctgaacacatcttcattatgattcacaccaacctgaagaaaaagttcagctgctgcgtcctggtctttcttctgtttgcagtcatctgtgtgtggaaggaaaagaagaaagggagttactatgattcctttaaattgcaaaccaaggaattccaggtgttaaagagtctggggaaattggccatggggtctgattcccagtctgtatcctcaagcagcacccaggacccccacaggggccgccagaccctcggcagtctcagaggcctagccaaggccaaaccagaggcctccttccaggtgtggaacaaggacagctcttccaaaaaccttatccctaggctgcaaaagatctggaagaattacctaagcatgaacaagtacaaagtgtcctacaaggggccaggaccaggcatcaagttcagtgcagaggccctgcgctgccacctccgggaccatgtgaatgtatccatggtagaggtcacagattttcccttcaatacctctgaatgggagggttatctgcccaaggagagcattaggaccaaggctgggccttggggcaggtgtgctgttgtgtcgtcagcgggatctctgaagtcctcccaactaggcagagaaatcgatgatcatgacgcagtcctgaggtttaatggggcacccacagccaacttccaacaagatgtgggcacaaaaactaccattcgcctgatgaactctcagttggttaccacagagaagcgcttcctcaaagacagtttgtacaatgaaggaatcctaattgtatgggacccatctgtataccactcagatatcccaaagtggtaccagaatccggattataatttctttaacaactacaagacttatcgtaagctgcaccccaatcagcccttttacatcctcaagccccagatgccttgggagctatgggacattcttcaagaaatctccccagaagagattcagccaaaccccccatcctctgggatgcttggtatcatcatcatgatgacgctgtgtgaccaggtggatatttatgagttcctcccatccaagcgcaagactgacgtgtgctactactaccagaagttcttcgatagtgcctgcacgatgggtgcctaccacccgctgctctatgagaagaatttggtgaagcatctcaaccagggcacagatgaggacatctacctgcttggaaaagccacactgcctggcttccggaccattcactgctaagcacaggctcctcactcttctccatcaggcattaaatgaatggtctcttggccaccccagcctgggaagaacattttcctgaacaattccagcctgctccttttactctaggggcctctgtcagcaagaccatggggacttcaagagcctgtggtcaggaaatcaggtccagccttccctgtagccagacagtttatgagcccagagcctcctgccacacacatgcacacatatctagcattctttccagacagcatcctccccgccttccaccttggtagatgcaaggtctatctctcccatcagggctgccaaagctgggctttgtttttcccagcagaatgatgccattctcacaaaccaatgctctatattgcttgaagtctgcatctaaatattgatttcacgttttaaagaaattctcttaaattacaattgtgcccaatgcagggtggctctggggggcaagtaggtggtacaggggattggaaacatgctccgcgcctccagagaaaagttgctcccgaggtccatgcccctggaacgtgttcctatcactctggctggttgggctggtccttagactgggtgcttatgattaaagggtcttggttagcccactttccctctccatgtggagatggaaggtagagaaggatacagtgtctatcctcaagttgctacggttcagtgagagaggcagacatctgaacaggcaggtaggattcagtgtgctcagtgcactggggatttggagagagatgggcttgctctctctgtgcacccaggagggccacgcacttaaaactgtgtttgtggatcagagaaggctttatagcacagggggcattcagatgagtcttagaggaagagaagaaacatggcaagcagattacatctgagccgtttgaattgtgtttttctttcttcccatgtttattttctaagatctacctgaacttagagactcaagatatttttttaggaaacctcctacccatgtctgaggtagcaagtgcagcctcacgacagataccaggcaatccagagccacaaaacgtgattcctccaggctctgcctggcctgaccctgtcctgtcagctgggtttacataccagtcccattcttccttttcaatacctacccccaaatcttctcctaaccaccatctgttttttttttttaaagcattttttgctttaaaagcatcctgaccccaatttctttgagctcacgggccttttgctgaaggtctctcagggtgtagtggtgtggctctctggacttaacgtcactctcagaggtcagaaccttggagatcagaactgattctcaccaggtgtgagaggtgtggtagcagattgcaatgctctgcacctcttccttgcaagtgagcaacttcaggctctctgggcagaggctggcccactgtagtttgcagacatgctctccagatggttttactaagtcccctctccctgatagggaatcctgctggaccagcgcagccctggtgtggagaggttaaaagacttgcacaggatcaccaagtcatgctgtagagccaggattcctagacccagggctctgcactctcaaggctggccccatgtgctcaaggggatctaatgtttgggctccaaactaaccatctcggagctgggctcctcatttactgccaaaccctcagcttatgtagctagaaagggccctggagtgagaaagcctggattttcaaattgatgctcccctactgactagctgtgccactctgggcaaatgctcttccttgagcctgtttccacacctgtaaagtggggatgatgatcctatctcactgcttttgtgaggattacaggaaagcacctgtcctggctctgtacctggcacgtagtaggtgctcagttcatgctggtttccttcctgcctttagtagggacctgctctgtgctcacacctcggctgcatgcaccctgctgtgacggaggctagtgtggaagaggtcctgtcctcagggaattaactgtcttattgggagacaacaactgtcctccttggaacacccaagaaaccatgcaaagcagtggacaacacagaacacgccctcctcctcgctgcctgcagctccaatctgattctgcttgggaatgggcggagcacgtgggctgcttaactgctgtataggacaagccccttacccctctctgggcccatgaattcctggcttggtttatgttctgatttgacacactgattttaatcttcgaatcatgacactgagtgcagaggaggtggcattccgacagcaggacatacatgttggtgtgaagactgggacgacactgggtagaatctagtttttaattattattaatataaaggatcaaattaatttaaatatgattctgaagtctacagaacttttagttctgtgctgtctatgtggacactttggtaaaatgcaaattatgatatggacgttatcattggtctggtgagatgtttcatatttgtgacagttaatttaaaaattatgagttaatgctgcctgtgtctatggggttctgtcttctttgatagccatctattcatctggatcatgggaccctctctaatccttccaccaatcaaataagctattgctattggtttggagttgagatatcagtctcggaaacttctgaaaaatgctaataattacccaaggattatgtcaaattttaaaataaatgtgtgtgtgtttctttaa

SEQ ID NO: 250037 - DNA, 577 bp, Artificial Sequence
  derived and/or modified sequence
ataagccactccacaggagaaatgacttcattttttcaacaaatatatgccgtggaaaagaagaagtaagggagcgaggaactcttctagataagagagaattgaaaatggcacatcatccagtcatccaaacaaaatgtcctgtccttgtttggatccccttttgagcagatgagttttgatcatcctgagaaaaatgggccttggcctgcagacccaataaaccttccctcccatggataatagtgctaattcctgaggacctgaagggcctgccgcccctgggggattagccagaagcaggcttgttttcctgctcagaacaaagtgacttccctgaacacatcttcattatgattcacaccaacctgaagaaaaagttcagctgctgcgtcctggtctttcttctgtttgcagtcatctgtgtgtggaaggaaaagaagaaagggagttactatgattcctttaaattgcaaaccaaggaattccaggtgttaaagagtctggggaaattggccatggggtctgattcccagtctgtatcctcaagcagcacccaggacccccacaggggccg

SEQ ID NO: 250038 - DNA, 707 bp, Artificial Sequence
  derived and/or modified sequence
gaggcgccacttgctggaagagggcgagagagacatttaaaaggcaaggggagagccagttgcgcagagccctgcaaccagcagtccagggagaagtggtgaatgtcatggagcccagctgaaatggactggcccccttgagcctgtcccaagccctggtgccaggtgtccatccccgtgctgagatgagttttgatcatcctgagaaaaatgggccttggcctgcagacccaataaaccttccctcccatggataatagtgctaattcctgaggacctgaagggcctgccgcccctgggggattagccagaagcaggcttgttttcctgctcagaacaaagtgacttccctgaacacatcttcattatgattcacaccaacctgaagaaaaagttcagctgctgcgtcctggtctttcttctgtttgcagtcatctgtgtgtggaaggaaaagaagaaagggagttactatgattcctttaaattgcaaaccaaggaattccaggtgttaaagagtctggggaaattggccatggggtctgattcccagtctgtatcctcaagcagcacccaggacccccacaggggccgccagaccctcggcagtctcagaggcctagccaaggccaaaccagaggcctccttccaggtgtggaacaaggacagctcttccaaaaaccttatccctaggctgcaaaagatctgga

SEQ ID NO: 250039 - DNA, 602 bp, Artificial Sequence
  derived and/or modified sequence
gcttaatgctgatttaccaagcggagtgcaaattgtgtgatgagttttgatcatcctgagaaaaatgggccttggcctgcagacccaataaaccttccctcccatggataatagtgctaattcctgaggacctgaagggcctgccgcccctgggggattagccagaagcaggcttgttttcctgctcagaacaaagtgacttccctgaacacatcttcattatgattcacaccaacctgaagaaaaagttcagctgctgcgtcctggtctttcttctgtttgcagtcatctgtgtgtggaaggaaaagaagaaagggagttactatgattcctttaaattgcaaaccaaggaattccaggtgttaaagagtctggggaaattggccatggggtctgattcccagtctgtatcctcaagcagcacccaggacccccacaggggccgccagaccctcggcagtctcagaggcctagccaaggccaaaccagaggcctccttccaggtgtggaacaaggacagctcttccaaaaaccttatccctaggctgcaaaagatctggaagaattacctaagcatgaacaagtacaaagtgtcctacaag

SEQ ID NO: 250040 - DNA, 504 bp, Artificial Sequence
  derived and/or modified sequence
aacaaacccacgtgcgcacagccccggggaacacggatttctccacggcaccgcaaggggagagccagttgcgcagagccctgcaaccagcagtccagggagaagtggtgaatgtcatggagcccagctgaaatggactggcccccttgagcctgtcccaagccctggtgccaggtgtccatccccgtgctgagatgagttttgatcatcctgagaaaaatgggccttggcctgcagacccaataaaccttccctcccatggataatagtgctaattcctgaggacctgaagggcctgccgcccctgggggattagccagaagcaggcttgttttcctgctcagaacaaagtgacttccctgaacacatcttcattatgattcacaccaacctgaagaaaaagttcagctgctgcgtcctggtctttcttctgtttgcagtcatctgtgtgtggaaggaaaagaagaaagggagttactatgattcctttaaattgcaaaccaa

SEQ ID NO: 250041 - DNA, 608 bp, Artificial Sequence
  derived and/or modified sequence
attattgactgagcagacagagagacgtgtcctcgccaacatctacaaatagctctgggctttggcaggcctggatgcaggatcttggaaaagaggagcgtgggtctgctgtttacagtgcaaagatttgacagatgagttttgatcatcctgagaaaaatgggccttggcctgcagacccaataaaccttccctcccatggataatagtgctaattcctgaggacctgaagggcctgccgcccctgggggattagccagaagcaggcttgttttcctgctcagaacaaagtgacttccctgaacacatcttcattatgattcacaccaacctgaagaaaaagttcagctgctgcgtcctggtctttcttctgtttgcagtcatctgtgtgtggaaggaaaagaagaaagggagttactatgattcctttaaattgcaaaccaaggaattccaggtgttaaagagtctggggaaattggccatggggtctgattcccagtctgtatcctcaagcagcacccaggacccccacaggggccgccagaccctcggcagtctcagaggcctagccaaggccaaaccagaggcctccttccaggtgtggaaca

SEQ ID NO: 250042 - DNA, 568 bp, Artificial Sequence
  derived and/or modified sequence
gaactttctgatagcttaataggaggaggttcctgtagggcggcacaaccagggagggcgtggaagctctgcatcccttctcccataccttgctctacacatctcttcatctgtatcctctgcagcatccttgatgataaaccagtaaattagagatggagtttcaccgtgttagccaagatggtcttgatctcctgtcctcatgatcctgatccgcctgcctcggcctcccaaagtgctgggattacagatgagttttgatcatcctgagaaaaatgggccttggcctgcagacccaataaaccttccctcccatggataatagtgctaattcctgaggacctgaagggcctgccgcccctgggggattagccagaagcaggcttgttttcctgctcagaacaaagtgacttccctgaacacatcttcattatgattcacaccaacctgaagaaaaagttcagctgctgcgtcctggtctttcttctgtttgcagtcatctgtgtgtggaaggaaaagaagaaagggagttactatgattcctttaaattgcaaaccaaggaattcc

SEQ ID NO: 250043 - DNA, 588 bp, Artificial Sequence
  derived and/or modified sequence
aatgctgatttaccaagcggagtgcaaattgtgtgagatggagtttcaccgtgttagccaagatggtcttgatctcctgtcctcatgatcctgatccgcctgcctcggcctcccaaagtgctgggattacagatgagttttgatcatcctgagaaaaatgggccttggcctgcagacccaataaaccttccctcccatggataatagtgctaattcctgaggacctgaagggcctgccgcccctgggggattagccagaagcaggcttgttttcctgctcagaacaaagtgacttccctgaacacatcttcattatgattcacaccaacctgaagaaaaagttcagctgctgcgtcctggtctttcttctgtttgcagtcatctgtgtgtggaaggaaaagaagaaagggagttactatgattcctttaaattgcaaaccaaggaattccaggtgttaaagagtctggggaaattggccatggggtctgattcccagtctgtatcctcaagcagcacccaggacccccacaggggccgccagaccctcggcagtctcagaggcctagccaaggccaaaccagaggcct

SEQ ID NO: 250044 - DNA, 4302 bp, Artificial Sequence
  derived and/or modified sequence
aactttctgatagcttaataggaggaggttcctgtagggcggcacaaccagggagggcgtggaagctctgcatcccttctcccataccttgctctacacatctcttcatctgtatcctctgcagcatccttgatgataaaccagtaaatatgagttttgatcatcctgagaaaaatgggccttggcctgcagacccaataaaccttccctcccatggataatagtgctaattcctgaggacctgaagggcctgccgcccctgggggattagccagaagcaggcttgttttcctgctcagaacaaagtgacttccctgaacacatcttcattatgattcacaccaacctgaagaaaaagttcagctgctgcgtcctggtctttcttctgtttgcagtcatctgtgtgtggaaggaaaagaagaaagggagttactatgattcctttaaattgcaaaccaaggaattccaggtgttaaagagtctggggaaattggccatggggtctgattcccagtctgtatcctcaagcagcacccaggacccccacaggggccgccagaccctcggcagtctcagaggcctagccaaggccaaaccagaggcctccttccaggtgtggaacaaggacagctcttccaaaaaccttatccctaggctgcaaaagatctggaagaattacctaagcatgaacaagtacaaagtgtcctacaaggggccaggaccaggcatcaagttcagtgcagaggccctgcgctgccacctccgggaccatgtgaatgtatccatggtagaggtcacagattttcccttcaatacctctgaatgggagggttatctgcccaaggagagcattaggaccaaggctgggccttggggcaggtgtgctgttgtgtcgtcagcgggatctctgaagtcctcccaactaggcagagaaatcgatgatcatgacgcagtcctgaggtttaatggggcacccacagccaacttccaacaagatgtgggcacaaaaactaccattcgcctgatgaactctcagttggttaccacagagaagcgcttcctcaaagacagtttgtacaatgaaggaatcctaattgtatgggacccatctgtataccactcagatatcccaaagtggtaccagaatccggattataatttctttaacaactacaagacttatcgtaagctgcaccccaatcagcccttttacatcctcaagccccagatgccttgggagctatgggacattcttcaagaaatctccccagaagagattcagccaaaccccccatcctctgggatgcttggtatcatcatcatgatgacgctgtgtgaccaggtggatatttatgagttcctcccatccaagcgcaagactgacgtgtgctactactaccagaagttcttcgatagtgcctgcacgatgggtgcctaccacccgctgctctatgagaagaatttggtgaagcatctcaaccagggcacagatgaggacatctacctgcttggaaaagccacactgcctggcttccggaccattcactgctaagcacaggctcctcactcttctccatcaggcattaaatgaatggtctcttggccaccccagcctgggaagaacattttcctgaacaattccagcctgctccttttactctaggggcctctgtcagcaagaccatggggacttcaagagcctgtggtcaggaaatcaggtccagccttccctgtagccagacagtttatgagcccagagcctcctgccacacacatgcacacatatctagcattctttccagacagcatcctccccgccttccaccttggtagatgcaaggtctatctctcccatcagggctgccaaagctgggctttgtttttcccagcagaatgatgccattctcacaaaccaatgctctatattgcttgaagtctgcatctaaatattgatttcacgttttaaagaaattctcttaaattacaattgtgcccaatgcagggtggctctggggggcaagtaggtggtacaggggattggaaacatgctccgcgcctccagagaaaagttgctcccgaggtccatgcccctggaacgtgttcctatcactctggctggttgggctggtccttagactgggtgcttatgattaaagggtcttggttagcccactttccctctccatgtggagatggaaggtagagaaggatacagtgtctatcctcaagttgctacggttcagtgagagaggcagacatctgaacaggcaggtaggattcagtgtgctcagtgcactggggatttggagagagatgggcttgctctctctgtgcacccaggagggccacgcacttaaaactgtgtttgtggatcagagaaggctttatagcacagggggcattcagatgagtcttagaggaagagaagaaacatggcaagcagattacatctgagccgtttgaattgtgtttttctttcttcccatgtttattttctaagatctacctgaacttagagactcaagatatttttttaggaaacctcctacccatgtctgaggtagcaagtgcagcctcacgacagataccaggcaatccagagccacaaaacgtgattcctccaggctctgcctggcctgaccctgtcctgtcagctgggtttacataccagtcccattcttccttttcaatacctacccccaaatcttctcctaaccaccatctgttttttttttttaaagcattttttgctttaaaagcatcctgaccccaatttctttgagctcacgggccttttgctgaaggtctctcagggtgtagtggtgtggctctctggacttaacgtcactctcagaggtcagaaccttggagatcagaactgattctcaccaggtgtgagaggtgtggtagcagattgcaatgctctgcacctcttccttgcaagtgagcaacttcaggctctctgggcagaggctggcccactgtagtttgcagacatgctctccagatggttttactaagtcccctctccctgatagggaatcctgctggaccagcgcagccctggtgtggagaggttaaaagacttgcacaggatcaccaagtcatgctgtagagccaggattcctagacccagggctctgcactctcaaggctggccccatgtgctcaaggggatctaatgtttgggctccaaactaaccatctcggagctgggctcctcatttactgccaaaccctcagcttatgtagctagaaagggccctggagtgagaaagcctggattttcaaattgatgctcccctactgactagctgtgccactctgggcaaatgctcttccttgagcctgtttccacacctgtaaagtggggatgatgatcctatctcactgcttttgtgaggattacaggaaagcacctgtcctggctctgtacctggcacgtagtaggtgctcagttcatgctggtttccttcctgcctttagtagggacctgctctgtgctcacacctcggctgcatgcaccctgctgtgacggaggctagtgtggaagaggtcctgtcctcagggaattaactgtcttattgggagacaacaactgtcctccttggaacacccaagaaaccatgcaaagcagtggacaacacagaacacgccctcctcctcgctgcctgcagctccaatctgattctgcttgggaatgggcggagcacgtgggctgcttaactgctgtataggacaagccccttacccctctctgggcccatgaattcctggcttggtttatgttctgatttgacacactgattttaatcttcgaatcatgacactgagtgcagaggaggtggcattccgacagcaggacatacatgttggtgtgaagactgggacgacactgggtagaatctagtttttaattattattaatataaaggatcaaattaatttaaatatgattctgaagtctacagaacttttagttctgtgctgtctatgtggacactttggtaaaatgcaaattatgatatggacgttatcattggtctggtgagatgtttcatatttgtgacagttaatttaaaaattatgagttaatgctgcctgtgtctatggggttctgtcttctttgatagccatctattcatctggatcatgggaccctctctaatccttccaccaatcaaataagctattgctattggtttggagttgagatatcagtctcggaaacttctgaaaaatgctaataattacccaaggattatgtcaaattttaaaataaatgtgtgtgtgtttctttaa

SEQ ID NO: 250045 - DNA, 1005 bp, Artificial Sequence
  derived and/or modified sequence
actcagtccaggcctctatcatgcctggcacatagtgttgaatattgtattcaataaatattcaacagtaaatatttgttgaatacagtattaaatactatagaatttagacaggtccctgtatcaacaacagcaacaatgaccaccaccaccaccaccaccaccacaacaaaataacaagaatgtccaatgtagggggttgctttttgatccacttgcctttggctagtggtgtctttctctccttagcgccatattcttcagcacttttcggcagctgtatgtggttctattttggtctcctctttactgcacggcgattatgttttcaagaggcaaatcttcagggtgactagagtgacacgttatctgagttctggatggaggtaaaggaatatcacggtggtacttaagctccaagaacttacggcacacctgcttgagtggatcatgggtgagctggagaacctgaagtagcaaaggcaagaaggcaacgacgttccatctgtggaaggacctaccaaccagatgagttttgatcatcctgagaaaaatgggccttggcctgcagacccaataaaccttccctcccatggataatagtgctaattcctgaggacctgaagggcctgccgcccctgggggattagccagaagcaggcttgttttcctgctcagaacaaagtgacttccctgaacacatcttcattatgattcacaccaacctgaagaaaaagttcagctgctgcgtcctggtctttcttctgtttgcagtcatctgtgtgtggaaggaaaagaagaaagggagttactatgattcctttaaattgcaaaccaaggaattccaggtgttaaagagtctggggaaattggccatggggtctgattcccagtctgtatcctcaagcagcacccaggacccccacaggggccgccagaccctcggcagtctcagaggcctagccaaggccaaaccagaggcctccttccaggtgtggaacaagg

SEQ ID NO: 250046 - DNA, 3947 bp, Artificial Sequence
  derived and/or modified sequence
gctcttcttccttccttctccagtcccttccactgtgcgtcttctgtcccccgttcttccccagcggacccctctttcgagactccctagtggggtccccagctcccgggcgatcctgcccttgccgagcgcgttttctggagtcacctgggggaggggagtcctgggcagggccgggctggggaagacgcctggggcactgcccggcgttaacaaagggagccgataccgaccggcgtgggcgcggagcgggcggccgccaccgagcgtgctgagcaaccgcagcctccgcggccgagagtgcagcgagcaaggggagagccagttgcgcagagccctgcaaccagcagtccagggagaagtggtgaatgtcatggagcccagctgaaatggactggcccccttgagcctgtcccaagccctggtgccaggtgtccatccccgtgctgagatgagttttgatcatcctgagaaaaatgggccttggcctgcagacccaataaaccttccctcccatggataatagtgctaattcctgaggacctgaagggcctgccgcccctgggggattagccagaagcagatgatcatgacgcagtcctgaggtttaatggggcacccacagccaacttccaacaagatgtgggcacaaaaactaccattcgcctgatgaactctcagttggttaccacagagaagcgcttcctcaaagacagtttgtacaatgaaggaatcctaattgtatgggacccatctgtataccactcagatatcccaaagtggtaccagaatccggattataatttctttaacaactacaagacttatcgtaagctgcaccccaatcagcccttttacatcctcaagccccagatgccttgggagctatgggacattcttcaagaaatctccccagaagagattcagccaaaccccccatcctctgggatgcttggtatcatcatcatgatgacgctgtgtgaccaggtggatatttatgagttcctcccatccaagcgcaagactgacgtgtgctactactaccagaagttcttcgatagtgcctgcacgatgggtgcctaccacccgctgctctatgagaagaatttggtgaagcatctcaaccagggcacagatgaggacatctacctgcttggaaaagccacactgcctggcttccggaccattcactgctaagcacaggctcctcactcttctccatcaggcattaaatgaatggtctcttggccaccccagcctgggaagaacattttcctgaacaattccagcctgctccttttactctaggggcctctgtcagcaagaccatggggacttcaagagcctgtggtcaggaaatcaggtccagccttccctgtagccagacagtttatgagcccagagcctcctgccacacacatgcacacatatctagcattctttccagacagcatcctccccgccttccaccttggtagatgcaaggtctatctctcccatcagggctgccaaagctgggctttgtttttcccagcagaatgatgccattctcacaaaccaatgctctatattgcttgaagtctgcatctaaatattgatttcacgttttaaagaaattctcttaaattacaattgtgcccaatgcagggtggctctggggggcaagtaggtggtacaggggattggaaacatgctccgcgcctccagagaaaagttgctcccgaggtccatgcccctggaacgtgttcctatcactctggctggttgggctggtccttagactgggtgcttatgattaaagggtcttggttagcccactttccctctccatgtggagatggaaggtagagaaggatacagtgtctatcctcaagttgctacggttcagtgagagaggcagacatctgaacaggcaggtaggattcagtgtgctcagtgcactggggatttggagagagatgggcttgctctctctgtgcacccaggagggccacgcacttaaaactgtgtttgtggatcagagaaggctttatagcacagggggcattcagatgagtcttagaggaagagaagaaacatggcaagcagattacatctgagccgtttgaattgtgtttttctttcttcccatgtttattttctaagatctacctgaacttagagactcaagatatttttttaggaaacctcctacccatgtctgaggtagcaagtgcagcctcacgacagataccaggcaatccagagccacaaaacgtgattcctccaggctctgcctggcctgaccctgtcctgtcagctgggtttacataccagtcccattcttccttttcaatacctacccccaaatcttctcctaaccaccatctgttttttttttttaaagcattttttgctttaaaagcatcctgaccccaatttctttgagctcacgggccttttgctgaaggtctctcagggtgtagtggtgtggctctctggacttaacgtcactctcagaggtcagaaccttggagatcagaactgattctcaccaggtgtgagaggtgtggtagcagattgcaatgctctgcacctcttccttgcaagtgagcaacttcaggctctctgggcagaggctggcccactgtagtttgcagacatgctctccagatggttttactaagtcccctctccctgatagggaatcctgctggaccagcgcagccctggtgtggagaggttaaaagacttgcacaggatcaccaagtcatgctgtagagccaggattcctagacccagggctctgcactctcaaggctggccccatgtgctcaaggggatctaatgtttgggctccaaactaaccatctcggagctgggctcctcatttactgccaaaccctcagcttatgtagctagaaagggccctggagtgagaaagcctggattttcaaattgatgctcccctactgactagctgtgccactctgggcaaatgctcttccttgagcctgtttccacacctgtaaagtggggatgatgatcctatctcactgcttttgtgaggattacaggaaagcacctgtcctggctctgtacctggcacgtagtaggtgctcagttcatgctggtttccttcctgcctttagtagggacctgctctgtgctcacacctcggctgcatgcaccctgctgtgacggaggctagtgtggaagaggtcctgtcctcagggaattaactgtcttattgggagacaacaactgtcctccttggaacacccaagaaaccatgcaaagcagtggacaacacagaacacgccctcctcctcgctgcctgcagctccaatctgattctgcttgggaatgggcggagcacgtgggctgcttaactgctgtataggacaagccccttacccctctctgggcccatgaattcctggcttggtttatgttctgatttgacacactgattttaatcttcgaatcatgacactgagtgcagaggaggtggcattccgacagcaggacatacatgttggtgtgaagactgggacgacactgggtagaatctagtttttaattattattaatataaaggatcaaattaatttaaatatgattctgaagtctacagaacttttagttctgtgctgtctatgtggacactttggtaaaatgcaaattatgatatggacgttatcattggtctggtgagatgtttcatatttgtgacagttaatttaaaaattatgagttaatgctgcctgtgtctatggggttctgtcttctttgatagccatctattcatctggatcatgggaccctctctaatccttccaccaatcaaataagctattgctattggtttggagttgagatatcagtctcggaaacttctgaaaaatgctaataattacccaaggattatgtcaaattttaaaataaatgtgtgtgtgtttctttaa

SEQ ID NO: 250047 - DNA, 507 bp, Artificial Sequence
  derived and/or modified sequence
cggccgccaccgagcgtgctgagcaaccgcagcctccgcggccgagagtgcagcgagcaaggggagagccagttgcgcagagccctgcaaccagcagtccagggagaagtggtgaatgtcatggagcccagctgaaatggactggcccccttgagcctgtcccaagccctggtgccaggtgtccatccccgtgctgagatgagttttgatcatcctgagaaaaatgggccttggcctgcagacccaataaaccttccctcccatggataatagtgctaattcctgaggacctgaagggcctgccgcccctgggggattagccagaagcagttggctacatgtctgctatcttacccagaattcctagcctctatcatgaggcttgttttcctgctcagaacaaagtgacttccctgaacacatcttcattatgattcacaccaacctgaagaaaaagttcagctgctgcgtcctggtctttcttctgtttgcagtcatctgtgtgtg

SEQ ID NO: 250048 - RNA, 228 nt, Artificial Sequence
  derived and/or modified sequence
augauccauacaaaucuaaaaaaaaaauuuucuugcuguguacuaguguucuugcuuuucgcugugauuugcguguggaaagagaagaaaaaggguuccuauuacgacucauuuaagcuacagacaaaagaguuccagguacuaaaaucacuggggaaguuggccaugggaucagacucacagaguguaucgucuagcucaacucaggauccucaucgcggccgcuag

SEQ ID NO: 250049 - RNA, 129 nt, Artificial Sequence
  derived and/or modified sequence
augauucacaccaaccucaaaaagaaguucucuugcugcguucucguuuuucuccuguuugccguuauuuguguguggaaagaaaaaaagaaaggaagcuacuacgacaguuucaaacugcagaccuag

SEQ ID NO: 250050 - RNA, 294 nt, Artificial Sequence
  derived and/or modified sequence
augauacauacaaacuuaaaaaaaaaguucaguuguugugugcugguuuuccucuuauucgccgugaucugcgucuggaaagagaaaaaaaaaggcagcuauuacgacagcuuuaaauugcagaccaaggaguuucagguccugaaaucccugggaaaguuggcaauggguucagauucacaaagcgucucuagcuccuccacacaagauccccaccgaggccgucagacacugggcucccugcgcggauuggccaaagcuaagccagaggcaaguuuucagguguggaacuag

SEQ ID NO: 250051 - RNA, 138 nt, Artificial Sequence
  derived and/or modified sequence
augauucacacaaaccucaaaaaaaaguucucaugcugcguccucguauuccugcuguuugccgucauuuguguuuggaaggagaaaaaaaagggcucauacuacgauucauuuaagcuccagacuaaggaauuuuag

SEQ ID NO: 250052 - RNA, 276 nt, Artificial Sequence
  derived and/or modified sequence
augauacacacuaauuuaaaaaaaaaauuuagcugcugcguacucguuuuccuacuauuugccgugauuugcguguggaaagagaaaaagaaaggaaguuauuaugacucauucaaguuacagaccaaagaauuucagguuuuaaagucacugggcaagcuggcuaugggcucugacucccaguccgugucaaguucuucaacacaagauccccaccggggcaggcagacgcuggguucucugcggggacucgccaaggccaagccagaggcuuag

SEQ ID NO: 250053 - RNA, 297 nt, Artificial Sequence
  derived and/or modified sequence
augauacauacgaauuuaaaaaaaaaguucaguuguugugugcucguuuuuuuacuguuugcagugaucugcguuuggaaagagaagaagaagggcucguacuaugacucauuuaaacuucagaccaaagaguuucagguccugaagucacuugguaaacuggcaauggguagcgauucucagagugucucaucuagcuccacacaggauccacauagggguaggcagacgcuggggucacuaaggggacuugccaaggccaaacccgaagccuccuuccagguuuggaauaaauag

SEQ ID NO: 250054 - RNA, 78 nt, Artificial Sequence
  derived and/or modified sequence
augauccauacuaaucugaaaaaaaaauucucuuguuguguccucguguuucugcucuuugcugucauuugcguguag

SEQ ID NO: 250055 - DNA, 528 bp, Artificial Sequence
  derived and/or modified sequence
atgaacagccagctggtgaccaccgagaagagattcctgaaggacagcctgtacaacgagggcatcctgatcgtgtgggaccccagcgtgtaccacagcgacatccccaagtggtaccagaaccccgactacaacttcttcaacaactacaagacctacagaaagctgcaccccaaccagcccttctacatcctgaagccccagatgccctgggagctgtgggacatcctgcaggagatcagccccgaggagatccagcccaacccccccagcagcggcatgctgggcatcatcatcatgatgaccctgtgcgaccaggtggacatctacgagttcctgcccagcaagagaaagaccgacgtgtgctactactaccagaagttcttcgacagcgcctgcaccatgggcgcctaccaccccctgctgtacgagaagaacctggtgaagcacctgaaccagggcaccgacgaggacatctacctgctgggcaaggccaccctgcccggcttcagaaccatccactgctag

SEQ ID NO: 250056 - DNA, 528 bp, Artificial Sequence
  derived and/or modified sequence
atgaattctcaacttgttactaccgaaaaacgctttctgaaggattctctctataatgaaggcatcctgattgtgtgggatcccagcgtctaccactccgatatacccaagtggtaccagaaccccgactacaatttttttaacaattacaagacctaccgaaaactgcacccaaatcagcccttctacatcctcaagccccaaatgccctgggaactttgggatatcctacaggagatctcccctgaggaaattcagccgaaccctccgagtagtggcatgctgggcattataatcatgatgacactgtgtgatcaagttgatatctacgagttcctgccttcaaagagaaaaactgacgtgtgctactattaccaaaagtttttcgattcagcctgcaccatgggggcataccaccccttgctgtacgagaagaatctggtcaagcatctgaatcagggcactgatgaggacatttaccttcttggcaaggccactcttcccggcttccgcaccatccattgctag

SEQ ID NO: 250057 - DNA, 528 bp, Artificial Sequence
  derived and/or modified sequence
atgaacagccagctggtgaccacagagaagcgcttcctgaaggacagcctgtacaatgaaggcatcctgattgtgtgggaccccagcgtgtaccacagcgacatccccaagtggtaccagaacccagactacaacttcttcaacaactacaagacctacaggaagctgcaccccaaccagcccttctacatcctgaagccccagatgccctgggagctgtgggacatcctgcaggagatcagccctgaggagatccagcccaacccccccagcagcggcatgctgggcatcatcatcatgatgaccctgtgtgaccaggtggacatctatgagttcctgcccagcaagaggaagacagatgtgtgctactactaccagaagttctttgattctgcctgcaccatgggcgcctaccaccccctgctgtatgagaagaacctggtgaagcacctgaaccagggcacagatgaggacatctacctgctgggcaaggccaccctgcccggcttccgcaccatccactgctag

SEQ ID NO: 250058 - DNA, 528 bp, Artificial Sequence
  derived and/or modified sequence
atgaacagccagctggtgaccaccgagaagcggttcctgaaggactcattgtacaatgagggcattctgatagtctgggacccgtccgtgtaccattctgacattcctaaatggtatcagaatccggactacaatttttttaacaactataagacataccggaaactgcaccctaatcagccattctatatacttaaaccacagatgccttgggagctgtgggacatcctccaagaaatcagtcccgaggagattcagcccaacccaccctcttccggcatgctcggaatcattataatgatgacactgtgcgatcaagtggatatctacgaattcctgccgtccaaaaggaagaccgatgtatgttattattatcaaaagttttttgacagtgcctgtaccatgggggcttaccacccgttgctgtatgagaagaacctggtgaaacatcttaatcagggaaccgatgaagatatttatctgctgggtaaggccacacttcctggcttccgaaccatccactgttag

SEQ ID NO: 250059 - DNA, 528 bp, Artificial Sequence
  derived and/or modified sequence
atgaactctcaactggtcaccaccgaaaaaaggttcctcaaggacagcctctacaatgaaggtattcttatcgtctgggatcccagtgtgtaccatagcgatatccctaagtggtatcagaaccccgattacaatttcttcaacaactataagacttatcggaagctgcaccctaatcagccattctacattctgaaaccccagatgccctgggaactgtgggatatcctgcaggagatatctcctgaagaaatacagccgaatcccccatcatccgggatgttgggaatcataattatgatgactctgtgtgaccaagtggacatatacgaattcctacccagcaaaagaaaaacggatgtctgctattattatcagaagttctttgactctgcttgcacaatgggagcctatcatccactgctttacgaaaagaatctggttaagcacctaaatcagggcacagatgaagacatctatctgctggggaaagccaccttgcctggcttcagaactattcactgttag

SEQ ID NO: 250060 - DNA, 528 bp, Artificial Sequence
  derived and/or modified sequence
atgaacagccaacttgtcaccactgaaaaacgcttcctgaaagatagcctctacaacgagggcattcttattgtgtgggacccctccgtatatcactctgatattcccaaatggtatcagaatcccgattataatttctttaataactataagacataccgcaagctgcatccgaaccagcccttctacatcttaaagcctcagatgccctgggagctctgggatatactccaagaaatttcccctgaagagatccagccaaatcctccttcatctgggatgctaggtatcatcataatgatgacactatgcgaccaggtagatatatatgagtttctgccttctaagcgaaaaaccgacgtttgctactattaccagaagttcttcgatagcgcctgtacgatgggcgcctaccatccattgttgtatgaaaaaaacctagtgaaacacctgaatcagggcacagacgaggatatctacctgctcggaaaagccaccttaccaggattcaggacaattcactgctag

SEQ ID NO: 250061 - DNA, 528 bp, Artificial Sequence
  derived and/or modified sequence
atgaacagccaacttgtcaccactgaaaaacgcttcctgaaagatagcctctacaacgagggcattcttattgtgtgggacccctccgtatatcactctgatattcccaaatggtatcagaatcccgattataatttctttaataactataagacataccgcaagctgcatccgaaccagcccttctacatcttaaagcctcagatgccctgggagctctgggatatactccaagaaatttcccctgaagagatccagccaaatcctccttcatctgggatgctaggtatcatcataatgatgactctttgtgatcaagtagacatttacgaattcctgccatcaaagcgcaaaacagacgtatgctactattaccagaaattcttcgacagtgcttgtaccatgggcgcctaccacccactcctctacgaaaagaatttagtgaaacatctgaaccagggaacggacgaagatatttatctattaggaaaggcgactctgccagggttccggaccatacactgctag

SEQ ID NO: 250062 - protein, 520 aa, Artificial Sequence
  derived and/or modified sequence
MSLSPCRAQRGFSARSACSARSRGRSRGGFSSRGGFSSRSLNSFGGCLEGSRGSTWGSGGRLGVRFGEWSGGPGLSLCPPGGIQEVTINQNLLTPLKIEIDPQFQVVRTQETQEIRTLNNQFASFIDKVRFLEQQNKVLETKWHLLQQQGLSGSQQGLEPVFEACLDQLRKQLEQLQGERGALDAELKACRDQEEEYKSKYEEEAHRRATLENDFVVLKKDVDGVFLSKMELEGKLEALREYLYFLKHLNEEELGQLQTQASDTSVVLSMDNNRYLDFSSIITEVRARYEEIARSSKAEAEALYQTKYQELQVSAQLHGDRMQETKVQISQLHQEIQRLQSQTENLKKQNASLQAAITDAEQRGELALKDAQAKVDELEAALRMAKQNLARLLCEYQELTSTKLSLDVEIATYRRLLEGEECRMSGECTSQVTISSVGGSAVMSGGVGGGLGSTCGLGSGKGSPGSCCTSIVTGGSNIILGSGKDPVLDSCSVSGSSAGSSCHTILKKTVESSLKTSITY

SEQ ID NO: 250063 - DNA, 1563 bp, Artificial Sequence
  derived and/or modified sequence
atgtctttgagtccttgtagggcccagcgggggttttccgccaggtccgcctgttctgcgcggtccaggggccgcagtagaggcggtttctcatccaggggcggcttcagttccaggtctctgaactcatttggcgggtgcctggagggctcccgcgggagtacatgggggagtggtggacggctgggggtcagattcggcgaatggtccggaggacccggcctgtctttatgtccccccgggggaattcaggaagttaccattaaccaaaacttgcttacacccctgaagattgagattgacccccaatttcaggtcgtgcggacacaggagacgcaggaaattcgcacgctgaataatcagttcgcctccttcattgataaggttagatttcttgagcagcaaaacaaggtcctggaaacaaagtggcacctgctgcagcagcagggactttctgggagccagcagggcttggagcctgtgtttgaagcctgccttgatcagctgcgcaaacaactggagcagttacaaggcgaaaggggagccttggacgcagaactgaaggcttgcagggaccaagaagaggaatataagtctaagtatgaagaagaggcacatagaagagccacactagagaacgatttcgtagtgctgaaaaaggacgtagatggggtattcctgtcaaaaatggaacttgagggcaagctggaagcacttcgggagtacttatactttctcaaacacctcaatgaggaagagctcggccagctccaaactcaagcctcagacacctcagtggtgctcagcatggacaataacagatacttggactttagctctatcatcactgaagtgcgagctaggtatgaagagatcgcgagatcatccaaggccgaggcagaggcactctaccagacaaagtaccaagagttacaggtgtccgcccaactgcatggcgacagaatgcaagaaacaaaagtacaaatcagccaactgcaccaggagatccagcggctgcaatcgcaaacagaaaatctcaagaaacaaaacgcttcgctgcaagctgcgatcaccgacgctgaacagagaggcgaactcgccctgaaggacgctcaggccaaggtcgacgagctggaggccgcactgcgcatggctaaacagaacttggctcgcttgctgtgcgagtatcaggagctgacaagcacaaaattatcattagatgttgaaatagcaacatacagaagactgttggaaggggaggaatgtaggatgagtggtgaatgcacctctcaggtgacaatttcatccgttgggggctctgccgttatgtctggcggcgtcggaggcggccttggaagcacctgtggcctaggctctgggaaaggatctcccgggagctgttgcacctcaatcgtcaccggcggcagtaatatcatcctgggttccggaaaagatccagtgcttgactcttgttccgtcagtggtagcagcgctggtagtagctgccataccatcctgaagaaaacagttgagagtagtctgaagacatcgataacctattag

SEQ ID NO: 250064 - DNA, 1778 bp, Artificial Sequence
  derived and/or modified sequence
agaaactcacacaccttgacaatctgtctgtccgtctgcagctgcgtgactgtctgtctctgccatgtctctctccccatgccgggcccagaggggcttcagcgctcgctcagcctgttctgctcgctcaaggggccgcagcaggggaggcttcagcagcaggggcggcttcagcagcaggagccttaattcctttggggggtgcctggaaggctctcgtgggagtacctgggggtcagggggtaggctgggggtgcggtttggggagtggagtggtgggcctgggctctccctgtgccctccggggggcatccaagaagtgaccatcaaccagaatctgctgaccccactgaagattgagatcgatccccagttccaggtggtgcggacgcaggagacccaggagatcagaaccctcaacaaccagtttgcttccttcattgacaaggtgcggttcctggagcagcagaacaaggtcctggagacgaagtggcatctgctgcagcaacaggggttgagtggcagccagcagggcctggagcctgtctttgaggcctgcctggatcagctcaggaagcagctggagcagctccagggagaacgaggggctctggatgctgagttgaaggcctgccgggaccaggaggaggagtataagtccaagtatgaggaggaggcccacaggcgtgccacacttgagaacgactttgtggtcctcaagaaggatgtggatggggttttcctgagcaagatggagttggagggcaagctggaggctctgagagagtacctctacttcttgaagcatctgaatgaagaagagctgggccagctccagacccaggccagcgacacgtctgtggtgctgtccatggacaacaaccgctacctggacttcagcagcatcatcactgaggtccgcgcccggtacgaggagatcgcccggagcagcaaggctgaggctgaggccttgtaccagaccaagtaccaggaacttcaggtgtctgcccagcttcatggggacaggatgcaggaaacgaaagtccagatctctcagctacaccaagagattcagaggctgcagagtcagactgagaacctcaagaagcagaacgccagcctgcaggccgccatcactgatgctgagcagcgtggggagctggccctcaaggacgctcaggccaaggtggacgagctggaggctgctctgaggatggccaagcagaacctggcccggctgctgtgcgagtaccaggagctgacgagcacgaagctttccctggatgtggagattgccacttaccgcaggctgctggagggcgaggagtgcaggatgtctggggagtgcaccagccaggtcactatctcctcggtgggaggcagcgctgtcatgtctggaggagttggtggaggcttggggagcacttgtggactcggtagtgggaaaggcagccctgggtcctgctgcaccagcattgtgactggaggctccaacatcattctgggctctgggaaggaccctgttttggattcctgctctgtgtctggctccagcgctggctccagctgccacaccatcctgaagaagacagttgagtcgagtctgaagacatccatcacctactgagcgacccagcagccacctccttcctgaacacatttggcccactccccccatcagccggctctgcaaggccaactccgtgtccgctgcccacagcccaagccagcccacagcggatgctgcaaaaatcaataaagtctcccctcctgctgtt

SEQ ID NO: 250065 - DNA, 1700 bp, Artificial Sequence
  derived and/or modified sequence
aactcacacaccttgacaatctgtctgtccgtctgcagctgcgtgactgtctgtctctgccatgtctctctccccatgccgggcccagaggggcttcagcgctcgctcagcctgttctgctcgctcaaggggccgcagcaggggaggcttcagcagcaggggcggcttcagcagcaggagccttaattcctttggggagtggtgggcctgggctctccctgtgccctccggggggcatccaagaagtgaccatcaaccagaatctgctgaccccactgaagattgagatcgatccccagttccaggtggtgcggacgcaggagacccaggagatcagaaccctcaacaaccagtttgcttccttcattgacaaggtgcggttcctggagcagcagaacaaggtcctggagacgaagtggcatctgctgcagcaacaggggttgagtggcagccagcagggcctggagcctgtctttgaggcctgcctggatcagctcaggaagcagctggagcagctccagggagaacgaggggctctggatgctgagttgaaggcctgccgggaccaggaggaggagtataagtccaagtatgaggaggaggcccacaggcgtgccacacttgagaacgactttgtggtcctcaagaaggatgtggatggggttttcctgagcaagatggagttggagggcaagctggaggctctgagagagtacctctacttcttgaagcatctgaatgaagaagagctgggccagctccagacccaggccagcgacacgtctgtggtgctgtccatggacaacaaccgctacctggacttcagcagcatcatcactgaggtccgcgcccggtacgaggagatcgcccggagcagcaaggctgaggctgaggccttgtaccagaccaagtaccaggaacttcaggtgtctgcccagcttcatggggacaggatgcaggaaacgaaagtccagatctctcagctacaccaagagattcagaggctgcagagtcagactgagaacctcaagaagcagaacgccagcctgcaggccgccatcactgatgctgagcagcgtggggagctggccctcaaggacgctcaggccaaggtggacgagctggaggctgctctgaggatggccaagcagaacctggcccggctgctgtgcgagtaccaggagctgacgagcacgaagctttccctggatgtggagattgccacttaccgcaggctgctggagggcgaggagtgcaggatgtctggggagtgcaccagccaggtcactatctcctcggtgggaggcagcgctgtcatgtctggaggagttggtggaggcttggggagcacttgtggactcggtagtgggaaaggcagccctgggtcctgctgcaccagcattgtgactggaggctccaacatcattctgggctctgggaaggaccctgttttggattcctgctctgtgtctggctccagcgctggctccagctgccacaccatcctgaagaagacagttgagtcgagtctgaagacatccatcacctactgagcgacccagcagccacctccttcctgaacacatttggcccactccccccatcagccggctctgcaaggccaactccgtgtccgctgcccacagcccaagccagcccacagcggatgctgcaaaaatcaataaagtctcccctcctgc

SEQ ID NO: 250066 - DNA, 1563 bp, Artificial Sequence
  derived and/or modified sequence
atgagcctgagcccctgccgggcccagaggggcttcagcgcccggagcgcctgcagcgcccggagccggggccgcagccggggcggcttcagcagccggggcggcttcagcagccgcagcctgaacagctttggaggctgcctggagggcagccggggcagcacctggggcagcggcggccgcctgggcgtgcgctttggagagtggagcggcggccctggcctgagcctgtgccccccaggcggcatccaggaggtgaccatcaaccagaacctgctgacccccctgaagattgaaattgacccccagttccaggtggtgaggacccaggagacccaggagatccgcaccctgaacaaccagtttgccagcttcatcgacaaggtgcgcttcctggagcagcagaacaaggtgctggagaccaagtggcacctgctgcagcagcagggcctgagcggcagccagcagggcctggagcctgtgtttgaggcctgcctggaccagctgaggaagcagctggagcagctgcagggcgagcggggggccctggatgctgagctgaaggcctgccgggaccaggaggaggagtacaagagcaaatatgaggaggaggcccacagaagagccaccctggagaatgactttgtggtgctgaagaaggatgtggatggagtcttcctgagcaagatggagctggagggcaagctggaggccctgcgggagtacctgtacttcctgaagcacctgaatgaggaggagctgggccagctgcagacccaggccagtgacacctctgtggtgctgtccatggacaacaaccgctacctggacttcagcagcatcatcacagaggtgcgggcccgctatgaggagatcgcccggagcagcaaggccgaggccgaggccctgtaccagaccaagtaccaggagctgcaggtgtctgcccagctgcacggggacaggatgcaggagaccaaggtgcagatcagccagctgcaccaggagatccagaggctgcagagccagacagagaacctgaagaagcagaatgccagcctgcaggccgccatcacagatgctgagcagagaggagagctggccctgaaggatgcccaggccaaggtggatgagctggaggccgccctgaggatggccaagcagaacctggcccggctgctgtgtgagtaccaggagctgaccagcaccaagctgagcctggatgtggagatcgccacctaccgccgcctgctggagggggaggagtgcaggatgtctggagaatgtaccagccaggtgaccatcagctctgtgggcggcagcgctgtgatgtctgggggcgtgggcggcggcctgggcagcacctgtggcctgggcagcggcaagggcagccctggcagctgctgcaccagcatcgtgactggaggcagcaacatcatcctgggcagcggcaaggaccctgtgctggacagctgcagcgtgtctggcagcagcgctggcagcagctgccacaccatcctgaagaagacagtggagagcagcctgaagaccagcatcacctactag

SEQ ID NO: 250067 - DNA, 1563 bp, Artificial Sequence
  derived and/or modified sequence
atgagcctgagcccctgccgggcccagcggggcttcagcgcccggagtgcctgctccgctcggtctagaggaaggagcagaggggggttctctagtaggggcgggttttcgtctagatccctgaattccttcgggggatgcctggaaggaagccgcgggtctacgtggggctccggcgggagactcggcgtccgttttggcgagtggagcggtggccctggtctcagcctgtgccctccggggggcattcaggaagtgactattaaccagaaccttctcacacctctgaagattgaaattgacccccagttccaggttgttcgcacccaggaaactcaggaaatacgcactctaaacaatcagttcgccagtttcattgacaaagtgaggtttctagagcagcagaacaaggtgctggagacgaaatggcatcttttacagcagcagggacttagtggttcacagcaagggttagaaccagtgtttgaggcctgcctggaccagctgcgaaaacagctcgagcagctgcagggggagcgcggagcacttgatgccgaactgaaagcctgtcgagatcaggaagaggaatataaaagtaagtacgaggaggaggcacaccggcgggctacattagaaaacgactttgtcgtgttgaagaaggacgtcgacggtgtgttcttatctaagatggagctcgaaggcaaactcgaggcgctaagggagtacctctacttccttaaacacctcaatgaggaggagctgggtcagctgcagactcaggcctccgacacaagtgtggttctgtccatggataataataggtacctagacttttcttctattatcactgaagtgagggcacggtacgaggagatagcccggtcaagtaaggcagaggccgaagctctgtaccagacgaagtatcaagagctgcaggtatctgcccagctccatggggaccgaatgcaggagacaaaggtgcagatttcacagctgcatcaggagatccagcgcctgcagtcccagacagagaacctgaaaaaacagaatgcctctcttcaggccgccatcaccgacgccgagcagcgtggtgagttagctctcaaggacgcgcaagctaaggtggacgagctcgaagcagccctacggatggctaaacaaaatctggcccgccttctttgcgaataccaggagttaacatctacgaaactttctctcgacgtagagattgcaacctaccgaaggctcctggaaggcgaggagtgtcgaatgagtggggagtgcacttcccaggtcactatatcttctgtcggaggcagcgccgtcatgtccgggggcgtcggtgggggtctcggttccacatgtggcttgggatcggggaaaggctcacccggatcctgctgtacctcaatagtaacaggcgggagcaacatcattctaggctcaggtaaggatcccgtattggatagctgtagtgtcagcgggagttctgccggtagttcatgccatacgatcttgaaaaaaaccgtcgagtctagtctgaagacttctatcacctactag

SEQ ID NO: 250068 - DNA, 1563 bp, Artificial Sequence
  derived and/or modified sequence
atgtccttgtcaccctgccgggcacaacgtggtttcagcgctcgatcggcctgcagtgcacgatcacgtggaaggagtagggggggattctcatcacgaggaggtttctccagccgttcactgaactctttcggcggatgcctggaaggctctcgcggatctacttggggctcgggagggcgtttaggcgtgcggttcggcgagtggtccggcggaccgggactgagcctgtgtcccccagggggaattcaggaggtcactatcaaccaaaacctcctgacccctcttaagattgaaatcgaccctcaattccaggtcgtcagaacgcaggaaactcaggaaatcaggactttaaataatcaattcgctagctttatagacaaagtcaggtttctggagcagcagaataaggtgctggagacgaaatggcaccttctccagcaacaggggctgtcgggctcccagcaaggcctcgaacccgtcttcgaggcttgtctggaccagctgagaaaacagcttgaacaactgcagggcgagagaggagccctagatgccgaattgaaggcatgtagggaccaggaggaggagtacaagtctaaatacgaagaagaggcgcacaggagggcaaccttagaaaacgacttcgtagtgcttaagaaggacgtcgatggagtcttcctgagcaaaatggagctggagggtaaactggaggccttgagggaatacctctactttctgaagcacttgaacgaggaagaactgggacagctgcagacgcaagcaagcgatacctctgtagtgttaagtatggataacaatcgttatttggacttttcttccataatcactgaggtgagggctcgatacgaagaaattgcaaggagctctaaggctgaggctgaggcgctgtaccagaccaaataccaggagttgcaggtgtccgctcaattgcacggggaccggatgcaggaaaccaaagtgcagatcagccaactgcaccaggagattcagcgtctgcagtctcaaacagaaaacctgaaaaagcagaacgcctctttacaggccgcaatcacagatgctgaacagaggggcgagttggcgttgaaagacgcccaggccaaagttgatgaactggaagccgctctccgcatggccaaacagaacctggcccgtctcctttgtgaataccaggagttaacctccacaaaattgtccctggacgtcgagatcgctacgtatcggagactgttggaaggcgaggaatgcagaatgagcggagagtgtacttctcaggttaccatctcatcagtcgggggaagtgcagttatgtccggcggagtgggcggagggctaggatcaacctgtggcttgggttctggaaaaggctcccccggttcatgttgtacctctattgtgactggcggaagcaacatcattctgggcagcggtaaggaccctgttctcgatagttgtagtgtatcaggctcctctgctggcagttcatgtcacactatcctgaaaaaaacagtcgagtcttccctaaagactagcataacttactag

SEQ ID NO: 250069 - DNA, 1563 bp, Artificial Sequence
  derived and/or modified sequence
atgagcctgagcccctgcagagcccagagaggcttcagcgccagaagcgcctgcagcgccagaagcagaggcagaagcagaggcggcttcagcagcagaggcggcttcagcagcagaagcctgaacagcttcggcggctgcctggagggcagcagaggcagcacctggggcagcggcggcagactgggcgtgagattcggcgagtggagcggcggccccggcctgagcctgtgcccccccggcggcatccaggaggtgaccatcaaccagaacctgctgacccccctgaagatcgagatcgacccccagttccaggtggtgagaacccaggagacccaggagatcagaaccctgaacaaccagttcgccagcttcatcgacaaggtgagattcctggagcagcagaacaaggtgctggagaccaagtggcacctgctgcagcagcagggcctgagcggcagccagcagggcctggagcccgtgttcgaggcctgcctggaccagctgagaaagcagctggagcagctgcagggcgagagaggcgccctggacgccgagctgaaggcctgcagagaccaggaggaggagtacaagagcaagtacgaggaggaggcccacagaagagccaccctggagaacgacttcgtggtgctgaagaaggacgtggacggcgtgttcctgagcaagatggagctggagggcaagctggaggccctgagagagtacctgtacttcctgaagcacctgaacgaggaggagctgggccagctgcagacccaggccagcgacaccagcgtggtgctgagcatggacaacaacagatacctggacttcagcagcatcatcaccgaggtgagagccagatacgaggagatcgccagaagcagcaaggccgaggccgaggccctgtaccagaccaagtaccaggagctgcaggtgagcgcccagctgcacggcgacagaatgcaggagaccaaggtgcagatcagccagctgcaccaggagatccagagactgcagagccagaccgagaacctgaagaagcagaacgccagcctgcaggccgccatcaccgacgccgagcagagaggcgagctggccctgaaggacgcccaggccaaggtggacgagctggaggccgccctgagaatggccaagcagaacctggccagactgctgtgcgagtaccaggagctgaccagcaccaagctgagcctggacgtggagatcgccacctacagaagactgctggagggcgaggagtgcagaatgagcggcgagtgcaccagccaggtgaccatcagcagcgtgggcggcagcgccgtgatgagcggcggcgtgggcggcggcctgggcagcacctgcggcctgggcagcggcaagggcagccccggcagctgctgcaccagcatcgtgaccggcggcagcaacatcatcctgggcagcggcaaggaccccgtgctggacagctgcagcgtgagcggcagcagcgccggcagcagctgccacaccatcctgaagaagaccgtggagagcagcctgaagaccagcatcacctactag

SEQ ID NO: 250070 - protein, 250 aa, Artificial Sequence
  derived and/or modified sequence
MQPAMMMFSSKYWARRGFSLDSAVPEEHQLLGSSTLNKPNSGKNDDKGNKGSSKREAATESGKTAVVFSLKNEVGGLVKALRLFQEKRVNMVHIESRKSRRRSSEVEIFVDCECGKTEFNELIQLLKFQTTIVTLNPPENIWTEEEELEDVPWFPRKISELDKCSHRVLMYGSELDADHPGFKDNVYRQRRKYFVDVAMGYKYGPRLLAAIGDWEFQLFSVSSSLSSSSLCMLSVHILMDVRSIVVAVDI

SEQ ID NO: 250071 - protein, 490 aa, Artificial Sequence
  derived and/or modified sequence
MQPAMMMFSSKYWARRGFSLDSAVPEEHQLLGSSTLNKPNSGKNDDKGNKGSSKREAATESGKTAVVFSLKNEVGGLVKALRLFQEKRVNMVHIESRKSRRRSSEVEIFVDCECGKTEFNELIQLLKFQTTIVTLNPPENIWTEEEELEDVPWFPRKISELDKCSHRVLMYGSELDADHPGFKDNVYRQRRKYFVDVAMGYKYGQPIPRVEYTEEETKTWGVVFRELSKLYPTHACREYLKNFPLLTKYCGYREDNVPQLEDVSMFLKERSGFTVRPVAGYLSPRDFLAGLAYRVFHCTQYIRHGSDPLYTPEPDTCHELLGHVPLLADPKFAQFSQEIGLASLGASDEDVQKLATCYFFTIEFGLCKQEGQLRAYGAGLLSSIGELKHALSDKACVKAFDPKTTCLQECLITTFQEAYFVSESFEEAKEKMRDFAKSITRPFSVYFNPYTQSIEILKDTRSIENVVQDLRSDLNTVCDALNKMNQYLGI

SEQ ID NO: 250072 - DNA, 753 bp, Artificial Sequence
  derived and/or modified sequence
atgcagcccgccatgatgatgttcagcagcaagtactgggccagaagaggcttcagcctggacagcgccgtgcccgaggagcaccagctgctgggcagcagcaccctgaacaagcccaacagcggcaagaacgacgacaagggcaacaagggcagcagcaagagagaggccgccaccgagagcggcaagaccgccgtggtgttcagcctgaagaacgaggtgggcggcctggtgaaggccctgagactgttccaggagaagagagtgaacatggtgcacatcgagagcagaaagagcagaagaagaagcagcgaggtggagatcttcgtggactgcgagtgcggcaagaccgagttcaacgagctgatccagctgctgaagttccagaccaccatcgtgaccctgaacccccccgagaacatctggaccgaggaggaggagctggaggacgtgccctggttccccagaaagatcagcgagctggacaagtgcagccacagagtgctgatgtacggcagcgagctggacgccgaccaccccggcttcaaggacaacgtgtacagacagagaagaaagtacttcgtggacgtggccatgggctacaagtacggccccagactgctggccgccatcggcgactgggagttccagctgttcagcgtgagcagcagcctgagcagcagcagcctgtgcatgctgagcgtgcacatcctgatggacgtgagaagcatcgtggtggccgtggacatctag

SEQ ID NO: 250073 - DNA, 1473 bp, Artificial Sequence
  derived and/or modified sequence
atgcagcccgccatgatgatgttcagcagcaagtactgggccagaagaggcttcagcctggacagcgccgtgcccgaggagcaccagctgctgggcagcagcaccctgaacaagcccaacagcggcaagaacgacgacaagggcaacaagggcagcagcaagagagaggccgccaccgagagcggcaagaccgccgtggtgttcagcctgaagaacgaggtgggcggcctggtgaaggccctgagactgttccaggagaagagagtgaacatggtgcacatcgagagcagaaagagcagaagaagaagcagcgaggtggagatcttcgtggactgcgagtgcggcaagaccgagttcaacgagctgatccagctgctgaagttccagaccaccatcgtgaccctgaacccccccgagaacatctggaccgaggaggaggagctggaggacgtgccctggttccccagaaagatcagcgagctggacaagtgcagccacagagtgctgatgtacggcagcgagctggacgccgaccaccccggcttcaaggacaacgtgtacagacagagaagaaagtacttcgtggacgtggccatgggctacaagtacggccagcccatccccagagtggagtacaccgaggaggagaccaagacctggggcgtggtgttcagagagctgagcaagctgtaccccacccacgcctgcagagagtacctgaagaacttccccctgctgaccaagtactgcggctacagagaggacaacgtgccccagctggaggacgtgagcatgttcctgaaggagagaagcggcttcaccgtgagacccgtggccggctacctgagccccagagacttcctggccggcctggcctacagagtgttccactgcacccagtacatcagacacggcagcgaccccctgtacacccccgagcccgacacctgccacgagctgctgggccacgtgcccctgctggccgaccccaagttcgcccagttcagccaggagatcggcctggccagcctgggcgccagcgacgaggacgtgcagaagctggccacctgctacttcttcaccatcgagttcggcctgtgcaagcaggagggccagctgagagcctacggcgccggcctgctgagcagcatcggcgagctgaagcacgccctgagcgacaaggcctgcgtgaaggccttcgaccccaagaccacctgcctgcaggagtgcctgatcaccaccttccaggaggcctacttcgtgagcgagagcttcgaggaggccaaggagaagatgagagacttcgccaagagcatcaccagacccttcagcgtgtacttcaacccctacacccagagcatcgagatcctgaaggacaccagaagcatcgagaacgtggtgcaggacctgagaagcgacctgaacaccgtgtgcgacgccctgaacaagatgaaccagtacctgggcatctag

SEQ ID NO: 250074 - DNA, 753 bp, Artificial Sequence
  derived and/or modified sequence
atgcagcccgcaatgatgatgttttcatcgaagtactgggcccgtagaggtttcagcctagactccgcagtgccggaagaacaccagctgctgggctcctcaacactgaacaagccaaattctggtaagaacgatgataaagggaacaaaggtagctccaaacgcgaggcagccacagagtctggtaagacagctgtggttttcagtttgaagaatgaagtgggcgggctggtaaaggcgctgagactttttcaggagaagcgcgtcaatatggtgcacatcgaatcacgaaaaagtagacgtcggtcctctgaagtggaaattttcgtggactgtgaatgtggaaagaccgagtttaacgagttgatccagctgttgaagtttcagacaaccatcgtgaccctcaacccacctgagaatatctggactgaggaagaggagctggaggatgttccctggttcccacgtaaaatatctgagctcgataaatgttctcaccgagttttgatgtacggtagcgagcttgacgctgaccacccaggttttaaggacaacgtgtaccgccaaaggcgcaagtactttgtagatgtggcaatgggatacaagtatgggccgagactgctcgccgctataggagattgggagtttcagctcttcagcgtctcctcttctctgagcagcagttcgctttgcatgctttccgtccacattcttatggacgtccggagcatcgttgtcgcggtggatatttag

SEQ ID NO: 250075 - DNA, 1473 bp, Artificial Sequence
  derived and/or modified sequence
atgcagcccgccatgatgatgttctcttctaagtactgggccagaagaggttttagtctggacagcgcagtgcctgaggaacaccagttactgggatcatcaactctgaacaaacccaattccggcaagaacgatgacaagggcaacaagggatccagcaagcgggaggctgccacagagtctgggaagactgcagtagtgttttctctgaagaatgaagtcggcggtttagtcaaagccctacgactgtttcaggaaaaaagagtaaacatggtgcacattgagagtcgcaagtcccgcaggcggtcctcagaggtggaaatcttcgtagactgcgagtgcgggaaaaccgaatttaatgagctgatccagttactgaaattccagaccacaatcgtcacacttaacccgcccgaaaacatttggacagaggaagaggaactcgaggatgttccctggttccctaggaagatttcagaactggataaatgttctcacagggtgctgatgtacggttctgagttggacgctgaccacccgggattcaaggacaacgtgtaccgccagaggaggaaatactttgttgacgtggcgatggggtataaatacggccagccgatccctcgcgtggagtacaccgaggaagagaccaagacctggggggtggtctttcgggagctgagtaaactgtacccaactcatgcctgcagggagtatcttaagaacttcccattgctcaccaagtattgtggataccgagaggataacgttcctcagctggaggacgtctctatgtttctcaaagagaggtctggctttaccgtccgccctgtggctggatacttatctccccgggatttcctggcgggtctggcttatagagtattccattgcacacagtatattcgccacggcagcgaccccctgtacacacccgaacccgacacatgtcacgaactgctcggccatgtacccctgttggccgaccctaaattcgcacagttcagccaggagattggcctggcctccctgggagctagtgatgaagacgtacagaagctcgcgacttgttacttctttacaatcgaatttggactctgcaagcaggaaggtcagcttagagcgtacggcgcaggtcttttgtccagtatcggggaacttaagcacgcgttgtccgataaagcatgcgtgaaggcgttcgacccaaaaactacttgccttcaggagtgcctaatcaccacatttcaggaggcttactttgtgtccgaaagtttcgaagaagccaaggaaaagatgagagatttcgccaagtccattactcgtcctttctctgtctacttcaacccttacacgcagagcatagagatactcaaggacacacggtctatcgaaaacgtggttcaggatctcagaagtgacctcaatacagtctgtgatgcgctgaacaaaatgaaccagtatctaggtatctag

SEQ ID NO: 250076 - DNA, 753 bp, Artificial Sequence
  derived and/or modified sequence
atgcagcctgccatgatgatgttcagcagcaagtactgggcccggcggggcttcagcctggacagcgctgtgcctgaggagcaccagctgctgggcagcagcaccctgaacaagcccaacagcggcaagaatgatgacaagggcaacaagggcagcagcaagcgggaggccgccacagaaagtggcaagacagctgtggtgttcagcctgaagaatgaggtgggcggcctggtgaaggccctgcggctcttccaggagaagagggtgaacatggtgcacatcgagagcaggaagagcagaagaagaagcagcgaggtggagatctttgtggactgtgaatgtgggaagacagagttcaatgagctgatccagctgctgaagttccagaccaccatcgtgaccctgaaccccccagagaacatctggacagaggaggaggagctggaggatgtgccctggttccccaggaagatcagcgagctggacaagtgcagccaccgggtgctgatgtatggcagcgagctggatgctgaccaccctggcttcaaggacaacgtgtaccggcagaggaggaagtactttgtggatgtggccatgggctacaagtatggcccccggctgctggccgccatcggggactgggagttccagctgttctctgtgagcagcagcctgagcagcagcagcctgtgcatgctgtctgtgcacatcctgatggatgtgcgcagcatcgtggtggccgtggacatctag

SEQ ID NO: 250077 - DNA, 1473 bp, Artificial Sequence
  derived and/or modified sequence
atgcagcctgccatgatgatgttcagcagcaagtactgggcccggcggggcttcagcctggacagcgctgtgcctgaggagcaccagctgctgggcagcagcaccctgaacaagcccaacagcggcaagaatgatgacaagggcaacaagggcagcagcaagcgggaggccgccacagaaagtggcaagacagctgtggtgttcagcctgaagaatgaggtgggcggcctggtgaaggccctgcggctcttccaggagaagagggtgaacatggtgcacatcgagagcaggaagagcagaagaagaagcagcgaggtggagatctttgtggactgtgaatgtgggaagacagagttcaatgagctgatccagctgctgaagttccagaccaccatcgtgaccctgaaccccccagagaacatctggacagaggaggaggagctggaggatgtgccctggttccccaggaagatcagcgagctggacaagtgcagccaccgggtgctgatgtatggcagcgagctggatgctgaccaccctggcttcaaggacaacgtgtaccggcagaggaggaagtactttgtggatgtggccatgggctacaagtatggccagcccatcccccgggtggagtacacagaggaggagaccaagacctggggcgtggtgttccgggagctgagcaagctgtaccccacccacgcctgccgggagtacctgaagaacttccccctgctgaccaagtactgcggctaccgggaggacaacgtgccccagctggaggatgtgtccatgttcctgaaggagaggagcggcttcaccgtgcggcctgtggccggctacctgagcccccgggacttcctggccggcctggcctacagagtcttccactgcacccagtacatccgccacggcagtgaccccctgtacaccccagagccagacacctgccacgagctgctgggccacgtgcccctgctggccgaccccaagtttgcccagttcagccaggagatcggcctggccagcctgggcgccagtgatgaagatgtgcagaagctggccacctgctacttcttcaccatcgagtttggcctgtgcaagcaggagggccagctgcgggcctacggggccggcctgctgagcagcatcggggagctgaagcacgccctgagtgacaaggcctgtgtgaaggcctttgaccccaagaccacctgcctgcaggagtgcctgatcaccaccttccaggaggcctactttgtgtctgagagctttgaggaggccaaggagaagatgagggactttgccaagagcatcacccggcccttctctgtgtacttcaacccctacacccagagcattgagatcctgaaggacaccaggagcattgaaaatgtggtgcaggacctgcggagtgacctgaacacagtgtgtgatgccctgaacaagatgaaccagtacctgggcatctag

SEQ ID NO: 250078 - DNA, 753 bp, Artificial Sequence
  derived and/or modified sequence
atgcagcccgccatgatgatgttcagcagcaagtactgggcccggagaggcttcagcctagattctgccgtgccggaagagcatcaactcctgggtagcagcacacttaataagcctaattccggaaagaacgacgacaaaggcaataaagggtcgtctaagagagaagctgcaacagaaagcggtaagacagctgtcgtcttctccctcaagaacgaggtggggggattggtgaaggcgttaaggctcttccaggagaaacgagtcaacatggtacacatcgaatccaggaaatcccgtcgacgctctagcgaagtagaaatcttcgttgattgcgagtgcggaaaaactgaatttaacgaacttattcagctgttaaagtttcagacaacaattgtaaccctcaatccccctgagaacatctggacggaagaggaggaactggaagatgtgccctggtttccccgcaagatttccgaactggataagtgttctcatagagtcctgatgtatgggtccgagctggatgccgatcaccctggatttaaggacaacgtgtaccgccaacgccgcaagtacttcgtagatgtggccatgggctacaaatacggccctaggcttctcgccgcaattggtgactgggagttccagctgttttccgtaagctcatccctgtctagtagcagtttgtgcatgctgagcgtgcacatccttatggacgtgcggtcaatcgtcgtggctgtggacatctag

SEQ ID NO: 250079 - DNA, 1473 bp, Artificial Sequence
  derived and/or modified sequence
atgcagcccgccatgatgatgttcagcagcaagtactgggcccggaggggcttctccctagactcagcagttcccgaggagcaccagcttctcggctccagtacactgaataagccgaactctggaaagaatgatgacaaggggaacaaggggtccagtaagcgagaggcagcaaccgaaagtggaaagacagcagtggtgttctcactgaaaaacgaggttggcggactcgtgaaagctctcagactgttccaggagaagcgggtgaacatggtgcatattgaaagccgcaagtcccgccggaggagttcggaggtggagattttcgtggactgtgaatgtggaaagactgagtttaacgaacttatccagctgctgaagtttcagactaccattgtgacactgaatccacccgagaacatctggaccgaggaggaggaactcgaggatgtaccttggtttccgagaaagatctcagaacttgacaaatgctcacatcgcgtactgatgtacggttcagaattggacgccgaccaccctggattcaaagataacgtgtaccggcagaggagaaagtattttgtggatgtagccatgggatataagtatggccagcccattcctcgggtggaatataccgaggaagagacaaagacttggggcgtcgtgtttcgcgagctgtctaaattgtatcctacacatgcttgtcgtgagtatctgaagaacttcccacttctcacaaagtattgcggatatcgtgaggataacgtaccgcagctcgaggatgtatccatgttcctaaaggaacgcagcgggttcactgtgcggcctgtagccgggtatttaagtcctagggactttttagcgggtttggcttacagagtcttccactgcactcagtatatccgccacggttccgaccccctatataccccagagcctgacacatgccacgagctgctgggccatgttccgcttcttgccgatcccaagttcgcacaattcagccaggagataggtctagcaagcctcggtgcctcggatgaggacgtgcagaagctggctacctgttacttctttacaatcgaattcggattatgtaagcaggagggccagctccgcgcatacggcgccggactgttgtcatctattggcgaactgaagcatgctcttagtgataaggcttgtgttaaggcatttgacccaaagacaacttgtctgcaggaatgccttatcacgacttttcaagaagcctattttgtctcggagtcttttgaagaggccaaggagaagatgcgcgattttgccaagtctatcacccggccattctcagtgtacttcaatccctatactcaatctattgagattttaaaggatacaaggtcaatagaaaacgtggtgcaggatctaagatctgacctcaatactgtgtgtgacgctttaaacaaaatgaatcaatacctgggaatctag

SEQ ID NO: 250080 - DNA, 753 bp, Artificial Sequence
  derived and/or modified sequence
atgcagcctgccatgatgatgttctcctctaaatactgggcaaggcgcggattttcactggacagcgcagtacctgaagagcaccagcttctaggctccagcacactgaacaagccgaattctggaaaaaatgacgataaagggaacaaaggttcatcaaagcgggaggcggcaaccgagtctggcaagacagcagtcgtgttctctctgaagaacgaggttggaggactggtaaaggctctccggctattccaggaaaagagagtcaacatggtgcacattgaaagcaggaaaagcagaagacgaagttctgaggtggaaatattcgtcgactgtgaatgcggcaagacagagtttaacgaactcattcagcttctcaaatttcagacaactatcgtgactctaaaccctcccgagaacatatggacagaggaagaagagctcgaggatgtgccctggtttcccaggaagattagtgaactagacaagtgcagccatagggtgctcatgtatgggagcgagctggacgcagatcaccccggattcaaggacaacgtatacagacaacgcaggaaatactttgtggatgtcgccatgggctacaaatacggaccgcgtctcctggcagctatcggcgattgggagttccagctgttcagtgtgagttcatcactctccagttcaagtctatgcatgctatcagtccatattctgatggatgttcgcagcattgtcgttgccgtagatatatag

SEQ ID NO: 250081 - DNA, 1473 bp, Artificial Sequence
  derived and/or modified sequence
atgcagcctgcaatgatgatgttttcctctaaatactgggctagaaggggcttttccctggactctgctgtccccgaagagcaccagctgctaggaagttccactcttaataaacctaacagcggaaaaaatgacgacaagggaaacaagggctctagtaagagggaagccgctaccgaatccggaaagaccgcggttgtcttcagcctgaagaatgaggtgggcggtctagtaaaagcactacgactgttccaggagaaacgggtgaacatggtgcacatcgagagccgaaagtcgcgaagaagatccagcgaggtagagatttttgtggattgcgaatgtggaaaaacagaatttaatgagcttatacagctgctgaagtttcaaaccacaattgtcacccttaaccctcccgaaaacatttggaccgaggaggaagagctggaggatgtcccttggttcccaaggaagatctccgagctggacaaatgcagccatagagtattgatgtacggctctgaactcgacgccgaccatcctgggtttaaagataatgtctacaggcagaggaggaaatactttgtcgatgtggcaatgggttataaatacggacagccaattccacgggttgagtacaccgaggaagaaacaaaaacatggggcgtggttttccgtgaactcagcaagctctaccctacacacgcctgccgggagtacttgaaaaactttccgttattaaccaagtactgtggctacagagaggataatgtaccccaactcgaggacgtgtccatgtttctgaaggagcgttccggttttacagttcgacctgtcgcaggatatctgtccccaagagatttcctagctggcctggcctatagggtcttccactgtacacaatacatccgccacggaagtgatccactctataccccggaacccgacacatgccacgagttactgggtcacgtgcccctcctcgccgatcccaagtttgcccagttcagccaggagattgggctcgcttcactgggtgcctcagacgaagatgtacagaagttggctacttgctatttcttcacaatcgaattcggactgtgtaagcaggagggacagttgagagcctacggcgctggcctgttatcttcaattggggaattgaagcacgctcttagtgacaaagcctgcgtgaaagcttttgaccccaagacaacttgcctccaagagtgtctgatcacaacctttcaagaagcgtatttcgtgtctgaaagcttcgaagaggctaaggagaaaatgcgggactttgctaaaagcatcacaaggcccttttctgtctactttaacccctacacccagtcaatcgagattctgaaggataccaggtctatcgagaatgtggtccaagacctgagatctgatcttaacacagtttgcgatgctctgaacaagatgaatcagtaccttggaatttag

SEQ ID NO: 250082 - DNA, 2992 bp, Artificial Sequence
  derived and/or modified sequence
accgggatccatgcagccagcaatgatgatgttttccagtaaatactgggcacggagagggttttccctggattcagcagtgcccgaagagcatcagctacttggcagctcaacactaaataaacctaactctggcaaaaatgacgacaaaggcaacaagggaagcagcaaacgtgaagctgctaccgaaagtggcaagacagcagttgttttctccttgaagaatgaagttggtggattggtaaaagcactgaggctctttcaggaaaaacgtgtcaacatggttcatattgaatccaggaaatctcggcgaagaagttctgaggttgaaatctttgtggactgtgagtgtgggaaaacagaattcaatgagctcattcagttgctgaaatttcaaaccactattgtgacgctgaatcctccagagaacatttggacagaggaagaagagctagaggatgtgccctggttccctcggaagatctctgagttagacaaatgctctcacagagttctcatgtatggttctgagcttgatgctgaccacccaggatttaaggacaatgtctatcgacagagaagaaagtattttgtggatgtggccatgggttataaatatggcccaagactgttagctgctattggcgactgggaatttcagctcttttctgtatcaagttctttgagctcaagctccttgtgtatgttgagcgtgcacatattgatggatgttagatccattgttgttgctgttgatatttaatttcatgatagtttttgcagatgaaaatcacttctctagaatatgaagaggactttctgcaaggtgagaaaatagtgggaagccctatcctgtggtgcacaggacaaataaaaacaaataatttctaggagttaaatctttgttctccctgaggctccttaggtgcagtagtttattttcattacgtctcttgtaaaggcagcaccaatattaacaacgcgaacaaaacaaactaatgtttttgtttgctcccatctgaaagttccttaaggcccgtagactcatttacgaaaattcatgtgtgcaaaactcatttgcaaaagcaaataaaatatgtgatcgcaaatgctctttacctgactggcctaggggactagctgaaaatgcgtttatgcctttatgtttactctatggcgtggcttagcagtcgtggggctcctaacctcctctacagatgagtccccgtcaagccacgtatgtcagatgacttgaatgttttgaaattcaggcatcatttagatggttgttaagttgctgtactgatttgtgagtttttgtttgtaaaaaaatattattaaatcattgtgctctgtagccttggaaatgtttttgaagttcattcattacaatgttcagccaaggaaacatctctgtatttagttaagttcggacttttctgtccctttgggtttacatatgctgctttctttcctggtgaaaattttggttacaagtgtgactgagtgatgatgtctagataagggtcaggaaaactgaattgagaaaattagaaaaaagaaacccttatatgtaaattgtacataggaataattggaggctaccagaaagtttgttacaatcctgaatctttgctttttgcatagtaattgaaatatatgaggcaagacaaatacatacctgccagactctctgaggcataactattttttccctaacatttaaatctgtgttttgctttaggctgattgattgatttactcacttaacaaatattatttttttgttttgttttgttttgttttgagatagagtatctgtcatccaagctgaggtgcagtggcacgatctcagctcactgcaacctccgcctcctgggttcaagcgattctcctgcctcagtctctctagtagctggaattataggcacacgccaccatgcccggttaattttagtatttttagtatttttgtatttttagttgatgcagaatatatatatatattctggcaatatttttccagtctcagaggcataagccatcttcttgaatactcattgagtatttggctgtatattgtagacacctggatgcaggtgatactatttcatgaaggtggtaccaactaatatagtactaggtaacactatggttactggctaaaaatgagagtcatcaattactgattgaaatttctacacacctggtgtgacacctcagttgtgagacatgcaacaaatgcttgataagagttaattataaattttgtgatgatgaattttttttttaacttttactttaggtttaggggtacatgtgaaggtttgttacataggtaaacacatgtcatggggttttgttgtacatattatttcatcacccaggtgttaagcctagtacccaatagtttactttcctgctcctcaccctcctctcaccctccaccctccaggagaccccagtgtctgtggtttccttctttgtgttcataagttcttatcatttagctcccacttacaagtgagaacatgcagtatttagttttctgttccttcattagtttgctaaggataatagcctccagctccatccatgttgctgcaaaagacattatctcatttttttatggctgcatagtattccatcgtgtatatgtaccacatttttctcatgcaatctgtcactgatggacatgtaggttgattctgtgtctttgctattgtaaatagtgctgcagtgaacttccgcatgcatgtgtcttgatgatagaatgatttatattcctctgggtatatactcagtaacgggattgctaggttgaatggtaattctgcttttagctctttgatgaatggccatactgctttccacaatggttgaactaatttacactcccaccaacagtgtataagtgtttccttttctctgcaaccttgccagcatctgttatttttttgacttttaaataataaacattctgactggtgtg

SEQ ID NO: 250083 - DNA, 2360 bp, Artificial Sequence
  derived and/or modified sequence
cattgctcttcagcaccagggttctggacagcgccccaagcaggcagctgatcgcacgccccttcctctcaatctccgccagcgctgctactgcccctctagtaccccctgctgcagagaaagaatattacaccgggatccatgcagccagcaatgatgatgttttccagtaaatactgggcacggagagggttttccctggattcagcagtgcccgaagagcatcagctacttggcagctcaacactaaataaacctaactctggcaaaaatgacgacaaaggcaacaagggaagcagcaaacgtgaagctgctaccgaaagtggcaagacagcagttgttttctccttgaagaatgaagttggtggattggtaaaagcactgaggctctttcaggaaaaacgtgtcaacatggttcatattgaatccaggaaatctcggcgaagaagttctgaggttgaaatctttgtggactgtgagtgtgggaaaacagaattcaatgagctcattcagttgctgaaatttcaaaccactattgtgacgctgaatcctccagagaacatttggacagaggaagaagagctagaggatgtgccctggttccctcggaagatctctgagttagacaaatgctctcacagagttctcatgtatggttctgagcttgatgctgaccacccaggatttaaggacaatgtctatcgacagagaagaaagtattttgtggatgtggccatgggttataaatatggtcagcccattcccagggtggagtatactgaagaagaaactaaaacttggggtgttgtattccgggagctctccaaactctatcccactcatgcttgccgagagtatttgaaaaacttccctctgctgactaaatactgtggctacagagaggacaatgtgcctcaactcgaagatgtctccatgtttctgaaagaaaggtctggcttcacggtgaggccggtggctggatacctgagcccacgagactttctggcaggactggcctacagagtgttccactgtacccagtacatccggcatggctcagatcccctctacaccccagaaccagacacatgccatgaactcttgggacatgttccactacttgcggatcctaagtttgctcagttttcacaagaaataggtctggcgtctctgggagcatcagatgaagatgttcagaaactagccacgtgctatttcttcacaatcgagtttggcctttgcaagcaagaagggcaactgcgggcatatggagcaggactcctttcctccattggagaattaaagcacgccctttctgacaaggcatgtgtgaaagcctttgacccaaagacaacttgcttacaggaatgccttatcaccaccttccaggaagcctactttgtttcagaaagttttgaagaagccaaagaaaagatgagggactttgcaaagtcaattacccgtcccttctcagtatacttcaatccctacacacagagtattgaaattctgaaagacaccagaagtattgaaaatgtggtgcaggaccttcgcagcgacttgaatacagtgtgtgatgctttaaacaaaatgaaccaatatctggggatttgatgcctggaactatgttgttgccagcatgatctttttggggcttagcagcagttcagtcaatgtcatataacgcaaataaccttctgtgtcatggcttggctaataagcatgcaattccatatatctataccatcttgtaactcactgtgttagtatataaagcaccataagaaatccaatggcagataaccactcattgtatgaaataacgtattatgtttaaacatcttaaaaagatttgacattcctgcttagtgtccttaaccaaactgcatctagttaaaatttgtaacaaatagccctcttatgagtctcatttatgcccttttctttttcagatctaagcctttcctctgtgttcattagataaaatgaaaaaaagcagtgaagctgtttccattttcaatagtatcagtgttttcacgcattatttgagataaacccagaattgtaggaaacttcccatcacaataacaaaggttcaatattctatttcaaaaattgttgaggtaacacagcagttggaatgatttttaggttgagtatttacacaatgcaagaaaacacctttttacaaatggaattatgtaggttgcgttgaccttgtagaacctgagttatgacaagcttcctgaagtattttggaagatagtacttccggaaaggacattaggaaagactaaacagtggacaatcaatcttgggactatgaattttatgctggaataaagtaaattatcatgttc

SEQ ID NO: 250084 - protein, 783 aa, Artificial Sequence
  derived and/or modified sequence
MVIMSEFSADPAGQGQGQQKPLRVGFYDIERTLGKGNFAVVKLARHRVTKTQVAIKIIDKTRLDSSNLEKIYREVQLMKLLNHPHIIKLYQVMETKDMLYIVTEFAKNGEMFDYLTSNGHLSENEARKKFWQILSAVEYCHDHHIVHRDLKTENLLLDGNMDIKLADFGFGNFYKSGEPLSTWCGSPPYAAPEVFEGKEYEGPQLDIWSLGVVLYVLVCGSLPFDGPNLPTLRQRVLEGRFRIPFFMSQDCESLIRRMLVVDPARRITIAQIRQHRWMRAEPCLPGPACPAFSAHSYTSNLGDYDEQALGIMQTLGVDRQRTVESLQNSSYNHFAAIYYLLLERLKEYRNAQCARPGPARQPRPRSSDLSGLEVPQEGLSTDPFRPALLCPQPQTLVQSVLQAEMDCELQSSLQWPLFFPVDASCSGVFRPRPVSPSSLLDTAISEEARQGPGLEEEQDTQESLPSSTGRRHTLAEVSTRLSPLTAPCIVVSPSTTASPAEGTSSDSCLTFSASKSPAGLSGTPATQGLLGACSPVRLASPFLGSQSATPVLQAQGGLGGAVLLPVSFQEGRRASDTSLTQGLKAFRQQLRKTTRTKGFLGLNKIKGLARQVCQAPASRASRGGLSPFHAPAQSPGLHGGAAGSREGWSLLEEVLEQQRLLQLQHHPAAAPGCSQAPQPAPAPFVIAPCDGPGAAPLPSTLLTSGLPLLPPPLLQTGASPVASAAQLLDTHLHIGTGPTALPAVPPPRLARLAPGCEPLGLLQGDCEMEDLMPCSLGTFVLVQ

SEQ ID NO: 250085 - DNA, 2352 bp, Artificial Sequence
  derived and/or modified sequence
atggtgatcatgagcgagttcagcgccgaccccgccggccagggccagggccagcagaagcccctgagagtgggcttctacgacatcgagagaaccctgggcaagggcaacttcgccgtggtgaagctggccagacacagagtgaccaagacccaggtggccatcaagatcatcgacaagaccagactggacagcagcaacctggagaagatctacagagaggtgcagctgatgaagctgctgaaccacccccacatcatcaagctgtaccaggtgatggagaccaaggacatgctgtacatcgtgaccgagttcgccaagaacggcgagatgttcgactacctgaccagcaacggccacctgagcgagaacgaggccagaaagaagttctggcagatcctgagcgccgtggagtactgccacgaccaccacatcgtgcacagagacctgaagaccgagaacctgctgctggacggcaacatggacatcaagctggccgacttcggcttcggcaacttctacaagagcggcgagcccctgagcacctggtgcggcagccccccctacgccgcccccgaggtgttcgagggcaaggagtacgagggcccccagctggacatctggagcctgggcgtggtgctgtacgtgctggtgtgcggcagcctgcccttcgacggccccaacctgcccaccctgagacagagagtgctggagggcagattcagaatccccttcttcatgagccaggactgcgagagcctgatcagaagaatgctggtggtggaccccgccagaagaatcaccatcgcccagatcagacagcacagatggatgagagccgagccctgcctgcccggccccgcctgccccgccttcagcgcccacagctacaccagcaacctgggcgactacgacgagcaggccctgggcatcatgcagaccctgggcgtggacagacagagaaccgtggagagcctgcagaacagcagctacaaccacttcgccgccatctactacctgctgctggagagactgaaggagtacagaaacgcccagtgcgccagacccggccccgccagacagcccagacccagaagcagcgacctgagcggcctggaggtgccccaggagggcctgagcaccgaccccttcagacccgccctgctgtgcccccagccccagaccctggtgcagagcgtgctgcaggccgagatggactgcgagctgcagagcagcctgcagtggcccctgttcttccccgtggacgccagctgcagcggcgtgttcagacccagacccgtgagccccagcagcctgctggacaccgccatcagcgaggaggccagacagggccccggcctggaggaggagcaggacacccaggagagcctgcccagcagcaccggcagaagacacaccctggccgaggtgagcaccagactgagccccctgaccgccccctgcatcgtggtgagccccagcaccaccgccagccccgccgagggcaccagcagcgacagctgcctgaccttcagcgccagcaagagccccgccggcctgagcggcacccccgccacccagggcctgctgggcgcctgcagccccgtgagactggccagccccttcctgggcagccagagcgccacccccgtgctgcaggcccagggcggcctgggcggcgccgtgctgctgcccgtgagcttccaggagggcagaagagccagcgacaccagcctgacccagggcctgaaggccttcagacagcagctgagaaagaccaccagaaccaagggcttcctgggcctgaacaagatcaagggcctggccagacaggtgtgccaggcccccgccagcagagccagcagaggcggcctgagccccttccacgcccccgcccagagccccggcctgcacggcggcgccgccggcagcagagagggctggagcctgctggaggaggtgctggagcagcagagactgctgcagctgcagcaccaccccgccgccgcccccggctgcagccaggccccccagcccgcccccgcccccttcgtgatcgccccctgcgacggccccggcgccgcccccctgcccagcaccctgctgaccagcggcctgcccctgctgcccccccccctgctgcagaccggcgccagccccgtggccagcgccgcccagctgctggacacccacctgcacatcggcaccggccccaccgccctgcccgccgtgcccccccccagactggccagactggcccccggctgcgagcccctgggcctgctgcagggcgactgcgagatggaggacctgatgccctgcagcctgggcaccttcgtgctggtgcagtag

SEQ ID NO: 250086 - DNA, 2352 bp, Artificial Sequence
  derived and/or modified sequence
atggtgataatgtctgagttttctgctgatcctgccggccagggccagggacagcagaagccccttcgtgtcggcttttacgacatcgagagaacgctcggcaagggcaacttcgccgttgtcaaactggcccgacatcgcgtgaccaaaactcaggtagccatcaagatcatcgataaaactagacttgatagtagtaacctagaaaagatctaccgcgaagtgcaactgatgaaattgctcaatcacccccacattattaagctctatcaggtgatggaaacgaaagatatgctttacatcgtaaccgagttcgcaaaaaatggggagatgtttgactatctcacctctaacggtcatctgtctgagaacgaagcacggaagaaattttggcaaattttgtctgccgtggagtattgccacgatcatcacatcgtgcacagagaccttaaaacggagaacctgctgctggacgggaacatggacatcaagttggccgacttcgggttcggcaatttctataaatccggcgagccactctccacttggtgcggaagccccccctacgcagcacccgaggtgttcgagggtaaggaatatgaaggtcctcagttagacatatggagcctgggagtcgtgctctacgtcctcgtctgcggaagcctgccattcgacggccctaacctgccaacgctccgacaaagggtgttggagggtagattcaggatcccattttttatgtcccaggactgtgaaagcctgatcagaagaatgctggtcgtggacccagccaggcgcatcaccattgctcaaatcaggcaacaccggtggatgagggcagagccctgcctcccgggccctgcctgcccagccttttctgctcacagctacacaagcaatctgggggactatgacgagcaggcacttggcattatgcagacattgggcgtcgatagacagaggacagtcgagtccttgcagaattcctcttacaatcactttgcggccatttattacttattgctcgaaagactgaaggagtaccggaacgcgcaatgtgctcgtcctgggcctgcacggcagccccgcccacgttcatctgacctgagcgggctggaggtaccacaggaaggcttgtcgacggatccctttagacccgccctgctctgtcctcaacctcaaaccctagtgcagtccgtgctacaggctgagatggattgcgagctgcagagctcactgcagtggccactattcttccccgtcgacgcctcctgctcaggggtcttcaggcctcgtcccgtgagcccttcctctctgcttgatactgccatctccgaggaagcccgccaaggtccaggacttgaggaagaacaagatacacaggaaagcctgccctcttcaacaggcaggagacacacacttgctgaagtgtcaacccgcttaagccccctgacggccccatgcattgtcgtgagcccctccacaaccgccagtcccgcggaggggacctcatccgacagctgtctgacattctcggcctcgaagagccccgcaggcctctccggtactccagctacgcagggcctgctgggggcatgttcacctgtccgcctcgcctctccctttctgggcagccaaagcgccacgcccgtactacaggcccagggaggactgggcggtgcggtgctgcttcctgtgtccttccaggaggggagaagagccagcgatacatctctcacgcagggcttgaaagcgttccggcagcagctgaggaaaacgactaggactaaaggttttctgggccttaacaaaatcaaaggccttgccaggcaggtgtgtcaggcgccagctagtagagcaagtcgcggcgggctttcccccttccacgctcctgctcagtctccagggctccatggaggggccgccggatctcgagagggttggagcctattagaggaggtactagagcagcagcgcctgcttcagctgcagcaccaccccgccgccgctcccggatgtagccaggcaccacagccggcccccgctcctttcgtgatagcgccctgcgatggcccgggagccgccccacttccgtcgaccctcctgacctctgggcttccgctgttaccgccaccactgctgcaaacaggagcgagtcctgtagccagtgctgcccagctgctagatacccacctccacattgggactggaccaactgcgctccccgcagtgcccccgccccgactagcacgtctcgcccctggatgcgagccactcggccttctacaaggggattgcgagatggaggaccttatgccatgctccttgggaacattcgtcctagtgcagtag

SEQ ID NO: 250087 - DNA, 2352 bp, Artificial Sequence
  derived and/or modified sequence
atggtgatcatgtctgagttctctgctgaccctgctggccagggccagggccagcagaagcccctgcgggtgggcttctatgacattgaaagaaccctgggcaaaggaaactttgctgtggtgaagctggcccggcaccgggtgaccaagacccaggtggccatcaagatcatcgacaagacccggctggacagcagcaacctggagaagatctaccgggaggtgcagctgatgaagctgctgaaccacccccacatcatcaagctgtaccaggtgatggagaccaaggacatgctgtacatcgtgacagaatttgccaagaatggagagatgtttgactacctgaccagcaatggccacctgtctgaaaatgaggccaggaagaagttctggcagatcctgtctgctgtggagtactgccacgaccaccacatcgtgcaccgggacctgaagacagagaacctgctgctggatggcaacatggacatcaagctggccgactttggcttcggcaacttctacaagagcggggagcccctgagcacctggtgtggcagccccccctatgctgcccctgaggtgtttgagggcaaggagtatgagggcccccagctggacatctggagcctgggcgtggtgctgtatgtgctggtgtgtggcagcctgccctttgatggccccaacctgcccaccctgcggcagagggtgctggagggccgcttccgcatccccttcttcatgagccaggactgtgagagcctcatccggaggatgctggtggtggaccctgcccggcgcatcaccatcgcccagatccggcagcaccgctggatgagagctgagccctgcctgcccggccctgcctgcccagccttcagcgcccacagctacaccagcaacctgggggactatgatgagcaggccctgggcatcatgcagaccctgggcgtggaccggcagaggacagtggagagcctgcagaacagcagctacaaccactttgctgccatctactacctgctgctggagcggctgaaggagtacagaaatgcccagtgtgcccggcccggccctgcccggcagccccggcccaggagcagtgacctgagcggcctggaggtgccccaggagggcctgagcacagaccccttccggcctgccctgctgtgcccccagccccagaccctggtgcagagcgtgctgcaggccgagatggactgtgagctgcagagcagcctgcagtggcccctcttcttccctgtggatgccagctgcagcggggtcttccggcccaggcctgtgagccccagcagcctgctggacacagccatcagcgaggaggcccggcagggccctggcctggaggaggagcaggacacccaggagagcctgcccagcagcacaggccgccgccacaccctggccgaggtgtccacccggctgagccccctgacagccccctgcatcgtggtgagccccagcaccacagccagccctgctgagggcaccagcagtgacagctgcctgaccttcagcgccagcaagagccctgctggcctgagcggcaccccagccacccagggcctgctgggcgcctgcagccctgtgcggctggccagccccttcctgggcagccagagcgccacccctgtgctgcaggcccagggcggcctgggcggcgctgtgctgctgcctgtgtccttccaggagggccggcgggccagtgacaccagcctgacccagggcctgaaggccttccggcagcagctgaggaagaccaccaggaccaagggcttcctgggcctgaacaagatcaagggcctggcccggcaggtgtgccaggccccagccagccgggccagcagaggaggcctgagccccttccacgccccagcccagagccctggcctgcacggcggggccgccggcagccgggagggctggagcctgctggaggaggtgctggagcagcagaggctgctgcagctgcagcaccaccctgctgctgcccctggctgcagccaggccccccagcctgccccagcccccttcgtcatcgccccctgtgatggccctggggccgcccccctgcccagcaccctgctgaccagcggcctgcccctgctgcccccacccctgctgcagacaggagccagccctgtggccagcgctgcccagctgctggacacccacctgcacatcggcaccggccccacagccctgcctgctgtgcccccaccccggctggcccggctggcccctggctgtgagcccctgggcctgctgcagggcgactgtgagatggaggacctgatgccctgcagcctgggcacctttgtgctggtgcagtag

SEQ ID NO: 250088 - DNA, 2352 bp, Artificial Sequence
  derived and/or modified sequence
atggtgatcatgagcgagttcagcgccgaccccgccggccagggccagggccagcagaagccattaagggtaggcttctatgatatcgaaaggactttgggtaaaggcaacttcgcagtagtaaaactcgcccggcacagagtcacgaagacccaggtcgctatcaaaatcatcgacaagacgcgtctcgactcttccaatttggaaaagatatatagggaagtccaactgatgaagctgctgaatcaccctcacattataaaactctaccaggtgatggagacgaaggacatgctctatatagtgactgaatttgccaagaacggagaaatgttcgactacctcaccagcaatggtcatctcagcgaaaacgaggcacgaaaaaaattctggcaaatcctgagcgcagtggagtactgccacgatcatcacattgtccatagagacctaaagaccgaaaaccttctcctggatggcaacatggacattaaactggccgatttcggcttcggcaatttctataagtctggcgaacctcttagcacatggtgcgggagtccgccctacgctgcccccgaggtctttgagggcaaagagtatgagggaccgcagttggacatatggagcctcggcgtagtgttgtatgtactggtttgtgggtccctcccattcgatgggccaaacctgcctacattacggcaaagggtcctggagggtaggttccgcatccctttctttatgtcccaggattgcgaatccttgatcaggagaatgttggtggtggaccctgccaggaggattactatcgcccagatccgtcagcacagatggatgagggctgaaccatgccttcccgggcccgcttgtcctgccttctccgcccacagttacacatctaacctgggcgactatgatgagcaggctttaggaattatgcagactctaggggtggaccggcagcgcacggtggaatccctgcagaatagcagctataaccacttcgctgcaatctactacctgctgcttgagcggctgaaagaatacagaaacgcacagtgcgcacgacctgggccagcccgccaaccacgtccaaggagcagcgatcttagcgggttagaggttccccaggaggggttatcaactgaccccttcagacccgcactactctgtccacaaccacagacacttgttcagtctgtcttgcaggccgagatggattgcgagctgcaaagttctctacaatggccgcttttcttccctgtggacgccagctgcagcggggttttcagaccacggcctgttagcccttccagcctacttgataccgctatctcagaggaggcccgccaggggccaggccttgaagaggaacaggatacgcaggagtcactgccatcgagtaccgggagaagacatactcttgccgaggtgtccacccgcttatctcccttaaccgctccatgtattgtggtgtcacccagcacgacagcgtctccagccgagggaacgagcagtgacagttgccttacattcagcgcctcaaagtctccagcgggcctgtcaggaacccccgctacacagggcctgctgggagcttgctcccccgtgcgattggcctcacccttcctcggctcacaaagtgcgacaccagtgttgcaagcccagggcgggctggggggagctgtgcttctgcctgtgtcttttcaggagggccgacgcgcctctgacacatcactgacgcagggcctgaaagcttttaggcagcaactgaggaaaactacacggacgaaggggttcctgggcctcaacaaaatcaagggactcgccaggcaggtgtgccaggcccccgctagtagagcatcccggggtgggctgtccccttttcacgctccagcccaatcaccaggcctacacgggggagctgccggatcccgagagggctggagtctcctcgaggaggtcctggaacagcagagactcctgcagttacagcaccaccctgcggcggctccagggtgttcacaggccccccagcctgcccctgcgccttttgtaatcgctccatgtgacggccccggggccgcacctctgccctcgacactgctgacttcggggcttcctttgcttcctccccccttgctccagacaggggcctcccctgttgcttccgccgcacagttgctcgatacacaccttcatatcggcacgggccctactgccttaccagccgtgccgccccctaggctggctcggttggcccccgggtgtgagcccctgggcctcctccagggcgattgcgagatggaggatctgatgccttgttccttgggcacttttgtgcttgttcaatag

SEQ ID NO: 250089 - DNA, 2352 bp, Artificial Sequence
  derived and/or modified sequence
atggtgatcatgtctgagttctctgcagaccccgctggtcaggggcaaggtcaacagaaacctctgagggtgggtttctatgatatcgagcgcaccttgggtaaggggaactttgcagtcgttaagcttgccagacatagagtaactaaaacgcaagtggcaatcaagatcattgataaaacccgcttagacagctctaacctagagaagatctaccgggaggtacagctcatgaaactgttaaaccaccctcacatcatcaagttatatcaggttatggagaccaaggatatgctttatatcgttacagaattcgcaaagaatggggaaatgtttgactatctcacaagtaacggtcatctgagcgagaacgaagccaggaagaagttctggcagatactcagcgccgtggagtactgccatgatcaccacattgtccatcgggaccttaaaaccgaaaaccttctcctggacgggaatatggacatcaaattggcagattttgggtttgggaacttttacaaatccggcgaacccctctctacttggtgcgggagccctccatacgccgctcctgaggtcttcgagggaaaggaatacgagggcccacagctggacatatggagtttgggtgtagtgctctatgtcctcgtgtgcgggtctttgccatttgacggcccaaacctcccgactttgcggcagagggtgctggagggacgcttcaggattcctttcttcatgtcccaggattgtgagtcgctaattcgccgtatgcttgtcgtagatcctgccaggcgcatcaccattgcccaaatccgacaacaccgctggatgcgcgctgagccttgtctaccagggcctgcttgccccgcatttagtgcccacagttatacaagtaatctgggcgactacgatgagcaagctttgggaatcatgcagactctgggagtggacaggcagcggacggtcgaaagccttcagaattcatcatacaatcacttcgcagcaatctattatctgttgcttgagcgtttaaaggaatatagaaacgcacagtgcgcccgtccaggccctgccagacagccaaggccacgctcatccgatctctccggcctcgaggttccccaagaggggctcagcactgatccattcaggccagcgttgctgtgtcctcagccccagacgctggtgcaatccgtgctgcaggctgaaatggattgcgagttacaaagctctctgcagtggcctctgttttttcctgtggacgcgagctgttcaggtgtgttccgacctaggcctgtgtcacccagctccctcctcgacaccgcgatatcggaagaggcacgccagggtcccggactcgaagaggaacaggatactcaggagtctctgcccagttcaacaggccgacgtcacaccctcgcggaagtgtcaacgcgcctttcccctctaaccgcaccgtgcatcgtcgttagccccagcaccaccgccagcccagcagagggtacatcctccgatagctgtcttactttttccgcttcgaagagccctgcagggctgtcagggacccctgcaacccagggcctgctgggggcttgttctccagtgcgtctggcgagtccctttcttggctcgcagtctgctacacccgtgctacaagcgcagggtggcctaggaggagcagtactgcttccagtaagtttccaggagggcaggcgagcctccgacacctcactcacacaggggctaaaggcctttaggcagcaactgaggaagacgacacgcacaaagggattccttgggctgaacaaaatcaaggggctggctcggcaagtctgccaggcacccgcatctagggcatctcgcggaggactcagtccctttcacgcacccgcacagtctcccggtctgcacgggggtgcagctggctcccgggagggttggagtctgttggaggaagtcctcgagcagcagagattgctacagctgcagcaccatccggctgctgcccctgggtgttcccaggccccacagcctgcacccgcaccttttgttatcgctccttgtgatggacccggagcagcgccactccctagcaccttattgacttccggactaccccttttgccacctcctctgctccagacaggcgcatctcctgtggcctcggccgctcaactgttggatacacacctacacatcggtacaggacctacagctctgcctgccgtgcctccccctcgcttagcgcgactggctcccggatgcgaacccctgggtctgctccaaggtgattgcgagatggaggatctgatgccatgctccttgggcacatttgtactggtccaatag

SEQ ID NO: 250090 - DNA, 4712 bp, Artificial Sequence
  derived and/or modified sequence
atgcggcgcggccccggaggcagcagcagcggcggcggcagccggagcagtaggcacccgagcagcgccagcggccgagcgggcggcttcctggcctgggcgctccggtggcggcggaggtgcgcgcggagccatggttatcatgtcggagttcagcgcggaccccgcgggccagggtcagggccagcagaagcccctccgggtgggtttttacgacatcgagcggaccctgggcaaaggcaacttcgcggtggtgaagctggcgcggcatcgagtcaccaaaacgcaggttgcaataaaaataattgataaaacacgattagattcaagcaatttggagaaaatctatcgtgaggttcagctgatgaagcttctgaaccatccacacatcataaagctttaccaggttatggaaacaaaggacatgctttacatcgtcactgaatttgctaaaaatggagaaatgtttgattatttgacttccaacgggcacctgagtgagaacgaggcgcggaagaagttctggcaaatcctgtcggccgtggagtactgtcacgaccatcacatcgtccaccgggacctcaagaccgagaacctcctgctggatggcaacatggacatcaagctggcagattttggatttgggaatttctacaagtcaggagagcctctgtccacgtggtgtgggagccccccgtatgccgccccggaagtctttgaggggaaggagtatgaaggcccccagctggacatctggagcctgggcgtggtgctgtacgtcctggtctgcggttctctccccttcgatgggcctaacctgccgacgctgagacagcgggtgctggagggccgcttccgcatccccttcttcatgtctcaagactgtgagagcctgatccgccgcatgctggtggtggaccccgccaggcgcatcaccatcgcccagatccggcagcaccggtggatgcgggctgagccctgcttgccgggacccgcctgccccgccttctccgcacacagctacacctccaacctgggcgactacgatgagcaggcgctgggtatcatgcagaccctgggcgtggaccggcagaggacggtggagtcactgcaaaacagcagctataaccactttgctgccatttattacctcctccttgagcggctcaaggagtatcggaatgcccagtgcgcccgccccgggcctgccaggcagccgcggcctcggagctcggacctcagtggtttggaggtgcctcaggaaggtctttccaccgaccctttccgacctgccttgctgtgcccgcagccgcagaccttggtgcagtccgtcctccaggccgagatggactgtgagctccagagctcgctgcagtggcccttgttcttcccggtggatgccagctgcagcggagtgttccggccccggcccgtgtccccaagcagcctgctggacacagccatcagtgaggaggccaggcaggggccgggcctagaggaggagcaggacacgcaggagtccctgcccagcagcacgggccggaggcacaccctggccgaggtctccacccgcctctccccactcaccgcgccatgtatagtcgtctccccctccaccacggcaagtcctgcagagggaaccagctctgacagttgtctgaccttctctgcgagcaaaagccccgcggggctcagtggcaccccggccactcaggggctgctgggcgcctgctccccggtcaggctggcctcgcccttcctggggtcgcagtccgccaccccagtgctgcaggctcaggggggcttgggaggagctgttctgctccctgtcagcttccaggagggacggcgggcgtcggacacctcactgactcaagggctgaaggcctttcggcagcagctgaggaagaccacgcggaccaaagggtttctgggactgaacaaaatcaaggggctggctcgccaggtgtgccaggcccccgccagccgggccagcaggggcggcctgagccccttccacgcccctgcacagagcccaggcctgcacggcggcgcagccggcagccgggagggctggagcctgctggaggaggtgctagagcagcagaggctgctccagttacagcaccacccggccgctgcacccggctgctcccaggccccccagccggcccctgccccgtttgtgatcgccccctgtgatggccctggggctgccccgctccccagcaccctcctcacgtcggggctcccgctgctgccgcccccactcctgcagaccggcgcgtccccggtggcctcagcggcgcagctcctggacacacacctgcacattggcaccggccccaccgccctccccgctgtgcccccaccacgcctggccaggctggccccaggttgtgagcccctggggctgctgcagggggactgtgagatggaggacctgatgccctgctccctaggcacgtttgtcctggtgcagtgagggcagccctgcatcctggcacggacactgactcttacagcaataacttcagaggaggtgaagacatctggcctcaaagccaagaactttctagaagcgaaataagcaatacgttaggtgttttggctttttagtttatttttgttttatttttttcttgcactgagtgacctcaactttgagtagggactggaaactttaggaagaaagataattgaggggcgtgtctgggggcgggggcaggaggggagcggggtggagggaacacgtgcagtgccgtggtgtggggatctcggcccctctctctgggttcgtcgtggttgagatgattacctcggacgtctacggaaacgagcgggcgcattgttgtccgcttgtgtgtgtgtgtgtgtgtgtgtgtgtgcgcgtgcattgattactatccatttctttagtcaacgctctccacttcctgatttctgctttaaggaaaactgtgaactttctgcttcatgtatcagttttaaagcagcccaggcaaagatcatctacagattctaggaattctctcccctgaaatcaaaacctggaagacttttttttcttattttagttgagaagtttcataaactgctcaaggattagttttccaggactctgcggaggaacggcaggaagaacctcagagagggcagaggtgacttcaaagtgctggggactccgtcctgagggtcacttggccctgagcccctgcgtgcccttgcggaagcccagaagcttcttcctgctgcacctcccgtttccgctgctgctgacgtttatgcatttcatgatggggtccaacaagaacacctgacttgggtgaagttgtgcaatattggaggctgactgtagggctgggcagctgggagacaggctcatggctcatggctcatggctcagggcggtgcctgccctgggccgggacccccctccccaccccccacctaggctttttgggttttgttcaaggaaggtaaagtgagaggtttaggtcagtgtttttaagtttttgttttttttttaaagcaaatcctgtatatgtatctacatgggagacaggtagacactacttatttgttacattttgtactatacgtttgtgttccaggtttcagcttccctcgctcctgttgttaagaagcgtccctgtcagcacaggtgtgcattgaggaaggggccccagggccttcgctccctcagcactggggtggaggcggcaggaaggggcggcccttacctggcaggtctgggcgcacctttagcaggtggactccgtggggctccaccagccagaagcctctggaaggcaacgaaggcaatgctgctccctgagtccagtccccgcccccaaacccagcccaggtgccttcagctacttcggcttcttaaaccctgcagtgttaaacagaggcattgagaaaggggaaaggcgggtatttttaaaagccaaagattgacccagttacttgagggtagggaggcgggcccagtgcaggaggctgcatccctggcctgctggtgcccaccgggggctgtgcctgtgccgggccgcagggaagctggctgcccccattcctgctgctgctgctgctgctgctctgtggctgtttcaaagactgggcgaaaggctgtccggagggcagaccaggtgccttgccgcagagaaaacaccaaagtctcctgttcgctcataaagaagtttttgggatgggagagaatccagaccatcttggggcagccaggcccttgccttcatttttacagaggtagcacaactgattccaacacaaaaccccttcccctttttaaaatgatttctgttctaatgccatagatcaaaggcctcagaaaccattgtgtgtttcctctttgaagcaatgacaagcactttactttcacggtggtttttgttttttcttattgctgtggaacctcttttggaggacgttaaaggcgtgttttacttgtttttttaagagtgtgtgatgtgtgttttgtagatttcttgacagtgctgtaatacagacggcaatgcaatagcctatttaaagacactacgtgatctgattgagatgtacatagtttttttttttaccataactgaattattttatctcttatgttaacatgagaaatgtatgccaaatgattagttgatgtatgttttttaatttaatatttaaataaaatatttggaaggaaaaaa

SEQ ID NO: 250091 - DNA, 954 bp, Artificial Sequence
  derived and/or modified sequence
atggcaagtgtgattccggcctctaacaggtccatgcgcagcgatcggaatacatacgttggcaagcgcttcgtccacgtgaagaacccctatctggatctcatggacgaggacatactgtaccacctcgacttagggactaagacgcacaacctccctgctatgtttggcgacgtgaagttcgtgtgtgtcggggggagcccaaatagaatgaaggctttcgcactgttcatgcataaggagctcggctttgaagaggccgaagaggacattaaggacatctgtgcagggactgacaggtactgtatgtacaagactgggccagttctggccatttcacacggcatgggcatcccttccatcagtatcatgctccatgaactgatcaaactgcttcatcatgccaggtgctgtgacgtgaccattatacgcattgggacctctgggggcatagggatcgctcccggaacagtggtgatcacagacatagcagtcgattcgttcttcaagccaagattcgagcaagtgatactcgacaacattgtcacgcggagcacagagctggataaggagctgagcgaggaactatttaactgctcaaaggagatccctaacttccctactctcgtgggtcatacgatgtgtacctacgacttttatgagggacaggggagactcgatggggctctgtgtagtttttctagggagaaaaagttggactatctgaagcgcgcttttaaagccggcgtccgtaatattgaaatggagtctactgtgtttgctgccatgtgtgggctgtgcggactcaaagcagctgttgtttgtgtgacgctcctcgatcggctggactgtgatcaaattaatctgccccatgacgtgctggtagagtaccaacaaagaccacagctcctgattagcaatttcatccggcgccgcctggggttgtgtgattag

SEQ ID NO: 250092 - DNA, 954 bp, Artificial Sequence
  derived and/or modified sequence
atggccagcgtcatcccagccagcaacagatccatgagaagtgacaggaacacctacgtgggcaagagatttgtgcacgtgaagaacccctacctggacctgatggatgaggacatcctgtaccacctggacctgggcaccaagacccacaacctgcctgccatgtttggagatgtgaagtttgtgtgtgtgggcggcagccccaacaggatgaaggcctttgccctcttcatgcacaaggagctgggctttgaggaggccgaggaggacatcaaggacatctgtgccggcacagaccgctactgcatgtacaagacaggccctgtgctggccatcagccacggcatgggcatccccagcatcagcatcatgctgcacgagctgatcaagctgctgcaccacgcccgctgctgtgatgtgaccatcatcagaattggcaccagcggcggcattggaattgcccctggcaccgtggtgatcacagacattgctgtggacagcttcttcaagcccaggtttgagcaggtgatcctggacaacatcgtgaccaggagcacagagctggacaaggagctgtctgaggagctgttcaactgcagcaaggagatccccaacttccccaccctggtgggccacaccatgtgcacctatgacttctatgagggccagggccgcctggatggagccctgtgcagcttcagccgggagaagaagctggactacctgaagagggccttcaaggccggcgtgagaaatattgagatggagagcacagtgtttgctgccatgtgtggcctgtgtggcctgaaggctgctgtggtgtgtgtgaccctgctggaccggctggactgtgaccagatcaacctgccccatgatgtgctggtggagtaccagcagaggccccagctgctgatcagcaacttcatcagaagaaggctgggcctgtgtgactag

SEQ ID NO: 250093 - DNA, 954 bp, Artificial Sequence
  derived and/or modified sequence
atggccagcgtgatccccgccagcaaccggagcatgcggagcgacagaaacacgtacgtgggcaagagattcgtgcatgtgaagaacccttatctcgatctaatggatgaagatatactctaccacctggatctgggcactaagacgcacaatctgccagcaatgtttggagacgtgaagttcgtgtgtgtaggggggtctcccaaccgcatgaaagcgtttgccttattcatgcataaggaactcggtttcgaagaagccgaggaggacattaaagatatttgcgctggtaccgatcgttactgcatgtacaagacaggccccgtcctggccatctcccatggtatgggcatcccttctatctcgatcatgctgcatgagctgattaagctgctccaccatgcccgctgttgcgatgttacaatcatcaggattggaacctccggcggaatcggtatcgctcccgggacagtcgtgatcacagacattgctgtagattccttttttaaacctcgatttgagcaggtgatattagataatattgtgacgaggagcacagaactcgacaaagaactcagtgaggaactttttaattgcagtaaggagattccaaactttcctaccctggtaggccacacaatgtgtacatatgacttctatgagggacagggaaggctggatggagccctgtgctccttttcccgcgaaaagaaattggattatttaaagagggctttcaaggcgggcgtgagaaatattgagatggagtccaccgtgtttgccgccatgtgtggcctgtgcggacttaaggctgctgttgtgtgtgtgaccctgttggaccgtctagattgcgatcaaatcaacctgccgcatgatgtgttggtggagtaccaacagagaccccaactgctgatatccaattttattcgccgacggttaggtctgtgtgattag

SEQ ID NO: 250094 - DNA, 954 bp, Artificial Sequence
  derived and/or modified sequence
atggcatctgtcatcccagcaagcaatcggtctatgagatctgatcggaatacctatgtagggaaaagatttgtccacgtgaaaaacccataccttgatctgatggacgaggatattttgtatcatcttgatcttggtaccaagactcacaatctccctgccatgttcggggatgtgaagttcgtatgcgtgggagggagccccaatcgcatgaaagccttcgccctattcatgcacaaagaactgggctttgaggaggctgaggaagacattaaagacatctgcgcaggtaccgaccgctattgcatgtacaaaacgggaccagtgttggcgatcagccatggcatgggcatcccatctatctcgatcatgctgcatgaattgatcaagttgctgcatcatgccagatgttgtgatgttaccattataaggataggcacaagtggaggaatcggcatcgcccctggtactgtcgtgataacagatatcgctgtggatagctttttcaagccccgatttgagcaagtcattcttgataatatcgtaacgcgcagcacagaactagacaaggagctctctgaagaattgtttaactgtagcaaagaaattccgaatttcccgacactggtggggcataccatgtgcacatacgacttctacgagggacaagggagattggacggagctctctgctctttttctagggagaaaaagttggattatctgaagcgcgcttttaaagccggtgtccggaacattgagatggagtctaccgtgtttgccgcaatgtgcgggttgtgcgggctcaaagcagccgtggtatgcgtgacactcttggaccgtttggactgcgatcagatcaacctgcctcacgacgtcctggtcgagtatcagcagagaccccagctgctgataagtaacttcatccgcagacggctggggttgtgcgattag

SEQ ID NO: 250095 - DNA, 954 bp, Artificial Sequence
  derived and/or modified sequence
atggcgtctgtgatccccgcctccaatagatctatgcgcagcgatagaaacacatatgtcggcaagcggtttgtgcatgtgaaaaacccctatttggatcttatggatgaagacattctgtaccacttagacctcggtaccaagacacataatctgcctgccatgtttggggatgtgaagtttgtgtgtgtgggtggctccccaaacagaatgaaagcatttgctctattcatgcacaaggaattagggttcgaggaggcagaagaggacattaaggacatatgcgcaggaaccgatagatactgcatgtataagaccgggcccgtactcgcgatctcccacgggatgggaatcccttcaatatcaatcatgctgcacgaattgattaaactcctgcaccacgccaggtgttgcgatgttacaataatcagaatcggcactagcggtggtatcggcatcgctccaggcactgtcgtcattactgatatcgcggtggactcttttttcaagcccaggtttgagcaagttatcctggataacatcgtcacgagatcaaccgagctggataaggaactctcagaagaactttttaattgtagcaaggagatccccaactttcctactttagtaggacatacaatgtgtacatatgatttctatgagggtcagggccgcttagacggtgcactttgctcgttttcccgcgagaaaaaattagactatctgaagcgtgcgttcaaggccggggtccggaacatcgagatggaaagcacagtctttgctgcgatgtgtggcttgtgtggactcaaggccgcagtcgtatgcgttactctactggaccgtttggactgcgatcaaattaatttgccccacgatgtgctggtggaataccagcagagaccccagctcttaatctctaactttatcagacgcaggctggggctatgtgactag

SEQ ID NO: 250096 - DNA, 954 bp, Artificial Sequence
  derived and/or modified sequence
atggcctcagttattcctgcatcaaacagatctatgaggagtgatcgaaacacatatgtcggcaaaaggttcgtccatgtgaagaacccctacctggacctgatggatgaggacatcttgtaccacttggacctgggcaccaagacccacaatttacctgctatgttcggggacgtgaagttcgtgtgtgttggcgggtcccccaatagaatgaaagccttcgccctgttcatgcataaagaattaggatttgaggaagccgaggaggatattaaagatatctgcgctggaactgacaggtattgtatgtataaaactgggcccgtgctcgcaatttcccatggaatgggcatcccctccataagtattatgttacatgaactaattaagctgctacatcatgcaaggtgttgcgatgtgacaatcattcggataggcacatctgggggcataggcatcgcccctggtaccgtggtgattactgatattgccgttgatagcttcttcaaaccaagattcgagcaggtgatactggacaatatcgtgactagaagcacagaactagacaaggaactgtcagaagagctctttaactgttctaaagaaatcccaaattttccaactctcgtcggtcatactatgtgtacttacgatttttacgagggccagggaagactggacggggcactttgttcctttagccgcgagaaaaaactggactatctgaaaagagcttttaaagctggcgtccgtaatatcgaaatggagagtaccgtgttcgcagccatgtgcggtttgtgtggcctgaaggcagctgtagtgtgtgtcaccctgctggaccggctcgattgcgatcagattaacttgccacacgacgtcctggtggaatatcagcaaagaccccagctgctcatctcaaacttcatcagacgccgactaggactttgcgactag

SEQ ID NO: 250097 - DNA, 954 bp, Artificial Sequence
  derived and/or modified sequence
atggccagcgtgatccccgccagcaacagaagcatgagaagcgacagaaacacctacgtgggcaagagattcgtgcacgtgaagaacccctacctggacctgatggacgaggacatcctgtaccacctggacctgggcaccaagacccacaacctgcccgccatgttcggcgacgtgaagttcgtgtgcgtgggcggcagccccaacagaatgaaggccttcgccctgttcatgcacaaggagctgggcttcgaggaggccgaggaggacatcaaggacatctgcgccggcaccgacagatactgcatgtacaagaccggccccgtgctggccatcagccacggcatgggcatccccagcatcagcatcatgctgcacgagctgatcaagctgctgcaccacgccagatgctgcgacgtgaccatcatcagaatcggcaccagcggcggcatcggcatcgcccccggcaccgtggtgatcaccgacatcgccgtggacagcttcttcaagcccagattcgagcaggtgatcctggacaacatcgtgaccagaagcaccgagctggacaaggagctgagcgaggagctgttcaactgcagcaaggagatccccaacttccccaccctggtgggccacaccatgtgcacctacgacttctacgagggccagggcagactggacggcgccctgtgcagcttcagcagagagaagaagctggactacctgaagagagccttcaaggccggcgtgagaaacatcgagatggagagcaccgtgttcgccgccatgtgcggcctgtgcggcctgaaggccgccgtggtgtgcgtgaccctgctggacagactggactgcgaccagatcaacctgccccacgacgtgctggtggagtaccagcagagaccccagctgctgatcagcaacttcatcagaagaagactgggcctgtgcgactag

SEQ ID NO: 250098 - RNA, 954 nt, Artificial Sequence
  derived and/or modified sequence
auggcgucugugauccccgccuccaauagaucuaugcgcagcgauagaaacacauaugucggcaagcgguuugugcaugugaaaaaccccuauuuggaucuuauggaugaagacauucuguaccacuuagaccucgguaccaagacacauaaucugccugccauguuuggggaugugaaguuuguguguguggguggcuccccaaacagaaugaaagcauuugcucuauucaugcacaaggaauuaggguucgaggaggcagaagaggacauuaaggacauaugcgcaggaaccgauagauacugcauguauaagaccgggcccguacucgcgaucucccacgggaugggaaucccuucaauaucaaucaugcugcacgaauugauuaaacuccugcaccacgccagguguugcgauguuacaauaaucagaaucggcacuagcggugguaucggcaucgcuccaggcacugucgucauuacugauaucgcgguggacucuuuuuucaagcccagguuugagcaaguuauccuggauaacaucgucacgagaucaaccgagcuggauaaggaacucucagaagaacuuuuuaauuguagcaaggagauccccaacuuuccuacuuuaguaggacauacaauguguacauaugauuucuaugagggucagggccgcuuagacggugcacuuugcucguuuucccgcgagaaaaaauuagacuaucugaagcgugcguucaaggccgggguccggaacaucgagauggaaagcacagucuuugcugcgauguguggcuuguguggacucaaggccgcagucguaugcguuacucuacuggaccguuuggacugcgaucaaauuaauuugccccacgaugugcugguggaauaccagcagagaccccagcucuuaaucucuaacuuuaucagacgcaggcuggggcuaugugacuag

SEQ ID NO: 250099 - RNA, 954 nt, Artificial Sequence
  derived and/or modified sequence
auggccucaguuauuccugcaucaaacagaucuaugaggagugaucgaaacacauaugucggcaaaagguucguccaugugaagaaccccuaccuggaccugauggaugaggacaucuuguaccacuuggaccugggcaccaagacccacaauuuaccugcuauguucggggacgugaaguucguguguguuggcgggucccccaauagaaugaaagccuucgcccuguucaugcauaaagaauuaggauuugaggaagccgaggaggauauuaaagauaucugcgcuggaacugacagguauuguauguauaaaacugggcccgugcucgcaauuucccauggaaugggcauccccuccauaaguauuauguuacaugaacuaauuaagcugcuacaucaugcaagguguugcgaugugacaaucauucggauaggcacaucugggggcauaggcaucgccccugguaccguggugauuacugauauugccguugauagcuucuucaaaccaagauucgagcaggugauacuggacaauaucgugacuagaagcacagaacuagacaaggaacugucagaagagcucuuuaacuguucuaaagaaaucccaaauuuuccaacucucgucggucauacuauguguacuuacgauuuuuacgagggccagggaagacuggacggggcacuuuguuccuuuagccgcgagaaaaaacuggacuaucugaaaagagcuuuuaaagcuggcguccguaauaucgaaauggagaguaccguguucgcagccaugugcgguuuguguggccugaaggcagcuguagugugugucacccugcuggaccggcucgauugcgaucagauuaacuugccacacgacguccugguggaauaucagcaaagaccccagcugcucaucucaaacuucaucagacgccgacuaggacuuugcgacuag

SEQ ID NO: 250100 - protein, 783 aa, Artificial Sequence
  derived and/or modified sequence
MGCAPSIHISERLVAEDAPSPAAPPLSSGGPRLPQGQKTAALPRTRGAGLLESELRDGSGKKVAVADVQFGPMRFHQDQLQVLLVFTKEDNQCNGFCRACEKAGFKCTVTKEAQAVLACFLDKHHDIIIIDHRNPRQLDAEALCRSIRSSKLSENTVIVGVVRRVDREELSVMPFISAGFTRRYVENPNIMACYNELLQLEFGEVRSQLKLRACNSVFTALENSEDAIEITSEDRFIQEWQGIYYAKKKNGDNIQQNVKIIPVIGQGGKIRHYVSIIRVCNGNNKAEKISECVQSDTHTDNQTGKHKDRRKGSLDVKAVASRATEVSSQRRHSSMARIHSMTIEAPITKVINIINAAQESSPMPVTEALDRVLEILRTTELYSPQFGAKDDDPHANDLVGGLMSDGLRRLSGNEYVLSTKNTQMVSSNIITPISLDDVPPRIARAMENEEYWDFDIFELEAATHNRPLIYLGLKMFARFGICEFLHCSESTLRSWLQIIEANYHSSNPYHNSTHSADVLHATAYFLSKERIKETLDPIDEVAALIAATIHDVDHPGRTNSFLCNAGSELAILYNDTAVLESHHAALAFQLTTGDDKCNIFKNMERNDYRTLRQGIIDMVLATEMTKHFEHVNKFVNSINKPLATLEENGETDKNQEVINTMLRTPENRTLIKRMLIKCADVSNPCRPLQYCIEWAARISEEYFSQTDEEKQQGLPVVMPVFDRNTCSIPKSQISFIDYFITDMFDAWDAFVDLPDLMQHLDNNFKYWKGLDEMKLRNLRPPPE

SEQ ID NO: 250101 - DNA, 2352 bp, Artificial Sequence
  derived and/or modified sequence
atggggtgtgcaccgtccattcatatcagcgagcgactggtggcagaagatgcacctagccctgccgctccgcctttgagtagcggcggcccacgcctgcctcaaggtcagaagacggccgctctgccgaggacgcggggcgctggactgctagaaagcgaattgagggacggatccgggaaaaaggtggctgtagccgacgttcagtttggcccgatgcggtttcaccaggatcagctgcaggtcttacttgttttcactaaggaagataaccagtgtaatggcttctgtagagcgtgtgagaaagcgggttttaagtgtacggtgacaaaggaggcgcaggcagtacttgcctgcttcctggataagcaccacgacatcattataatcgatcacaggaacccaaggcagttggatgctgaagccttatgtcgaagtattaggtctagtaaactttcagagaacaccgtaatagtgggcgtcgtgcgcagggtcgacagagaagagctgagtgtaatgccttttattagtgctggcttcacacggaggtatgttgaaaatcctaatattatggcatgttacaacgaactccttcagctggagtttggggaggtgcgttctcaactcaaactaagggcgtgtaattccgtgtttaccgccctagaaaactccgaggatgctatagaaattacatcggaagatagattcattcaggaatggcaggggatatactatgcgaaaaagaagaacggagataatattcaacagaacgttaaaataatccccgtcattggtcaaggaggaaaaattcggcactacgtgtcaattattcgcgtttgtaacggaaataacaaagcggaaaagatcagtgagtgtgtgcagagtgatacccacacagataatcaaaccggcaagcacaaggatcgccggaaaggaagccttgacgtcaaagcagtcgcctcacgggctacagaagtaagttcacagaggcggcattcatctatggccaggattcacagcatgaccatcgaggctccaatcactaaggtgattaacatcattaatgctgcccaggaaagctcacctatgcccgtgactgaggcattagatcgcgtgctggagatcctgcggaccacagagctgtactcaccccagtttggcgccaaagatgatgacccgcacgcaaatgatctcgtgggaggcctcatgtccgacggcttacggcgcttgagtggaaacgaatatgtgctgtcaaccaagaacacgcagatggttagttctaacattatcactcctatttctcttgatgacgtcccaccaagaatcgctcgggccatggagaatgaagaatattgggatttcgacatttttgaacttgaagctgcgacccataaccggcccctgatctatttaggattgaaaatgtttgctagatttgggatctgtgagttcttacattgtagcgagtccactttgagatcctggctgcaaatcattgaagcaaactaccattcctcgaatccttatcataacagcacacacagtgctgacgttctccatgccaccgcctattttctgtccaaagaacggattaaagaaacattggacccaatagatgaggttgccgcccttattgccgctactattcacgacgtggatcaccctggacgcacaaacagtttcctatgtaatgctggaagtgagctggccatcctttataatgatacggcagtcctggaaagccaccatgcggctctcgcgtttcagcttactaccggtgatgataaatgcaacatcttcaagaacatggaacggaatgactatcgaaccctccgccagggcattatcgatatggttctggcgacggaaatgactaaacacttcgagcatgtgaataagtttgtgaactccattaacaagcctcttgccacactagaggaaaatggggagactgacaagaatcaggaagttattaataccatgttacgaactcccgagaatcgtacgcttataaagagaatgctgatcaaatgtgctgacgtctcaaatccttgtagacctttacagtactgcatcgagtgggccgcacgaattagtgaggagtacttctctcagacagatgaggagaagcagcagggattgcccgtggtgatgcctgtcttcgacagaaacacatgctcaattcccaagtcgcaaatatccttcatcgattactttataaccgatatgtttgatgcctgggatgcatttgtggatctaccggatctgatgcagcatcttgacaacaactttaagtactggaaggggctggatgagatgaaacttcggaacctccgtccgccaccagaatag

SEQ ID NO: 250102 - DNA, 2352 bp, Artificial Sequence
  derived and/or modified sequence
atgggctgtgcccccagcatccacatcagcgagcggctggtggccgaggatgcccccagccctgctgccccacccctgagcagcggcggcccccggctgccccagggccagaagacagctgccctgcccaggaccaggggggccggcctgctggagagcgagctgagagatggcagcggcaagaaggtggccgtggctgatgtgcagtttggccccatgaggttccaccaggaccagctgcaggtgctgctggtgttcaccaaggaggacaaccagtgcaatggcttctgccgggcctgtgagaaggccggcttcaagtgcaccgtgaccaaggaggcccaggccgtgctggcctgcttcctggacaagcaccacgacatcatcatcatcgaccacaggaacccccggcagctggatgctgaggccctgtgccgcagcatccgcagcagcaagctgtctgagaacacagtcatcgtgggcgtggtgagaagagtggaccgggaggagctgtctgtgatgcccttcatctctgctggcttcacccggcgctacgtggagaaccccaacatcatggcctgctacaatgagctgctgcagctggagtttggagaggtgcgcagccagctgaagctgcgggcctgcaacagcgtcttcaccgccctggagaacagtgaagatgccatcgagatcaccagtgaagatcgcttcatccaggagtggcagggcatctactatgccaagaagaagaatggagacaacatccagcagaatgtgaagatcatccctgtgattggccagggcggcaagatccgccactacgtgtccatcatccgggtgtgcaatggaaacaacaaggccgagaagatcagtgaatgtgtgcagagcgacacccacacagacaaccagacaggcaagcacaaggacaggaggaagggcagcctggatgtgaaggctgtggccagccgggccacagaggtgagcagccagaggaggcacagctccatggcccgcatccacagcatgaccatcgaggcccccatcaccaaggtgatcaacatcatcaatgctgcccaggagagcagccccatgcctgtgacagaggccctggacagagtgctggagatcctgcggaccacagagctgtacagcccccagtttggagccaaggatgatgacccccacgccaatgacctggtgggcggcctgatgtctgatggcctgcggcggctgtctggaaatgaatatgtgctgagcaccaagaacacccagatggtgagcagcaacatcatcacccccatcagcctggatgatgtgcccccacgcatcgcccgggccatggagaatgaggagtactgggactttgacatctttgagctggaggccgccacccacaaccggcccctcatctacctgggcctgaagatgtttgccaggtttggcatctgtgagttcctgcactgcagcgagagcaccctgcgctcctggctgcagatcatcgaggccaactaccacagcagcaacccctaccacaacagcacccacagcgcagatgtgctgcacgccacagcctacttcctgagcaaggagcgcatcaaggagaccctggaccccattgatgaggtggccgccctgattgctgccaccatccatgatgtggaccaccctggccgcaccaacagcttcctgtgcaatgccggcagcgagctggccatcctgtacaatgacacagctgtgctggagagccaccacgccgccctggccttccagctgaccactggagatgacaagtgcaacatcttcaagaacatggagagaaatgactaccgcaccctgcggcagggcatcatcgacatggtgctggccacagagatgaccaagcactttgagcacgtgaacaagtttgtgaacagcatcaacaagcccctggccaccctggaggagaatggagaaacagacaagaaccaggaggtgatcaacaccatgctgcggaccccagagaacagaaccctcatcaagaggatgctgatcaagtgtgctgatgtgagcaacccctgccggcccctgcagtactgcatcgagtgggccgcccgcatcagcgaggagtacttcagccagacagatgaggagaagcagcagggcctgcctgtggtgatgcctgtgtttgacaggaacacctgcagcatccccaagagccagatctccttcatcgactacttcatcacagacatgtttgatgcctgggatgcctttgtggacctgcctgacctgatgcagcacctggacaacaacttcaagtactggaagggcctggatgagatgaagctgaggaacctgcggcccccacctgagtag

SEQ ID NO: 250103 - DNA, 2352 bp, Artificial Sequence
  derived and/or modified sequence
atgggctgcgcccccagcatccacatcagcgagcggctggtggccgaagacgcgccaagcccagccgcccccccactgtcaagcgggggaccaaggctaccacagggacagaaaactgctgctctgcctcgcactcgaggcgcgggcctcctggaatcagagctccgcgatggctccggcaaaaaagttgctgtcgctgatgtacagttcgggcccatgagattccaccaggatcagctacaggttctgctcgtgttcaccaaggaggataatcagtgcaacgggttttgtagggcttgcgagaaggctgggtttaagtgtacagtcacaaaagaggcacaagcagtgctggcctgttttcttgacaagcaccacgatattattatcatcgaccaccggaatcctaggcagttggacgccgaggcactgtgccgaagcatacgcagtagcaagctcagtgaaaataccgtgatcgtgggtgtggtaagacgagttgatagagaggaactttccgtaatgccttttatctcggccggcttcactagaagatatgtggaaaaccccaacattatggcttgctataatgaactactgcagttagaattcggcgaggtgcggagtcagttgaaattgcgagcatgcaactctgtgtttacggcactagagaacagcgaggacgcaattgaaataacctccgaagatagatttatacaggaatggcaaggcatctactatgccaagaagaagaatggggataatatccagcagaacgttaagatcataccagtgatcggtcaggggggcaagatccgccactatgtgtctatcatccgggtgtgcaacggcaataacaaggccgagaaaatttcagagtgcgttcagtccgacacccacaccgacaaccagacagggaaacacaaggatcgccgcaaggggtccctggatgtgaaagcagtagctagcagggcaaccgaagtatcttcccagcgacgtcactccagtatggccagaatccactccatgaccatcgaagcaccgatcaccaaggttatcaatattatcaacgccgctcaggaatcttcgcctatgcctgtgacggaggccctggatcgggtgctggagatcctgagaacaaccgagctgtacagcccacagttcggagcgaaggacgatgatcctcacgcgaatgacttagtgggtggcctgatgagtgacggactccggcgtctgtctggaaatgagtatgtgctctccaccaaaaacactcagatggtcagtagcaacattatcacgcccatctctctagacgacgtgcctcctcggattgcaagggccatggagaatgaagaatattgggatttcgacattttcgagctcgaggccgcgacccacaaccggccactgatttacctggggttaaagatgtttgcacggttcggcatctgcgagtttttgcactgctctgagtcgacactcaggtcatggctgcagattatcgaggccaactatcacagtagcaacccttatcataactccacgcattcagcagatgtgctgcacgctacagcttattttcttagtaaagagagaataaaagagaccttggacccaatcgatgaagtggctgctctgattgcggctaccatccacgatgtggaccacccaggacgcaccaacagcttcctttgtaatgccgggtccgaactagccatcctgtacaacgataccgcggtgctggagtcacaccacgctgctttagcatttcagttgacaaccggagacgataagtgtaatatctttaaaaacatggaacgcaatgactacagaactctgcgccagggcattattgacatggttctggcaacggagatgacaaagcattttgagcacgtgaacaaattcgttaatagtatcaacaagccactggctacgctcgaggagaacggagagacagacaaaaatcaggaggttattaacacaatgctgaggactccagagaatcgcacacttatcaaacggatgcttattaagtgcgccgatgtttcaaacccttgtcgtcctctgcaatactgcattgagtgggcagccaggatttcggaggagtacttcagccaaacagacgaagagaagcaacaagggctgccagtcgtcatgcctgtattcgatcggaatacatgcagtatacctaagtctcaaatcagtttcatcgactattttatcaccgacatgtttgacgcctgggacgctttcgtggacttgcccgacctgatgcaacacctggataataacttcaagtactggaaggggctggacgaaatgaaacttcgaaacttacgcccccctcccgagtag

SEQ ID NO: 250104 - DNA, 2663 bp, Artificial Sequence
  derived and/or modified sequence
cgccgcagcgcccgcaccgcgataaaaggggcggccgcgtttcctgacgcgagatccgcgctcgccgccgcccgcccaggcggcgatgacacggcgcccgcggcggcccggaggcgccgggtgggccgtttgctgaccggatcgcggctacccgccagcgtgtccgcggcgccgccgccagcatgggctgtgccccgagcatccacatttccgagcgcctggtggccgaggacgcgcctagccccgcggcaccgccgctgtcgtccggcgggccgcgcctcccgcagggccagaagacggccgccttgccccggacccgcggcgccggcctcttggagtcggagcttcgcgacggcagcggcaagaaggtagcagtagctgatgtgcagtttggccccatgagatttcatcaagatcaacttcaggtacttttagtgtttaccaaagaagataaccaatgtaatggattctgcagggcatgtgaaaaagcagggtttaagtgtacagttaccaaggaggctcaggctgtccttgcctgtttcctggacaaacatcatgacattatcatcatagaccacagaaatcctcgacagctggatgcagaggcactgtgcaggtctatcagatcatcaaaactctcagaaaacacagttattgttggtgtagtacgcagggtggatagagaagagttgtccgtaatgcctttcatttctgctggatttacaaggaggtatgtagaaaaccccaacatcatggcctgctacaatgaactgctccagctggagtttggagaggtgcgatcacaactgaaactcagggcttgtaactcagtattcactgcattagaaaacagtgaagatgcaattgaaattacaagcgaagaccgttttatacaggagtggcaaggaatttactatgccaaaaagaaaaacggagataatatacaacaaaatgtgaagataatacctgtcattggacagggaggaaaaattagacactatgtgtccattatcagagtgtgcaatggcaacaataaggctgagaaaatatccgaatgtgttcagtctgacactcatacagataatcagacaggcaaacataaagacaggagaaaaggctcactagacgtcaaagctgttgcctcccgtgcaactgaagtttccagccagagacgacactcttccatggcccggatacattccatgacaattgaggcgcccatcaccaaggtaatcaatattatcaatgctgcccaggaaagtagtcccatgcctgtgacagaagccctagaccgtgtgctggaaattctaagaaccactgagttatattcaccacagtttggtgctaaagatgatgatccccatgccaatgaccttgttgggggcttaatgtctgatggtttgcgaagactatcagggaatgaatatgttctttcaacaaaaaacactcaaatggtttcaagcaatataatcactcccatctcccttgatgatgtcccaccacggatagctcgggccatggaaaatgaggaatactgggactttgatatttttgaactggaggctgccacccacaataggcctttgatttatcttggtctcaaaatgtttgctcgctttggaatctgtgaattcttacactgctccgagtcaacgctaagatcatggttacaaattatcgaagccaattatcattcctccaatccctaccacaattctacacattctgctgatgtgcttcatgccactgcctattttctctccaaggagaggataaaggaaactttagatccaattgatgaggtcgctgcactcatcgcagccaccattcatgatgtggatcaccctgggagaaccaactccttcctgtgtaatgctggaagtgagctggccattttgtacaatgacactgctgtgctggagagccaccatgcggccttggccttccagctgaccactggagatgataaatgcaatatatttaaaaacatggagaggaatgattatcggacactgcgccaggggattatcgacatggtcttagccacagaaatgacaaagcactttgagcatgtcaacaaatttgtcaacagcatcaacaaacccttggcaacactagaagaaaatggggaaactgataaaaaccaggaagtgataaacactatgcttaggactccagagaaccggaccctaatcaaacgaatgctgattaaatgtgctgatgtgtccaatccctgccgacccctgcagtactgcatcgagtgggctgcacgcatttcggaagaatatttttctcagactgatgaagagaagcagcagggcttacctgtggtgatgccagtgtttgacagaaatacctgcagcatccccaaatcccaaatctctttcattgattacttcatcacagacatgtttgatgcttgggatgcctttgtagacctgcctgatttaatgcagcatcttgacaacaactttaaatactggaaaggactggacgaaatgaagctgcggaacctccgaccacctcctgaatagtgggagacaccacccagagccctgaagctttgttccttcggtcatttggaattcctgagggcagccagagctccttggtcctttcagtactaggcagaacagcccccgatctgcatagcctgtgaaagc

SEQ ID NO: 250105 - DNA, 2352 bp, Artificial Sequence
  derived and/or modified sequence
atgggctgcgccccatctatacatattagcgagagattagtggcagaggacgcaccatctcctgcagctccgccactgagctctggcggaccaaggctcccacagggacagaaaacagccgctctgccacggaccaggggcgctggcttgctggaaagtgagttgcgcgacggctcggggaagaaagtagccgtcgccgacgtccagtttggacctatgagattccatcaggatcaattgcaggttctattagtgttcacgaaggaggataaccagtgtaacgggttttgccgggcatgcgagaaagctggatttaagtgcacagtgactaaggaagcacaggcggtgctcgcttgcttcttggacaaacaccatgacatcatcataattgaccacaggaaccctagacagctggatgccgaagcactctgccgctctatccggagtagcaaattgtcagagaacacggtgattgtgggcgtcgtccgaagggtggaccgcgaggaattgtcagtgatgccctttataagcgctggctttacaagaaggtacgtcgaaaaccccaacataatggcgtgttacaacgagctattgcaactggagttcggggaggtgagatctcagctgaagttgagggcttgtaatagcgtcttcaccgctctagaaaattccgaggacgctatagagattacatccgaggatcggttcatacaggagtggcagggaatctactacgccaagaaaaagaatggggataacattcagcaaaacgttaaaattattccagtgatcggccagggcggaaagatccggcactatgtgagtattatccgcgtctgtaacggaaacaataaagccgagaaaatctcagaatgcgttcagtcggacacgcatactgacaatcagactgggaagcataaagatagaaggaagggaagcctcgacgtaaaagcagtcgcctcaagggcgaccgaggtgagctcccaaaggaggcattccagtatggcacggattcattccatgaccatcgaagccccaatcacaaaagtgatcaacattatcaatgctgcccaggaatcatcaccaatgcctgtaaccgaggctctggacagagtcctcgaaatccttcgtaccactgaactgtattcaccgcagttcggcgctaaggacgacgaccctcatgccaatgaccttgttggagggctgatgagcgacgggctgaggagattgtcgggtaatgagtacgtgttgagcacaaaaaacacacagatggtttccagcaacatcatcacacctatttcgctcgacgacgtcccccctagaatagcaagagctatggagaacgaagaatattgggacttcgatattttcgaacttgaagccgcaacccacaaccggccactgatctaccttggacttaaaatgttcgctcgatttggcatctgtgaatttttgcactgctccgagtccactctgaggtcatggctgcagattatcgaagccaactaccactctagcaacccctatcacaactcaactcacagcgcggacgtgctgcatgctacggcctatttcctctcaaaagaacggattaaagagactctagatcccattgatgaggttgctgcactaattgcggctaccatccatgacgtggaccaccctggaagaacaaactcatttctgtgtaacgcagggagtgaactggccattctgtacaacgatacagccgtactggagagtcaccacgccgcactggcatttcaattgaccactggagacgacaaatgtaatatctttaaaaatatggagcggaacgactatcgcacgctcagacagggcattatcgacatggtcctcgcaacagaaatgaccaagcacttcgagcatgtaaacaaattcgtaaattcaatcaataagccactagccacactagaggagaatggagagaccgataaaaaccaagaggtaatcaacactatgctgcggaccccggaaaatcgtactttgattaagcgcatgctgatcaagtgtgccgatgtgtctaacccctgcagacccctgcagtactgtattgagtgggccgcaagaatttcagaagagtacttttcccaaacagacgaggagaagcagcaggggctccccgtggtgatgcctgttttcgaccgaaatacctgctcaatcccaaaaagtcagatctcatttatcgactactttatcacagacatgttcgacgcttgggatgcctttgttgacctccccgatctcatgcagcaccttgacaacaactttaagtattggaagggcctcgacgagatgaagctgcggaatctgcggcctccccctgagtag

SEQ ID NO: 250106 - DNA, 2352 bp, Artificial Sequence
  derived and/or modified sequence
atgggctgcgcccccagcatccacatcagcgagagactggtggccgaggacgcccccagccccgccgccccccccctgagcagcggcggccccagactgccccagggccagaagaccgccgccctgcccagaaccagaggcgccggcctgctggagagcgagctgagagacggcagcggcaagaaggtggccgtggccgacgtgcagttcggccccatgagattccaccaggaccagctgcaggtgctgctggtgttcaccaaggaggacaaccagtgcaacggcttctgcagagcctgcgagaaggccggcttcaagtgcaccgtgaccaaggaggcccaggccgtgctggcctgcttcctggacaagcaccacgacatcatcatcatcgaccacagaaaccccagacagctggacgccgaggccctgtgcagaagcatcagaagcagcaagctgagcgagaacaccgtgatcgtgggcgtggtgagaagagtggacagagaggagctgagcgtgatgcccttcatcagcgccggcttcaccagaagatacgtggagaaccccaacatcatggcctgctacaacgagctgctgcagctggagttcggcgaggtgagaagccagctgaagctgagagcctgcaacagcgtgttcaccgccctggagaacagcgaggacgccatcgagatcaccagcgaggacagattcatccaggagtggcagggcatctactacgccaagaagaagaacggcgacaacatccagcagaacgtgaagatcatccccgtgatcggccagggcggcaagatcagacactacgtgagcatcatcagagtgtgcaacggcaacaacaaggccgagaagatcagcgagtgcgtgcagagcgacacccacaccgacaaccagaccggcaagcacaaggacagaagaaagggcagcctggacgtgaaggccgtggccagcagagccaccgaggtgagcagccagagaagacacagcagcatggccagaatccacagcatgaccatcgaggcccccatcaccaaggtgatcaacatcatcaacgccgcccaggagagcagccccatgcccgtgaccgaggccctggacagagtgctggagatcctgagaaccaccgagctgtacagcccccagttcggcgccaaggacgacgacccccacgccaacgacctggtgggcggcctgatgagcgacggcctgagaagactgagcggcaacgagtacgtgctgagcaccaagaacacccagatggtgagcagcaacatcatcacccccatcagcctggacgacgtgccccccagaatcgccagagccatggagaacgaggagtactgggacttcgacatcttcgagctggaggccgccacccacaacagacccctgatctacctgggcctgaagatgttcgccagattcggcatctgcgagttcctgcactgcagcgagagcaccctgagaagctggctgcagatcatcgaggccaactaccacagcagcaacccctaccacaacagcacccacagcgccgacgtgctgcacgccaccgcctacttcctgagcaaggagagaatcaaggagaccctggaccccatcgacgaggtggccgccctgatcgccgccaccatccacgacgtggaccaccccggcagaaccaacagcttcctgtgcaacgccggcagcgagctggccatcctgtacaacgacaccgccgtgctggagagccaccacgccgccctggccttccagctgaccaccggcgacgacaagtgcaacatcttcaagaacatggagagaaacgactacagaaccctgagacagggcatcatcgacatggtgctggccaccgagatgaccaagcacttcgagcacgtgaacaagttcgtgaacagcatcaacaagcccctggccaccctggaggagaacggcgagaccgacaagaaccaggaggtgatcaacaccatgctgagaacccccgagaacagaaccctgatcaagagaatgctgatcaagtgcgccgacgtgagcaacccctgcagacccctgcagtactgcatcgagtgggccgccagaatcagcgaggagtacttcagccagaccgacgaggagaagcagcagggcctgcccgtggtgatgcccgtgttcgacagaaacacctgcagcatccccaagagccagatcagcttcatcgactacttcatcaccgacatgttcgacgcctgggacgccttcgtggacctgcccgacctgatgcagcacctggacaacaacttcaagtactggaagggcctggacgagatgaagctgagaaacctgagacccccccccgagtag

SEQ ID NO: 250107 - protein, 623 aa, Artificial Sequence
  derived and/or modified sequence
MKQPNRKRKLNMDSKERLDQDGRLEQAEEEKKPKDSTTPLSHVPSAAAQGAWSWEWYLKEQKAVAAPVELFSKDQSFPEHENGFQIGMRLEGIDPRHPSVFCVLSVAEVCGYRLRLHFDGYLSCYDFWTNAGSPDIHPVGWCEKTKHELHIPKGYRKDKFVWMDYLKACKLQNAPKKLFRNRSPNGPMSKEFQVGMKLEAVDRKNPSLVCVATIADIVEDRLLVHFDNWDDSYDYWCDVNSPYVQPVGWCQENGRTLIAPQGYPNPENFSWTEYLEATQTNAVPAKVFKMRLPHGFLPNMKLEVVDKRNPRLIRVATIVDVDDQRVKVHFDGWDHKYDYWVEADSPDIHPIGWCDVTGHPLEVPQRTNDLKILPGQAVCPTPGCRGIGHIRGPRYSGHHSAFGCPYSDMNLKKEATLHDRLREQTQANLESDSSHSKSKSLCSLNFNGKHEKVNSQPRLVQQAKCLKIKGKEDIDLDNLFRVLVLHPRGLEYSVEQAQQVLHQSVSMSTVSAHPFRDLPLGREQHCKLLPGVADIRASQVARWTVDEVAEFVQSLLGCEEHAKCFKKEQIDGKAFLLLTQTDIVKVMKIKLGPALKIYNSILMFRHSQELPEEDIASGQEVRG

SEQ ID NO: 250108 - DNA, 3586 bp, Artificial Sequence
  derived and/or modified sequence
gggcaccgcggggcagcggcgccgcagcctgggctggcggaacctcgcgctccgactcgccccccgcctgtagctcggtcggcgttgcgggcaggcgccgctccgctggggattgctatgctatgccttgtatgactaagacctcttaccaagaatacgtgtcagaccataaaaccactgccaaggagtgcgggggtggcaatgaaacagcccaacaggaaaaggaagcttaatatggattccaaagagcgtttggatcaggacggacgcttggagcaagctgaagaggaaaagaagcccaaggatagcacaacccctttgagtcacgtcccttcagcggctgcacagggagcatggtcttgggagtggtacttgaaagaacagaaggctgtcgcagcacctgttgagctgttttccaaggatcagtcctttccagagcatgaaaatggttttcagattggaatgagattagaaggcattgatccccgacatccatcggtattctgtgtgctttctgtagcggaggtttgtggttaccgtctaagacttcattttgatggttatttaagttgctatgatttttggaccaatgctggttcccctgacattcatccagtaggatggtgtgaaaagaccaaacatgaactgcacatccctaagggttatagaaaagataaatttgtttggatggattacttgaaggcctgcaaattgcaaaatgctccaaagaaattattcagaaacagaagtcctaatgggccaatgtctaaagaatttcaggttggaatgaagctggaggccgtggacaggaagaacccttccttggtgtgtgtggcgaccatagcagatattgttgaagatcgcttactagtgcattttgacaactgggatgatagttacgattactggtgcgatgttaatagcccttatgtccagccagttggttggtgtcaggagaatggaagaactctgatagcaccccaaggttatcccaatccagaaaatttttcctggacagaatacctggaagctactcaaaccaatgcagttcctgccaaagtttttaaaatgaggttgcctcatggttttctgccaaatatgaaacttgaagttgtggataaacggaaccccaggttaattcgtgttgctacgattgtagatgttgatgaccaaagagtaaaggttcattttgatggttgggaccataagtatgactactgggtggaggcagacagccctgatatccacccgatcggatggtgtgatgtcacagggcatccactggaagtgccacagcgaacgaatgacctgaagatccttccaggtcaagctgtctgtcctactcccgggtgccgaggaataggccatatccgtggtccacgttattcgggacatcacagtgcttttggctgcccgtattcagacatgaacttgaaaaaggaggcaacacttcacgatcgtttgagagaacaaacacaggcaaatttggaatcagactcttcacattcaaaatcaaaaagcctctgtagtttgaacttcaatggaaaacatgaaaaggtgaacagtcagcccagacttgtacagcaggcaaagtgtttgaaaatcaaaggaaaagaagatattgacttggataatctcttcagagtgcttgtgctgcatcccagaggtttggaatactcggtggagcaggcgcagcaggtgcttcaccagtcagtgtccatgtccacggtgtcagcccacccttttcgggaccttcccctcggcagggagcaacactgcaagttgcttccaggcgtggctgacatccgggccagccaagtggcacgttggactgtggatgaggtggctgagtttgtacagtctcttctgggctgtgaagagcatgccaagtgctttaagaaagagcagatcgatggcaaagccttcctgcttctgacacagacggacattgtcaaagtgatgaagatcaaactgggcccagcactgaagatttacaactctatcctgatgttcaggcattcccaggaactccctgaagaagatattgcctcaggccaagaagtcaggggatgaatgggctccctgaacttcctctggcaccaagacctgcgctctttcagcaataaaagtggagcacattaatttgatgtgaatgtccccatggccgtatccacactgaatctggactttttaaagtgtctgtgatttgtttacatgtttagaggattttgatgactggtccagtgccaatgactcagaggcttaggcccatctgtgggtttggtttacgaacattgttatctttggtgggatccgctcagctctgatttgtttgcaagacagaccaaagaagcccacacatccacctttattcttctccgtcaccagaaaagaaaccattttccatcttacaagcataacactctcaagtggtgaaatattagaaaagcagtgttcatgaatacatcgttaatgtttttaccagagcaacatcgagcttggctcagatctgccatggagcacagctagtctaagagctagaggcctggtgctttcaaaagacttcatgtgagatttttgtgtactttactcaggaaagtgtgaatctctaaaaaataataataataagcacatgttttcatgattcattaattctcctttttgttccattaaccatttcttggttgtgctcccaagctttcctggagcctccacaaaggagagtagccaggagtaatgagaggacggtcaggtgggcacttccaaaagctggagagacccttctgaggaccctccaccatcagcggggcctcaggggaccctgtcctaacactggtgtggctgctgggccagacgctcacctgcacagaactcctccctgctcccactctgaagggcgtttcagaattgactcatttccactgcagtctgccagaacccctgtaataaggagctgtgttatattacatctggggctgtgtgcatctttacaaatggagacacactattcaaagggaagatctctaaagtagggagcgtggtacttattctttgtttgaaacattccgatttgttgtcaggccttatttgttttttgtaagtgattgtatcggaggcttaagttgtgtggaatcagtcccacagtgttgaaagacaagtacctcttttctgacacttcttactacttttacaggtagtaacagctacaaatactctcccagaagtggagggacaccatttgtgggtggggagaaagagggagaggttctatgtccacttgcttcattaagaatgttaaggtttaagaaagttgattctgcttggagaatttctcaagctttacatttttttttcactgaagaaaataaacaaactctaagaggtgtgcatatataacatttctttagatctttacctaaaaggaattttaatatattattggttgatgtaaattttgtttctgtggagttttgtttgttttgctttttgtagactgccatgtgcaagtaaaattcctgcttctgccatgttaaaattttaatatattttaaatgataataaacagagaaaacaaaatttatacctc

SEQ ID NO: 250109 - DNA, 3546 bp, Artificial Sequence
  derived and/or modified sequence
gtgctctgactttaggtcgggtggcttctggggccttctgaggaacatgcacaagctgctacagctactgattgctatgctatgccttgtatgactaagacctcttaccaagaatacgtgtcagaccataaaaccactgccaaggagtgcgggggtggcaatgaaacagcccaacaggaaaaggaagcttaatatggattccaaagagcgtttggatcaggacggacgcttggagcaagctgaagaggaaaagaagcccaaggatagcacaacccctttgagtcacgtcccttcagcggctgcacagggagcatggtcttgggagtggtacttgaaagaacagaaggctgtcgcagcacctgttgagctgttttccaaggatcagtcctttccagagcatgaaaatggttttcagattggaatgagattagaaggcattgatccccgacatccatcggtattctgtgtgctttctgtagcggaggtttgtggttaccgtctaagacttcattttgatggttatttaagttgctatgatttttggaccaatgctggttcccctgacattcatccagtaggatggtgtgaaaagaccaaacatgaactgcacatccctaagggttatagaaaagataaatttgtttggatggattacttgaaggcctgcaaattgcaaaatgctccaaagaaattattcagaaacagaagtcctaatgggccaatgtctaaagaatttcaggttggaatgaagctggaggccgtggacaggaagaacccttccttggtgtgtgtggcgaccatagcagatattgttgaagatcgcttactagtgcattttgacaactgggatgatagttacgattactggtgcgatgttaatagcccttatgtccagccagttggttggtgtcaggagaatggaagaactctgatagcaccccaaggttatcccaatccagaaaatttttcctggacagaatacctggaagctactcaaaccaatgcagttcctgccaaagtttttaaaatgaggttgcctcatggttttctgccaaatatgaaacttgaagttgtggataaacggaaccccaggttaattcgtgttgctacgattgtagatgttgatgaccaaagagtaaaggttcattttgatggttgggaccataagtatgactactgggtggaggcagacagccctgatatccacccgatcggatggtgtgatgtcacagggcatccactggaagtgccacagcgaacgaatgacctgaagatccttccaggtcaagctgtctgtcctactcccgggtgccgaggaataggccatatccgtggtccacgttattcgggacatcacagtgcttttggctgcccgtattcagacatgaacttgaaaaaggaggcaacacttcacgatcgtttgagagaacaaacacaggcaaatttggaatcagactcttcacattcaaaatcaaaaagcctctgtagtttgaacttcaatggaaaacatgaaaaggtgaacagtcagcccagacttgtacagcaggcaaagtgtttgaaaatcaaaggaaaagaagatattgacttggataatctcttcagagtgcttgtgctgcatcccagaggtttggaatactcggtggagcaggcgcagcaggtgcttcaccagtcagtgtccatgtccacggtgtcagcccacccttttcgggaccttcccctcggcagggagcaacactgcaagttgcttccaggcgtggctgacatccgggccagccaagtggcacgttggactgtggatgaggtggctgagtttgtacagtctcttctgggctgtgaagagcatgccaagtgctttaagaaagagcagatcgatggcaaagccttcctgcttctgacacagacggacattgtcaaagtgatgaagatcaaactgggcccagcactgaagatttacaactctatcctgatgttcaggcattcccaggaactccctgaagaagatattgcctcaggccaagaagtcaggggatgaatgggctccctgaacttcctctggcaccaagacctgcgctctttcagcaataaaagtggagcacattaatttgatgtgaatgtccccatggccgtatccacactgaatctggactttttaaagtgtctgtgatttgtttacatgtttagaggattttgatgactggtccagtgccaatgactcagaggcttaggcccatctgtgggtttggtttacgaacattgttatctttggtgggatccgctcagctctgatttgtttgcaagacagaccaaagaagcccacacatccacctttattcttctccgtcaccagaaaagaaaccattttccatcttacaagcataacactctcaagtggtgaaatattagaaaagcagtgttcatgaatacatcgttaatgtttttaccagagcaacatcgagcttggctcagatctgccatggagcacagctagtctaagagctagaggcctggtgctttcaaaagacttcatgtgagatttttgtgtactttactcaggaaagtgtgaatctctaaaaaataataataataagcacatgttttcatgattcattaattctcctttttgttccattaaccatttcttggttgtgctcccaagctttcctggagcctccacaaaggagagtagccaggagtaatgagaggacggtcaggtgggcacttccaaaagctggagagacccttctgaggaccctccaccatcagcggggcctcaggggaccctgtcctaacactggtgtggctgctgggccagacgctcacctgcacagaactcctccctgctcccactctgaagggcgtttcagaattgactcatttccactgcagtctgccagaacccctgtaataaggagctgtgttatattacatctggggctgtgtgcatctttacaaatggagacacactattcaaagggaagatctctaaagtagggagcgtggtacttattctttgtttgaaacattccgatttgttgtcaggccttatttgttttttgtaagtgattgtatcggaggcttaagttgtgtggaatcagtcccacagtgttgaaagacaagtacctcttttctgacacttcttactacttttacaggtagtaacagctacaaatactctcccagaagtggagggacaccatttgtgggtggggagaaagagggagaggttctatgtccacttgcttcattaagaatgttaaggtttaagaaagttgattctgcttggagaatttctcaagctttacatttttttttcactgaagaaaataaacaaactctaagaggtgtgcatatataacatttctttagatctttacctaaaaggaattttaatatattattggttgatgtaaattttgtttctgtggagttttgtttgttttgctttttgtagactgccatgtgcaagtaaaattcctgcttctgccatgttaaaattttaatatattttaaatgataataaacagagaaaacaaaatttatacctca

SEQ ID NO: 250110 - DNA, 1872 bp, Artificial Sequence
  derived and/or modified sequence
atgaaacagcccaaccgaaagaggaaactgaatatggatagcaaggagaggctcgaccaagacggcagactggagcaggcagaggaggagaaaaaaccaaaggacagtacaacgccgctgtcacatgttcccagcgcagctgcacagggcgcatggagctgggaatggtatctaaaagaacagaaggcagtcgcagcaccggttgaacttttcagcaaagatcagtccttccccgaacacgaaaatggatttcaaatcggcatgagactggaggggatcgaccccagacacccttcagtattttgcgtcttatctgtagccgaagtgtgtggctaccgcctgcgactccatttcgatgggtatctgtcttgctatgacttttggacaaacgcaggcagcccagacatccacccagtgggctggtgtgaaaagacaaagcacgaattgcacattccaaaaggctaccgcaaggataagttcgtttggatggattatctgaaggcctgcaagctccagaatgcccccaagaaacttttcagaaacaggtctccgaacgggccgatgtctaaagagttccaagtgggcatgaagttggaagccgtggaccgaaaaaatccaagtctagtgtgcgtcgctactatcgcagatattgtagaggatagactactggtccacttcgacaactgggatgattcgtacgactattggtgcgacgtgaactcaccgtacgttcagcctgtcggctggtgccaagaaaatggtagaactctcatcgctccccaaggctatcccaacccagaaaatttctcgtggacagagtacctcgaggctacgcagactaacgctgtgcccgctaaggtgttcaaaatgagactcccgcacgggttcctgcccaacatgaagctagaggtggtggacaaacgcaatccgagacttatccgagtggccacaatagtggatgtcgatgatcaacgcgtaaaagttcacttcgatggctgggaccacaaatacgactattgggtggaggctgacagccccgacatacaccctatcggctggtgtgatgtaacggggcatcccttggaggtgccacagcgcaccaacgatttgaagatcctgcctgggcaggccgtctgtcctactccggggtgtagaggtattggacacatcagaggacctaggtactccggtcaccacagcgccttcgggtgtccatatagcgacatgaatctcaagaaggaggccaccctgcacgataggctgagggagcagacacaggctaacctggagtcagactcatcccatagcaagtcaaagtccttatgctctctgaattttaatggtaaacacgagaaggtaaactctcagcccagactcgtgcagcaggcaaagtgtctgaagattaaaggcaaagaggacatcgacctcgacaacctcttccgtgtcctggtgctacacccccgtggccttgaatatagcgtcgaacaggcgcagcaggtgttacatcaatctgtctccatgtccacagtatctgcgcaccccttcagggatttacctttagggagggaacaacattgtaagctgctgcccggtgtggccgacatccgggcctcccaggtggcccgctggacggttgacgaagtcgcggaatttgtgcagtcacttctggggtgtgaggaacacgccaagtgcttcaagaaggagcagatcgacggcaaggcatttctgctgttgacccaaaccgacattgtgaaggttatgaagatcaaactcggacccgcgctgaagatatataactctatcctgatgttccgccattctcaagaactgccggaggaagacatcgctagtgggcaggaagtccgcggctag

SEQ ID NO: 250111 - DNA, 1872 bp, Artificial Sequence
  derived and/or modified sequence
atgaaacagcccaaccgtaaaagaaaactcaacatggattccaaagagcgcctggaccaggatgggcgcctggaacaggcagaagaagaaaaaaaacccaaagatagcacaactcccctgagtcacgtgccatccgccgctgctcaaggggcctggtcttgggagtggtatctgaaggaacagaaggctgttgccgcccccgtggaacttttttccaaagaccagtcgtttccagaacatgaaaacggctttcagattggtatgaggttggagggtattgacccacgccatccatcagtcttctgtgtgctcagtgtcgccgaggtttgcggttaccgcctacgcctccacttcgacggatacctctcatgttacgacttctggaccaacgcaggctcccccgatatccaccctgtaggctggtgtgagaagaccaaacacgagcttcatatcccgaaagggtatagaaaagataaatttgtgtggatggattaccttaaggcctgcaagctgcagaacgccccgaagaagttgttcaggaatcggagtccaaatggaccgatgtccaaagaatttcaggtgggtatgaaactggaggcagtcgataggaaaaacccatctctggtgtgcgtggcgaccatcgcagacattgtggaggatcggctgctggtgcacttcgacaattgggatgacagctacgactactggtgcgatgtgaattctccctacgtgcaaccggtggggtggtgccaagagaatgggcgtactcttattgccccacagggttatccaaatcctgagaatttctcctggacagagtaccttgaggctactcaaacgaacgcagtgcctgctaaggtcttcaaaatgcgtctgcctcacgggttcctccctaacatgaagctcgaggttgttgataagagaaatccacgtctcatccgcgtggctacaattgttgatgttgacgaccaacgggttaaggtacattttgacggttgggaccataaatatgattactgggtggaagcagactctcccgatatccatcctatcggctggtgtgacgtgacagggcaccctctggaggtcccccagaggacaaacgatctgaaaatcctccctgggcaagcagtgtgccctacacctggctgtagaggcattggccacatcagaggccctaggtactctggccatcattccgctttcgggtgtccttatagcgacatgaatctgaaaaaagaggcgaccctacatgacagacttagagaacagacacaggcaaacttggaatctgattctagtcatagcaaatcaaaatcactgtgctccctcaatttcaacggcaaacatgagaaagtcaatagccagccccggctagtgcagcaagctaaatgcctgaagatcaagggcaaggaagatatcgacctcgacaacctctttagagtgctggtattgcacccaagaggactcgagtactccgtggaacaagcccagcaggtgcttcatcagagcgtgtcaatgtctactgtctcggctcaccccttcagggatctccccctgggcagggagcagcattgtaagttattacctggcgtagcagacatcagagcctcccaagttgctcgctggaccgtagacgaagtggcggagttcgttcagtcccttcttggctgtgaggagcatgccaaatgctttaagaaagaacaaatcgatgggaaggcattcctcctgctgacccaaactgacatcgttaaggttatgaagatcaaacttggtccagccttgaagatctacaactcgatattgatgtttagacatagccaggaactgcctgaagaggacatcgctagcggccaggaggttcggggctag

SEQ ID NO: 250112 - DNA, 1872 bp, Artificial Sequence
  derived and/or modified sequence
atgaagcagcccaacaggaagaggaagctgaacatggacagcaaggagcggctggaccaggacggccgcctggagcaggccgaggaggagaagaagcccaaggacagcaccacccccctgagccacgtgcccagcgctgctgcccagggcgcctggagctgggagtggtacctgaaggagcagaaggctgtggccgcccctgtggagctgttcagcaaggaccagagcttccctgagcatgaaaatggcttccagatcggcatgaggctggagggcatcgaccccaggcaccccagcgtcttctgtgtgctgtctgtggccgaggtgtgtggctaccgcctgcggctgcactttgatggctacctgagctgctatgacttctggaccaatgccggcagcccagacatccaccctgtgggctggtgtgagaagaccaagcatgagctgcacatccccaagggctacaggaaggacaagtttgtgtggatggactacctgaaggcctgcaagctgcagaatgcccccaagaagctgttcaggaacagaagccccaacggccccatgagcaaggagttccaggtgggcatgaagctggaggccgtggacaggaagaaccccagcctggtgtgtgtggccaccatcgctgacatcgtggaggaccggctgctggtgcactttgacaactgggatgacagctatgactactggtgtgatgtgaacagcccctacgtgcagcctgtgggctggtgccaggagaatggaagaaccctcatcgccccccagggctaccccaaccctgagaacttctcctggacagagtacctggaggccacccagaccaatgctgtgcctgccaaggtgttcaagatgaggctgccccacggcttcctgcccaacatgaagctggaggtggtggacaagaggaaccccaggctcatccgggtggccaccatcgtggatgtggatgaccagagggtgaaggtgcactttgatggctgggaccacaagtatgactactgggtggaggccgacagcccagacatccaccccatcggctggtgtgatgtgacaggccaccccctggaggtgccccagaggaccaatgacctgaagatcctgcccggccaggccgtgtgccccaccccaggctgccggggcatcggccacatccggggcccccgctacagcggccaccacagcgccttcggctgcccctacagcgacatgaacctgaagaaggaggccaccctgcatgaccggctgcgggagcagacccaggccaacctggagagtgacagcagccacagcaagagcaagagcctgtgcagcctgaacttcaacgggaagcatgagaaggtgaacagccagccccggctggtgcagcaggccaagtgcctgaagatcaagggcaaggaggacatcgacctggacaacctcttccgggtgctggtgctgcacccccggggcctggagtacagcgtggagcaggcccagcaggtgctgcaccagagcgtgtccatgagcacagtgtctgcccaccccttccgggacctgcccctgggccgggagcagcactgcaagctgctgcccggggtggccgacatccgggccagccaggtggcccgctggacagtggatgaggtggccgagtttgtgcagagcctgctgggctgtgaggagcacgccaagtgcttcaagaaggagcagattgatggcaaggccttcctgctgctgacccagacagacatcgtgaaggtgatgaagatcaagctgggccctgccctgaagatctacaacagcatcctgatgttccgccacagccaggagctgcctgaagaagatattgccagcggccaggaggtgcggggctag

SEQ ID NO: 250113 - DNA, 1872 bp, Artificial Sequence
  derived and/or modified sequence
atgaagcagcccaaccggaagcggaagctgaacatggacagcaaggaaagactggatcaggacgggagactcgaacaggcggaagaggaaaagaagcccaaggattcaaccacacccttaagtcacgtcccatccgcagcggcccagggagcttggagttgggagtggtatctgaaagaacaaaaagctgtcgcagctccagtggagctgttctccaaagaccaatccttccccgagcatgaaaatggttttcagatcggaatgaggctggaggggattgacccccgacacccatcagtgttctgcgtattgtctgtcgctgaggtgtgcggctaccggcttcgactgcatttcgatgggtatttgagctgttatgatttctggacgaatgcaggctctccggacattcatcctgttggttggtgcgaaaagaccaagcacgaacttcacattccaaaagggtatcgcaaggacaagtttgtttggatggactacctgaaagcctgtaagttacagaacgcgcccaagaagctgttcagaaacagatcaccaaatgggcccatgagcaaggagttccaggtggggatgaagttggaagctgtggatcgcaaaaacccttctcttgtatgcgtcgctaccatcgccgatatcgtcgaggatagactgctcgtccactttgacaactgggacgactcttatgactactggtgcgatgtgaactctccttacgtgcagcccgttggctggtgccaggagaatggacgaactctgattgcccctcaggggtatcctaaccccgagaatttctcctggacagagtatctcgaggccacccagacaaacgcagtgcctgcaaaagttttcaagatgaggctccctcatggttttctgccgaacatgaaactggaagtcgtggacaaaaggaacccgcgcttgattcgggtggccacaattgttgacgtcgacgatcagagggtgaaggtgcattttgatggatgggatcataagtatgattattgggtcgaggctgactcccctgacatccatccaatcggctggtgtgacgtgaccggacatccgttagaggttcctcaacgcacaaatgatttgaagatcctccccggtcaagcggtctgtcccactcctggctgtcggggtattggacacattcggggcccaagatattcagggcatcacagtgccttcggatgcccctattcagacatgaatctgaagaaggaggccactctccatgaccgacttcgagaacaaacacaagccaacttggagtctgactcatctcattccaaatccaagagcctctgttcgctaaacttcaatggaaagcatgagaaggtaaacagccagccccggctggtgcagcaggctaaatgcttgaagatcaagggcaaagaagatatagaccttgacaacttatttagagtccttgtgctccacccaaggggattagagtattcagtggagcaggctcaacaggttcttcatcagtccgtgtcgatgagtactgtgtcagctcatccgttcagagacctgccgctggggagagagcagcactgtaaacttctacctggcgtcgcagatattagggcttcccaggttgcgcgttggactgtggacgaggtggcggaatttgtccagagtctgttggggtgcgaggagcacgccaagtgttttaaaaaggagcaaatcgatggaaaggcattcctccttctgacccagaccgatatcgtgaaggtgatgaaaatcaaactcggaccagccctgaagatctataacagtattttgatgttccgacattcccaggagctgccagaggaggatatcgcaagtggtcaggaggtgagaggctag

SEQ ID NO: 250114 - DNA, 1872 bp, Artificial Sequence
  derived and/or modified sequence
atgaagcagcccaaccggaagcggaagctgaacatggacagcaaggaacgattggaccaggatggccgcctggaacaggccgaggaggagaagaagccaaaagattcaacaacccccctgtcccatgtcccttcagcagcagctcaaggggcttggtcttgggagtggtacctgaaagagcagaaagctgttgcggcacctgtcgaactgttctccaaggaccagtcatttcctgagcacgagaacggcttccagatcgggatgcgacttgaaggtatcgacccacggcacccatccgtgttctgcgtactgtctgtcgcagaggtgtgcgggtacagattacgcctccatttcgatggttatctctcatgctatgacttctggactaacgctggaagccccgacattcacccggtgggctggtgtgagaagactaagcacgagctccacatccccaagggctatcggaaagacaaatttgtctggatggactacttgaaggcctgtaagcttcagaatgcgccaaaaaaacttttcaggaacaggtcaccaaatggccccatgagtaaagagttccaagtgggaatgaagcttgaagcggtggaccggaagaatcctagtctggtttgcgtcgccacaatcgccgacattgtggaggaccggctgcttgtgcacttcgataattgggatgactcctacgactactggtgcgacgtgaattctccctacgttcagccggtgggatggtgtcaagagaacggcagaacactcattgccccacaggggtaccccaaccccgaaaattttagctggaccgaatatcttgaagccacccagaccaacgccgtccccgcaaaagtctttaagatgcgcttgcctcatgggttcttgccaaatatgaagctggaagtagtcgataagcgtaatcccaggctgattagggttgccaccattgtcgatgtggatgaccagcgcgtgaaggtacacttcgatgggtgggatcacaaatatgattattgggttgaggctgacagtcccgatatccaccctataggctggtgcgacgtgactggacatccacttgaggtcccacagcgcactaatgatttgaaaatccttcccgggcaggcagtgtgtccaacacctggatgccggggaattggtcatatacggggtccccgctatagtggccatcactccgccttcggctgtccttattccgatatgaacctcaaaaaggaggctacattacacgatagactgcgtgagcagacacaggccaacctggagagtgacagttcacatagtaagtccaaatctctctgtagtttgaattttaatgggaagcatgagaaggtaaacagtcagcctaggctagtccagcaggcaaagtgcctgaagatcaaagggaaggaagatatagacctggacaatctttttagagtgctcgtcttgcatccacggggactcgaatattccgtcgagcaggctcagcaagtgctccaccagtcagtgtctatgagtacagtttctgcccatccatttcgcgatctgccgctcggtagggaacaacactgtaaactattgcctggggtggcggacattagggcgtcgcaggtcgcccggtggaccgtcgatgaagtggcagagttcgtgcaatcgttgctgggatgcgaggagcacgctaagtgttttaaaaaagaacagatcgacggaaaagcctttctgctattgacccagaccgatatcgtgaaagtcatgaagatcaagttgggtcccgcacttaagatatataactcaatcctaatgttccggcactctcaggagctgccggaggaggatatagcctccgggcaagaagtccgaggctag

SEQ ID NO: 250115 - DNA, 1872 bp, Artificial Sequence
  derived and/or modified sequence
atgaagcagcctaatcggaagcgaaaacttaacatggattctaaggagaggcttgaccaagacggaaggttagagcaggccgaggaggaaaaaaagcctaaagattcaaccacccctctgtcccacgtcccatcggctgctgctcagggggcatggagctgggaatggtatctgaaggagcagaaggctgtagctgccccagtggaactgttttcaaaggatcaatcttttcccgagcacgaaaatggcttccagatcggaatgagactggaggggatagacccaagacatccttcagtgttttgtgtcttaagcgtagctgaagtatgcggctaccgtctgaggctccattttgatggatatctttcctgctatgatttctggacaaatgcgggtagcccagacattcacccagtgggctggtgtgagaagactaaacatgaactgcatatccctaaaggctaccgcaaagataagttcgtttggatggattatctgaaggcatgtaaattgcagaacgccccaaagaagctgttcaggaatagaagccctaacggccctatgagtaaagagtttcaagttggtatgaaattagaggctgtggatagaaaaaacccgagtcttgtctgcgtggccactattgcagacattgtggaggacaggttgcttgtacatttcgataactgggatgattcttacgactactggtgcgatgtgaattcaccttatgtgcaacctgtcggttggtgtcaggagaacggaagaaccttgatagcccctcaaggctaccctaacccagagaatttctcgtggaccgagtacctggaagctacgcagaccaacgcagttcctgcaaaagtgtttaagatgagattgccccacggcttcctacctaatatgaaactggaagtcgtcgacaaaagaaatccacggttgatcagagtcgcaactatcgtcgacgtggatgaccaacgcgttaaagtgcacttcgatggctgggatcacaagtatgattattgggtggaagcagacagtcccgacattcatcccatcggatggtgtgacgtgaccgggcatccattagaggtgcctcagagaacaaacgacctaaaaatcctgcctggccaagccgtgtgtccaactcccggatgccgcggaatagggcacattagaggtccgcgatatagcggacatcacagcgcgtttggctgtccttacagcgatatgaatttaaagaaagaggcgacgctgcatgaccggttgagagagcagactcaggcgaatctcgagtctgactcctcccactctaagagcaaaagtctatgcagcctaaacttcaacgggaaacatgagaaggttaactctcaacccaggcttgtccagcaggcaaagtgcctgaagattaaggggaaagaagatatcgaccttgataatttgttcagggtcctcgtgctgcatcccagagggcttgaatactcggtggaacaggcccagcaggtgctgcaccagtccgtttccatgtcaactgtatccgcccacccatttcgggacctgcccctcggacgcgaacagcactgcaagctcctccctggagttgccgatattcgagcaagtcaggtggccaggtggactgtagacgaagttgcagagtttgtacagtccctgctcgggtgcgaggagcacgctaagtgcttcaaaaaagagcagatagatgggaaagctttcttgctcctgacacagaccgatatcgtcaaggttatgaaaatcaagctcggcccagctctcaagatttacaactccatcctaatgttcaggcactcgcaggaacttccagaggaagacatagcctctggacaggaggtcagggggtag

SEQ ID NO: 250116 - DNA, 1872 bp, Artificial Sequence
  derived and/or modified sequence
atgaagcagccgaaccgcaaacggaaactaaacatggattccaaggagcgccttgatcaggacgggagactggagcaagcagaggaggagaagaaaccaaaggattccactacacccctgagtcacgttccaagcgcagccgctcagggagcttggagctgggaatggtatctgaaagagcagaaagctgtagcggctcctgtggaactcttttcgaaagaccagagcttccccgaacacgagaatgggttccagattggcatgcgattggaaggaatcgaccccaggcacccgtccgtgttctgtgtcctgtccgtggctgaagtgtgcggataccggctgaggctgcatttcgacggctacctcagctgctatgatttctggactaatgctggatcccctgacatccatcctgtcgggtggtgtgaaaaaacaaagcatgagctccacattcccaagggatacaggaaggacaagttcgtctggatggattatcttaaggcgtgtaagctacaaaatgcccctaagaaactcttccggaatcgtagtcccaacggtcctatgtcgaaggaattccaggtgggaatgaaactggaagcggttgacaggaagaacccatctctggtatgcgtggccacgatcgccgatattgtggaggaccgtttacttgtgcacttcgacaattgggacgatagctacgattactggtgtgacgtgaattcgccctatgtccagccagtggggtggtgtcaggaaaacggaagaacactaatcgctccacagggctatcctaatcctgaaaacttcagttggaccgagtacctcgaggctacccagactaacgcagttccagcaaaagtattcaaaatgcggctacctcatggctttctgccaaatatgaagttggaggtggttgacaaacgcaatcccagattaatcagggttgcaacgatcgtggacgtggacgatcagagagttaaagttcatttcgatggctgggaccataaatatgactactgggtcgaggctgattcccctgatatccatccgataggatggtgcgacgtgaccgggcaccccctagaagtacctcaaagaaccaacgacctgaagattctcccagggcaagccgtctgccccacgcctggttgtcggggtataggccacatccgaggaccgcgatattctgggcaccatagtgccttcggttgcccatattctgatatgaatcttaaaaaggaagccaccttgcacgataggcttagggagcaaacccaggccaacctggagtctgattcatcgcactccaagagcaaatccctgtgctcactgaattttaatggaaagcacgagaaggttaatagtcaaccgagactggttcagcaagctaagtgcttaaagatcaagggaaaggaggatatagatttagataaccttttcagagtgctcgtactacatcccagaggcctggagtacagcgtggaacaagcccagcaggtgcttcaccaatccgtatctatgtctactgtcagtgcccatccctttcgcgaccttccgcttgggcgagagcagcattgcaagctgctgcctggcgtggcagacattagggcatcgcaggtcgcacgctggactgttgacgaggtcgctgagtttgtgcagagcctcctagggtgcgaagagcacgctaaatgttttaagaaagagcaaatagatggcaaagccttccttctattaactcagaccgacatagtgaaggtcatgaaaatcaagctgggaccagcattgaagatctataattcaattctaatgtttcgacactctcaggagcttcccgaggaggatatagccagtggacaggaagtaagaggatag

SEQ ID NO: 250117 - DNA, 1872 bp, Artificial Sequence
  derived and/or modified sequence
atgaagcagcccaacagaaagagaaagctgaacatggacagcaaggagagactggaccaggacggcagactggagcaggccgaggaggagaagaagcccaaggacagcaccacccccctgagccacgtgcccagcgccgccgcccagggcgcctggagctgggagtggtacctgaaggagcagaaggccgtggccgcccccgtggagctgttcagcaaggaccagagcttccccgagcacgagaacggcttccagatcggcatgagactggagggcatcgaccccagacaccccagcgtgttctgcgtgctgagcgtggccgaggtgtgcggctacagactgagactgcacttcgacggctacctgagctgctacgacttctggaccaacgccggcagccccgacatccaccccgtgggctggtgcgagaagaccaagcacgagctgcacatccccaagggctacagaaaggacaagttcgtgtggatggactacctgaaggcctgcaagctgcagaacgcccccaagaagctgttcagaaacagaagccccaacggccccatgagcaaggagttccaggtgggcatgaagctggaggccgtggacagaaagaaccccagcctggtgtgcgtggccaccatcgccgacatcgtggaggacagactgctggtgcacttcgacaactgggacgacagctacgactactggtgcgacgtgaacagcccctacgtgcagcccgtgggctggtgccaggagaacggcagaaccctgatcgccccccagggctaccccaaccccgagaacttcagctggaccgagtacctggaggccacccagaccaacgccgtgcccgccaaggtgttcaagatgagactgccccacggcttcctgcccaacatgaagctggaggtggtggacaagagaaaccccagactgatcagagtggccaccatcgtggacgtggacgaccagagagtgaaggtgcacttcgacggctgggaccacaagtacgactactgggtggaggccgacagccccgacatccaccccatcggctggtgcgacgtgaccggccaccccctggaggtgccccagagaaccaacgacctgaagatcctgcccggccaggccgtgtgccccacccccggctgcagaggcatcggccacatcagaggccccagatacagcggccaccacagcgccttcggctgcccctacagcgacatgaacctgaagaaggaggccaccctgcacgacagactgagagagcagacccaggccaacctggagagcgacagcagccacagcaagagcaagagcctgtgcagcctgaacttcaacggcaagcacgagaaggtgaacagccagcccagactggtgcagcaggccaagtgcctgaagatcaagggcaaggaggacatcgacctggacaacctgttcagagtgctggtgctgcaccccagaggcctggagtacagcgtggagcaggcccagcaggtgctgcaccagagcgtgagcatgagcaccgtgagcgcccaccccttcagagacctgcccctgggcagagagcagcactgcaagctgctgcccggcgtggccgacatcagagccagccaggtggccagatggaccgtggacgaggtggccgagttcgtgcagagcctgctgggctgcgaggagcacgccaagtgcttcaagaaggagcagatcgacggcaaggccttcctgctgctgacccagaccgacatcgtgaaggtgatgaagatcaagctgggccccgccctgaagatctacaacagcatcctgatgttcagacacagccaggagctgcccgaggaggacatcgccagcggccaggaggtgagaggctag

SEQ ID NO: 250118 - protein, 540 aa, Artificial Sequence
  derived and/or modified sequence
MGPGERAGGGGDAGKGNAAGGGGGGRSATTAGSRAVSALCLLLSVGSAAACLLLGVQAAALQGRVAALEEERELLRRAGPPGALDAWAEPHLERLLREKLDGLAKIRTAREAPSECVCPPGPPGRRGKPGRRGDPGPPGQSGRDGYPGPLGLDGKPGLPGPKGEKGAPGDFGPRGDQGQDGAAGPPGPPGPPGARGPPGDTGKDGPRGAQGPAGPKGEPGQDGEMGPKGPPGPKGEPGVPGKKGDDGTPSQPGPPGPKGEPGSMGPRGENGVDGAPGPKGEPGHRGTDGAAGPRGAPGLKGEQGDTVVIDYDGRILDALKGPPGPQGPPGPPGIPGAKGELGLPGAPGIDGEKGPKGQKGDPGEPGPAGLKGEAGEMGLSGLPGADGLKGEKGESASDSLQESLAQLIVEPGPPGPPGPPGPMGLQGIQGPKGLDGAKGEKGASGERGPSGLPGPVGPPGLIGLPGTKGEKGRPGEPGLDGFPGPRGEKGDRSERGEKGERGVPGRKGVKGQKGEPGPPGLDQPCPVGPDGLPVPGCWHK

SEQ ID NO: 250119 - protein, 309 aa, Artificial Sequence
  derived and/or modified sequence
MESRSGIQAGVRCRDLGSLQPPPLALKQFSSLSLPSSWDYRRLPPRCGFLFEVSETTNPPAGTNSRHTLTVKLDGLAKIRTAREAPSECVCPPGPPGRRGKPGRRGDPGPPGPLGLDGKPGLPGPKGEKGAPGDFGPRGDQGQDGAAGPPGPPGPPGARGPPGDTGKDGPRGAQGPAGPKGEPGQDGEMGPKGPPGPKGEPGVPGKKGDDGTPSQPGPPGPKGEPGSMGPRGENGVDGAPGPKGEPGHRGTDGAAGPRGDVRDPGLGSVSSCSQRLASSSKKNGSEPPPGCAGCPRPQGRAGRHSGDRL

SEQ ID NO: 250120 - DNA, 1623 bp, Artificial Sequence
  derived and/or modified sequence
atgggccccggcgagagagccggcggcggcggcgacgccggcaagggcaacgccgccggcggcggcggcggcggcagaagcgccaccaccgccggcagcagagccgtgagcgccctgtgcctgctgctgagcgtgggcagcgccgccgcctgcctgctgctgggcgtgcaggccgccgccctgcagggcagagtggccgccctggaggaggagagagagctgctgagaagagccggcccccccggcgccctggacgcctgggccgagccccacctggagagactgctgagagagaagctggacggcctggccaagatcagaaccgccagagaggcccccagcgagtgcgtgtgcccccccggcccccccggcagaagaggcaagcccggcagaagaggcgaccccggcccccccggccagagcggcagagacggctaccccggccccctgggcctggacggcaagcccggcctgcccggccccaagggcgagaagggcgcccccggcgacttcggccccagaggcgaccagggccaggacggcgccgccggcccccccggcccccccggcccccccggcgccagaggcccccccggcgacaccggcaaggacggccccagaggcgcccagggccccgccggccccaagggcgagcccggccaggacggcgagatgggccccaagggcccccccggccccaagggcgagcccggcgtgcccggcaagaagggcgacgacggcacccccagccagcccggcccccccggccccaagggcgagcccggcagcatgggccccagaggcgagaacggcgtggacggcgcccccggccccaagggcgagcccggccacagaggcaccgacggcgccgccggccccagaggcgcccccggcctgaagggcgagcagggcgacaccgtggtgatcgactacgacggcagaatcctggacgccctgaagggcccccccggcccccagggcccccccggcccccccggcatccccggcgccaagggcgagctgggcctgcccggcgcccccggcatcgacggcgagaagggccccaagggccagaagggcgaccccggcgagcccggccccgccggcctgaagggcgaggccggcgagatgggcctgagcggcctgcccggcgccgacggcctgaagggcgagaagggcgagagcgccagcgacagcctgcaggagagcctggcccagctgatcgtggagcccggcccccccggcccccccggcccccccggccccatgggcctgcagggcatccagggccccaagggcctggacggcgccaagggcgagaagggcgccagcggcgagagaggccccagcggcctgcccggccccgtgggcccccccggcctgatcggcctgcccggcaccaagggcgagaagggcagacccggcgagcccggcctggacggcttccccggccccagaggcgagaagggcgacagaagcgagagaggcgagaagggcgagagaggcgtgcccggcagaaagggcgtgaagggccagaagggcgagcccggcccccccggcctggaccagccctgccccgtgggccccgacggcctgcccgtgcccggctgctggcacaagtag

SEQ ID NO: 250121 - DNA, 3061 bp, Artificial Sequence
  derived and/or modified sequence
agaggtgcgcgctgcgcgtgggatcagcccggcgccgacgggtggctccgaggagctcgctccttcctcgcccccgccccctcgccgcgcggggccagcccggccgctcctcccctgggtgggtccctgctccttttctggcagggtctatttgcatagaggaaactgcccaaagtggccgctgtggaggagctggctgcggcgaagggggcgtgcgcggcgatccgctgctacccggaggctaacccccgcgcccggcggacctcgtgcctcgggctgtcccgcctgctcctctcgcacccagcctctgccccagcagcaccgccccctcggagagtccacgcgcgacgaacgcgccatgggcccaggcgagcgcgccggtggcggcggcgacgcggggaagggcaatgcggcgggcggcggcggcggagggcgctcggcgacgacggccgggtcccgggcggtgagcgcgctgtgcctgctgctctccgtgggctcggcggctgcctgcctgctgctgggtgtccaggcggccgcgctgcagggccgggtggcggcgctcgaggaggagcgggagctgctgcggcgcgcggggccgccaggcgccctggacgcctgggccgagccgcacctggagcgcctgctgcgggagaagttggacggactagcgaagatccggactgctcgggaagctccatccgaatgtgtctgccccccagggccccctggacggcgcggcaagcctgggagaagaggcgaccctggtcctccagggcaatcaggacgagatggctacccgggacccctgggtttggatggcaagcccggacttccaggcccgaaaggggaaaagggtgcaccaggagactttggcccccggggagaccaaggacaagatggagctgctgggcctccggggccccctggacctcctggggcccggggccctcctggcgacactgggaaagatggccccaggggagcacaaggcccagcgggccccaaaggagagcccggacaagacggcgagatgggcccaaagggacccccagggcccaagggtgagcctggagtacctggaaagaagggcgacgatgggacaccaagccagcctggaccaccagggcccaagggcgagccagggagcatggggcctcggggagagaacggtgtggacggtgccccaggaccgaagggggagcctggccaccgaggcacggatggagctgcagggccccggggtgccccaggcctcaagggcgagcagggagacacagtggtgatcgactatgatggcaggatcttggatgccctcaaggggcctcccggaccacaggggcccccagggccaccagggatccctggagccaagggcgagcttggattgcccggtgccccaggaatcgatggagagaagggccccaaaggacagaaaggagacccaggagagcctgggccagcaggactcaaaggggaagcaggcgagatgggcttgtccggcctcccgggcgctgacggcctcaagggggagaagggggagtcggcgtctgacagcctacaggagagcctggctcagctcatagtggagccagggccccctggcccccctggccccccaggcccgatgggcctccagggaatccagggtcccaagggcttggatggagcaaagggagagaagggtgcgtcgggtgagagaggccccagcggcctgcctgggccagttggcccaccgggccttattgggctgccaggaaccaaaggagagaagggcagacccggggagccaggactagatggtttccctggaccccgaggagagaaaggtgatcggagcgagcgtggagagaagggagaacgaggggtccccggccggaaaggagtgaagggccagaagggcgagccgggaccaccaggcctggaccagccgtgtcccgtgggccccgacgggctgcctgtgcctggctgctggcataagtgacccacaggcccagctcacacctgtacagatccgtgtggacatttttaatttttgtaaaaacaaaacagtaatatattgatcttttttcatggaatgcgctacctgtggccttttaacattcaagagtatgcccacccagccccaaagccaccggcatgtgaagctgccggaaagtggacaggccagaccagggagatgtgtacctgaggggcacccttgggcctgggctttcccaggaaggagatgaaggtagaagcacctggctcgggcaaggctagaaagatgctacgttgggccttcagtcacctgatcagcagagagactctcagctgtggtactgccctgtaagaacctgcccccgcaaaactctggagtccctgggacacaccctatccaagaagacccaggggtggaacagcggctgctgttgctcctggcctcatcagcctccaaactcaaccacaaccagctgcctctgcagttggacaagacttggcccccggacaagactcgcccagcacttgcggctgggcccggggagcagtgagtggaaatcccccacgagggtctagctctaccacattcaggaggcctcaggaggccagcctgccatgagagcacatgtcctctggccaggagtagtggctgagctctgtgatcgctgtgatgtggacccagctccagggagcagagtgtcgaggatggaggggcccagcctggactgactgctacttcctgtctctgtttccattatcacccagagagggacaagataggacatggcctggaccagggaggcaggcctcccactcagagtctgggtctcactggccccaagtctcccacccagaactctggccaaaaatggctctctaggtgggctgtgcaggcaaagcaaagctcagggctggttcccagctggcctgagcagggggcctgccaccagacccacccacgctctgacgagaggcttttccacctccagcaagtgttcccagcaaccagctccatcctggctgcttgccttccatttccgtgtagatggagatcactgtgtgtaataaaccacaagtgcgtgtc

SEQ ID NO: 250122 - DNA, 1623 bp, Artificial Sequence
  derived and/or modified sequence
atgggccctggcgagcgcgcaggtggcggcggagacgcaggaaagggaaacgcagctggtggaggcggagggggccgaagcgctacaaccgcggggtcacgggcggtgagcgccctgtgcctcttgctgtcagtcggctccgccgcggcatgcctcctactgggcgtacaggcagcagctttgcagggaagagtggctgcactcgaagaggagcgcgagctcctccggcgcgccgggccacccggggcactggatgcctgggcagagccccatctggaacgtctgctgcgggaaaagcttgacggcctggcgaaaattagaacggcgagagaagccccatccgagtgcgtgtgcccacctggtcctccaggtcgaagggggaaaccgggacggcgcggggaccccggtccccctggccagtccggccgggatggatatcccggtcccctcggactggatggtaagcccggccttccaggacccaagggcgaaaaaggcgcgccaggtgattttggccctagaggcgatcaggggcaggacggggcagcagggcctccagggccgccaggtcccccgggcgctagggggcccccaggcgatacgggcaaggacggccccagaggagcccaagggccggctggaccaaagggcgaacccggccaggacggagagatggggcctaagggtccccccgggccaaagggcgagccaggtgttcccggcaaaaagggagatgacgggacaccaagccagcccggtccccctggcccaaaaggcgagcccggctccatgggacctaggggagagaacggagtagacggtgctcccggccctaagggggaacctggacatagaggaactgacggggctgcgggacctaggggagcccccggactcaagggtgaacagggggacaccgttgttattgattatgacggcagaattctggatgctctgaaagggccccccggtccccagggcccacccggcccccccggaattccaggagccaagggcgagcttggactgccaggggctccaggaatcgacggagaaaaagggcccaaagggcaaaaaggcgatcctggtgagcctggtccagccggactgaagggcgaggccggggaaatgggcctgtcaggcctgccaggggctgatgggctgaaaggagaaaagggcgagagtgcatccgattctctgcaggagtctctcgcgcagttaattgtagagcccggaccacctgggcccccaggccccccaggtcctatggggctgcaaggaattcagggacctaagggactggatggggctaagggtgagaagggagcctccggcgagcgcggcccgagcggtctcccaggccctgtgggcccccccggcctgatcggcctccctggcaccaagggggagaagggacgtccaggagagcccggcctggacgggttccccggcccgaggggtgagaagggggaccgcagtgagcgtggagaaaaaggggaaaggggcgtccctggaagaaagggtgtgaaaggccagaaaggagagcccgggccaccgggactcgatcagccatgcccagtgggacccgatgggttaccagtcccgggctgttggcacaaatag

SEQ ID NO: 250123 - DNA, 1623 bp, Artificial Sequence
  derived and/or modified sequence
atgggccctggagagagagctgggggcggcggagatgctggaaaaggaaatgctgctgggggcggcggcggcggccgcagcgccaccacagctggcagcagagctgtgtctgccctgtgcctgctgctgtctgtgggcagcgctgctgcctgcctgctgctgggcgtgcaggccgccgccctgcagggccgggtggccgccctggaggaggagcgggagctgctgcggcgggccggccccccaggggccctggatgcctgggccgagccccacctggagcggctgctgcgggagaagctggatggcctggccaagatcagaacagcccgggaggcccccagtgaatgtgtgtgccccccaggccccccaggaagaagaggcaagccaggaagaagaggagaccccggccccccaggccagagcggcagagatggctacccaggccccctgggcctggatggcaagccaggcctgcccggccccaagggggagaagggggcccctggggactttggccccaggggggaccagggccaggatggagctgctggccccccaggccccccaggccccccaggggcccggggccccccaggggacaccgggaaggatggccccaggggggcccagggccctgctggccccaagggggagcccggccaggatggagagatgggccccaagggccccccaggccccaagggggagcccggggtgcctgggaagaagggagatgatggcacccccagccagcccggccccccaggccccaagggggagcccggctccatgggccccagaggagaaaatggagtggatggagcccctggccccaagggggagcccggccaccggggcacagatggagctgctggccccaggggggcccctggcctgaagggggagcagggcgacacagtggtgattgattatgatggccgcatcctggatgccctgaagggccccccaggcccccagggccccccaggccccccaggcatccctggggccaagggggagctgggcctgcccggggcccctggcattgatggagagaagggccccaagggccagaagggggaccccggggagcccggccctgctggcctgaagggggaggccggggagatgggcctgagcggcctgcctggagcagatggcctgaagggggagaagggggagagcgccagtgacagcctgcaggagagcctggcccagctgattgtggagcccggccccccaggccccccaggccccccaggccccatgggcctgcagggcatccagggccccaagggcctggatggagccaagggggagaagggggccagcggggagcggggccccagcggcctgcccggccctgtgggccccccaggcctcatcggcctgcccggcaccaagggggagaagggccggcctggagagcccggcctggatggcttccctggccccagaggagagaagggggacagaagtgagcggggggagaagggggagcggggcgtgcccggcaggaaaggagtgaagggccagaagggggagcccggccccccaggcctggaccagccctgccctgtgggcccagatggcctgcctgtgcccggctgctggcacaagtag

SEQ ID NO: 250124 - DNA, 1623 bp, Artificial Sequence
  derived and/or modified sequence
atgggccccggcgagcgggccggcggcggcggcgacgccggcaagggcaacgcagccggcggcggcggcgggggcagatctgcgacaacagccgggtctagagcggtgtctgccctgtgcctcctcttaagtgtgggatccgcagccgcttgtctgctcctaggagtgcaggccgctgccctccagggcagagttgcggcgttagaggaggagcgggagctgttgagacgcgcagggccgcctggggctctggatgcctgggccgaaccacacctcgagagactgctgagagagaaactcgatggcctggctaaaattaggacagctcgggaagctccttccgagtgtgtgtgtccccctgggcctcccggcaggcggggtaagccagggcgcaggggcgacccgggaccacctggtcagtcaggcagggatggttacccaggacccctggggctggatggcaaaccaggactgccaggcccgaaaggagaaaaaggggcgcccggcgatttcgggccacggggtgatcagggtcaagatggtgcggccggaccgcccggccctccaggacccccaggtgcccgtggtccccctggcgacactggcaaagacgggccccgcggcgcccaaggacctgcaggacccaaaggagagcccggacaggatggggaaatggggcccaaaggccccccaggtccgaaaggcgagcccggagtgccgggcaagaaaggagatgacggaacaccaagccagcctggtccacccggtcctaaaggcgagccgggatcgatggggcctcgaggcgagaacggcgtggatggtgctccgggccccaagggcgagcccggccaccgaggcactgacggtgcagcaggcccacgaggggcccctggacttaaaggagaacaaggagacaccgtcgtgatagactacgacggacgtatccttgacgctcttaaaggcccccccggaccccaaggcccccccggtccccctgggattcccggtgcaaagggggaactgggactccctggagcccccggcattgatggcgagaaaggtcctaaagggcaaaaaggggatcccggagagcctggccctgctggcttgaaaggcgaagcgggagagatgggtctcagcggcctccccggagcagatggccttaagggggagaaaggcgaatctgcatccgatagcttacaggaatcattggctcaactgatcgtggaacctggcccccctggcccacctggacctcctggtcccatgggactccagggtattcagggaccgaaggggttggatggggccaaaggggagaagggagctagtggagaaagaggcccttctgggctgccaggcccagtagggccccctggtctgatcggcctccccggaacaaagggcgagaaaggaagaccaggtgaacccggactggacggcttcccaggcccccgcggcgaaaagggcgaccggtcagagcggggagagaagggagaaagaggcgtgccgggcaggaagggcgtgaaagggcagaagggcgagcctgggccaccaggcctcgatcagccttgcccagtggggccagatggattgcctgtccctggctgctggcataagtag

SEQ ID NO: 250125 - DNA, 1623 bp, Artificial Sequence
  derived and/or modified sequence
atgggtcccggtgagcgtgccggtggcggtggggacgctggcaagggcaatgcagctggcggagggggaggtggacgcagcgccacaaccgcaggctccagggctgttagcgccttatgtctcctcctatccgtcggctccgccgctgcatgcctgctgttaggagttcaggcagccgcactgcagggacgggtggccgcacttgaagaagaacgcgaactcctgcgcagggcaggacctccaggagcgctcgacgcatgggccgagccacatctcgaacgccttctgcgagagaagctggacgggctggcaaagataaggaccgcccgtgaagctccgagcgaatgtgtctgtcctccaggtcctcctggtcgcaggggaaagccagggagaagaggcgaccctgggccaccagggcagagcggccgagacggttacccaggaccactgggcttggacggtaagcctggtctgcccggtccaaagggggaaaaaggggctcccggtgacttcggacccaggggcgatcagggacaggacggagccgcaggcccaccaggtccccctggacccccaggagcccgagggccacccggagacaccggtaaggacggacctaggggggctcagggaccagcgggaccgaagggagagcccggacaggatggagagatgggcccaaagggtccgccagggccaaaaggagagccaggcgtgccaggcaaaaaaggcgatgatgggacccccagtcagcccggaccaccaggcccaaaaggggagcctgggtcaatgggtcccaggggtgaaaacggagtggacggcgctccagggccaaaaggtgagcccggacatcggggaactgatggagccgcaggtccgaggggcgctccaggtttaaaaggtgagcaaggggatacagtggttatcgactatgatggaaggattcttgacgcgctcaaagggccaccaggtccccagggaccaccagggcctcccggtatcccaggggcaaaaggtgagctgggactccctggagctcctggaatcgatggcgagaagggccctaaaggacagaagggcgaccctggagagcccggacctgctggactcaaaggcgaggcgggagagatgggtctgtccggcctgcctggggcagacgggctcaagggtgaaaaaggcgagtcagcatcagactccctgcaggaatcactggctcagttaatcgttgaacctggtcccccaggccctcccggtccgcctggccctatgggtcttcagggaattcaggggccaaagggcctggacggggctaaaggtgaaaaaggggcaagcggtgaacgcggtcctagtggactcccaggtcccgtcggccctcccggtctgattggactcccagggactaaaggagagaagggtcggcctggggaaccgggtctcgacgggtttccgggacccagaggggaaaagggcgacagatcggagcgcggagagaagggcgagaggggcgtgccagggaggaagggtgtgaaggggcaaaaaggcgaacccggtccccctggcttggatcagccctgccccgtgggtccagatggtttgcccgtccctggttgttggcacaagtag

SEQ ID NO: 250126 - protein, 390 aa, Artificial Sequence
  derived and/or modified sequence
MSVRVARVAWVRGLGASYRRGASSFPVPPPGAQGVAELLRDATGAEEEAPWAATERRMPGQCSVLLFPGQGSQVVGMGRGLLNYPRVRELYAAARRVLGYDLLELSLHGPQETLDRTVHCQPAIFVASLAAVEKLHHLQPSVIENCVAAAGFSVGEFAALVFAGAMEFAEGLYAVKIRAEAMQEASEAVPSGMLSVLGQPQSKFNFACLEAREHCKSLGIENPVCEVSNYLFPDCRVISGHQEALRFLQKNSSKFHFRRTRMLPVSGAFHTRLMEPAVEPLTQALKAVDIKKPLVSVYSNVHAHRYRHPGHIHKLLAQQLVSPVKWEQTMHAIYERKKGRGFPQTFEVGPGRQLGAILKSCNMQAWKSYSAVDVLQTLEHVDLDPQEPPR

SEQ ID NO: 250127 - DNA, 1173 bp, Artificial Sequence
  derived and/or modified sequence
atgagcgtgagagtggccagagtggcctgggtgagaggcctgggcgccagctacagaagaggcgccagcagcttccccgtgcccccccccggcgcccagggcgtggccgagctgctgagagacgccaccggcgccgaggaggaggccccctgggccgccaccgagagaagaatgcccggccagtgcagcgtgctgctgttccccggccagggcagccaggtggtgggcatgggcagaggcctgctgaactaccccagagtgagagagctgtacgccgccgccagaagagtgctgggctacgacctgctggagctgagcctgcacggcccccaggagaccctggacagaaccgtgcactgccagcccgccatcttcgtggccagcctggccgccgtggagaagctgcaccacctgcagcccagcgtgatcgagaactgcgtggccgccgccggcttcagcgtgggcgagttcgccgccctggtgttcgccggcgccatggagttcgccgagggcctgtacgccgtgaagatcagagccgaggccatgcaggaggccagcgaggccgtgcccagcggcatgctgagcgtgctgggccagccccagagcaagttcaacttcgcctgcctggaggccagagagcactgcaagagcctgggcatcgagaaccccgtgtgcgaggtgagcaactacctgttccccgactgcagagtgatcagcggccaccaggaggccctgagattcctgcagaagaacagcagcaagttccacttcagaagaaccagaatgctgcccgtgagcggcgccttccacaccagactgatggagcccgccgtggagcccctgacccaggccctgaaggccgtggacatcaagaagcccctggtgagcgtgtacagcaacgtgcacgcccacagatacagacaccccggccacatccacaagctgctggcccagcagctggtgagccccgtgaagtgggagcagaccatgcacgccatctacgagagaaagaagggcagaggcttcccccagaccttcgaggtgggccccggcagacagctgggcgccatcctgaagagctgcaacatgcaggcctggaagagctacagcgccgtggacgtgctgcagaccctggagcacgtggacctggacccccaggagccccccagatag

SEQ ID NO: 250128 - DNA, 1173 bp, Artificial Sequence
  derived and/or modified sequence
atgagtgtacgcgtggcgcgagtggcttgggtaaggggtctgggcgcctcctatcgcagaggcgcatcttccttcccagtccccccaccaggggctcagggggttgccgagctgttgcgggacgcgaccggagcagaagaggaggcgccatgggctgccacggagaggcgaatgcctggccaatgtagtgtactcttgttccctggccagggatctcaagtggtgggcatgggaaggggcttattgaattaccctcgcgtacgggaactgtatgctgctgccagacgcgtactggggtacgacctgcttgaactctctctccacggcccccaggagactctcgatcgcaccgttcactgccaaccagccatctttgtggccagcctggctgcagtggaaaaactccaccacctgcagcccagcgtaatcgaaaactgcgtggccgcggccggattctctgtaggcgaattcgctgccctcgtgtttgccggagcgatggaattcgcagagggtctgtatgcagtcaaaatccgtgccgaagcgatgcaggaagcctccgaggcggtgccctcaggtatgcttagcgtcctaggccagccacagtccaagtttaattttgcttgtctggaggctagggagcactgtaaatctctgggcattgaaaatcctgtgtgcgaagtatccaactacctcttccccgactgccgtgtcatctctggccaccaagaggctctccgatttctccagaaaaactctagtaaatttcactttaggcggacaagaatgctcccagttagtggtgcatttcatactcgcctgatggaaccagccgtagagcctctcacacaggcattgaaggccgtcgatataaagaagcctcttgtctccgtgtattccaacgttcacgcacaccgatatcgccaccctgggcatattcataaactgcttgcccagcagctggttagtcccgtgaagtgggaacagaccatgcatgcaatttacgagaggaagaaagggagagggtttccacaaaccttcgaggtagggcccgggaggcagctgggggccatcctgaaatcttgtaacatgcaggcttggaagtcttatagcgctgtggacgttttgcaaactctggaacatgtagacctggatccccaggaacctccacggtag

SEQ ID NO: 250129 - DNA, 1173 bp, Artificial Sequence
  derived and/or modified sequence
atgtctgtgcgggtggcccgggtggcctgggtgcggggcctgggcgccagctacagaagaggagccagcagcttccctgtgcccccacctggggcccagggcgtggccgagctgctgagagatgccactggagctgaggaggaggccccctgggccgccacagagaggaggatgcctggccagtgcagcgtgctgctcttccctggccagggcagccaggtggtgggcatgggccggggcctgctgaactacccccgggtgcgggagctgtatgctgctgccaggagagtgctgggctatgacctgctggagctgagcctgcacggcccccaggagaccctggacagaacagtgcactgccagcctgccatctttgtggccagcctggccgctgtggagaagctgcaccacctgcagcccagcgtgattgagaactgtgtggccgccgccggcttctctgtgggggagtttgctgccctggtgtttgctggggccatggagtttgctgagggcctgtatgctgtgaagatccgggcagaggccatgcaggaggccagcgaggccgtgcccagcggcatgctgtctgtgctgggccagccccagagcaagttcaactttgcctgcctggaggcccgggagcactgcaagagcctgggcattgaaaatcctgtgtgtgaggtgagcaactacctgttcccagactgcagggtcatcagcggccaccaggaggccctgcgcttcctgcagaagaacagcagcaagttccacttccggaggaccaggatgctgcctgtgtctggggccttccacacccggctgatggagcctgctgtggagcccctgacccaggccctgaaggctgtggacatcaagaagcccctggtgtctgtgtacagcaatgtgcacgcccaccgctaccgccaccctggccacatccacaagctgctggcccagcagctggtgtcccctgtgaagtgggagcagaccatgcacgccatctatgaaaggaagaagggccggggcttcccccagacctttgaggtgggccctggccggcagctgggcgccatcctgaagagctgcaacatgcaggcctggaagagctacagcgctgtggatgtgctgcagaccctggagcacgtggacctggacccccaggagccccccaggtag

SEQ ID NO: 250130 - DNA, 1379 bp, Artificial Sequence
  derived and/or modified sequence
tcgggcctcggtcgccacggtaacgcgcgcgggcaggtgtccgaccatgagcgtccgggtcgcacgggtagcgtgggtcaggggcttgggcgccagctaccgccgcggcgcctcgagcttcccggtgcctccgccgggcgcccagggtgtagcggagctgctgcgagatgcgaccggggcggaggaggaggcgccctgggcggcgacggagcggcgaatgccgggccagtgctccgtgctgctcttcccgggccagggcagccaggtggtgggcatgggccgcggtctgctcaactacccgcgcgtccgcgaactctacgccgccgcccgccgcgtgctgggctacgacctgctggaactgagcctgcacgggccgcaggagaccctggaccgcaccgtgcactgtcagcccgcgatcttcgtggcatcgctggccgctgtcgagaaactacatcacctgcagccctcggtgattgagaactgtgttgctgctgctggattcagtgtgggagagtttgcagccctagtgtttgccggagccatggaatttgctgaaggtttgtatgcagtgaaaatccgagctgaggccatgcaggaagcttcagaagctgtccccagtgggatgctgtctgtcctcggccagcctcagtccaagttcaacttcgcctgtttggaagcccgggaacactgcaagtctttaggcatagagaaccccgtatgtgaagtgtccaactacctctttccagattgcagggtgatttcaggacaccaagaggctctacggtttctccagaagaattcctctaagtttcatttcagacgcaccaggatgttgccggttagtggcgcattccacacccgcctcatggagccagccgtggagcccctgacgcaagctttaaaggcagtcgacattaagaagcctctggtttctgtctactccaacgtccacgcgcatagatacaggcatcccgggcacatccacaagctgctggcccagcagctggtctccccagtgaagtgggagcagacgatgcatgccatatacgaaaggaaaaagggcagggggttcccccaaactttcgaagtaggccctggcaggcagctgggagccatcctgaagagctgtaacatgcaggcctggaagtcctacagcgccgtggatgtgctgcagaccctcgaacatgtggacctggaccctcaggagcccccgagatgactgcagggggctcaaatgcgatgaccccctctgtcctcctgaggagaggctgtaggctgtgcctgtcgccccctaccttcctaatggctcctcctctgaggagtgaaagggatttgtttgcaacgtgctttgaaggccacataaaaagccctaaaaatga

SEQ ID NO: 250131 - DNA, 1173 bp, Artificial Sequence
  derived and/or modified sequence
atgagcgtgcgggtggcccgggtggcctgggtgcggggcctgggcgcctcctacagacggggcgcaagtagcttcccagttccgcctccaggggcacagggggtggccgagctcctacgcgatgcaaccggtgccgaagaagaagcgccttgggccgccaccgagcgccgtatgccaggccagtgttccgtccttctattccctggacagggcagccaggtagttggcatgggaaggggcttactgaattaccccagagttcgcgaactatacgccgcggcccgaagggtgctggggtatgatctgctggagctcagccttcatgggccccaggaaacactcgacaggactgttcactgccagccggctatctttgtggccagcctcgcagccgtggaaaaattacaccacctccagccatccgttattgaaaattgcgtcgctgctgccgggttctcagtaggggaattcgctgcgctcgtcttcgctggcgctatggagtttgccgaagggttgtacgccgtaaaaatccgcgcggaagcaatgcaagaggctagcgaagccgtaccttccggcatgctgtcagtgctggggcagcctcagtcaaagttcaattttgcctgtttggaagcccgagagcactgcaagtctctgggtattgaaaatccagtgtgcgaggtgtcaaattacctctttccagactgtcgggtgatctccggccaccaggaagcgctgagattccttcagaaaaacagttccaagttccacttcaggcgtaccagaatgcttccagtcagcggcgcctttcacacccgcctcatggaacctgcggtcgaaccattgacccaggccttgaaggctgttgatatcaaaaaaccattggttagcgtgtacagtaatgtgcatgctcaccgttacagacaccctggacacattcataagctcctggcccagcaattagtgtcccctgtgaaatgggaacagaccatgcatgctatctacgaacgcaaaaaaggccggggcttccctcaaacatttgaggtggggcccggcaggcaacttggtgcaatcctgaagagctgcaatatgcaggcctggaagtcctactcagctgtggatgttctccagactctggaacacgtagatcttgatccccaggaaccaccccgatag

SEQ ID NO: 250132 - DNA, 1173 bp, Artificial Sequence
  derived and/or modified sequence
atgtcagtgagagttgccagagtcgcatgggtcagagggctgggtgcctcctatcggcgaggagcctcatcttttccggtgcctcctccaggggctcagggggttgccgaactgctgagagatgccacaggcgcagaagaagaagccccatgggcggctaccgagagaaggatgccgggtcagtgctccgtgctcttgtttcccggacaagggtctcaggtggtgggcatgggccgagggttgttaaactaccctagggtgcgtgaactctacgctgccgctcgcagagtcctgggatatgacctgttagaactgtctttacatggaccccaggagactttggaccgtacagtccactgtcagcctgccatattcgtcgctagcttggctgccgtcgagaagctgcatcatctccagccctcagtaatcgagaattgtgttgctgcagccggtttctccgtgggtgagttcgccgcacttgtttttgccggagctatggagttcgccgagggcctctacgcggtcaaaatccgcgctgaggcaatgcaagaggcgagtgaagctgttcctagcgggatgctgagcgttctcggtcaaccacagtccaagttcaatttcgcttgtcttgaggcaagggagcattgtaagagtctggggattgagaaccctgtgtgcgaagtctctaattatctcttccccgactgtagggtgatttccggacaccaggaagcacttcgattcctccagaagaactcctcaaagttccatttccggaggacgcggatgctccctgtttcgggggcttttcacacccgtctgatggagcctgctgtcgaacccctgacccaggccctaaaggccgtcgacataaagaagcccttagtgtctgtttacagtaatgtccacgcacaccggtacagacaccccggtcatattcacaaactccttgcacagcaactggtcagtcctgtaaaatgggagcagaccatgcacgccatttatgagagaaagaaaggcagggggttcccgcaaacatttgaggtgggacctggtcgccagttaggcgcaatccttaagagctgtaatatgcaggcctggaagagttattcagctgtggacgttctgcaaaccctggagcacgttgaccttgaccctcaagagccaccacgctag

SEQ ID NO: 250133 - protein, 216 aa, Artificial Sequence
  derived and/or modified sequence
MSFLFGSRSSKTFKPKKNIPEGSHQYELLKHAEATLGSGNLRMAVMLPEGEDLNEWVAVNTVDFFNQINMLYGTITDFCTEESCPVMSAGPKYEYHWADGTNIKKPIKCSAPKYIDYLMTWVQDQLDDETLFPSKIGVPFPKNFMSVAKTILKRLFRVYAHIYHQHFDPVIQLQEEAHLNTSFKHFIFFVQEFNLIDRRELAPLQELIEKLTSKDR

SEQ ID NO: 250134 - DNA, 651 bp, Artificial Sequence
  derived and/or modified sequence
atgtcattcttattcggcagtcggtcttcaaagacatttaagccaaagaaaaacatccccgagggaagccaccaatacgagcttctgaaacacgcagaagcaacactgggctcggggaatctcagaatggccgtcatgctcccggaaggagaagacctcaatgagtgggtggctgtgaataccgtagactttttcaaccagatcaacatgttatatgggaccatcaccgatttctgcactgaggagagctgccccgtcatgagcgccgggccaaaatacgagtaccattgggcagatggaaccaatattaagaagcctataaagtgcagcgctcctaaatatatcgactaccttatgacctgggtgcaggaccaattagacgatgagacactgtttccttctaagatcggagttccttttccaaaaaatttcatgtccgtggccaaaactatcctgaagcgcttgttccgcgtgtatgctcacatttatcaccaacattttgaccctgttattcagctacaggaagaggcccatctcaacaccagcttcaagcactttatatttttcgtgcaagaattcaatctaatcgaccgacgggaactagctccgctgcaggagctgatcgaaaaactaacgtctaaggaccgctag

SEQ ID NO: 250135 - DNA, 651 bp, Artificial Sequence
  derived and/or modified sequence
atgtccttcctgtttggcagccgcagcagcaagaccttcaagcccaagaagaacatccctgagggcagccaccagtatgagctgctgaagcacgccgaggccaccctgggcagcggcaacctgaggatggctgtgatgctgcctgaaggagaggacctgaatgagtgggtggccgtgaacacagtggacttcttcaaccagatcaacatgctgtatggcaccatcacagacttctgcacagaggagagctgccctgtgatgtctgctggccccaagtatgagtaccactgggcagatggcaccaacatcaagaagcccatcaagtgcagcgcccccaagtacatcgactacctgatgacctgggtgcaggaccagctggatgatgagaccctcttccccagcaagattggagtgcccttccccaagaacttcatgtctgtggccaagaccatcctgaagaggctcttccgggtgtatgcccacatctaccaccagcactttgatcctgtgatccagctgcaggaggaggcccacctgaacaccagcttcaagcacttcatcttctttgtgcaggagttcaacctgattgaccggcgggagctggcccccctgcaggagctgattgagaagctgaccagcaaggacagatag

SEQ ID NO: 250136 - DNA, 651 bp, Artificial Sequence
  derived and/or modified sequence
atgagcttcctgttcggcagccggagcagcaagaccttcaagcccaaaaagaatatccctgaaggaagccatcaatatgagctactgaagcacgctgaagccacactaggaagcggtaatctccgtatggcggtcatgctccccgaaggcgaggatctgaatgagtgggttgccgtaaatacagtggatttcttcaaccagataaacatgttgtacggcacaatcactgatttctgtacagaggagagctgccccgtcatgagtgccggacctaaatatgaataccactgggcagatggaactaatattaaaaagccaattaaatgctcagcgcctaagtatatcgattatctgatgacctgggtccaggaccaactcgatgacgaaactctctttccttctaagatcggcgtgccttttccaaaaaacttcatgagcgtggccaagactatacttaagcggttgttcagggtgtatgcgcatatctaccatcagcatttcgatcccgtgatccagctgcaggaggaggcacatctgaataccagcttcaaacatttcatcttttttgtgcaggaattcaacttaatcgacaggagagagctggcgcctcttcaggaactgattgagaaacttacgagtaaagacagatag

SEQ ID NO: 250137 - DNA, 651 bp, Artificial Sequence
  derived and/or modified sequence
atgagcttcttattcgggagccgttcgagcaaaacttttaaacccaagaaaaacatacctgaggggagtcatcagtacgaactgctcaaacacgcagaggctacacttggcagcggaaatcttagaatggcggtgatgctcccggaaggcgaggatctgaacgagtgggtggctgttaatactgtggacttttttaatcaaatcaacatgctctacggtaccatcacagatttttgtacagaggaatcctgtcctgtgatgtccgctgggccaaagtacgaataccattgggctgatgggacaaatattaagaagccaattaagtgcagtgctccgaagtacatcgactatctgatgacatgggtgcaggaccagctggacgacgaaacactttttcccagcaagatcggggtcccctttcccaaaaactttatgtccgtcgctaagaccatacttaagcggctgttccgtgtatatgcgcatatttaccatcagcatttcgatcctgtgatccagttacaggaagaagcacatctcaatacttcgttcaaacactttattttttttgtgcaggagtttaacctgatagacagacgggagctggccccactgcaggaactcatagagaagctcacgtctaaagatcgatag

SEQ ID NO: 250138 - DNA, 6963 bp, Artificial Sequence
  derived and/or modified sequence
gagcgctacccacttccgccccctccccctgccattggaactagctgagccgaactagttgcggccaccgagcagccggctctcggcacctcctcctccgcctccctgtctcctgttccattcgcctttcctcttctttcctggcccacgccgctccgaggcctcgcgaccgccgagcctgcagcctgccccgcggccaacatgagcttcttgtttggtagtcgctcttctaaaacttttaaaccaaagaagaacattccagagggttctcaccagtatgagctcttaaaacacgcagaagccacacttggcagtggcaaccttcggatggctgtcatgcttcctgaaggggaagatctcaatgaatgggttgcagttaacactgtggatttcttcaatcagatcaacatgctttatggaactatcacagacttctgtacagaagagagttgtccagtgatgtcagctggcccaaaatatgagtatcattgggcagatggaacgaacataaagaaacctattaagtgctctgcaccaaagtatattgattacttgatgacttgggttcaggaccagttggatgatgagacgttatttccatcaaaaattggtgtcccgttcccaaagaatttcatgtctgtggcaaaaactatactcaaacgcctctttagggtttatgctcacatttatcatcagcattttgaccctgtgatccagcttcaggaggaagcacatctaaatacatctttcaagcactttattttttttgtccaggaattcaaccttattgatagaagagaacttgcaccactccaagaactgattgaaaaactcacctcaaaagacagataaaaggatgcagagctgtgcaaattgttcctcaaatgaagcagtgtggagtgtattggggattttgttatattttgtttttatctggattgtttttgtcctaggtttgggggcgggggcttgtttgggttcctttttctttattctgattatgtgaaaccatattctattgctaggggaagccaagaaccattctctatacacttgataagggtaaatttatcttagtgtttttaaacttggttttggttacttgaggagttttttaataatattgtgtgctgcaagaaagtgcttgttgattgaactgccgatggattggtttctgtgtggtataaattgtggcccatttatgaagtccccaaaagagttatgtttttaagtgccttggcaggctcacttctgaggtgcaaaacatagatatagaactgaacagggcttgaaacaatattaggattactacccagggcacttactggtgcatgttgtaacatatctatgataaaagccatagtttacctaaaatggtgatttccagcctttactgctttgaagaaacagaatttgtaaaggtatgcatgtagaacataaaaaatatttcttaattattttttatattgatggtaatatattacgttcaacaatgcttaaagctctacaagcaggtcttttcccacctcttgatatctgtgatactgaaacttgaggatgttgaaatgtattacattttggcttctttctacatgttaactgcactgtagatgtaaaaattcaggttatatataggattgccatcttcagaggtgatgctgaactgtgaggtttcctagtaattgccaaatgagccgtaagtctgcagaattcccttctactttgaagagaaggggataggaatgtatatttggctgggggcatggagatgttcgtatgtatgaggagttagggatggggagtcaagttctagaaagttttgtctgaaaacctttgaatagaatggcatgaagattttaatcaattacttataaacaaagtcttagagacttccttttaggaatcaacttccatgagaagttaaaaataaattattaattttaggtacagacattaaacatggaatttaaggactgttgggggaaattgatcacttcttagcatttccattcagtgaatggagctgatgtttgcctgtcattttaagatgataccataccttctttggttattataggtccagtttgaagcattctgacttctggtttttccaccctgaaaggaaatgtttttctttgcagcagtattagataatgaaaaatgctaattcagtagttattaacttctaaattttattcgccatgactttctagtgaattattaccataaataacaatttcagaaacttagtttttagaataaatattaatttttccacttcagttttattctagaaaataccctttttagaaatccagttttagttttgtcattttcgataaatctttcttcagttagaaatatatatccttccttcagttgaaacatatacctttttcacatctaggaagaaatgcttgctctgaaatagtatagattaaaaacactcagtagaaaagaatctaaaattaaatgaatttgttttgccattaaagtagagcagtgatacaatttaatgccattacaattatgttgactagaaactgcctttttctccacttcatttctagcaattatttaccaagtaccaacagtagaagtaacaggaaagcctggcagagttaaatatcttggacatttattggtaaagcttatttataaactgcagtcagagctagttaatttccttaaatctttttgtattcagatagataatatgaatcattatgggttgattcagaaataaaatttgtgaggtgattttgaatcttgtccatataggaaaatgaagcacagaattactcagtcttccatattgtatttgacttcatatcaatctagtaaaaaaggagttgcaatagccaagtatagagagaatagtgaaaaattaatcttgccctttcaagccttatacagtagtacactgtacttgtttttagtagtaagacctactttcccactatatgtagatagtttgttttcactgtgccagaatctcaggtgcctgcttagagtatttctttaatcacagtcactgggaagtaaggagatgtatatatgtgtatatatggtaacaaagcatagcagttctctaggggagaggcctggcattgcacatggtgttacatggctacaagtaaggaaaaaatcagaaagtgaaagaactgatgtaataaaaggttgatttggttggttcccatgaaagttagtaagatgcccttttaaatataaggatcagtgctttgttctgcagcagagtttgctgataaatgtctgttggattctttttggatttctttaattaatttgtaagtaaccaagataattattttcccccttgctctctatattaatacgtagctataaagcaacagttggttttcttatcctttgataaaagcatcccataaaatataaagtagtaagttaacatagtattattgtcacacacaatgctttttttggttaaatgttgatacgaagcaatgttttggaattactttaattgatggagtagtggtggtagagagaaattaataacaaaaagagtgaaaatattttaattagcagtagatggtgctactggctttcatttgctgacttgattattccctttctcttaaaaaccatggcattagactgcactaaattaacaagcatgttagttgctggtagaggttttggaggttaatttaccttaaattggaagacttttaattgcagtctctttctaccttccctctgttagtcatttgtaaattctaaatggtcaccataaaatgtattaggtaggagaagatacgttttatgtataatatatctcagactgagttactgcctgtcttatcaggatggataaaacactacagtctcttatcaggaaatagagatgatgtggatatttatatattacatatataaccaccagactccattttatatattagcattttccttgcttatgggaaaatagcaaaacaacatttcatttatacttttgtttacccctctctgagacaggttttgataaccactgaaatggtagaatatgtgagatacaaatattgagttgtagaactttctttttaaggtgaataagtcatgccttaacatccaaataagagttcatcttcagagtggttcttttgggagcactgtttattccagctatactgcaaaagtataatgtttttggaactgttctagagcataccatgaaaagcagtttgttattatgcaggaaaatcagtttcatcattttagttacactaaacacttttggcagcttaatatgacctttttaaattttttttattttttttatttttatttctttaagatggagtcttgctctgttgcccgggctggagtacaatggcatgatctcagctcactgcaacctccacctcctgggttcaagcatttctcctgcctcagcctcccaagtagctgggattacaggcagcaccacacctggctaattttcatatttttagtagagatggggtttcaacatattggccaggctggtctcaaactcctgacctcaagtgatccgccctccccagcctcccaaagtgctgggattacaggtgtgagccaccacagccagccagtatgacctatcttaatcatcagctcaactgtaatttaaatttggctgttctctggagctaaaccattagggaagttcaaaggaatgtgccatgatttccgaatttgcacaagagaatgttttaagcattggtagcataattgaataaaagaatagtttcctgatgtcactattttgaagtggaaattatcacttggatgtggaggttttactttttaaaaacattcagcttaattaccttaccttaattaccttagttagatatactaatggaaaaaaaccaagtcctttctctagaacttgttttctatttttgttccttttcatgaaaacttctcaatttaattttaactactgtaggatagtattgattgaatggatactatggaaaagtggatccaatatttaagatagaagtagtttaaggagacaacagcctttactgccatttttttttaaatgttttcactcagatgaacaatttgactttaataaaagactggagatttttgtacaaagaaataggaataagtttcatatactaattatgctgagttttaagcctacatatcacaaaatatttagaattgtataaccttttcatatatttataacttttaatgtctttttaaaagatgtgggaccaaaaatatatttataatttggaaatgtgactgcataccaataagaaaacttaccttattttgaaatttatctgggatattaaagaatctaccaattcttaaaaacacagatttatactttaagcttattttaaaattaaagaatatataccaattcttagaaacactttaaggactactcttaaataacttaaatatcagagttttgttgtaatattaaaatttaccgtggaaatcactgttgttcagctatcaccttaattgtgtatgatatgataaatgtttagcagtaaagctatcttaagatttaatggaaaagtttaatttgaagatgtaacaaaaattctgaccacagttgattctgaatttttaaggctttcctaataggctgatcacagagaataatccattttgaaggtataaaactgcactgtatgtctgtcacttgtagctgaactgattcacattttgacaaaagagagaaaatacaaaaatgagttttgcaaatgtaataactttttctgcatatagaactaaataattgaaaaatatgggctatagttctcaaaggtagatagtaaaatcactggctttttccagctgtatgtttttccactgtgcgtgtacacacacactggaaaataattaggctgattttgcaggtcttcattgttagagattctgaagtatttactgtcaattcataggtttcagtttatttaggaaattagtgtttgacagctttttttaaattatttcactgaagctgagattattagtgatacaaagttaaaatttcaatatttaatttctctatatattattaatattaaattgttttttacttataaattcatgttctcatctgatttaatattaaatttgtataggtgggcgtttcttaccattttgcacaagtttttgtttttctgaaatacttaattgtgcaggttgtaaaaaagattagtgcattttcattttaaggatgctttgctccttaaattgttcgacagaaatgactttttagggaaagtagtttttttggagctactaacttgtatttattattgtacatgcataaccagggtggtgagggcactaatcttgtaggaaacacttacttgatgttttatttgaacttttcctataggtttaacttttactgcatagaattaacactaggaacagtgtcatgaaatctgggttgaaggagaatacagtatatatgagaacacttaaagttcaaatagaaatcatttctgaagacaaaagcagaggaatattgtcagtgccaagtaatggaagaataagggcggcatttacactgtgcaagtattgagaagagtgcataaagacagggaactactctcatggagacagtttctctcttataatcaagtaactagaaggggaaaaatcatctaagttatgaaatccaacataggcgctatattacaaactgtgccggattatgcaaattgtagttgttactgatcaaagtttaattgcttcatttttgtttaaaaagggatactgatgtcagaaaatctgtaatatgttttattcaaaagatgtaaataatgtatacagacttgtatgtgatgggatgggaaatatttaaattctaggtgtttttttttttttaaagaagaaactcaatgtttataagaaaaaaatgaataaatagttacgtttggccatgaa

SEQ ID NO: 250139 - DNA, 651 bp, Artificial Sequence
  derived and/or modified sequence
atgagcttcctgttcggcagcagaagcagcaagaccttcaagcccaagaagaacatccccgagggcagccaccagtacgagctgctgaagcacgccgaggccaccctgggcagcggcaacctgagaatggccgtgatgctgcccgagggcgaggacctgaacgagtgggtggccgtgaacaccgtggacttcttcaaccagatcaacatgctgtacggcaccatcaccgacttctgcaccgaggagagctgccccgtgatgagcgccggccccaagtacgagtaccactgggccgacggcaccaacatcaagaagcccatcaagtgcagcgcccccaagtacatcgactacctgatgacctgggtgcaggaccagctggacgacgagaccctgttccccagcaagatcggcgtgcccttccccaagaacttcatgagcgtggccaagaccatcctgaagagactgttcagagtgtacgcccacatctaccaccagcacttcgaccccgtgatccagctgcaggaggaggcccacctgaacaccagcttcaagcacttcatcttcttcgtgcaggagttcaacctgatcgacagaagagagctggcccccctgcaggagctgatcgagaagctgaccagcaaggacagatag

SEQ ID NO: 250140 - protein, 375 aa, Artificial Sequence
  derived and/or modified sequence
MSVSGLKAELKFLASIFDKNHERFRIVSWKLDELHCQFLVPQQGSPHSLPPPLTLHCNITESYPSSSPIWFVDSEDPNLTSVLERLEDTKNNNLLRQQLKWLICELCSLYNLPKHLDVEMLDQPLPTGQNGTTEEVTSEEEEEEEEMAEDIEDLDHYEMKEEEPISGKKSEDEGIEKENLAILEKIRKTQRQDHLNGAVSGSVQASDRLMKELRDIYRSQSYKTGIYSVELINDSLYDWHVKLQKVDPDSPLHSDLQILKEKEGIEYILLNFSFKDNFPFDPPFVRVVLPVLSGGYVLGGGALCMELLTKQGWSSAYSIESVIMQINATLVKGKARVQFGANKNQYNLARAQQSYNSIVQIHEKNGWYTPPKEDG

SEQ ID NO: 250141 - DNA, 1128 bp, Artificial Sequence
  derived and/or modified sequence
atgagcgtgagcggcctgaaggccgagctgaagttcctggccagcatcttcgacaagaaccacgagagattcagaatcgtgagctggaagctggacgagctgcactgccagttcctggtgccccagcagggcagcccccacagcctgcccccccccctgaccctgcactgcaacatcaccgagagctaccccagcagcagccccatctggttcgtggacagcgaggaccccaacctgaccagcgtgctggagagactggaggacaccaagaacaacaacctgctgagacagcagctgaagtggctgatctgcgagctgtgcagcctgtacaacctgcccaagcacctggacgtggagatgctggaccagcccctgcccaccggccagaacggcaccaccgaggaggtgaccagcgaggaggaggaggaggaggaggagatggccgaggacatcgaggacctggaccactacgagatgaaggaggaggagcccatcagcggcaagaagagcgaggacgagggcatcgagaaggagaacctggccatcctggagaagatcagaaagacccagagacaggaccacctgaacggcgccgtgagcggcagcgtgcaggccagcgacagactgatgaaggagctgagagacatctacagaagccagagctacaagaccggcatctacagcgtggagctgatcaacgacagcctgtacgactggcacgtgaagctgcagaaggtggaccccgacagccccctgcacagcgacctgcagatcctgaaggagaaggagggcatcgagtacatcctgctgaacttcagcttcaaggacaacttccccttcgacccccccttcgtgagagtggtgctgcccgtgctgagcggcggctacgtgctgggcggcggcgccctgtgcatggagctgctgaccaagcagggctggagcagcgcctacagcatcgagagcgtgatcatgcagatcaacgccaccctggtgaagggcaaggccagagtgcagttcggcgccaacaagaaccagtacaacctggccagagcccagcagagctacaacagcatcgtgcagatccacgagaagaacggctggtacaccccccccaaggaggacggctag

SEQ ID NO: 250142 - DNA, 1128 bp, Artificial Sequence
  derived and/or modified sequence
atgagcgtcagtgggctaaaggccgagctcaagttcttggccagcatcttcgacaagaaccatgagagattccgtattgtttcatggaagttagatgaactgcactgccagttcctggtgccccaacagggaagccctcactcgttacccccgccgctcactctgcactgtaatattacagaaagttacccctcctcctccccaatctggtttgtggattctgaggaccctaatctgaccagcgtcctcgagaggctggaagacacaaaaaacaataacttgctgagacagcagctgaaatggctgatctgcgagctgtgctccctgtataacttaccaaagcacttagacgtcgagatgcttgaccagccattgcctaccgggcaaaacgggactaccgaagaagtcacctccgaagaagaggaagaggaggaggagatggcagaagatatcgaagatctggaccactacgagatgaaggaggaagagcctattagtgggaagaaatccgaggacgagggaatcgagaaagagaacttagcgattttggagaagatccgcaagactcagcgccaagatcatcttaatggtgccgtttcaggcagcgttcaagcctccgaccgccttatgaaggagctgcgggacatataccgcagccagtcatataagactggcatctacagcgttgagctcatcaatgattcattgtacgattggcacgtgaagcttcagaaggtcgatcctgatagtccgctccatagcgacctgcaaatcctgaaagagaaggaggggattgagtacatccttctcaacttttctttcaaggacaactttcctttcgacccccccttcgtccgggtggtattacctgtactaagtggcggctatgtcttggggggaggcgccctgtgcatggagttgctgacgaagcaggggtggtcgtctgcgtattctatcgagagcgtaattatgcagattaatgcaacgctagtcaaggggaaggcgagggttcagttcggtgcaaataagaatcagtacaaccttgcaagagcccagcagtcctacaacagtatagtacagatacatgaaaaaaatgggtggtatacaccacctaaggaagacgggtag

SEQ ID NO: 250143 - DNA, 1128 bp, Artificial Sequence
  derived and/or modified sequence
atgtctgtgtctggcctgaaggccgagctgaagttcctggccagcatctttgacaagaaccacgagcgcttccgcatcgtgtcctggaagctggatgagctgcactgccagttcctggtgccccagcagggcagcccccacagcctgcccccacccctgaccctgcactgcaacatcacagagagctaccccagcagcagccccatctggtttgtggacagcgaggaccccaacctgacctctgtgctggagcggctggaggacaccaagaacaacaacctgctgcggcagcagctgaagtggctgatctgtgagctgtgcagcctgtacaacctgcccaagcacctggatgtggagatgctggaccagcccctgcccaccggccagaatggcaccacagaggaggtgaccagcgaggaggaggaggaggaggaggagatggctgaagatattgaggacctggaccactatgagatgaaggaggaggagcccatcagcggcaagaagtcagaagatgagggcatcgagaaggagaacctggccatcctggagaagatcaggaagacccagaggcaggaccacctgaatggagctgtgtctggctctgtgcaggccagtgaccggctgatgaaggagctgcgggacatctaccgcagccagagctacaagacaggcatctacagcgtggagctgatcaatgacagcctgtatgactggcacgtgaagctgcagaaggtggaccctgacagccccctgcacagcgacctgcagatcctgaaggagaaggagggcatcgagtacatcctgctgaacttctccttcaaggacaacttcccctttgaccccccatttgtgcgggtggtgctgcctgtgctgagcggcggctacgtgctgggcggcggggccctgtgcatggagctgctgaccaagcagggctggagcagcgcctacagcattgaatctgtcatcatgcagatcaatgccaccctggtgaagggcaaggcccgggtgcagtttggagccaacaagaaccagtacaacctggcccgggcccagcagagctacaacagcatcgtgcagatccacgagaagaatggctggtacaccccacccaaggaggatggatag

SEQ ID NO: 250144 - DNA, 1128 bp, Artificial Sequence
  derived and/or modified sequence
atgagcgtgagcggcctgaaggccgagctgaagttcctggccagcatcttcgacaagaaccacgagagattcaggattgtgtcttggaaactggacgagttgcattgccagtttctggtgcctcagcagggatcgcctcattctctcccacctcccctcaccctacattgtaatattactgaatcttaccctagttcttctccaatctggtttgtggactcagaggatcccaatctgacatcggtgttggagcgtcttgaggataccaagaacaataatctcctgcggcagcagcttaaatggctgatctgcgaactgtgcagtttatataatttgcccaagcacttggacgtggagatgctggatcaacccctccctacgggacaaaacggcaccacagaagaggtgacatccgaggaggaggaggaagaagaggagatggcagaggatattgaggacttggatcactatgagatgaaagaggaagagccgatctccggtaaaaagtcagaagacgaggggatagagaaagagaacctggcgattcttgaaaaaatcaggaagacccaaaggcaggaccatctgaatggtgccgtgtctggctccgtccaagcgtcagataggcttatgaaggagctgagagatatttacaggtcccagagttacaagaccggcatttatagcgtcgagttaatcaacgactcattgtacgactggcatgtgaaattgcagaaagtggatccagacagcccactccatagtgatctccagatcttgaaggaaaaagaaggtatagagtatattctattaaacttttctttcaaggataattttccatttgacccccccttcgtgcgagttgtcctgccagttctgagcggcggctatgttctgggcggcggagccctttgcatggagctgttaaccaaacagggctggagctcagcgtacagcatagaatctgtgatcatgcagattaatgctacccttgttaaaggtaaggctagggtgcagtttggcgccaataaaaatcagtataatcttgcacgggctcagcagtcctacaactctattgtacagattcacgaaaagaatggctggtacacacccccaaaagaagatgggtag

SEQ ID NO: 250145 - DNA, 1128 bp, Artificial Sequence
  derived and/or modified sequence
atgtctgtttctgggttaaaggcagagttaaagtttctcgcatcaattttcgacaaaaaccacgagcggttcagaattgtgagctggaagctggacgaattacattgccaattccttgtgccacagcagggatccccacactccctacccccaccgttgacgctccattgcaatatcactgagagctacccttcaagcagccctatctggtttgtagattctgaggaccctaatctcaccagcgtcctggagaggctggaggacactaagaataataatttattgcgacagcagttaaagtggctcatttgtgagctgtgttctctgtacaatctgccgaagcatctcgacgtagagatgcttgaccagccgctacctaccggtcagaacgggaccacagaggaggtgacatccgaagaagaagaagaagaagaggagatggccgaagacatagaggacttagatcattacgaaatgaaggaggaggagcctatcagtggaaagaagagtgaagacgaggggatcgagaaggaaaacctcgcaattctcgagaaaattcgtaagacccaacgccaagaccacctgaatggcgcagtgagtggttccgtgcaggcttccgataggttaatgaaggagctgcgagacatttaccgctcacagtcatataagaccggaatctattcagtagaactcattaatgattcactctacgactggcatgtaaagctgcaaaaggtggacccagatagtcctctccattcagacctgcagatcttaaaggaaaaggaaggtatagaatatatcctccttaacttcagcttcaaggataatttcccctttgaccccccttttgtccgcgtggtgctcccagttctgtccggagggtatgtcctagggggaggagctctgtgtatggaattactgactaagcaaggctggagctcagcatacagtatcgagagcgttattatgcaaatcaacgccaccctggttaagggtaaagccagagtgcagttcggggctaacaagaatcaatacaacctcgctagggcacaacaaagttataactcgattgtccagatccacgagaaaaatgggtggtacactcctcctaaggaggatggttag

SEQ ID NO: 250146 - DNA, 3130 bp, Artificial Sequence
  derived and/or modified sequence
cgggcgcgcgcgctctggcctcgtgcacgcgctgaaaccggagcgcgcagggcgcgccagggtgagggggacgggggcggggtgggggcagccctttcccaggcggtagcgggggcggcgtcgctgttgcccttttaagccgcggggccgccgcctcctgccgctggagtcggttacaaaggaagcgccacccaggccgccacacgccgaggcttccgcgcccctcgccattttccagcagcgctcgacgaggcggagccgcgagagcgcggcccaggccggccccgcggggcggtcgcggccgtgacggcggctccgggcccggctccccttccgcgcccggctccccttccgcgcccctcccgccggagatgaggggaagatgtccgtgtcagggctcaaggccgagctgaagttcctggcgtccatcttcgacaagaaccacgagcgattccgcatcgtcagttggaagctggacgagctgcactgccagttcctggtgccgcagcagggcagcccgcactcgctgccgccgccactcacgctccactgcaacatcacggaatcctatccatcttcttcaccgatatggtttgtggattctgaagacccaaatctgacatcagttctggaacgtctagaagatactaagaacaacaatttgcttcgtcagcaattgaagtggttgatatgtgaactctgcagtttatataaccttcctaagcacctggatgttgagatgctagatcaaccactacccacgggtcagaatgggacaacagaagaagtgacttcagaagaagaggaagaagaagaagagatggctgaagatatagaagacttagatcactatgagatgaaggaagaagagcctattagtgggaaaaagtcagaggatgaaggaattgaaaaagaaaatttggcaatattagagaaaattaggaagactcaaaggcaagaccatttaaatggtgcagtgtctgggtcagtgcaagcttcagatagacttatgaaagagctcagggacatatacagatcacagagttataaaacagggatttattcagtggaactcataaatgacagtttatatgactggcatgttaaactgcagaaggttgaccctgatagtcctttgcacagtgatcttcagatcttaaaagaaaaagaaggcatagaatatattttgcttaacttctcttttaaggataactttccatttgatcctccatttgttcgagtggtgttacctgttctctcaggagggtatgtattgggtggaggagcattatgtatggaacttctcacaaaacagggctggagcagtgcctactcaatagaatcggtcatcatgcaaataaatgccaccttagtcaaaggcaaagccagagtgcagtttggagcaaataagaatcaatataatctagcaagagcccaacaatcctataattccattgtacagatacatgagaaaaatggctggtacacccctccaaaggaagatggctaaatgtgttgactgttgtatgtttggactaatgttgctttaaagaaaatctttctaacatgcagacaaaagctttgagtgcccctattacagcagtaccgaagatgttagttaatagatattttagtggataatctgtcatctgacatccagtataagttacagcctttgcattttgctcattttagatatcttggactgagcagtggggcctttactgtatttttcctgataaatacacatactggccactccttatctctttttcttgaaaagtgaactttttaaagcagccaagtcaacatcaggctactgaagttgaggctttagggtaactttcctatattgagcccatgggttacaaggatttgcaatatattgttccatttacagccaatacaggtttaatcgatgttcaatattggtttaggaaatttaaggccttctaaatcataatagctctttcatgtctaaaaccattttatgatattgccaaaatgtgataggaaacctactcattaaattgttaaactttttaatgactatgtgaagatatgaattgtttcctgaagataatactcttaattgagttgtattgtacttcttaggcaaagcagtgtaaaactgtatcaattaaggcttgtgagtagtgatttccactggggcatcagagtcttggctgggctgaatctgctgcttgttggttcagtgtttcttatgaacaagagccacagtacagagcttcaagttatttaaaatactaagtcatcttacgtttccattttattaacgggatgttgcaatcgtttgtaaactaataaacttataaagtgattggcacaaagactccttgagcaaaagctgtgcagttaagtacaaaaagatacttaatttggagactcttacagtaatttttgccatgtcaaaacaatggcttttacattgaaagattaatagaaactctacatatgttaatttttttatagaacctgactcaaatcaaggtactctccattttattgccttacctgaatcagtcctttttggttggtaatagatttttttatacacccacgtttgatttaaaagtaaattctagttcttaagcacttttaacaaatccagaagcacatttttctgcacaaacaagttacaaagttcaaaagtgtttcttgtgcattagctttgagattcagtttttaactttgtaaaccacatctgagagacttgtcatttctacattgtgtgtgtttaatttcttttgattccattttggttaagagagcagtaaatagattttctggtattcttgttcacttgattacatttgtataaagttctgattgccagttgctcagataacaagtgacaaggcagaattctttaaatcagtaaagttccttaagcctaaggctaaatcttgaatacattgttgaattctttaatatcctgatggcaagcagactgatagctgcacatttggcatgctttgtttaatggattttatttttaattgcagatttatttggcaatgtacagtaaattttgtaaacttgcatcaagtttatgaataaagaaccatttaaaaattttgtttgtgctgatcatggcaagcaaaaaaaa

SEQ ID NO: 250147 - protein, 310 aa, Artificial Sequence
  derived and/or modified sequence
MPLLVEGRRVRLPQSAGDLVRAHPPLEERARLLRGQSVQQVGPQGLLYVQQRELAVTSPKDGSISILGSDDATTCHIVVLRHTGNGATCLTHCDGTDTKAEVPLIMNSIKSFSDHAQCGRLEVHLVGGFSDDRQLSQKLTHQLLSEFDRQEDDIHLVTLCVTELNDREENENHFPVIYGIAVNIKTAEIYRASFQDRGPEEQLRAARTLAGGPMISIYDAETEQLRIGPYSWTPFPHVDFWLHQDDKQILENLSTSPLAEPPHFVEHIRSTLMFLKKHPSPAHTLFSGNKALLYKKNEDGLWEKISSPGS

SEQ ID NO: 250148 - protein, 45 aa, Artificial Sequence
  derived and/or modified sequence
MPLLVEGRRVRLPQSAGDLVRAHPPLEAPSPFWVLMMPLLVTLWS

SEQ ID NO: 250149 - DNA, 138 bp, Artificial Sequence
  derived and/or modified sequence
atgcccctgctggtggagggcagaagagtgagactgccccagagcgccggcgacctggtgagagcccacccccccctggaggcccccagccccttctgggtgctgatgatgcccctgctggtgaccctgtggagctag

SEQ ID NO: 250150 - DNA, 933 bp, Artificial Sequence
  derived and/or modified sequence
atgcctctgctggtcgaagggaggcgcgttcgactgccccagtctgctggggacctcgtaagggcgcatcccccactggaggagcgggccagactcctccgcggacaaagcgtgcagcaggtgggtccgcagggtctgctttacgttcaacaacgggagctcgctgtaacaagcccaaaagacggtagcatctctattctggggtctgatgacgccaccacatgccacatagtggtgcttcgccataccggaaacggtgctacgtgtctgacccattgcgacggcaccgatacaaaagcggaggtgcctctaataatgaactctattaagtctttttccgatcatgctcaatgcggacgcttggaggtgcatcttgtaggagggttttccgatgacagacagctatctcagaaactgacccaccagctgctgagcgagtttgaccgccaggaagacgatattcatctggtgaccctgtgtgtcacggagctgaacgaccgggaggagaatgaaaatcacttccccgttatctacggcatcgctgtgaacattaaaacagccgagatctaccgtgcaagttttcaggatcgtgggcccgaggaacagctcagggccgcacggaccttggcaggagggcccatgatatccatctacgacgccgagacggaacagctaaggattggtccctattcctggacaccctttccccatgtggatttttggctgcatcaggatgataagcagattttggaaaacctgtcaaccagtcctttggctgagcctcctcatttcgtggaacacattcgatctacactcatgttcttgaagaagcacccttctccagcacataccctcttcagcggcaataaagcgctactgtacaagaagaatgaggatggcctgtgggaaaaaatctcatctcccggtagttag

SEQ ID NO: 250151 - DNA, 138 bp, Artificial Sequence
  derived and/or modified sequence
atgcccctgctggtagaaggacggcgtgtgcgcctgccccaaagcgctggtgatctcgtgcgcgcccaccctccgcttgaggctccttcccctttctgggtgctcatgatgcccctgctggttaccctgtggtcctag

SEQ ID NO: 250152 - DNA, 933 bp, Artificial Sequence
  derived and/or modified sequence
atgcccctgctggtggagggccggcgggtgcggctgccccagagcgctggggacctggtgcgggcccacccccccctggaggagcgggcccggctgctgcggggccagagcgtgcagcaggtgggcccccagggcctgctgtatgtgcagcagcgggagctggccgtgaccagccccaaggatggcagcatcagcatcctgggcagtgatgatgccaccacctgccacatcgtggtgctgcggcacactggaaatggagccacctgcctgacccactgtgatggaacagacaccaaggccgaggtgcccctcatcatgaacagcatcaagagcttcagtgaccacgcccagtgtggccgcctggaggtgcacctggtgggcggcttcagtgatgaccggcagctgagccagaagctgacccaccagctgctgtctgaatttgaccggcaggaggatgacatccacctggtgaccctgtgtgtgacagagctgaatgaccgggaggagaatgaaaaccacttccctgtgatctacggcattgctgtgaacatcaagacagctgagatctaccgggccagcttccaggaccggggccctgaggagcagctgcgggccgcccggaccctggccggcggccccatgatcagcatctatgatgctgagacagagcagctgagaattggcccctacagctggacccccttcccccacgtggacttctggctgcaccaggatgacaagcagatcctggagaacctgagcaccagccccctggccgagcccccccactttgtggagcacatccgcagcaccctgatgttcctgaagaagcaccccagccctgcccacaccctcttcagcggcaacaaggccctgctgtacaagaagaatgaagatggcctgtgggagaagatcagcagccctggcagctag

SEQ ID NO: 250153 - DNA, 138 bp, Artificial Sequence
  derived and/or modified sequence
atgcccctgctggtggagggccggcgggtgcggctgccccagagcgctggggacctggtgcgggcccacccccccctggaggcccccagccccttctgggtgctgatgatgcccctgctggtgaccctgtggagctag

SEQ ID NO: 250154 - DNA, 933 bp, Artificial Sequence
  derived and/or modified sequence
atgcccctgctggtggagggccggcgggtgcggctgccccagagcgccggtgacctggtacgggcccacccaccgttagaagaacgcgccaggttgcttagaggccagtccgttcagcaggtcgggcctcaaggcctgttgtacgtgcaacagagggagctcgccgtgacatccccgaaagacggatctatttcaatcctgggaagcgatgacgccactacctgtcacattgttgtgctcaggcacacaggaaatggtgccacttgccttacacattgtgacggaactgataccaaggccgaggtccccctcataatgaactccatcaaaagcttttcagatcatgcccaatgcggtagactcgaggttcacttggtgggcggcttcagcgatgaccggcagttatcccagaagttgacccatcagctgctgtccgaatttgatcgccaggaagacgatatccatctcgttacactctgcgtaactgaactaaacgaccgcgaagagaacgagaaccattttcctgtcatatacggaattgccgtgaacatcaaaacggccgagatctatcgcgcaagtttccaagatagaggacctgaggagcaactgcgggctgcccggactctcgcgggcggtcccatgattagtatctatgatgctgaaacagaacagctcaggatcggtccttacagctggactccctttccccatgtggatttttggcttcatcaagacgacaagcagattctggaaaacctgtccacatccccgctggcagaacccccacacttcgtcgaacacatacggagcacgctcatgttcctaaagaaacatccctcgccagctcacacgcttttttccgggaataaggcactgctctacaaaaaaaacgaagatggattatgggagaaaatcagttcacccggatcatag

SEQ ID NO: 250155 - DNA, 138 bp, Artificial Sequence
  derived and/or modified sequence
atgcccctgctggtggagggccggcgggtgcggctgccccagagcgcgggggacctggtgcgggcccaccccccactggaggccccaagcccattttgggtgctgatgatgcccttgttggttactctctggagctag

SEQ ID NO: 250156 - DNA, 933 bp, Artificial Sequence
  derived and/or modified sequence
atgcccctgctggtggaggggagacgcgtgagactgccccagtctgcaggagatctggttcgcgcacatccccctctcgaagagcgggcaagactgctgagagggcaatctgtccagcaggttggtccccagggactgctctacgttcagcaaagagaactggcagtgactagcccaaaggacggcagcattagcatcctgggtagcgacgatgccactacgtgccacatcgtggtcctccgccacactgggaatggagctacctgccttacacactgcgacggcactgatactaaagccgaggtgcctcttataatgaactcaatcaagtcattctctgatcatgcccaatgcgggagactggaggtccacctggtgggcggattctctgacgataggcaactaagtcagaagcttacccatcagctactgtcagagttcgatcgccaggaagatgacattcatctggtgacactgtgtgtgacagaactcaatgaccgtgaggaaaatgaaaatcattttcctgtgatctacggtattgctgtcaacattaagaccgccgaaatttacagggcaagctttcaggatagaggaccagaagaacaactcagggctgcacgtactctcgctggcggacccatgatctccatatatgacgccgaaacagagcagcttcgaataggtccatatagttggacacctttcccgcatgtggatttttggttacaccaggacgacaaacagatcctggagaacctttcaacttctccactagctgaacccccacattttgtggaacatattcgcagtaccctgatgtttttaaaaaagcacccctcgccagcccacacccttttctctggcaataaggccctgctgtacaagaaaaatgaagatgggttatgggagaaaatttctagccctggcagttag

SEQ ID NO: 250157 - DNA, 138 bp, Artificial Sequence
  derived and/or modified sequence
atgcccctccttgtggagggaaggcgggtgcgcctcccacagtctgccggtgatctggtgagagcccaccccccactagaagccccatcccccttttgggtgctcatgatgccactgctcgttaccctgtggtcttag

SEQ ID NO: 250158 - DNA, 1043 bp, Artificial Sequence
  derived and/or modified sequence
gctgcaaagcggggggccgccgcctccctgggcctgcctgggcggccgcctccgcgatgccgctgctcgtcgaggggcggcgagtgcggctgccgcagtcagccggggacctcgtccgagcccacccgcctttggaggctccatctccattctgggttctgatgatgccactacttgtcacattgtggtcctgaggcacacaggtaatggggccacctgcttgacacattgtgacggaaccgacaccaaagctgaggtccccttgatcatgaactccataaaatccttttctgaccacgctcaatgtggaaggctggaagtacaccttgttggaggcttcagtgacgacaggcagttgtcacaaaaactcactcatcaacttcttagtgaatttgacaggcaagaagatgacattcacttagtgacattatgtgtgacagaattaaatgaccgggaagaaaacgaaaaccactttccagtaatatatggcattgctgtcaacattaagactgcagagatttacagagcatcctttcaagatcggggtccggaggagcagcttcgtgctgcgcgaactttagcaggaggaccaatgattagcatttatgatgcagagacagaacaacttcgtataggaccgtactcctggacaccatttccacatgtggatttctggttgcaccaagatgacaagcaaatactagagaatctttccacttcgcctctggctgagccaccccactttgttgaacatattagatctaccttgatgtttttaaaaaaacacccatctccagctcacacactgttttctggaaataaagccctactctacaaaaaaaatgaagatggcttgtgggaaaagatctcttctccaggaagttaaaaaacatgaattaccaaagaaagcaccttcttggcctgacagaccattggtggggctggcacgaatccagatctggatcctacatctgttgggtcttaggcctccttccctcctcagtgtctttcaaatgactttcatcaaatgactttcaaaataa

SEQ ID NO: 250159 - DNA, 1204 bp, Artificial Sequence
  derived and/or modified sequence
gcgcggcccgaggggcgggggcggcgggcggcccggggctgcaaagcggggggccgccgcctccctgggcctgcctgggcggccgcctccgcgatgccgctgctcgtcgaggggcggcgagtgcggctgccgcagtcagccggggacctcgtccgagcccacccgcctttggaggaaagagccagacttctcagaggtcagtctgttcaacaagtgggaccccagggccttctgtatgttcagcaaagagagcttgcagtgacctccccaaaggatggctccatctccattctgggttctgatgatgccactacttgtcacattgtggtcctgaggcacacaggtaatggggccacctgcttgacacattgtgacggaaccgacaccaaagctgaggtccccttgatcatgaactccataaaatccttttctgaccacgctcaatgtggaaggctggaagtacaccttgttggaggcttcagtgacgacaggcagttgtcacaaaaactcactcatcaacttcttagtgaatttgacaggcaagaagatgacattcacttagtgacattatgtgtgacagaattaaatgaccgggaagaaaacgaaaaccactttccagtaatatatggcattgctgtcaacattaagactgcagagatttacagagcatcctttcaagatcggggtccggaggagcagcttcgtgctgcgcgaactttagcaggaggaccaatgattagcatttatgatgcagagacagaacaacttcgtataggaccgtactcctggacaccatttccacatgtggatttctggttgcaccaagatgacaagcaaatactagagaatctttccacttcgcctctggctgagccaccccactttgttgaacatattagatctaccttgatgtttttaaaaaaacacccatctccagctcacacactgttttctggaaataaagccctactctacaaaaaaaatgaagatggcttgtgggaaaagatctcttctccaggaagttaaaaaacatgaattaccaaagaaagcaccttcttggcctgacagaccattggtggggctggcacgaatccagatctggatcctacatctgttgggtcttaggcctccttccctcctcagtgtctttcaaatgactttcatcaaatgactttcaaaataaaaccttattttggcaaaggca

SEQ ID NO: 250160 - DNA, 933 bp, Artificial Sequence
  derived and/or modified sequence
atgcccctgctggtggagggcagaagagtgagactgccccagagcgccggcgacctggtgagagcccacccccccctggaggagagagccagactgctgagaggccagagcgtgcagcaggtgggcccccagggcctgctgtacgtgcagcagagagagctggccgtgaccagccccaaggacggcagcatcagcatcctgggcagcgacgacgccaccacctgccacatcgtggtgctgagacacaccggcaacggcgccacctgcctgacccactgcgacggcaccgacaccaaggccgaggtgcccctgatcatgaacagcatcaagagcttcagcgaccacgcccagtgcggcagactggaggtgcacctggtgggcggcttcagcgacgacagacagctgagccagaagctgacccaccagctgctgagcgagttcgacagacaggaggacgacatccacctggtgaccctgtgcgtgaccgagctgaacgacagagaggagaacgagaaccacttccccgtgatctacggcatcgccgtgaacatcaagaccgccgagatctacagagccagcttccaggacagaggccccgaggagcagctgagagccgccagaaccctggccggcggccccatgatcagcatctacgacgccgagaccgagcagctgagaatcggcccctacagctggacccccttcccccacgtggacttctggctgcaccaggacgacaagcagatcctggagaacctgagcaccagccccctggccgagcccccccacttcgtggagcacatcagaagcaccctgatgttcctgaagaagcaccccagccccgcccacaccctgttcagcggcaacaaggccctgctgtacaagaagaacgaggacggcctgtgggagaagatcagcagccccggcagctag

SEQ ID NO: 250161 - protein, 461 aa, Artificial Sequence
  derived and/or modified sequence
MNDQYHRAARDGYLELLKEATRKELNAPDEDGMTPTLWAAYHGNLESLRLIVSRGGDPDKCDIWGNTPLHLAASNGHLHCLSFLVSFGANIWCLDNDYHTPLDMAAMKGHMECVRYLDSIAAKQSSLNPKLVGKLKDKAFREAERRIRECAKLQRRHHERMERRYRRELAERSDTLSFSSLTSSTLSRRLQHLALGSHLPYSQATLHGTARGKTKMQKKLERRKQGGEGTFKVSEDGRKSARSLSGLQLGSDVMFVRQGTYANPKEWGRAPLRDMFLSDEDSVSRATLAAEPAHSEVSTDSGHDSLFTRPGLGTMVFRRNYLSSGLHGLGREDGGLDGVGAPRGRLQSSPSLDDDSLGSANSLQDRSCGEELPWDELDLGLDEDLEPETSPLETFLASLHMEDFAALLRQEKIDLEALMLCSDLDLRSISVPLGPRKKILGAVRRRRQAMERPPALEDTEL

SEQ ID NO: 250162 - DNA, 1386 bp, Artificial Sequence
  derived and/or modified sequence
atgaacgaccagtaccacagagccgccagagacggctacctggagctgctgaaggaggccaccagaaaggagctgaacgcccccgacgaggacggcatgacccccaccctgtgggccgcctaccacggcaacctggagagcctgagactgatcgtgagcagaggcggcgaccccgacaagtgcgacatctggggcaacacccccctgcacctggccgccagcaacggccacctgcactgcctgagcttcctggtgagcttcggcgccaacatctggtgcctggacaacgactaccacacccccctggacatggccgccatgaagggccacatggagtgcgtgagatacctggacagcatcgccgccaagcagagcagcctgaaccccaagctggtgggcaagctgaaggacaaggccttcagagaggccgagagaagaatcagagagtgcgccaagctgcagagaagacaccacgagagaatggagagaagatacagaagagagctggccgagagaagcgacaccctgagcttcagcagcctgaccagcagcaccctgagcagaagactgcagcacctggccctgggcagccacctgccctacagccaggccaccctgcacggcaccgccagaggcaagaccaagatgcagaagaagctggagagaagaaagcagggcggcgagggcaccttcaaggtgagcgaggacggcagaaagagcgccagaagcctgagcggcctgcagctgggcagcgacgtgatgttcgtgagacagggcacctacgccaaccccaaggagtggggcagagcccccctgagagacatgttcctgagcgacgaggacagcgtgagcagagccaccctggccgccgagcccgcccacagcgaggtgagcaccgacagcggccacgacagcctgttcaccagacccggcctgggcaccatggtgttcagaagaaactacctgagcagcggcctgcacggcctgggcagagaggacggcggcctggacggcgtgggcgcccccagaggcagactgcagagcagccccagcctggacgacgacagcctgggcagcgccaacagcctgcaggacagaagctgcggcgaggagctgccctgggacgagctggacctgggcctggacgaggacctggagcccgagaccagccccctggagaccttcctggccagcctgcacatggaggacttcgccgccctgctgagacaggagaagatcgacctggaggccctgatgctgtgcagcgacctggacctgagaagcatcagcgtgcccctgggccccagaaagaagatcctgggcgccgtgagaagaagaagacaggccatggagagaccccccgccctggaggacaccgagctgtag

SEQ ID NO: 250163 - DNA, 1386 bp, Artificial Sequence
  derived and/or modified sequence
atgaatgatcaatatcatagagcagcacgcgatggctacctcgagctgttaaaggaagcaacacgcaaagagctgaatgctcccgatgaggatggtatgactcccaccctatgggctgcctatcacggaaatctcgaatccctgagacttattgtatccaggggtggagacccagataaatgcgacatttggggcaataccccgctccacctggcggcttctaacggccacctgcactgcttaagctttcttgttagcttcggagccaatatctggtgtttagacaatgattatcacacccctctagacatggccgctatgaaaggccacatggagtgtgtgagatacttggactctatagccgccaagcagtcttcgcttaacccgaagctggtcggtaaattgaaagacaaggcttttagggaagctgaacggaggatccgggaatgcgctaaactgcagcgcaggcaccacgaaaggatggaacggaggtataggagggaactggcagagaggtctgacactctcagctttagctctttgacctccagcaccttgtctcggagacttcagcatctcgccttgggcagtcatcttccttattctcaggccactctgcacgggacagcaagaggtaaaacgaagatgcagaaaaagttggaaagaagaaagcaaggcggcgagggaaccttcaaggtgtctgaggacggaagaaagtctgctcgttctctgtcagggctgcaacttggctccgacgtgatgttcgtccgtcagggcacctatgccaatcctaaggagtggggtcgggccccacttagggacatgttcctgtccgacgaagactccgtgtcacgtgccacactggctgctgaacctgctcatagcgaggtgtcaaccgatagcggtcacgatagtctttttacgaggcctggacttggcactatggtgtttcgcagaaattacctgtcgtctggtctgcacggactcggcagagaggatgggggactcgacggcgttggggcaccacggggccgcctgcaaagctctcccagccttgatgatgactcgttaggcagcgccaattctctgcaagaccggtcttgtggggaagagctcccctgggatgaattggatttagggctggatgaggacctggagccagagacttcccccttggagacatttttggcctccttgcacatggaggactttgctgccctgcttcgtcaagagaagatcgacctagaggccctgatgctctgcagcgatctggatctcagaagtataagcgtccccctcggcccgcgaaagaaaatcttaggtgctgtacgaaggcgcagacaggccatggaaagaccgccggctctggaggacaccgagctttag

SEQ ID NO: 250164 - DNA, 1386 bp, Artificial Sequence
  derived and/or modified sequence
atgaatgaccagtaccaccgggccgccagagatggctacctggagctgctgaaggaggccaccaggaaggagctgaatgccccagatgaagatggcatgacccccaccctgtgggccgcctaccacggcaacctggagagcctgcggctgattgtgtccagaggaggagaccctgacaagtgtgacatctggggcaacacccccctgcacctggccgccagcaatggccacctgcactgcctgtccttcctggtgtcctttggagccaacatctggtgcctggacaatgactaccacacccccctggacatggccgccatgaagggccacatggagtgtgtgcgctacctggacagcattgctgccaagcagagcagcctgaaccccaagctggtgggcaagctgaaggacaaggccttccgggaggccgagcggcgcatcagagaatgtgccaagctgcagaggaggcaccacgagaggatggagcggcgctaccgccgggagctggccgagaggagtgacaccctgtccttcagcagcctgaccagcagcaccctgagccggcggctgcagcacctggccctgggcagccacctgccctacagccaggccaccctgcatggaacagcccggggcaagaccaagatgcagaagaagctggagaggaggaagcagggcggggagggcaccttcaaggtgtctgaagatggcaggaagagcgcccggagcctgagcggcctgcagctgggcagtgatgtgatgtttgtgcggcagggcacctacgccaaccccaaggagtggggccgggcccccctgcgggacatgttcctgagtgatgaggacagcgtgtcccgggccaccctggccgctgagcccgcccacagcgaggtgtccacagattctggccatgacagcctcttcacccggcccggcctgggcaccatggtgttcagaagaaactacctgagcagcggcctgcacggcctgggccgggaggatggcggcctggatggagtgggcgccccccggggccgcctgcagagcagccccagcctggatgatgacagcctgggcagcgccaacagcctgcaggacaggagctgtggggaggagctgccctgggatgagctggacctgggcctggatgaggacctggagcctgagaccagccccctggagaccttcctggccagcctgcacatggaggactttgctgccctgctgcggcaggagaagattgacctggaggccctgatgctgtgcagcgacctggacctgcggagcatctctgtgcccctgggccccaggaagaagatcctgggcgctgtgagaagaagacggcaggccatggagcggcccccagccctggaggacacagagctgtag

SEQ ID NO: 250165 - DNA, 1386 bp, Artificial Sequence
  derived and/or modified sequence
atgaacgaccagtaccaccgggccgcccgggacggctacctggagcttctgaaggaggcgacccgaaaggagctcaacgctccggacgaggatggtatgactccgactctctgggctgcttaccatggaaatcttgaatctctccggctgatcgtgtccaggggtggcgatcctgacaagtgtgatatctggggaaacaccccactgcaccttgccgcctctaatgggcacctgcactgcctaagttttttagtttcattcggagcaaatatatggtgcctcgacaacgattaccacacgccgctcgatatggccgcgatgaaaggacatatggaatgcgtgcgctaccttgactccattgcggcaaaacaatcctcactgaaccccaagttggtgggtaaactgaaggataaagcatttagggaggccgaacgacgcattcgcgagtgtgcgaaacttcaacgccgacaccacgaacgaatggagcgccgctaccgcagagaactcgccgagcgttccgacactctctcctttagttcattgacctcctcaactctgtcccgaagattacagcacttggccctcggcagtcacctgccatacagtcaagccactcttcatggcactgctaggggaaaaaccaaaatgcagaaaaagctcgaacgtcgtaaacaagggggggaaggcacatttaaggtaagtgaggacggtagaaagtccgccaggtccctgtcggggctgcagcttggttccgatgtcatgttcgtgcggcaggggacctatgccaaccctaaagaatggggaagagctcccctgcgcgacatgttcttaagcgacgaagattcagtctcacgcgctacgctcgcagccgagcccgcccattctgaagtcagtactgattctgggcacgactccctcttcacaaggccgggccttggcacaatggtctttcggaggaattatctgagctctgggctacatggtcttggacgcgaagacggcgggctcgatggggtcggcgctccgcgtggccggctccaaagctctccaagcctggatgacgattccctaggaagcgcaaattctctgcaggatagaagttgcggcgaggaactgccatgggatgaactggacctgggtctcgacgaggatttggaaccggaaacttctccactggagacatttcttgctagcctccacatggaagactttgcagccctcctccggcaagagaagatcgatctggaggcacttatgctgtgctctgatctggatctgcggtctatcagcgtgccactgggaccgagaaagaagattctgggtgctgtgcgccggcgtcgtcaggctatggagcgacctcctgccttagaggatacagagctttag

SEQ ID NO: 250166 - DNA, 1386 bp, Artificial Sequence
  derived and/or modified sequence
atgaatgatcaataccaccgcgcagctagagatggttatctggagttgttaaaggaggctactcggaaggagctcaatgccccagacgaggacggaatgacaccgactttgtgggccgcttatcatggtaacttggagtctcttagactcatcgtgtctcgagggggtgaccctgataaatgcgatatctgggggaatactcctctccacctggcagcctccaatggacatttacactgcctctccttccttgtgtcgttcggggctaatatttggtgtctggacaatgattatcacacccctttggacatggcagccatgaaaggacacatggagtgtgtgcgttatcttgattctatagcagcaaaacaatcctcacttaacccaaaactggtaggaaaacttaaggacaaggcatttagagaggccgagcgaagaattagagaatgtgcaaagctgcaacggcgacaccatgagaggatggagcgccgttatcgtcgagagctagcagaaaggagcgatacgttgtcttttagctctctgacttcatccactctttcgcggagattgcagcaccttgctctgggatcccatcttccatactctcaggcgaccctgcacggtactgctcgcggaaaaaccaagatgcagaaaaaactggaacgaagaaaacaaggcggtgagggaacctttaaagttagcgaagacggtaggaagtctgcacggtctctcagcgggctgcagctaggcagcgacgtcatgttcgtgcggcagggcacatatgcgaatcccaaggagtgggggcgtgctcctctgcgggatatgttcctgtcagacgaagactccgtttcgcgggcaacactggcggctgagcctgcgcactccgaagtgtccacagactccggccatgactcactgtttacgcggcctggtttggggactatggtatttcgcagaaactacctgagcagcgggctgcatggactggggagagaagatgggggtttggacggggtgggggcacccagggggaggctccagtcctcgccctctctggatgatgactccctgggttccgccaacagcctgcaggatcgaagttgcggggaagagctcccctgggatgagttggatcttggcctagatgaggacctggaaccggaaacgtcgcctttggagactttcctcgcatctctccatatggaagacttcgccgctctccttaggcaagagaagattgacttggaagctctgatgttgtgttccgatttggacttgcggtctatttcagttcctctgggacccaggaaaaagatccttggagctgtgagacggaggcgacaggccatggagagaccacctgccctggaagataccgaattatag

SEQ ID NO: 250167 - DNA, 3561 bp, Artificial Sequence
  derived and/or modified sequence
cagatgtcttggtagtcgcggctctggcgctccgcaccctccgtctgcggcagcgggggctggcggccccggcccctgcccggccccgtcctccaacctcatgcctcagccctaataccgccgccctcccctgcggggggcctttctccgtgtcccccgcccgccccgtccacttcgggcgccatgaacgaccagtaccaccgggcagcccgggatggctacctggagctcctcaaggaggccacccgaaaggagctgaatgcccccgacgaggatggcatgacccccactctctgggctgcctaccatggcaacctcgagtcgctgcgtctcattgtgagccgcgggggtgacccggacaagtgtgacatctggggcaacacacccctgcatctggcagcttccaatggccacttgcactgcctgtccttcctggtgtccttcggagccaacatctggtgcctagacaacgactaccacacgccgctggacatggctgccatgaagggccacatggaatgcgtgcgctacctggactccatcgcggccaagcagagcagcctcaaccccaagctggtgggtaagctgaaggacaaggccttccgcgaggcggagcggcgcatccgcgagtgcgccaagctgcagcggaggcaccacgaacgcatggagcggcgataccggcgcgagctggccgagcgttccgacaccctcagcttctccagcctcacgtccagcaccctgagccgccggctgcagcatctggcgctgggcagccacctgccgtactctcaggccacgctgcacggcacggccaggggcaagaccaagatgcagaagaagctggagcggcgcaagcagggcggcgaaggcaccttcaaggtctccgaggatgggcgcaagagcgcccgctcgctctcgggcctgcagctgggcagcgacgtgatgttcgtgcgccagggcacctacgccaatcccaaggagtggggccgagccccgctccgggacatgttcctctcggacgaggacagcgtctcccgtgccacgctggcggccgagcctgcccactcggaggtcagcaccgactcaggccacgactccctgtttacccgccccggcctgggcaccatggtgttccgcagaaattacttgagcagtgggctgcacggactgggccgcgaggatgggggtctggatggggtgggagcgccgcggggtcggctgcagagctcccccagcctggacgatgacagcctgggcagtgccaacagcctgcaggaccgcagctgtggggaggagctgccctgggatgagctcgatttaggcttggacgaggacctggagcccgagactagcccgctggagaccttcctggcctctctgcacatggaggactttgccgccctcctgcggcaggagaagatcgacctcgaggctttgatgctgtgctctgacctcgacctccgcagcatcagcgtcccactggggccccgaaagaagatcttgggggccgtgaggaggcggcggcaggcgatggagcgcccgccggccctggaggacacagagctataaccgggggctcctctccccagaccaaaatgaattgcaagttgccacaacctatggtggggtctcgaggtcctcacagttgccagccctgcagcccccttccccaggagcaaggaccagttggggcgactcctttgaaagtctgtctgcaccttgaagctgagggtgtggcctggaggcaccagaggggcaagagaatgttccggaactccagttctgaggggtcttgaaggccctgagccacccattctgagcagccgtaaaggacatgtagacttgggggaggcctgccccagagggagggcaggggcatcggaactggatgagagtgtgggaggtggatgcgggagggtgcacctgtcccgggcgccgtaggcctctcccacccctcccctgatggtcttgttctcttgtgctcaggccagagacttgctcacttcctgcattgttgtgaagggaagagtttgggctgcctcccctcctcccgtccaccccagaggggaagttcctcagccagactcttcagccaaatgccccaactttcagtctgtaccccatcccaagcatagccagctccccctccttcacctagtggtcaaggcccggagctggaaagccgggttggggtggggtgggggtactgacgcccttcccagctcatccaggggtggagcctggcctgtcttcctccaacctccccctttttcgttgtgcagcctggccccccagggaccccagagggccagggcgctagatgcaaggtgctagaccaatgggctgcagtattatagcccccaggcctggcaggcatgcgctgggctagagaaaggtgtccgccaacctcctcagtctcccaggcctgggacaggcagaacagggtgtggctgggtgtcaggcctggggtgggtaagtcctgcgatgtggacactggagaaagtggatcctctaaactgcagattgtccccaggtcaccagggctgtgtgcgtgtgcatgtttgtgtgcatgtatgcgtgtgtgcatgcatgtgtgtgtaagtatgtggtatgtgtgagcacgggtgtgtgcttgggtgtgtgtgtgttcttgcatacatgtgtacgtgtgtgtgcacgtgaacgcgtgcgtgtttgtgtgtgtgcatgcatgtgtgtgcatgtgtgtgtgtgcatgcatgtgtgtgtgtgtgcatgtgtgcgtgtgtgcacactcacgttgggtggtgtttggtaggtttccctccaggtctggtagggactgggctgttgcgtgattctgcgtggatcgggggtaagagagctcacctgtgtcccagccctctgatggtggtgagaccaggggaaaggccagctcagagggtggtcacagcatgtgtcctctgacgtatgcccccaaagctctccagccagactgaggtcacagatgtgggagagtccctgatgagcccgctgacacgtgtgcgcccctttgcaccccatgcagaggtgctctcctcctttctcagccatggccccccatccctgacctcagcttgggaagcagctcctgctgggagcatggcctcagcccccagcatctcctggggcccccatggctggggcaggggaaagagagccctcaaaggcctctttctggtctgtctgggggttcccattcccacacatgtgcccagagtagggggcatggaggagatggtccctgtcctactgcaggacactgagggcttggctgcctgccaccgccatctggagcccaccacagctcttctccctgttctctgggcctgagcctggggccacccccaagtgccgacttgtttctcccagagccccaggtgctgccccttctctcctgttcctcgtccgtttactgccgcagcccctcctggttcttctggtgctggggtggagcaggctctgtgctcccaccactgtaccccgaatccctcctgcaggctcattgccacttttgtagagaatgttctctatcagtatcgt

SEQ ID NO: 250168 - protein, 499 aa, Artificial Sequence
  derived and/or modified sequence
MRVLVPPAERSQDTRVGAPAWREAAQAMARTAHILTDRCGQEAVTMWQPKDSVLDPNVAHHLGRAAYIQPWRFRVEMIKGGGTLEKPPPGEGVTLWKGKMKPPAWYARLPLPLHRKARALQTTEVVHAHARGARLTAARLGRAQHQINGRVRQLLRQREVTDHRLSEVRKGLLINQQSVKLRGYRPKSEKVPDKADSMLTWEKEELKSMKRKMERDMEKSEVLLKTLASCRDTLNFCFKERLQAVDLMNQPLDKVLEQARRHSWVNLSRAPTPRTQGQKTPPPDPVGTYNPACALALNEAKRLLVESKDTLVEMAKNEVDVREQQLQISDRVCASLAQKASETLELKERLNMTLGLMRGTILRCTKYNQELYTTHGLIKGPLSKVHLETAEKLDRPLVRMYQRHVGTQLPEAARLAQGTDKLQCHITYLEKNLDELLATHKNLSWGLNCKNIGHEVDGNVVRLRLRQRQPHVCYEQAQRLVKDWDPRTPPPRSKSSADP

SEQ ID NO: 250169 - DNA, 1500 bp, Artificial Sequence
  derived and/or modified sequence
atgcgggtcctggtgccccccgccgagcgatctcaggacacccgcgtgggagctccagcctggagagaggccgctcaggctatggctcgcaccgcccacatcctaacagaccgctgcggccaggaagccgtcacaatgtggcagccaaaagacagcgtactcgatcctaacgtggcccatcatctgggcagggccgcctatatccagccctggagattcagggtggagatgattaagggaggagggacactcgagaaacccccaccaggtgagggtgtcacgctgtggaagggaaagatgaaaccacccgcttggtatgcgcggctgcctctgccactccacagaaaagcccgcgcacttcagaccacagaggttgtgcacgcacatgccaggggcgccaggctcacggctgccaggctgggtcgtgctcaacaccagattaatggaagagtacgtcagctcttgagacagagggaggtgacggatcacaggttgagcgaggtgagaaagggcctgctaattaatcaacagtcagtgaaacttagggggtaccggccgaaaagcgagaaggtgcccgacaaggcagactcgatgctcacatgggaaaaagaagaactcaagagcatgaagcgtaaaatggagcgggacatggaaaagtcagaagtcctacttaaaacgttggcttcttgcagggatactctgaacttctgttttaaggaaaggcttcaggccgtggacctgatgaatcagccactggataaggtgctcgagcaggcccgacggcattcatgggttaatctcagtagggcccctacccctcggacgcagggccaaaagactcctcccccagatcccgtcggtacgtataacccagcatgcgccctggccttgaacgaagcgaaaagactcttggtagagtccaaagacaccctcgtcgaaatggccaaaaatgaagttgacgtgagggaacaacagctgcaaatctctgaccgggtttgcgccagcctggcacagaaagcctcggagacactcgaacttaaagaaaggctgaacatgactctcggcctgatgcgtggtacaattctgaggtgcaccaaatacaatcaggagctgtacacaactcacggactgatcaaaggcccattgtctaaagtgcacctggaaactgccgaaaaactggaccgccccctggtgcgcatgtatcagagacacgtcggtacacaacttcccgaggctgcacgcctagcacagggcaccgataagcttcaatgtcatatcacctatctcgaaaagaacctggacgaactgctggccacacacaaaaacctttcttggggcttgaactgtaaaaatattggtcacgaagtcgacgggaatgtggtgagactccggctgagacaacgtcagccgcacgtctgttacgaacaggcccagcgactcgtgaaggattgggatcctaggaccccaccacctagaagtaaatcctctgccgatccatag

SEQ ID NO: 250170 - DNA, 1500 bp, Artificial Sequence
  derived and/or modified sequence
atgagggtgctggtgcccccagctgagaggagccaggacaccagggtgggcgccccagcctggagggaggccgcccaggccatggccaggacagcccacatcctgacagacagatgtggccaggaggccgtgaccatgtggcagcccaaggacagcgtgctggaccccaacgtggcccaccacctgggccgggccgcctacatccagccctggaggttccgggtggagatgatcaagggcggcggcaccctggagaagcccccacctggagagggcgtgaccctgtggaagggcaagatgaagcccccagcctggtacgcccggctgcccctgcccctgcacaggaaggcccgggccctgcagaccacagaggtggtgcacgcccacgcccggggggcccggctgacagctgcccggctgggccgggcccagcaccagatcaatggccgggtgcggcagctgctgcggcagcgggaggtgacagaccaccggctgtctgaggtgaggaagggcctgctgatcaaccagcagagcgtgaagctgcggggctaccggcccaagtctgagaaggtgcctgacaaggctgacagcatgctgacctgggagaaggaggagctgaagtccatgaagaggaagatggagcgggacatggagaagtctgaggtgctgctgaagaccctggccagctgccgggacaccctgaacttctgcttcaaggagcggctgcaggccgtggacctgatgaaccagcccctggacaaggtgctggagcaggcccggcggcacagctgggtgaacctgagccgggcccccacccccaggacccagggccagaagaccccacctccagaccctgtgggcacctacaacccagcctgtgccctggccctgaatgaggccaagaggctgctggtggagagcaaggacaccctggtggagatggccaagaatgaggtggatgtgcgggagcagcagctgcagatcagtgacagagtgtgtgccagcctggcccagaaggccagcgagaccctggagctgaaggagcggctgaacatgaccctgggcctgatgaggggcaccatcctgcgctgcaccaagtacaaccaggagctgtacaccacccacggcctcatcaagggccccctgagcaaggtgcacctggagacagctgagaagctggaccggcccctggtgaggatgtaccagagacatgtgggcacccagctgcctgaggccgcccggctggcccagggcacagacaagctgcagtgccacatcacctacctggagaagaacctggatgagctgctggccacccacaagaacctgtcctggggcctgaactgcaagaacatcggccacgaggtggatggaaatgtggtgcggctgcggctgcggcagaggcagccccacgtgtgctatgagcaggcccagaggctggtgaaggactgggaccccaggaccccaccacccaggagcaagagcagcgctgacccctag

SEQ ID NO: 250171 - DNA, 1500 bp, Artificial Sequence
  derived and/or modified sequence
atgcgggtgctggtgccccccgccgagcggagccaggacacccgggtgggagcacccgcatggcgggaagccgcccaggcaatggctagaacagcccatattctgacggacaggtgtggtcaggaggctgtgactatgtggcagcccaaggattccgtgctggaccctaacgtcgcacaccatcttggccgggctgcttacattcagccttggcgatttagggtagaaatgataaaaggaggcggcacgcttgagaagcctccacccggcgagggcgtgactctgtggaaaggtaagatgaagccccccgcctggtacgccagattacccctgccattgcaccgaaaggcccgggcattgcagaccactgaggtcgtccatgcccacgcacgcggcgctcgcctcacggccgcaagactggggcgggcccaacaccagatcaatggccgcgtcagacagctcttgcggcaacgtgaagtgactgatcacagactctctgaggtacggaaggggctgctcattaaccagcagtccgtcaagcttaggggttaccgccctaaatctgagaaggtgccagataaggcggactctatgctgacctgggagaaagaagaactaaagtctatgaagcggaaaatggagcgcgacatggaaaagtctgaggtgctgttgaaaaccctggcgtcttgccgggatactctcaacttttgctttaaggagaggctccaagctgtggaccttatgaaccagcctctagataaggtgctcgaacaggcccgccgccattcctgggtcaatttgagtagggctcctacccctcggacacaaggacagaagactccaccgccagatcccgtgggcacatacaaccccgcctgtgcactcgcacttaatgaggccaaacgtctgctggtggaaagcaaagacaccctcgtggaaatggccaagaacgaggttgatgtaagagagcagcagcttcaaatatccgatagggtgtgtgcctccctggcccagaaagcatccgaaacacttgaactcaaagagcgcttaaatatgacactgggacttatgcgcggaactattttaaggtgtaccaaatataatcaggagctttatacaacacacggcctgatcaaaggtccactttcgaaggtgcatctggaaacggccgagaagctggacaggccccttgtgcggatgtaccagcgccatgtgggaacacagcttcccgaagctgcgcgcttagcacagggtaccgataagttgcagtgtcatatcacttacctggagaaaaatcttgacgaactgcttgccacgcacaaaaacctgtcatggggcctcaactgtaagaatatcggccacgaagtagacgggaatgtggtgaggctacgactacggcagagacagcctcacgtatgttatgaacaggcccaaagacttgttaaggattgggatcctcggacaccgcctccaagatccaagtccagtgcagacccctag

SEQ ID NO: 250172 - DNA, 1500 bp, Artificial Sequence
  derived and/or modified sequence
atgcgtgtcctggtgcccccagctgaacgttcacaagatacacgcgtgggggctccagcgtggagagaagctgcgcaggcaatggcaagaactgctcatattctgactgaccgctgtggacaggaagctgtaacaatgtggcagcctaaagacagcgtcttggatcctaatgtggcccatcatctcggaagagcagcctacatccaaccatggcgctttagagtggaaatgatcaaaggaggcggtaccctggagaagcccccaccgggtgaaggggtaacgctttggaaaggtaagatgaaacctcccgcttggtatgccagactgccactgccactgcacaggaaagccagagccctgcagactaccgaggtcgtgcacgcccacgcaagaggggcaagactcactgcagccagattagggagggcacagcaccagatcaacggccgagtgcggcagcttctgcgtcagcgggaagtgactgaccatcgattgtcggaagtcagaaaagggctgctgatcaatcaacaatccgttaagctgcgagggtacagacccaaatcagagaaggtacctgacaaggctgatagcatgctgacctgggagaaggaggagctgaagtcaatgaaaagaaaaatggagagggacatggagaagtctgaggtcctgttgaagacgttggcctcatgtcgcgacactctgaacttttgtttcaaagagcgcctgcaggccgttgaccttatgaatcaaccactcgataaggtgctcgagcaagctcggcgacactcttgggtgaatttgtcccgggcacccacacctagaacccaggggcagaagacacccccaccagatcccgtgggaacatataacccagcgtgcgcactcgcgctgaacgaggcaaagcggttgctggtggagagtaaggacacgctcgtcgagatggccaagaatgaggttgacgtgcgggaacagcagctgcagatttcagatcgcgtatgtgcctccctggcgcagaaagctagcgaaacactcgagttgaaagagagactcaacatgacattggggcttatgaggggtaccattctaaggtgcaccaaatacaaccaggaactgtacacaacccacggactgatcaagggcccactgtctaaagttcaccttgagaccgcagagaaattggatagacccctggtgaggatgtatcagcgacacgtgggaactcagcttccggaagcagccagactggcccagggcacagacaaactacagtgtcacatcacgtacctggaaaagaatctagatgagttgctcgctacccataagaacttgagttggggactcaattgtaaaaatatcggacacgaggtagacggcaatgtggtacggctgcgactgcggcaaagacagccccacgtctgctacgagcaggcacagaggctcgtcaaggactgggatcctagaacaccacccccaaggtccaaaagttctgctgatccatag

SEQ ID NO: 250173 - DNA, 1751 bp, Artificial Sequence
  derived and/or modified sequence
gtacactgtctctacaggccaggaaagagttgtgtgtctttggggtcccttccgctccgcctagggttcccggccaggccgagagaccaagcagggaccatgcgcgtgttggtacccccggctgagcgcagccaggacacacgcgttggggccccagcatggcgcgaggcagctcaggccatggcgaggaccgcgcacattctgaccgatcgctgcgggcaggaggcggtgaccatgtggcagcccaaggacagcgtgctggacccgaacgtggcccaccacctcggccgcgccgcctacatccagccctggcgcttccgcgtggagatgatcaaaggcggcggcaccttggagaagccgccgccaggcgagggcgtcacgctgtggaagggcaagatgaagccgcccgcctggtacgcccgcctgccgctacccttgcaccgcaaagcgcgcgccctgcagaccaccgaggtggtgcacgcgcacgcgcgtggagcgcgcctcaccgccgcccgcctcggccgcgcgcagcaccagattaacgggcgggtgcgacagctgctgcgccagcgcgaggtcaccgaccacaggctcagcgaagtgcgcaagggtctgcttattaaccagcagagcgtcaagctgcggggctacaggcccaagtctgagaaggtccctgacaaagctgacagtatgcttacatgggagaaagaggagctgaaaagcatgaagaggaaaatggagagagatatggaaaaatcagaggtcctactcaagaccctggcctcctgccgagacactctgaacttctgcttcaaggagcggctccaagccgtggacctcatgaaccagcctctggacaaggttctggagcaggccagacgccactcatgggtgaacctctcccgagcccccactccacgcacacagggtcagaaaacgcctcctccagaccctgtgggcacctataacccagcgtgcgccttggcgctaaacgaagccaagcggttgttggtcgagtccaaggacaccttggtagaaatggcaaagaacgaggtggacgtccgggagcaacagctgcagataagcgaccgtgtgtgtgcctcgctggcgcagaaggcgagcgagaccttggagctgaaggaaagattaaatatgacgttaggactgatgaggggaactatcctccggtgtacgaaatataaccaagagttgtacaccacccacggtctcatcaagggtcctctgtcgaaagttcacctggagaccgcagaaaagctggacagacccctggttcgcatgtaccagagacacgtgggcacccaactcccggaggctgcgcgcctcgcacagggcaccgacaagctgcagtgccacatcacgtacctggaaaagaacctggacgagctgctcgccacgcacaagaacctcagctggggcctcaactgcaagaacatcgggcatgaggtggacggcaacgtggtgcgcctgcgcctgcgccagcggcaaccgcacgtgtgctacgagcaggcgcagcgcctggttaaggactgggacccgcgcacgccgccgccgcgcagcaagagcagcgcggacccctagtgaccccagcgtcccccgccccagccagctgattggatgctggctgggacctcggagagcagacacagccccatggccctccctctcccctgacgcaccctccctccaagcaccctctaggagaattataattaaaaataacaataattatc

SEQ ID NO: 250174 - DNA, 1500 bp, Artificial Sequence
  derived and/or modified sequence
atgagagtgctggtgccccccgccgagagaagccaggacaccagagtgggcgcccccgcctggagagaggccgcccaggccatggccagaaccgcccacatcctgaccgacagatgcggccaggaggccgtgaccatgtggcagcccaaggacagcgtgctggaccccaacgtggcccaccacctgggcagagccgcctacatccagccctggagattcagagtggagatgatcaagggcggcggcaccctggagaagcccccccccggcgagggcgtgaccctgtggaagggcaagatgaagccccccgcctggtacgccagactgcccctgcccctgcacagaaaggccagagccctgcagaccaccgaggtggtgcacgcccacgccagaggcgccagactgaccgccgccagactgggcagagcccagcaccagatcaacggcagagtgagacagctgctgagacagagagaggtgaccgaccacagactgagcgaggtgagaaagggcctgctgatcaaccagcagagcgtgaagctgagaggctacagacccaagagcgagaaggtgcccgacaaggccgacagcatgctgacctgggagaaggaggagctgaagagcatgaagagaaagatggagagagacatggagaagagcgaggtgctgctgaagaccctggccagctgcagagacaccctgaacttctgcttcaaggagagactgcaggccgtggacctgatgaaccagcccctggacaaggtgctggagcaggccagaagacacagctgggtgaacctgagcagagcccccacccccagaacccagggccagaagacccccccccccgaccccgtgggcacctacaaccccgcctgcgccctggccctgaacgaggccaagagactgctggtggagagcaaggacaccctggtggagatggccaagaacgaggtggacgtgagagagcagcagctgcagatcagcgacagagtgtgcgccagcctggcccagaaggccagcgagaccctggagctgaaggagagactgaacatgaccctgggcctgatgagaggcaccatcctgagatgcaccaagtacaaccaggagctgtacaccacccacggcctgatcaagggccccctgagcaaggtgcacctggagaccgccgagaagctggacagacccctggtgagaatgtaccagagacacgtgggcacccagctgcccgaggccgccagactggcccagggcaccgacaagctgcagtgccacatcacctacctggagaagaacctggacgagctgctggccacccacaagaacctgagctggggcctgaactgcaagaacatcggccacgaggtggacggcaacgtggtgagactgagactgagacagagacagccccacgtgtgctacgagcaggcccagagactggtgaaggactgggaccccagaacccccccccccagaagcaagagcagcgccgacccctag

SEQ ID NO: 250175 - protein, 531 aa, Artificial Sequence
  derived and/or modified sequence
MLPITDRLLHLLGLEKTAFRIYAVSTLLLFLLFFLFRLLLRFLRLCRSFYITCRRLRCFPQPPRRNWLLGHLGMYLPNEAGLQDEKKVLDNMHHVLLVWMGPVLPLLVLVHPDYIKPLLGASAAIAPKDDLFYGFLKPWLGDGLLLSKGDKWSRHRRLLTPAFHFDILKPYMKIFNQSADIMHAKWRHLAEGSAVSLDMFEHISLMTLDSLQKCVFSYNSNCQEKMSDYISAIIELSALSVRRQYRLHHYLDFIYYRSADGRRFRQACDMVHHFTTEVIQERRRALRQQGAEAWLKAKQGKTLDFIDVLLLARDEDGKELSDEDIRAEADTFMFEGHDTTSSGISWMLFNLAKYPEYQEKCREEIQEVMKGRELEELEWDDLTQLPFTTMCIKESLRQYPPVTLVSRQCTEDIKLPDGRIIPKGIICLVSIYGTHHNPTVWPDSKVYNPYRFDPDNPQQRSPLAYVPFSAGPRNCIGQSFAMAELRVVVALTLLRFRLSVDRTRKVRRKPELILRTENGLWLKVEPLPPRA

SEQ ID NO: 250176 - DNA, 1596 bp, Artificial Sequence
  derived and/or modified sequence
atgttgcccattaccgatcgccttcttcatttactggggttggagaagaccgctttcagaatctatgccgtcagcactctgcttctttttttgctgttctttttgttccgcctgctcctgcgctttctgcggctatgtcgctctttctatatcacgtgtcgaaggttaagatgtttccctcaaccccccagaagaaactggcttctgggccacctgggaatgtacttgccaaacgaggccggtttacaggatgagaagaaagtgctcgataatatgcatcatgttctgttggtctggatgggaccagtgctgcccctgttggtgcttgtccaccccgattatattaagcctctactgggcgcatccgccgcaattgcaccgaaggatgatctgttttatggcttcctaaagccttggttgggggacgggctcctgttgtcaaaaggggacaagtggagcagacatagacgcttgttgacccctgctttccactttgatatactgaagccgtacatgaagatctttaaccaatcggccgatatcatgcacgccaagtggcggcacctggccgagggcagcgccgttagtctggatatgtttgaacacatttcactgatgactctggattctctgcaaaaatgcgttttcagctacaattcgaactgtcaagagaagatgtcagactacatctcagccatcatagagctgagcgcactgagtgttaggcgacaataccgattacaccactatctggacttcatttattacagaagcgcagacgggagaaggtttcgacaagcttgtgatatggttcaccattttacgacagaagttatccaggagcgcaggagggctcttcgccaacagggtgctgaggcctggctgaaggcaaaacaagggaagactcttgattttatagatgtactccttcttgcccgcgatgaagatggaaaagagctctcagacgaggatattagagccgaggcagatacattcatgttcgagggtcacgacactacaagcagcggtataagctggatgctcttcaatctagctaagtatcccgaatatcaggagaaatgccgcgaggagatccaggaggtgatgaagggacgcgaactggaagaactggagtgggatgacctgactcagctccctttcacaacgatgtgtatcaaggaatccctgcggcaataccccccagtgactctggtgtctcggcaatgtaccgaggacatcaaactccccgacggccggatcatccctaaagggattatctgtttggtatctatctatggaacacaccataaccctaccgtttggcccgacagtaaagtgtacaacccgtaccgctttgacccagacaacccgcaacagagatcccctctcgcctacgtccccttttcagcaggccccaggaactgcatcggtcaatcatttgccatggctgaacttcgagtggtagtcgcattgactcttctcagatttcggctttctgtcgataggaccagaaaggtcagaagaaaaccagagcttattttacggaccgaaaatggtctctggttgaaggtggagccgcttccacctagagcctag

SEQ ID NO: 250177 - DNA, 1596 bp, Artificial Sequence
  derived and/or modified sequence
atgctgcccatcacagaccggctgctgcacctgctgggcctggagaagacagccttccgcatctatgctgtgtccaccctgctgctcttcctgctcttcttcctgttccggctgctgctgcgcttcctgcggctgtgccgctccttctacatcacctgccggcggctgcgctgcttcccccagccccccaggaggaactggctgctgggccacctgggcatgtacctgcccaatgaggccggcctgcaggatgagaagaaggtgctggacaacatgcaccacgtgctgctggtgtggatgggccctgtgctgcccctgctggtgctggtgcacccagactacatcaagcccctgctgggcgccagcgctgccatcgcccccaaggatgacctcttctacggcttcctgaagccctggctgggagatggcctgctgctgagcaagggggacaagtggagccgccaccggcggctgctgaccccagccttccactttgacatcctgaagccctacatgaagatcttcaaccagagcgctgacatcatgcacgccaagtggaggcacctggccgagggcagcgctgtgtccctggacatgtttgagcacatcagcctgatgaccctggacagcctgcagaagtgtgtgttctcctacaacagcaactgccaggagaagatgtctgactacatcagcgccatcatcgagctgagcgccctgtctgtgcggcggcagtaccgcctgcaccactacctggacttcatctactacagatctgcagatggccgccgcttccggcaggcctgtgacatggtgcaccacttcaccacagaggtgatccaggagaggagaagagccctgcggcagcagggcgctgaggcctggctgaaggccaagcagggcaagaccctggacttcattgatgtgctgctgctggccagagatgaagatggcaaggagctgagtgatgaggacatccgggcagaggccgacaccttcatgtttgagggccatgacaccaccagcagcggcatctcctggatgctgttcaacctggccaagtacccagagtaccaggagaagtgccgggaggagatccaggaggtgatgaagggccgggagctggaggagctggagtgggatgacctgacccagctgcccttcaccaccatgtgcatcaaggagagcctgcggcagtacccacctgtgaccctggtgtcccggcagtgcacagaggacatcaagctgcctgatggccgcatcatccccaagggcatcatctgcctggtgtccatctacggcacccaccacaaccccaccgtgtggccagacagcaaggtgtacaacccctacagatttgatcctgacaacccccagcagaggagccccctggcctacgtgcccttctctgctggccccaggaactgcatcggccagagctttgccatggccgagctgcgggtggtggtggccctgaccctgctgcgcttccggctgtctgtggacaggaccaggaaggtgcggaggaagccagagctgatcctgaggacagaaaatggcctgtggctgaaggtggagcccctgcccccccgggcctag

SEQ ID NO: 250178 - DNA, 1596 bp, Artificial Sequence
  derived and/or modified sequence
atgctgcccatcaccgaccggctgctgcacctgctgggcctggagaaaaccgcattcagaatttatgccgtgagtaccctgttactatttctcctcttttttctcttccgccttttgttacggttccttaggttgtgcaggtcgttctatattacatgccggcgactgcggtgcttcccccaaccgcctcgccggaactggcttctggggcacttgggaatgtacctgcccaatgaagccggcctgcaggatgagaaaaaggttctggacaatatgcatcatgtgctgctcgtgtggatgggacctgtcctgcccctgctcgtgctggtgcatcccgattatatcaagccccttctgggagcaagcgcggccatcgcacccaaggacgatctattctacggctttctaaagccatggcttggggatgggcttctcttatcaaagggcgacaagtggagcagacataggcggttgctcacgccagcattccacttcgacattcttaagccttatatgaaaattttcaatcagagtgccgatattatgcatgccaaatggcgccatttggccgagggatccgccgtctctctggacatgtttgaacatatctctttgatgaccctggactcactgcagaaatgtgtgttttcttacaatagcaattgtcaggagaagatgtccgattatatttctgctatcattgagctgagtgccctctctgtgagaagacagtaccgattgcatcactatcttgacttcatttattaccggagtgccgatggcaggagattccgccaggcgtgtgacatggtgcatcactttactaccgaggttatccaggaacggcggcgggctctccgccagcaaggggctgaggcctggctgaaggccaaacaggggaaaacattggactttattgatgttctccttctggctcgcgatgaagacggtaaagagttatccgacgaagatatcagggcggaggcagacactttcatgttcgaaggacatgatacaacctcctcgggaatttcatggatgctgtttaacctggctaagtatcccgagtatcaggaaaagtgcagagaggaaatacaggaagtgatgaagggcagagaacttgaggaactggaatgggatgatctcacacagctgcccttcacaacgatgtgcataaaggagagcctccggcagtacccacccgtcactctggtgagccggcaatgtactgaggacataaaattgcccgacggacggataattccaaaaggcataatttgcttggtgtctatttacggaactcaccataaccctacagtgtggccagacagcaaggtgtataatccctatcggttcgatcccgataaccctcagcagcggagccctcttgcttatgtcccgttttctgctggccctcgaaactgcatagggcaaagctttgcaatggctgagctgcgagtggtggtggcactgactctgctacgctttcggctttcagtggatcgcactaggaaggtgaggagaaaacctgaattgattttgagaactgaaaacggcctgtggttaaaagtagagcccctccccccacgagcttag

SEQ ID NO: 250179 - DNA, 1596 bp, Artificial Sequence
  derived and/or modified sequence
atgctgcccatcacagacagactgctccacttacttggcttagaaaaaaccgcctttcggatttacgcggtatctactctgctcctgtttctcctgttctttcttttccggctgcttttgcggttcttgagactttgtcggtctttctatatcacatgcaggcgtttgcgatgctttccccagccacctaggaggaactggctcctgggccatttggggatgtatctgcctaatgaggctggcttacaagacgagaagaaagttctcgataatatgcatcatgtattgctggtgtggatggggccagtcctgccactcctggtgctggttcaccctgattacataaagcccctgctgggggcttccgccgctatcgcccctaaggacgatctgttttacggttttctgaagccctggcttggggacggactgttattgtccaaaggggacaaatggagccggcacaggcggctcctgacaccggctttccatttcgacattctgaagccttacatgaagatcttcaaccagtctgccgatataatgcatgccaagtggcggcacctggccgagggtagcgctgtgtccctggacatgttcgagcacattagcctcatgacccttgactcactccaaaaatgtgtgttctcctacaacagcaactgccaggagaagatgtccgattacatctctgctatcatagaactcagcgctctgagcgttcgacgacaatatagactgcaccactaccttgattttatctactatcgcagtgccgatggacgtagattccgacaagcttgtgacatggtgcatcattttacgactgaggtgatacaggagagacggagggccctcaggcagcagggcgcagaggcctggctgaaggccaaacagggaaagactctcgacttcatagatgtgctcctgctcgcacgagacgaggacggcaaggaactctccgacgaagacatccgagccgaggccgatacatttatgtttgaggggcacgacaccacttcctccggaatttcctggatgctgtttaaccttgccaagtatcccgaataccaagagaagtgtagggaggaaattcaggaggtcatgaaaggtagagagctcgaagagcttgaatgggatgatctcacccagctcccgtttaccaccatgtgtatcaaggaatccctgcggcaatatccccctgtgacactcgtgtccagacagtgcactgaagacattaaactgccagacggaaggataattccaaagggaatcatctgcctcgtctcgatatatggcacccaccacaatccgaccgtgtggcctgattcaaaggtgtataacccttaccggttcgatccggataacccgcagcaaagatccccacttgcctatgtgccctttagtgccggtccaagaaattgcatcggccagagcttcgctatggcagaactgagagtggtggttgccttgaccctcctgagattccgcctgagtgttgatagaacaaggaaggtccggagaaaaccagagctgattctgagaactgaaaatggcttgtggctgaaagtggaacccttgccccctcgggcttag

SEQ ID NO: 250180 - DNA, 2445 bp, Artificial Sequence
  derived and/or modified sequence
caggatgctgcccatcacagaccgcctgctgcacctcctggggctggagaagacggcgttccgcatatacgcggtgtccacccttctcctcttcctgctcttcttcctgttccgcctgctgctgcggttcctgaggctctgcaggagcttctacatcacctgccgccggctgcgctgcttcccccagcctccccggcgcaactggctgctgggccacctgggcatgtaccttccaaatgaggcgggccttcaagatgagaagaaggtactggacaacatgcaccatgtactcttggtatggatgggacctgtcctgccgctgttggttctggtgcaccctgattacatcaaaccccttttgggagcctcagctgccatcgcccccaaggatgacctcttctatggcttcctaaaaccttggctaggggatgggctgctgctcagcaaaggtgacaagtggagccggcaccgtcgcctgctgacacccgccttccactttgacatcctgaagccttacatgaagatcttcaaccagagcgctgacattatgcatgctaaatggcggcatctggcagagggctcagcggtctcccttgatatgtttgagcatatcagcctcatgaccctggacagtcttcagaaatgtgtcttcagctacaacagcaactgccaagagaagatgagtgattatatctccgctatcattgaactgagcgctctgtctgtccggcgccagtatcgcttgcaccactacctcgacttcatttactaccgctcggcggatgggcggaggttccggcaggcctgtgacatggtgcaccacttcaccactgaagtcatccaggaacggcggcgggcactgcgtcagcagggggccgaggcctggcttaaggccaagcaggggaagaccttggactttattgatgtgctgctcctggccagggatgaagatggaaaggaactgtcagacgaggatatccgagccgaagcagacaccttcatgtttgagggtcacgacacaacatccagtgggatctcttggatgctgttcaatttggcaaagtatccggaataccaggagaaatgccgagaagagattcaggaagtcatgaaaggccgggagctggaggagctggagtgggacgatctgactcagctgccctttacaactatgtgcattaaggagagcctgcgccagtacccacctgtcactcttgtctctcgccaatgcacggaggacatcaagctcccagatgggcgcatcatccccaaaggaatcatctgcttggtcagcatctatggaacccaccacaaccccacagtgtggcctgactccaaggtgtacaacccctaccgctttgacccggacaacccacagcagcgctctccactggcctatgtgcccttctctgcaggacccaggaattgcatcggacagagcttcgccatggccgagttgcgcgtggttgtggcactaacactgctacgtttccgcctgagcgtggaccgaacgcgcaaggtgcggcggaagccggagctcatactgcgcacggagaacgggctctggctcaaggtggagccgctgcctccgcgggcctgagcgtgggcgcgcccctgcggctcccgagggtccaggccccgcccccaaaggaccaggactcgccccaaagatcccgagggcataggccacccccctcgaagttcaggttcagctcctggatgaccaggcaccgctgttgagcagcctggtggtactggccacgcccctcaaggcaaggctcctccccttagggggcctgatcccgccccttgaggcttaggtcccgccccctgacttctcgcacctgtcctgtttgagggaccagggtcgaccctgcccccttgggctcaggccccgcccccaggatcctacggattgaggtcctcaggccacgcccctgcagatccaggtctccaggccttgcccactgagccttcagaggacctaagacccacctatgactcagggcccaccacaccccacccccccccaactggctgaacccctggcaggcttccaaactgaggaaagctggagcctgacgtcagagcttttaactcggacatcaccctcctgaggccctcagctcatacgggcagactgctcaggcgtgaggctggatcgtagggttcgaggctgcttgcttttgttgttgttttgtaaactcagacccttgtaagccccttccttcctcccttgcccaaagatcctttgctgagtgttctgtttttgcagaataaaagcaaaggatgcagacttaccccaccctccacccctagctcagccagatccttacacgtggagcccccagcatgggaatgaggggctctgcaactgagcgaagctgcgggctaggaggctggaaagccatttatcctaggacataaactcagattttgggggtc

SEQ ID NO: 250181 - DNA, 1596 bp, Artificial Sequence
  derived and/or modified sequence
atgctgcccatcaccgacagactgctgcacctgctgggcctggagaagaccgccttcagaatctacgccgtgagcaccctgctgctgttcctgctgttcttcctgttcagactgctgctgagattcctgagactgtgcagaagcttctacatcacctgcagaagactgagatgcttcccccagccccccagaagaaactggctgctgggccacctgggcatgtacctgcccaacgaggccggcctgcaggacgagaagaaggtgctggacaacatgcaccacgtgctgctggtgtggatgggccccgtgctgcccctgctggtgctggtgcaccccgactacatcaagcccctgctgggcgccagcgccgccatcgcccccaaggacgacctgttctacggcttcctgaagccctggctgggcgacggcctgctgctgagcaagggcgacaagtggagcagacacagaagactgctgacccccgccttccacttcgacatcctgaagccctacatgaagatcttcaaccagagcgccgacatcatgcacgccaagtggagacacctggccgagggcagcgccgtgagcctggacatgttcgagcacatcagcctgatgaccctggacagcctgcagaagtgcgtgttcagctacaacagcaactgccaggagaagatgagcgactacatcagcgccatcatcgagctgagcgccctgagcgtgagaagacagtacagactgcaccactacctggacttcatctactacagaagcgccgacggcagaagattcagacaggcctgcgacatggtgcaccacttcaccaccgaggtgatccaggagagaagaagagccctgagacagcagggcgccgaggcctggctgaaggccaagcagggcaagaccctggacttcatcgacgtgctgctgctggccagagacgaggacggcaaggagctgagcgacgaggacatcagagccgaggccgacaccttcatgttcgagggccacgacaccaccagcagcggcatcagctggatgctgttcaacctggccaagtaccccgagtaccaggagaagtgcagagaggagatccaggaggtgatgaagggcagagagctggaggagctggagtgggacgacctgacccagctgcccttcaccaccatgtgcatcaaggagagcctgagacagtacccccccgtgaccctggtgagcagacagtgcaccgaggacatcaagctgcccgacggcagaatcatccccaagggcatcatctgcctggtgagcatctacggcacccaccacaaccccaccgtgtggcccgacagcaaggtgtacaacccctacagattcgaccccgacaacccccagcagagaagccccctggcctacgtgcccttcagcgccggccccagaaactgcatcggccagagcttcgccatggccgagctgagagtggtggtggccctgaccctgctgagattcagactgagcgtggacagaaccagaaaggtgagaagaaagcccgagctgatcctgagaaccgagaacggcctgtggctgaaggtggagcccctgccccccagagcctag

SEQ ID NO: 250182 - protein, 1034 aa, Artificial Sequence
  derived and/or modified sequence
MPRRKQQAPKRAAGYAQEEQLKEEEEIKEEEEEEDSGSVAQLQGGNDTGTDEELETGPEQKGCFSYQNSPGSHLSNQDAENESLLSDASDQVSDIKSVCGRDASDKKAHTHVRLPNEAHNCMDKMTAVYANILSDSYWSGLGLGFKLSNSERRNCDTRNGSNKSDFDWHQDALSKSLQQNLPSRSVSKPSLFSSVQLYRQSSKMCGTVFTGASRFRCRQCSAAYDTLVELTVHMNETGHYQDDNRKKDKLRPTSYSKPRKRAFQDMDKEDAQKVLKCMFCGDSFDSLQDLSVHMIKTKHYQKVPLKEPVPTISSKMVTPAKKRVFDVNRPCSPDSTTGSFADSFSSQKNANLQLSSNNRYGYQNGASYTWQFEACKSQILKCMECGSSHDTLQQLTTHMMVTGHFLKVTSSASKKGKQLVLDPLAVEKMQSLSEAPNSDSLAPKPSSNSASDCTASTTELKKESKKERPEETSKDEKVVKSEDYEDPLQKPLDPTIKYQYLREEDLEDGSKGGGDILKSLENTVTTAINKAQNGAPSWSAYPSIHAAYQLSEGTKPPLPMGSQVLQIRPNLTNKLRPIAPKWKVMPLVSMPTHLAPYTQVKKESEDKDEAVKECGKESPHEEASSFSHSEGDSFRKSETPPEAKKTELGPLKEEEKLMKEGSEKEKPQPLEPTSALSNGCALANHAPALPCINPLSALQSVLNNHLGKATEPLRSPSCSSPSSSTISMFHKSNLNVMDKPVLSPASTRSASVSRRYLFENSDQPIDLTKSKSKKAESSQAQSCMSPPQKHALSDIADMVKVLPKATTPKPASSSRVPPMKLEMDVRRFEDVSSEVSTLHKRKGRQSNWNPQHLLILQAQFASSLFQTSEGKYLLSDLGPQERMQISKFTGLSMTTISHWLANVKYQLRKTGGTKFLKNMDKGHPIFYCSDCASQFRTPSTYISHLESHLGFQMKDMTRLSVDQQSKVEQEISRVSSAQRSPETIAAEEDTDSKFKCKLCCRTFVSKHAVKLHLSKTHSKSPEHHSQFVTDVDEE

SEQ ID NO: 250183 - DNA, 3105 bp, Artificial Sequence
  derived and/or modified sequence
atgcccagaagaaagcagcaggcccccaagagagccgccggctacgcccaggaggagcagctgaaggaggaggaggagatcaaggaggaggaggaggaggaggacagcggcagcgtggcccagctgcagggcggcaacgacaccggcaccgacgaggagctggagaccggccccgagcagaagggctgcttcagctaccagaacagccccggcagccacctgagcaaccaggacgccgagaacgagagcctgctgagcgacgccagcgaccaggtgagcgacatcaagagcgtgtgcggcagagacgccagcgacaagaaggcccacacccacgtgagactgcccaacgaggcccacaactgcatggacaagatgaccgccgtgtacgccaacatcctgagcgacagctactggagcggcctgggcctgggcttcaagctgagcaacagcgagagaagaaactgcgacaccagaaacggcagcaacaagagcgacttcgactggcaccaggacgccctgagcaagagcctgcagcagaacctgcccagcagaagcgtgagcaagcccagcctgttcagcagcgtgcagctgtacagacagagcagcaagatgtgcggcaccgtgttcaccggcgccagcagattcagatgcagacagtgcagcgccgcctacgacaccctggtggagctgaccgtgcacatgaacgagaccggccactaccaggacgacaacagaaagaaggacaagctgagacccaccagctacagcaagcccagaaagagagccttccaggacatggacaaggaggacgcccagaaggtgctgaagtgcatgttctgcggcgacagcttcgacagcctgcaggacctgagcgtgcacatgatcaagaccaagcactaccagaaggtgcccctgaaggagcccgtgcccaccatcagcagcaagatggtgacccccgccaagaagagagtgttcgacgtgaacagaccctgcagccccgacagcaccaccggcagcttcgccgacagcttcagcagccagaagaacgccaacctgcagctgagcagcaacaacagatacggctaccagaacggcgccagctacacctggcagttcgaggcctgcaagagccagatcctgaagtgcatggagtgcggcagcagccacgacaccctgcagcagctgaccacccacatgatggtgaccggccacttcctgaaggtgaccagcagcgccagcaagaagggcaagcagctggtgctggaccccctggccgtggagaagatgcagagcctgagcgaggcccccaacagcgacagcctggcccccaagcccagcagcaacagcgccagcgactgcaccgccagcaccaccgagctgaagaaggagagcaagaaggagagacccgaggagaccagcaaggacgagaaggtggtgaagagcgaggactacgaggaccccctgcagaagcccctggaccccaccatcaagtaccagtacctgagagaggaggacctggaggacggcagcaagggcggcggcgacatcctgaagagcctggagaacaccgtgaccaccgccatcaacaaggcccagaacggcgcccccagctggagcgcctaccccagcatccacgccgcctaccagctgagcgagggcaccaagccccccctgcccatgggcagccaggtgctgcagatcagacccaacctgaccaacaagctgagacccatcgcccccaagtggaaggtgatgcccctggtgagcatgcccacccacctggccccctacacccaggtgaagaaggagagcgaggacaaggacgaggccgtgaaggagtgcggcaaggagagcccccacgaggaggccagcagcttcagccacagcgagggcgacagcttcagaaagagcgagaccccccccgaggccaagaagaccgagctgggccccctgaaggaggaggagaagctgatgaaggagggcagcgagaaggagaagccccagcccctggagcccaccagcgccctgagcaacggctgcgccctggccaaccacgcccccgccctgccctgcatcaaccccctgagcgccctgcagagcgtgctgaacaaccacctgggcaaggccaccgagcccctgagaagccccagctgcagcagccccagcagcagcaccatcagcatgttccacaagagcaacctgaacgtgatggacaagcccgtgctgagccccgccagcaccagaagcgccagcgtgagcagaagatacctgttcgagaacagcgaccagcccatcgacctgaccaagagcaagagcaagaaggccgagagcagccaggcccagagctgcatgagccccccccagaagcacgccctgagcgacatcgccgacatggtgaaggtgctgcccaaggccaccacccccaagcccgccagcagcagcagagtgccccccatgaagctggagatggacgtgagaagattcgaggacgtgagcagcgaggtgagcaccctgcacaagagaaagggcagacagagcaactggaacccccagcacctgctgatcctgcaggcccagttcgccagcagcctgttccagaccagcgagggcaagtacctgctgagcgacctgggcccccaggagagaatgcagatcagcaagttcaccggcctgagcatgaccaccatcagccactggctggccaacgtgaagtaccagctgagaaagaccggcggcaccaagttcctgaagaacatggacaagggccaccccatcttctactgcagcgactgcgccagccagttcagaacccccagcacctacatcagccacctggagagccacctgggcttccagatgaaggacatgaccagactgagcgtggaccagcagagcaaggtggagcaggagatcagcagagtgagcagcgcccagagaagccccgagaccatcgccgccgaggaggacaccgacagcaagttcaagtgcaagctgtgctgcagaaccttcgtgagcaagcacgccgtgaagctgcacctgagcaagacccacagcaagagccccgagcaccacagccagttcgtgaccgacgtggacgaggagtag

SEQ ID NO: 250184 - DNA, 3105 bp, Artificial Sequence
  derived and/or modified sequence
atgccccgaagaaaacagcaagctcccaagagggcagccggttacgctcaggaggagcagctgaaggaggaggaagagatcaaagaggaggaagaggaggaggactccggctccgtggcgcagctgcaagggggaaacgatactggtactgacgaagaactcgagacaggacccgaacagaaaggatgcttttcgtatcaaaattctcccggatctcacctgtccaaccaagacgccgaaaacgagtctctcctcagtgacgccagtgatcaagtatctgatataaagagcgtgtgtggtcgcgacgctagcgataaaaaagctcatacacacgtgagactaccaaacgaggcccacaactgtatggacaagatgaccgctgtttatgctaacattctctctgattcatactggtctggtctgggcttggggtttaagctgtctaactccgaacgcaggaactgtgacacacggaatggcagcaacaaatccgattttgactggcaccaagacgcattatctaaatcacttcagcagaacctgccctcaaggtccgtgagcaaaccgagcttattctcctctgtgcagctgtatcgacagagcagtaaaatgtgtggaaccgtgttcaccggcgcctccaggttcaggtgtagacagtgtagcgctgcctacgacacactggttgaactcacagtgcatatgaacgaaactggtcactatcaggacgacaacaggaagaaggacaagcttaggcctacctcgtactccaagcctcgcaagcgagcctttcaagacatggataaagaagatgcccagaaggtgcttaaatgcatgttttgtggagattcctttgattccctccaagacctctctgtccacatgattaaaacaaagcattatcagaaagtgccgcttaaagaacctgtgcccacaatctctagcaagatggttacgccagccaagaagagggtgtttgatgtgaatcgtccatgctcaccagattcaacaaccgggtctttcgccgattctttttcctctcagaaaaatgccaacctgcagctcagcagtaacaaccgatacgggtatcaaaacggcgcaagctatacatggcagttcgaagcttgtaagtcgcagattttgaagtgtatggagtgcggcagcagtcacgacaccctacagcaactgacaacccatatgatggtgaccgggcatttccttaaggtgacatcttctgcctctaaaaaggggaaacagttggtgcttgacccattagccgtcgagaagatgcagagtctgtcagaagccccaaattctgactccctcgcacctaagccttcctccaactcggcatccgactgtactgcaagcaccacagaacttaagaaggaaagcaaaaaggagcgcccagaagaaacatctaaggacgagaaagtggtgaaaagtgaagattacgaggaccccctgcagaagccactcgatcctaccatcaagtatcaatatctgcgtgaagaagacctcgaggatgggagcaaaggtggtggcgacatcttgaagagtttggagaacaccgttactactgccatcaataaggctcagaacggagccccgagctggtccgcttatccatctattcacgccgcatatcagctgagtgaggggactaagcctcctctgcctatgggcagccaagtattacaaatacggcctaacctcactaataagctgcggcctatcgctccgaagtggaaggtgatgcccctggtgtctatgccaacacacctggccccgtacacccaggttaaaaaggaaagtgaggacaaggatgaagcggtgaaggaatgcggtaaggaaagccctcacgaggaggcttcctcgttctctcacagtgagggcgactcttttcggaagagtgaaaccccacccgaagcgaagaagactgagctcggcccgttgaaggaggaagagaaacttatgaaggaaggttccgagaaggagaagccgcaacccctggaacccacctctgccctgtccaacgggtgcgccctggccaaccatgcgcctgccttgccttgcatcaacccactttcagctttgcagtcagtgcttaataaccacctggggaaggctaccgagccattgcggtcaccgtcatgttcttcaccttcatcctcaactatatccatgtttcacaaatctaacttgaacgtcatggataaacccgtgttgtctcccgcctctacacggagcgcaagcgtctcacgccgctacctgtttgaaaattctgaccaacccatagatctcacaaaatccaaatccaaaaaggcagaaagctcccaggcccagtcttgcatgtcaccccctcagaagcatgctctgtccgatattgctgacatggttaaggttctccccaaggctaccacccccaaaccagcttcttccagtagagtgccacctatgaaactcgagatggatgtgaggagatttgaagacgtcagtagcgaagtgagtactttacacaaacgaaaaggcagacagtctaattggaatccccagcacctcctgatcctccaagcacaatttgcttcctcgttgttccaaacatcagagggtaaatacctgctgagtgatctgggtcctcaggaacggatgcagatcagcaagtttaccggtctgagtatgactacaataagtcactggctcgccaacgtcaagtaccaactcagaaagactggaggcactaagttcctaaagaacatggacaaagggcatccaatattctactgcagtgactgtgcttcgcaatttcgaaccccttccacttatatctctcatctggagtcccacctgggattccaaatgaaggatatgacacggctatctgtggaccagcagagtaaggtagagcaggaaattagcagagtgtcgtcggcccagcggagcccggaaacgatcgctgccgaagaagacacagactctaaatttaagtgtaaactgtgctgccggacatttgtgtcaaaacacgcagtcaaactgcacctgtctaagacacacagcaagagccctgagcatcactctcagttcgtgaccgatgtggatgaggaatag

SEQ ID NO: 250185 - DNA, 3105 bp, Artificial Sequence
  derived and/or modified sequence
atgcccaggaggaagcagcaggcccccaagagagctgctggctacgcccaggaggagcagctgaaggaggaggaggagatcaaggaggaggaggaggaggaggacagcggctctgtggcccagctgcagggcggcaatgacaccggcacagatgaggagctggagaccggccctgagcagaagggctgcttctcctaccagaacagccctggcagccacctgagcaaccaggatgctgaaaatgaaagcctgctgagtgatgccagtgaccaggtgtctgacatcaagtctgtgtgtggcagagatgccagtgacaagaaggcccacacccacgtgcggctgcccaatgaggcccacaactgcatggacaagatgacagctgtgtatgccaacatcctgagtgacagctactggagcggcctgggcctgggcttcaagctgagcaacagcgagaggaggaactgtgacaccagaaatggcagcaacaagagtgactttgactggcaccaggatgccctgagcaagagcctgcagcagaacctgcccagccgctctgtgtccaagcccagcctcttcagctctgtgcagctgtaccggcagagcagcaagatgtgtggcaccgtcttcaccggggccagccgcttccgctgccggcagtgcagcgctgcctatgacaccctggtggagctgactgtgcacatgaatgaaacaggccactaccaggatgacaacaggaagaaggacaagctgcggcccaccagctacagcaagcccaggaagagggccttccaggacatggacaaggaggatgcccagaaggtgctgaagtgcatgttctgtggggacagctttgacagcctgcaggacctgtctgtgcacatgatcaagaccaagcactaccagaaggtgcccctgaaggagcctgtgcccaccatcagcagcaagatggtgaccccagccaagaagagggtgtttgatgtgaaccggccctgcagcccagacagcaccaccggcagctttgctgacagcttcagcagccagaagaatgccaacctgcagctgagcagcaacaacagatatggctaccagaatggagccagctacacctggcagtttgaggcctgcaagagccagatcctgaagtgcatggagtgtggcagcagccatgacaccctgcagcagctgaccacccacatgatggtgacaggccacttcctgaaggtgaccagcagcgccagcaagaagggcaagcagctggtgctggaccccctggccgtggagaagatgcagagcctgtctgaggcccccaacagcgacagcctggcccccaagcccagcagcaacagcgccagtgactgcacagccagcaccacagagctgaagaaggagagcaagaaggagaggcctgaggagaccagcaaggatgagaaggtggtgaagtctgaggactatgaggaccccctgcagaagcccctggaccccaccatcaagtaccagtacctgcgggaggaggacctggaggatggcagcaaaggaggaggagacatcctgaagagcctggagaacacagtgaccacagccatcaacaaggcccagaatggagcccccagctggagcgcctaccccagcatccacgccgcctaccagctgtctgagggcaccaagccacccctgcccatgggcagccaggtgctgcagatccggcccaacctgaccaacaagctgcggcccatcgcccccaagtggaaggtgatgcccctggtgtccatgcccacccacctggccccctacacccaggtgaagaaggagagcgaggacaaggatgaggccgtgaaggaatgtgggaaggagagcccccatgaggaggccagcagcttcagccacagcgagggggacagcttcaggaagtctgagaccccacctgaggccaagaagacagagctgggccccctgaaggaggaggagaagctgatgaaggagggcagcgagaaggagaagccccagcccctggagcccaccagcgccctgagcaatggctgtgccctggccaaccacgccccagccctgccctgcatcaaccccctgagcgccctgcagagcgtgctgaacaaccacctgggcaaggccacagagcccctgcggagccccagctgcagcagccccagcagcagcaccatctccatgttccacaagagcaacctgaatgtgatggacaagcctgtgctgagccctgccagcaccaggtctgcctctgtgagccgccgctacctgtttgaaaattctgaccagcccatcgacctgaccaagagcaagagcaagaaggccgagagcagccaggcccagagctgcatgagccccccccagaagcacgccctgagtgacattgctgacatggtgaaggtgctgcccaaggccaccacccccaagccagccagcagcagccgggtgccccccatgaagctggagatggatgtgagaagatttgaagatgtgtcctctgaggtgtccaccctgcacaagaggaagggccggcagagcaactggaacccccagcacctgctgatcctgcaggcccagtttgccagcagcctcttccagaccagcgagggcaagtacctgctgagtgacctgggcccccaggagaggatgcagatcagcaagttcaccggcctgtccatgaccaccatcagccactggctggccaacgtgaagtaccagctgaggaagacaggaggcaccaagttcctgaagaacatggacaagggccaccccatcttctactgcagcgactgtgccagccagttccgcacccccagcacctacatcagccacctggagagccacctgggcttccagatgaaggacatgacccggctgtctgtggaccagcagagcaaggtggagcaggagatcagccgggtgagcagcgcccagaggagccctgagaccatcgctgctgaggaggacacagacagcaagttcaagtgcaagctgtgctgcaggacctttgtgtccaagcatgctgtgaagctgcacctgagcaagacccacagcaagagccctgagcaccacagccagtttgtgacagatgtggatgaggagtag

SEQ ID NO: 250186 - DNA, 3105 bp, Artificial Sequence
  derived and/or modified sequence
atgccccggcggaagcagcaggcccccaagcgggccgccggctacgcacaggaagaacagcttaaagaggaggaagagataaaagaggaagaggaagaagaggattctggaagtgtggctcagcttcagggagggaacgatactgggactgacgaagaactggaaactggtcctgaacaaaagggatgcttttcatatcagaatagtccggggtcccatctctccaatcaggacgcagaaaacgagtcactgctgagcgatgcatccgaccaggtcagcgacatcaagtccgtctgcgggagggatgcgagcgataagaaagctcacacccacgttcgcctccccaatgaggcgcataactgcatggataaaatgacggcggtgtatgccaacatcctctccgattcctattggtcagggctgggtctgggcttcaagttatcaaattccgagagaaggaactgtgataccagaaatggctccaacaagagcgactttgattggcatcaggatgcgctgtccaaaagtctccagcaaaacctcccttcccgaagcgtgtcaaaaccctctctcttctcctcagtccagctgtataggcaatccagtaaaatgtgcggcacagtttttacaggcgccagccgcttccggtgccgacagtgctccgcagcttatgacaccctcgtggaattaacggttcacatgaacgaaacaggtcactaccaggatgacaaccgtaagaaagacaaattgcgacccaccagctatagcaagccgcgtaagagagcttttcaagatatggacaaagaggatgcccagaaggttctgaagtgtatgttttgcggggatagtttcgacagcctccaggacttgtcggtgcatatgattaaaactaaacactaccagaaagtgccattaaaggagccagtacctactattagttccaaaatggtgacccccgccaagaaaagggtttttgatgtcaatcgcccatgcagtccagactccacgacagggagttttgccgactctttttcttcacagaagaatgccaacctgcaactgtccagcaataaccgctatggctaccagaacggagccagctatacttggcagtttgaggcttgtaaatctcaaatcctaaaatgtatggagtgcggatcaagccacgatactttgcagcagctgacgactcatatgatggttaccggacatttcttgaaggttacttctagtgcctccaagaaaggcaaacagctggtgctggatcctctcgccgttgagaagatgcagagcctttccgaagcccccaattccgacagcctcgccccgaagccaagcagcaattccgcctccgattgcacggcttccacaaccgagcttaagaaggagtctaagaaagaaagaccagaagaaacatctaaagatgaaaaggttgtgaaatccgaagactacgaggaccctctgcagaaacccctggatcccacaataaagtatcaatatctgagagaggaggacctcgaggatggcagcaagggaggaggagatattcttaaaagtcttgagaatactgtgactactgccatcaataaagcccagaatggagccccctcttggtccgcctatccaagtatccatgctgcgtatcagctctctgaaggaacaaagcctccgctgccaatgggcagccaagtgctacaaattcgcccaaatctcaccaataaattgcgtccaatcgccccgaagtggaaagtgatgccactcgtgagcatgcccacccacctggcgccatacacccaggtcaaaaaagaatccgaagacaaagatgaagcggtgaaagagtgcggaaaggagtccccacatgaagaggcgtcctcctttagtcactctgagggcgacagttttagaaaatctgaaaccccccctgaagcgaagaagaccgagcttggacctctcaaggaggaggaaaagctgatgaaagagggttctgagaaagagaaacctcaaccgctggaaccgacttcagctctgagtaacggctgcgccctagctaatcacgctccagctctgccctgcataaaccccctgtctgcactgcagtccgttctcaacaaccatctcggaaaagcaacagagccgctgcgctctccctcttgttcctccccttcttcatctacgatcagcatgtttcataagtccaatctcaatgttatggataaacctgtgctgagcccagcaagcaccagatcagcttccgtcagccggaggtacctgttcgaaaattccgaccagcctattgacttaactaaatctaaatccaaaaaggccgaatctagccaggcccagtcatgcatgtcaccacctcaaaaacacgctctctccgacatcgccgacatggtgaaagttctccccaaagccacgactcctaagcccgctagctccagccgggtgccaccgatgaaactcgagatggacgtacgcaggtttgaagatgtgagttctgaagtgagtaccctgcacaagcgaaaagggcgccagtcaaactggaacccacagcatctgctaatcttgcaggcccaattcgccagttcccttttccagacatccgaagggaaatacctgttgtccgatcttggcccacaggagcgtatgcagatcagcaaatttacagggctctctatgactactatctcccactggcttgctaacgtgaaatatcagctccgcaagacaggtgggacgaagttcctgaagaacatggacaaagggcatcctattttctattgttccgactgtgccagccagtttcgaacccctagtacatatatatctcatctggaatcccaccttggtttccagatgaaggatatgacccggctctctgtagaccagcagagtaaagtcgaacaagaaatctccagggtgtcatctgcccagaggtctccagaaactatagcggcggaggaggacaccgactcaaaattcaagtgcaaactatgctgcagaactttcgtgtctaaacacgcagtgaagctacatctcagcaaaactcactctaaaagcccagagcaccactcacaatttgtgactgatgtcgacgaggagtag

SEQ ID NO: 250187 - DNA, 3105 bp, Artificial Sequence
  derived and/or modified sequence
atgcctcgacggaagcagcaggctcccaagagggccgcaggttatgctcaggaggaacagctgaaggaggaagaggagattaaggaggaggaggaggaggaagactccggttctgtggctcagttacagggcggtaacgacaccggcaccgatgaggaattggagaccgggcctgaacaaaaggggtgtttctcttatcagaattccccaggtagccatttaagcaatcaggacgccgaaaacgagtccttgctctccgatgcgtctgaccaggtgtctgacatcaagtctgtttgcggacgcgacgcctctgacaaaaaggctcatacccacgtgaggttgcccaatgaggcccataactgtatggataagatgacagcagtgtatgccaacattctttcagattcatattggagcggccttggactcggttttaagctctccaatagcgagcgtagaaattgcgacacgcgtaacggaagtaacaaatccgacttcgactggcaccaggacgctctcagtaagtccttgcaacagaacctgcccagtcggtccgtttcaaagcccagtttgttcagctcagtccagttgtatcgacaatcttctaagatgtgtggaacagtcttcacgggggcatcccgattccggtgcaggcaatgcagtgcagcctatgataccctggttgaactgacggttcacatgaacgaaactgggcattaccaggacgataaccgcaaaaaagacaagctaaggcctaccagctacagcaagccgcgaaagcgggctttccaggacatggataaggaggacgcacagaaggttctgaagtgcatgttctgtggcgatagctttgactctttgcaggacctctctgtgcacatgattaagacgaagcactaccagaaggttccgctcaaagaaccagtacctaccatcagcagcaaaatggttaccccagccaagaagcgggtttttgatgtcaatcgtccttgtagccctgattctaccaccgggtcattcgctgattctttttccagccaaaaaaacgccaaccttcaattgagctcaaacaaccgatatggctaccaaaacggtgcttcctacacctggcagttcgaggcatgcaaatcccaaattttgaagtgcatggagtgcggaagtagccatgacactttacaacaactgaccactcatatgatggtgaccggccacttcctcaaagtgacctcttccgccagcaaaaaagggaagcagctggtgctcgacccactggccgtcgagaaaatgcagagcctctcagaggcacccaattccgactctctggcccctaagccctccagcaatagtgcctccgattgtactgcttccactaccgaacttaaaaaagagagtaagaaggaacgccctgaggagactagtaaggacgagaaagtggtaaagtcagaagattacgaggatccactgcagaaacctcttgacccgaccatcaagtatcagtacctacgcgaagaagatttagaggatggaagtaaagggggaggcgacatcctcaagagcctggagaatacggtgactacagctatcaacaaggctcagaatggcgctccttcctggtctgcttacccaagcatccatgccgcttaccagctgagcgaggggacaaagccacccctaccaatgggctcccaggtactgcagatcaggccgaatcttacaaacaaattgaggcctattgctccaaaatggaaggttatgccgctcgtaagtatgcctacacacctagcgccatatacacaggtgaaaaaggaaagcgaggacaaggatgaggcagtaaaagagtgcggaaaagagtcaccccatgaggaagctagctcctttagccactctgagggagacagttttcgcaagtcggaaactccacctgaggctaagaagaccgagttgggcccactgaaggaggaggaaaaacttatgaaggagggatcagagaaggagaaacctcagcctttggaacctacttcggcactgtctaatggttgtgcactcgccaaccacgcacccgcactcccctgtatcaatccactcagtgctcttcagtcggttctgaacaaccatttaggaaaagcaactgagcccctgaggagccctagttgctcctcccctagcagtagcaccatcagcatgtttcataagagtaacctcaacgtgatggataaaccagtactgtctccagcgagcaccagaagcgcttctgtgtcccggcgatacctgtttgagaattctgaccaacctatagacctaacgaagtcgaaatcaaaaaaagccgagtctagccaggcccagagctgtatgagtccaccacagaagcatgcattaagcgatatagctgacatggtcaaagttttgcctaaagctaccacacccaaacctgcttcatcgtcccgtgttccccctatgaagctggagatggacgtgcgcaggttcgaggatgtgagcagtgaggtgtccaccctccacaaacggaagggaagacaatccaactggaatccccagcatctactcattttacaggcacaattcgcgtcctcactgtttcagacatcggaaggaaagtatttgctatccgatctcggtccccaggagaggatgcagatatcaaaattcaccggactgtcgatgaccacgatttcgcactggcttgccaatgttaaatatcagctacgcaagacaggaggtaccaagtttctgaaaaatatggataagggtcatcctattttctactgctctgactgcgcttctcagttcaggacgccctcaacgtatatctctcatttggaatctcatttgggctttcagatgaaagatatgacacgcctgtccgttgaccagcaaagtaaggtggagcaggagatcagccgagttagcagcgcacagcggtctcctgagacaattgccgctgaggaagatacagacagcaaattcaagtgtaagttgtgctgcagaacattcgtgtccaagcatgccgttaaactccacttgtccaagacacattccaagagtcctgagcaccactctcaattcgtcacggatgtggatgaggagtag

SEQ ID NO: 250188 - DNA, 7935 bp, Artificial Sequence
  derived and/or modified sequence
gtgtgtgtgtgcgagggtgtgtgtgtgtgtttgtgtgtgtgtgcatatgtggggggtgtgagtgtgtgtgtgcgaggaagcgggggtgcgtgcgcgtgtgagtgcgtgtgtgagtgtctgtgtgtgtgtctgtgtgtgtgtgtgagtgagtgaattccagattttctgtctttccaaaacccgctcctgtcctctcgcatatcactcacagacggggatctgacagcagccacaaacctacagtgagtgatcgctctccccccggcacgaatccgccatagagatcggcgaggaggaggaggaggaggaggaagaaaagaaggaggaggtggaggaggaggtggaggaggaggaggaggagggaaagaggagaaggaagaagaagaaaaagaagaaacccactaccttcccaggattgccttttttttttccttatctttacgcgcgagtgtgcctgtggcgcgtgtgcgcccctcgtcccttccatccgaacccgggcttggatgtttaataaagaaatcaagtgtctcaacagtcaccaaaaaaaaaaaaaaccgcaaaaacaaaaccaaaaaaattccaaaagcaaaaacaaaaaagagagaggaaaaaaaattcaaaataaacaaacaaacaaacaaggcagaaccaacctctacttcaaagcagccggcacaagccacccgtgtctgccacccagagaggggggtctctggcccgtggtggaggagttgcaggggggatcgtcagggggacagaggccgagtgacgtcctaggagccaccgggcaagaggcggaggagacccagagaggccagagagacagcgggccccagcgcgcggctcggggctggggcgccagaagtgggactggagcgaagtagaggatgccgaggagaaaacagcaggcacccaagcgggcggcaggctacgcccaggaggaacagctgaaagaagaggaggaaataaaagaagaggaggaggaggaggacagcggttcagtagctcaactgcagggtggcaatgacacagggacggacgaggagctagaaacgggcccagagcaaaaaggctgcttcagctaccagaactctccaggaagtcatttgtccaatcaggatgccgagaacgagtctctgctgagtgacgccagtgatcaggtgtcggacatcaagagtgtctgcggcagagatgcctcagacaagaaagcacacactcacgtcaggcttccaaacgaagcacacaattgcatggataaaatgaccgctgtctacgccaacatcctgtcggattcctactggtcaggcctgggccttggcttcaagctgtccaatagtgagaggaggaactgtgacacccgaaacggcagcaacaagagtgattttgattggcaccaagacgctctgtccaaaagcctgcagcagaacttgccttctcggtccgtctcgaaacccagcctgttcagctcggtgcagttgtaccgacagagcagcaagatgtgcgggactgtgttcacaggggccagcagattccgatgccgacagtgcagcgcggcctatgacaccctagtcgagctgactgtgcacatgaatgaaacgggccactatcaagatgacaaccgcaaaaaggacaagctcagacccacgagctattcaaagcccaggaaaagggctttccaggatatggacaaagaggatgctcaaaaggttctgaaatgtatgttttgtggcgactcctttgattccctccaagatttgagcgtccacatgattaaaacaaaacattaccaaaaagtgcctttgaaggagccagtcccaaccatttcctcgaaaatggtcaccccggctaagaaacgcgtttttgatgtcaatcggccgtgttcccccgattcaaccacaggatcttttgcagattctttttcttctcagaagaacgccaacttgcagttgtcctccaacaaccgctatggctaccaaaatggagccagctacacctggcagtttgaggcctgcaagtcccagatcttaaagtgcatggagtgtgggagctcccatgacaccttgcagcagctcaccacccacatgatggtcacaggtcactttctcaaggtcaccagctctgcctccaagaaagggaagcagctggtattagacccgttagcagtggagaaaatgcagtcgttgtctgaggccccaaacagtgattctctggctcccaagccatccagtaactcagcatcagattgtacagcctctacaactgagttaaagaaagagagtaaaaaagaaaggccagaggaaaccagcaaggatgagaaagtcgtgaaaagcgaggactatgaagatcctctacaaaaacctttagaccctacaatcaaatatcaatacctaagggaggaagacttggaagatggctcaaagggtggaggggacattttgaaatctttggaaaatactgtcaccacagccatcaacaaagcccaaaacggggcccccagctggagtgcctaccccagcatccacgcagcctaccagctgtctgagggcaccaagccgcctttgcctatgggatcccaggtactgcagatccggcctaatctcaccaacaagctgaggcccattgcaccaaagtggaaagtgatgccactggtttctatgcccacacacctggccccttacactcaagtcaagaaagagtcagaagacaaagatgaagcggtgaaggagtgtgggaaagaaagtccccacgaagaggcctcatctttcagccacagtgagggcgattctttccgcaaaagtgaaacacctccagaagccaaaaagaccgagctgggtcccctgaaggaggaggagaagctgatgaaagagggcagcgagaaggagaaaccccagcccctggagcccacatctgctctgagcaatgggtgcgccctcgccaaccacgccccggccctgccatgcatcaacccactcagcgccctgcagtccgtcctgaacaatcacttgggcaaagccacggagcccttgcgctcaccttcctgctccagcccaagttcaagcacaatttccatgttccacaagtcgaatctcaatgtcatggacaagccggtcttgagtcctgcctccacaaggtcagccagcgtgtccaggcgctacctgtttgagaacagcgatcagcccattgacctgaccaagtccaaaagcaagaaagccgagtcctcgcaagcacaatcttgtatgtccccacctcagaagcacgctctgtctgacatcgccgacatggtcaaagtcctccccaaagccaccaccccaaagccagcctcctcctccagggtcccccccatgaagctggaaatggatgtcaggcgctttgaggatgtctccagtgaagtctcaactttgcataaaagaaaaggccggcagtccaactggaatcctcagcatcttctgattctacaagcccagtttgcctcgagcctcttccagacatcagagggcaaatacctgctgtctgatctgggcccacaagagcgtatgcaaatctctaagtttacgggactctcaatgaccactatcagtcactggctggccaacgtcaagtaccagcttaggaaaacgggcgggacaaaatttctgaaaaacatggacaaaggccaccccatcttttattgcagtgactgtgcctcccagttcagaaccccttctacctacatcagtcacttagaatctcacctgggtttccaaatgaaggacatgacccgcttgtcagtggaccagcaaagcaaggtggagcaagagatctcccgggtatcgtcggctcagaggtctccagaaacaatagctgccgaagaggacacagactctaaattcaagtgtaagttgtgctgtcggacatttgtgagcaaacatgcggtaaaactccacctaagcaaaacgcacagcaagtcacccgaacaccattcacagtttgtaacagacgtggatgaagaatagctctgcaggacgaatgccttagtttccactttccagcctggatcccctcacactgaacccttcttcgttgcaccatcctgcttctgacattgaactcattgaactcctcctgacaccctggctctgagaagactgccaaaaaaaaaaaaaaaaaaaaatcaccccagccatttctcttcatcctcactaacaatttggtaatgaagtattgatttccacttctctgcttatgggcggtattagattttcattgataaattgcaatggggctgtctcgtctccacagtacccttttcactgtcacaagaaaacaaagtgccaccgaagaaaagtaatgactgagagcattgatgtacttattttgtcagtttgtaacaggaaagtgggggggagtctaagtcttcatagtctaatgtccaagtgggttgcactagatgtagacacttggaggcttacttttcatggtaatgtccatttcctatttataacccctctgggaacgtttgtctaaaggaaatgtttctgttcagtgtaacaattacagttgcacctggattgcccagtcctgcccctgcactaggggaccattaatcactgcaaagtagaagaattattaagttaaaccagagtttgagccaagaaaacccctgaacaatgttcatcttctgtgaaacttgctcaaatagttaagcttaaccatgttgctgccaaagacttttcctatgcagtggtggggcaccttgatcatcatcattatcttgattggctgaaaaaaaaatagttttaagcacacaccactgtctatgagaactgcaaattgggagaataggtgaaatgcagaatctgagagaacgcgagaagatgagatcattacagggtggaaagttctgcagcagccttttctggtaatccctttctgcagaacctgatgtttatgggctctaaaacgcagcttagctttagaagcaacagaaagcatgaaatagggtgtccattttaaatgtgttcctgcaacttttttcattaaaactttgagggcccaattttaatttgtggaatattcccgttaataatgagatctaattaagacatccattaaaagcccgttaaagttaatttaacgtaaaaattccaatagaactgtattagattttctccattaaattaacgttatggatttttaacggatgtcttaattatacgttattattaacgggaatactgtattacacagattaaaatcaggtcctaagtcaacttggaagagctaagagcatgttttaatattaaaagtcttgcatacctagtgcacagtttggagacgcaaggatagatctgtttactctagttgaacattttctatacaattgaaagcaacctataatagataaatccatcattgcatttaaacaatgaatttccttattctcaaaggacaaatacgtctggattatgtggtaaattgctactcagctatggtgaaatatttatactattctaggcacaacactaggaactaggtgattctgaaacaaaaggaatattttctgttgttgctttaattaccaaggttatttttttttaatctcaacactgacaaaatgaaaccaaatatctcttcctcaccatttctcaaggaggctgcctgttggaattgttttggaaattttgacatgatccctaaattcaacattgggattaaaaaaaaaaaaaaacttcttatttacctcctagggaaagtgttgcccttatgccacatataatagcaaattgctttttttatggcatgcataacctagatgggaaaaaatatggcgcttcggggaaggagggaaaaagtaaatgaagttccaggaatgtcattctgaagtaatgaggcatggacagaaaatatacccctcacatcatcggattgagatggcagtcgaaatagcttcattgaagtgtcagcactcatccatcaatcaatcacccacaaggaaaaatagcaacagtacaacggggtggcttttatgggatttactcatgggcatagggaatagcggctcaaatgtagttctgacatgaaaagcaaggtgctgatattattttttatgatgggaggatcataaagtgaattgagaacagtgaggtctgtctttgcttaacctattcaaccagaaatgaatggagctcgactggaaaggaacagtcttcagatgggttaagattgaagggtggactggactctactgagcaccgtccttcaacaaggaaattctattaaaggaaaatcaatgcattagtattggggttctcgtagctgttaaaaattgtctgctccaatccagggttattaggccaaagttacataattcagatctcactgcaaccatccaaaagtggattctcgagcccttgctccaatggggggaggagatcaatacaattcccaattccatggaaattgtttcccttctaaggaagaaaaaataaatcatctgcttcaacatataatcgatatggttttgttagcgtaatttctatggtgggtggggtgggaggtgagagaaaaaaatattgataaatttggtaagacaggtgaattgccgcctggcaaccgtgcatgtcactgccgagggatggctgctaaggttcaccttagaaaacaagatctgggctggcactggggcatacatcaccactcagcatattcctagaggccaggcctgtcttcactcagccagccctctgaggcttctagaaacttctttctggaggaaaaaaactaaataacataaactcaggagaatgtctttacccaccttcataccactgctttctttttgctgaataaaacacagttctgataagtaagaactttagaattggaaaggaggctgacatgcaaatataatgcaaattaccctcaagtatcgccattcttccaccacctcttggtaccagtgagagcgagagattgccttttcttccccatccctccttccagctaagaccaccaaccagctgcaaattgagatgtccatttaaaaatttatatgtcaatatttaaatgttacatatttggccctattttgtagttcagcaaatcctccaaatacacagcatgttacaaggcactggtggcacagggcacaacaggaaatgatatttatttagcaaattcatttaacaaatattattgggcacctgttatgtgagacactgtcctaggcactgtgggataacaacagcaaacacttcacacaacagcctggccttcctgtgttttacaacagctcctaaagatagctgatatcaagacatttgagggacacagttcatgtagaatcaaaatattagtatttcagaataaggattttttttctgaaaagcatacagagaggaaacagcttaaaaataggtcaagacctaaaaacagaatataatcacggaataaactggataacccagacagtccccacagaatttctttcaggtcacagatttcttaaaactcacccccaaaatgtgcctgcttggttgtttgaatcttgcataattaatgtcacaggcgcaagccgctgaacttagttgagatgcagaaaacaaacaaatgcaatgacatatctgagaagcatttatgtaactccggttaagtggtgaggaggggtgtgtgaagacagtgtgcatgcatgagtgtgtattcatatatatgtgtatacatatgaatttcactgttattttccagggtctatggacaatgtggcagtaagagtctatgatgttctgaaacttttcacagtaaatccaaagattacagaccttacaaggtgcttgcattctgttgcttttccatctgtcacttctcaggttatttgactgtgttcaaaccttcttttctttttcattgagtttcattttttaagcttgttaaatgcttttgtttaaaaaaaaaaaaaaa

SEQ ID NO: 250189 - protein, 1290 aa, Artificial Sequence
  derived and/or modified sequence
MKASSCFLILAHSNPGELMEFFDEQVRSNNEAIRVGILTLLRLAVNADEPRLRDHIISIERTVKIVMGDLSTKVRNSVLLLIQTMCEKSYIEAREGWPLIDYVFSQFATLNRNLEKPVKTNFHENEKEEESVRETSLEVLKTLDPLVIGMPQVLWPRILTFVVPAEYTEALEPLFSIIRILIMAEEKKQHSAKESTALVVSTGAVKLPSPQQLLARLLVISMPASLGELRGAGAIGLLKILPEIIHPKLVDLWKTRLPELLQPLEGKNISTVLWETMLLQQLLKESLWKISDVAWTIQLTQDFKQQMGSYSNNSTEKKFLWKALGTTLACCQDSDFVNSQIKEFLTAPNQLGDQRQGITSILGYCAENHLDIVLKVLKTFQNQEKFFMNRCKSLFSGKKSLTKTDVMVIYGAVALHAPKKQLLSRLNQDIISQVLSLHGQCSQVLGMSVMNKDMDLQMSFTRSITEIGIAVQDAEDQGFQFSYKEMLIGYMLDFIRDEPLDSLASPIRWKALIAIRYLSKLKPQLSLQDHLNILEENIRRLLPLPPLENLKSEGQTDKDKEHIQFLYERSMDALGKLLKTMMWDNVNAEDCQEMFNLLQMWLVSQKEWERERAFQITAKVLTNDIEAPENFKIGSLLGLLAPHSCDTLPTIRQAAASSTIGLFYIKGIHLEVERLQGLQEGLESDDVQVQIKISSKIAKIVSKFIPNEEILMFLEEMLDGLESLNPTCTKACGIWMITVLKQQGAALEDQLLEILGTIYHHMPVLRQKEESFQFILEAISQIASFHMDTVVVNLLQKPLPFDRDTKTLWKALAEKPASSGKLLQALIDKLETELEDDIARVEAISVACAMYEVISMGTSVTGLYPELFTLLLKLVSCTLGQKMLTCPWSHRRHVMQQGEQQQIPDPCRLSTATLKCLQAQAMREGLAKESDEGDNLWTLLSSPSTHHIGVCSLARSMAVWQHGVILDIMEQLLSSLTSSSENYRITGAAFFSELMKEPILWKHGNLRNVLILMDQSAWDSNATLRQMAIRGLGNTASGAPHKVKKHKQLMLESIIRGLYHLARTEVVCESLKALKKILELLTDRDVSFYFKEIVLQTRTFFEDEQDDVRLTAIFLFEDLAPLTGRRWKIFFAEEIKKSLISFLLHLWDPNPKIGVACRDVLMVCIPFLGLQELYGVLDRLLDQDLPRARDFYRQFCVKLAKKNQEILWILHTHSFTFFTSTWEVIRSAAVKLTDAVVLNLTSQYVELLDREQLTTRLQALRQDPCISVQRAAEAALQTLLRRCKETSIPL

SEQ ID NO: 250190 - protein, 1585 aa, Artificial Sequence
  derived and/or modified sequence
MTLSTEESIEMFGDINLTLGMLNKEDIVNKEDIYSHLTSVIQNTDILDDAIVQRLIYYASKDMRDNNMLREIRMLAGEVLVSLAAHDFNSVMYEVQSNFRILELPDEFVVLALAELATSYVSQSIPFMMMTLLTMQTMLRLAEDERMKGTFCIALEKFSKAIYKYVNHWRDFPYPRLDANRLSDKIFMLFWYIMEKWAPLASPMQTLSIVKAHGPTVSLLLHREDFRGYALGQVPWLLNQYKDKEIDFHVTQSLKQILTAAVLYDIGLPRSLRRSIFINLLQQICRAPEPPVKENEMKASSCFLILAHSNPGELMEFFDEQVRSNNEAIRVGILTLLRLAVNADEPRLRDHIISIERTVKIVMGDLSTKVRNSVLLLIQTMCEKSYIEAREGWPLIDYVFSQFATLNRNLEKPVKTNFHENEKEEESVRETSLEVLKTLDPLVIGMPQVLWPRILTFVVPAEYTEALEPLFSIIRILIMAEEKKQHSAKESTALVVSTGAVKLPSPQQLLARLLVISMPASLGELRGAGAIGLLKILPEIIHPKLVDLWKTRLPELLQPLEGKNISTVLWETMLLQLLKESLWKISDVAWTIQLTQDFKQQMGSYSNNSTEKKFLWKALGTTLACCQDSDFVNSQIKEFLTAPNQLGDQRQGITSILGYCAENHLDIVLKVLKTFQNQEKFFMNRCKSLFSGKKSLTKTDVMVIYGAVALHAPKKQLLSRLNQDIISQVLSLHGQCSQVLGMSVMNKDMDLQMSFTRSITEIGIAVQDAEDQGFQFSYKEMLIGYMLDFIRDEPLDSLASPIRWKALIAIRYLSKLKPQLSLQDHLNILEENIRRLLPLPPLENLKSEGQTDKDKEHIQFLYERSMDALGKLLKTMMWDNVNAEDCQEMFNLLQMWLVSQKEWERERAFQITAKVLTNDIEAPENFKIGSLLGLLAPHSCDTLPTIRQAAASSTIGLFYIKGIHLEVERLQGLQEGLESDDVQVQIKISSKIAKIVSKFIPNEEILMFLEEMLDGLESLNPTCTKACGIWMITVLKQQGAALEDQLLEILGTIYHHMPVLRQKEESFQFILEAISQIASFHMDTVVVNLLQKPLPFDRDTKTLWKALAEKPASSGKLLQALIDKLETELEDDIARVEAISVACAMYEVISMGTSVTGLYPELFTLLLKLVSCTLGQKMLTCPWSHRRHVMQQGEQQQIPDPCRLSTATLKCLQAQAMREGLAKESDEGDNLWTLLSSPSTHHIGVCSLARSMAVWQHGVILDIMEQLLSSLTSSSENYRITGAAFFSELMKEPILWKHGNLRNVLILMDQSAWDSNATLRQMAIRGLGNTASGAPHKVKKHKQLMLESIIRGLYHLARTEVVCESLKALKKILELLTDRDVSFYFKEIVLQTRTFFEDEQDDVRLTAIFLFEDLAPLTGRRWKIFFAEEIKKSLISFLLHLWDPNPKIGVACRDVLMVCIPFLGLQELYGVLDRLLDQDLPRARDFYRQFCVKLAKKNQEILWILHTHSFTFFTSTWEVIRSAAVKLTDAVVLNLTSQYVELLDREQLTTRLQALRQDPCISVQRAAEAALQTLLRRCKETSIPL

SEQ ID NO: 250191 - DNA, 3873 bp, Artificial Sequence
  derived and/or modified sequence
atgaaggccagcagctgcttcctgatcctggcccacagcaaccccggcgagctgatggagttcttcgacgagcaggtgagaagcaacaacgaggccatcagagtgggcatcctgaccctgctgagactggccgtgaacgccgacgagcccagactgagagaccacatcatcagcatcgagagaaccgtgaagatcgtgatgggcgacctgagcaccaaggtgagaaacagcgtgctgctgctgatccagaccatgtgcgagaagagctacatcgaggccagagagggctggcccctgatcgactacgtgttcagccagttcgccaccctgaacagaaacctggagaagcccgtgaagaccaacttccacgagaacgagaaggaggaggagagcgtgagagagaccagcctggaggtgctgaagaccctggaccccctggtgatcggcatgccccaggtgctgtggcccagaatcctgaccttcgtggtgcccgccgagtacaccgaggccctggagcccctgttcagcatcatcagaatcctgatcatggccgaggagaagaagcagcacagcgccaaggagagcaccgccctggtggtgagcaccggcgccgtgaagctgcccagcccccagcagctgctggccagactgctggtgatcagcatgcccgccagcctgggcgagctgagaggcgccggcgccatcggcctgctgaagatcctgcccgagatcatccaccccaagctggtggacctgtggaagaccagactgcccgagctgctgcagcccctggagggcaagaacatcagcaccgtgctgtgggagaccatgctgctgcagcagctgctgaaggagagcctgtggaagatcagcgacgtggcctggaccatccagctgacccaggacttcaagcagcagatgggcagctacagcaacaacagcaccgagaagaagttcctgtggaaggccctgggcaccaccctggcctgctgccaggacagcgacttcgtgaacagccagatcaaggagttcctgaccgcccccaaccagctgggcgaccagagacagggcatcaccagcatcctgggctactgcgccgagaaccacctggacatcgtgctgaaggtgctgaagaccttccagaaccaggagaagttcttcatgaacagatgcaagagcctgttcagcggcaagaagagcctgaccaagaccgacgtgatggtgatctacggcgccgtggccctgcacgcccccaagaagcagctgctgagcagactgaaccaggacatcatcagccaggtgctgagcctgcacggccagtgcagccaggtgctgggcatgagcgtgatgaacaaggacatggacctgcagatgagcttcaccagaagcatcaccgagatcggcatcgccgtgcaggacgccgaggaccagggcttccagttcagctacaaggagatgctgatcggctacatgctggacttcatcagagacgagcccctggacagcctggccagccccatcagatggaaggccctgatcgccatcagatacctgagcaagctgaagccccagctgagcctgcaggaccacctgaacatcctggaggagaacatcagaagactgctgcccctgccccccctggagaacctgaagagcgagggccagaccgacaaggacaaggagcacatccagttcctgtacgagagaagcatggacgccctgggcaagctgctgaagaccatgatgtgggacaacgtgaacgccgaggactgccaggagatgttcaacctgctgcagatgtggctggtgagccagaaggagtgggagagagagagagccttccagatcaccgccaaggtgctgaccaacgacatcgaggcccccgagaacttcaagatcggcagcctgctgggcctgctggccccccacagctgcgacaccctgcccaccatcagacaggccgccgccagcagcaccatcggcctgttctacatcaagggcatccacctggaggtggagagactgcagggcctgcaggagggcctggagagcgacgacgtgcaggtgcagatcaagatcagcagcaagatcgccaagatcgtgagcaagttcatccccaacgaggagatcctgatgttcctggaggagatgctggacggcctggagagcctgaaccccacctgcaccaaggcctgcggcatctggatgatcaccgtgctgaagcagcagggcgccgccctggaggaccagctgctggagatcctgggcaccatctaccaccacatgcccgtgctgagacagaaggaggagagcttccagttcatcctggaggccatcagccagatcgccagcttccacatggacaccgtggtggtgaacctgctgcagaagcccctgcccttcgacagagacaccaagaccctgtggaaggccctggccgagaagcccgccagcagcggcaagctgctgcaggccctgatcgacaagctggagaccgagctggaggacgacatcgccagagtggaggccatcagcgtggcctgcgccatgtacgaggtgatcagcatgggcaccagcgtgaccggcctgtaccccgagctgttcaccctgctgctgaagctggtgagctgcaccctgggccagaagatgctgacctgcccctggagccacagaagacacgtgatgcagcagggcgagcagcagcagatccccgacccctgcagactgagcaccgccaccctgaagtgcctgcaggcccaggccatgagagagggcctggccaaggagagcgacgagggcgacaacctgtggaccctgctgagcagccccagcacccaccacatcggcgtgtgcagcctggccagaagcatggccgtgtggcagcacggcgtgatcctggacatcatggagcagctgctgagcagcctgaccagcagcagcgagaactacagaatcaccggcgccgccttcttcagcgagctgatgaaggagcccatcctgtggaagcacggcaacctgagaaacgtgctgatcctgatggaccagagcgcctgggacagcaacgccaccctgagacagatggccatcagaggcctgggcaacaccgccagcggcgccccccacaaggtgaagaagcacaagcagctgatgctggagagcatcatcagaggcctgtaccacctggccagaaccgaggtggtgtgcgagagcctgaaggccctgaagaagatcctggagctgctgaccgacagagacgtgagcttctacttcaaggagatcgtgctgcagaccagaaccttcttcgaggacgagcaggacgacgtgagactgaccgccatcttcctgttcgaggacctggcccccctgaccggcagaagatggaagatcttcttcgccgaggagatcaagaagagcctgatcagcttcctgctgcacctgtgggaccccaaccccaagatcggcgtggcctgcagagacgtgctgatggtgtgcatccccttcctgggcctgcaggagctgtacggcgtgctggacagactgctggaccaggacctgcccagagccagagacttctacagacagttctgcgtgaagctggccaagaagaaccaggagatcctgtggatcctgcacacccacagcttcaccttcttcaccagcacctgggaggtgatcagaagcgccgccgtgaagctgaccgacgccgtggtgctgaacctgaccagccagtacgtggagctgctggacagagagcagctgaccaccagactgcaggccctgagacaggacccctgcatcagcgtgcagagagccgccgaggccgccctgcagaccctgctgagaagatgcaaggagaccagcatccccctgtag

SEQ ID NO: 250192 - DNA, 4758 bp, Artificial Sequence
  derived and/or modified sequence
atgaccctgagcaccgaggagagcatcgagatgttcggcgacatcaacctgaccctgggcatgctgaacaaggaggacatcgtgaacaaggaggacatctacagccacctgaccagcgtgatccagaacaccgacatcctggacgacgccatcgtgcagagactgatctactacgccagcaaggacatgagagacaacaacatgctgagagagatcagaatgctggccggcgaggtgctggtgagcctggccgcccacgacttcaacagcgtgatgtacgaggtgcagagcaacttcagaatcctggagctgcccgacgagttcgtggtgctggccctggccgagctggccaccagctacgtgagccagagcatccccttcatgatgatgaccctgctgaccatgcagaccatgctgagactggccgaggacgagagaatgaagggcaccttctgcatcgccctggagaagttcagcaaggccatctacaagtacgtgaaccactggagagacttcccctaccccagactggacgccaacagactgagcgacaagatcttcatgctgttctggtacatcatggagaagtgggcccccctggccagccccatgcagaccctgagcatcgtgaaggcccacggccccaccgtgagcctgctgctgcacagagaggacttcagaggctacgccctgggccaggtgccctggctgctgaaccagtacaaggacaaggagatcgacttccacgtgacccagagcctgaagcagatcctgaccgccgccgtgctgtacgacatcggcctgcccagaagcctgagaagaagcatcttcatcaacctgctgcagcagatctgcagagcccccgagccccccgtgaaggagaacgagatgaaggccagcagctgcttcctgatcctggcccacagcaaccccggcgagctgatggagttcttcgacgagcaggtgagaagcaacaacgaggccatcagagtgggcatcctgaccctgctgagactggccgtgaacgccgacgagcccagactgagagaccacatcatcagcatcgagagaaccgtgaagatcgtgatgggcgacctgagcaccaaggtgagaaacagcgtgctgctgctgatccagaccatgtgcgagaagagctacatcgaggccagagagggctggcccctgatcgactacgtgttcagccagttcgccaccctgaacagaaacctggagaagcccgtgaagaccaacttccacgagaacgagaaggaggaggagagcgtgagagagaccagcctggaggtgctgaagaccctggaccccctggtgatcggcatgccccaggtgctgtggcccagaatcctgaccttcgtggtgcccgccgagtacaccgaggccctggagcccctgttcagcatcatcagaatcctgatcatggccgaggagaagaagcagcacagcgccaaggagagcaccgccctggtggtgagcaccggcgccgtgaagctgcccagcccccagcagctgctggccagactgctggtgatcagcatgcccgccagcctgggcgagctgagaggcgccggcgccatcggcctgctgaagatcctgcccgagatcatccaccccaagctggtggacctgtggaagaccagactgcccgagctgctgcagcccctggagggcaagaacatcagcaccgtgctgtgggagaccatgctgctgcagctgctgaaggagagcctgtggaagatcagcgacgtggcctggaccatccagctgacccaggacttcaagcagcagatgggcagctacagcaacaacagcaccgagaagaagttcctgtggaaggccctgggcaccaccctggcctgctgccaggacagcgacttcgtgaacagccagatcaaggagttcctgaccgcccccaaccagctgggcgaccagagacagggcatcaccagcatcctgggctactgcgccgagaaccacctggacatcgtgctgaaggtgctgaagaccttccagaaccaggagaagttcttcatgaacagatgcaagagcctgttcagcggcaagaagagcctgaccaagaccgacgtgatggtgatctacggcgccgtggccctgcacgcccccaagaagcagctgctgagcagactgaaccaggacatcatcagccaggtgctgagcctgcacggccagtgcagccaggtgctgggcatgagcgtgatgaacaaggacatggacctgcagatgagcttcaccagaagcatcaccgagatcggcatcgccgtgcaggacgccgaggaccagggcttccagttcagctacaaggagatgctgatcggctacatgctggacttcatcagagacgagcccctggacagcctggccagccccatcagatggaaggccctgatcgccatcagatacctgagcaagctgaagccccagctgagcctgcaggaccacctgaacatcctggaggagaacatcagaagactgctgcccctgccccccctggagaacctgaagagcgagggccagaccgacaaggacaaggagcacatccagttcctgtacgagagaagcatggacgccctgggcaagctgctgaagaccatgatgtgggacaacgtgaacgccgaggactgccaggagatgttcaacctgctgcagatgtggctggtgagccagaaggagtgggagagagagagagccttccagatcaccgccaaggtgctgaccaacgacatcgaggcccccgagaacttcaagatcggcagcctgctgggcctgctggccccccacagctgcgacaccctgcccaccatcagacaggccgccgccagcagcaccatcggcctgttctacatcaagggcatccacctggaggtggagagactgcagggcctgcaggagggcctggagagcgacgacgtgcaggtgcagatcaagatcagcagcaagatcgccaagatcgtgagcaagttcatccccaacgaggagatcctgatgttcctggaggagatgctggacggcctggagagcctgaaccccacctgcaccaaggcctgcggcatctggatgatcaccgtgctgaagcagcagggcgccgccctggaggaccagctgctggagatcctgggcaccatctaccaccacatgcccgtgctgagacagaaggaggagagcttccagttcatcctggaggccatcagccagatcgccagcttccacatggacaccgtggtggtgaacctgctgcagaagcccctgcccttcgacagagacaccaagaccctgtggaaggccctggccgagaagcccgccagcagcggcaagctgctgcaggccctgatcgacaagctggagaccgagctggaggacgacatcgccagagtggaggccatcagcgtggcctgcgccatgtacgaggtgatcagcatgggcaccagcgtgaccggcctgtaccccgagctgttcaccctgctgctgaagctggtgagctgcaccctgggccagaagatgctgacctgcccctggagccacagaagacacgtgatgcagcagggcgagcagcagcagatccccgacccctgcagactgagcaccgccaccctgaagtgcctgcaggcccaggccatgagagagggcctggccaaggagagcgacgagggcgacaacctgtggaccctgctgagcagccccagcacccaccacatcggcgtgtgcagcctggccagaagcatggccgtgtggcagcacggcgtgatcctggacatcatggagcagctgctgagcagcctgaccagcagcagcgagaactacagaatcaccggcgccgccttcttcagcgagctgatgaaggagcccatcctgtggaagcacggcaacctgagaaacgtgctgatcctgatggaccagagcgcctgggacagcaacgccaccctgagacagatggccatcagaggcctgggcaacaccgccagcggcgccccccacaaggtgaagaagcacaagcagctgatgctggagagcatcatcagaggcctgtaccacctggccagaaccgaggtggtgtgcgagagcctgaaggccctgaagaagatcctggagctgctgaccgacagagacgtgagcttctacttcaaggagatcgtgctgcagaccagaaccttcttcgaggacgagcaggacgacgtgagactgaccgccatcttcctgttcgaggacctggcccccctgaccggcagaagatggaagatcttcttcgccgaggagatcaagaagagcctgatcagcttcctgctgcacctgtgggaccccaaccccaagatcggcgtggcctgcagagacgtgctgatggtgtgcatccccttcctgggcctgcaggagctgtacggcgtgctggacagactgctggaccaggacctgcccagagccagagacttctacagacagttctgcgtgaagctggccaagaagaaccaggagatcctgtggatcctgcacacccacagcttcaccttcttcaccagcacctgggaggtgatcagaagcgccgccgtgaagctgaccgacgccgtggtgctgaacctgaccagccagtacgtggagctgctggacagagagcagctgaccaccagactgcaggccctgagacaggacccctgcatcagcgtgcagagagccgccgaggccgccctgcagaccctgctgagaagatgcaaggagaccagcatccccctgtag

SEQ ID NO: 250193 - DNA, 3873 bp, Artificial Sequence
  derived and/or modified sequence
atgaaagcatcctcatgtttcctgatcctagcacatagcaatccgggagagttgatggaatttttcgacgagcaggtgcgcagcaacaacgaagcgataagagtgggcattctgacgctactgcgcctggcagttaatgccgacgaacctcgcctgcgcgaccacataatatcaattgaaagaacggtgaagattgtcatgggtgatttgtctaccaaagtaagaaattccgtcctcctgttgatccagaccatgtgtgagaagagctacatcgaagctcgcgaaggctggccacttatcgattacgtttttagccagtttgccaccctgaacaggaatttggaaaagccagtcaagacaaatttccacgaaaacgaaaaggaggaggaatccgtgagagaaacaagcctggaagttctgaaaaccttggatcctctagttatcggcatgccccaagtactctggccaaggatcctaacctttgtcgtgccagcagaatacaccgaggcattagagcctctgttctctattatacggatccttatcatggctgaggagaagaagcagcactcagccaaggagtcaacagccctggtggtgtctaccggcgccgtcaagctgccatctcctcagcagctactcgcgcggcttctggttattagcatgcccgccagccttggggagttgaggggagccggagctatcggcctactgaagattctccctgaaatcattcacccaaaactcgtcgacctgtggaaaacacgcttacctgagctcctgcagcctcttgaaggaaaaaatataagcacagttctctgggaaacaatgctgttgcagcagcttcttaaggaatccctctggaagatctcggatgtagcttggactatccagcttacgcaggatttcaagcagcagatgggatcctatagcaataactccaccgaaaaaaagttcctgtggaaggcactcggtacaactctggcttgttgtcaggacagcgacttcgtgaattcccagattaaagagtttcttacagcccccaatcaactcggtgatcagcgacagggcattacatccatcctggggtactgcgcagaaaaccacctcgacatcgtgttgaaagtcctaaaaaccttccaaaaccaggagaagttcttcatgaaccggtgtaagagtttgttttccggtaagaaaagcctgacgaaaaccgacgttatggtgatctacggtgcagtggctcttcatgcccctaagaagcaactactgtctagactcaaccaggatatcatttctcaggtgctctcactgcatggacagtgtagccaggtgctgggaatgtcagttatgaacaaggatatggatttgcagatgagctttacaagatccattaccgagataggaatcgccgtacaggacgctgaagatcaggggttccagttttcctacaaagagatgctgatcggatatatgctggacttcataagagatgagcccctcgatagcctggcttcccctataaggtggaaagccctgattgccatccgctacctaagtaagctcaaaccgcagctgagtctgcaggatcatctgaatatcttggaggagaacatccgccgcctcctgcctcttccacccctggaaaacctaaagtctgagggtcaaaccgacaaggataaggagcatatccaatttctctacgagcgttcaatggatgcactgggtaaactcttgaaaactatgatgtgggataatgttaatgccgaggattgccaggagatgtttaacctgttacagatgtggctcgtaagtcagaaagagtgggagcgcgagcgagcctttcagattactgctaaagtattgacaaacgacatcgaagcacccgaaaactttaaaatcggcagcttgcttggactgctggccccccacagttgtgatacactccctacaattagacaggcagcggccagtagtaccattgggcttttctacatcaaagggatccacctggaggtcgaacgcctgcaaggtttacaggaagggctggagagtgacgacgtacaggttcaaattaagatttcttcaaagatcgctaagatcgtgtctaaatttatccctaatgaagagatactaatgtttctggaggaaatgctcgatggcctggaaagcttgaatcccacctgcacaaaggcctgtggtatctggatgattaccgtactgaagcagcaaggagccgcacttgaagaccagctgcttgaaatattgggcactatatatcatcacatgccagtcctgcgccagaaggaagagtcatttcagtttattctcgaggccattagccaaatagcttccttccatatggacactgttgtggtcaatcttcttcagaagcctctgccattcgaccgcgacacaaagactctgtggaaagcactggctgagaaacccgcgagctctggcaagttgctgcaggcgttaatcgataagctggagaccgaactggaggatgacattgcccgcgtcgaagccatttctgttgcatgcgccatgtatgaggtgattagcatgggaaccagcgtgactggcctgtaccctgaactttttacattgttgctgaagctcgtctcctgcaccctaggtcagaagatgctgacttgcccctggtcacacagacggcacgtgatgcagcaaggcgaacagcagcagataccagatccctgccggcttagcaccgcaactctcaaatgcctgcaggcccaagccatgcgcgagggcctggcgaaggaatctgacgaaggcgacaacctgtggaccttactgagtagcccaagtacccatcatatcggcgtgtgcagcctggcccggtcgatggcagtatggcagcatggagtgatcctggacatcatggagcaattgctctcaagtcttacaagctcatccgaaaattatcgtattacaggggccgccttcttcagtgagctcatgaaagaacccatcctttggaaacatggcaaccttagaaatgtgttgatcctgatggatcaaagcgcctgggactctaatgctaccttacggcagatggcgattagagggctcggaaacacggcttctggcgcgcctcacaaagtcaagaagcacaagcagctcatgcttgaaagcatcattagaggcctttatcacctggcacggacagaagtggtgtgcgagagtcttaaggctctgaagaaaatcttagagctcttgaccgatcgcgatgtgagcttctactttaaggagatcgtgttacaaactcgaacattcttcgaagacgagcaggacgatgtccgtctaaccgccattttcctcttcgaggatctggctccacttactgggaggcgatggaagattttctttgcggaagagatcaagaaatcccttatcagtttcctgctccacttgtgggatcctaatcccaagattggcgtggcttgtcgcgatgttttgatggtatgcataccctttttaggccttcaagagctgtacggagtactggaccgcctgctggatcaggaccttcctagagcaagagacttttacaggcagttttgcgttaagcttgccaaaaagaatcaggaaattctttggatcctccacacgcattctttcaccttcttcacgtcaacatgggaggtgatcaggtccgctgctgttaaactgacagatgctgttgtactaaacttgacttcccagtatgtggaactcctcgatagggaacagttgacaacacgcctccaggctctccgccaggatccttgtatatccgtgcagcgggcagcagaggctgctcttcagaccctattgagacgctgtaaagagacatcaatccctctctag

SEQ ID NO: 250194 - DNA, 4758 bp, Artificial Sequence
  derived and/or modified sequence
atgaccttgagcacggaggaatccatagagatgtttggcgatataaacttgactctcggtatgttaaacaaggaagatatcgtgaataaagaggacatctacagccatctgaccagcgtcatacagaatacagatattctggatgacgccatagtccagcggctgatatactacgccagcaaggacatgcgagacaacaatatgctgcgcgaaattcgtatgctggctggcgaggtgctggtcagtctggcggcacatgattttaattcagtgatgtatgaggtacaaagcaactttagaatcctggaactgccagacgagtttgtcgtcctggccctcgctgagctagctacttcttacgtgtctcaaagcattcctttcatgatgatgacgcttctcacaatgcagactatgctgcggcttgccgaggacgaaagaatgaaggggacgttttgcattgccctagaaaagttctcgaaagccatctacaaatatgtcaaccactggcgtgactttccttacccaaggctcgatgctaataggttgagtgacaaaattttcatgctcttctggtatattatggagaagtgggccccactagcctcgcctatgcagacactcagcatcgtaaaagctcatgggcccacggtcagtctgctgcttcacagagaagatttccgggggtatgccctcggtcaagttccctggcttctaaaccagtacaaggacaaagaaatagacttccacgtgactcagtctttgaagcagattctgaccgctgcagttctgtatgatatcggacttccccggagtctgcgtcgtagtatctttattaatctgttgcaacagatttgcagggctcctgagcccccggtgaaagagaatgaaatgaaagccagttcctgctttctgattttggcacactccaatcctggcgaactgatggaattctttgacgaacaggtgcggagcaataatgaggctatccgagtcggtatcttaactctgctaagactggcagtcaacgccgatgagccccggctgagagatcatatcatatcaatagagcggacagtcaaaattgttatgggggatttatctaccaaggtcaggaacagtgtactacttttgattcagaccatgtgtgagaaaagttacattgaggcaagggagggctggccactgatcgactacgtgttctcgcagtttgcaacccttaataggaaccttgaaaagccagtcaagacgaacttccatgaaaatgagaaagaggaagaaagcgttcgagagactagcttggaagtgttaaaaacgctggatcctctggttatcggaatgccccaggttctgtggccccggattctgaccttcgtcgtgccagcagaatacaccgaagcactggagcccctctttagtatcattagaatcctgataatggcggaggaaaagaaacagcactcagctaaagagagcaccgccctggtagtgtcaacaggcgccgttaaattgccatcacctcagcagcttctagcgaggttgctggtaatctcgatgccggcttctcttggagaacttaggggcgcaggtgccatcggactgctgaagattctgcccgagataatccatccaaagctagtagacttatggaaaacccgcctgccagagctcctgcagcctctggagggtaaaaacataagcactgtgctctgggagaccatgcttctccagctcctcaaggagtctctctggaaaatttctgatgtggcttggacaatccagctcactcaggacttcaaacaacagatggggagctacagtaacaactccaccgagaaaaagtttctctggaaggctctcggaactaccctggcttgttgccaagacagcgactttgtgaatagtcagatcaaggaatttctgacagcccctaaccagctgggtgaccaaagacaagggatcacaagcatcctaggatattgcgcggaaaaccacctcgacatcgtgctgaaggtgctgaaaacctttcagaatcaggagaaattcttcatgaataggtgcaaatcactcttctcaggcaagaagtccctcacgaagactgacgtgatggttatttatggcgcggtggcgttgcacgccccaaagaagcagctattatcccgcttgaaccaggacatcattagccaggtgctctcactccatgggcagtgtagccaggtgctgggaatgagcgttatgaataaagacatggatttgcagatgtcatttacacggagcatcaccgagattgggatcgctgtacaggacgccgaggatcagggattccagttcagctacaaggagatgctgatcggctacatgctggatttcattcgggacgaacccctcgattcacttgcgagccctatcagatggaaggcactaatagctatccggtacctttcaaagctgaagccacaactgagcctgcaggatcatctgaacattctggaggaaaacatacggcgtctgctccctttgcctcctctagagaatttaaaatccgaggggcagaccgacaaggataaagagcacatccagttcctgtacgagagatcaatggatgccctggggaagctgcttaaaacaatgatgtgggacaatgtgaacgcggaggattgccaggagatgttcaacttactgcagatgtggctggtgtctcaaaaagaatgggagcgcgaaagggcattccagattaccgccaaggtgctcactaacgacattgaagctcccgaaaacttcaagatcggtagcctgttggggctgttagctcctcactcctgtgacacgttgcctactatcagacaggctgctgctagtagcaccatcgggctgttttacattaagggaatccatctcgaggtggaacgtcttcaggggctccaggagggcttggagtcggatgacgtgcaggtgcagataaaaattagctcaaaaatcgcaaaaattgtgtccaagtttattcccaacgaagaaatactcatgtttctcgaagagatgctcgatggattggaaagtctcaaccctacctgtaccaaggcatgtggaatttggatgatcacagtgctgaaacagcagggcgcagcactggaagaccagctgctggagattctcgggacaatctatcaccatatgcctgtgctcagacagaaggaagaaagcttccaatttatactggaggccatatcacagatcgcctcgttccacatggacacggtggtagtaaatttactccaaaaaccactacctttcgacagagatactaaaaccctgtggaaggcacttgcggaaaagcccgccagtagtgggaaacttttacaagctcttatcgataaactggaaacggagttagaagatgatatcgctcgggttgaggccatcagcgtcgcctgcgctatgtatgaagtgatatccatgggcacttctgtgactggattatatccagagctgttcacgctgctcctaaagctagtttcctgcacactcggtcagaagatgctcacttgcccctggagccatcggcggcacgtcatgcaacagggagagcagcagcagattccagacccctgccgactttctacagccacactcaagtgcctacaggcgcaggcaatgcgagagggactggccaaggagagcgacgagggggataatctgtggaccctcctgtcttcaccatccacccaccatatcggagtctgctcacttgccaggtcaatggctgtgtggcagcacggcgttatactggatattatggaacagctcctttcatccctaacgtcttccagcgagaactacagaattactggggccgccttttttagcgagctcatgaaggaacctattctgtggaaacacggcaacctccgtaacgttcttatcctcatggatcaatctgcctgggattccaatgccaccttaagacagatggccattcggggcttaggaaataccgctagcggagcacctcacaaagttaagaaacataagcagctgatgcttgagagcattattaggggcctttatcatctggccaggacagaagtcgtttgcgaatcccttaaagccctgaagaaaatcttagagttgctgactgaccgggatgtgtctttttactttaaagagattgttttgcaaacccggacctttttcgaggatgagcaggatgacgtgcgcctgactgcgattttcctgtttgaggatctggccccactcaccggccgccgatggaaaatattttttgccgaggaaattaagaagagcctgattagcttcctactccatttatgggaccccaaccccaaaatcggtgtggcttgtcgggacgtgctgatggtctgcatcccttttctgggtctgcaggagctgtacggtgtgcttgaccgcctactggatcaagacctcccccgggccagagatttttaccggcaattctgcgtgaagctcgctaagaaaaatcaggagatcttatggatcctccatactcattcttttacttttttcacgagcacctgggaggtcatccggagtgcagctgtcaagctgaccgatgccgtggtgctgaacctgaccagccaatatgtcgagttgctggatcgtgagcagttgactactcggctccaggcccttcgccaagacccctgtatctccgtccagcgcgccgctgaggctgcgctgcagacactgctaaggaggtgtaaggaaacttctattcctctctag

SEQ ID NO: 250195 - DNA, 3873 bp, Artificial Sequence
  derived and/or modified sequence
atgaaggccagcagctgcttcctgatcctggcccacagcaaccctggagagctgatggagttctttgatgagcaggtgcgcagcaacaatgaggccatccgggtgggcatcctgaccctgctgcggctggccgtgaatgctgatgagccccggctgcgggaccacatcatcagcattgaaagaacagtgaagatcgtgatgggagacctgagcaccaaggtgagaaattctgtgctgctgctgatccagaccatgtgtgagaagagctacatcgaggcccgggagggctggcccctgattgattatgtgttcagccagtttgccaccctgaacagaaacctggagaagcctgtgaagaccaacttccatgaaaatgagaaggaggaggagagcgtgcgggagaccagcctggaggtgctgaagaccctggaccccctggtgattggcatgccccaggtgctgtggccccgcatcctgacctttgtggtgcctgctgagtacacagaggccctggagcccctcttcagcatcatccgcatcctgatcatggccgaggagaagaagcagcacagcgccaaggagagcacagccctggtggtgtccactggagctgtgaagctgcccagcccccagcagctgctggcccggctgctggtgatctccatgcctgccagcctgggggagctgcggggggccggggccatcggcctgctgaagatcctgcctgagatcatccaccccaagctggtggacctgtggaagacccggctgcctgagctgctgcagcccctggagggcaagaacatcagcacagtgctgtgggagaccatgctgctgcagcagctgctgaaggagagcctgtggaagatcagtgatgtggcctggaccatccagctgacccaggacttcaagcagcagatgggcagctacagcaacaacagcacagagaagaagttcctgtggaaggccctgggcaccaccctggcctgctgccaggacagcgactttgtgaacagccagatcaaggagttcctgacagcccccaaccagctgggggaccagaggcagggcatcaccagcatcctgggctactgtgccgagaaccacctggacatcgtgctgaaggtgctgaagaccttccagaaccaggagaagttcttcatgaaccgctgcaagagcctcttcagcggcaagaagagcctgaccaagacagatgtgatggtgatctacggggctgtggccctgcacgcccccaagaagcagctgctgagccggctgaaccaggacatcatcagccaggtgctgagcctgcacggccagtgcagccaggtgctgggcatgtctgtgatgaacaaggacatggacctgcagatgtccttcaccaggagcatcacagaaattggaattgctgtgcaggatgctgaggaccagggcttccagttctcctacaaggagatgctgattggctacatgctggacttcatcagagatgagcccctggacagcctggccagccccatccgctggaaggccctgattgccatccgctacctgagcaagctgaagccccagctgagcctgcaggaccacctgaacatcctggaggagaacatccggcggctgctgcccctgccccccctggagaacctgaagtctgagggccagacagacaaggacaaggagcacatccagttcctgtatgaaagatccatggatgccctgggcaagctgctgaagaccatgatgtgggacaacgtgaatgctgaggactgccaggagatgttcaacctgctgcagatgtggctggtgtcccagaaggagtgggagcgggagcgggccttccagatcacagccaaggtgctgaccaatgacatcgaggcccctgagaacttcaagattggcagcctgctgggcctgctggccccccacagctgtgacaccctgcccaccatccggcaggccgccgccagcagcaccatcggcctcttctacatcaagggcatccacctggaggtggagcggctgcagggcctgcaggagggcctggagagtgatgatgtgcaggtgcagatcaagatcagcagcaagatcgccaagatcgtgtccaagttcatccccaatgaggagatcctgatgttcctggaggagatgctggatggcctggagagcctgaaccccacctgcaccaaggcctgtggcatctggatgatcaccgtgctgaagcagcagggcgccgccctggaggaccagctgctggagatcctgggcaccatctaccaccacatgcctgtgctgcggcagaaggaggagagcttccagttcatcctggaggccatcagccagatcgccagcttccacatggacacagtggtggtgaacctgctgcagaagcccctgccctttgaccgggacaccaagaccctgtggaaggccctggccgagaagccagccagcagcggcaagctgctgcaggccctgattgacaagctggagacagagctggaggatgacatcgcccgggtggaggccatctctgtggcctgtgccatgtatgaagtcatctccatgggcacctctgtgacaggcctgtacccagagctgttcaccctgctgctgaagctggtgtcctgcaccctgggccagaagatgctgacctgcccctggagccacagaagacatgtgatgcagcagggcgagcagcagcagatcccagacccctgccgcctgagcacagccaccctgaagtgcctgcaggcccaggccatgagggagggcctggccaaggagagtgatgaaggagacaacctgtggaccctgctgagcagccccagcacccaccacatcggcgtgtgcagcctggcccgctccatggctgtgtggcagcacggcgtcatcctggacatcatggagcagctgctgagcagcctgaccagcagcagcgagaactaccgcatcaccggggccgccttcttcagcgagctgatgaaggagcccatcctgtggaagcacggcaacctgagaaatgtgctgatcctgatggaccagagcgcctgggacagcaatgccaccctgcggcagatggccatccggggcctgggcaacacagccagcggggccccccacaaggtgaagaagcacaagcagctgatgctggagagcatcatccggggcctgtaccacctggccaggacagaggtggtgtgtgagagcctgaaggccctgaagaagatcctggagctgctgacagacagagatgtgtccttctacttcaaggagatcgtgctgcagaccaggaccttctttgaagatgagcaggatgatgtgcggctgacagccatcttcctgtttgaggacctggcccccctgactggaagacgctggaagatcttctttgctgaggagatcaagaagagcctcatctccttcctgctgcacctgtgggaccccaaccccaagattggagtggcctgcagagatgtgctgatggtgtgcatccccttcctgggcctgcaggagctgtatggagtgctggaccggctgctggaccaggacctgccccgggcccgggacttctaccggcagttctgtgtgaagctggccaagaagaaccaggagatcctgtggatcctgcacacccacagcttcaccttcttcaccagcacctgggaggtgatccgctctgctgctgtgaagctgacagatgctgtggtgctgaacctgaccagccagtatgtggagctgctggaccgggagcagctgaccacccggctgcaggccctgcggcaggacccctgcatctctgtgcagagagctgctgaggccgccctgcagaccctgctgcggcgctgcaaggagaccagcatccccctgtag

SEQ ID NO: 250196 - DNA, 4758 bp, Artificial Sequence
  derived and/or modified sequence
atgaccctgagcacagaggagagcattgagatgtttggagacatcaacctgaccctgggcatgctgaacaaggaggacatcgtgaacaaggaggacatctacagccacctgaccagcgtcatccagaacacagacatcctggatgatgccatcgtgcagaggctcatctactatgccagcaaggacatgagggacaacaacatgctgcgggagatccgcatgctggccggggaggtgctggtgtccctggccgcccatgacttcaacagcgtgatgtatgaggtgcagagcaacttccgcatcctggagctgcctgatgaatttgtggtgctggccctggccgagctggccaccagctatgtgtcccagagcatccccttcatgatgatgaccctgctgaccatgcagaccatgctgcggctggctgaagatgagaggatgaagggcaccttctgcatcgccctggagaagttcagcaaggccatctacaagtatgtgaaccactggagggacttcccctacccccggctggatgccaaccggctgagtgacaagatcttcatgctgttctggtacatcatggagaagtgggcccccctggccagccccatgcagaccctgagcatcgtgaaggcccacggccccaccgtgtccctgctgctgcaccgggaggacttccggggctacgccctgggccaggtgccctggctgctgaaccagtacaaggacaaggagattgacttccacgtgacccagagcctgaagcagatcctgacagctgctgtgctgtatgacatcggcctgcccaggagcctgcggcgcagcatcttcatcaacctgctgcagcagatctgccgggcccctgagccccctgtgaaggaaaatgagatgaaggccagcagctgcttcctgatcctggcccacagcaaccctggagagctgatggagttctttgatgagcaggtgcgcagcaacaatgaggccatccgggtgggcatcctgaccctgctgcggctggccgtgaatgctgatgagccccggctgcgggaccacatcatcagcattgaaagaacagtgaagatcgtgatgggagacctgagcaccaaggtgagaaattctgtgctgctgctgatccagaccatgtgtgagaagagctacatcgaggcccgggagggctggcccctgattgattatgtgttcagccagtttgccaccctgaacagaaacctggagaagcctgtgaagaccaacttccatgaaaatgagaaggaggaggagagcgtgcgggagaccagcctggaggtgctgaagaccctggaccccctggtgattggcatgccccaggtgctgtggccccgcatcctgacctttgtggtgcctgctgagtacacagaggccctggagcccctcttcagcatcatccgcatcctgatcatggccgaggagaagaagcagcacagcgccaaggagagcacagccctggtggtgtccactggagctgtgaagctgcccagcccccagcagctgctggcccggctgctggtgatctccatgcctgccagcctgggggagctgcggggggccggggccatcggcctgctgaagatcctgcctgagatcatccaccccaagctggtggacctgtggaagacccggctgcctgagctgctgcagcccctggagggcaagaacatcagcacagtgctgtgggagaccatgctgctgcagctgctgaaggagagcctgtggaagatcagtgatgtggcctggaccatccagctgacccaggacttcaagcagcagatgggcagctacagcaacaacagcacagagaagaagttcctgtggaaggccctgggcaccaccctggcctgctgccaggacagcgactttgtgaacagccagatcaaggagttcctgacagcccccaaccagctgggggaccagaggcagggcatcaccagcatcctgggctactgtgccgagaaccacctggacatcgtgctgaaggtgctgaagaccttccagaaccaggagaagttcttcatgaaccgctgcaagagcctcttcagcggcaagaagagcctgaccaagacagatgtgatggtgatctatggagctgtggccctgcacgcccccaagaagcagctgctgagccggctgaaccaggacatcatcagccaggtgctgagcctgcacggccagtgcagccaggtgctgggcatgtctgtgatgaacaaggacatggacctgcagatgtccttcaccaggagcatcacagagatcggcattgctgtgcaggatgctgaggaccagggcttccagttctcctacaaggagatgctgattggctacatgctggacttcatcagagatgagcccctggacagcctggccagccccatccgctggaaggccctgattgccatccgctacctgagcaagctgaagccccagctgagcctgcaggaccacctgaacatcctggaggagaacatccggcggctgctgcccctgccccccctggagaacctgaagtctgagggccagacagacaaggacaaggagcacatccagttcctgtatgaaagatccatggatgccctgggcaagctgctgaagaccatgatgtgggacaacgtgaatgctgaggactgccaggagatgttcaacctgctgcagatgtggctggtgtcccagaaggagtgggagcgggagcgggccttccagatcacagccaaggtgctgaccaatgacatcgaggcccctgagaacttcaagattggcagcctgctgggcctgctggccccccacagctgtgacaccctgcccaccatccggcaggccgccgccagcagcaccatcggcctcttctacatcaagggcatccacctggaggtggagcggctgcagggcctgcaggagggcctggagagtgatgatgtgcaggtgcagatcaagatcagcagcaagatcgccaagatcgtgtccaagttcatccccaatgaggagatcctgatgttcctggaggagatgctggatggcctggagagcctgaaccccacctgcaccaaggcctgtggcatctggatgatcaccgtgctgaagcagcagggcgccgccctggaggaccagctgctggagatcctgggcaccatctaccaccacatgcctgtgctgcggcagaaggaggagagcttccagttcatcctggaggccatcagccagatcgccagcttccacatggacacagtggtggtgaacctgctgcagaagcccctgccctttgaccgggacaccaagaccctgtggaaggccctggccgagaagccagccagcagcggcaagctgctgcaggccctgattgacaagctggagacagagctggaggatgacatcgcccgggtggaggccatctctgtggcctgtgccatgtatgaggtgatctccatgggcacctctgtgacaggcctgtacccagagctgttcaccctgctgctgaagctggtgtcctgcaccctgggccagaagatgctgacctgcccctggagccaccggcggcacgtgatgcagcagggcgagcagcagcagatcccagacccctgccgcctgagcacagccaccctgaagtgcctgcaggcccaggccatgagggagggcctggccaaggagagtgatgaaggagacaacctgtggaccctgctgagcagccccagcacccaccacatcggcgtgtgcagcctggcccgctccatggctgtgtggcagcacggcgtcatcctggacatcatggagcagctgctgagcagcctgaccagcagcagcgagaactaccgcatcactggagctgccttcttcagcgagctgatgaaggagcccatcctgtggaagcacggcaacctgagaaatgtgctgatcctgatggaccagagcgcctgggacagcaatgccaccctgcggcagatggccatccggggcctgggcaacacagccagcggggccccccacaaggtgaagaagcacaagcagctgatgctggagagcatcatccggggcctgtaccacctggccaggacagaggtggtgtgtgagagcctgaaggccctgaagaagatcctggagctgctgacagacagagatgtgtccttctacttcaaggagatcgtgctgcagaccaggaccttctttgaagatgagcaggatgatgtgcggctgacagccatcttcctgtttgaggacctggcccccctgaccggccgccgctggaagatcttctttgctgaggagatcaagaagagcctcatctccttcctgctgcacctgtgggaccccaaccccaagattggagtggcctgcagagatgtgctgatggtgtgcatccccttcctgggcctgcaggagctgtatggagtgctggaccggctgctggaccaggacctgccccgggcccgggacttctaccggcagttctgtgtgaagctggccaagaagaaccaggagatcctgtggatcctgcacacccacagcttcaccttcttcaccagcacctgggaggtgatccgctctgctgctgtgaagctgacagatgctgtggtgctgaacctgaccagccagtatgtggagctgctggaccgggagcagctgaccacccggctgcaggccctgcggcaggacccctgcatctctgtgcagagagctgctgaggccgccctgcagaccctgctgcggcgctgcaaggagaccagcatccccctgtag

SEQ ID NO: 250197 - DNA, 5282 bp, Artificial Sequence
  derived and/or modified sequence
agttcatatgactgattttcactaagtgtaacaatcaacgagttcaccataaagcctttcccaacatcaggacagtaaagcaactactgaaaaccattcctgaatttgtgatcaatggactcaagtttagggagaggagcacctttggtctgcaacaatggtttgaatcccagtctctaattacttctttcccaaatactctggtcaccaaagggacaatatttggtgagatgcagccattttgttggttagcaggagttcagacgcaagacaatgtcatagtggtagaatacagtatcaacttcaacagcaagcccatctctggaagctcccagaccattgtgccaatcaagtggaggaggcactttcatttagagaggcttatgtgaaccttatatgagaaacttgccaacctgcctctttgattttttagccttactatttctaatacttaggtgctatcttttagagaccctgaaacagccaagacatgacacttagtacagaggaatccatagagatgtttggggatattaacctcactcttggcatgctgaacaaggaagatattgttaacaaggaagacatttacagtcatctcacttctgttattcagaatactgacatcttggatgatgcaattgtccaacgattgatttattatgcttctaaggatatgagagacaacaatatgctcagagaaatcagaatgctagctggtgaggttttggtgtctcttgctgcacatgatttcaactctgtgatgtatgaagtacaaagtaacttcaggatcttagagctaccagatgaattcgttgtgcttgccctggctgaattggcaaccagctatgtgtcccagagtattcctttcatgatgatgaccctgctcaccatgcaaaccatgctcaggctggccgaggatgaaaggatgaaggggactttctgtattgcccttgagaaattcagcaaagccatttacaaatatgtcaaccactggagagattttccctaccccagactggatgccaaccgactgtctgacaagatcttcatgctgttctggtatataatggagaagtgggcccctttggcctcacccatgcagactttgagcatcgttaaggcccacgggcccacggtgagcttgctgctgcatcgggaagacttccgtggatacgccctgggccaggtgccctggctcctgaaccagtataaagacaaagagattgatttccatgtcactcagagcctaaaacaaatactgactgcagcagttctttatgacattggccttccaaggagcttgagaagatccatctttatcaatttactccagcagatctgcagagctccagagcctccagtaaaggaaaatgaaatgaaagcttcaagctgttttctcattctagcccattccaatcctggagagctgatggaattttttgatgaacaagtaagaagtaataatgaagccattcgagtgggaatcttgactttgttaagattggctgtcaatgctgatgagcccaggttgagggatcacatcatttcaatagaaagaacagtcaaaatcgtcatgggtgatctcagtacaaaagtaagaaattctgttcttctcctcatccaaaccatgtgtgaaaagtcctatattgaagctcgggaaggatggccattgattgattatgtcttctcccagtttgcaacgttgaacaggaatctggagaaaccagtgaaaactaactttcatgagaatgaaaaggaagaggaatctgtccgagaaacaagccttgaggtcttaaaaaccctggacccactggtcattggaatgcctcaggtgctatggccaaggatcctgacttttgtggtacctgcagaatacacagaagctctggagcccctgtttagtatcatcagaattctgattatggcagaggagaagaagcagcacagtgccaaggagtcgacagcacttgtcgtctctacaggagctgtgaaacttccttcaccacagcagctactggccagacttctggtaatatctatgcctgccagtttaggggagttacgtggggctggtgcaatagggcttttgaagatactgcctgagataattcacccaaaattggtagacctatggaaaacacgtttacctgagcttctgcagcctctggaaggaaagaacatcagtaccgttctatgggaaaccatgctgcttcagcagttgctcaaagaatccttatggaagatcagtgatgtggcctggaccattcagctgactcaggatttcaaacagcaaatgggcagttacagcaataactccactgagaagaaattcctttggaaagccttgggaaccaccttagcatgctgccaagattcagactttgtaaactcacagattaaggagtttctgactgctcccaaccaactgggggatcaaagacagggaataacatctattttaggatactgtgccgagaaccatttggatattgttttaaaagttcttaaaacattccaaaatcaggaaaagtttttcatgaatcgatgtaagagccttttttctgggaaaaagagcctgaccaagacagatgtcatggtcatctatggagcagtggccctccatgctcccaagaagcaacttctctccagacttaatcaagatatcatatcccaagtcctgtctcttcatggccagtgctctcaggttctgggcatgtctgtgatgaacaaggacatggatctgcaaatgagtttcacaagaagcatcactgagattggcattgctgtccaagatgctgaggatcaggggttccagttttcctacaaggagatgctgattggttacatgctggacttcattagagacgagcccctggattccttagctagccctattcggtggaaagccttaatcgccattaggtatctcagtaaactgaaacctcagctctcactacaagaccaccttaacattcttgaggagaatattcggaggctgctgccccttccacctctggaaaatctgaaaagtgaaggccagacagacaaggacaaggagcacattcaatttctctatgaacgatccatggacgccctaggaaaacttctgaagaccatgatgtgggataatgtgaatgcagaggactgtcaagaaatgtttaatcttctccaaatgtggcttgtttcacaaaaagagtgggaaagagaaagagccttccagatcactgcgaaagtgctgacaaatgatattgaggcaccagagaactttaaaattggttcactgcttggacttctggctcctcactcctgtgataccctgcccaccatccgtcaggcggctgctagctcaactattggtctgttctatataaaaggcattcacttggaagtggaaagactgcagggtttgcaggaagggctggaaagtgatgacgtgcaggttcagatcaagatttcttctaaaatagctaagattgtcagtaagttcatcccaaatgaagaaattctgatgttcctagaggaaatgctggacggtctggagagcctcaaccccacttgtacaaaggcctgtggcatatggatgatcactgtcctgaagcagcagggagctgctctggaagatcagctattggagatcttaggcacaatctaccatcacatgccagtcctcagacaaaaagaagaaagttttcagttcattctagaagccatctcccagatagccagctttcacatggatacagttgttgtcaaccttttacagaagcctctgccttttgacagggacacaaagacattgtggaaggcgctggctgaaaagccagcctccagtgggaaactcttgcaagccttaatagacaaactggagactgagttagaagatgacatcgccagggttgaggcaatttcagtggcctgtgctatgtatgaagtgatctcaatgggcacctctgtcaccggcttgtatccagagctgttcactctcctcctgaagctggttagctgcacactgggccagaagatgctcacttgtccctggagccataggcggcatgtgatgcagcagggagaacagcagcagatcccagacccctgcaggctttcaactgctactttaaaatgtttgcaagcccaagccatgagagaaggccttgcaaaggaatctgatgagggggacaacttatggactctactcagcagtcctagtacccaccacataggcgtatgttcactggccaggagcatggcagtgtggcaacacggagtcatactggacatcatggaacagctgctctcatctcttacctcctcctcggagaactaccggataaccggcgcagctttcttctctgagctcatgaaggaaccaatcctttggaagcatgggaatctgcgaaatgtgctgatcttgatggatcaaagtgcctgggactccaacgccactctgaggcagatggccatccgagggctcggcaacacagcatccggggctcctcacaaggtgaagaaacataagcagttaatgctagaatctatcatcagaggcctgtatcacctagctcgcactgaagtcgtctgtgaaagcttgaaggctctaaaaaaaatcctggagctgctgacagaccgagacgtgagcttctacttcaaggaaatagtgctgcaaacaaggaccttctttgaagatgagcaggatgatgtgagattgactgccatcttcttatttgaggacctggcacccctaacaggaagaaggtggaagattttttttgctgaagaaataaaaaagagcctgatttcattccttctgcacctttgggatcccaaccccaagattggagttgcttgccgtgatgtcttgatggtctgcattccctttttgggcctccaggagctctatggggtattagaccgtctccttgatcaggatctaccaagggccagggatttctacaggcaattctgtgtgaaactggccaagaaaaaccaggaaattctgtggatcctccacacacactccttcaccttcttcaccagcacctgggaggtgatcaggagtgcagctgtcaaactcacagatgccgttgttctcaatttgaccagccaatatgtggagttactagacagagaacaactgaccacacgactccaagcacttcgtcaagatccgtgtattagtgtccagagagcagctgaggctgctttgcaaaccctcctgagaaggtgtaaagagacaagcattcctctgtaagccatcaagaaataaactgctggcttttcct

SEQ ID NO: 250198 - DNA, 5239 bp, Artificial Sequence
  derived and/or modified sequence
gagttcaccataaagcctttcccaacatcaggacagtaaagcaactactgaaaaccattcctgaatttgtgatcaatggactcaagtttagggagaggagcacctttggtctgcaacaatggtttgaatcccagtctctaattacttctttcccaaatactctggtcaccaaagggacaatatttggtgagatgcagccattttgttggttagcaggagttcagacgcaagacaatgtcatagtggtagaatacagtatcaacttcaacagcaagcccatctctggaagctcccagaccattgtgccaatcaagtggaggaggcactttcatttagagaggcttatgtgaaccttatatgagaaacttgccaacctgcctctttgattttttagccttactatttctaatacttaggtgctatcttttagagaccctgaaacagccaagacatgacacttagtacagaggaatccatagagatgtttggggatattaacctcactcttggcatgctgaacaaggaagatattgttaacaaggaagacatttacagtcatctcacttctgttattcagaatactgacatcttggatgatgcaattgtccaacgattgatttattatgcttctaaggatatgagagacaacaatatgctcagagaaatcagaatgctagctggtgaggttttggtgtctcttgctgcacatgatttcaactctgtgatgtatgaagtacaaagtaacttcaggatcttagagctaccagatgaattcgttgtgcttgccctggctgaattggcaaccagctatgtgtcccagagtattcctttcatgatgatgaccctgctcaccatgcaaaccatgctcaggctggccgaggatgaaaggatgaaggggactttctgtattgcccttgagaaattcagcaaagccatttacaaatatgtcaaccactggagagattttccctaccccagactggatgccaaccgactgtctgacaagatcttcatgctgttctggtatataatggagaagtgggcccctttggcctcacccatgcagactttgagcatcgttaaggcccacgggcccacggtgagcttgctgctgcatcgggaagacttccgtggatacgccctgggccaggtgccctggctcctgaaccagtataaagacaaagagattgatttccatgtcactcagagcctaaaacaaatactgactgcagcagttctttatgacattggccttccaaggagcttgagaagatccatctttatcaatttactccagcagatctgcagagctccagagcctccagtaaaggaaaatgaaatgaaagcttcaagctgttttctcattctagcccattccaatcctggagagctgatggaattttttgatgaacaagtaagaagtaataatgaagccattcgagtgggaatcttgactttgttaagattggctgtcaatgctgatgagcccaggttgagggatcacatcatttcaatagaaagaacagtcaaaatcgtcatgggtgatctcagtacaaaagtaagaaattctgttcttctcctcatccaaaccatgtgtgaaaagtcctatattgaagctcgggaaggatggccattgattgattatgtcttctcccagtttgcaacgttgaacaggaatctggagaaaccagtgaaaactaactttcatgagaatgaaaaggaagaggaatctgtccgagaaacaagccttgaggtcttaaaaaccctggacccactggtcattggaatgcctcaggtgctatggccaaggatcctgacttttgtggtacctgcagaatacacagaagctctggagcccctgtttagtatcatcagaattctgattatggcagaggagaagaagcagcacagtgccaaggagtcgacagcacttgtcgtctctacaggagctgtgaaacttccttcaccacagcagctactggccagacttctggtaatatctatgcctgccagtttaggggagttacgtggggctggtgcaatagggcttttgaagatactgcctgagataattcacccaaaattggtagacctatggaaaacacgtttacctgagcttctgcagcctctggaaggaaagaacatcagtaccgttctatgggaaaccatgctgcttcagttgctcaaagaatccttatggaagatcagtgatgtggcctggaccattcagctgactcaggatttcaaacagcaaatgggcagttacagcaataactccactgagaagaaattcctttggaaagccttgggaaccaccttagcatgctgccaagattcagactttgtaaactcacagattaaggagtttctgactgctcccaaccaactgggggatcaaagacagggaataacatctattttaggatactgtgccgagaaccatttggatattgttttaaaagttcttaaaacattccaaaatcaggaaaagtttttcatgaatcgatgtaagagccttttttctgggaaaaagagcctgaccaagacagatgtcatggtcatctatggagcagtggccctccatgctcccaagaagcaacttctctccagacttaatcaagatatcatatcccaagtcctgtctcttcatggccagtgctctcaggttctgggcatgtctgtgatgaacaaggacatggatctgcaaatgagtttcacaagaagcatcactgagattggcattgctgtccaagatgctgaggatcaggggttccagttttcctacaaggagatgctgattggttacatgctggacttcattagagacgagcccctggattccttagctagccctattcggtggaaagccttaatcgccattaggtatctcagtaaactgaaacctcagctctcactacaagaccaccttaacattcttgaggagaatattcggaggctgctgccccttccacctctggaaaatctgaaaagtgaaggccagacagacaaggacaaggagcacattcaatttctctatgaacgatccatggacgccctaggaaaacttctgaagaccatgatgtgggataatgtgaatgcagaggactgtcaagaaatgtttaatcttctccaaatgtggcttgtttcacaaaaagagtgggaaagagaaagagccttccagatcactgcgaaagtgctgacaaatgatattgaggcaccagagaactttaaaattggttcactgcttggacttctggctcctcactcctgtgataccctgcccaccatccgtcaggcggctgctagctcaactattggtctgttctatataaaaggcattcacttggaagtggaaagactgcagggtttgcaggaagggctggaaagtgatgacgtgcaggttcagatcaagatttcttctaaaatagctaagattgtcagtaagttcatcccaaatgaagaaattctgatgttcctagaggaaatgctggacggtctggagagcctcaaccccacttgtacaaaggcctgtggcatatggatgatcactgtcctgaagcagcagggagctgctctggaagatcagctattggagatcttaggcacaatctaccatcacatgccagtcctcagacaaaaagaagaaagttttcagttcattctagaagccatctcccagatagccagctttcacatggatacagttgttgtcaaccttttacagaagcctctgccttttgacagggacacaaagacattgtggaaggcgctggctgaaaagccagcctccagtgggaaactcttgcaagccttaatagacaaactggagactgagttagaagatgacatcgccagggttgaggcaatttcagtggcctgtgctatgtatgaagtgatctcaatgggcacctctgtcaccggcttgtatccagagctgttcactctcctcctgaagctggttagctgcacactgggccagaagatgctcacttgtccctggagccataggcggcatgtgatgcagcagggagaacagcagcagatcccagacccctgcaggctttcaactgctactttaaaatgtttgcaagcccaagccatgagagaaggccttgcaaaggaatctgatgagggggacaacttatggactctactcagcagtcctagtacccaccacataggcgtatgttcactggccaggagcatggcagtgtggcaacacggagtcatactggacatcatggaacagctgctctcatctcttacctcctcctcggagaactaccggataaccggcgcagctttcttctctgagctcatgaaggaaccaatcctttggaagcatgggaatctgcgaaatgtgctgatcttgatggatcaaagtgcctgggactccaacgccactctgaggcagatggccatccgagggctcggcaacacagcatccggggctcctcacaaggtgaagaaacataagcagttaatgctagaatctatcatcagaggcctgtatcacctagctcgcactgaagtcgtctgtgaaagcttgaaggctctaaaaaaaatcctggagctgctgacagaccgagacgtgagcttctacttcaaggaaatagtgctgcaaacaaggaccttctttgaagatgagcaggatgatgtgagattgactgccatcttcttatttgaggacctggcacccctaacaggaagaaggtggaagattttttttgctgaagaaataaaaaagagcctgatttcattccttctgcacctttgggatcccaaccccaagattggagttgcttgccgtgatgtcttgatggtctgcattccctttttgggcctccaggagctctatggggtattagaccgtctccttgatcaggatctaccaagggccagggatttctacaggcaattctgtgtgaaactggccaagaaaaaccaggaaattctgtggatcctccacacacactccttcaccttcttcaccagcacctgggaggtgatcaggagtgcagctgtcaaactcacagatgccgttgttctcaatttgaccagccaatatgtggagttactagacagagaacaactgaccacacgactccaagcacttcgtcaagatccgtgtattagtgtccagagagcagctgaggctgctttgcaaaccctcctgagaaggtgtaaagagacaagcattcctctgtaagccatcaagaaataaactgctggcttttcc

SEQ ID NO: 250199 - DNA, 3873 bp, Artificial Sequence
  derived and/or modified sequence
atgaaggccagcagctgcttcctgatcctggcccacagcaaccccggggaattaatggaattcttcgatgagcaagtgcgcagcaataatgaggcgatcagagtgggaatcctcactttactccggctcgcagttaacgcggatgagcctcggctgcgcgatcacatcataagtattgagcgcactgtgaagatcgtgatgggcgatctgagcaccaaagtacggaatagcgtattattgctgatccagactatgtgtgaaaagtcctatattgaagcacgagaggggtggcctctgatcgattacgtgttcagccagttcgccacactgaataggaacctggagaagcccgtgaaaactaatttccacgagaatgagaaggaggaagagtctgtccgcgagactagtcttgaagtgcttaagacactcgacccattagttataggcatgcctcaagtgctttggccgagaatcctgaccttcgtcgtgccggcagaatatacagaggccctggagcctctcttctccattataagaattctcattatggcagaagagaagaaacagcacagtgcaaaggaaagcaccgccctggtagtatcaacgggcgcagtgaagctgccaagtcctcagcagttactagctcgcctcttagtcatcagcatgcccgcaagtttgggtgagctgagaggggccggggcgatcggattattaaaaattctccccgagatcatccacccgaagctggttgacctctggaagactcgactgccagaattgctacaacctctggaggggaaaaacattagtaccgtcctgtgggaaactatgctgcttcagcagctgctgaaagagtccctttggaagatcagtgacgtggcctggaccattcagttaactcaggactttaagcagcagatgggcagctacagcaataacagcacagagaaaaagttcctctggaaagcactcgggaccacgctcgcctgctgtcaggactcggatttcgtcaatagccagattaaggaattcttgaccgcccctaaccagttgggcgaccagaggcagggtattacgagtattctagggtattgcgcagaaaaccaccttgatattgtgcttaaagtgttgaagaccttccagaatcaagagaagttttttatgaataggtgcaaaagcctgtttagcgggaaaaaatctctcacaaagaccgacgttatggtgatttacggtgctgtggctctgcatgcaccaaagaaacaactactctcccggctcaaccaggatattattagtcaggtactgagcctgcatggccagtgttcccaggtgctcggaatgtccgttatgaataaggacatggacctgcagatgtcctttacccgttccatcaccgagattggcatcgctgttcaagacgctgaagaccaagggtttcaattctcatataaagagatgctaataggctacatgttggacttcattagagacgagcctctggactccctggcttcaccaatccggtggaaggcgctcatcgcgatacgatatcttagtaaactgaagcctcagttgagtctacaggatcacctgaatatactggaagagaacataaggcgcctgctgccgttgcccccactcgaaaatctcaaatctgagggacagaccgacaaagacaaggagcacattcagtttctttacgagaggtcaatggatgctctggggaagctccttaaaactatgatgtgggataatgttaacgcagaggactgccaagagatgttcaaccttctccagatgtggctggtgtcccagaaggagtgggaaagagaacgagccttccagatcaccgccaaggtgctcactaacgacatagaagccccggagaattttaaaatcggctcactgctcgggctactagctcctcactcctgcgacaccctccccaccatccggcaagcagcagcaagctcaactatcggtctgttctatattaaggggattcatctcgaagtggaacggctgcaaggcctgcaggaaggcctggagtccgatgatgtgcaggtgcaaatcaagatctcatcaaaaattgccaagatcgtcagtaaattcataccgaacgaagagattctgatgtttcttgaggaaatgctggatgggctcgagtcactaaatcccacatgtaccaaagcatgcgggatatggatgattacagtgctcaaacagcagggtgccgctttggaggaccagctgttagaaatactgggtactatctaccatcacatgccagtactccgtcaaaaggaggaatcattccagtttattttggaggctatttcccaaatagcctccttccacatggatacggtggtagttaatctgctgcagaaaccgctgccattcgaccgcgacactaaaacactgtggaaggccctggcggaaaagcctgcgtcttctgggaagcttttgcaggctctgatcgacaagctggagactgagcttgaggatgacattgcgagagtcgaggcaattagtgtagcttgcgccatgtatgaggtaataagtatgggcacctccgtaactggcctgtatcctgaactgttcacactgctgttgaaactggtcagttgtactctggggcaaaagatgcttacttgtccttggtctcacagaagacatgtgatgcagcagggcgaacaacagcagatcccagacccctgcaggctgtctacagccactctcaagtgcctgcaagcccaggccatgagggagggactggctaaagagagcgacgagggcgacaacctctggacactcctgtcatcgccctcaacccatcatatcggagtctgctctcttgcgcgaagtatggccgtctggcagcatggagtcattctggacattatggaacagttgttaagttcactgacgtcttcttctgaaaactaccgcattactggtgcagccttcttctctgagctgatgaaggagccgatcttgtggaagcacggaaacctgagaaacgtcctcatcctcatggaccagagcgcttgggactccaacgccactctacgccagatggccatacgtggtctcggtaataccgccagtggggctccccataaagtgaaaaagcataaacagctgatgctggagagtattatacgtggcctctatcatctggcccggaccgaggttgtgtgcgaaagtttgaaagctttaaaaaaaattttggaactgttgacagatcgcgacgtgtccttttatttcaaggagattgtgctccaaacccggactttctttgaagatgagcaggacgacgtacgcctcactgccatcttcctcttcgaggacttagcccccctcacggggcgaagatggaaaatcttttttgcagaggagatcaaaaaatctcttatcagctttctgctccacctgtgggatcctaaccccaagattggcgttgcatgcagagatgtcctgatggtgtgtatccctttcctggggttacaggagttgtacggcgtgctggatagattgcttgatcaggatctgcctcgggcccgcgatttttaccggcaattctgcgtcaagcttgccaagaagaaccaggagatcctctggatattacacacacattctttcacatttttcactagtacatgggaagtcattagaagtgctgcggtgaaactgaccgacgccgtggtgctgaatttgacaagccagtatgtggagctgcttgatagggaacagcttactaccaggctgcaggcactacgccaggatccatgcatctctgtgcagagggctgcagaggctgcattgcagacactccttcgtaggtgtaaggaaactagcattcccctgtag

SEQ ID NO: 250200 - DNA, 4758 bp, Artificial Sequence
  derived and/or modified sequence
atgaccctgagcaccgaggagagcatcgagatgttcggcgacatcaatcttactctcggtatgcttaacaaagaagacattgttaacaaagaagacatctactcccatttgacatctgtgattcaaaacacggatatattggacgatgccattgtccaacggctaatttactatgcatccaaggatatgagagataacaatatgctccgggaaattagaatgctggctggagaggtgctcgttagtctcgctgcccatgactttaatagtgttatgtacgaggttcaatccaattttaggatactggaactaccagacgagtttgttgttcttgcactcgctgaactcgcgaccagctatgtctctcagagcataccttttatgatgatgaccctgctgacgatgcagactatgcttaggctcgcagaagacgagcggatgaaaggcacgttctgcattgcactggagaaattttctaaggcaatatacaaatacgtgaaccactggagggacttcccttacccacgcctcgacgccaatcgactctcggataaaattttcatgttgttctggtacattatggaaaagtgggcgccactggcaagcccaatgcagaccctgagcattgtcaaggcccacgggcccaccgtttccctccttctgcaccgagaagactttcgcggatatgctctggggcaggtgccatggttgctcaaccagtataaggacaaggagatagattttcatgtgacccagtcactaaagcagatcctgactgccgcagtgttgtatgacattgggctgcctagatccctgcgcagaagtatcttcatcaacttgctgcagcaaatttgtcgggcccccgagcctccagttaaagagaatgagatgaaagcaagcagctgttttctgatactggcccacagtaaccccggtgaattgatggaatttttcgacgaacaggtgcgcagcaacaacgaagctattagagtcggaattttgaccctgctgaggctcgccgtcaacgccgacgaaccccgactccgtgatcatatcataagcatcgagcggaccgtaaaaatcgtgatgggagacttgagcacaaaggtgcgtaacagcgtgcttctgttgattcagaccatgtgtgagaagagctatatcgaggctagggaaggatggcctctcattgattatgtctttagccagttcgctaccctgaatagaaacctcgaaaaacccgtgaagacaaactttcatgaaaacgagaaagaagaggagagtgtccgagagacatcattggaggttcttaagaccttggaccccttagtcattggaatgccacaggtcttatggcccaggatcctgaccttcgtggtgccagcagagtataccgaggccctggagccgctctttagtattatcagaatattaatcatggccgaggagaaaaaacagcactccgccaaagagagtacagctctcgtggtttctactggagctgtaaaattaccatcccctcagcagcttctcgcgcgattgttggtgatcagtatgcctgccagcctgggcgaactccggggagccggcgccatcggacttctgaagatccttcccgagataattcacccaaaactggtggacttgtggaaaacgcgacttccggagctgctccaacccttggaaggaaagaacattagcaccgtgctttgggagacaatgctcctgcaactgctcaaagagagcctttggaagataagcgacgttgcctggaccatacaattgacccaggatttcaagcagcagatggggtcgtattctaacaactcaaccgaaaagaagtttctctggaaggctttggggaccaccctcgcctgttgtcaggactctgacttcgttaactcgcaaatcaaagagttcctgaccgcccccaatcagctgggggaccagaggcagggaatcacctcaatcctcggctactgtgctgaaaaccatctcgacattgtgcttaaggttctgaaaaccttccagaatcaagagaaattctttatgaatcgatgcaaatcactcttctctgggaagaagagcctgaccaagacggacgtgatggttatttacggcgctgtggcactccacgcccctaaaaaacagctcttgagcagattgaatcaggacatcatctcccaagtgctgtctctgcatggccagtgtagccaggtgctcggaatgtcagtgatgaacaaagacatggacttacagatgtcttttaccaggagcatcaccgaaattgggattgccgtgcaggatgccgaagaccaaggctttcagttctcatataaagagatgctcatcgggtacatgctggacttcatccgggacgaacccctggacagtctggcctcacctatccggtggaaagctttaattgcgatcaggtacctcagcaaactgaagccccagctttccctccaggatcatcttaacatactggaagaaaatattcgccggctgttacccttgcctcccttagagaacttgaagtctgagggccagactgacaaggataaggagcacattcagttcctgtacgaacgcagcatggatgctctgggtaagctcttgaagaccatgatgtgggacaacgttaatgccgaggattgtcaggagatgttcaacctactgcagatgtggctagtcagccaaaaggaatgggagcgggaacgcgcctttcagatcaccgctaaagtgctcaccaatgatattgaggctccagaaaattttaagataggctctctgcttggcttgctggcaccccatagttgcgacacccttccaacaatccggcaggccgccgcatccagcactattggcttgttctacattaagggcatccaccttgaagtggagcgacttcaaggactgcaggagggccttgaatcggacgatgtccaggtccagatcaagatcagcagtaaaatagctaagatcgtctcaaagtttattccaaacgaagagatacttatgtttctggaggaaatgttagacggcctggaaagcctgaaccccacctgtacaaaagcttgcggtatctggatgataactgttctgaagcagcagggtgccgcccttgaggatcagctgctggaaatccttggcacgatttaccaccacatgcctgtgctgcggcagaaggaagagagtttccagtttatactagaagcaattagccagatcgcgagcttccacatggacactgtggtggttaaccttctccagaaaccattgcctttcgatagagatacaaagacactttggaaagcactcgctgagaagcccgcctcaagcggaaagcttctccaggccctgatagacaaacttgaaactgaacttgaagacgatatcgctcgcgttgaagctattagtgttgcctgcgcaatgtatgaggtgatcagtatggggacaagcgtgactggactgtatcctgagctgttcacactcctactcaagcttgtgagctgtactctcggacaaaagatgcttacttgtccatggagtcacaggcgccacgtgatgcagcagggagagcagcagcaaattcctgacccttgtcgtttgtcaacagctaccctgaagtgcctacaggcccaagctatgcgcgaaggcctcgcaaaagagagcgacgagggggacaacctttggactctgctgtcctcgcccagcacacatcacatcggcgtgtgttcattagctcgatccatggctgtgtggcaacatggtgtcatcctcgatattatggagcagttgctctcctctctgacctcttcatccgagaattacagaataaccggcgcagcattcttctctgaattgatgaaagaacctatcctgtggaagcatggcaatttgcgtaacgtgttgatactgatggatcagagtgcttgggactcaaacgccaccctgaggcaaatggcaattagaggactgggcaatacagccagcggagccccacataaggttaagaaacacaagcaactcatgttggaaagcattatcagggggctatatcacttagcaaggactgaggtcgtgtgcgagagtctcaaagccctaaaaaagatattggagctcctaacagatagagacgtgagtttttatttcaaagagatcgtgttgcagactcggaccttctttgaggatgaacaggacgatgtgaggctgaccgctatctttttattcgaggacctggcccccttgaccggtaggcggtggaaaattttcttcgctgaggaaatcaaaaagtccctcatttccttcctgctgcacctgtgggaccccaacccgaaaataggtgtcgcctgtcgagatgttctcatggtatgcatcccctttctgggactacaggagctgtacggtgttctagatcgcctcctcgatcaagacctccctcgagctcgagatttttatcgacaattttgcgttaagctggccaagaagaatcaggagatcctctggattttgcacacccattcatttacgttcttcacctccacatgggaagttatccggtccgctgctgtcaaactgacagatgctgtggtgcttaacctcaccagccagtacgtagaactgttggacagagagcagctgaccactaggctgcaggcactgaggcaggacccctgtattagcgtccaaagggctgctgaggcggccctgcagactctgcttcgaaggtgtaaagagactagcatccccttatag

SEQ ID NO: 250201 - DNA, 3873 bp, Artificial Sequence
  derived and/or modified sequence
atgaaagctagcagttgtttcctcatactggcgcattccaatccaggtgaactgatggagttctttgatgagcaagtccggtctaacaatgaggcaattcgggttggcatcctcactctgcttcggctcgccgtgaacgccgatgagcccaggctgcgcgaccacataataagcatcgagcgtacagtgaaaattgttatgggcgacctatcgacaaaggtgaggaactccgttctgttgcttattcaaaccatgtgtgagaaaagttacattgaggctcgggaaggatggcctttaattgattacgtcttttctcagtttgccaccctgaacaggaacctcgagaagccagtaaagaccaactttcacgaaaatgagaaggaggaggaatcagtgagagagaccagtctggaagttctgaagactctggatccccttgtgatcggcatgcctcaggtgctgtggcctcgcatacttacttttgtggtgccagctgagtacacagaggccctggagcccctcttcagcatcatccgaattctcatcatggcggaggaaaagaagcaacattctgcgaaggagtctactgcactggttgtcagcactggagccgtcaagctcccttcaccacaacaactgctcgctagacttctggtaatatcaatgccagcctccctgggcgagctgcgtggcgctggcgctattggccttcttaaaatcctaccagagatcattcatccgaaactggtggatctgtggaaaactagactaccggagttacttcaacccttagaaggaaaaaatatctccaccgtcttgtgggaaaccatgctgcttcagcagttgttaaaggagtccctgtggaagatctctgacgtggcctggacgattcagcttacccaagactttaagcaacagatgggcagttattctaacaattcaaccgagaaaaaatttctctggaaagcgttgggtaccactcttgcctgctgtcaggacagcgacttcgtcaacagtcaaatcaaggagttcctgaccgcacccaatcagctcggagatcagcgccagggcatcacatctatcttgggatactgtgctgagaatcacctggatatcgtccttaaggtgctgaaaaccttccaaaatcaggagaagtttttcatgaatagatgtaagtctttatttagcggaaaaaaaagcctgaccaagacggatgtgatggtgatttatggcgcagtagctctacatgctcccaagaaacagctgctctccaggttgaatcaagatatcatttcgcaagttcttagccttcacggccagtgcagtcaggtgcttgggatgtcggttatgaataaggatatggatttgcagatgtcctttaccagaagcataacggagataggcatagcagtgcaagatgccgaagatcagggcttccagttctcatataaggaaatgctgattggctatatgctcgacttcatccgggacgaacccctcgattctctggccagcccgatccggtggaaggccctgattgctatccgctatctgagtaagctgaagcctcagctgtccctacaggatcacttgaatattctcgaagagaatatacgacggttgctccccctgccacctctggaaaatctgaagtcagaaggccaaaccgataaggacaaagaacatatccagttcctatatgaacgttcaatggacgctctcggtaagcttctgaagactatgatgtgggacaacgtgaacgctgaagattgccaggaaatgtttaatttgttgcagatgtggctggtcagccaaaaggagtgggagagggaacgagcattccaaatcactgcaaaggttctcaccaacgatatcgaggcccctgaaaactttaaaatcggcagcttgctcggtttactcgcccctcattcgtgcgatacccttcccacaatacggcaggcagctgcctcttctacaattggtctcttctacattaaaggcatccaccttgaagtcgagaggctccaagggctgcaggagggcctggaaagcgacgacgtccaggtgcagattaagatttcctccaagatcgctaagatagtcagcaaatttataccaaatgaagaaatattgatgttcctggaggaaatgcttgatggccttgaaagccttaatcctacctgtacaaaggcgtgcggcatttggatgattacagtcctgaagcaacagggagcggcactagaggaccagcttctggaaatactcgggaccatttatcaccatatgcctgtgctcagacagaaagaggagtctttccagtttatcttagaggccatctcgcagatcgcatccttccatatggataccgtcgtggtcaacctgctgcagaaacctctgccatttgatcgagacacaaagaccctctggaaagcgctggccgaaaagcctgccagcagcggcaagctgctgcaggccctgatcgataagctggagactgagctagaagacgacatcgccagagtagaagcgatctccgtagcctgtgcgatgtacgaagtaatttccatgggaacatccgtgacaggcttgtatccggagcttttcactcttctactgaaactggtctcttgcacgttgggccaaaagatgctgacctgcccatggtcacatcgtcggcatgtgatgcaacagggggagcagcagcagatccccgacccctgccgcttatctacggccacacttaaatgtctgcaggcccaggccatgcgcgaaggcttggccaaagagtccgatgaaggggacaatttgtggacattactgtcttccccatctacccaccatatcggagtctgttctctcgctagatcgatggccgtctggcagcatggcgttattctcgatatcatggaacagctacttagttcactgacgagcagctctgagaattatcggattacaggagcagcctttttttcagaattgatgaaggagccaattctgtggaagcacggcaacttgcgcaacgtgctgatcttaatggatcaatctgcatgggactcgaacgccaccctgaggcaaatggccataagagggttggggaatacagcgtccggagcaccccataaggtgaagaaacacaaacagcttatgcttgagagcatcattaggggtctgtatcacttggcgcgtacggaagttgtgtgcgaaagtctaaaggcccttaagaagatacttgagctactcaccgacagagacgtaagcttctatttcaaggaaattgtgctgcagacgcgaaccttctttgaggatgaacaggacgacgtcaggttaactgccatttttctgtttgaagatcttgccccattaactggaagaaggtggaaaatcttttttgcagaagagataaagaagtctttgataagcttcctcctccatctttgggatcctaatcccaagatcggtgtcgcctgccgggatgtgttgatggtgtgtattccttttctcggactgcaagagctgtacggcgttcttgatcggctactcgaccaggatctgccaagagccagagacttttacaggcagttctgcgtaaaactggcgaaaaaaaaccaggagatcctgtggatcctgcatacccatagtttcacattcttcactagtacgtgggaggtcatcagaagtgcggctgtgaaactcacagatgcagtggtcctgaaccttacaagccagtacgttgagctcctggacagggagcagttgaccacacgcctgcaggccctgcggcaggatccctgtatctcagtgcaacgggctgccgaggctgccctccagaccctgcttcgaaggtgcaaggaaacctctattcctctgtag

SEQ ID NO: 250202 - DNA, 4758 bp, Artificial Sequence
  derived and/or modified sequence
atgaccttatcaactgaagagtctattgaaatgttcggggatataaacctgactcttggcatgcttaacaaagaggacatcgttaataaggaggacatttactctcacttgacctctgtgatacagaacactgatattttggacgacgcgattgtgcaaagacttatctattacgcctctaaagacatgagggacaataatatgctccgagagattcggatgctcgctggtgaggttctggtgtctctggctgcccatgattttaacagcgtcatgtacgaagtacagagcaatttccggatcttggagctcccagacgaattcgttgttttggccctcgcagagcttgccacctcctatgtgagccagagtatacctttcatgatgatgacacttctgactatgcagaccatgctacgacttgccgaggacgaaaggatgaaaggtacattctgcattgctttggagaaatttagcaaggccatctacaaatacgttaatcattggagagactttccctatcccagactggatgcgaatagactgtccgataagattttcatgctgttctggtatatcatggagaaatgggctccactggccagccctatgcagacactttcaatcgtgaaggcacatgggccaacagtgagcctcttattacacagagaggacttcagaggttacgctcttgggcaggtcccctggcttttgaatcagtataaagacaaggagattgatttccatgtgactcagtccctaaagcagatacttaccgcagccgtgctgtatgatatcggactaccgagatcgctgcggcgttcaatttttattaacctactacagcaaatttgtagggccccagagcctcctgtgaaggaaaacgagatgaaagcatcctcatgtttcctgatcttggcccacagtaacccgggagaactgatggagttctttgacgagcaggtacgcagtaacaacgaagccatccgcgtggggatccttaccctgttacgcctggccgtgaatgcagatgagcccagattgagggaccacatcatttcaatcgagaggaccgtaaaaattgtgatgggcgaccttagcacgaaggtgagaaacagcgtacttctcctgatacagactatgtgtgaaaagtcatatattgaagccagagagggctggcccctgatcgattacgtattttcccagttcgctacattgaaccgaaatctggagaaacccgtgaaaacgaattttcatgagaacgaaaaggaagaagagtcagtgcgggaaaccagtctggaggtgctcaagacactggatccactggtaatcggcatgccccaggtactatggcctcgaatccttacattcgtcgtcccagccgaatacacagaggctctcgaacccttgttctccatcatccggatactgatcatggctgaagaaaagaaacaacacagcgctaaagagagcactgcgctggtcgtgagcacaggagccgtgaagctgccctccccccagcaactgctggctagactgctggtcatttctatgccagctagtctgggtgaattgcgcggtgccggtgcaattggcctccttaaaatcctgcctgaaattatccatcctaaactggtcgacctgtggaaaacaaggctgcccgagttactgcaaccccttgaaggtaagaacatttccactgttctgtgggagaccatgcttttgcagctgctcaaagagagtctctggaaaatctccgatgttgcatggacaattcagctgacccaagatttcaaacagcaaatggggagttattccaataactctacagagaaaaagttcctgtggaaagcccttgggactacattggcctgctgccaggattcagacttcgtaaactcacagattaaggagttcctgacagctcccaatcagcttggagatcagcggcagggcatcacctctattctgggatactgcgctgaaaaccatctcgacatcgtgctgaaggtcctgaaaacctttcaaaaccaagagaagttttttatgaaccggtgcaagtccctttttagtgggaagaagtctctgacaaaaaccgacgtgatggtgatctacggggcagtggctctgcacgcacctaaaaaacagttgctctcccgtctgaaccaagatattatctcacaggtgctttctctacacggacagtgtagccaggtccttgggatgagcgtgatgaataaagacatggatctccaaatgagttttacaaggagcatcactgagatcggtattgctgtacaggatgctgaggaccaggggtttcaatttagttataaagaaatgttgattgggtatatgctggactttatcagagacgaaccgctggattcacttgcctcacccattagatggaaggctctcatagctatacgatacctcagtaaacttaaaccacagctgagcctgcaggaccacctaaatatcctggaggagaacatccgaagactgctgcctctcccccctctggagaaccttaagagcgaggggcagactgacaaagataaagaacatatccagttcctatatgagagatccatggatgcacttggtaagctgctgaagactatgatgtgggacaacgtaaacgccgaagactgtcaagagatgttcaacctgttacagatgtggctcgtgtctcagaaggaatgggaacgagaacgggctttccagatcaccgccaaggtcctgacaaatgacatcgaagccccagagaactttaagattggaagcctgctgggcctcctggcaccgcacagctgcgataccttgcccaccatcagacaggctgccgctagctccaccattggtttgttttatattaaaggaatacacctggaggtggagcgcctacaggggctgcaggagggcctggaaagtgatgacgtccaggtgcagattaagatttcgtctaagatagctaaaattgtgtctaaatttatccctaacgaggaaatccttatgttcctggaggagatgctcgacggtcttgaaagcctaaatccgacttgcaccaaggcttgtgggatctggatgattactgtgctcaaacagcagggagcggcacttgaagaccagctccttgagatcttgggtaccatttaccatcatatgcctgtcctgcgccagaaggaggaatccttccaatttatcctggaggctattagtcagatcgcctccttccacatggatacagtggtcgtgaatctgttgcagaagcccctacctttcgatcgggacactaaaacgctttggaaagctttggccgagaaacctgcaagtagcggtaaactgctgcaagccctcatcgacaaactggagactgaactggaagatgacattgctcgggttgaggccatctctgttgcatgtgccatgtacgaggtgatctccatgggaacatcagtaacgggattgtaccccgaactgttcaccctgctgctcaagcttgtctcttgcactttgggacagaagatgctgacctgcccctggagtcacagacggcacgtcatgcagcagggtgaacagcagcagatcccggacccatgccgcctctccactgcgacactgaaatgtctgcaagcccaggccatgcgggaaggactcgctaaagagagtgacgagggcgacaatttatggactcttctctcttccccgtccacccaccacattggtgtatgctctctggcaaggagcatggctgtgtggcagcacggtgtaatactggacattatggagcagcttctcagctcacttacatcttcttcagagaactaccgcattaccggtgctgcgttttttagtgagcttatgaaggagcccatcctgtggaagcacggaaacctgcgtaatgtcctgattctgatggaccaatctgcgtgggacagtaacgcaactctgagacagatggcaattcgcggactcggcaacacagctagcggcgctcctcacaaagtcaaaaagcataagcagctgatgctggaaagcatcattcgaggactctaccacctcgcccgtaccgaagtcgtgtgcgagtccttgaaggcactgaagaaaatactcgagttgctgacagacagggacgtaagcttctactttaaggagatcgtgcttcagactcggaccttcttcgaggatgaacaggatgatgttcgcctcactgcgatcttcctgtttgaagaccttgccccactgaccgggaggcgctggaaaattttctttgctgaggaaatcaaaaagagcttgatttcatttctgttacatctctgggaccctaatccaaaaattggagtcgcctgtcgtgacgtcctgatggtctgtattcccttcctgggtttacaggaactgtacggagtcctggacaggcttctcgatcaggatctgcctcgggcacgggatttctaccgacagttctgtgtgaaactggctaaaaaaaatcaagaaatcctctggatcttacacacacactcttttaccttcttcaccagcacctgggaagtgataagatctgccgctgtcaaattgacagatgcagttgtcttgaacctaacctcacagtatgtggaactcctggatcgggaacagctcactacaagactccaggctctccgacaggatccctgcatatccgtgcagagagccgcagaggcagcactgcagaccctccttcgcaggtgcaaggaaacctccattccactgtag

SEQ ID NO: 250203 - protein, 324 aa, Artificial Sequence
  derived and/or modified sequence
MSPAAAAEPDGDQQDRHVSKLIFCFFVFGAVLLCVGVLLSIFGFQACQYKPLPDCPMVLKVAGPACAVVGLGAVILARSRAQLQLRAGLQRGQQMDPDRAFICGESRQFAQCLIFGFLFLTSGMLISVLGIWVPGCGSNWAQEPLNETDTGDSEPRMCGFLSLQIMGPLIVLVGLCFFVVAHVKKRNTLNAGQDASEREEGQIQIMEPVQVTVGDSVIIFPPPPPPYFPESSASAVAESPGTNSLLPNENPPSYYSIFNYGRTPTSEGAASERDCESIYTISGTNSSSEASHTPHLPSELPPRYEEKENAAATFLPLSSEPSPP

SEQ ID NO: 250204 - DNA, 975 bp, Artificial Sequence
  derived and/or modified sequence
atgagccccgccgccgccgccgagcccgacggcgaccagcaggacagacacgtgagcaagctgatcttctgcttcttcgtgttcggcgccgtgctgctgtgcgtgggcgtgctgctgagcatcttcggcttccaggcctgccagtacaagcccctgcccgactgccccatggtgctgaaggtggccggccccgcctgcgccgtggtgggcctgggcgccgtgatcctggccagaagcagagcccagctgcagctgagagccggcctgcagagaggccagcagatggaccccgacagagccttcatctgcggcgagagcagacagttcgcccagtgcctgatcttcggcttcctgttcctgaccagcggcatgctgatcagcgtgctgggcatctgggtgcccggctgcggcagcaactgggcccaggagcccctgaacgagaccgacaccggcgacagcgagcccagaatgtgcggcttcctgagcctgcagatcatgggccccctgatcgtgctggtgggcctgtgcttcttcgtggtggcccacgtgaagaagagaaacaccctgaacgccggccaggacgccagcgagagagaggagggccagatccagatcatggagcccgtgcaggtgaccgtgggcgacagcgtgatcatcttccccccccccccccccccctacttccccgagagcagcgccagcgccgtggccgagagccccggcaccaacagcctgctgcccaacgagaacccccccagctactacagcatcttcaactacggcagaacccccaccagcgagggcgccgccagcgagagagactgcgagagcatctacaccatcagcggcaccaacagcagcagcgaggccagccacaccccccacctgcccagcgagctgccccccagatacgaggagaaggagaacgccgccgccaccttcctgcccctgagcagcgagcccagccccccctag

SEQ ID NO: 250205 - DNA, 975 bp, Artificial Sequence
  derived and/or modified sequence
atgagccctgccgcagccgcagagcccgatggagaccagcaggaccgacacgtctcaaaactgatcttttgtttttttgtgtttggggccgtgttgctgtgtgttggcgtgctcctgagcatttttggcttccaggcctgccagtacaaaccattaccagattgtcccatggttttgaaagtggccggacctgcatgtgccgtggtgggactgggtgccgtgatcctggcaagaagccgggcacaattgcaactgcgtgccggactgcagcgcgggcagcagatggacccagaccgggctttcatttgcggcgaatctcggcagttcgcacagtgtctgatttttggattcctgtttctcacaagtggtatgctgatctctgtgcttggcatatgggtaccaggatgcggcagcaattgggcccaggagcctcttaacgaaaccgacaccggtgacagtgagcctaggatgtgtgggttcctcagtctccagatcatggggcccttaatagtgctcgtaggcttgtgtttcttcgttgttgctcacgttaaaaagagaaacacactgaatgctgggcaggacgccagcgagagggaagagggtcagattcagatcatggagccagtgcaggtaaccgtaggtgactcagtgatcatcttccctccccccccccccccttatttccctgagtcttccgccagcgctgtcgcagagtcaccaggtaccaattccctgcttccgaacgagaatcctccatcatactatagcatctttaattatggaaggacacccacatccgagggagccgcgagtgagagagattgcgagagtatttacaccatcagtgggactaattcatcgtcagaagcatcacatacgccacaccttccttcagaactgccgccaaggtatgaggagaaggaaaatgccgcggctacattcctgcccctctcttctgagccaagtccaccttag

SEQ ID NO: 250206 - DNA, 975 bp, Artificial Sequence
  derived and/or modified sequence
atgagccctgctgctgctgctgagccagatggagaccagcaggacagacatgtgtccaagctgatcttctgcttctttgtgtttggagctgtgctgctgtgtgtgggcgtgctgctgagcatcttcggcttccaggcctgccagtacaagcccctgcctgactgccccatggtgctgaaggtggccggccctgcctgtgctgtggtgggcctgggcgctgtgatcctggcccggagccgggcccagctgcagctgcgggccggcctgcagaggggccagcagatggaccctgaccgggccttcatctgtggggagagccggcagtttgcccagtgcctgatcttcggcttcctgttcctgaccagcggcatgctgatctctgtgctgggcatctgggtgcccggctgcggcagcaactgggcccaggagcccctgaatgaaacagacaccggggacagcgagcccaggatgtgtggcttcctgagcctgcagatcatgggccccctcatcgtgctggtgggcctgtgcttctttgtggtggcccacgtgaagaagaggaacaccctgaatgccggccaggatgccagcgagcgggaggagggccagatccagatcatggagcctgtgcaggtgacagtgggggacagcgtcatcatcttccccccacctcctccaccctacttccctgagagcagcgccagcgctgtggccgagagccctggcaccaacagcctgctgcccaatgaaaatcctccttcctactacagcatcttcaactacggccgcacccccaccagcgagggcgccgccagcgagcgggactgtgagagcatctacaccatcagcggcaccaacagcagcagcgaggccagccacaccccccacctgcccagcgagctgcccccaagatatgaggagaaggaaaatgctgctgccaccttcctgcccctgagcagcgagcccagccccccatag

SEQ ID NO: 250207 - DNA, 975 bp, Artificial Sequence
  derived and/or modified sequence
atgagccccgccgccgccgccgagcccgacggcgaccagcaggacaggcacgtgagcaaactcatcttttgtttttttgttttcggggccgtgctgttatgtgttggagtgctgctgtcaatcttcgggttccaggcttgtcagtacaaaccgcttcctgattgtccaatggtccttaaggtggcaggccccgcttgcgcagttgtggggctcggggccgtcattctggcgcgttctagagcccaacttcagctgcgggctggccttcagcgaggccagcagatggaccccgatagagctttcatctgtggagagagccggcagttcgcccagtgtttgattttcggattcctttttcttacatccgggatgcttattagtgttttgggcatctgggtacccggctgtggctcgaactgggcccaagagcctctcaacgagaccgatactggagacagcgagccaaggatgtgcggtttcctgtcactgcagatcatggggcccctaatcgtcctggtgggactgtgcttcttcgtggtggcgcacgtgaagaagagaaacaccctcaatgctggccaggacgcaagcgagagggaggaagggcagatccagattatggagccggtccaggttaccgtgggcgacagcgtaattatctttcctccacctccaccaccatatttcccagaaagcagtgcgagcgccgtggccgaatcacctggtaccaactcgctgctgcctaacgagaatccacccagctattactccatttttaactacggacggacccctaccagcgagggagctgcttcagaacgcgattgcgagtccatttacaccatcagcggtactaactcgtcgagcgaagcatctcatacgccccacctgcccagtgagttacctccccggtacgaggagaaagaaaacgctgccgcgacatttctcccactttcctctgagccgtcgcctccttag

SEQ ID NO: 250208 - DNA, 975 bp, Artificial Sequence
  derived and/or modified sequence
atgtctcccgctgccgctgccgaacctgacggggaccagcaggaccggcacgtcagcaagcttatcttttgtttctttgttttcggtgcagtcctgttatgtgtgggtgttctgctgtccatatttgggtttcaggcgtgtcagtataagcctctgcctgattgcccaatggtgctgaaggtggcaggccctgcatgcgctgtggtaggcctgggcgcagtcattctcgccagatctagagcccagttacaactcagggctgggctgcaacgagggcagcaaatggaccctgacagggcgttcatctgcggagagtccaggcagttcgctcaatgtctgatttttggattcctgtttctcacatcggggatgctgatatctgtgttgggcatctgggtgcctggctgcggtagcaattgggcccaggagccattaaacgagacggatacgggggattctgagccacgaatgtgtgggttcctcagtttgcagattatgggcccactgatcgtccttgttggcttgtgtttctttgtcgtcgctcacgtcaagaaacggaacacccttaacgcaggccaagacgcatcggaacgtgaagagggccagatccaaatcatggaacccgtgcaggtgactgtcggcgatagcgtgatcatcttcccgcctcccccaccaccttactttccagaatcttctgcctcggcggttgccgagtccccgggtaccaatagcctgttgccaaacgaaaatccacctagctattactccatatttaactatggacgcaccccaacatccgaaggcgcagcttccgaacgtgactgcgagtctatttataccatctcagggaccaatagttcttctgaggcgtcccacactccccatctgccatcagagctcccgccaaggtacgaggagaaggaaaacgccgcagccaccttcctgccgctctccagcgaacccagccctccctag

SEQ ID NO: 250209 - DNA, 1535 bp, Artificial Sequence
  derived and/or modified sequence
gccggccccgccaggtgtgcgggccaggcagccgtggaaggtgcccatttctcccagattcctcgcgcgcacggccacgagcgcggaggctgccaaacccgccagccctgggttccgaagccgcccctggctctccattccctcgcgggcgcgccccgggcccccagtggcggccagctcccaccggtcgctcctgcactgccctgccctgccctccccgggccgccgcgcccgcgcagcaccgcctccttctctaaatactgccgggtccgccctccgcaccaggacgcgcggtgggtagggtgcagggcggccggcgcagccgaggccgcgtgcggaggcggacgccgcgcccagccagtgcccacagcagcgcggtcagccaggcgccggacccagcttcagagctgctgaaatcttggagggaagaaaacacatcccaccctgcctccgggaaggggcctctcctggacatgtctcctgcagctgctgctgagccagatggggaccagcaggacagacacgtcagcaaactcatcttctgcttctttgtcttcggcgccgtcttgttgtgtgtgggagtcctgctctccatctttgggttccaggcatgccaatataagcccctcccagactgccccatggtgctcaaggtggcggggcctgcatgtgccgtggttggacttggggctgtgatcctggcccgctcccgggcgcaacttcagctccgtgcagggctgcagagaggtcagcagatggaccccgaccgagccttcatctgtggagagagccgccagtttgcccagtgccttatctttgggtttctgttcttgacaagcggcatgctcatcagcgtcctgggcatttgggtccctggatgtggctccaactgggcgcaggaaccgctaaacgagacagacactggcgactcagagccccggatgtgtgggttcctttctctgcagatcatggggcccttgattgtgcttgtgggattgtgtttcttcgtggttgcccatgttaagaagagaaacacgctgaatgctggccaggatgcctctgagagagaagagggacagatccagattatggagcctgtccaggtcactgtaggtgactcggtaataatatttccaccccctccaccaccttactttcctgaatcttcagcttctgcggtcgctgagagtcctggaactaacagtctgcttccgaatgaaaaccccccttcatattacagtattttcaactatggcaggaccccaacttcagagggtgcagcctctgaaagagactgtgaatctatatataccatttctgggacgaattcatcttctgaggcctcacacactccacatcttccatctgaattgcctcctagatatgaagaaaaagaaaatgctgcagctacattcttgcctctatcttctgagccttccccaccgtaaactatggactctagttcagttttatatgcaatggatcactattttatttaattttttttaaataaaaaatacaatagcattggctat

SEQ ID NO: 250210 - protein, 360 aa, Artificial Sequence
  derived and/or modified sequence
MEERERGARSAGAGSPARPPSPRLDVSSDSFDPLLALYAPRLPPIPYPNAPCFNNVAEYESFLRTGVRGGGRGRGRARGAAAGSGVPAAPGPSGRTRRRPDAPAPDPERIQRLRRLMVAKEEGDGAAGAGRRGPGRSRKAPRNVLTRMPLHEGSPLGELHRCIREGVKVNVHIRTFKGLRGVCTGFLVAFDKFWNMALTDVDETYRKPVLGKAYERDSSLTLTRLFDRLKLQDSSKKEADSKSAVEDSTLSRYSQTSTWKLASVWGRADTGRGSHKRSRSVPSSLQASAREESRSELSGRTTRTDGSSVGGTFSRATTLSRGQSRKKKRKPKVDYQQVFTRHINQIFIRGENVLLVHLAQ

SEQ ID NO: 250211 - DNA, 6584 bp, Artificial Sequence
  derived and/or modified sequence
cctctggcggcttcgttccttcttcccatcggcctcggcttgcgggcctttcaaacatggaggagcgggagcggggggcgaggtcggctggcgccgggagccccgcgcgcccgcccagcccgcggctggatgtcagctctgacagcttcgacccgctgctggccctgtacgcgccccgcctgcctcccattccctaccccaatgccccctgcttcaacaacgtggcggagtacgagagcttcctcaggaccggagtccggggcggcgggcgcgggcgcgggcgggctcggggcgcggccgcgggctctggggttcccgccgcacccgggccctcgggcaggactcgtcgccgcccggacgcgcccgccccggaccccgagcgcatccagcgcctccgccgtctcatggtggccaaagaggaaggggacggggccgcaggagcgggccggaggggtccgggtcggagcaggaaggcgccacgcaacgtgctcacgcgaatgcccttgcacgaaggcagccctctgggtgaactccatcgctgtatccgtgagggggtgaaggtgaatgttcacatccgcactttcaagggacttcggggcgtctgtacaggcttccttgttgcattcgacaagttctggaatatggcacttactgatgtggatgagacctaccgaaaacctgtcctaggcaaagcatatgaacgggattcttcactgactctcactaggctatttgatcggctgaaacttcaagattcctccaagaaggaagcagattctaagtctgcagttgaagattccactctgtctagatactcacagacatccacttggaagttggcttcagtgtggggaagagcagacactggccggggctcacacaagcgttcccgctctgtcccttcttccctgcaggcctctgcaagggaggagtccaggtcagagctgtcagggaggactacacggacagacggctccagtgtgggaggtaccttttccagggctaccaccctttccagaggccagtcccgtaagaaaaagcgaaagcccaaagtggattaccagcaggtattcactcgacacataaatcagattttcattcgaggcgagaatgtcctgctggttcatcttgcacagtgaccagctcagcctgagctttggtttttagaaataaagtgcatgaattgctgctatgctgtatcctagtatcccagtgaaactctgagttggaatgattccctctggtcctgcatatgcagaggacggagcaggctcagccccctggaagatgagctcaaggggaggacaggccttgggagggcaggcgtttgcattaatatcaaggcaaaaagcattcatagatacatgcatctgatttggtattgtgatttacttcagaccctgaaaccaaatatctgatcttccattagacttaggggtcatgatatgagtggaatttacattttagatactataggggaaagaaaagtctcaaaaagaagtattgcatgtctaaaagctagtgccctgagtactcatgaattcgattccaagagtagtggtgtaaattgccttggagccctgcatccacgtcttgtaactaacttttgaattttgcctgacatgattctctcttgatgaagaaatgacatatattatctttgaatatctacaaggaaagttaccaacttatgtaggggtgaaatttggataggcggtatgctcaaagcagccagcaatgagtgctctgttttgatccttcttcttattatggaaaggagtacaggacctcttcagtcttccccttaccagaggtagcctctgcaaatggcataccagatgggactctaagatgcttgtgtggtggcttcttgtccttctctttgacttctgtggcatggtgctagtgcatgtaccctgtggtattgcccctctgtccgtagtgtgaactgtcctgtgagctttatgtcaggagactgtgaccttcatgtccagcttcaaagagttgtgcatgaactcggtaatacacatcacacggctgagagtcccctttccaggcagggccagcatgtgtagaatatctttcagaatatggtttcaccatgaaacaggggtggtagatttattcccttgtgtcaggccaaagaagttcttacaaagtacagtgggtagtgtctaaagcgacactttactcacagcctggcttgagtcaacaggaacaccatagcacccacaaatacttctacttgaatcatattctgtgctttttcaatcactagtgcagaataggctgcatttgacacagactgttaggcaatattgatttttttgttttgtttttatttggttttatctgagataacttatgttcaaggtgagaataagaaatagccaactagttaaaatgtatgaaaagaaaactttcccctgctgtatttgttgtgtaacataaataagccttctgagaagcagggtgaataaagtttagggagctgggacacctggtcctgctagctggaccactggctcatcatgcaatgaaaaggtgagcagacttaacccctccgtgcctcagctttttccccacagacacctacctcacaggggcattgagaaaaaaaaaatgaaggcattttacagtctctaaacatctttaagtgccatgagtaatttttcctgactctgtttcatagctttgtaagaattctgtgtctttataagacacagaagcaaggcaggtgctacataaaaaagtaatctcagccaggcacggtggctcacgcctgtaatcccagcactttgggaggctgaggcgggtggatcacaaggtcaggagatcaagaccatcctggctaacacggtgaaaccctgtctctactaaaaatacaaaaattagccgggcgtggtggcgggcgcctgtagtcccagctacgtgggtggctgaggcaggagaatggggtgaacccgggaggcggagcttgcagtgagccaagattgcaccactgtactccagcctgggcgacagagcaagactctgtctcaaaaaaaggaaaaaaaaaaaaagtaatcttagggttcatagttatgatcctgttgtaactatcttcggaaggcagcagtatcttctggaacttccatattccattccttcctcctaagggacaatggaagttctcagaagagtatcttcagtaagaggagagtaactttttttttgctgctcccgctatatcccaggcctcacccttttctgatcattatcagaaagaatcccctgaacttttcaaggggtttatatggtagcaccaaatggagaatgagcatctaaaaatgacacatcccgaaagggcaatctgtggaagtttgttgtttgtttgtttttatttttaaatgcattgtaaagtgtactctagagccagatcaggtgcactaaagtttatagaggttccagtttacaaactcaagtgaacagtaatctttggaagctgccagtctaaattctaaatagtgtatctgaaatctcagttcccaaaatagttgtcaggtttaatcatcaggcaacactgcgtatacctgtgtggctatcctcatctgcctgccctctcatccctcggctagaatgatgtactctactttcccaataaggtagaaatttggaatccaacggaatataatcagttttcattcattccagtgcctagttaaatctaacctgacttaaacatatgcctgtttttatgtttacctataattttcatatagccgtataaggattgatttaccattttttgcccaacatgacaattctggctatgaaaattatgtttaaactgtgtatgatctattttatgtgctctatgttcccatttgtttgtttggtctggacagtggttctggaatgaattctatctagtaaattagtaaatgtgctgttttgtataaagcatgataattactttttaacagaagttcatttttaaagattactcccttttctttctctcttttttttgagacaatttctctcttgttgcctaggcagtgcagtggcgcgatctcagctccctgcaacttctgcctcccaggttcaagcgattctcctgccttagcctcctgagtagctgggtcagccaccatggctgactcattttttgtatttttagtagagaaggggttttaccgtgttagccaggctggtcttgaactcctgaccttgggtgatccacctgcctcagcctcccaaagtgctgggattacaggcgtgagctatcccgcccggtccccttttctttattatcgaagatattgtttaaaagaaagaaaaagtaggtcccaataatatatgtgctattcaaaaaatgtgatcatttaggacattatcacaagttgctatggaaataactgaagacttcctcaggagaaggaaagaaaatgaggaacataatgatagagtcggggaactcccactagctcacctgaggggggctcgatgcagctgaaatactgaatactgaaatactagaaaccaacaaaactggtttctagaattctccagggatttgggcttgggaaacttggtaagaatagtttttatttttgaacattcaactttggttcttcaaagtaatctttaaacatgggaatatgttttcaagacaatttataggacatacttatgtagttggtgaggtcttctcaaaagtatctacctttgttagataataacaagtgattaagaaaggggagatatggttttatactcataacaatttcctgtgccattctctgtacacagaggtgattcatttactctcccattagtagaacttgcactttgggctgtctgttctagtatttgggaagtgtttatgcttccttccagggaccatcttatgatcagaggcaggatgtctgtgagatggttagctagagttagcagtgtccggggagagtggctttagaccagtcagtaccttgctctttgtgcatggtgcatgtcaagtcaggaagccaagaaaccgttggcattaaaatctagatgcatagagatccttgctatgagttgtggataggagtggctccatctatccttgtggtgaaagagtccaggagctcctttagagattgtcaagtcctgagcgatgagctgcccttaatcctcagaagccttacaaaaattgagatgtaccatttctaccctttgagaaaaaagaaatagaaacttacttgatgcagaatggatatttatatttctgcttgcaccatttccatagcagctgacaaaggcaaaatcatgaaatagaatcatttctataaattgcttctttaagttttctctaaattttgcctctaggaaaaaattaaaactattcaatgacagctagctgtcactggtgctaccccaaagctttccaatcttttatgtattttttgtgaatgaaactgttgctgtaggaaagtcaaggttcatgtaagagtatcgtggtgtaaatataatggtttcacagctgtttgaatttttcttttcctgtgccagatatagaatgcagtcaaccctttttcagtaacttatgttcaccagtctgtgcttttcttctcccagaaggcttttcttagtggttgtaaatgcaagaatcctgagccctgtgttgcaaaggtgggtggtctgtcagcactttctggcaaattgagttgatggatttaagataagcctttggggttcctgtcagttttctgggccctgaggaagggttgggcctcctttactctcagtattttgagtgtttttcaaatgtttgtacgttatcttgcactgctctaataaaaatgaaagctctctgacaagaaatagttctggatggtttgaagatctgcggggaaaaataagtgtgcacctgagaccttcagttagtcttttatttatttagaataaaaaatagtttgataacctaccagagttagtgcttctttaaaaacactccttggaaagatggggactgtcccttaggaaagccataaaagtgattcccaatactttgcaattgcttttgatttttagtcctttggaacaaatgtgtgatgttatgtctgatgttgtgtttttagagctgtgaaaagtctgaaaaatttcaaggggtattatttaaatgatgattatctggctgaattatgtgtgagctagaatctagggtagctgtccacttctttttctgttgtcctgacagtaaagcaaatagtaagccatgtcttgaaagtgatttgcttgtttcatactgacatctaaagacatcagccttctctttggcaaccctggggatactcctctgcaccataacttattaatgtttttttagacaaggctaaacctgaatgactctacgtatctatagtttcactgctcatataccagctgctacaagaaaaaccatgacttgtaagtttgtctttactcctaattgctaaattaactgaaacccttcctgtctagggagaattgctgctagtaaggtcagtttgcaatgttcagctttagatatgtgtcgtaatgggagtctgaaaactgtaataaactgtattcatatcctg

SEQ ID NO: 250212 - DNA, 1083 bp, Artificial Sequence
  derived and/or modified sequence
atggaagaaagagagcgtggagcacggtcagccggagccggctctccagcccggccaccatcgcctcgcttggatgtatcaagcgactcatttgacccgctgctcgccctgtatgctccccgacttccgccgatcccttaccctaatgcaccatgttttaacaatgtggcagagtatgagagttttctgagaacaggggtgaggggaggaggtcggggacgcggaagagcgcggggtgctgccgccgggtctggtgtgccagctgccccaggcccatctgggcggacacgacgcagacccgacgcacccgcaccagatcccgaacgaatccagcgcctccgcaggctcatggtagccaaggaggagggggacggcgcggcaggcgccggaaggagagggcctggaaggagccggaaggctcccagaaatgtgcttactagaatgcctctccatgagggctcgccactaggtgagcttcaccgatgtatcagggagggagtgaaggtaaacgtgcacatcaggacttttaaagggctgcggggcgtctgtaccgggtttttagtcgccttcgacaaattttggaatatggccctcactgacgttgatgagacctacaggaaaccggttctaggaaaagcatatgaaagggacagttcactcaccctgacccgactgttcgataggctgaaacttcaggactcgtccaagaaagaggctgacagtaaaagcgctgttgaggactcaacactgtcaaggtattcacagacctctacttggaaactcgcgtccgtgtggggacgcgctgatacaggacgcggtagccacaaacggtcccggagcgttccatccagtctacaagccagcgcccgggaagagtcccgaagcgaactgagcgggcgaacaactcgcacagacgggtccagcgttggaggaactttctctagggctaccaccttgagcagaggccaatccaggaagaaaaaacgaaagccaaaggttgactatcagcaggtctttacccggcacatcaatcaaatcttcatacgaggcgagaacgtactcctggtgcaccttgcacaatag

SEQ ID NO: 250213 - DNA, 1083 bp, Artificial Sequence
  derived and/or modified sequence
atggaggagcgggagcggggggcccggtctgctggagctggcagccctgcccggccccccagcccccggctggatgtgtccagtgacagctttgaccccctgctggccctgtatgccccccggctgccccccatcccctacccaaatgccccctgcttcaacaacgtggccgagtatgagagcttcctgaggactggagtgcggggcggcggccggggccggggccgggcccggggagctgctgctggcagcggcgtgcctgctgcccctggccccagcggccgcacccggcggcggccagatgccccagccccagaccctgagcgcatccagaggctgcggcggctgatggtggccaaggaggagggagatggagctgctggagctggaagaagaggccctggccgcagcaggaaggcccccagaaatgtgctgaccaggatgcccctgcacgagggcagccccctgggggagctgcaccgctgcatccgggagggcgtgaaggtgaatgtgcacatccgcaccttcaagggcctgcggggcgtgtgcaccggcttcctggtggcctttgacaagttctggaacatggccctgacagatgtggatgagacctacaggaagcctgtgctgggcaaggcctatgaaagagacagcagcctgaccctgacccggctgtttgaccggctgaagctgcaggacagcagcaagaaggaggccgacagcaagtctgctgtggaggacagcaccctgagccgctacagccagaccagcacctggaagctggcctctgtgtggggccgggctgacaccggccggggcagccacaagaggagccgctctgtgcccagcagcctgcaggccagcgcccgggaggagagccgctctgagctgagcggccgcaccaccaggacagatggcagctctgtgggcggcaccttcagccgggccaccaccctgagccggggccagagcaggaagaagaagaggaagcccaaggtggactaccagcaggtgttcaccaggcacatcaaccagatcttcatcagaggagaaaatgtgctgctggtgcacctggcccagtag

SEQ ID NO: 250214 - DNA, 1083 bp, Artificial Sequence
  derived and/or modified sequence
atggaggagcgggagcggggcgcccggagcgccggcgccggcagccctgccagaccacctagcccccgtctagatgtatcaagtgactcgttcgatccattgctggctctgtacgctccgaggctccctcccatcccctatcctaatgccccttgtttcaataacgttgctgaatacgaaagctttcttaggacaggggtacggggaggaggacggggcagaggccgggctcggggcgcggcagccggcagcggggtccctgccgctccagggccatcgggtaggacccggaggaggccagacgctcccgcgcctgaccctgagcgaatccagcgactccggcggctaatggtggctaaagaggaaggtgacggcgccgcaggcgccggcaggaggggccctgggcggtctaggaaggcaccacgcaacgtgttgactaggatgccgttgcatgaggggagtccccttggtgagttacatcgctgcatcagggagggtgtgaaggtgaatgtgcatattagaacttttaaaggattgaggggagtctgcacgggtttcctagtggcctttgataagttctggaacatggccctcacagatgtggacgaaacgtacaggaaacctgtgctggggaaggcctacgagcgggattcctcgctgacactgaccaggctgttcgatcgtttgaagctacaggacagttccaaaaaggaagctgattccaaatctgcagtcgaggattccacactgagtcgctattcacagacctccacatggaaattggcctccgtgtggggaagagcggatacgggcagggggagccataaaagaagccggagtgtccccagttctctccaggcttctgcacgcgaggaatccaggagcgaactttccggacggaccacccggactgacgggagcagcgtgggtggcactttctccagagctaccactctttcacgaggccagtccagaaaaaagaaaaggaaaccaaaggtagattatcagcaggtctttacacggcacataaatcagatattcataagaggagaaaatgtcctgctggtgcatctggcacaatag

SEQ ID NO: 250215 - DNA, 1083 bp, Artificial Sequence
  derived and/or modified sequence
atggaagagagggagcgaggagctagatcggctggtgcgggttcacctgctcgccctccctcaccccgactggacgtgagctccgattcatttgacccgctgttggctttgtacgccccaaggctccccccaataccctaccccaatgccccatgctttaataatgtggcagagtatgagtcctttctgagaacgggagtgagaggtggaggtagaggcaggggacgcgcacggggtgcggctgccggtagtggcgttccagctgcccctggtccctccgggcgtacgagacgtagacctgacgcccctgcaccagacccagagaggattcaacgactaaggagactgatggtcgcaaaggaggaaggcgacggcgcagcaggcgctggccgacgaggcccaggcaggtcccgcaaagcgccacgcaatgtactgacacggatgccattacacgaaggaagtccactcggtgaattacaccggtgcatccgtgagggcgttaaggttaacgtgcatattcggacctttaagggactaagaggagtgtgcacgggtttcttggtggcgttcgataagttttggaacatggcactgacagacgtggatgaaacctaccgaaagcccgttttgggaaaggcctacgaacgagatagctcgctgactctgaccagactattcgaccgattgaagcttcaggactcctccaagaaggaagccgacagcaaaagtgcagtagaggacagcactctgagcaggtattcacagacatcaacctggaagctggcttccgtatggggtcgcgcagacaccggacgcggttcacataaaaggtcacgaagcgtcccaagcagcttgcaggcctccgctagagaggagtcacgctcagaactgtcaggccgaaccactaggacggatggcagcagcgtagggggtacgttcagtcgcgctaccactttgtctcgcggtcagtccagaaaaaaaaagcgcaagccaaaggttgactatcagcaggttttcacaagacacattaatcagatattcatccggggtgaaaatgtgctcttagtgcacctggcccagtag

SEQ ID NO: 250216 - DNA, 1083 bp, Artificial Sequence
  derived and/or modified sequence
atggaggagagagagagaggcgccagaagcgccggcgccggcagccccgccagaccccccagccccagactggacgtgagcagcgacagcttcgaccccctgctggccctgtacgcccccagactgccccccatcccctaccccaacgccccctgcttcaacaacgtggccgagtacgagagcttcctgagaaccggcgtgagaggcggcggcagaggcagaggcagagccagaggcgccgccgccggcagcggcgtgcccgccgcccccggccccagcggcagaaccagaagaagacccgacgcccccgcccccgaccccgagagaatccagagactgagaagactgatggtggccaaggaggagggcgacggcgccgccggcgccggcagaagaggccccggcagaagcagaaaggcccccagaaacgtgctgaccagaatgcccctgcacgagggcagccccctgggcgagctgcacagatgcatcagagagggcgtgaaggtgaacgtgcacatcagaaccttcaagggcctgagaggcgtgtgcaccggcttcctggtggccttcgacaagttctggaacatggccctgaccgacgtggacgagacctacagaaagcccgtgctgggcaaggcctacgagagagacagcagcctgaccctgaccagactgttcgacagactgaagctgcaggacagcagcaagaaggaggccgacagcaagagcgccgtggaggacagcaccctgagcagatacagccagaccagcacctggaagctggccagcgtgtggggcagagccgacaccggcagaggcagccacaagagaagcagaagcgtgcccagcagcctgcaggccagcgccagagaggagagcagaagcgagctgagcggcagaaccaccagaaccgacggcagcagcgtgggcggcaccttcagcagagccaccaccctgagcagaggccagagcagaaagaagaagagaaagcccaaggtggactaccagcaggtgttcaccagacacatcaaccagatcttcatcagaggcgagaacgtgctgctggtgcacctggcccagtag

SEQ ID NO: 250217 - DNA, 576 bp, Artificial Sequence
  derived and/or modified sequence
atgcagagtgtgttctatcctgcaggacggattagtgagcggtacgacattaagggctgcgaagtctcacgctgggtggaccccgcgccagagggatctccactagtgctggtgttaaaggacctgaacttccaaggcaagaccatcaacttggggccacagagatcctggttcctgcggcagatggagctggacaccaccttcctcagggagttgaacgtactggattacagtttgctcatagcgtttcagcgcctgcacgaagatgagcgcggccccgggagctcgttgatcttccgcactgctcgatcagttcagggtgcccagagccccgaggagtctcgcgcgcagaatagacgcttacttcccgacgccccgaacgctttgcatatccttgatggccccgagcagcgctatttccttggcgtggtcgacttggcgactgtctacggcctccgaaaaaggctagagcacctctggaaaaccctccgctatcccgggcggaccttttctactgtgtcccccgcaagatatgcacgtcggttgtgtcagtgggttgaagctcataccgagtag

SEQ ID NO: 250218 - DNA, 576 bp, Artificial Sequence
  derived and/or modified sequence
atgcagagcgtcttctacccagctggccgcatcagcgagagatatgacatcaagggctgtgaggtgagccgctgggtggaccctgcccctgagggcagccccctggtgctggtgctgaaggacctgaacttccagggcaagaccatcaacctgggcccccagaggtcctggttcctgcggcagatggagctggacaccaccttcctgcgggagctgaatgtgctggactacagcctgctgattgccttccagaggctgcatgaagatgagcggggccctggcagcagcctcatcttcagaacagcccggtctgtgcagggcgcccagagccctgaggagagccgggcccagaacagaaggctgctgcctgatgccccaaatgccctgcacatcctggatggccctgagcagcgctacttcctgggcgtggtggacctggccaccgtgtatggcctgaggaagaggctggagcacctgtggaagaccctgcgctacccaggccgcaccttcagcacagtgtccccagcccgctatgcccggcggctgtgccagtgggtggaggcccacacagaatag

SEQ ID NO: 250219 - DNA, 576 bp, Artificial Sequence
  derived and/or modified sequence
atgcagagcgtgttctaccccgccggccggatcagcgagcggtacgacattaagggttgtgaagtaagccgttgggtggaccccgcccccgaaggcagcccactggtactagtgctgaaggatctgaacttccaggggaagacaataaacctcgggccccagaggagttggttccttagacaaatggagctcgacactacctttctcagggagctgaacgtgctggattactccctgctcattgcctttcagagacttcacgaagacgaaaggggcccgggatcttccctgatcttccgcacggcaaggagtgtacagggggcccaatcacccgaagagtccagagcccagaatcgcagactgttgcctgatgcacctaatgcactccatatcctggatggacccgagcaacgctatttcctaggggtcgtggatctggctactgtatatggcctgcgtaagaggctggaacacttgtggaagactctccgatatcctgggaggactttcagtaccgtgagtccagcccgctacgcccggcgcctgtgtcaatgggttgaggcccataccgaatag

SEQ ID NO: 250220 - DNA, 576 bp, Artificial Sequence
  derived and/or modified sequence
atgcagagcgtcttttatcctgcaggcaggatatccgaaaggtacgatattaagggatgtgaggtcagccggtgggttgatcccgctcctgagggatcacccctagtgcttgttttaaaggacctaaacttccagggaaagactattaatttgggtcctcagagatcctggtttctgaggcaaatggagctggatactaccttcttgcgcgaacttaacgtgctggactacagcctgctgatcgccttccaacgcttgcatgaagacgagagaggcccaggcagctcattaatattcaggactgccagatcggtgcagggcgcacaaagtccagaggaatctagagcccagaatagacgcctgcttccggatgcacctaacgccttacacatacttgacggccctgagcagaggtactttcttggcgtagttgacctggcaacagtgtacggattgagaaaaagattagagcatctgtggaaaacccttcgatacccaggcaggacctttagcactgtatcgccggctcgatacgctcgaagactgtgccagtgggtggaggcacatactgaatag

SEQ ID NO: 250221 - DNA, 576 bp, Artificial Sequence
  derived and/or modified sequence
atgcagagcgtgttctaccccgccggcagaatcagcgagagatacgacatcaagggctgcgaggtgagcagatgggtggaccccgcccccgagggcagccccctggtgctggtgctgaaggacctgaacttccagggcaagaccatcaacctgggcccccagagaagctggttcctgagacagatggagctggacaccaccttcctgagagagctgaacgtgctggactacagcctgctgatcgccttccagagactgcacgaggacgagagaggccccggcagcagcctgatcttcagaaccgccagaagcgtgcagggcgcccagagccccgaggagagcagagcccagaacagaagactgctgcccgacgcccccaacgccctgcacatcctggacggccccgagcagagatacttcctgggcgtggtggacctggccaccgtgtacggcctgagaaagagactggagcacctgtggaagaccctgagataccccggcagaaccttcagcaccgtgagccccgccagatacgccagaagactgtgccagtgggtggaggcccacaccgagtag

SEQ ID NO: 250222 - protein, 773 aa, Artificial Sequence
  derived and/or modified sequence
MKMRGEKRRDKVNPKSSQRKLNWIPSFPTYDYFNQVTLQLLDGFMITLSTDGVIICVAENISSLLGHLPAEIVGKKLLSLLPDEEKDEVYQKIILKFPLLNSETHIEFCCHLKRGNVEHGDSSAYENVKFIVNVRDICNEFPVVFSGLFSSHLCADFAACVPQEDRLYLVGNVCILRTQLLQQLYTSKAVSDEAVLTQDSDEEPFVGELSSSQGQRGHTSMKAVYVEPAAAAAAAAISDDQIDIAEVEQYGPQENVHMFVDSDSTYCSSTVFLDTMPESPALSLQDFRGEPEVNPLYRADPVDLEFSVDQVDSVDQEGPMDQQDPENPVAPLDQAGLMDPVDPEDSVDLGAAGASAQPLQPSSPVAYDIISQELELMKKLKEQLEERTWLLHDAIQNQQNALELMMDHLQKQPNTLRHVVIPDLQSSEAVPKKQQKQHAGQVKRPLPHPKDVKCFCGLSLSNSLKNTGELQEPCVAFNQQQLVQQEQHLKEQQRQLREQLQQLREQRKVQKQKKMQEKKKLQEQKMQEKKKLQEQRRQKKKKLQERKKWQGQMLQKEPEEEQQKQQLQEQPLKHNVIVGNERVQICLQNPRDVSVPLCNHPVRFLQAQPIVPVQRAAEQQPSGFYQDENCGQQEDESQSFYPEAYQGPPVNQLPLIDTSNSEAISSSSIPQFPITSDSTISTLETPQDYIRLWQELSDSLGPVVQVNTWSCDEQGTLHGQPTYHQVQVSEVGVEGPPDPQAFQGPAAYQPDQMRSAEQTRLMPAEQRDSNKPC

SEQ ID NO: 250223 - DNA, 2322 bp, Artificial Sequence
  derived and/or modified sequence
atgaagatgcgaggagagaaacggagggacaaggttaaccctaaatcctcccaacggaaactgaactggataccctctttccccacttatgactactttaatcaagttaccctgcaactgctcgacgggtttatgatcaccctgagcacggacggggtcataatttgcgttgctgagaacatcagctccctcttgggccacctgcccgctgaaatcgtcggcaagaagctgctgagtcttctgcccgacgaggagaaggacgaggtgtatcagaagataatcctgaagttcccattactcaactctgagacccacatagagttctgctgtcaccttaagcgcggaaatgtggagcacggggacagttctgcttatgagaatgtgaagtttatcgtgaatgtcagggatatctgcaatgaattccctgtggtgtttagcggactttttagctctcatctctgcgccgactttgcagcttgcgtcccacaagaagatcgactgtacctcgtaggcaatgtgtgtattctccgaacacaactacttcagcagctctacacatccaaggccgtgagcgatgaggcagtcttaacccaggattccgatgaagagcccttcgtaggagaattatcatcgagccaggggcagcggggtcacacgtccatgaaggctgtctatgttgagcccgcggccgctgctgccgcggctgctataagcgatgaccaaatagatattgcagaggtggagcaatatggaccacaggagaacgttcacatgttcgtggactcagattctacatattgctcatctacggtgttccttgacactatgcccgagagccctgccttatccctgcaagatttccgtggcgagccggaggtcaaccccctctatagagctgatcccgtcgacctggagttcagtgtggaccaggtcgacagtgtcgaccaggaagggccaatggatcagcaggatcctgagaatccggtcgcccctctggatcaagcagggctaatggatcctgtcgaccctgaggatagcgtggatctgggcgcggctggagcctccgctcagcctctgcaaccttcatcacctgttgcctatgacattatcagccaggagctggaactgatgaagaagctcaaggagcagttggaggaaagaacctggctgctgcacgacgccattcagaaccagcagaatgcactggaattaatgatggaccatctccagaaacagcccaataccctcagacacgtcgtgatccctgacttgcaatcaagcgaagccgtccccaagaaacaacagaagcagcatgccggtcaggtgaaaaggccactgccgcaccctaaagacgtcaagtgcttctgtggcctgagtctttctaactctctcaagaacaccggcgaactccaagaaccatgcgttgccttcaaccaacagcaactggttcagcaggagcaacacctgaaggagcagcaaaggcagctgcgtgagcaactacaacagctgagagaacagcggaaagtacagaaacagaaaaaaatgcaagaaaagaagaaactgcaggagcagaagatgcaggagaagaagaaactccaagaacaacggcgacagaaaaaaaagaagttgcaagagaggaaaaaatggcagggtcagatgctccagaaagagccagaggaggagcagcagaagcagcaactgcaggagcagcccttaaaacacaatgtgatcgttggaaacgaaagggtccaaatctgtttgcagaatcccagggatgtgtcagtccctctttgcaatcatcctgtgcgcttcttacaggcgcagcccattgtcccggtgcagcgtgccgccgagcagcagccgagcggattttatcaggacgagaattgtgggcagcaggaggatgagtcacagagcttttatccagaagcataccaagggcccccggtaaaccagctgcctttaattgacacttcaaatagtgaagccatcagctcgtcttctatcccacaatttccaataacctcggattctaccatttcaaccctagaaaccccacaagactacatacgcttatggcaagagctgtcggacagtctcggtcccgtggtgcaagtcaatacttggtcgtgcgatgagcaggggacacttcacgggcaaccgacgtaccaccaggtgcaagtgtccgaggtcggtgtggagggcccgcctgacccacaagcctttcaaggacctgcagcgtaccaacccgaccaaatgagaagcgcagaacaaacccgcctcatgcctgccgaacaaagggattccaataagccctgctag

SEQ ID NO: 250224 - DNA, 3163 bp, Artificial Sequence
  derived and/or modified sequence
acgctgcctccatgcctgcctcccctctctgccacgcccccaccacgcgctttgcactctggggcccacgcacttccctgaagagtctagaagctgctcctcatttccagactttccgggcgcccaccaggctcccgggctctcaccggagaccacagggaggagcttcaaggtaccccaagtccctgcggcctccagcagtgaagagttccacaagggagtcttcctacgtcactgaataatgaatgaagatgagaggggaaaagagaagagacaaagtcaatccaaaaagctctcaaaggaaattaaactggattccatcatttcctacctatgattacttcaaccaagtgacgctacagttattagatggctttatgattacactgagcacagatggagtgatcatttgtgtggctgaaaacatctcttctcttcttggacatttaccagctgagattgtgggcaaaaaattattaagccttctgcctgatgaagagaaagatgaagtctaccaaaagattattctcaaatttcctttactaaactcagaaacacatattgaattttgctgtcatttaaaaagaggaaatgtcgaacatggtgatagttctgcttacgaaaacgtgaaatttattgtgaatgtaagagatatttgtaatgagtttcctgtggtctttagtggcttgttttccagccacctctgtgctgactttgctgcatgtgttcctcaggaggatcggctttatcttgtgggaaatgtttgcattctcaggactcagctcctgcagcaactttacacttcaaaggcagtcagtgatgaagctgtacttacacaagattcagatgaggaaccttttgtgggagagctcagtagctctcaaggtcaaagaggacacactagcatgaaagccgtgtacgttgaacccgctgctgctgctgctgctgctgctatctcagacgaccaaattgatattgcagaggttgagcagtatggaccacaagaaaacgttcacatgtttgtagattctgattcaacttattgctccagtacagttttcctggatactatgcctgaatctccagccttatccttgcaagactttcgaggtgagcctgaggtgaatccattgtacagggcagacccagtggacctggagttctcggtggatcaggtggactcagtggaccaggagggcccaatggaccagcaggacccagagaacccagttgccccgttggaccaggcaggcctgatggatccagtggatccagaggactcagtggacctgggggctgctggcgcaagtgctcagccattacagccatcatcaccagttgcatatgacatcattagccaggaactggaactgatgaagaagttgaaggagcagctagaagagaggacttggttgctgcatgatgccatccaaaaccagcagaatgcattggaattgatgatggatcaccttcagaagcagccaaacacattacgccacgttgtcattcctgatctccaatcttcggaggcagtgcccaagaaacaacagaaacaacacgctgggcaagtgaagcggcctctcccacatcccaaggacgtcaagtgtttctgtggtttatctttatccaactctctcaaaaacactggggagcttcaggagccttgtgttgccttcaaccagcagcaactggtgcagcaagaacaacacctgaaggagcagcagcggcagctgcgggagcagctgcaacagctgagagagcaaaggaaggtgcagaagcagaagaagatgcaggagaagaagaagctgcaggagcagaaaatgcaggagaagaagaagctgcaggagcagaggcggcaaaagaagaagaagctacaggagcggaagaagtggcaggggcagatgctacagaaagagccagaggaggagcagcagaagcagcagctgcaagagcagccactgaagcataatgtcatcgtggggaatgagagggtgcagatatgcctgcaaaacccacgtgacgtatctgtgcccctctgcaatcaccctgttagatttttacaggcccaacccattgttcctgtccagagagcagctgaacaacagccctctggcttctatcaagatgaaaactgtgggcaacaggaagatgagagtcaaagtttttatcctgaggcgtatcaagggccccccgtgaaccagctgccattgatagatacctcaaactctgaggcaatttcttcttccagcattcctcagtttcccataacttcagactcaaccataagcaccctggagaccccacaggattacatccggctttggcaagagttgtctgattcactcggtcctgttgtccaagtgaacacttggtcttgcgatgagcagggcaccctgcacggccaacccacctaccatcaggtgcaagtttctgaggtaggagtcgagggacctcctgatccacaggctttccaaggccctgctgcataccagccagaccagatgagatctgcggagcagaccagattgatgcctgcagagcaacgtgactcaaataagccgtgctaacagtactttcatgaccagtgatgaggggaaatggggggagggggcaggccaatgaggtctgcatggccaggggaccttcaaggtgcgtaaagtcccttggggtagggtttagtgggtagagacttatttgtttcctgataggttatgtttgtaattgtttgttaagcacagcctgtttcttggaagttatgctgtagaggcagcctgtgatccgtagtatgctagggtgtgacagcagccagccacagctggatctgatgtcttgtctgccccgcccagctttgcatatccatgttctaccacaggaaggtggcctgccaagagtctgctcaaagttttcaacataaagaataaagaaaaaaaaatgccaaagtgcttttcaatctagtaaatctagagggttgttttgtcttagccacaagaattccgaggtcttgaccctgatgatcaacctgcctcccctccatagtcttgttggagaagcccagagagaatgggactccaactaagggaacctgaaatcaactcaatggaggcacttcagagctaaaataattatggcttccttgcttaataaacattttcgttcactgcaa

SEQ ID NO: 250225 - DNA, 2322 bp, Artificial Sequence
  derived and/or modified sequence
atgaagatgagaggagagaagaggcgggacaaggtgaaccccaagagcagccagaggaagctgaactggatccccagcttccccacctatgactacttcaaccaggtgaccctgcagctgctggatggcttcatgatcaccctgagcacagatggagtcatcatctgtgtggccgagaacatcagcagcctgctgggccacctgcctgctgagatcgtgggcaagaagctgctgagcctgctgcctgatgaggagaaggatgaggtgtaccagaagatcatcctgaagttccccctgctgaacagcgagacccacatcgagttctgctgccacctgaagagaggaaatgtggagcacggggacagcagcgcctatgaaaatgtgaagttcatcgtgaatgtgcgggacatctgcaatgagttccctgtggtgttcagcggcctcttcagcagccacctgtgtgccgactttgctgcctgtgtgccccaggaggaccggctgtacctggtgggcaatgtgtgcatcctgcggacccagctgctgcagcagctgtacaccagcaaggctgtgtctgatgaggccgtgctgacccaggacagtgatgaggagccctttgtgggggagctgagcagcagccagggccagaggggccacacctccatgaaggctgtgtatgtggagcctgctgctgctgctgctgctgctgccatcagtgatgaccagattgatattgctgaggtggagcagtatggcccccaggagaatgtgcacatgtttgtggacagcgacagcacctactgcagcagcaccgtcttcctggacaccatgcctgagagccctgccctgagcctgcaggacttccggggggagcctgaggtgaaccccctgtacagagctgaccctgtggacctggagttctctgtggaccaggtggacagcgtggaccaggagggccccatggaccagcaggaccctgagaaccctgtggcccccctggaccaggccggcctgatggaccctgtggaccctgaggacagcgtggacctgggcgccgccggggccagcgcccagcccctgcagcccagcagccctgtggcctatgacatcatcagccaggagctggagctgatgaagaagctgaaggagcagctggaggagaggacctggctgctgcatgatgccatccagaaccagcagaatgccctggagctgatgatggaccacctgcagaagcagcccaacaccctgcggcacgtggtgatcccagacctgcagagcagcgaggccgtgcccaagaagcagcagaagcagcacgccggccaggtgaagaggcccctgccccaccccaaggatgtgaagtgcttctgtggcctgagcctgagcaacagcctgaagaacacaggagagctgcaggagccctgtgtggccttcaaccagcagcagctggtgcagcaggagcagcacctgaaggagcagcagaggcagctgcgggagcagctgcagcagctgcgggagcagaggaaggtgcagaagcagaagaagatgcaggagaagaagaagctgcaggagcagaagatgcaggagaagaagaagctgcaggagcagaggcggcagaagaagaagaagctgcaggagaggaagaagtggcagggccagatgctgcagaaggagcctgaggaggagcagcagaagcagcagctgcaggagcagcccctgaagcacaacgtgattgtgggcaatgaaagagtgcagatctgcctgcagaaccccagagatgtgtctgtgcccctgtgcaaccaccctgtgcgcttcctgcaggcccagcccatcgtgcctgtgcagagagctgctgagcagcagcccagcggcttctaccaggatgagaactgtggccagcaggaggatgagagccagagcttctacccagaggcctaccagggcccccctgtgaaccagctgcccctgattgacaccagcaacagcgaggccatcagcagcagcagcatcccccagttccccatcaccagtgacagcaccatcagcaccctggagaccccccaggactacatccggctgtggcaggagctgagtgacagcctgggccctgtggtgcaggtgaacacctggagctgtgatgagcagggcaccctgcacggccagcccacctaccaccaggtgcaggtgtctgaggtgggcgtggagggccccccagacccccaggccttccagggccctgctgcctaccagcctgaccagatgaggtctgctgagcagacccggctgatgcctgctgagcagagggacagcaacaagccctgctag

SEQ ID NO: 250226 - DNA, 2322 bp, Artificial Sequence
  derived and/or modified sequence
atgaagatgcggggcgagaagcggcgggacaaggtgaaccccaagtccagccagcgcaaactcaactggatcccatcgttcccaacgtatgactattttaaccaggttactttgcaactcctagacgggtttatgatcactctgagtactgatggggtgataatctgtgtggctgagaacatctcttctttactgggccacctgcctgcggagattgtgggcaagaagctactctccttgctgccagacgaagagaaggatgaagtatatcaaaaaatcattttgaagtttccgctgctgaactccgaaacgcatattgaattctgctgccatctcaagcggggcaatgtcgagcacggcgactccagcgcctatgagaacgtcaaatttatcgtgaacgtgcgcgacatctgcaatgagttccccgtcgtgttcagtggcctgttcagttcccacctgtgcgcagacttcgcagcttgtgtccctcaggaagatcgcctgtatctagtgggtaatgtgtgcattttaaggactcaacttctgcaacaactgtacacttcaaaagcagtgagcgatgaggcggttttgacccaagacagcgacgaggagccttttgtgggcgagctgtcttccagtcaggggcagcgcggccacaccagtatgaaggctgtatacgtggagcccgcagccgccgcagccgccgctgccatcagcgatgaccagatcgatatcgccgaggtcgaacagtatggcccccaggagaatgtccatatgtttgtggactcagatagcacatattgctccagcacagtttttttggatacaatgcctgagtcaccagccttgagcttgcaggatttcagaggcgagcccgaagtgaacccgctgtacagggccgatcctgtggatctcgagttcagtgttgatcaggtcgactctgtggatcaagaggggcctatggaccagcaggatcccgaaaaccccgtcgcccctcttgaccaggccggactgatggaccccgttgatcctgaggacagtgtggatctgggggccgccggagcctctgctcagcccctgcagcccagctcacccgtcgcatacgatataatttcacaggaactggaactgatgaaaaaactaaaagagcaacttgaagaacgcacctggttgctgcacgacgccatccagaatcagcagaacgccctggagttgatgatggaccacctccagaaacaacctaataccttaagacacgtggtgattcccgatttgcagagttctgaggctgtgcccaagaagcagcaaaagcagcatgctggccaggtcaaaagaccactccctcatcccaaagacgtaaagtgtttttgcgggttgtcactctctaatagcctcaagaacaccggagaactgcaggagccctgtgtcgcttttaaccaacaacagctggtgcagcaagagcaacacctcaaagagcagcagcgccagctccgcgagcagctgcagcaattgagagaacagaggaaggtgcagaaacagaagaagatgcaggagaaaaaaaagctccaggaacagaagatgcaggaaaagaagaagctacaggagcagcggcgtcagaagaagaagaaattgcaggaacggaaaaagtggcagggccagatgctgcagaaggaacctgaggaggaacaacagaagcagcagctgcaggaacaacctctgaaacacaatgtaatcgtgggaaacgagcgagtgcagatttgcctgcagaacccaagggatgtatcagtccccttatgcaaccatccagtgagattcctgcaggcacaaccaatcgttccagtgcaacgggcagccgaacaacagccatccggcttttatcaagacgaaaattgtgggcagcaagaggacgagagtcagtctttttatcccgaagcttaccagggtcctcccgtaaatcaactcccattgatcgatacgtctaattccgaagctatctccagctctagcattccgcagttcccaatcacatccgattcaaccattagcacactggagaccccgcaagactatattcggctttggcaggaactgagtgattccctaggcccggtggttcaggtcaacacttggtcgtgcgatgaacagggcactcttcacgggcagccaacctatcaccaggtgcaggttagcgaggtgggcgtggaagggccacctgatcctcaagcttttcagggtcccgccgcgtatcagcccgatcagatgcgatctgccgaacagacccggcttatgcccgccgaacagagggattcaaataagccctgctag

SEQ ID NO: 250227 - DNA, 2322 bp, Artificial Sequence
  derived and/or modified sequence
atgaaaatgcgcggagagaagaggcgggataaggtgaacccaaagtcgagccaacgaaaactcaattggattcccagcttccctacatacgattatttcaatcaggtgacccttcaactgctggacggctttatgatcactctgtccaccgacggcgttatcatttgcgtcgccgaaaatatttcctccctgctgggccacctgcccgctgaaatcgttggcaaaaaattactcagcctactgcccgatgaggagaaggatgaagtttatcagaagattatcctaaagtttccattgctgaattctgaaactcacattgagttctgttgccacctgaagagaggaaacgtggaacacggtgacagctcagcttacgagaacgtgaaattcatcgtgaacgttagagacatttgtaacgaattcccagtggtgttcagcgggctgttttcatcccatttatgtgccgattttgctgcgtgtgtgccacaagaggaccgtctgtatttggtaggcaatgtgtgcatcctgaggacgcagctcctacaacagctgtatacatccaaggcagtgagtgacgaggctgtgctgactcaggattccgatgaggagccattcgtgggagaactgagtagcagccaaggccagagaggccacacttccatgaaggctgtttatgttgaaccagcagctgcagcagcggcagctgccatctccgatgaccagatagatattgcagaagtggagcagtatgggccacaggagaatgtacacatgtttgtcgattccgattcgacatactgctccagcacagtgtttctggataccatgcccgaatcccctgccctgtctttgcaggacttccgaggggaacctgaggtcaaccctctgtaccgggctgatcctgtagacctcgagtttagcgtggatcaggtggattctgtagatcaggaggggcctatggatcagcaggatcctgagaaccccgtggcgcctctcgaccaggccggtctgatggatcctgtcgatcccgaagacagtgtcgacttaggcgctgctggagccagtgctcagccgctacagccttctagcccagtcgcatatgacattatttcccaagaactggaattaatgaaaaagctgaaggagcaactggaggaaagaacctggttattgcacgacgcgattcaaaatcagcagaacgctctggaattgatgatggaccacctgcagaagcagccgaacacattaaggcacgttgtcatccctgaccttcaatctagcgaggccgtccccaaaaagcaacagaagcagcatgctgggcaagtcaaacggcctctgcctcatcctaaagatgtcaagtgcttttgcggcttgagtctgtcaaatagtcttaagaacaccggggagttgcaagaaccctgtgtggcgttcaaccagcaacagcttgtccaacaagaacagcacttgaaggaacaacagaggcaactcagagagcaactgcagcagctgcgggagcagcgtaaagttcaaaagcagaagaaaatgcaggaaaaaaaaaaactccaagagcagaagatgcaggagaagaaaaagttgcaggagcaacgtcgtcagaagaagaaaaaactgcaggagagaaagaaatggcaagggcagatgttacagaaagagcccgaagaggaacagcagaaacagcaattgcaggagcagccgctcaagcataacgtcatcgtggggaacgaaagggtacagatatgtctgcagaacccgagggacgtgtctgtacccctgtgcaatcatcctgtgcggttcctacaggctcaacccattgttcctgtgcagagagccgctgagcagcagcccagtggtttctaccaagacgaaaattgcggacagcaagaggacgaatcccaatccttttatcctgaggcttaccagggaccgccagtgaatcagctgcccctgattgacaccagcaatagtgaggctatctcaagttcgtccatccctcagttcccaattacaagcgattctactatctcaaccctggaaacgcctcaggactatatcaggctctggcaagagctcagtgatagccttggacctgttgtgcaggtgaatacttggtcctgtgatgagcagggaaccctccatggacagcctacctaccaccaggtacaggtgtcagaggtgggagttgaaggacctcctgacccacaggcctttcagggacctgcggcttatcaacccgatcaaatgcggagtgctgagcagacgaggcttatgcccgcagaacaaagggactctaacaagccttgttag

SEQ ID NO: 250228 - DNA, 2322 bp, Artificial Sequence
  derived and/or modified sequence
atgaagatgagaggcgagaagagaagagacaaggtgaaccccaagagcagccagagaaagctgaactggatccccagcttccccacctacgactacttcaaccaggtgaccctgcagctgctggacggcttcatgatcaccctgagcaccgacggcgtgatcatctgcgtggccgagaacatcagcagcctgctgggccacctgcccgccgagatcgtgggcaagaagctgctgagcctgctgcccgacgaggagaaggacgaggtgtaccagaagatcatcctgaagttccccctgctgaacagcgagacccacatcgagttctgctgccacctgaagagaggcaacgtggagcacggcgacagcagcgcctacgagaacgtgaagttcatcgtgaacgtgagagacatctgcaacgagttccccgtggtgttcagcggcctgttcagcagccacctgtgcgccgacttcgccgcctgcgtgccccaggaggacagactgtacctggtgggcaacgtgtgcatcctgagaacccagctgctgcagcagctgtacaccagcaaggccgtgagcgacgaggccgtgctgacccaggacagcgacgaggagcccttcgtgggcgagctgagcagcagccagggccagagaggccacaccagcatgaaggccgtgtacgtggagcccgccgccgccgccgccgccgccgccatcagcgacgaccagatcgacatcgccgaggtggagcagtacggcccccaggagaacgtgcacatgttcgtggacagcgacagcacctactgcagcagcaccgtgttcctggacaccatgcccgagagccccgccctgagcctgcaggacttcagaggcgagcccgaggtgaaccccctgtacagagccgaccccgtggacctggagttcagcgtggaccaggtggacagcgtggaccaggagggccccatggaccagcaggaccccgagaaccccgtggcccccctggaccaggccggcctgatggaccccgtggaccccgaggacagcgtggacctgggcgccgccggcgccagcgcccagcccctgcagcccagcagccccgtggcctacgacatcatcagccaggagctggagctgatgaagaagctgaaggagcagctggaggagagaacctggctgctgcacgacgccatccagaaccagcagaacgccctggagctgatgatggaccacctgcagaagcagcccaacaccctgagacacgtggtgatccccgacctgcagagcagcgaggccgtgcccaagaagcagcagaagcagcacgccggccaggtgaagagacccctgccccaccccaaggacgtgaagtgcttctgcggcctgagcctgagcaacagcctgaagaacaccggcgagctgcaggagccctgcgtggccttcaaccagcagcagctggtgcagcaggagcagcacctgaaggagcagcagagacagctgagagagcagctgcagcagctgagagagcagagaaaggtgcagaagcagaagaagatgcaggagaagaagaagctgcaggagcagaagatgcaggagaagaagaagctgcaggagcagagaagacagaagaagaagaagctgcaggagagaaagaagtggcagggccagatgctgcagaaggagcccgaggaggagcagcagaagcagcagctgcaggagcagcccctgaagcacaacgtgatcgtgggcaacgagagagtgcagatctgcctgcagaaccccagagacgtgagcgtgcccctgtgcaaccaccccgtgagattcctgcaggcccagcccatcgtgcccgtgcagagagccgccgagcagcagcccagcggcttctaccaggacgagaactgcggccagcaggaggacgagagccagagcttctaccccgaggcctaccagggcccccccgtgaaccagctgcccctgatcgacaccagcaacagcgaggccatcagcagcagcagcatcccccagttccccatcaccagcgacagcaccatcagcaccctggagaccccccaggactacatcagactgtggcaggagctgagcgacagcctgggccccgtggtgcaggtgaacacctggagctgcgacgagcagggcaccctgcacggccagcccacctaccaccaggtgcaggtgagcgaggtgggcgtggagggcccccccgacccccaggccttccagggccccgccgcctaccagcccgaccagatgagaagcgccgagcagaccagactgatgcccgccgagcagagagacagcaacaagccctgctag

SEQ ID NO: 250229 - protein, 888 aa, Artificial Sequence
  derived and/or modified sequence
MLRQVLHRGLRTCFSRLGHFIASHPVFFASAPVLISILLGASFSRYQVEESVEHLLAPQHSLAKIERNLVNSLFPVNRSKHRLYSDLQTPGRYGRVIVTSFQKANMLDQHHTDLILKLHAAVTKIQVPRPGFNYTFAHICILNNDKTCIVDDIVHVLEELKNARATNRTNFAITYPITHLKDGRAVYNGHQLGGVTVHSKDRVKSAEAIQLTYYLQSINSLNDMVAERWESSFCDTVRLFQKSNSKVKMYPYTSSSLREDFQKTSRVSERYLVTSLILVVTMAILCCSMQDCVRSKPWLGLLGLVTISLATLTAAGIINLTGGKYNSTFLGVPFVMLGHGLYGTFEMLSSWRKTREDQHVKERTAAVYADSMLSFSLTTAMYLVTFGIGASPFTNIEAARIFCCNSCIAIFFNYLYVLSFYGSSLVFTGYIENNYQHSIFCRKVPKPEALQEKPAWYRFLLTARFSEDTAEGEEANTYESHLLVCFLKRYYCDWITNTYVKPFVVLFYLIYISFALMGYLQVSEGSDLSNIVATATQTIEYTTAQQKYFSNYSPVIGFYIYESIEYWNTSVQEDVLEYTKGFVRISWFESYLNYLRKLNVSTGLPKKNFTDMLRNSFLKAPQFSHFQEDIIFSKKYNDEVDVVASRMFLVAKTMETNREELYDLLETLRRLSVTSKVKFIVFNPSFVYMDRYASSLGAPLHNSCISALFLLFFSAFLVADSLINVWITLTVVSVEFGVIGFMTLWKVELDCISVLCLIYGINYTIDNCAPMLSTFVLGKDFTRTKWVKNALEVHGVAILQSYLCYIVGLIPLAAVPSNLTCTLFRCLFLIAFVTFFHCFAILPVILTFLPPSKKKRKEKKNPENREEIECVEMVDIDSTRVVDQITTV

SEQ ID NO: 250230 - DNA, 2667 bp, Artificial Sequence
  derived and/or modified sequence
atgctccggcaggtactgcacagaggacttagaacgtgtttctctaggctgggtcacttcattgccagccaccccgtctttttcgctagcgcccctgtgcttatatccattctgctgggggcatcgtttagtcggtaccaggtggaggagtcggtagagcatctcctggccccacagcacagtttggcaaagatagagcgaaacctcgttaattcgctctttccggtgaaccggagtaagcatcggctgtactcagacctgcagacacccggcaggtatggacgcgtgatcgttacttccttccagaaggccaatatgcttgaccagcatcacacggatttgattctgaagctccatgccgccgttacaaagattcaggtcccccgccctggcttcaactacacatttgctcacatctgtattctcaataatgacaaaacctgtatcgttgacgatattgtgcatgtgctcgaagagctgaagaacgccagggcaactaaccggactaacttcgcgatcacctatcccataacacatctaaaggatggaagggctgtctataatgggcatcagcttggaggagtgaccgtgcatagtaaggatagggtaaaatcagccgaggccattcagttgacttactacctacagagtattaacagcctcaatgatatggttgcggagaggtgggaatcttccttctgcgacacagtacgcctcttccagaaaagtaactccaaagtaaagatgtacccgtacacgtcatcttctctgcgggaggacttccagaaaacttctcgagtcagtgagagatatctggtaactagcttgatcttagtcgtgacaatggccatcttgtgttgtagtatgcaggattgtgtgagatctaagccatggctcggactgctgggactggtgacaatttcactggctactcttacggctgcaggtattatcaacctgactggggggaaatataacagtactttcctgggtgtgccctttgttatgcttggccacgggctgtatggcactttcgagatgctcagtagctggcgaaagacacgggaggaccagcacgtgaaggagcgcacggctgcagtgtatgccgactcgatgttatccttctccttaaccacagccatgtatctggttacgttcggcatcggggcctccccttttactaacatcgaagcagcccggatcttctgctgcaactcctgcatcgcaatcttctttaactacctttacgtgcttagcttctacggatcgagccttgtcttcaccggctacattgagaataactatcagcactctatcttttgccgcaaggttcccaagccagaggcgctccaggaaaagccggcctggtatcgtttcctgctcaccgccagattcagcgaggacactgccgagggcgaggaagccaatacttacgagtctcatctgctggtctgcttcctgaaacggtactattgcgactggatcaccaacacttatgttaaacccttcgtggtgctgttctatcttatctacatcagttttgccctgatgggctacctgcaagtgtctgaggggtccgatctcagtaatatcgtcgcgactgctacccagaccatcgagtatacaactgcccagcagaaatacttcagcaactactcccccgtcattggattctatatatatgagtcaatcgaatactggaacacgtcagtccaggaagacgttttggaatataccaagggattcgtgcggatctcttggttcgagagctatctaaactacctgcggaagttaaatgtgagtacaggtttgcctaaaaagaacttcacagatatgctgagaaacagctttctcaaagcacctcaattctcccatttccaggaggacattatcttttcaaaaaagtataatgatgaggtcgacgtggtggctagccggatgtttttggtggctaagaccatggaaacgaaccgtgaggagctttacgaccttctagaaacactcagacgtctgtcagtcacctcgaaagttaagttcattgtgttcaatccctccttcgtctacatggacaggtacgcatcttctctgggagcccccctgcacaactcctgcatttccgccctgttcctgttgtttttctctgctttcctggtagccgatagcctgattaacgtctggattacactgaccgtggtttctgtggagttcggagtgattggattcatgactctctggaaggtggaattggattgtatttctgtcctgtgccttatctacgggatcaactacacaatcgacaattgtgccccgatgctatcaacattcgtccttggtaaagattttacccgcactaagtgggtaaaaaacgcactggaagtccacggagtcgctattcttcagagctatctgtgctacattgtaggcctcatccccttagctgcggtaccttccaacctgacatgtactttgtttcggtgtttgttcctgattgcttttgtgacattcttccactgtttcgcgatcttgcccgtgattctgacatttctccctcctagcaagaaaaagcgcaaagagaagaagaaccctgaaaatagagaagaaattgaatgtgtggagatggtcgacatcgattcaacacgcgtcgtggatcagatcacgaccgtttag

SEQ ID NO: 250231 - DNA, 2667 bp, Artificial Sequence
  derived and/or modified sequence
atgctgcggcaggtgctgcaccggggcctgcggacctgcttcagccggctgggccacttcatcgccagccaccctgtgttctttgccagcgcccctgtgctgatcagcatcctgctgggcgccagcttcagccgctaccaggtggaggagagcgtggagcacctgctggccccccagcacagcctggccaagattgaaagaaacctggtgaacagcctcttccctgtgaacagaagcaagcaccggctgtacagcgacctgcagaccccaggccgctatggccgggtgattgtgaccagcttccagaaggccaacatgctggaccagcaccacacagacctgatcctgaagctgcacgccgctgtgaccaagatccaggtgccccggcccggcttcaactacacctttgcccacatctgcatcctgaacaatgacaagacctgcatcgtggatgacatcgtgcacgtgctggaggagctgaagaatgcccgggccaccaacagaaccaactttgccatcacctaccccatcacccacctgaaggatggccgggctgtgtacaacggccaccagctgggcggcgtgacagtgcacagcaaggacagagtgaagtctgctgaggccatccagctgacctactacctgcagagcatcaacagcctgaatgacatggtggccgagcgctgggagagcagcttctgtgacacagtgcggctcttccagaagagcaacagcaaggtgaagatgtacccctacaccagcagcagcctgcgggaggacttccagaagaccagccgggtgtctgagcgctacctggtgaccagcctcatcctggtggtgaccatggccatcctgtgctgcagcatgcaggactgtgtgcgcagcaagccctggctgggcctgctgggcctggtgaccatcagcctggccaccctgacagctgctggcatcatcaacctgactggaggcaagtacaacagcaccttcctgggcgtgccctttgtgatgctgggccacggcctgtatggcacctttgagatgctgagctcctggaggaagacccgggaggaccagcacgtgaaggagaggacagctgctgtgtatgctgacagcatgctgtccttcagcctgaccacagccatgtacctggtgaccttcggcatcggggccagccccttcaccaacatcgaggccgcccgcatcttctgctgcaacagctgcatcgccatcttcttcaactacctgtatgtgctgtccttctacggcagcagcctggtgttcaccggctacatcgagaacaactaccagcacagcatcttctgcaggaaggtgcccaagccagaggccctgcaggagaagccagcctggtaccgcttcctgctgacagcccgcttcagcgaggacacagctgagggggaggaggccaacacctatgagagccacctgctggtgtgcttcctgaagcgctactactgtgactggatcaccaacacctacgtgaagccctttgtggtgctcttctacctgatctacatcagctttgccctgatgggctacctgcaggtgtctgagggcagtgacctgagcaacatcgtggccacagccacccagaccatcgagtacaccacagcccagcagaagtacttcagcaactacagccctgtgattggcttctacatctatgagagcattgagtactggaacacctctgtgcaggaggatgtgctggagtacaccaagggctttgtgcgcatctcctggtttgagagctacctgaactacctgaggaagctgaatgtgtccacaggcctgcccaagaagaacttcacagacatgctgaggaacagcttcctgaaggccccccagttcagccacttccaggaggacatcatcttcagcaagaagtacaatgatgaggtggatgtggtggccagcaggatgttcctggtggccaagaccatggagaccaaccgggaggagctgtatgacctgctggagaccctgcggcggctgtctgtgaccagcaaggtgaagttcatcgtgttcaaccccagctttgtgtacatggacagatatgccagcagcctgggcgcccccctgcacaacagctgcatcagcgccctcttcctgctcttcttcagcgccttcctggtggccgacagcctcatcaacgtgtggatcaccctgactgtggtgtctgtggagtttggagtgattggcttcatgaccctgtggaaggtggagctggactgcatctctgtgctgtgcctgatctacggcatcaactacaccatcgacaactgtgcccccatgctgagcacctttgtgctgggcaaggacttcaccaggaccaagtgggtgaagaatgccctggaggtgcacggcgtggccatcctgcagagctacctgtgctacatcgtgggcctcatccccctggccgctgtgcccagcaacctgacctgcaccctcttccgctgcctcttcctgattgcctttgtgaccttcttccactgctttgccatcctgcctgtgatcctgaccttcctgccccccagcaagaagaagaggaaggagaagaagaacccagaaaatcgggaggagattgaatgtgtggagatggtggacatcgacagcaccagggtggtggaccagatcaccaccgtgtag

SEQ ID NO: 250232 - DNA, 2667 bp, Artificial Sequence
  derived and/or modified sequence
atgctgcggcaggtgctgcaccggggcctgcggacctgcttcagcagactgggtcacttcatcgcaagtcacccggttttctttgccagtgccccggttttgattagcatcctgctgggtgcttctttcagtcgctaccaggttgaggaatccgttgaacacctattggcaccacagcatagcctggccaagattgagagaaacctagtgaactctctattcccggtaaaccgtagtaaacatcgtctttacagcgatctgcagactcccggccggtacggacgcgtcatcgtgacctctttccagaaggcgaatatgctggatcagcatcatacagacctgatccttaaactgcatgcagcggtgaccaagatacaggtgccccggccaggcttcaattacacttttgcccatatctgcattctgaataatgacaaaacctgcatcgtggacgacatcgtgcacgttttggaggagttgaagaacgcccgggcgacaaatcgcaccaatttcgccatcacttaccctattacacatttaaaggatggacgagctgtctacaatgggcatcagctaggtggagtaacagtgcacagtaaggatagggtgaagagtgcggaggccatacagttaacttactacctgcagagtattaatagccttaacgacatggtggctgaacggtgggagtcctctttctgtgataccgtgcgattatttcaaaaatcgaactccaaagttaaaatgtatccctatacctcttcctcattgcgtgaggactttcagaagacctccagagtatcagagcgctatttggtgactagcttaattctggtagtcacaatggctattctttgttgctctatgcaggattgcgtgcggtcaaaaccctggctcggtcttctgggcctggtgactataagtctggctacccttactgccgctggcatcatcaatctgaccgggggtaagtataattctacgttccttggagtcccttttgttatgttaggacatggactgtatggcaccttcgagatgttgagctcgtggcggaaaacaagggaggaccaacatgtgaaggagcgcacggctgccgtctacgccgactccatgctcagttttagcctgaccactgcaatgtatctcgtcacttttgggattggcgcgagcccttttactaacattgaagccgctaggatcttttgctgcaactcttgcatcgcgatcttctttaattatttatacgtgctcagtttttatgggagctccctggtctttaccggctatatcgagaataattaccaacactcaatattttgtagaaaggtccccaagccggaagccttacaagagaaaccagcatggtatcggtttcttcttactgctcgtttctcagaagatacagcagagggggaagaagcaaatacgtatgaaagccacctgctcgtctgcttcttgaaaagatattactgtgactggatcactaatacatacgtgaagccattcgttgtcctgttctacctgatttacatttcttttgctctaatgggctaccttcaggtttccgagggaagcgatctgagcaatattgttgccacagcgacacagacaatcgagtatacaactgcccagcagaaatactttagtaattactctccagtgatcggattctacatttatgagagcattgagtattggaatacatccgttcaggaggacgtgttggagtacaccaaaggctttgtgcggataagttggttcgagagttacttaaattacctgcggaaactaaatgtttcaactggcttgcctaagaagaatttcaccgacatgctccggaattccttcttgaaagccccacagttcagccacttccaggaagatatcattttctccaaaaagtataacgatgaggttgatgtggttgccagccgtatgtttctcgtggcaaagacaatggagaccaatcgcgaggaactctacgatctgcttgagacactgaggcgtctgtccgtgacttcgaaggtgaagtttatcgtgtttaacccaagcttcgtgtatatggaccgctatgccagctcactgggagcccctctgcacaactcctgtattagtgccttatttttgttattcttcagtgcttttttagtggccgattccctcattaatgtatggatcacactgacagtggtgagcgttgagtttggggtaatcgggtttatgaccctgtggaaggttgaactggattgcatcagcgtgctctgtttaatctacggtattaactatacaatcgataactgcgctccaatgctctctacatttgttcttgggaaagactttacacgtactaagtgggtgaagaacgcattagaggtgcatggagtcgccattcttcagtcatatctctgttatatcgtagggcttatcccactggcagctgtgccctcaaatcttacgtgcacactgtttcgatgtctgtttctcatagctttcgtgacgttttttcactgcttcgccatcctgcccgtcattttaacgtttctccccccaagcaagaaaaaacggaaagagaagaagaaccctgagaatagagaagagatagaatgtgtggaaatggtagacatcgatagtactagagttgttgaccagatcacaactgtttag

SEQ ID NO: 250233 - DNA, 13714 bp, Artificial Sequence
  derived and/or modified sequence
tttggaaggaggcgtgatttccacgttcgagcgtcttcgctccccaccccctctcggcaccagccagtgcgcgccaccacctgagcctggcgagagccgggacgcacgcagtcttcagcctgctcctttaagcctctggagagactcggctctgagcgggtccgcccgacacccgccccctccccccactcctgagaactctttactttttgtttggaaaatcggggccatttctttatttatctctgggtcttcccggaggagggcagagaaggggagagcgagcttggcgggccggaccgggggaggggagcgaagggaggggaggggactgggtgtagcctggaattctccgtcctcgtgttcctgggcgggcgcgcagagtctcctggcgatagcgccgtcgccgctccccgcgccaccccgtcgttggccttgggggtcgggtgagtggggtcatgacgagccgcgggggctgccccgggccccgcccgcgctgagaggggacgcggccgcgcggcgcggagcccccctggcggggaggccgcggggggtggggagggcgcacgcggtagggcggagtgggggcggcgcagaggccgccaagctggggggctctccgggagggcgcggccgcgggcaggagggcgtgtctccggctcgaggggaccctcccgaggcgcggcgcgggactccccgatggtggtgccgcggctccgggagagctcagggtctcgccgccgccgccgtcgccgccgccgcgggcgccgctgccgccgccgccgccgccgccgccgccgccgcccgaacccgcgccgagcgtgcgcctcgccctcctcccgcgcccgctctgctctaggatgctgcggcaggttctgcacaggggcttgaggacgtgtttctcccggctcggccacttcattgccagtcaccctgtcttcttcgcctcggcgccggtgctcatctccatcctgctcggcgccagcttcagccgctaccaggtcgaggagagcgtggagcacctgctggcgccccagcacagcctggccaagatcgagcgcaacctcgttaacagcctcttcccggtcaaccgctccaagcaccgtctctactcggacctgcagacccccgggcgctacggccgggtcatcgtcacctccttccagaaagccaacatgctggaccagcatcacaccgacctgatcttaaagttgcatgctgctgtcaccaagatccaggttccaaggcctggttttaattacacgtttgcccatatatgtatcctgaataatgataagacttgcatcgtggatgacatagtgcacgtcctggaagagctaaagaatgctcgggccaccaatcggaccaattttgctatcacatacccaatcactcacttaaaggacgggagggctgtgtacaatgggcaccagcttgggggcgtcactgtgcacagcaaagaccgggtgaaatctgcagaggccatccagctcacctactacctgcagtcaatcaacagtctcaatgacatggtggctgagaggtgggagtccagcttctgcgacactgtcagactgtttcagaaatccaacagcaaagtcaaaatgtacccttacacgtcctcctcactgagggaagatttccagaagaccagccgcgtatcagaacgttacctggtcaccagcctgattctggtggttaccatggccatcctgtgttgctctatgcaggactgcgtccgcagcaaaccctggctaggcctgctcggattggtgaccataagcctggccactctcactgcagccgggatcatcaatcttactggtgggaaatataattccaccttcctgggagtccctttcgtcatgctaggtcatggattatatgggacttttgaaatgttatcctcctggaggaaaactagagaagaccaacatgttaaagagagaactgcagcagtctatgcagactccatgctctccttttctctcaccactgccatgtacctggtcacctttggcataggggccagccctttcacgaacattgaggcagccaggattttctgctgcaattcctgtattgcaatcttcttcaactacctctatgtactctcgttttatggttccagcctagtgttcactggctacatagaaaacaattaccagcatagtatcttctgtagaaaagtcccaaagcctgaggcattgcaggagaagccggcatggtacaggtttctcctgacggccagattcagtgaggacacagctgaaggcgaggaagcgaacacttacgagagtcacctattggtatgtttcctcaaacgctattactgtgactggataaccaacacctatgtcaagccttttgtagttctcttttaccttatttatatttcctttgccttaatgggctatctgcaggtcagtgaagggtcagaccttagtaacattgtagcaaccgcgacacaaaccattgagtacactactgcccagcaaaagtacttcagcaactacagtcctgtgattgggttttacatatatgagtctatagaatactggaacactagtgtccaagaagatgttctagaatacaccaaggggtttgtgcggatatcctggtttgagagctatttaaattaccttcggaaactcaatgtatccactggcttgcctaagaaaaatttcacagacatgttgaggaattcctttctgaaagcccctcaattttcacattttcaagaggacatcatcttctctaaaaaatacaatgatgaggtcgatgtagtggcctccagaatgtttttggtggccaagaccatggaaacaaacagagaagaactctatgatctcttggaaaccctgaggagactttctgtcacctccaaggtgaagttcatcgtcttcaatccgtcctttgtatacatggatcgatatgcctcctctctgggagcccccctgcacaactcctgcatcagtgctttgttcctgctcttcttctcggcattcctggtggcagattcactgattaacgtctggatcactctcacagttgtgtccgtggagtttggagtgataggtttcatgacattatggaaagtagaactggactgcatttctgtgctatgcttaatttatggaattaattacacaattgacaattgtgctccaatgttatccacatttgttctgggcaaggatttcacaagaactaaatgggtaaaaaatgccctggaagtgcatggggtagctattttacagagttacctctgctatattgttggtctgattcctcttgcagctgtgccttcaaatctgacctgtacactgttcaggtgcttgtttttaatagcatttgtcaccttctttcactgctttgccattttacctgtgatactgactttcctgccaccctctaagaaaaaaaggaaagagaagaaaaatcctgagaaccgggaggaaattgagtgtgtagaaatggtagatatcgatagtacccgtgtggttgaccaaattacaacagtgtgataatgtctgcttggcatattttcaccttaggtcttatcaagaccaaagagattatgttaatgaaacaattaaattcaaagttcttcccttttttaaagataggaaacaggcattgccaaaaaaaaaaaaaaaaaaaaaaggaaaggacagtggggagaaatgggcctggcatattttcagtctttaaaacaaaggagttgttatgagaattcacacacacatagacacacacacacacacacacacacacacacacacacacacaccctgggagacctatagtctcttaaactaagatcaagtagaagaaagcttattaacaagcaggatcctgccttatccaaactgcagatgttgctggcattgtgacaaaacccactgattgaaaggtcaactgccaaggcagaaacacctttaagcattgttcaaacaataaggcttccagaacttctgtagagcagtagctccagtcatggtctgtggtttgaggttttagctgtctcacctagctccctaacactgaaggagatacttgtgaaagttctgaccagcaaaagcaagccagagccttggaaactgatatgtggtagagtggccatcactcatggactaaaattgattcaccgctaaatttacccaggtgaagcagtttcgttgtctagaatgaaattatcatattccgccattggtatgcctttaacatttgtatagtttggtttgcttaaaacaccttaaaaccaatgacagctccagcactgcagaattggtgtgattctactttggaatagcttgtcacttgtcaccaaatgggtctgctttattagttacagctcttggcaggaggatccagggacccaaaaccacagggccaaacccaaatacctggcatgatggagcaaaagcaggtgtctacttggacccagatatagtgtctccattttaacaacaacaacaaaatagccagctggtacagctgtttgcattggccctacatgcattttttgcatggatatccagaaacatctgcccacacaaaactgcggggaaaaaaaatgaacactgaaatagttatttgctgttgcttccaacttgtagtgccagtctgcctttgctgtgaaacacacctgctcagagacagagaggggaagaagatctttggtaagtctaagtcctgacgctgagaagctttgtaaaagtgcagggagataaagggccaaaagggagatagatggaaaacactggaaaaagtattcactgatacaaatctatcaatgatggcagtccaattctcttgctaaagtggctgcacctcaccttgctggtcccccccacaccttttttgatgtccttctgcgtcatcatagcaaggcccttctgtaaattaacaagcctagatatttatactcttgacttccagtatctacagaagaatggttcatagatctaaacagaaatggtttagatctaaaaaggctgtatacgttgcccaggcccctgcatttctttaaatttataaaaatgaagctaaaacctggttacatttgaagcaaatatctacagtatttttcccttttagagatgtagcttccttagacatctgtagtggtaagcatttcccaaaagcatcttacctttctgaaccttagcagacatactgtgcagcttacctatcttctgcagaggaggaaactgagacctaggagaataaagtgactcactcaggtcacaccactaaagggttttcatcatttcagcatacctaagacagggcagtccaattttcagtattctcataagatggctattactcctctcaaaatgcatttccaaagtaggaacataggacttcgttggccacagggcagacatttttttagtgtctggaattaaaatgtttgaggtttaggtttgccattgtctttccaaaaggccaaataattcagatgtaaccacaccaagtgcaaacctgtgctttctatttcacgtactgttgtccatacagttctaaatacatgtgcaggggattgtagctaatgcattacacagtcgttcagtcttctctgcagacacactaagtgatcataccaacgtgttatacactcaactagaagataataagctttaatctgagggcaagtacagtcctgacaaaagggcaagtttgcataatagatcttcgatcaattctctctccaaggggcccgcaactaggctattattcataaaacacaactgaagaggggattggttttactgttaaatcatgtgttgctaaatcattttctgaacagtgtgttctaaatcagtcattgatttagtgtcagccacgtggagcacctcggcttaaagcagctccacaaaacctgacacaacacacacaccaattaaatggattttgttgagaatttaatcattcaatttggtcaaccagaatgacttcctgtggaactctgttttatgacagataatagttttccaacttgattgagtctctgtataccctgggatattgtattttttaatgaagggcattttcaaacttgtcaacttctcttttcagcacttgaaatgaaggcttatggaattctgactgtgaaatgaatttttctattgggagattatgcatgccaagatttattatttattgttagataattattatttatttgttaatactgattattgattattgctctgctgcattggtttagccccgctatggagaagacactttagaagtaactcagaatcacatccccataaaatctaagtctttacttcatcaagttttactttttgaattgctataaagacggaaaaattgatccctgcaaacacttgaagaagctgtgttttttttctttcaattaattccaaccaagacattaacgtccactttaccaaagaaacttacttggttggtttttagttggtgtttgttgtttgtttaccaaagaaaatattcgattcatcaaaaatattgctcctggtcaactaaaaaactgtgatactgggacttttttggccattcataaggaaaatttttaaaagtcaaggtaagggtgatattctctcatttagtggaagaagaagatgtcaattcacagggaatgtggtgttcgcaagaaagaaaatgatacttgaaatagggcattattgtttagcctacagcaacatttcaacaagcagcatcagggctcctcaggttaaaagaagtacagtttgtttcagagaaaaaggaagacaaaccctcgtgaaatgtttctccattgttccagctcataagttttactttgttttgggttttggagtttttagtttctttgatgtttgttttgctttaatttggtttgtggtttgtgtttgcttgtgtttgcttctgcctttcctaccttctgccttttactccctcagttttcagtcagaagtgtgataatcagatgccatcctccatggccacgcttatgtatgcaatataccgctccaaatgaggaccttggtaacccttgaccctttaattctaactaaccatcacccaatcgtaagtggcattatgggaccatgataccacttttctccagtgtcaatgacagagctcagctgtgtccatcacaagaaaaggtggaatgggcagctgtcttgggggtgtggcaagaggcagaacctcttggacacaaatgttatcttcctcataatggctttattcttttggatcctattaaagtacccctgtagcttatagtagtgtttgacctctgtgactctgttttctcatctgtaaaatggggataatatcagtaaatgtctttaaattcagcaaatacttatcgagtgccaaatatcgcccagatactgttcgagaggctggggacacaacagtcaacaaatcagattttttaaaatctgctcttgtagagtctacctttgagtgacattgcaggtatattgtggggattgaatgagatgagagatgacatttggaaagcactcttggaaaggcctggcaaagaaaagagactcaagacattatttgtaattcagcaatctcgcacagtagcattagggctcgggatgtaaagctactgagaagtagatttgagcctgagaattagggctacaaatacaatgagttgccacagaaggtagttaattaccagtcattttaggacatcaaaatgaagctgatcaccacatagtggggccactgtaaaggggctgcaagtcctggatgttggcatcatactatgatctttgaaaaaaacagatacaggcacttgcttttggggatggggaagggacaccactgattactgaataactgtggctggcttgtctgagggaatgtaaacattcccttgaggtaatttgcttttaattttgtgtaaaaagcaccaggtatttagagacataaagttcccgttttttaaaagaatagtaaatctgcaatacaaagaaaaatattaagttagtggattcgctggcaaagaactaagaatggctgcagccaacacactgcagagttcctccctgtggtggttacaactgttatttctgtttcatgccagtccaggagaaagcaaagaggaaagtggatgagctataatccgttcacctgaataggcagtgccaggatgtcccccccagcttgcctctcacccgccccgctgctgcccagctgatttgtttgaagtcctctttgatatctatgagagcaccgtggaaggaagaagaagggaggcgaccggagagctatggcctctgtgcagatttttgagttagattaaaattagtaccacctgattaggagcctacctggtgaggaaaaaagccttcttttcaaagtacaaaaaaaagcgatgtgtaccaaggagaaaaccagcagagaaagcttggtggaagaagtgatgttcttgtggaatgtgccagcagcttctccttccagaatgctgacaccagatgaatctttggttagaattaagcctacccctttgtttttcacatgagaaaactgaaccctcgagtaatgaaattatattcacagagctaattagaaacaggagactataattgaaatctagtttttagcctcaattctttctccattttgccactttactgccaaattctattcatctaaattattggggtcttaacctgggggccaaatgagttcatgggaggggtctctgagtttcctacaattaagttacatgcaaaaatgtgtgtatatgttcaacatgtgcattttcctaaactgagggctcagattccaaaagaggtctatgaccgaaaaagggtgaagaaccactgtcctaaattaatacagacctcattgggagtgtgatcctggtgtcctcattttggctaatgagcaatcaagaacttttgaactatcttttctctaaggatccaaaaatgcttcaaaatattggtttcttcatcccaagccaagtgcctacttctattcatttattcttcattcattctttcattcattcatttctttattctgcaaatgtattttcagtgccaattcatgttctagcagcagctaaatatgccctccacagcaggaccaggaaaggagccctctgtactgtgctcttgttggcaagaggaacaccaggttgctaccacattctcactgttgcaacaaattatatatagcctcaaattttcagtaaccatcccacacacacatacacacataaaggcagcagccaacaaagccaacatatagaagtgtgccctgtcaaagaaccaggaagagcagcctatttccaggttatatacagtgatatgctgtttacaactgcataccacatccttagaaggcctgctcccaaatgagccctactctgagatgtctacaccaggcatgctttcacacacgtgcagtaccctactctcaaaacaagtatggagagaataagtctcattcatctcgttaatatttttagtgggcaaagaagcaaccgtggccatggacagatgggtgcatttaaggacaggtgtggccgggcacagtggctcaagcctgtaatcccagcactttgggaggcggaggcgggcagatcacgaggttaagagattgagaccatcctggccagcatggtgaaaccccgcctctactaaaaaatacaaaaaaattagctgggcgtggtggcacgtgcctgtagtcccagctactcaggaggcaggagaatcccttgaacccgggaggtagaagttgcagtgagccgagatttcaccactgccctccagactggcaacagagtgagacttcgtctcaaaaaaataaaggacaagtgtgttttatacacaaatatgcagaagcccagttctcttgactccaagtcagaagctagataaaatagaggttgctgggggaagttggaaaataaatgactatactgtacttgttggctctgctgctgctgatataacttcaggcacaacggaagccgcctcggttggcctatgggaagggctgggtgaatcactgcttggccttgcatgaagcacaaaggacacaccaatggctgatcagtggcccttccatcatcttctgcccagccatgataaggaaagccttctattgagatggaggaatattagctcaactttgtagcatctgatgtaaagtttgaggggtttgtcttttttgtttgtttgtttgtttttttttgagatggagtctcactctgtcacccaggctggagtgcagtggcgccatctcagctcactgcaagctccacctcccaggttcacgacattctcctgcctcagcctcctgagtagctgggactacaggtgcccgccaccgcgcccggctaattgtgtgtgtgtgtgtgtgtgtgtgtgtgtgtgtgtttagtagagatggggtttcaccgtgttacccatgatagtctcgatctcctaacctcgtgatccacccgcctcggcctcccaaagtgctgggattacaggcgtgagccaccgtgcccggcaagggctttgttcattaggatcaacaaagtgctttgtctaattcctgcaaaatggcaaagacccagcccatttccattactcattccaggctcatgctcaggaaaactaataacgttctctttgacaaaacaatttccttaattttctaggatgaatcttgaacatgtttagctcagcctttcagatatttattctttaaattaccatcctgtcaaaattgcctttacgcactgatccagaatcaccaaggcagttgccacgatgcctcccaggactgtgggtgactgggcaaactggtaatgacccgttggctctgcttcacacacacacatacacattgacacacataaatgtacacatgcatatatgtgtgtacaacacaactataaaacatagaaacatatacctgtacatatgcacatgcttacatacacacatatcacagatgtgcatgcacacatacacatgcacaccaccttttacaatatgcctgacacatttgaggcacattaaaatgccttggcaggcccagccctatagttctgtaaggtttggcaggccaaaggcttcggatgtctgcaggataccattgaaaaaatgttatcttccccttctatatgtttcttatgcacgagcacagctaagagcagccaaatagtaagctttaaagaaaagaaacctggaaaagtgaatgtgccttgcaatttaaaaattgctaacagtttcacagtgggaaaattgcatttgttggaattttccaagtcataagcaagaagaatagcatagacccaaaacgacagagatctcttccaaggtatggaattgtggaaatttatttagaatatttgcttggtgatccagagaagggggaaagaagtggtgaggaagaatatatggggtgatccctccaaattgccaactcctcgtcttaggaagaagtgggcagtttccattgatccctagcatcagtttgacgggaaaaccggtgcatttcatcaacctcaaggaaaggaagtgccatgcatggaggcctggtgataggcaacatccatttagaagaacagtcacacaagcaacagaagaactatccaagactagaagcttagaagcttataccaaactctctgtctctctctctctctctcacacacacacacacagagtggatgggaggggacattaagaggaaccctagtgcagttcccccaaaaaaccttggcatagagtataacagggaaaaagtaattactgggaagctgaaaacaatcaaatatgtgaggaatgactgaatatgagctgaggataatgtaaattgttctggattgtctataagataaagatacagagcctgaatctatgtttttctgaataaagagaccccatattctcttttgaattattgacctataattcctcttcagcagctttgaatacactcaagttctcttcctattgtttatgatcccataatacaaccacccactatttgttgtggtttacaatccagcttagaacccttgagcaaaattattgaattattgaatgctaggcccaaacaaaagaaatttcagcttggttttagtaatttcttgatcaaacttctctcattcctctaaatgtacaaaggtttcaaagttgtaaaaaatatgtctacatagccaatgctcttagtatttttaacagcaaagataatctctgccaataattattaatgacaaaatagtgataactgttcaatgttgctttaacagtccaattgtagtaggtgagaaaacaaaaaagaagagaagctatgttgaatatttagtaatgttggaaaagatcctcaccctagacataaaatagtttaaacatttaaacatggcccctctcttattgtcattgctagtgaaagaagttcctgaaattgcatattacattgtaaagttttgggctaaatcacaatacatttttaagttgcttccatggcaatagatcgtaagaccacagcttgtcaaagtaaccactaattcagtattcagaaaccttatcatctgttcctccaaaaagaccccatagttaatgttgtgtttcccagtattttagttgggtttcttcacacttaggcaagtgggtgattctggtcataataaactattttcaaactaggaaaaagtatccaaatgctagagcacataatgagttcagcttggtcagttttgagacagataagcataaaaccctactagaaaaaaataatagtcaaacctaaagctttaaaaaatgtgagtcacatcacttttctccaggaaaggcagaacgtgctcagggtggaatttaatcaaaaatgtacccagaacaatttcccacaaagagctgtaatactttgcagcaaggggcattaataaactctaatttttaccgaaagtcaagagacacacagatcttttttggtaccctctacatcatcatagcaaggcccttctgaacattaacaagcctagatgtttctactgcttatttgcagtatctacaggggaatggttcgtggatataaacagaaatgttttatctgaagaggctgtgtatgccaccccagacccctgcatttcttaatatctataaaaatatgactaaacttgttacatttgaggcaaatatgtacagtatttttcccttttaaagatagtttaaaaaatcaaggtaataaaaaacggccaactctttcaggaaaaaaaaaatccggtattttgtactacttgagtttctctaatgcctaaaatatgcatttaaatcatcccacacctacacagaaacaaaatcagcagggaaaaccatcccactgatgattggcaattccaccgttcctctccatctgaccagctttcaccagagggcgatctttcatgcttgcacatcgagtttatacaatgtagaagcccccaagtcacctgggaaatggctcatgccaaatacatggagtccttagttgactatcttttcatattaaaatcccatcttccaatgaagcatcctgttttcaatactgatatcaaatttcgaatgtaaaggagatttcaaatgtattgctttcaccttttcttttttattcatttatttttaattgacataaaaattgtatatatttatgggatacaatgtgatgttttgatatatgtatgcattgtggaatgattaaatcaagctaattaaca

SEQ ID NO: 250234 - DNA, 2667 bp, Artificial Sequence
  derived and/or modified sequence
atgctccggcaggtgctgcaccgcggacttagaacctgtttctcccgcttgggccacttcatcgcatcccatcctgtcttttttgcctccgcgccagttctgatctccatattgcttggtgcctctttctcccggtaccaggtcgaggagtcggtggagcatcttctcgctcctcagcactccctcgctaagattgagcgaaacctggtgaattccttgttccctgtcaatcggtccaaacatcggctgtattctgacttgcagaccccgggacgctatgggagagtgattgtcaccagttttcaaaaggctaacatgctggaccagcatcacacagacctaatcctcaagcttcacgcagctgtaactaaaattcaggttcccaggccagggtttaattacacctttgcgcatatctgcattctgaataatgacaaaacatgtattgtcgacgacattgttcacgttctggaggaactgaaaaacgcacgggctacaaacaggactaactttgctataacataccccatcacccacttgaaagatgggagggccgtgtacaacggccaccagctgggcggtgttactgtgcactcgaaggatagggttaagtccgcggaagctattcagctgacctattatttacagagcatcaactctctcaacgacatggtagctgaacggtgggagtcttcattttgcgacacagtacggctttttcaaaaatccaattccaaagtcaagatgtatccttacacaagttcaagtcttagagaggattttcagaagacctcccgtgtgtctgaaaggtacttagtgaccagcctaatcctggtggtgacaatggccatcctgtgttgctcaatgcaggactgcgttagaagcaagccctggctggggctgctgggtctagtgaccataagtctcgcaaccctcaccgccgctggcattataaacctgacgggcggaaaatataactctaccttcctgggtgtcccattcgttatgctcggccatggattgtatggcacatttgagatgctttccagttggcgtaaaactagagaggatcagcacgtcaaggaaaggacagcggcagtctatgctgattcaatgctgtcattctcgctgaccacggccatgtatctagtaacttttgggatcggggcttcgccgttcacgaatattgaggccgcaagaattttttgttgcaattcctgtatagccatttttttcaactacttgtacgtcctctcattttacggcagctctctagtatttacaggctacatcgagaataattaccaacattcgatcttctgcagaaaagttccgaagcctgaggcgctgcaagagaaacccgcatggtacagattcctactgacagcgagattttcagaggatacggccgaaggcgaagaagctaacacctatgagagccatttactcgtgtgcttcttaaaacgctattattgtgattggatcactaacacatacgtcaagccgttcgttgtgcttttttacttgatctacatcagctttgccctaatggggtaccttcaggtcagtgaaggtagcgatctctctaatatcgtagctactgcgacccagacgatcgaatatacaactgcacagcagaaatactttagcaattactcccctgtgatcgggttttatatctacgaaagcattgagtattggaacacatcagtacaggaggatgttttagaatacaccaaaggttttgtcaggattagctggtttgagagctatcttaattacctccggaagctgaatgtctctacaggtctccccaaaaaaaacttcaccgacatgttacgcaactccttccttaaagctccacagttctctcatttccaggaggacatcatttttagtaagaagtacaatgatgaggtagacgtggtggcatccaggatgtttctggtcgccaagaccatggagaccaatagggaagagctctacgatctcctggagacattgcggcgattatctgtgacctcgaaagtcaaattcattgtctttaacccatcttttgtttacatggatcgctacgcatcaagtctcggggcacctttgcacaatagctgcatttcggctctgttccttctgtttttcagcgcttttcttgtcgccgactcgcttataaacgtatggattaccctgactgtggtctcagttgagtttggagtaattggctttatgactctctggaaagtcgagctggactgtatctccgttctctgcctcatctatggcataaattacacaatcgacaattgtgcgccaatgctgtccacctttgtgctaggcaaggacttcacccgcaccaagtgggttaagaatgctctcgaagtgcatggcgtggccatcttacaatcctacctgtgctacatcgtggggctgatcccattagccgctgtgccctcaaaccttacatgtactctgttccgctgcctgttcttaatcgctttcgtgacattcttccattgttttgccattctgcccgtcattctgacattcctccccccatccaagaagaaacgcaaggagaaaaagaacccagagaacagagaggaaattgaatgcgtggaaatggtcgatattgatagcacgcgtgttgttgaccagatcactacggtgtag

SEQ ID NO: 250235 - DNA, 2667 bp, Artificial Sequence
  derived and/or modified sequence
atgctgagacaggtgctgcacagaggcctgagaacctgcttcagcagactgggccacttcatcgccagccaccccgtgttcttcgccagcgcccccgtgctgatcagcatcctgctgggcgccagcttcagcagataccaggtggaggagagcgtggagcacctgctggccccccagcacagcctggccaagatcgagagaaacctggtgaacagcctgttccccgtgaacagaagcaagcacagactgtacagcgacctgcagacccccggcagatacggcagagtgatcgtgaccagcttccagaaggccaacatgctggaccagcaccacaccgacctgatcctgaagctgcacgccgccgtgaccaagatccaggtgcccagacccggcttcaactacaccttcgcccacatctgcatcctgaacaacgacaagacctgcatcgtggacgacatcgtgcacgtgctggaggagctgaagaacgccagagccaccaacagaaccaacttcgccatcacctaccccatcacccacctgaaggacggcagagccgtgtacaacggccaccagctgggcggcgtgaccgtgcacagcaaggacagagtgaagagcgccgaggccatccagctgacctactacctgcagagcatcaacagcctgaacgacatggtggccgagagatgggagagcagcttctgcgacaccgtgagactgttccagaagagcaacagcaaggtgaagatgtacccctacaccagcagcagcctgagagaggacttccagaagaccagcagagtgagcgagagatacctggtgaccagcctgatcctggtggtgaccatggccatcctgtgctgcagcatgcaggactgcgtgagaagcaagccctggctgggcctgctgggcctggtgaccatcagcctggccaccctgaccgccgccggcatcatcaacctgaccggcggcaagtacaacagcaccttcctgggcgtgcccttcgtgatgctgggccacggcctgtacggcaccttcgagatgctgagcagctggagaaagaccagagaggaccagcacgtgaaggagagaaccgccgccgtgtacgccgacagcatgctgagcttcagcctgaccaccgccatgtacctggtgaccttcggcatcggcgccagccccttcaccaacatcgaggccgccagaatcttctgctgcaacagctgcatcgccatcttcttcaactacctgtacgtgctgagcttctacggcagcagcctggtgttcaccggctacatcgagaacaactaccagcacagcatcttctgcagaaaggtgcccaagcccgaggccctgcaggagaagcccgcctggtacagattcctgctgaccgccagattcagcgaggacaccgccgagggcgaggaggccaacacctacgagagccacctgctggtgtgcttcctgaagagatactactgcgactggatcaccaacacctacgtgaagcccttcgtggtgctgttctacctgatctacatcagcttcgccctgatgggctacctgcaggtgagcgagggcagcgacctgagcaacatcgtggccaccgccacccagaccatcgagtacaccaccgcccagcagaagtacttcagcaactacagccccgtgatcggcttctacatctacgagagcatcgagtactggaacaccagcgtgcaggaggacgtgctggagtacaccaagggcttcgtgagaatcagctggttcgagagctacctgaactacctgagaaagctgaacgtgagcaccggcctgcccaagaagaacttcaccgacatgctgagaaacagcttcctgaaggccccccagttcagccacttccaggaggacatcatcttcagcaagaagtacaacgacgaggtggacgtggtggccagcagaatgttcctggtggccaagaccatggagaccaacagagaggagctgtacgacctgctggagaccctgagaagactgagcgtgaccagcaaggtgaagttcatcgtgttcaaccccagcttcgtgtacatggacagatacgccagcagcctgggcgcccccctgcacaacagctgcatcagcgccctgttcctgctgttcttcagcgccttcctggtggccgacagcctgatcaacgtgtggatcaccctgaccgtggtgagcgtggagttcggcgtgatcggcttcatgaccctgtggaaggtggagctggactgcatcagcgtgctgtgcctgatctacggcatcaactacaccatcgacaactgcgcccccatgctgagcaccttcgtgctgggcaaggacttcaccagaaccaagtgggtgaagaacgccctggaggtgcacggcgtggccatcctgcagagctacctgtgctacatcgtgggcctgatccccctggccgccgtgcccagcaacctgacctgcaccctgttcagatgcctgttcctgatcgccttcgtgaccttcttccactgcttcgccatcctgcccgtgatcctgaccttcctgccccccagcaagaagaagagaaaggagaagaagaaccccgagaacagagaggagatcgagtgcgtggagatggtggacatcgacagcaccagagtggtggaccagatcaccaccgtgtag

SEQ ID NO: 250236 - protein, 207 aa, Artificial Sequence
  derived and/or modified sequence
MSEAVRVPSPATPLVVAAPAPEERKGKESEREKLPPIVSAGAGATAGLDRGAKGQISTFSSFISAVSPKKEAAENRSSPAHLVFPNIKNVREPPPICLDVRQKQRTSMDASSSEMKAPVLPEPILPIQPKTVKDFQEDVEKVKSSGDWKAVHDFYLTTFDSFPELNAAFKKDATASFNTIEDSGINAKFVNAVYDTLLNTVSIMTCK

SEQ ID NO: 250237 - DNA, 624 bp, Artificial Sequence
  derived and/or modified sequence
atgagcgaggccgtgagagtgcccagccccgccacccccctggtggtggccgcccccgcccccgaggagagaaagggcaaggagagcgagagagagaagctgccccccatcgtgagcgccggcgccggcgccaccgccggcctggacagaggcgccaagggccagatcagcaccttcagcagcttcatcagcgccgtgagccccaagaaggaggccgccgagaacagaagcagccccgcccacctggtgttccccaacatcaagaacgtgagagagcccccccccatctgcctggacgtgagacagaagcagagaaccagcatggacgccagcagcagcgagatgaaggcccccgtgctgcccgagcccatcctgcccatccagcccaagaccgtgaaggacttccaggaggacgtggagaaggtgaagagcagcggcgactggaaggccgtgcacgacttctacctgaccaccttcgacagcttccccgagctgaacgccgccttcaagaaggacgccaccgccagcttcaacaccatcgaggacagcggcatcaacgccaagttcgtgaacgccgtgtacgacaccctgctgaacaccgtgagcatcatgacctgcaagtag

SEQ ID NO: 250238 - DNA, 624 bp, Artificial Sequence
  derived and/or modified sequence
atgagcgaggctgtccgcgtgccctctcctgccacacctctggtggtggccgcaccagccccagaggaacgaaaaggcaaggagagcgaacgggagaagctaccacctatcgtttcagccggcgccggggccaccgccggactcgacagaggggccaagggacagatttcaacattctcctctttcatttctgctgtttctcccaagaaagaggccgccgagaatcggtctagtccagcccatctagtcttccctaacatcaaaaacgtgcgggaacctcctccgatctgcctcgacgtgcgacagaaacagcgcacctctatggacgcttcttccagcgaaatgaaggcaccagtcctaccggaacctatcctgccaatccagcccaaaacagttaaagactttcaggaagacgtggagaaggtcaaatcgagtggcgactggaaggcagtccacgacttttatctaacaacattcgactcattccccgagttaaatgccgccttcaagaaagacgccactgcatcgttcaacacaattgaagatagcggaattaacgcaaagtttgtcaacgccgtgtacgatacccttctgaatactgtgagcatcatgacctgcaaatag

SEQ ID NO: 250239 - DNA, 624 bp, Artificial Sequence
  derived and/or modified sequence
atgtctgaggccgtgcgggtgcccagccctgccacccccctggtggtggccgccccagcccctgaggagaggaagggcaaggagagcgagcgggagaagctgccccccatcgtgtctgctggggccggggccacagctggcctggacagaggagccaagggccagatcagcaccttcagcagcttcatctctgctgtgagccccaagaaggaggccgctgagaacagaagcagccctgcccacctggtgttccccaacatcaagaatgtgcgggagcccccacccatctgcctggatgtgcggcagaagcagaggacctccatggatgccagcagcagcgagatgaaggcccctgtgctgcctgagcccatcctgcccatccagcccaagacagtgaaggacttccaggaggatgtggagaaggtgaagagcagcggggactggaaggctgtgcatgacttctacctgaccacctttgacagcttccctgagctgaatgctgccttcaagaaggatgccacagccagcttcaacaccattgaagattctggcatcaatgccaagtttgtgaatgctgtgtatgacaccctgctgaacacagtgtccatcatgacctgcaagtag

SEQ ID NO: 250240 - DNA, 2175 bp, Artificial Sequence
  derived and/or modified sequence
agagccctctcgcggccgcggcggcagcagcagcgccagccccagcaacactgaggccgccgccgccgcctggcgctcccgccgcccggcccgacatgagtgaggcggttcgggtaccctcgcccgccactccgctggtggtggcggcgcccgcgcctgaggagaggaaagggaaggagtcagagcgcgagaagctgccgcccatcgtatcggcgggcgccggcgcgaccgcgggtttggacagaggagccaaaggccaaatttccactttcagcagttttatttcagctgttagcccgaagaaagaagctgctgaaaacagaagttcacctgcacatcttgttttccctaacatcaagaatgtgagagaaccaccaccaatttgccttgatgttagacaaaaacagcgtacatctatggatgcatcatcatccgaaatgaaggccccagtccttccagaacctattcttcctatccagcccaaaactgtgaaagactttcaggaagatgtagaaaaagttaagtcatcaggagattggaaagcagtacatgatttttatctaacaacgtttgattctttcccagaattaaatgctgcatttaagaaagatgccactgcctcatttaacaccattgaagactctgggattaatgctaaatttgtgaatgctgtgtatgataccttacttaatactgtaagtattatgacatgcaagtaatattattctgtgtctcttctgtatatcaaaagcagccatacaaatattgtaaaaatcaccttataattaccttagaaactctgatacaattttatagtaaatgtagctggaattctcataaagttagattattttattcttttattttttaattatgaattaagcagcaaatacttttatatccaatccttttttagaaagacttgctaaaatcatgctttacttactcagcaaaaggaggtaagttatttaattatattggaattacactgaatctgtagatcagtggttcttaaacattagcctgtatcagaatcacaagaagggcttgttaaaatacagaatttcagattcagtaggtcttgggtgaagcccaagaattttcatttgtaacaagttcccaggatatgttgatttatgagttcatttatgatgtgacacatactataaaaattatgtcaccattcaaaaaatccagatgcatatttgaaggactaagtgggaatgataaagacagaatgtaaacaaagtctccagaagtttagctatgaagtgaaagacatgttaagaatgaccacattttgagaaccatactgctatagatcaatttgtgaaaaattgacatcttttcaatccataagcatactgtatccttttaggtacctaggtcttctttaatttctcttggtaatgttttgtagttttctggatagaggtgttacacatttctcattacatgtatttctaggtacttcattttttttatcctattataattttattttccaattgtgactaatatatggaaatactttcatatatttatctttatctaaatacagttgacccttgaacaatgcgagggttaggggcgctaaccccctatgcagtaaaaaaaaaaatctgtgtataacttttgactccccagaagcttaactactaataacctattgttgaccagaagtcttactgataacataaacagtcaattaacgtatattttatgttatatgtattctatactatattgttacaataaagtaagctaaggaaaaggcaatgttattaagaaaaaataaggaagataaaatatatttactatatattaagtggaagtggactatcataaaggtcttcatccttattgagtaggctgaggaagaggaggggttggtcttgctgtctcaggtggcagaggtgaaagaaaataatgtatataagcagacttgcacaattcaagcctgtattcaagagtcaactgtactttgctatattcatccattaattctaatagtacatcagtaaattaacttggattttctgtgtacacaatcttgtcatttgtgaaaaaggagagttttatctccttctaatcctgtatcttatatggatatatgtatgtgtttgcattgactgggacctctttcacaattgtgaataaaagaagtaatagcag

SEQ ID NO: 250241 - DNA, 624 bp, Artificial Sequence
  derived and/or modified sequence
atgagcgaggccgtgcgggtgcccagccccgccacccccctggtggttgccgcccccgctcccgaggaacggaagggcaaggagtcagagcgtgagaaactcccgccaatcgtaagtgccggtgctggtgctacagcagggctggaccggggcgctaagggccaaatctccaccttttctagctttatcagtgcggtgtctcctaaaaaggaggctgcggagaataggtctagccctgcccatctcgtattcccgaatataaagaacgtcagagagccaccgcctatctgtcttgacgtccggcagaaacagagaaccagcatggacgcttcatcatcagagatgaaagcgcctgtcttaccggagccaatcctccccattcagcctaaaaccgtcaaagactttcaagaggacgtcgaaaaagtcaagtcgagcggggattggaaagcagtccacgacttttaccttaccacctttgactcgtttcccgagctcaacgccgcgttcaaaaaagacgcaaccgcttcctttaacacgatcgaggacagcggtataaacgccaaattcgtaaatgccgtctacgacacactgcttaacaccgtctccatcatgacctgcaagtag

SEQ ID NO: 250242 - DNA, 624 bp, Artificial Sequence
  derived and/or modified sequence
atgagcgaagccgtccgcgttccaagtccagccacgcctctggtggtagcggcaccggctcctgaagagcgcaaagggaaggaatcagagagagaaaagttacctcctattgtgagcgccggagctggggcaaccgccggactggatcggggtgccaaggggcaaatctctaccttcagctccttcatctccgctgtctctcccaagaaagaggccgctgaaaatcgcagcagcccagcccatctggtttttcctaatattaagaacgtccgggaacctcctcccatatgccttgatgtgcgccaaaagcagcgcacctccatggatgcaagttcgtcggagatgaaggctccggtcctgcctgagcctattttaccaatccaacccaagacagtgaaagactttcaagaagacgtggaaaaggtgaaaagctcaggggactggaaagcggtgcatgacttttatctgaccacttttgacagcttcccagagcttaacgctgcttttaaaaaggacgccacagcatccttcaacacgattgaggactccgggatcaacgccaaatttgtgaatgcagtgtatgacacgctgctaaataccgtgagcataatgacttgcaagtag

SEQ ID NO: 250243 - protein, 105 aa, Artificial Sequence
  derived and/or modified sequence
MAPAGMSGAQDNSCLYQEIAPSFQRLPCPRTSSRHFSEAMTCPCGWRPFKGGPGGLKGPVWPAKEENSCSHGRIQRVQRRRVPSASPLIQKINRRSVLFHPYCWS

SEQ ID NO: 250244 - DNA, 318 bp, Artificial Sequence
  derived and/or modified sequence
atggcccccgccggcatgagcggcgcccaggacaacagctgcctgtaccaggagatcgcccccagcttccagagactgccctgccccagaaccagcagcagacacttcagcgaggccatgacctgcccctgcggctggagacccttcaagggcggccccggcggcctgaagggccccgtgtggcccgccaaggaggagaacagctgcagccacggcagaatccagagagtgcagagaagaagagtgcccagcgccagccccctgatccagaagatcaacagaagaagcgtgctgttccacccctactgctggagctag

SEQ ID NO: 250245 - DNA, 318 bp, Artificial Sequence
  derived and/or modified sequence
atggcaccagcaggcatgtccggtgcccaagataactcctgtttataccaggagatcgctccatcttttcagagactcccatgccctcggacatcctctagacatttttcagaggccatgacatgcccctgcgggtggcgcccgtttaagggggggcccggtggcctgaagggtcccgtttggccagcgaaggaggagaactcttgcagccacgggcgaatccagcgtgtgcagaggagacgcgttccatccgcaagtccgcttatacagaaaatcaatcggcgttctgttctatttcatccatactgctggagttag

SEQ ID NO: 250246 - DNA, 318 bp, Artificial Sequence
  derived and/or modified sequence
atggccccagctggcatgtctggggcccaggacaacagctgcctgtaccaggagatcgcccccagcttccagaggctgccctgccccaggaccagcagccgccacttcagcgaggccatgacctgcccctgtggctggaggcccttcaagggcggccctgggggcctgaagggccctgtgtggccagccaaggaggagaacagctgcagccacggccgcatccagagggtgcagaggcggcgggtgcccagcgccagccccctcatccagaagatcaacagaagatctgtgctcttccacccctactgctggagctag

SEQ ID NO: 250247 - DNA, 318 bp, Artificial Sequence
  derived and/or modified sequence
atggcccccgccggcatgagcggcgcccaggacaacagctgcctgtatcaggagatcgcaccaagttttcaaagactgccctgtcccagaacctcctctcggcatttcagtgaagctatgacttgcccctgcggatggcgtccgttcaaaggaggccccggcggactgaaaggaccagtatggcccgccaaagaggaaaattcctgttcacacggcagaatccagagggtccaaaggagaagagttccctccgcctctccattgattcagaaaattaaccgccggagcgttctattccacccttactgttggtcgtag

SEQ ID NO: 250248 - DNA, 318 bp, Artificial Sequence
  derived and/or modified sequence
atggcccctgctggaatgtcaggggcacaggacaactcatgtctgtaccaggaaatcgcgccttcttttcagagattgccttgtcccagaacatcttctcgtcacttctccgaggctatgacctgcccttgcggctggaggccattcaaagggggtcctggaggtctgaaggggcctgtttggcctgccaaagaggaaaactcctgtagtcatgggagaatacaaagggttcagaggcgacgggtcccatcagcaagcccactcatccagaaaatcaatcgaaggtcggtgctcttccatccttactgttggagctag

SEQ ID NO: 250249 - DNA, 1083 bp, Artificial Sequence
  derived and/or modified sequence
agttgcgtccgttggggcttctggggcagcccacagggttccgagcatgtgctggcagttgctctttggagcacccacttcacttctcccatgtagttcctgagtgcaggactctcctgaagaaggggcgtctaaaaggccagcccatgcatcttgttcagaccaggctgctccatctccgctaagcccagggatccacttgtgtgtctttctgggataattgtctttagtggcagcctgggcctcggggaaggaagggcatgaggaatggccccggctgggatgtcaggggcccaggacaactcctgtctctaccaggaaattgccccctcttttcagaggctgccttgtcctagaacctcgtcgcgacatttctcagaagccatgacatgtccctgcggctggaggcctttcaagggtggcccaggaggcctcaagggcccggtgtggcctgcaaaggaagagaacagctgttctcacggaaggatccaaagggttcaaaggcgaagggtgccatctgcttccccactgattcagaagataaacaggagaagtgtcctgtttcacccatattgctggtcctgatttttcaatagtgtccctaccctgaagctcttccattggtcatcatggagttagctaacagcccagggaactggtctcttttcccttttcccttaccacctggaactcacctggaaagggcaatcagctggctctatatcagacgccaccacctggtctttgaagtttctgtcctaccagtgccacagctccctctcccacttctgaactacctccaagagagaccatcctcagcagcctagtatgttatgctagtcctggaatggtgtattctggatgtctactcaaggccaaaccccagtattgcctttcgtttccctattcaaggccaaggctagattctcttcattgtctccatttctctttctccagagctcctatagggcaagacactgtttctcatatatttctggatccttggagcttagctcggagcttggcatacatgcccagcatgaacttttctgaataaaataatttcaaatgctgtatacagga

SEQ ID NO: 250250 - protein, 1649 aa, Artificial Sequence
  derived and/or modified sequence
MESVEKDWGWGLWRNLRCLGHAHQGKCCTEGGISSTTKTSSENGSCCFEKAARKDHVCRFIGCGRNDRFNYVVMQLQGRNLADLRRSQSRGTFTISTTLRLGRQILESIESIHSVGFLHRDIKPSNFAMGRFPSTCRKCYMLDFGLARQFTNSCGDVRPPRAVAGFRGTVRYASINAHRNREMGRHDDLWSLFYMLVEFVVGQLPWRKIKDKEQVGSIKERYDHRLMLKHLPPEFSIFLDHISSLDYFTKPDYQMSIRVTRKSYKVSTSGPQAFNSLSYTSGPGACISSSSFSRMGSSSFRGGLGAGYGGASGGITTITVNQSLLSPLNLEVDPNIQAVRTQEEKQIKTLNNKFFSFIDKVRFLEQQNKMLETKWSLVQQQKMARSNMDNMFESYINNLKWQLETLGQEKLKLEAELGNMHGLVEDFRNKYEVEISKCTEMENEFVLIKEYVDEAYMNKMELESSLKELTAKISFLRQLYEEEIGSCSPRSRIHLWCCSWTTAASWTWTASSLRSRPEGFPGGCHADTEQRGELAIKDANAKLSELEAALQLASQDMARQLREYQELMNVKLALDIKIATYRKLLEGEESWLESGMQNMSIHMKTTSSYAGGQSLAYGGLTSPGLSYGLGSSFGSGMGSSSFSHTSSSRAVVMKKIETRDGKLVSESSNVLPNLRITATLLTSVFDNSIKTFGVIESDPFDWEKTGNDGSLTTTTTSTTPQLHTRLTPAAIGIANATPIPGDLLRENTDEVFPDEQLSDGENGIPVGVSPDKLPGSLGHPRPQEKDVWEEMDANKNKIKLGICKAATEEENSHGQANGLLNAPSLGSPIRVRSEITQPDRDIPLVRKLRSIHSFELEKRLTLEPKPDTDKFLETCLEKMQKDTSAGKESILPALLHKPCVPAVSRTDHIWHYDEEYLPDASKPASANTPEQADGGGSNGFIAVNLSSCKQEIDSKEWVIVDKEQDLQDFRTNEAVGHKTTGSPSDEEPEVLQVLEASPQDEKLQLGPWAENDHLKKETSGVVLALSAEGPPTAASEQYTDRLELQPGAASQFIAATPTSLMEAQAEGPLTAITIPRPSVASTQSTSGSFHCGQQPEKKDLQPMEPTVELYSPRENFSGLVVTEGEPPSGGSRTDLGLQIDHIGHDMLPNIRESNKSQDLGPKELPDHNRLVVREFENLPGETEEKSILLESDNEDEKLSRGQHCIEISSLPGDLVIVEKDHSATTEPLDVTKTQTFSVVPNQDKNNEIMKLLTVGTSEISSRDIDPHVEGQIGQVAEMQKNKISKDDDIMSEDLPGHQGDLSTFLHQEGKREKITPRNGELFHCVSENEHGAPTRKDMVRSSFVTRHSRIPVLAQEIDSTLESSSPVSAKEKLLQKKAYQPDLVKLLVEKRQFKSFLGDLSSASDKLLEEKLATVPAPFCEEEVLTPFSRLTVDSHLSRSAEDSFLSPIISQSRKSKIPRPVSWVNTDQVNSSTSSQFFPRPPPGKPPTRPGVEARLRRYKVLGSSNSDSDLFSRLAQILQNGSQKPRSTTQCKSPGSPHNPKTPPKSPVVPRRSPSASPRSSSLPRTSSSSPSRAGRPHHDQRSSSPHLGRSKSPPSHSGSSSSRRSCQQEHCKPSKNGLKGSGSLHHHSASTKTPQGKSKPASKLSR

SEQ ID NO: 250251 - protein, 1244 aa, Artificial Sequence
  derived and/or modified sequence
MSGGGEQLDILSVGILVKERWKVLRKIGGGGFGEIYDALDMLTRENVALKVESAQQPKQVLKMEVAVLKKLQGKDHVCRFIGCGRNDRFNYVVMQLQGRNLADLRRSQSRGTFTISTTLRLGRQILESIESIHSVGFLHRDIKPSNFAMGRFPSTCRKCYMLDFGLARQFTNSCGDVRPPRAVAGFRGTVRYASINAHRNREMGRHDDLWSLFYMLVEFVVGQLPWRKIKDKEQVGSIKERYDHRLMLKHLPPEFSIFLDHISSLDYFTKPDYQLLTSVFDNSIKTFGVIESDPFDWEKTGNDGSLTTTTTSTTPQLHTRLTPAAIGIANATPIPGDLLRENTDEVFPDEQLSDGENGIPVGVSPDKLPGSLGHPRPQEKDVWEEMDANKNKIKLGICKAATEEENSHGQANGLLNAPSLGSPIRVRSEITQPDRDIPLVRKLRSIHSFELEKRLTLEPKPDTDKFLETCLEKMQKDTSAGKESILPALLHKPCVPAVSRTDHIWHYDEEYLPDASKPASANTPEQADGGGSNGFIAVNLSSCKQEIDSKEWVIVDKEQDLQDFRTNEAVGHKTTGSPSDEEPEVLQVLEASPQDEKLQLGPWAENDHLKKETSGVVLALSAEGPPTAASEQYTDRLELQPGAASQFIAATPTSLMEAQAEGPLTAITIPRPSVASTQSTSGSFHCGQQPEKKDLQPMEPTVELYSPRENFSGLVVTEGEPPSGGSRTDLGLQIDHIGHDMLPNIRESNKSQDLGPKELPDHNRLVVREFENLPGETEEKSILLESDNEDEKLSRGQHCIEISSLPGDLVIVEKDHSATTEPLDVTKTQTFSVVPNQDKNNEIMKLLTVGTSEISSRDIDPHVEGQIGQVAEMQKNKISKDDDIMSEDLPGHQGDLSTFLHQEGKREKITPRNGELFHCVSENEHGAPTRKDMVRSSFVTRHSRIPVLAQEIDSTLESSSPVSAKEKLLQKKAYQPDLVKLLVEKRQFKSFLGDLSSASDKLLEEKLATVPAPFCEEEVLTPFSRLTVDSHLSRSAEDSFLSPIISQSRKSKIPRPVSWVNTDQVNSSTSSQFFPRPPPGKPPTRPGVEARLRRYKVLGSSNSDSDLFSRLAQILQNGSQKPRSTTQCKSPGSPHNPKTPPKSPVVPRRSPSASPRSSSLPRTSSSSPSRAGRPHHDQRSSSPHLGRSKSPPSHSGSSSSRRSCQQEHCKPSKNGLKGSGSLHHHSASTKTPQGKSKPASKLSR

SEQ ID NO: 250252 - protein, 1174 aa, Artificial Sequence
  derived and/or modified sequence
EPGKDHVCRFIGCGRNDRFNYVVMQLQGRNLADLRRSQSRGTFTISTTLRLGRQILESIESIHSVGFLHRDIKPSNFAMGRFPSTCRKCYMLDFGLARQFTNSCGDVRPPRAVAGFRGTVRYASINAHRNREMGRHDDLWSLFYMLVEFVVGQLPWRKIKDKEQVGSIKERYDHRLMLKHLPPEFSIFLDHISSLDYFTKPDYQLLTSVFDNSIKTFGVIESDPFDWEKTGNDGSLTTTTTSTTPQLHTRLTPAAIGIANATPIPGDLLRENTDEVFPDEQLSDGENGIPVGVSPDKLPGSLGHPRPQEKDVWEEMDANKNKIKLGICKAATEEENSHGQANGLLNAPSLGSPIRVRSEITQPDRDIPLVRKLRSIHSFELEKRLTLEPKPDTDKFLETCLEKMQKDTSAGKESILPALLHKPCVPAVSRTDHIWHYDEEYLPDASKPASANTPEQADGGGSNGFIAVNLSSCKQEIDSKEWVIVDKEQDLQDFRTNEAVGHKTTGSPSDEEPEVLQVLEASPQDEKLQLGPWAENDHLKKETSGVVLALSAEGPPTAASEQYTDRLELQPGAASQFIAATPTSLMEAQAEGPLTAITIPRPSVASTQSTSGSFHCGQQPEKKDLQPMEPTVELYSPRENFSGLVVTEGEPPSGGSRTDLGLQIDHIGHDMLPNIRESNKSQDLGPKELPDHNRLVVREFENLPGETEEKSILLESDNEDEKLSRGQHCIEISSLPGDLVIVEKDHSATTEPLDVTKTQTFSVVPNQDKNNEIMKLLTVGTSEISSRDIDPHVEGQIGQVAEMQKNKISKDDDIMSEDLPGHQGDLSTFLHQEGKREKITPRNGELFHCVSENEHGAPTRKDMVRSSFVTRHSRIPVLAQEIDSTLESSSPVSAKEKLLQKKAYQPDLVKLLVEKRQFKSFLGDLSSASDKLLEEKLATVPAPFCEEEVLTPFSRLTVDSHLSRSAEDSFLSPIISQSRKSKIPRPVSWVNTDQVNSSTSSQFFPRPPPGKPPTRPGVEARLRRYKVLGSSNSDSDLFSRLAQILQNGSQKPRSTTQCKSPGSPHNPKTPPKSPVVPRRSPSASPRSSSLPRTSSSSPSRAGRPHHDQRSSSPHLGRSKSPPSHSGSSSSRRSCQQEHCKPSKNGLKGSGSLHHHSASTKTPQGKSKPASKLSR

SEQ ID NO: 250253 - DNA, 3735 bp, Artificial Sequence
  derived and/or modified sequence
atgagcggcggcggcgagcagctggacatcctgagcgtgggcatcctggtgaaggagagatggaaggtgctgagaaagatcggcggcggcggcttcggcgagatctacgacgccctggacatgctgaccagagagaacgtggccctgaaggtggagagcgcccagcagcccaagcaggtgctgaagatggaggtggccgtgctgaagaagctgcagggcaaggaccacgtgtgcagattcatcggctgcggcagaaacgacagattcaactacgtggtgatgcagctgcagggcagaaacctggccgacctgagaagaagccagagcagaggcaccttcaccatcagcaccaccctgagactgggcagacagatcctggagagcatcgagagcatccacagcgtgggcttcctgcacagagacatcaagcccagcaacttcgccatgggcagattccccagcacctgcagaaagtgctacatgctggacttcggcctggccagacagttcaccaacagctgcggcgacgtgagaccccccagagccgtggccggcttcagaggcaccgtgagatacgccagcatcaacgcccacagaaacagagagatgggcagacacgacgacctgtggagcctgttctacatgctggtggagttcgtggtgggccagctgccctggagaaagatcaaggacaaggagcaggtgggcagcatcaaggagagatacgaccacagactgatgctgaagcacctgccccccgagttcagcatcttcctggaccacatcagcagcctggactacttcaccaagcccgactaccagctgctgaccagcgtgttcgacaacagcatcaagaccttcggcgtgatcgagagcgaccccttcgactgggagaagaccggcaacgacggcagcctgaccaccaccaccaccagcaccaccccccagctgcacaccagactgacccccgccgccatcggcatcgccaacgccacccccatccccggcgacctgctgagagagaacaccgacgaggtgttccccgacgagcagctgagcgacggcgagaacggcatccccgtgggcgtgagccccgacaagctgcccggcagcctgggccaccccagaccccaggagaaggacgtgtgggaggagatggacgccaacaagaacaagatcaagctgggcatctgcaaggccgccaccgaggaggagaacagccacggccaggccaacggcctgctgaacgcccccagcctgggcagccccatcagagtgagaagcgagatcacccagcccgacagagacatccccctggtgagaaagctgagaagcatccacagcttcgagctggagaagagactgaccctggagcccaagcccgacaccgacaagttcctggagacctgcctggagaagatgcagaaggacaccagcgccggcaaggagagcatcctgcccgccctgctgcacaagccctgcgtgcccgccgtgagcagaaccgaccacatctggcactacgacgaggagtacctgcccgacgccagcaagcccgccagcgccaacacccccgagcaggccgacggcggcggcagcaacggcttcatcgccgtgaacctgagcagctgcaagcaggagatcgacagcaaggagtgggtgatcgtggacaaggagcaggacctgcaggacttcagaaccaacgaggccgtgggccacaagaccaccggcagccccagcgacgaggagcccgaggtgctgcaggtgctggaggccagcccccaggacgagaagctgcagctgggcccctgggccgagaacgaccacctgaagaaggagaccagcggcgtggtgctggccctgagcgccgagggcccccccaccgccgccagcgagcagtacaccgacagactggagctgcagcccggcgccgccagccagttcatcgccgccacccccaccagcctgatggaggcccaggccgagggccccctgaccgccatcaccatccccagacccagcgtggccagcacccagagcaccagcggcagcttccactgcggccagcagcccgagaagaaggacctgcagcccatggagcccaccgtggagctgtacagccccagagagaacttcagcggcctggtggtgaccgagggcgagccccccagcggcggcagcagaaccgacctgggcctgcagatcgaccacatcggccacgacatgctgcccaacatcagagagagcaacaagagccaggacctgggccccaaggagctgcccgaccacaacagactggtggtgagagagttcgagaacctgcccggcgagaccgaggagaagagcatcctgctggagagcgacaacgaggacgagaagctgagcagaggccagcactgcatcgagatcagcagcctgcccggcgacctggtgatcgtggagaaggaccacagcgccaccaccgagcccctggacgtgaccaagacccagaccttcagcgtggtgcccaaccaggacaagaacaacgagatcatgaagctgctgaccgtgggcaccagcgagatcagcagcagagacatcgacccccacgtggagggccagatcggccaggtggccgagatgcagaagaacaagatcagcaaggacgacgacatcatgagcgaggacctgcccggccaccagggcgacctgagcaccttcctgcaccaggagggcaagagagagaagatcacccccagaaacggcgagctgttccactgcgtgagcgagaacgagcacggcgcccccaccagaaaggacatggtgagaagcagcttcgtgaccagacacagcagaatccccgtgctggcccaggagatcgacagcaccctggagagcagcagccccgtgagcgccaaggagaagctgctgcagaagaaggcctaccagcccgacctggtgaagctgctggtggagaagagacagttcaagagcttcctgggcgacctgagcagcgccagcgacaagctgctggaggagaagctggccaccgtgcccgcccccttctgcgaggaggaggtgctgacccccttcagcagactgaccgtggacagccacctgagcagaagcgccgaggacagcttcctgagccccatcatcagccagagcagaaagagcaagatccccagacccgtgagctgggtgaacaccgaccaggtgaacagcagcaccagcagccagttcttccccagacccccccccggcaagccccccaccagacccggcgtggaggccagactgagaagatacaaggtgctgggcagcagcaacagcgacagcgacctgttcagcagactggcccagatcctgcagaacggcagccagaagcccagaagcaccacccagtgcaagagccccggcagcccccacaaccccaagaccccccccaagagccccgtggtgcccagaagaagccccagcgccagccccagaagcagcagcctgcccagaaccagcagcagcagccccagcagagccggcagaccccaccacgaccagagaagcagcagcccccacctgggcagaagcaagagcccccccagccacagcggcagcagcagcagcagaagaagctgccagcaggagcactgcaagcccagcaagaacggcctgaagggcagcggcagcctgcaccaccacagcgccagcaccaagaccccccagggcaagagcaagcccgccagcaagctgagcagatag

SEQ ID NO: 250254 - DNA, 3735 bp, Artificial Sequence
  derived and/or modified sequence
atgagtggtggcggcgagcagctcgatattctgtctgttggtatcttggtgaaagaaagatggaaagtactacgaaaaatcgggggggggggtttcggggaaatctacgatgcattggatatgctcacacgggaaaacgttgcattgaaagtcgagagcgcccagcagcctaaacaggtcctgaaaatggaagttgctgtgctgaagaagctccaagggaaggaccatgtctgccgctttatcggatgcggaagaaacgaccggttcaattatgtggtgatgcagcttcaaggtagaaatttggccgacctccggcgatcacagtcccgggggacttttacaatttcgacaactcttcgcctggggaggcagatcctggagtctatcgagagcattcactctgtgggctttcttcacagggacattaagccatctaactttgctatggggcgctttcctagcacttgtcgaaaatgctatatgcttgatttcggattggctcgccagtttacgaactcttgtggggacgttagaccgcctcgcgcagtggccggttttagaggaacagttcgctacgcaagtattaatgctcatcggaacagagagatgggccgacatgatgacctttggtcacttttttatatgctcgtggaatttgtggtggggcagctgccatggcggaaaatcaaagacaaagaacaggtgggctccatcaaagaaagatatgaccatcggttgatgctcaaacacctacctcctgaattctcaattttcctggatcatatttcttcactcgactacttcaccaagccagactatcagttactcacatccgtcttcgacaactcaataaagacattcggggtcattgaatcagacccattcgattgggagaaaactggcaacgatgggtctctcactactacaacaactagcacgactccacagctgcatacacggttgacaccggccgccataggaatcgccaacgctacccctattcctggagatttgctgagagagaatacagatgaggtgttccctgatgagcagttatccgatggagaaaatggtattcctgtgggcgtgagtcctgacaagcttccaggttccctggggcacccacggcctcaggaaaaggacgtttgggaagaaatggatgctaacaaaaataaaatcaagctgggcatctgcaaggccgccacagaagaagagaatagtcacggccaagctaatggcctccttaatgcaccaagcctgggcagtccaattagagttcgttccgagatcacccagcctgaccgcgatattcccctggtgcgtaaactgcggagtatccatagtttcgagctagagaaacggctgaccctggaacctaagcccgataccgacaaattcctggaaacttgtctggagaagatgcaaaaagatactagtgcaggaaaagaaagcatccttcctgctctattacataagccctgcgtgcccgcggtctcgaggactgaccacatttggcattatgacgaggagtaccttccagatgcatctaaaccagcaagcgccaatactcccgagcaggctgatggtggagggtctaacgggttcatcgccgtgaacctatcgagctgtaaacaggaaatcgatagtaaagaatgggtgatagttgacaaggagcaggaccttcaggactttagaaccaacgaggccgttggacacaagacaacaggaagcccatcagatgaagagccggaagtgctgcaggtcttagaggccagtccacaggatgagaagctgcaactgggaccatgggccgaaaatgatcacctgaagaaggagaccagcggcgtggtcttggcgctgtccgcggagggccctccaaccgccgccagcgaacagtatactgataggctggaactccagccaggcgccgcgtcacagttcatcgccgcaacacccacaagtctaatggaggcacaggccgagggaccacttaccgctataactatccctagaccctcagtggcttcgacacaaagtacttccggcagttttcactgcggccagcagccagaaaaaaaggatttgcagcccatggaaccaacagttgaattatatagtcctagagagaacttctctggtctagtggtgaccgagggagaacctccttcaggcggtagcaggactgatctggggctccagatcgaccacatcggccacgacatgctcccaaatattagagaatccaacaaaagccaggatctggggcctaaggaacttccagatcataatcgtctggttgtccgggaatttgaaaatctgcccggggaaaccgaagaaaaaagcatacttctggagagcgacaatgaggacgagaaattgtctagagggcagcactgcattgagattagctctcttcccggggacctggtaatcgtggagaaagaccactcagccacaactgagccactcgacgtgacaaaaacccaaacatttagtgtggtgcccaaccaggataaaaacaacgaaataatgaaactgctgaccgtcggtacctccgagattagttctagagacatcgaccctcatgttgagggccagattggccaggtggccgaaatgcagaagaataagataagcaaagacgacgatattatgtccgaggacttgcctggtcaccagggagatcttagcaccttcctgcatcaggaaggcaaaagagaaaagattacaccacgaaacggggaactattccattgcgtcagcgaaaacgagcatggagcaccaaccaggaaggacatggtgagatccagcttcgtgacccgtcactcaaggatccccgtgctggcccaggaaatcgactccacgctggaatccagttcaccggtaagcgcaaaagagaaactccttcagaaaaaggcctatcagcccgaccttgtcaagttgctggtggagaagagacagttcaagtcgtttctcggggatctctcctccgcttccgacaagttgcttgaagagaaactggccaccgtccccgcccctttttgtgaggaggaagtactgactcccttttctcgcctcacagtcgactcacacctgtccagatctgcggaggacagctttctcagccccattatctctcagagcagaaaaagtaaaattccacgacctgtaagttgggtaaatacggaccaggtcaattcctctacgtcttcccagtttttccctagaccaccacccggcaaaccccctaccagacctggggtcgaggccagactccggcgatataaggttctaggctccagcaactccgacagcgatctcttctctcgcctggcccagatactgcagaacggctctcagaagccgagatctacaactcaatgtaagtctccgggaagcccacacaacccaaaaacccctccaaagagcccagtagttcctagaaggtcaccaagcgccagcccacgatcatcctccctaccaaggacaagcagttcatctccttcccgggctgggagaccacatcatgatcaaaggagttctagccctcaccttggcagatctaagagtcctccttcacattccggctcttcttctagcagacggtcttgtcagcaggagcactgcaagccctccaaaaatggtcttaaaggttcaggcagcctgcaccatcactccgcctcaaccaagacccctcaagggaaatcgaagcctgcttctaaactgtcccgttag

SEQ ID NO: 250255 - DNA, 3735 bp, Artificial Sequence
  derived and/or modified sequence
atgtctgggggcggggagcagctggacatcctgtctgtgggcatcctggtgaaggagcgctggaaggtgctgaggaagattggaggcggcggctttggagagatctatgatgccctggacatgctgaccagagaaaatgtggccctgaaggtggagagcgcccagcagcccaagcaggtgctgaagatggaggtggccgtgctgaagaagctgcagggcaaggaccacgtgtgccgcttcatcggctgcggcagaaatgaccgcttcaactacgtggtgatgcagctgcagggcaggaacctggccgacctgcggcgcagccagagccggggcaccttcaccatcagcaccaccctgcggctgggccggcagatcctggagagcattgagagcatccacagcgtgggcttcctgcaccgggacatcaagcccagcaactttgccatgggccgcttccccagcacctgcaggaagtgctacatgctggactttggcctggcccggcagttcaccaacagctgtggagatgtgcggccccccagggctgtggccggcttccggggcaccgtgcgctatgccagcatcaatgcccacaggaaccgggagatgggcagacatgatgacctgtggagcctcttctacatgctggtggagtttgtggtgggccagctgccctggaggaagatcaaggacaaggagcaggtgggcagcatcaaggagagatatgaccaccggctgatgctgaagcacctgcccccagagttcagcatcttcctggaccacatcagcagcctggactacttcaccaagccagactaccagctgctgacctctgtgtttgacaacagcatcaagacctttggagtcatcgagagtgacccctttgactgggagaagacaggaaatgatggcagcctgaccaccaccaccaccagcaccaccccccagctgcacacccggctgaccccagctgccatcggcatcgccaatgccacccccatccctggggacctgctgagagaaaatacagatgaggtgtttcctgatgagcagctgagtgatggagaaaatggcatccctgtgggcgtgtccccagacaagctgcccggcagcctgggccacccccggccccaggagaaggatgtgtgggaggagatggatgccaacaagaacaagatcaagctgggcatctgcaaggccgccacagaggaggagaacagccacggccaggccaacggcctgctgaatgcccccagcctgggcagccccatccgggtgcgctctgagatcacccagcctgaccgggacatccccctggtgaggaagctgcggagcatccacagctttgagctggagaagaggctgaccctggagcccaagccagacacagacaagttcctggagacctgcctggagaagatgcagaaggacaccagcgctgggaaggagagcatcctgcctgccctgctgcacaagccctgtgtgcctgctgtgtccaggacagaccacatctggcactatgatgaggagtacctgcctgatgccagcaagccagccagcgccaacaccccagagcaggctgatggcggcggcagcaatggcttcatcgctgtgaacctgagcagctgcaagcaggagattgacagcaaggagtgggtgattgtggacaaggagcaggacctgcaggacttccgcaccaatgaagctgtgggccacaagaccaccggcagccccagtgatgaggagcctgaggtgctgcaggtgctggaggccagcccccaggatgagaagctgcagctgggcccctgggccgagaatgaccacctgaagaaggagaccagcggcgtggtgctggccctgtctgctgagggccccccaacagctgccagcgagcagtacacagaccggctggagctgcagcctggagctgccagccagttcatcgccgccacccccaccagcctgatggaggcccaggccgagggccccctgacagccatcaccatcccccggcccagcgtggccagcacccagagcaccagcggcagcttccactgcggccagcagcctgagaagaaggacctgcagcccatggagcccaccgtggagctgtacagcccccgggagaacttcagcggcctggtggtgacagaaggagagcccccatctgggggcagcaggacagacctgggcctgcagattgaccacatcggccatgacatgctgcccaacatccgggagagcaacaagagccaggacctgggccccaaggagctgcctgaccacaaccggctggtggtgcgggagtttgagaacctgcccggggagacagaggagaagagcatcctgctggagagtgacaatgaagatgagaagctgagccggggccagcactgcatcgagatcagcagcctgcccggggacctggtgattgtggagaaggaccacagcgccaccacagagcccctggatgtgaccaagacccagaccttctctgtggtgcccaaccaggacaagaacaatgagatcatgaagctgctgactgtgggcaccagcgagatcagcagccgggacatcgacccccacgtggagggccagatcggccaggtggccgagatgcagaagaacaagatcagcaaggatgatgacatcatgtctgaggacctgcccggccaccagggcgacctgagcaccttcctgcaccaggagggcaagcgggagaagatcaccccaagaaatggagagctgttccactgtgtgtctgaaaatgaacatggagcccccaccaggaaggacatggtgcgcagcagctttgtgaccaggcacagccgcatccctgtgctggcccaggagattgacagcaccctggagagcagcagccctgtgtctgccaaggagaagctgctgcagaagaaggcctaccagcctgacctggtgaagctgctggtggagaagaggcagttcaagagcttcctgggggacctgagcagcgccagtgacaagctgctggaggagaagctggccaccgtgcctgcccccttctgtgaggaggaggtgctgacccccttcagccggctgactgtggacagccacctgagccgctctgcagaagattccttcctgagccccatcatcagccagagcaggaagagcaagatccccaggcctgtgtcctgggtgaacacagaccaggtgaacagcagcaccagcagccagttcttccccaggcctcctcctgggaagccacccaccaggcctggggtggaggcccggctgcggcgctacaaggtgctgggcagcagcaacagcgacagcgacctcttcagccggctggcccagatcctgcagaatggcagccagaagcccaggagcaccacccagtgcaagagccctggcagcccccacaaccccaagaccccacccaagagccctgtggtgccccggcgcagccccagcgccagccccaggagcagcagcctgcccaggaccagcagcagcagccccagcagagctggccggccccaccacgaccagaggagcagcagcccccacctgggccgcagcaagagcccccccagccacagcggcagcagcagcagcagaagaagctgccagcaggagcactgcaagcccagcaagaatggcctgaagggcagcggcagcctgcaccaccacagcgccagcaccaagaccccccagggcaagagcaagccagccagcaagctgagcaggtag

SEQ ID NO: 250256 - DNA, 3735 bp, Artificial Sequence
  derived and/or modified sequence
atgagcggcggcggcgagcagctggacatcctgagcgtgggcatccttgtgaaagaaagatggaaagttctgagaaagatcggaggaggaggctttggagagatatacgatgctctggatatgttaaccagagagaatgtggccctcaaggtcgaaagcgctcaacagccaaagcaagttttgaaaatggaagtcgcagtcttgaagaaactccagggaaaggatcacgtttgtcgtttcattggctgcggcaggaacgatcgcttcaattacgttgtaatgcaactgcaggggagaaatctggcggatctccgaagaagccaaagccggggaaccttcacaatctccacaacactaagattgggccgtcagatcctggagtcaatcgagagtattcactccgtggggtttctgcatagagacattaaaccatcgaactttgctatgggtcgctttccaagcacctgtcgcaaatgttacatgctggatttcgggctggctcggcagttcaccaatagctgtggcgatgtccgacctccccgggccgtcgcagggtttcgaggaactgtgcggtacgctagcatcaatgcacacagaaaccgcgaaatgggccgacatgatgacctgtggagtttgttctacatgctagtagaattcgttgtcggccagctgccgtggagaaaaattaaagacaaggagcaggtcggcagcatcaaggagcgatacgatcataggctgatgctcaagcacctgcctcccgagttttctatctttctggaccatatttcctcactcgactatttcacaaaacctgactaccagttgttgactagcgtttttgacaactctatcaagacattcggcgttatagagtcagacccattcgactgggagaagacgggaaatgatggaagcctcacaacaactaccacaagcactacaccccagttgcacactcgcctcacgcccgccgctatcggcatagctaacgctacccccatacctggcgacctgcttagagaaaacactgatgaggtatttcctgacgaacagctgagtgacggcgagaacgggataccggtgggggtcagcccggacaagctgccagggtcacttgggcatcctaggccccaagagaaggacgtttgggaagaaatggacgcaaacaagaataaaatcaagttggggatttgcaaggccgcaactgaagaagaaaacagtcacgggcaggcaaatggcctgctaaacgccccctcactgggctcaccaatacgggtgcgctccgaaattactcagcccgaccgagatatcccacttgtccgtaagctcaggtcaatccattcattcgaactggaaaagcgactgacactcgaacccaagcctgacacggacaagtttctcgagacctgtcttgagaaaatgcagaaggatacctccgcggggaaggaaagcatactgcctgcgctgcttcacaagccctgcgtgcctgccgtaagccgtacagaccacatatggcactacgacgaggaatacctgccagacgcgagcaagcctgcatcagccaacactccagagcaggctgatgggggcggaagtaatggcttcatagccgtaaacttatcctcttgtaagcaggagatcgactcaaaagaatgggtcattgtggataaggagcaggacttgcaggattttcggactaacgaagcggtgggccacaagacaactggttctccctccgacgaagaaccagaggtgttgcaggtgctcgaggcctctccccaggatgagaagctgcagctcggaccatgggcggagaatgaccatctgaaaaaggagacttctggcgtggtgctggcactctcagctgagggaccgcccaccgcggcaagtgagcagtacaccgacagactcgaactccagcctggtgccgcttctcagtttatagccgctactcctacgagtctgatggaggcccaggccgaagggcccctgaccgcaatcaccatcccgcgcccatccgtagcaagtacccagtccaccagcggctctttccattgtggccaacagcccgagaagaaggatctgcagcccatggagccaactgttgaactctactcgcccagggaaaacttctctgggctcgtggtgaccgaaggcgaaccccccagcgggggaagccgcaccgatctagggctgcaaattgatcacattggccacgacatgctacctaacatcagggagagcaataagagtcaggacctgggccctaaagaactgcccgaccataacaggctggtcgtgcgtgaattcgagaatctccctggtgaaacagaggagaagtctattcttctcgagtcagataatgaggacgagaagctgtcccgcggacaacattgcattgagatctcctccctcccaggcgacttagtgatcgttgaaaaagatcacagcgcgacgaccgagccattggacgtgacaaaaacgcaaactttctccgtcgtcccaaatcaggataagaataacgaaattatgaaactgctcacagttggcacttccgagataagttctcgcgacatcgacccgcatgttgagggccagatcgggcaggttgcggagatgcagaaaaacaagatatcaaaggacgatgatatcatgtctgaagacctgcctggccatcagggcgacctgtcaacctttttacatcaagaaggtaagagggagaagatcacaccccgtaacggggaactattccattgcgtgagcgagaatgagcatggagccccaacaaggaaagacatggttcgaagctccttcgtgaccaggcacagccggattcctgtcctagcacaggagattgactccacgctggagagctcaagcccggtgtccgctaaggagaagctgctgcagaagaaggcctaccagcctgatctggtgaaactgttagtagaaaagcgtcagtttaagtcgtttttgggagatctaagttctgcttcggacaagctgctcgaggaaaagcttgccacagttcctgccccattctgcgaagaggaggtgctgacgcccttcagccgtctgaccgtggacagccacctgagcagatcagcagaggatagcttcttgtcaccgatcatctcgcaaagccgcaagagtaaaataccccggcctgtatcatgggttaacacggatcaagttaattcctcaacctcatcacagttcttccccagaccgccgccaggtaagccccctacccgcccaggggttgaggcccgactgcgaagatataaggtcctgggatcttctaactccgactcagacttgttttcacgcctcgcacaaattcttcaaaacggttctcagaaaccccggagtactacacagtgcaagtcccccgggtcaccacataacccgaagacaccacctaaatcccctgtagttccaagacgcagcccaagtgcaagccccaggtcctcatccctcccgcggacatcctcgtcctctccgagccgtgcagggagacctcatcacgatcagcggtccagtagcccccatcttggccggtccaagagcccgcccagtcacagtggttcctcatcctcaaggagaagctgccagcaagaacactgtaagccttccaaaaacggactcaaggggagtggcagtctccaccaccactcagcatcaaccaagacaccacagggcaagagcaagccagcatccaagctgtcaagatag

SEQ ID NO: 250257 - DNA, 3735 bp, Artificial Sequence
  derived and/or modified sequence
atgtccggcggtggggagcagctggatatcctgtctgttggtattctcgtcaaggagcggtggaaagtcctccgaaagatcgggggtggaggcttcggcgaaatttatgacgccttagacatgctcacacgagagaatgtggccctcaaggtagaaagcgcgcagcaacccaagcaggttttgaaaatggaggttgccgtcctgaagaagctccagggcaaagatcacgtctgtcgatttattggctgcggcagaaacgaccggttcaactacgtggtcatgcaactgcagggccgtaacctggccgacttgaggagatcacaatcacggggaacctttaccatcagcactactctgaggcttgggagacagattctggagagcattgagagtatccactccgtgggctttctgcaccgcgatatcaagccctcgaacttcgcaatgggccgatttccaagtacttgtcggaagtgctatatgctggactttgggctcgcccgacagtttactaactcttgcggggatgtgcgcccaccgagggcagtggcgggattccggggaactgtgcgctacgcgagtataaacgcccacagaaatcgcgagatgggcagacatgacgatctgtggagtctcttttatatgctggtggaatttgtggtcggacaattgccatggcgcaaaatcaaggacaaagagcaggtgggatctatcaaagagcgctacgaccatagactgatgcttaaacatctgcccccagagttttccatctttctggaccacattagcagtctggactactttacaaagcctgactaccaactcttgactagcgtgttcgacaatagtattaagacatttggagtgatcgaatccgatccattcgactgggagaagacaggcaacgatggatcactcacaaccaccacaactagtaccactccccagctccacaccaggttaacacccgcagccatcggaattgctaacgccactccgataccaggagatctgctgagagaaaacaccgatgaggttttcccagacgaacagctgagtgacggagaaaacggcatcccggtcggtgtatccccagacaaactccctggcagcctaggtcaccctcgaccacaagagaaagacgtgtgggaggagatggatgcaaacaaaaacaaaattaagcttggcatctgcaaggcagccactgaggaggaaaacagccacgggcaggcaaatgggttattgaatgcgccttcactcggctctccaatacgcgttcggagcgagattacgcagccggatagggacattcctttggtgcgtaaactccggtccattcatagcttcgaacttgaaaaaaggttgacattggagcccaagccagatacggacaagtttctggaaacctgtctagaaaaaatgcaaaaagatacttccgcaggaaaggagtcaattctccccgctctgctccataaaccgtgcgtgcccgctgttagtcgaacagatcatatctggcactacgatgaggagtacctcccagatgctagtaagccagcatctgccaatactcctgagcaggccgacggcggaggatccaatggtttcatcgcggttaacctgtccagctgcaagcaagagattgattctaaggaatgggttatcgttgataaggagcaggacttgcaggactttcggaccaatgaggcagttgggcataaaacaacaggtagcccttccgatgaagagcccgaagtcttgcaggtgctggaagccagtccccaggatgaaaagcttcagctgggcccatgggcagaaaacgatcacctcaaaaaagaaacaagtggggtagtgttagcactgagcgccgaggggccaccgactgccgcaagcgaacaatataccgataggctggaattacaacccggagcggctagccaatttattgctgccacgcctacatctctgatggaggctcaagccgagggcccattgacagccattactataccacgacccagcgtagcctccacccagtcaacgagcggatccttccattgtgggcagcagccagagaaaaaagacctgcagccaatggaacccaccgtcgagttgtattcccccagagagaattttagcggtttggtggtcactgagggcgaacctccatcagggggttcacgcaccgacttgggcctgcaaatcgaccacataggccatgacatgttgcccaacatccgtgagtccaacaagtcgcaggatttaggcccaaaagaactgccggatcataacagactggtggtccgcgagtttgaaaacctgcccggagaaacagaggaaaagtcgatcctgttggaatctgacaacgaggatgaaaaactgtcgagagggcagcactgtattgagataagttcgctaccgggagacctagtcatcgttgaaaaagatcactcagctactaccgaacctctggatgtaacaaagacgcagactttttctgtcgtacccaaccaagacaagaacaatgagatcatgaagctgctgacagtcggcactagcgagatatcgtcgagagacattgatccacacgtcgaggggcagattggacaagtggcagaaatgcagaaaaataaaattagcaaagatgacgatatcatgtctgaggacctgccgggacaccagggagacctgagcacattcctgcaccaggagggcaaacgggagaaaatcacccccaggaatggcgagctgtttcattgtgtgtcagagaatgagcacggtgcacctacacgcaaagacatggtgagaagctcatttgtcacccgacactctcgcatccctgtgctcgcacaggaaatcgactctacccttgagagtagtagtcccgtgtctgctaaggagaagttactccagaaaaaggcctatcagcctgatttggtgaaactacttgtggaaaaacggcaatttaaaagttttctgggcgatctgagttctgcatctgacaagctgcttgaagagaagctggccaccgttcctgcgcctttctgcgaagaggaagtgttgacccccttctcaagacttaccgtggattcccatctgtccaggtctgccgaagactcgttcttgagccccattatatcacaatcacgcaagtcaaagattccaaggccagtcagttgggtgaatacagatcaagtgaactcttctacatcgtcacagttcttcccacggcctcctcctggaaaaccacccacacggcctggtgtggaagcaaggctgcgcagatacaaggtgctcggatcatccaattctgatagcgacctgttcagtcgcttggctcagatcctacagaacggatcccagaaaccgagatccaccacacaatgcaaaagcccaggaagtccacacaatccaaagacacctcctaagtcccctgtcgtccctagacggtcaccatctgcttcaccacggtccagttccctgccccgaacttcgtcatcctctccatctagggccggaaggccccatcatgatcagcggagctcatcacctcacctcgggcgtagcaagagtcccccaagccactccggctcatccagctcccgccgttcttgtcagcaggagcactgcaagccctcaaaaaacgggctgaagggctcagggtctttacaccaccattctgcatccacaaaaacacctcaagggaagtctaagcccgcaagtaaactgagcagatag

SEQ ID NO: 250258 - DNA, 5617 bp, Artificial Sequence
  derived and/or modified sequence
agaataacgtcgggtcgggtcagcgggctctgcagtagtcgccgcagcggcgatgggagcggtggggacgaggcggcggcggcggcaggagggggagcaggtgctggcacaagagcagcggcttgggggagccggcagcagcagtaacagcagcagcagccgccgccgccgccgccagtaaacgcggacggtaccccaggggactacccagccggccggccctggaagccgcgctcgggtcccgccgcagtcggcggtgggggatgggcaggcagtggcggtcccgcctgccgagggttaacccccgccggtcccggtcctgagctggaccagagccctcctccagaaacccctgcgtccgccacggcccaggttaaatggaaaccacccttgggaactggatgcctgtgtagctgttctaccatatcagtgtattgcaatgagtgggggaggagagcagctggatatcctgagtgttggaatcctagtgaaagaaagatggaaagtgttgagaaagattgggggtgggggctttggagaaatttacgatgccttggacatgctcaccagggaaaatgttgcactgaaggtggaatcagctcaacaaccaaaacaagttctgaaaatggaagttgctgttttgaaaaagctgcaagggaaagaccatgtttgtagatttattggctgtgggaggaatgatcgattcaactatgtggtcatgcagttgcagggtcggaatctggcagatcttcgccgtagccagtcccgaggcacattcaccattagtaccactctccggctgggtagacagattttggagtctattgaaagcattcattctgtgggattcttgcatcgagacatcaaaccgtcgaacttcgctatgggtcgctttcctagtacatgtaggaaatgttacatgcttgattttggcttggctcgacaatttaccaattcctgtggtgacgtcagaccacctcgagctgtggcaggttttcgagggacagttcgttatgcatcaatcaacgcacatcggaacagggaaatgggaagacatgatgacctttggtccttattctacatgttggtggagtttgtggttggtcagctgccctggagaaaaataaaggacaaggagcaagtaggctctattaaggagagatatgaccacaggctcatgttgaaacatctccctccagaattcagcatctttctagaccatatctcttctttggattattttacaaaaccagactaccagcttcttacatccgtgtttgacaatagcatcaagacttttggagtaattgagagtgacccttttgactgggagaagactggaaatgatggctccctaacaaccaccactacttctaccacccctcagttgcacactcgcttgacccctgctgcaattggaattgccaatgctactcccatccctggagacttgcttcgagaaaatacagatgaggtatttccagatgaacagcttagcgatggagaaaatggcatccctgttggtgtgtcaccagataaattgcctggatctctgggacacccccgtccccaggagaaggatgtttgggaagagatggatgccaacaaaaacaagataaagcttggaatttgtaaggctgctactgaagaggagaacagccatggccaggcaaatggtcttctcaatgctccaagccttgggtcaccaattcgtgtccgctcagagattactcagccagacagagatattccactggtgcgaaagttacgttccattcacagctttgagctggaaaaacgtctgaccctggagccaaagccagacactgacaagttccttgagacctgcctggagaaaatgcagaaagataccagtgcaggaaaagaatctattctccctgctctgctgcataagccttgcgttcctgctgtgtcccgtactgaccacatctggcactatgatgaagaatatcttccagatgcctccaagcctgcttctgccaacacccctgagcaggcagatggtggtggcagcaatggatttatagctgttaacctgagctcttgcaagcaagaaattgattccaaagaatgggtgattgtggacaaggagcaggaccttcaggattttaggacaaatgaggctgtaggacataaaacaactggaagtccttctgatgaggagcctgaagtacttcaagtcctggaggcatcacctcaagatgaaaagctccagttaggtccttgggcagaaaatgatcatttaaagaaggaaacctcaggtgtggtcttagcactttctgcagagggtcctcctactgctgcttcagaacaatatacagataggctggaactccagcctggagctgctagtcagtttattgcagcgacgcccacaagtctaatggaggcgcaggcagaaggaccccttacagcgattacaattcctagaccttctgtggcatctacacagtcaacttcaggaagctttcactgtggtcagcagccagagaagaaagatcttcagcccatggagcccactgtggaactttactctccaagggaaaacttctctggcttggttgtgacagagggtgaacctcctagtggaggaagcagaacagatttggggcttcagatagatcacattggtcatgacatgttacccaacattagagaaagtaacaaatctcaagacctgggaccaaaagaacttcctgatcataatagactggttgtgagagaatttgaaaatctccctggggaaactgaagagaaaagcatccttttagagtcagataatgaagatgagaagttaagtagagggcagcattgtattgagatctcctctctcccaggagatttggtaattgtggaaaaggatcactcagctactactgaacctcttgatgtgacaaaaacacagacttttagtgtggtgccaaatcaagacaaaaataatgagataatgaagcttctgacagttggaacttcagaaatttcttccagagacattgacccacatgttgaaggtcagataggccaagtggcagaaatgcaaaaaaataagatatctaaggatgatgacatcatgagtgaagacttgccaggtcatcaaggagacctctctacttttttgcaccaagagggcaagagagagaaaatcacccctagaaatggagaactatttcattgtgtttcagagaatgaacatggtgccccaacccggaaggatatggttaggtcatcctttgtaactagacacagccgaatccctgttttagcacaagagatagactcaactttggaatcatcctctccagtttctgcaaaagaaaagctcctccaaaagaaagcctatcagccagacctagtcaagcttctggtggaaaaaagacaattcaagtccttccttggcgacctctcaagtgcctctgataaattgctagaggagaaactagctactgttcctgctcccttttgtgaggaggaagtgctcactcccttttcaagactgacagtagattctcacctgagtaggtcagctgaagatagctttctgtcacccatcatctcccagtctagaaagagcaaaattccaaggccagtttcatgggtcaacacagatcaggtcaatagctcaacttcgtctcagttctttcctcggccaccaccaggaaagccacccacgaggcctggagtagaagccaggctacgcagatataaagtcctagggagtagtaactccgactcagaccttttctcccgcctggcccaaattcttcaaaatggatctcagaaaccccggagcactactcagtgcaagagtccaggatctcctcacaatccaaaaacaccacccaagagtccagttgtccctcgcaggagtcccagtgcctctcctcgaagctcatccttgcctcgcacgtctagttcctcaccatctagggctggacggccccaccatgaccagaggagttcgtccccacatctggggagaagcaagtcacctcccagccactcaggatcttcctcctccaggaggtcctgccaacaggagcattgcaaacccagcaagaatggcctgaaaggatccggcagcctccaccaccactcagccagcactaaaaccccccaagggaagagtaagccagccagtaaactcagcagataggagccaggctgcatctctttgaaaggtgtgagatcttcctcctaaacctgatgcatgtgtgtccctgtactttctatgtaaaaaaatcagtgttgatcttctcttgcaaaagaaagtaacatgatcaattatttataagaagacataatacatgataaggaattacctaaggcaggcagcaagtagattaggaatcaatgtctttgtacaagaaggaaaaatagagcaaaaatccaagggggagaaactcattaaaatgagctctcattttttaagctgcctttgaaacaaaagagttgaggataggagatagaatggaattttaggggggttgcctaatttttttaagcctcaattcaaagattatatagcaaaagtgaaacttcttgtttgatattttcattcaaaactttcccaccctgaagagtcattgatcagatattagattatataagaagtctgttgccagggagccagtattcatgtatatttggcttgtgtgtttatttcgtgtattgagaatgaacacctttactttgcctcattcctagtaccctccctggagttcagatttttttttaaaattttgtatgtctcgtctgattcaatctctctgcttttattttatggtcctagttgtactatcaaatccaattacttttttttaggtccccctgattttttttttttagagcaagagttcttaacatattacatttttattatgaaaaataagaaagttaggtaaaggaaagaaaagtctaactagagctattttgcaggctttagtgtttagggagagaaagaaagtgtgggttaatagccttcaagatagaagatgccctttcatctctgttaagtgtcctcctttagaaacttgagtagaaggaaaactgaccagagtagactgcttccttaagtcttctgggttccaactgtttgtaatatcagcatccaagatgatacgagggaagcacaatgctttggactgtgatttgagatttagaaataaattagatatattattgaggcttagaatcctcaaactttgtattttatacatttagccaataaggaattaatatctggggaaataaatttaggcaaatatttcttttttaatgttttattacctgcttctcctgtgttttagttcaacatttgggcttcttggcctgattttcatacaatctcaatttacgaagctgtaaagaggaagatatttgttctaatctcactcttctaataggaatcaggcaaatgaaagtctaccagacttttaaaatgggctgtttttatactctctaggtgttttgtgttgtaaagaccttattaaggtcaggtaaattggtctgcttgctgttgaaatttgccttctagcaaacatatgtgctttctgtttgaccttgtgtttgctgccaaacctaatacagttgaattggg

SEQ ID NO: 250259 - protein, 246 aa, Artificial Sequence
  derived and/or modified sequence
MGPQHLRLVQLFCLLGAISTLPRAGALLCYEATASRFRAVAFHNWKWLLMRNMVCKLQEGCEETLVFIETGTARGVVGFKGCSSSSSYPAQISYLVSPPGVSIASYSRVCRSYLCNNLTNLEPFVKLKASTPKSITSASCSCPTCVGEHMKDCLPNFVTTNSCPLAASTCYSSTLKFQAGFLNTTFLLMGCAREHNQLLADFHHIGSIKVTEVLNILEKSQIVGAASSRQDPAWGVVLGLLFAFRD

SEQ ID NO: 250260 - DNA, 741 bp, Artificial Sequence
  derived and/or modified sequence
atgggcccccagcacctgagactggtgcagctgttctgcctgctgggcgccatcagcaccctgcccagagccggcgccctgctgtgctacgaggccaccgccagcagattcagagccgtggccttccacaactggaagtggctgctgatgagaaacatggtgtgcaagctgcaggagggctgcgaggagaccctggtgttcatcgagaccggcaccgccagaggcgtggtgggcttcaagggctgcagcagcagcagcagctaccccgcccagatcagctacctggtgagcccccccggcgtgagcatcgccagctacagcagagtgtgcagaagctacctgtgcaacaacctgaccaacctggagcccttcgtgaagctgaaggccagcacccccaagagcatcaccagcgccagctgcagctgccccacctgcgtgggcgagcacatgaaggactgcctgcccaacttcgtgaccaccaacagctgccccctggccgccagcacctgctacagcagcaccctgaagttccaggccggcttcctgaacaccaccttcctgctgatgggctgcgccagagagcacaaccagctgctggccgacttccaccacatcggcagcatcaaggtgaccgaggtgctgaacatcctggagaagagccagatcgtgggcgccgccagcagcagacaggaccccgcctggggcgtggtgctgggcctgctgttcgccttcagagactag

SEQ ID NO: 250261 - DNA, 741 bp, Artificial Sequence
  derived and/or modified sequence
atgggcccgcagcatctacgtctcgtacagctattttgtctgttgggagccattagcaccttgcccagagccggggccctgctctgttacgaagctacggctagccgtttccgcgcggtggcatttcataattggaagtggctgttaatgcgcaacatggtatgcaaattgcaggaggggtgtgaagagacactcgtgttcatcgaaaccggcacagcacggggcgtggtgggatttaaaggctgcagtagctcgagctcctatcctgctcagatctcctacctcgtgagtcccccgggcgtgtcgatcgccagttatagccgcgtgtgccgtagctacctttgcaataacctgaccaacctggaaccatttgtcaaactgaaagccagtacacctaagtccatcacatcagctagctgctcctgcccaacctgtgtcggagagcatatgaaggactgtctgccaaactttgtgaccaccaattcttgccccctagctgcctccacttgctatagctcaacactcaagttccaggccggttttttgaacacaacgtttctgctgatgggctgcgcaagggagcataaccagctgctagctgatttccaccatattgggtctatcaaagttaccgaggtgttgaacatcttagagaaatctcagatagtgggagccgcatcgagccggcaggatcccgcgtggggagtcgttctgggcttactgttcgcttttagggactag

SEQ ID NO: 250262 - DNA, 2022 bp, Artificial Sequence
  derived and/or modified sequence
ggtctgtgcacgggttgcctcgtttctggccttcccttgccttgtacctcgacttcgcgcgtggcttgtttttgctgagtggaggcctgcgttttctgttatgtctcttccggtgccccacaactcctgagctacccttcttttatgcgttctctcccagcgctgtgattaccgggttgcttaccgggccctccttcctcagattgcacccctttccttgtgtctcttcttgtctttgtgtcggttgtgattttcctaatctctgattttccttttctctcggacgctctccctcttcggacccattttctcccgtgcttcatgccctgatagcctggccccttcccggcttccttcgctaccggggacgcctctagtttttctgaatttctggctggctccaccctccgcgttcatcttcctcaagagttcgcccctctgggggctcctctgtgtaatcgtcgccttctctgggtatttctgtgaactccgtctcacaccatcccgccatcttctctgccttggccccttttctctgtacagccagctctgtgtccttttcttctccccctctaaaatcgactcctcttctccctgagagccccacctttgtgccccactcctcattttcctacgcctccctctctctgctggtcctctctctccctgcaaggttccattccatcaatttgtttgtcttttgtaggggtggcatcccctctgactactgctccatcctttttttttttttttttttttttttgcttgaggatttcacttcaatcttttctggttgcgtctccacttgtactcagcttgttaggtccaggtccagttgttctgcatctgaggctggcgtgtgctgtcttctctgattggcctaatctccctcacccccgtgagatctgttgtcagccttcgtttctctttcctgtgtcccagcttttctgcgggtcttggcacctttcttggccacagatttctgggttacagagcatgtgtgtctgaggcattgcaggcagaaaagggtggccgacgtgacctctagctggactgctgggcaggggagctgtcctagataaaattggaaagaaacagtgacccagagacaggtggacaaagaattcggggactgatgggaactgagcttgggatccagactgaaactgattccagactgacctctagcacccaggacccagacacagggccatgggaccccagcatttgagacttgtgcagctgttctgccttctaggggccatctccactctgcctcgggctggagctcttttgtgctatgaagcaacagcctcaagattcagagctgttgctttccataactggaagtggcttctgatgaggaacatggtgtgtaagctgcaagagggctgcgaggagacgctagtgttcattgagacagggactgcaaggggagttgtgggctttaaaggctgcagctcgtcttcgtcttaccctgcgcaaatctcctaccttgtttccccacccggagtgtccattgcctcctacagtcgcgtctgccggtcttatctctgcaacaacctcaccaatttggagccttttgtgaaactcaaggccagcactcctaagtctatcacatctgcgtcctgtagctgcccgacctgtgtgggcgagcacatgaaggattgcctcccaaattttgtcaccactaattcttgccccttggctgcttctacgtgttacagttccaccttaaaatttcaggcagggtttctcaataccaccttcctcctcatggggtgtgctcgtgaacataaccagcttttagcagattttcatcatattgggagcatcaaagtgactgaggtcctcaacatcttagagaagtctcagattgttggtgcagcatcctccaggcaagatcctgcttggggtgtcgtcttaggcctcctgtttgccttcagggactgaccatctagctgcacccgacaagcacccagactctttcacataacaaataaaatagcagagttccctttc

SEQ ID NO: 250263 - DNA, 741 bp, Artificial Sequence
  derived and/or modified sequence
atgggcccccagcacctgcggctggtgcagctgttctgcctgctgggcgccatcagcaccctgccccgggccggggccctgctgtgctatgaggccacagccagccgcttccgggctgtggccttccacaactggaagtggctgctgatgaggaacatggtgtgcaagctgcaggagggctgtgaggagaccctggtgttcatcgagaccggcacagcccggggcgtggtgggcttcaagggctgcagcagcagcagcagctacccagcccagatctcctacctggtgagccccccaggagtgtccatcgccagctacagccgggtgtgccgcagctacctgtgcaacaacctgaccaacctggagccctttgtgaagctgaaggccagcacccccaagagcatcaccagcgccagctgcagctgccccacctgtgtgggggagcacatgaaggactgcctgcccaactttgtgaccaccaacagctgccccctggccgccagcacctgctacagcagcaccctgaagttccaggccggcttcctgaacaccaccttcctgctgatgggctgtgcccgggagcacaaccagctgctggccgacttccaccacatcggcagcatcaaggtgacagaggtgctgaacatcctggagaagagccagatcgtgggcgccgccagcagccggcaggaccctgcctggggcgtggtgctgggcctgctgtttgccttccgggactag

SEQ ID NO: 250264 - DNA, 741 bp, Artificial Sequence
  derived and/or modified sequence
atgggcccccagcacctgcggctggtgcagctgttctgcctgctgggcgcaatttcaaccctgcctcgggcgggagctctcctgtgttatgaagccacagctagcagattcagggccgtggctttccataactggaagtggcttcttatgagaaacatggtctgtaaactgcaggaaggatgtgaggagactctcgtttttatcgagaccgggacagctcggggagtcgtgggttttaagggctgctctagctccagttcttaccctgcccaaatatcctatctggtctcccccccaggcgttagtatagcatcctacagccgagtgtgtcggtcatatctctgcaacaatctcacaaatctggaaccatttgttaaactgaaggcctcaactcctaagtctattacttccgcttcttgctcatgcccgacatgtgtgggagagcacatgaaagactgtctgccaaacttcgtgacaacgaatagctgccctctcgccgcttcaacttgctattccagcaccttgaaatttcaagcagggttcctgaataccaccttcctactgatgggctgtgctagagaacataaccagctgttagcagactttcatcacattgggagcataaaagtcaccgaagtcctgaatatcttggaaaagtcacagatagtgggtgccgcatcatctagacaggatccggcctggggtgtggtcctggggttgcttttcgcgttccgggattag

SEQ ID NO: 250265 - DNA, 741 bp, Artificial Sequence
  derived and/or modified sequence
atgggtccccagcacctgcggctggtgcaactgttttgtttgctcggagctattagtaccctacccagagccggtgctctcctctgttatgaggctactgcctcacggttccgggctgttgcatttcacaactggaaatggctgctgatgcgaaacatggtgtgtaaactgcaagagggctgtgaagaaaccctagtttttattgagactgggacagcgaggggggttgtcgggtttaaaggctgttcgtcaagctccagctaccctgcccagattagctacttggtgagccctcccggagtttcaatcgccagctatagtcgggtatgcagatcctacttgtgtaataacctaactaatctggagccttttgtgaaacttaaggcttccactcccaagtccatcaccagtgctagttgcagttgcccgacgtgcgtgggcgagcacatgaaagattgcttaccaaattttgtgaccactaatagctgccctctcgcagcaagcacatgttactcctctactttgaagttccaagctggcttcctgaacacaaccttccttctgatgggttgtgcgagagagcacaatcagcttttggcagattttcaccacatcggatcgatcaaagtgaccgaagtgctgaacatactggagaagtcacagatagtcggggcagcatcttcccggcaggacccagcctggggcgtagtgttgggactcttgttcgcgtttcgggattag

SEQ ID NO: 250266 - protein, 490 aa, Artificial Sequence
  derived and/or modified sequence
MGIREFPSGAPRGKSIAVGMRRSPDVSPRRLSDISPQLRQLKYLVVDEAIKEDLKWSRSVEDLTSGPVGLTSIEERILRITGYYGYQPWAASCKREERPRDSPGPAEAQAPAGVEAGGRASRRCWTCSRAQLKKIFWGVAVVLCVCSSWAGSTQLAKLTFRKFDAPFTLTWFATNWNFLFFPLYYVGHVCKSTEKQSVKQRYRECCRFFGDNGLTLKVFFTKAAPFGVLWTLTNYLYLHAIKKINTTDVSVLFCCNKAFVFLLSWIVLRDRFMGVRIVAAILAIAGIVMMTYADGFHSHSVIGIALVVASASMSALYKVLFKLLLGSAKFGEAALFLSILGVFNILFITCIPIILYFTKVEYWSSFDDIPWGNLCGFSVLLLTFNIVLNFGIAVTYPTLMSLGIVLSIPVNAVIDHYTSQIVFNGVRVIAIIIIGLGFLLLLLPEEWDVWLIKLLTRLKVRKKEEPAEGAADLSSGPQSKNRRARPSFAR

SEQ ID NO: 250267 - DNA, 1473 bp, Artificial Sequence
  derived and/or modified sequence
atgggcatcagagagttccccagcggcgcccccagaggcaagagcatcgccgtgggcatgagaagaagccccgacgtgagccccagaagactgagcgacatcagcccccagctgagacagctgaagtacctggtggtggacgaggccatcaaggaggacctgaagtggagcagaagcgtggaggacctgaccagcggccccgtgggcctgaccagcatcgaggagagaatcctgagaatcaccggctactacggctaccagccctgggccgccagctgcaagagagaggagagacccagagacagccccggccccgccgaggcccaggcccccgccggcgtggaggccggcggcagagccagcagaagatgctggacctgcagcagagcccagctgaagaagatcttctggggcgtggccgtggtgctgtgcgtgtgcagcagctgggccggcagcacccagctggccaagctgaccttcagaaagttcgacgcccccttcaccctgacctggttcgccaccaactggaacttcctgttcttccccctgtactacgtgggccacgtgtgcaagagcaccgagaagcagagcgtgaagcagagatacagagagtgctgcagattcttcggcgacaacggcctgaccctgaaggtgttcttcaccaaggccgcccccttcggcgtgctgtggaccctgaccaactacctgtacctgcacgccatcaagaagatcaacaccaccgacgtgagcgtgctgttctgctgcaacaaggccttcgtgttcctgctgagctggatcgtgctgagagacagattcatgggcgtgagaatcgtggccgccatcctggccatcgccggcatcgtgatgatgacctacgccgacggcttccacagccacagcgtgatcggcatcgccctggtggtggccagcgccagcatgagcgccctgtacaaggtgctgttcaagctgctgctgggcagcgccaagttcggcgaggccgccctgttcctgagcatcctgggcgtgttcaacatcctgttcatcacctgcatccccatcatcctgtacttcaccaaggtggagtactggagcagcttcgacgacatcccctggggcaacctgtgcggcttcagcgtgctgctgctgaccttcaacatcgtgctgaacttcggcatcgccgtgacctaccccaccctgatgagcctgggcatcgtgctgagcatccccgtgaacgccgtgatcgaccactacaccagccagatcgtgttcaacggcgtgagagtgatcgccatcatcatcatcggcctgggcttcctgctgctgctgctgcccgaggagtgggacgtgtggctgatcaagctgctgaccagactgaaggtgagaaagaaggaggagcccgccgagggcgccgccgacctgagcagcggcccccagagcaagaacagaagagccagacccagcttcgccagatag

SEQ ID NO: 250268 - DNA, 1473 bp, Artificial Sequence
  derived and/or modified sequence
atgggtatccgtgaatttccgagcggggctccaaggggcaagagcattgccgtggggatgcggcgcagccctgacgtctctccgaggagactctctgatattagcccacaactccgccagctgaaatacctcgtggtggatgaggctatcaaggaagacctaaagtggtccaggagcgtcgaagacctgacctctggccccgtgggcctgacaagtatcgaggaaaggattctgaggatcaccgggtactacgggtaccagccctgggctgcatcttgtaaacgggaggaacgccctcgggactcccctgggcctgctgaggcccaagccccagcaggggtggaggcgggcggccgagcatctcgcagatgttggacttgctcgagagcccaactcaaaaagattttctggggggtggccgtggtgctgtgcgtctgttcgtcatgggcaggatctactcagctcgccaagttaaccttcagaaagtttgacgccccctttacactcacttggtttgctactaattggaactttctgttctttcccctgtactatgtgggacacgtttgtaaatctacagagaagcaatccgttaagcagcgctatcgggagtgttgtcggttctttggcgacaacggactcacccttaaggtgtttttcacaaaagctgccccttttggagtcctgtggaccctcacgaattatttataccttcatgccataaaaaaaattaatacaactgatgtgagcgttctgttctgctgcaataaagcgttcgtattccttctgtcctggatagttcttcgcgacagattcatgggagtcagaatcgttgcagccatcctcgccattgcaggaatcgtaatgatgacgtatgccgatggattccactctcattcagtcattggtatcgcgctggtggttgcctcagcgagcatgtcggcgctgtataaggtactgttcaaactcctgctcggctccgcaaaattcggcgaagccgccctgtttttgagtatactgggcgtgtttaacattctcttcattacttgcatacccatcatactgtactttactaaggtagagtattggtcttcctttgatgacattccttgggggaacttgtgtggctttagtgttctgttgctgacgttcaacattgtgcttaacttcggaatagcagtcacgtaccctacattgatgtccttgggaattgtcctatcaattcccgtgaatgccgtcatcgatcattacacttcgcaaatcgtgttcaatggcgtcagagtgatcgcaatcatcattatcggactggggttcctgctgctgctgctgccagaggagtgggacgtttggctgattaaactgctgacgcgcttgaaggtcaggaaaaaagaggaaccggcagaaggcgcagccgacctgtctagcggcccccagagcaagaatcgacgggcaagaccttcctttgctagatag

SEQ ID NO: 250269 - DNA, 1473 bp, Artificial Sequence
  derived and/or modified sequence
atgggcatccgggagttccccagcggggccccccggggcaagagcattgctgtgggcatgagaagaagcccagatgtgagcccccggcggctgagtgacatcagcccccagctgcggcagctgaagtacctggtggtggatgaggccatcaaggaggacctgaagtggagccgctctgtggaggacctgaccagcggccctgtgggcctgaccagcattgaggagcgcatcctgcgcatcaccggctactacggctaccagccctgggccgccagctgcaagcgggaggagcggccccgggacagccctggccctgctgaggcccaggccccagctggggtggaggccggcggccgggccagccgccgctgctggacctgcagccgggcccagctgaagaagatcttctggggcgtggccgtggtgctgtgtgtgtgcagctcctgggccggcagcacccagctggccaagctgaccttcaggaagtttgatgcccccttcaccctgacctggtttgccaccaactggaacttcctgttcttccccctgtactacgtgggccacgtgtgcaagagcacagagaagcagagcgtgaagcagcgctaccgggagtgctgccgcttctttggagacaatggcctgaccctgaaggtgttcttcaccaaggccgcccccttcggcgtgctgtggaccctgaccaactacctgtacctgcacgccatcaagaagatcaacaccacagatgtgtctgtgctcttctgctgcaacaaggcctttgtgttcctgctgtcctggatcgtgctgcgggaccgcttcatgggcgtgagaattgtggccgccatcctggccatcgccggcatcgtgatgatgacctatgcagatggcttccacagccacagcgtcatcggcatcgccctggtggtggccagcgcctccatgtctgccctgtacaaggtgctcttcaagctgctgctgggcagcgccaagtttggagaggccgccctcttcctgagcatcctgggcgtcttcaacatcctcttcatcacctgcatccccatcatcctgtacttcaccaaggtggagtactggagcagctttgatgacatcccctggggcaacctgtgtggcttctctgtgctgctgctgaccttcaacatcgtgctgaactttggaattgctgtgacctaccccaccctgatgagcctgggcatcgtgctgagcatccctgtgaatgctgtgattgaccactacaccagccagatcgtgttcaacggggtgcgggtgattgccatcatcatcatcggcctgggcttcctgctgctgctgctgcctgaggagtgggatgtgtggctgatcaagctgctgacccggctgaaggtgaggaagaaggaggagcctgctgagggcgctgctgacctgagcagcggcccccagagcaagaacagaagagcccggcccagctttgccaggtag

SEQ ID NO: 250270 - DNA, 1473 bp, Artificial Sequence
  derived and/or modified sequence
atgggcatccgggagttccccagcggcgccccccggggcaagagcatcgctgttggtatgaggcgaagcccagatgtgtccccgaggcgccttagcgacataagcccccaacttcgccagctaaagtatttagtggtggatgaagccatcaaggaggatctgaagtggtcacgcagtgttgaagacctcacttcagggcccgttgggttaacgtccatcgaggaaaggatcctgaggatcaccgggtactatgggtatcagccgtgggctgccagttgtaagcgcgaggaaagaccccgggattcccccgggccagccgaggctcaggcccccgctggggtagaggctggggggagggccagtcgccgttgttggacctgttcacgcgcacaacttaagaagattttttggggcgtcgccgttgtgctttgtgtttgttcgtcatgggctggttccacccaattggccaagctgacattccgcaaattcgatgccccattcacactgacatggtttgctaccaattggaatttccttttttttccactatactacgtagggcatgtgtgcaagtctaccgaaaaacagtctgtcaagcagcgctaccgtgagtgctgtcgctttttcggggataacggcctaactctgaaggtattctttactaaagccgcccccttcggagtgctatggacactgacgaactatttgtacctacacgccatcaaaaagattaacaccacggacgtgagcgtgctgttctgctgcaataaggcgttcgtgttcttgttgtcctggatcgtgctgcgcgacaggtttatgggagtacgtatcgtggcggccatcctggctattgctggcattgtaatgatgacatacgccgacgggtttcactctcactcggtcatcgggatcgcattggttgtggccagcgctagcatgtcagccttatacaaggtcctttttaaactcttactgggcagcgcaaaatttggtgaagccgctctcttcctctctatcctgggcgtgttcaacattctcttcattacatgtattcctatcatcctttatttcactaaggtagagtattggtcttcttttgacgatatcccatgggggaacctctgtggattctctgtcttgctgcttactttcaatatagtcctgaatttcggtattgccgtcacatacccaactttgatgagcctggggattgtgctgtctattcccgtgaatgctgttatcgatcactacacttctcagatcgtattcaatggggtcagggtcattgctatcatcattatcggactcggctttctgttgctgctgctgcctgaagagtgggatgtgtggcttataaagctgctcacgcgcctgaaggtgaggaaaaaggaggaacccgctgagggcgccgccgatctgtctagcggtccacagtcaaaaaaccggcgcgcccgccctagctttgcccggtag

SEQ ID NO: 250271 - DNA, 1473 bp, Artificial Sequence
  derived and/or modified sequence
atgggcatcagagagttccctagtggagcacctagaggtaagtctatagccgtggggatgcggaggtcaccagatgtgtcccctcgacgcctttccgatataagccctcaactgaggcagctgaagtatctggtagtggacgaagcaattaaggaagatcttaagtggtcgcgcagtgtagaggacctaacctctggaccggttggcttaacatccatcgaggaacgtatcctgcgcatcaccggatactatggttaccagccctgggcagccagctgtaagcgtgaggaacgcccacgcgacagccccggtccagcggaggcccaagcccctgcaggtgtggaagccggaggaagagccagccgcagatgttggacatgctccagagcccagctaaagaaaatcttttggggggtcgccgtggtgctgtgtgtctgttcaagctgggcaggctctacacaacttgccaagctgacctttcggaaattcgatgcaccttttacacttacttggtttgcaaccaactggaacttcctgttctttccgctgtactatgtagggcatgtttgtaagtccacggaaaagcaatctgtgaagcaacgctacagagaatgttgcaggttcttcggcgataacggcttaactttgaaagtgttcttcacaaaagccgctccgtttggtgtcctttggaccctgacaaattacctgtacctgcatgcaattaaaaaaataaacactacagatgtgagcgttttgttttgttgcaacaaggcctttgtgtttttattgtcatggatcgtgcttcgcgatcggttcatgggagttagaattgttgccgcaatcctggccattgcaggaatcgtgatgatgacctacgccgacggattccattcccatagcgtaattggaattgctctggtggttgcttctgccagcatgagtgcactgtataaagtgctgttcaaacttctgctgggtagcgcaaagttcggagaggcagccctgttcctttctatcctgggggtattcaatatcctgttcattacctgtatcccgattatcctgtattttactaaagttgagtactggtcaagcttcgatgacattccatgggggaacctatgtggattcagtgtgctgctgttgacttttaatatcgtgttgaactttggcatcgcagtcacttaccccaccctgatgtcattaggtatagtactctctatccccgtgaatgccgttatcgatcactacacctcccagattgtgtttaacggggtgcgcgtcattgcgataataataatcgggctcggattcttactcctgttactgcctgaggagtgggatgtgtggctaataaaattgctgacgcgcttgaaagtccggaagaaagaggagccggctgagggcgctgctgatctgtcatccggccctcagagcaagaatcgtcgggctcgtccctcattcgctcgatag

SEQ ID NO: 250272 - DNA, 2891 bp, Artificial Sequence
  derived and/or modified sequence
aaagcggcccggggcggccggcgcggcgcagaccctcggtgggcagcgcactccagtcttcccaggctagcggctgcagggagctccggcccgcggcccctccgcctcaagtctgggagctgccggtcccactctgtctttgcctatggggattcgagagtttcccagcggcgcacccaggggcaagagcattgccgttggcatgaggaggtcaccggacgtcagcccccggagactgtccgacatcagcccccagctccggcagctcaagtacttggtggtggacgaggcgattaaggaggatctgaaatggtcgcgctccgtggaggatctcaccagcgggccggtggggctcacgtccatcgaggagcggatcctgcgcatcactggctactatggctaccagccctgggcagcgagctgcaaaagggaggagcgcccccgggactccccgggcccggcggaggcccaggcaccggccggggtggaggccggcgggagagcgagtcgccgctgctggacgtgctcccgggcgcaactcaagaagatcttctggggcgtggcggtcgtgctgtgcgtgtgctcctcgtgggcgggctccacgcagctcgccaagctgaccttcaggaagttcgacgcgcccttcaccctcacgtggtttgccaccaactggaactttttattcttcccgttgtactacgtggggcacgtctgcaagtccacagagaagcagtctgtgaagcagcgatacagggaatgctgtcgattttttggagacaatggcttgactttgaaggtgttttttaccaaggcagcaccctttggtgttctttggacactcacaaactacctgtacttacatgcaataaagaaaataaacactacggatgtctccgtgttgttctgctgcaacaaagcttttgtgttcttgctctcatggatcgttctcagggacagattcatgggagtgaggattgtggccgccatcctcgccatcgctggcattgtgatgatgacctacgctgatggcttccacagccactccgtcatcggcatcgcactggtggtggcctcagcatcgatgtctgccctctacaaggttttgttcaagctcctcctgggcagtgctaagtttggagaagccgccttatttttgtccatcttgggtgtgtttaacatcctcttcatcacctgcattcctattatcctctactttaccaaagtggaatactggagctcttttgatgacattccatggggaaacctttgtggattttcagttcttttattgacattcaatattgtattaaattttggaattgccgttacatatcccactctgatgtctcttggaatcgtcctcagcatacctgtgaatgcagtgattgatcactacaccagtcagatcgtcttcaatggggtccgggtcatcgccatcatcatcatcggcctgggttttctcctcctgctcctgccagaggagtgggatgtctggttgatcaagctgctcacccgactcaaagtgaggaagaaggaggagcctgcagagggcgctgccgacctgagctcaggacctcagagcaagaacagaagagcccgcccttccttcgcccgctaacaccactcctctagaactcggtggtaatgactgggaggtctattcctgccgggaggaacctcagttgggtaaggtgtacatacctgtacagttttggtcatctgcggtaagttctatggtatttattggcatgtccaatttgcttgcacttttccacatcagaccttccacttaagggtaccaattcaatacaaaagagaaaagaagaacctctcagtgcttttccaacgaatgtaaagtgggtttaaaagttccctgcgtagatcgttttggatggctgacgttcttgacaagccagccatcagggcaagtgttttgaatcttagcaagtgttttgaatcttagcaactgaacatgacattgcacactgtgattatttttcagctatggtaggtcatattttgttttataccagagctgtactcttaattttaaggaatttcaatgaaccaaaagataactgtcaatttatttggatggatggatggagggatggaaggagggagggaaggatgtctgggatgtgaagaggcaaggcagaaatggatgatgaacatcaaaaactgtcagaggacaggtctgtgccaggtaccaggaaggacaagataagtccaagccccggctggcctgctctcacgtgtctgtgtaagatcatgcaagagaaatcacagtgccttctacagaattttcgtctttacctatgtgaagcgaggtgacgtgatacgtcactggcgccgtcttataatttagatgtaaaaatctttagaaacaaataaaactctctatatatgtgtatgtctgtgtacaaaaaaatgacagagctgatggccagtgtatacagagcgtggcccgcggtgtacaatacccatataaggtacattgtgcaggaggggaattgctggctgcttttacttcctgaccaagactgaaaaattatttactgaaatctgtaaacctttttatgaaacttttaagcaccaggctgtttacttacacaatttaggtctgccagaaaattctatctgtgatagatctgtaaagagggtcaggggttagagtttactatttttgaagtttacattgttacatatgaaatggaaacattattttgaaacgttgtcataacccaatggtgcattctgtaaccatggagtcttctgtttcctgggggaaaggggcattcatgacctgaactttttagcaaattattattctcagtttccattacctgtttggccaaacagattaataaaatatttgaaaaagaagcgtt

SEQ ID NO: 250273 - protein, 167 aa, Artificial Sequence
  derived and/or modified sequence
MTAGTVVITGGILATVILLCIIAVLCYCRLQYYCCKKSGTEVADEEEEREHDLPTHPRGPTCNACSSQALDGRGSLAPLTSEPCSQPCGVAASHCTTCSPYSSPFYIRTADMVPNGGGGERLSFAPTYYKEGGPPSLKLAAPQSYPVTWPGSGREAFTNPRAISTDV

SEQ ID NO: 250274 - DNA, 504 bp, Artificial Sequence
  derived and/or modified sequence
atgaccgccggcaccgtggtgatcaccggcggcatcctggccaccgtgatcctgctgtgcatcatcgccgtgctgtgctactgcagactgcagtactactgctgcaagaagagcggcaccgaggtggccgacgaggaggaggagagagagcacgacctgcccacccaccccagaggccccacctgcaacgcctgcagcagccaggccctggacggcagaggcagcctggcccccctgaccagcgagccctgcagccagccctgcggcgtggccgccagccactgcaccacctgcagcccctacagcagccccttctacatcagaaccgccgacatggtgcccaacggcggcggcggcgagagactgagcttcgcccccacctactacaaggagggcggcccccccagcctgaagctggccgccccccagagctaccccgtgacctggcccggcagcggcagagaggccttcaccaaccccagagccatcagcaccgacgtgtag

SEQ ID NO: 250275 - DNA, 2909 bp, Artificial Sequence
  derived and/or modified sequence
cgcgtgcatcagcctctctggcgggggattctccccggactccggccagcgccaatcaggtcgcgcggtacctgcccccagccctggccacctggaggggcgatgaggctccacgcccggagcagggcagtcctcggagcgccggggaggccgcggagcctcacgtgtgccgccccagccgctggcgcccggaaggacgcgctgcgaccccgtgggagccgaacgcgggagtcgctgcccgagcggagctgctcagccgcgggactgatgcccttggccagacgcacccccaactgctgtctgctcaggtgtagcccgcgtgactgagtcaccgctgctccagctgtttcacgtcgccgttccctttactgaatagtttgatggggcgccgggcggatgacagcgggaacggttgtgatcactggcggaatcctagctacggtgatcctcctctgcatcattgccgtcctgtgctactgcaggctccagtattactgctgcaagaagagcggaaccgaggttgcagacgaggaggaggagcgggagcacgaccttcccacgcatcccagaggccccacctgcaatgcctgcagctcccaagccctggacggcagaggcagcctggcgcctctcaccagcgagccctgcagccagccctgtggggtggccgcgagccactgcactacctgctccccatacagctcccccttttacatacggacggctgacatggtgcccaatgggggtggaggcgagaggctctcctttgctcccacatactacaaagaggggggacccccatccctcaaattggcagcaccccagagttacccggtgacctggccaggctctgggcgtgaggccttcaccaatccaagggctattagtacagacgtgtaaatccttccaccccgacccgcacacacacccacactgctgccctggcgggggccatgggggtgatgaatgaccctccaacagccccacatgggttgtttctgtttctttggcttttctcgctccgcagtggagggtttactaggatttaagcttttgagtgcattgagaaccaagacagggcctggctccaactctgtgggccagaggtgggggactgctaggtcgagtctgcagcttcgccagtttcttggttgggacactcctctggcagccccagcaccaccacaaccccttgcagtgtgccccagtcccctggattcgctggactgcaaaaaggagcaccagggaaagctcagcaaaggctcaggaggcctcccgggtcctcgggagatgaagcatccgtgcctaggaaaaggggacagagggcaaggagagaagtgagagctacaattccagcattggagaagcgaggggcggggcgtcaacggcactgcttcaggacgcgcttgctgaaacgactccaacagctagttcacagcccagctttgtacgttggttaccatagctactgctgtcactgtagctgctcccgtagggtcgttgattcctgaacgtatcacatctcacctgcccccttcctcgtgggacgtgtcaagttgactttaaagcctaaggtggcttgtggggactgcaccagaaagtgtctaaccttgtgttccccgaaatcctttctctgacttaggaaccagcgccccctgctggagaagttttttcattttgttagccgacttctggtagcttagcaaagagaccagctgactgtctctcggcccagcccaccacgccgagtagcttgtgtggatgcagtcctgtgagggtgtgcataaccgttcccaggtgtacgcacgcgcgcgcgcgcgcacagacacacacacacacacacacacacacacacacacacagtaaccacgggtaggcaccaggggctttgtacattcaggagctgcagagaggaaaggtctcccatgtaccagagaaggaaaagtctgatcccgaaacagcttgaacgaaaggtggttaacacgtgaccaatccccatggcagacagcgggctggtgaacaggaagagcacagaatctctgtggggcgatgctgcagcggctgaaaccacgtcaagtcccccagagcccggcattctatgtaagcatccacctgtgacgccgtggagcaggatcttcattcatctcaccagagcaacagcccagtcctgaggatgggagggacgtgacttagccttgggattccacgctcgccgccctcccttggccgccctactccccagtttcctggcgatgagccatttattgtgtctcacaccagcctcatttccaactccgacttcctacttagaatgtggcagtggctttgtgagtgagaatcctgatgagttttccagtggcctctgcagaagctggcccccttctaagggcatagctaacccccttcccactcctgagtcactgaattcgaggagggtggggcagggaaagggctggcccccctgctgaaatcttgattctgcatttgaggaaggtcagggtgccgctgggggagcagggagcggggagggaggaagaggggaatgcacatcttttgcgccactattaaggcacctgtcaccttacatctcaatctggaatcaaagtgccctgggttgagaagcagacctgggctctggtcacactttggtcactcattagctctaggaccagtcactaatctctgagactccattttctccagggaaacgaggcttgcccagatagactaacaaccctttagtgctccaagaagtgagaatttccgaaaaagatctgccggcccagagcactccctcttgccctaatcctggcagggtctggatgtatttacccaactctgatcttgcgtgcagggatgcttgctgatggatgaaagaccacaataaaacaagattagcagcaaaacaa

SEQ ID NO: 250276 - DNA, 504 bp, Artificial Sequence
  derived and/or modified sequence
atgaccgccggcacggtcgtgattactggcggcatactcgctaccgttatactactgtgcatcattgcagtgttatgctattgccggcttcaatattattgttgtaagaagtcaggaaccgaggtagctgacgaggaagaagaacgagagcatgacttgccaacacaccctaggggcccgacctgtaatgcatgctcgagccaggccttggacggccgaggctcattggcccccctgacttctgagccctgctcgcagccttgcggagttgctgcctctcattgtaccacgtgctcaccctattcctctcccttttacatcaggacagcagacatggtgccgaacggcggtgggggcgaacggctcagtttcgcacccacttattacaaggaaggcggccctcctagcttgaaactcgccgcaccgcagagctacccagtgacttggcccgggtccgggcgtgaagccttcaccaatcccagggccatttcgactgatgtttag

SEQ ID NO: 250277 - DNA, 504 bp, Artificial Sequence
  derived and/or modified sequence
atgacagctggcaccgtggtgatcactggaggcatcctggccaccgtcatcctgctgtgcatcatcgctgtgctgtgctactgccgcctgcagtactactgctgcaagaagagcggcacagaggtggctgatgaggaggaggagcgggagcatgacctgcccacccacccccggggccccacctgcaatgcctgcagcagccaggccctggatggccggggcagcctggcccccctgaccagcgagccctgcagccagccctgtggggtggccgccagccactgcaccacctgcagcccctacagcagccccttctacatcagaacagctgacatggtgcccaatggaggcggcggggagcggctgagctttgcccccacctactacaaggagggcggcccccccagcctgaagctggccgccccccagagctaccctgtgacctggccaggcagcggccgggaggccttcaccaacccccgggccatcagcacagatgtgtag

SEQ ID NO: 250278 - DNA, 504 bp, Artificial Sequence
  derived and/or modified sequence
atgaccgccggcaccgtggtgatcaccggcggcatcctggccaccgtcatcctgctgtgcattattgccgtgctctgctactgccgcctgcagtattactgttgcaaaaaatcaggtacggaagtcgccgatgaggaggaggagcgagaacacgatctgccaacacacccgaggggtcccacctgtaacgcatgctcctctcaggccttggacggtcggggatcattggccccgctcaccagtgaaccctgttctcagccgtgcggtgttgccgcttcacactgcaccacctgttccccttactcgagtcccttttacatacgcacggccgatatggtgccaaacgggggtgggggagaacgactgtcctttgctccaacttattacaaagagggaggtccacctagcctgaaactcgcggctccccagtcctatccagttacttggcctggtagcggtcgagaggcattcacaaatccacgggcaatcagtacagacgtgtag

SEQ ID NO: 250279 - DNA, 504 bp, Artificial Sequence
  derived and/or modified sequence
atgaccgccggaactgtggtgatcaccggtggaatattagcgacagtcatattgctgtgtattatagccgtgttgtgctattgtcgcttacagtactactgctgtaagaagtcagggactgaggtagctgatgaggaagaggaaagagagcatgaccttcctacccatccaaggggacctacctgcaacgcttgttccagccaggccttagacggaaggggcagcctcgctccactcacctctgaaccttgcagccagccctgcggcgtcgctgccagtcattgcaccacatgttcaccatactcctctcctttttatatccggaccgcggacatggtcccaaacggcggaggaggagagcgtctctcgtttgcccctacgtattacaaagaggggggtccgccaagcctaaagctggcagccccacagtcataccctgttacttggccaggttctggcagagaggctttcaccaacccaagagccatcagcaccgacgtttag

SEQ ID NO: 250280 - protein, 561 aa, Artificial Sequence
  derived and/or modified sequence
MANMNSDSRHLGTSEVDHERDPGPMNIQFEPSDLRSKRPFCIEPTNIVNVNHVIQRVSDHASAMNKRIHYYSRLTTPADKALIAPDHVVPAPEECYVYSPLGSAYKLQSYTEGYGKNTSLVTIFMIWNTMMGTSILSIPWGIKQAGFTTGMCVIILMGLLTLYCCYRVVKSRTMMFSLDTTSWEYPDVCRHYFGSFGQWSSLLFSLVSLIGAMIVYWVLMSNFLFNTGKFIFNFIHHINDTDTILSTNNSNPVICPSAGSGGHPDNSSMIFYANDTGAQQFEKWWDKSRTVPFYLVGLLLPLLNFKSPSFFSKFNILGTVSVLYLIFLVTFKAVRLGFHLEFHWFIPTEFFVPEIRFQFPQLTGVLTLAFFIHNCIITLLKNNKKQENNVRDLCIAYMLVTLTYLYIGVLVFASFPSPPLSKDCIEQNFLDNFPSSDTLSFIARIFLLFQMMTVYPLLGYLARVQLLGHIFGDIYPSIFHVLILNLIIVGAGVIMACFYPNIGGIIRYSGAACGLAFVFIYPSLIYIISLHQEERLTWPKLIFHVFIIILGVANLIVQFFM

SEQ ID NO: 250281 - protein, 437 aa, Artificial Sequence
  derived and/or modified sequence
MIWNTMMGTSILSIPWGIKQAGFTTGMCVIILMGLLTLYCCYRVVKSRTMMFSLDTTSWEYPDVCRHYFGSFGQWSSLLFSLVSLIGAMIVYWVLMSNFLFNTGKFIFNFIHHINDTDTILSTNNSNPVICPSAGSGGHPDNSSMIFYANDTGAQQFEKWWDKSRTVPFYLVGLLLPLLNFKSPSFFSKFNILGTVSVLYLIFLVTFKAVRLGFHLEFHWFIPTEFFVPEIRFQFPQLTGVLTLAFFIHNCIITLLKNNKKQENNVRDLCIAYMLVTLTYLYIGVLVFASFPSPPLSKDCIEQNFLDNFPSSDTLSFIARIFLLFQMMTVYPLLGYLARVQLLGHIFGDIYPSIFHVLILNLIIVGAGVIMACFYPNIGGIIRYSGAACGLAFVFIYPSLIYIISLHQEERLTWPKLIFHVFIIILGVANLIVQFFM

SEQ ID NO: 250282 - protein, 37 aa, Artificial Sequence
  derived and/or modified sequence
MANMNSDSRHLGTSEVDHERDPGPMNIQFEPSDLRSK

SEQ ID NO: 250283 - protein, 26 aa, Artificial Sequence
  derived and/or modified sequence
MANMNSDSRHLGTSEVDHERDPGPMN

SEQ ID NO: 250284 - protein, 97 aa, Artificial Sequence
  derived and/or modified sequence
MANMNSDSRHLGTSEVDHERDPGPMNIQFEPSDLRSKRPFCIEPTNIVNVNHVIQRVSDHASAMNKRIHYYSRLTTPADKALIAPDHVVPAPEECYV

SEQ ID NO: 250285 - protein, 498 aa, Artificial Sequence
  derived and/or modified sequence
MNKRIHYYSRLTTPADKALIAPDHVVPAPEECYVYSPLGSAYKLQSYTEGYGKNTSLVTIFMIWNTMMGTSILSIPWGIKQAGFTTGMCVIILMGLLTLYCCYRVVKSRTMMFSLDTTSWEYPDVCRHYFGSFGQWSSLLFSLVSLIGAMIVYWVLMSNFLFNTGKFIFNFIHHINDTDTILSTNNSNPVICPSAGSGGHPDNSSMIFYANDTGAQQFEKWWDKSRTVPFYLVGLLLPLLNFKSPSFFSKFNILGTVSVLYLIFLVTFKAVRLGFHLEFHWFIPTEFFVPEIRFQFPQLTGVLTLAFFIHNCIITLLKNNKKQENNVRDLCIAYMLVTLTYLYIGVLVFASFPSPPLSKDCIEQNFLDNFPSSDTLSFIARIFLLFQMMTVYPLLGYLARVQLLGHIFGDIYPSIFHVLILNLIIVGAGVIMACFYPNIGGIIRYSGAACGLAFVFIYPSLIYIISLHQEERLTWPKLIFHVFIIILGVANLIVQFFM

SEQ ID NO: 250286 - DNA, 1686 bp, Artificial Sequence
  derived and/or modified sequence
atggccaacatgaacagcgacagcagacacctgggcaccagcgaggtggaccacgagagagaccccggccccatgaacatccagttcgagcccagcgacctgagaagcaagagacccttctgcatcgagcccaccaacatcgtgaacgtgaaccacgtgatccagagagtgagcgaccacgccagcgccatgaacaagagaatccactactacagcagactgaccacccccgccgacaaggccctgatcgcccccgaccacgtggtgcccgcccccgaggagtgctacgtgtacagccccctgggcagcgcctacaagctgcagagctacaccgagggctacggcaagaacaccagcctggtgaccatcttcatgatctggaacaccatgatgggcaccagcatcctgagcatcccctggggcatcaagcaggccggcttcaccaccggcatgtgcgtgatcatcctgatgggcctgctgaccctgtactgctgctacagagtggtgaagagcagaaccatgatgttcagcctggacaccaccagctgggagtaccccgacgtgtgcagacactacttcggcagcttcggccagtggagcagcctgctgttcagcctggtgagcctgatcggcgccatgatcgtgtactgggtgctgatgagcaacttcctgttcaacaccggcaagttcatcttcaacttcatccaccacatcaacgacaccgacaccatcctgagcaccaacaacagcaaccccgtgatctgccccagcgccggcagcggcggccaccccgacaacagcagcatgatcttctacgccaacgacaccggcgcccagcagttcgagaagtggtgggacaagagcagaaccgtgcccttctacctggtgggcctgctgctgcccctgctgaacttcaagagccccagcttcttcagcaagttcaacatcctgggcaccgtgagcgtgctgtacctgatcttcctggtgaccttcaaggccgtgagactgggcttccacctggagttccactggttcatccccaccgagttcttcgtgcccgagatcagattccagttcccccagctgaccggcgtgctgaccctggccttcttcatccacaactgcatcatcaccctgctgaagaacaacaagaagcaggagaacaacgtgagagacctgtgcatcgcctacatgctggtgaccctgacctacctgtacatcggcgtgctggtgttcgccagcttccccagcccccccctgagcaaggactgcatcgagcagaacttcctggacaacttccccagcagcgacaccctgagcttcatcgccagaatcttcctgctgttccagatgatgaccgtgtaccccctgctgggctacctggccagagtgcagctgctgggccacatcttcggcgacatctaccccagcatcttccacgtgctgatcctgaacctgatcatcgtgggcgccggcgtgatcatggcctgcttctaccccaacatcggcggcatcatcagatacagcggcgccgcctgcggcctggccttcgtgttcatctaccccagcctgatctacatcatcagcctgcaccaggaggagagactgacctggcccaagctgatcttccacgtgttcatcatcatcctgggcgtggccaacctgatcgtgcagttcttcatgtag

SEQ ID NO: 250287 - DNA, 81 bp, Artificial Sequence
  derived and/or modified sequence
atggccaacatgaacagcgacagcagacacctgggcaccagcgaggtggaccacgagagagaccccggccccatgaactag

SEQ ID NO: 250288 - DNA, 1686 bp, Artificial Sequence
  derived and/or modified sequence
atggctaacatgaatagtgatagccggcatctgggcacctcagaagtggatcacgagagagacccagggccaatgaatattcaattcgagccctcagatttaagatccaagcggccgttctgcatagaacccactaatattgtcaacgtgaaccatgtcatacaaagggtgagcgaccacgcgagcgccatgaataaacgcatccactattacagccgtctgacaacccccgctgacaaggccttaatagcacctgaccatgtggtgccagcccctgaagaatgctatgtgtattcacccctgggcagcgcatataagctacagagttacaccgagggttatggcaaaaacacttctctggtgactattttcatgatttggaatacaatgatgggcaccagtatcctttccatcccttggggaatcaagcaagccggcttcaccaccggcatgtgcgtcatcatcctcatgggactattgaccctgtactgctgctaccgggtcgtcaagagcagaacgatgatgttcagcctggacactacttcctgggaatatcccgacgtgtgtaggcactactttggttcattcggtcaatggagttctctgctgttctccctggtttcattgattggggcgatgatcgtttactgggtactgatgtccaactttttgttcaacacagggaagttcatttttaatttcatccatcatatcaacgatacggatactatcctctctactaataactcaaacccagtgatttgtccctctgcaggaagcggagggcaccctgataactctagcatgatcttttacgccaacgatactggggcccaacagtttgagaaatggtgggacaaaagccggaccgtccccttctaccttgtgggcttgttactgccactcctgaacttcaagtcccccagcttcttctctaaattcaacattttagggactgtgagcgtcctgtatttgatctttttggtcacgttcaaagcggtgcgactagggttccacctggaattccattggttcattccaactgagttcttcgtgcccgaaatccggttccagttcccccagttgactggggtactgactctggctttttttattcacaattgcatcatcacgctcctgaagaacaataagaagcaggaaaacaatgtgcgggacctctgcatcgcctacatgttagtaactctcacctacttgtacattggggtgctcgtgttcgcctcttttccctctcctcctttgagcaaagactgcattgaacagaacttcctggacaacttcccttcatccgacactctgtcttttattgcccgaatatttctgttgttccagatgatgacggtgtatcctctgctggggtatctggcaagggtccagctgttgggtcatatcttcggcgatatttacccctctatctttcatgtattaatactgaatttgattatagtgggcgctggagtgattatggcctgcttctatccaaatatcggtggtatcatcagatacagtggcgctgcatgcgggctggcattcgtttttatttatccgagcctcatctacattatctcgttgcatcaggaggagcgtctgacctggcccaagctgatctttcatgtgttcatcatcatcttgggagtcgcaaatttgattgtgcaattcttcatgtag

SEQ ID NO: 250289 - DNA, 1686 bp, Artificial Sequence
  derived and/or modified sequence
atggccaatatgaactccgactctaggcatctgggcacctcggaagtggaccacgaaagggatccaggccccatgaacatccagttcgaaccatccgatctgcggagcaaaaggcctttctgcatagagcctaccaacattgtgaacgtaaatcatgtgatacagcgcgtcagcgatcacgccagtgcaatgaacaagcggatccactattacagccgcctcacgacccccgcggacaaagccttgatcgcgccggaccacgtagtcccggcaccagaagagtgctatgtttactctccgctgggaagcgcttataagcttcagtcttacacagaaggttatgggaagaatacctcactcgtgaccatctttatgatatggaacactatgatgggaacaagtatcctgtcaatcccctggggcataaagcaggctgggttcaccacaggcatgtgcgtaataatcctcatgggtttgctgacactgtactgctgctaccgggtcgtcaagtccaggaccatgatgttctctctggacactaccagttgggaataccctgatgtttgcaggcactacttcggcagttttggccagtggtcatcactcctgttctccttggtatccctgatcggcgctatgatcgtatactgggtgctgatgagtaactttctcttcaacactggcaagtttatcttcaatttcattcatcacatcaatgacacagataccattttgagtacaaacaattccaatccagtcatctgcccctctgcaggctcaggaggacatccggataactcctctatgatattctatgcaaatgacacgggagcgcaacagttcgaaaaatggtgggacaagtctaggacagtgccattttacctagtaggcctgcttcttcccctactcaatttcaaaagtcctagtttcttcagcaagttcaatatcctgggcaccgtgagtgtcttgtatcttattttcttagtgacctttaaggctgtgagactcggcttccacctggaattccattggttcatcccaaccgagtttttcgtgcctgagatcaggtttcagttcccccagctgaccggcgtactgaccctggccttctttatccacaactgtatcattacgctgttgaagaacaacaaaaaacaagagaataatgtgcgggacctgtgcattgcttacatgttggtgacacttacttacctgtacattggcgttctggttttcgcgtcatttccttccccaccattaagtaaggattgcatcgagcagaacttcctggacaacttcccgtccagcgatacattgtctttcattgcgagaattttcctactctttcagatgatgacggtgtacccacttctggggtacctcgcgcgcgtgcagctgctgggacatatatttggagacatttaccccagtattttccacgtgctcatactcaatctcatcattgttggcgcaggcgtgattatggcctgtttctacccaaacatcggcgggatcattcgctattctggggcggcatgtggcttggcgtttgtctttatctatccatcactcatttacataatctctcttcaccaggaggaacgccttacatggccaaagctaattttccacgtctttatcatcattctcggtgtggccaacctgattgtacagttctttatgtag

SEQ ID NO: 250290 - DNA, 81 bp, Artificial Sequence
  derived and/or modified sequence
atggccaacatgaacagcgactctagacacctcggaacatctgaggtggaccatgagcgggaccccggacccatgaactag

SEQ ID NO: 250291 - DNA, 1686 bp, Artificial Sequence
  derived and/or modified sequence
atggccaacatgaacagcgacagccgccacctgggcaccagcgaggtggaccacgagcgggaccccggccccatgaacatccagtttgagcccagcgacctgcggagcaagaggcccttctgcatcgagcccaccaacatcgtgaatgtgaaccacgtgatccagagggtgtctgaccacgccagcgccatgaacaagaggatccactactacagccggctgaccaccccagctgacaaggccctgattgccccagaccacgtggtgcctgcccctgaggagtgctacgtgtacagccccctgggcagcgcctacaagctgcagagctacacagagggctacggcaagaacaccagcctggtgaccatcttcatgatctggaacaccatgatgggcaccagcatcctgagcatcccctggggcatcaagcaggccggcttcaccaccggcatgtgtgtgatcatcctgatgggcctgctgaccctgtactgctgctacagagtggtgaagagcaggaccatgatgttcagcctggacaccacctcctgggagtacccagatgtgtgccgccactacttcggcagctttggccagtggagcagcctgctcttcagcctggtgtccctcatcggggccatgattgtgtactgggtgctgatgagcaacttcctgttcaacacaggcaagttcatcttcaacttcatccaccacatcaatgacacagacaccatcctgagcaccaacaacagcaaccctgtgatctgccccagcgctggcagcggcggccacccagacaacagctccatgatcttctacgccaatgacaccggggcccagcagtttgagaagtggtgggacaagagcaggacagtgcccttctacctggtgggcctgctgctgcccctgctgaacttcaagagccccagcttcttcagcaagttcaacatcctgggcaccgtgtctgtgctgtacctgatcttcctggtgaccttcaaggctgtgcggctgggcttccacctggagttccactggttcatccccacagagttctttgtgcctgagatccgcttccagttcccccagctgactggagtgctgaccctggccttcttcatccacaactgcatcatcaccctgctgaagaacaacaagaagcaggagaacaacgtgcgggacctgtgcatcgcctacatgctggtgaccctgacctacctgtacatcggcgtgctggtgtttgccagcttccccagcccccccctgagcaaggactgcatcgagcagaacttcctggacaacttccccagcagtgacaccctgtccttcatcgcccgcatcttcctgctcttccagatgatgacagtgtaccccctgctgggctacctggcccgggtgcagctgctgggccacatctttggagacatctaccccagcatcttccacgtgctgatcctgaacctgatcatcgtgggcgctggggtcatcatggcctgcttctaccccaacatcggcggcatcatccgctacagcggggccgcctgtggcctggcctttgtgttcatctaccccagcctcatctacatcatcagcctgcaccaggaggagcggctgacctggcccaagctgatcttccacgtgttcatcatcatcctgggcgtggccaacctgattgtgcagttcttcatgtag

SEQ ID NO: 250292 - DNA, 81 bp, Artificial Sequence
  derived and/or modified sequence
atggccaacatgaacagcgacagccgccacctgggcaccagcgaggtggaccacgagcgggaccccggccccatgaactag

SEQ ID NO: 250293 - DNA, 1686 bp, Artificial Sequence
  derived and/or modified sequence
atggccaacatgaacagcgacagccggcacctgggcaccagcgaggtcgaccacgaaagggacccaggtccgatgaacattcagttcgaaccttccgacctaaggagcaaaaggcccttctgcatcgagcccacaaacatagtgaacgtaaatcacgtgatccaacgcgtgagcgatcatgccagcgcaatgaataaacgcatccattattacagcaggctaacaactcccgccgacaaagccctaatcgcccctgatcacgtagtgcctgcccccgaagagtgttatgtctacagtccattggggtccgcgtataagctccaatcttacactgagggctatggaaaaaacacctctcttgttacaatattcatgatttggaacactatgatgggcacctctatactttctattccttggggtataaagcaggctggattcacgactgggatgtgcgtgatcatacttatggggctgttgaccctgtactgttgctatagagtcgtgaagtcccgaacgatgatgttcagtctggatactacgtcctgggagtaccctgatgtgtgtcgacactactttgggtcctttggacagtggtcgagtctcctctttagcctagtttctcttatcggagccatgatagtatactgggttctgatgagtaacttcttattcaataccggcaagttcatctttaacttcattcatcatatcaacgataccgacacaatcctcagcactaacaactctaaccctgtcatttgtccatctgccggctcaggtggtcacccagataacagttccatgatcttctatgccaatgacactggtgctcagcagttcgagaaatggtgggacaagtcgagaaccgttcctttttatctggtcgggcttctgcttccccttttaaacttcaagtccccttctttcttctcaaaattcaacatcctggggaccgtgagtgtcctgtacctgattttcctcgtgacatttaaagctgttagattaggctttcaccttgagttccactggtttatccccacggagttttttgtgccagaaattagatttcaatttcctcagctgaccggtgttctcacacttgctttcttcattcataattgcattattacactgttgaaaaacaacaagaaacaggagaacaacgttcgcgacctgtgcatcgcctacatgctggtgaccctgacctatctctatattggcgtgctcgtgttcgcttcattcccctcccccccattgagcaaggactgtatcgaacaaaattttctggacaatttcccttccagtgatactctatctttcattgcccgtatattcctgcttttccagatgatgacggtgtaccccctgcttgggtatctggctagagtgcaactgctggggcacatcttcggggatatttacccctctatttttcacgttctcatcttaaacctgattatcgtcggggccggcgtgatcatggcgtgcttctacccgaacattggcggtattattcggtactcgggggcagcttgcgggctggcattcgtgttcatatatcctagcctcatttacattatttctctgcatcaggaggagcggctgacctggccgaagttaatatttcatgtgttcattattatcttaggtgtagctaatctgatagtgcagttttttatgtag

SEQ ID NO: 250294 - DNA, 1686 bp, Artificial Sequence
  derived and/or modified sequence
atggccaacatgaacagcgacagccggcacctgggcaccagcgaggtggatcacgagcgggaccccggacccatgaatattcagttcgaacccagtgacctaagatccaagcggccattttgcattgagccaacgaacatcgtgaacgtgaatcatgtgattcaacgggtatctgaccatgcttccgccatgaacaaacgcattcattactatagcagactgactacccccgcagataaagctttgatagcacccgaccatgtcgtacctgctccagaagagtgttacgtgtattcaccactggggtcagcttataagcttcagagttacacggagggctatggtaaaaatacaagcctggtgacaattttcatgatttggaataccatgatgggcacgtccatcttgagcatcccttggggcataaagcaagcaggtttcaccacaggcatgtgcgtgattatactgatggggctcttgactctgtattgctgctatagagtggttaaaagcaggaccatgatgttctctctcgatacaacatcctgggagtatcctgatgtgtgccgccactacttcgggagcttcgggcagtggagctctctgctcttttcactggtttcgttaatcggcgctatgattgtctattgggtcctgatgagtaactttttgttcaatacagggaaattcatttttaatttcatccaccacattaacgacacggatactattttgtctacaaataattccaacccagtgatttgccccagcgctggttcaggaggccacccagacaactccagcatgattttttacgccaacgacacgggagcccagcagttcgaaaaatggtgggataagagccggaccgtccctttttacctggtggggttgctactccctctgctgaatttcaagtctccctcattcttcagcaagttcaatattctcgggactgtgtctgtgttgtatttaatatttttagtgaccttcaaagcagtgcggcttggtttccatctggaattccattggttcatccctacagagttcttcgtacccgaaattcgctttcagtttccccagttaaccggagtgctaactctcgccttcttcatccacaattgtatcattacgctgctgaagaataacaaaaaacaagaaaataacgtacgcgatctgtgcatagcgtacatgctggttactctgacctacctttatataggcgttctcgtgtttgcctcatttccaagtccccctctgagcaaagactgcattgaacagaattttctggacaactttcccagttccgataccctgtcttttatcgctagaatattcctgttgtttcagatgatgaccgtgtaccccctccttgggtacctggctagagtgcagttattagggcatatcttcggagacatctatccatctatttttcacgtgctgatccttaaccttataatcgttggcgcaggagtcatcatggcatgtttttacccaaacatcgggggcattatccgctactcaggcgcagcgtgcggtctggcgttcgtgttcatctatcccagtcttatctacatcatttccttgcatcaggaggaaaggctcacttggccgaaactgatttttcacgtgtttattattatacttggagttgctaacctgatagttcagtttttcatgtag

SEQ ID NO: 250295 - DNA, 81 bp, Artificial Sequence
  derived and/or modified sequence
atggccaacatgaacagcgacagccggcacctgggcaccagcgaggtggatcatgagcgagatcccgggcctatgaactag

SEQ ID NO: 250296 - DNA, 1686 bp, Artificial Sequence
  derived and/or modified sequence
atggccaacatgaactctgattcccgacacctcggcacctccgaagtggaccacgaaagggaccctgggcctatgaacattcaattcgagccttcagatctgcgatcaaaacgccctttttgcattgagcctaccaatatcgtaaacgtgaatcatgttatccagcgagtgagcgatcatgcttccgctatgaataaacgtattcactattactctagactaactactcccgcagataaagctctcattgccccagaccacgttgtgccagcgccagaggaatgctatgtgtactcccccctgggcagcgcttacaaactgcaatcctatactgagggctacggcaaaaacactagtttggttaccatattcatgatctggaacacaatgatgggaacgagtattctctccataccttggggaatcaagcaggcgggtttcactacaggtatgtgtgtgattattctcatgggcctccttactttgtattgttgttaccgtgttgtgaagtctcgcaccatgatgttctcgttagacaccacaagctgggaataccctgatgtttgtcgtcattacttcgggtccttcggtcagtggtcttcactccttttttcgctcgtttcactgattggcgctatgatcgtttactgggttctgatgtctaacttcctttttaacaccggcaagtttatatttaattttattcatcatattaatgatacagatactatcctctcaactaacaattccaacccggtcatatgtccctctgcgggatctggaggtcatcctgacaactcctcgatgattttctatgccaacgacacaggcgctcaacaattcgagaagtggtgggacaaatcaagaactgtgcctttctatttggtggggctcctgttgccgctcctgaactttaagagtccctctttcttctccaaatttaacattctcggaactgtatctgttttatatctgatctttttggttactttcaaagccgtaaggctggggttccatctggaattccactggtttatccccacggagttcttcgtgcctgaaatccgctttcagtttcctcaattgacaggcgtgcttacgctcgcgttctttattcataattgtattatcacgctgctcaagaacaacaaaaaacaggagaataatgtaagagatctttgcattgcatatatgttggtcacactaacctacctttacatcggggtgttggtgttcgcatctttccctagcccgcctctgagtaaggattgtatcgagcagaatttcctggacaattttccttctagtgataccctgagctttatcgcccgtatcttcctgctgttccaaatgatgaccgtttatccgctgctaggctatttggcacgggtgcagttacttggtcatatttttggcgatatttatccatcgatctttcacgtgctcatccttaatctcatcatcgtaggggctggcgtgatcatggcgtgcttttatcccaacattggaggtattatacgatacagcggcgcagcgtgcgggctggccttcgtgtttatttatccctctttgatttacatcatctctctgcaccaggaggaaagactgacatggccaaaactcatatttcacgtgtttatcattattctgggggttgctaatctgattgtgcaattcttcatgtag

SEQ ID NO: 250297 - DNA, 1686 bp, Artificial Sequence
  derived and/or modified sequence
atggccaatatgaattcagactcacgacacctcgggacttctgaggtggatcatgagcgggaccccggacccatgaatattcaatttgaaccatctgatcttcggagcaagcggccattctgtattgaacctacaaatattgtaaatgtaaatcacgtgattcagcgcgtcagcgatcacgcatccgccatgaacaaacgaatacactactatagtagactgaccacgccagccgataaggcactcatcgcgccagatcacgtggtgcccgcacctgaagaatgttacgtgtacagtccgttgggctcagcttataagcttcaatcctatacggagggatatggcaagaatacgtcactggtgacgattttcatgatatggaacacgatgatgggaacttcgattttaagcatcccttgggggatcaagcaagcgggtttcaccaccggtatgtgtgtaatcattctcatgggactgttaacattatattgctgttaccgcgtggtgaagtcccggaccatgatgttttccttggacacaactagctgggagtatcctgacgtgtgccggcactattttggcagcttcggccagtggtcctctctgttgtttagtctcgtttcactgataggtgctatgatagtctattgggtattaatgagcaactttctctttaatacagggaagttcatatttaattttatccaccatattaacgatactgatacaattctctccaccaataacagtaatccagtgatctgtccctctgcgggatccggaggacaccccgacaatagttctatgatcttctacgctaatgacacaggagcccagcaatttgaaaaatggtgggacaaatctcgaactgttcctttctatttggtggggttgcttctgcccctccttaattttaaaagcccttcctttttcagtaaattcaacatactaggaaccgtgtctgtgctgtacttgatcttcctggtgacctttaaagctgtgcgattgggcttccacctcgagttccattggtttatccctacagagttttttgttccagaaattcgctttcagttcccccagttgaccggggtgctcacactggcttttttcatccataactgcattatcacccttctgaagaataataagaagcaggagaacaatgtccgcgacttgtgtatcgcctatatgctggttacgctgacctatctctacatcggtgttttagtgttcgcctcattccccagtccgcctctgtcgaaggactgcatcgagcagaactttctggataacttcccgtccagtgacactctttcattcatcgcccgtattttcctcttgtttcagatgatgaccgtttatcccctgctcggttacctcgctcgagtgcaactgctcggccacatctttggtgacatctacccaagtatctttcacgtgctgatactgaatcttattatcgtaggcgcaggcgtgattatggcttgcttttacccgaacattggcggtatcatccggtactcaggagccgcttgcggcctggcttttgtattcatctacccctccttgatctacattatttcgttacatcaggaggagagactgacttggcccaaactgatcttccatgtgttcataattatcttgggtgtagcgaaccttattgtccagttcttcatgtag

SEQ ID NO: 250298 - DNA, 81 bp, Artificial Sequence
  derived and/or modified sequence
atggcaaacatgaactctgattctcgccatttaggcacatctgaagtggaccatgaacgggaccccggacccatgaactag

SEQ ID NO: 250299 - DNA, 2368 bp, Artificial Sequence
  derived and/or modified sequence
aggactaacttcttcagtgcttagagtgtgagaaaaatggcaaatatgaatagtgattctaggcatcttggcacctctgaggtagatcatgaaagagatcctggacctatgaatatccagtttgagccatcggatctaagatccaaaaggcctttctgtatagagcccacaaacatcgtgaatgtgaatcatgtcattcagagggttagtgaccatgcctctgccatgaacaagagaattcattactacagccggctcaccactcctgcagacaaggcactgattgccccagaccatgtagttccagctccagaagagtgctatgtgtatagtccattgggctctgcttataaacttcaaagttacactgaaggatacggtaaaaacaccagtttagtaaccatttttatgatttggaataccatgatgggaacatctatactaagcattccttggggcataaaacaggctggatttactactggaatgtgtgtcatcatactgatgggccttttaacactttattgctgctacagagtagtgaaatcacggactatgatgttttcgttggataccactagctgggaatatccagatgtctgcagacattatttcggctcctttgggcagtggtcgagtctccttttctccttggtgtctctcattggagcaatgatagtttattgggtgcttatgtcaaattttctttttaatactggaaagtttatttttaattttattcatcacattaatgacacagacactatactgagtaccaataatagcaaccctgtgatttgtccaagtgccgggagtggaggccatcctgacaacagctctatgattttctatgccaatgacacaggagcccaacagtttgaaaagtggtgggataagtccaggacagtccccttttatcttgtagggctcctcctcccactgctcaatttcaagtctccttcatttttttcaaaatttaatatcctaggcacagtgtctgtcctttatttgattttccttgtcacctttaaggctgttcgcttgggatttcatttggaatttcattggtttataccaacagaattttttgtaccagagataagatttcagtttccacagctgactggagtgcttacccttgctttttttattcataattgtatcatcacactcttgaagaacaacaagaaacaagaaaacaatgtgagggacttgtgcattgcttatatgctggtgacattaacttatctctatattggagtcctggtttttgcttcatttccttcaccaccattatccaaagattgtattgagcagaattttttagacaacttccctagcagtgacaccctgtccttcattgcaaggatattcctgctgttccagatgatgactgtatacccactcttaggctacctggctcgtgtccagcttttgggccatatcttcggtgacatttatcctagcattttccatgtgctgattcttaatctaattattgtgggagctggagtgatcatggcctgtttctacccaaacataggagggatcataagatattcaggagcagcatgtggactggcctttgtattcatatacccatctctcatctatataatttccctccaccaagaagagcgtctgacatggcctaaattaatcttccacgttttcatcatcattttgggcgtggctaacctgattgttcagttttttatgtgaaatacctcaactgtttttttcaagagctctcatgatattttgagccttgacaacagttctatataaattcacttgtaaatgctgctgttgtgtaattctaaatattttctaagataatttgaaagcaagggaaatagtggccccttaatgagtatttttttattggggtggggaaaggggcaaaaagaatgatcttagtgtctttacctttctcatattaactcacctctttattctgtggtcttttctgaatagaaatgtatgccctaggaagaaatcatgctgggttttgcttttagagataaaaggtggtggatttattttgcctgcagtaaagattctcagggtgtcagagcagcatattgtcaaatcctgcttctgttttatgtttcagtgtattcactttcattttcttacttactagaccatttctgcagtttgcccaaacctctactgtttgggacagtaagccaaatacctcatttttaaaaagaagttttcatggcatcagtgttaataaagtacatttttaactgagtcttaatctctatttgaagaaaaagtagagacaaaagtaatgtcaatgtaatccccaggatcatgaaatgtatacaaaataaataaagtaggagagtttgttgctgtc

SEQ ID NO: 250300 - DNA, 2927 bp, Artificial Sequence
  derived and/or modified sequence
ggtccaaggacgtaaccagatcatacaacacgcgccaggaaagcccaaaagaggggtgatccctcgatggaggtgccgcatcagcgttttctcacgtggcctccggggctctatgaatggcaagagattgcattccttctactacccctcccagcctccagccgggacaaggaactggagcaaactcggggctgcagttccgactggactcgcccacctgggcgcgccggctgcccagcctcctgaagcctcggggctgggccctgcggtgatgggcgtgctggccgtcgcagagccctctgggagttgtagtccgtagcggcgagaggtttgacagcgaccgcgggcttggcgcattcagaactccaactcccgccggcccctgcgacccaggctattgccgcttcctgtttggactaggagccccgcggtcgcaaattgcgagaatttgggaagggaatctttatcttctcgtctagttctccgaggttgaaggctcggcctgctcagagaaggaaactgaggtccaccgagttggagaaacctactcaacaccaggactaacttcttcagtgcttagagtgtgagaaaaatggcaaatatgaatagtgattctaggcatcttggcacctctgaggtagatcatgaaagagatcctggacctatgaatatccagtttgagccatcggatctaagatccaaaaggcctttctgtatagagcccacaaacatcgtgaatgtgaatcatgtcattcagagggttagtgaccatgcctctgccatgaacaagagaattcattactacagccggctcaccactcctgcagacaaggcactgattgccccagaccatgtagttccagctccagaagagtgctatgtgtatagtccattgggctctgcttataaacttcaaagttacactgaaggatacggtaaaaacaccagtttagtaaccatttttatgatttggaataccatgatgggaacatctatactaagcattccttggggcataaaacaggctggatttactactggaatgtgtgtcatcatactgatgggccttttaacactttattgctgctacagagtagtgaaatcacggactatgatgttttcgttggataccactagctgggaatatccagatgtctgcagacattatttcggctcctttgggcagtggtcgagtctccttttctccttggtgtctctcattggagcaatgatagtttattgggtgcttatgtcaaattttctttttaatactggaaagtttatttttaattttattcatcacattaatgacacagacactatactgagtaccaataatagcaaccctgtgatttgtccaagtgccgggagtggaggccatcctgacaacagctctatgattttctatgccaatgacacaggagcccaacagtttgaaaagtggtgggataagtccaggacagtccccttttatcttgtagggctcctcctcccactgctcaatttcaagtctccttcatttttttcaaaatttaatatcctaggcacagtgtctgtcctttatttgattttccttgtcacctttaaggctgttcgcttgggatttcatttggaatttcattggtttataccaacagaattttttgtaccagagataagatttcagtttccacagctgactggagtgcttacccttgctttttttattcataattgtatcatcacactcttgaagaacaacaagaaacaagaaaacaatgtgagggacttgtgcattgcttatatgctggtgacattaacttatctctatattggagtcctggtttttgcttcatttccttcaccaccattatccaaagattgtattgagcagaattttttagacaacttccctagcagtgacaccctgtccttcattgcaaggatattcctgctgttccagatgatgactgtatacccactcttaggctacctggctcgtgtccagcttttgggccatatcttcggtgacatttatcctagcattttccatgtgctgattcttaatctaattattgtgggagctggagtgatcatggcctgtttctacccaaacataggagggatcataagatattcaggagcagcatgtggactggcctttgtattcatatacccatctctcatctatataatttccctccaccaagaagagcgtctgacatggcctaaattaatcttccacgttttcatcatcattttgggcgtggctaacctgattgttcagttttttatgtgaaatacctcaactgtttttttcaagagctctcatgatattttgagccttgacaacagttctatataaattcacttgtaaatgctgctgttgtgtaattctaaatattttctaagataatttgaaagcaagggaaatagtggccccttaatgagtatttttttattggggtggggaaaggggcaaaaagaatgatcttagtgtctttacctttctcatattaactcacctctttattctgtggtcttttctgaatagaaatgtatgccctaggaagaaatcatgctgggttttgcttttagagataaaaggtggtggatttattttgcctgcagtaaagattctcagggtgtcagagcagcatattgtcaaatcctgcttctgttttatgtttcagtgtattcactttcattttcttacttactagaccatttctgcagtttgcccaaacctctactgtttgggacagtaagccaaatacctcatttttaaaaagaagttttcatggcatcagtgttaataaagtacatttttaactgagtcttaatctctatttgaagaaaaagtagagacaaaagtaatgtcaatgtaatccccaggatcatgaaatgtatacaaaataaataaagtaggagagtttgttgctgtctaa

SEQ ID NO: 250301 - DNA, 2673 bp, Artificial Sequence
  derived and/or modified sequence
aagagatgaaagatggttggtttaagctaatcttgataatcctattttcattcgcacatacttaagtttttagtctttcttaaaactagaggtggaaatgtgaaatttatcacatgagaaatttatcattgtcatttatagtggccatcagaaaagataatgaaataagacttttgattcttacttatataatccaatgtcagtaaatataagcactaatgaatgctgacttgaatgctcagggttttcttgaaaattctaaattctgtgataaataattgaccactgtgacaacagaatgtaagtcattaaagtgcattccattacagtaagttggcaggagttcaaacagttctctgtaaatttgtttaactgcgtagattaaatggcaatatattttctataatgaaacttgttgaaatgagagggaatcagctatttacaatcatggcataactacctaggcctttctgtatagagcccacaaacatcgtgaatgtgaatcatgtcattcagagggttagtgaccatgcctctgccatgaacaagagaattcattactacagccggctcaccactcctgcagacaaggcactgattgccccagaccatgtagttccagctccagaagagtgctatgtgtatagtccattgggctctgcttataaacttcaaagttacactgaaggatacggtaaaaacaccagtttagtaaccatttttatgatttggaataccatgatgggaacatctatactaagcattccttggggcataaaacaggctggatttactactggaatgtgtgtcatcatactgatgggccttttaacactttattgctgctacagagtagtgaaatcacggactatgatgttttcgttggataccactagctgggaatatccagatgtctgcagacattatttcggctcctttgggcagtggtcgagtctccttttctccttggtgtctctcattggagcaatgatagtttattgggtgcttatgtcaaattttctttttaatactggaaagtttatttttaattttattcatcacattaatgacacagacactatactgagtaccaataatagcaaccctgtgatttgtccaagtgccgggagtggaggccatcctgacaacagctctatgattttctatgccaatgacacaggagcccaacagtttgaaaagtggtgggataagtccaggacagtccccttttatcttgtagggctcctcctcccactgctcaatttcaagtctccttcatttttttcaaaatttaatatcctaggcacagtgtctgtcctttatttgattttccttgtcacctttaaggctgttcgcttgggatttcatttggaatttcattggtttataccaacagaattttttgtaccagagataagatttcagtttccacagctgactggagtgcttacccttgctttttttattcataattgtatcatcacactcttgaagaacaacaagaaacaagaaaacaatgtgagggacttgtgcattgcttatatgctggtgacattaacttatctctatattggagtcctggtttttgcttcatttccttcaccaccattatccaaagattgtattgagcagaattttttagacaacttccctagcagtgacaccctgtccttcattgcaaggatattcctgctgttccagatgatgactgtatacccactcttaggctacctggctcgtgtccagcttttgggccatatcttcggtgacatttatcctagcattttccatgtgctgattcttaatctaattattgtgggagctggagtgatcatggcctgtttctacccaaacataggagggatcataagatattcaggagcagcatgtggactggcctttgtattcatatacccatctctcatctatataatttccctccaccaagaagagcgtctgacatggcctaaattaatcttccacgttttcatcatcattttgggcgtggctaacctgattgttcagttttttatgtgaaatacctcaactgtttttttcaagagctctcatgatattttgagccttgacaacagttctatataaattcacttgtaaatgctgctgttgtgtaattctaaatattttctaagataatttgaaagcaagggaaatagtggccccttaatgagtatttttttattggggtggggaaaggggcaaaaagaatgatcttagtgtctttacctttctcatattaactcacctctttattctgtggtcttttctgaatagaaatgtatgccctaggaagaaatcatgctgggttttgcttttagagataaaaggtggtggatttattttgcctgcagtaaagattctcagggtgtcagagcagcatattgtcaaatcctgcttctgttttatgtttcagtgtattcactttcattttcttacttactagaccatttctgcagtttgcccaaacctctactgtttgggacagtaagccaaatacctcatttttaaaaagaagttttcatggcatcagtgttaataaagtacatttttaactgagtcttaatctctatttgaagaaaaagtagagacaaaagtaatgtcaatgtaatccccaggatcatgaaatgtatacaaaataaataaagtaggagagtt

SEQ ID NO: 250302 - protein, 192 aa, Artificial Sequence
  derived and/or modified sequence
MSQCACLEEVHLPNIKPGEGLGMYIKSTYDGLHVITGTTENVGWQLKNLVKKLRENPTGVVLLLKKRPTGSFNFTPAPLKNLRWKPPLVQTSPPPATTQSPESTMDTSLKKEKSAILDLYIPPPPAVPYSPRDENGSFVYGGSSKCKQPLPGPKGSESPNSFLDQESRRRRFTIADSDQLPGYSVETNILPT

SEQ ID NO: 250303 - protein, 555 aa, Artificial Sequence
  derived and/or modified sequence
MEPVTKWSPKQVVDWTRGLDDCLQQYVHKFEREKINGEQLLQISHQDLEELGVTRIGHQELVLEAVDLLCALNYGLETDNMKNLVLKLRASSHNLQNYISSRRKSPAYDGNTSRKAPNEFLTSVVELIGAAKALLAWLDRAPFTGITDFSVTKNKIIQLCLDLTTTVQKDCFVAEMEDKVLTVVKVLNGICDKTIRSTTDPVMSQCACLEEVHLPNIKPGEGLGMYIKSTYDGLHVITGTTENSPADRSQKIHAGDEVIQVNQQTVVGWQLKNLVKKLRENPTGVVLLLKKRPTGSFNFTPAPLKNLRWKPPLVQTSPPPATTQSPESTMDTSLKKEKSAILDLYIPPPPAVPYSPRDENGSFVYGGSSKCKQPLPGPKGSESPNSFLDQESRRRRFTIADSDQLPGYSVETNILPTKMREKTPSYGKPRPLSMPADGNWMGIVDPFARPRGHGRKGEDALCRYFSNERIPPIIEESSSPPYRFSRPTTERHLVRGADYIRGSRCYINSDLHSSATIPFQEEGTKKKSGSSATKSSSTEPSLLVSWFTRLKLLTH

SEQ ID NO: 250304 - DNA, 1668 bp, Artificial Sequence
  derived and/or modified sequence
atggagcccgtgaccaagtggagccccaagcaggtggtggactggaccagaggcctggacgactgcctgcagcagtacgtgcacaagttcgagagagagaagatcaacggcgagcagctgctgcagatcagccaccaggacctggaggagctgggcgtgaccagaatcggccaccaggagctggtgctggaggccgtggacctgctgtgcgccctgaactacggcctggagaccgacaacatgaagaacctggtgctgaagctgagagccagcagccacaacctgcagaactacatcagcagcagaagaaagagccccgcctacgacggcaacaccagcagaaaggcccccaacgagttcctgaccagcgtggtggagctgatcggcgccgccaaggccctgctggcctggctggacagagcccccttcaccggcatcaccgacttcagcgtgaccaagaacaagatcatccagctgtgcctggacctgaccaccaccgtgcagaaggactgcttcgtggccgagatggaggacaaggtgctgaccgtggtgaaggtgctgaacggcatctgcgacaagaccatcagaagcaccaccgaccccgtgatgagccagtgcgcctgcctggaggaggtgcacctgcccaacatcaagcccggcgagggcctgggcatgtacatcaagagcacctacgacggcctgcacgtgatcaccggcaccaccgagaacagccccgccgacagaagccagaagatccacgccggcgacgaggtgatccaggtgaaccagcagaccgtggtgggctggcagctgaagaacctggtgaagaagctgagagagaaccccaccggcgtggtgctgctgctgaagaagagacccaccggcagcttcaacttcacccccgcccccctgaagaacctgagatggaagccccccctggtgcagaccagccccccccccgccaccacccagagccccgagagcaccatggacaccagcctgaagaaggagaagagcgccatcctggacctgtacatcccccccccccccgccgtgccctacagccccagagacgagaacggcagcttcgtgtacggcggcagcagcaagtgcaagcagcccctgcccggccccaagggcagcgagagccccaacagcttcctggaccaggagagcagaagaagaagattcaccatcgccgacagcgaccagctgcccggctacagcgtggagaccaacatcctgcccaccaagatgagagagaagacccccagctacggcaagcccagacccctgagcatgcccgccgacggcaactggatgggcatcgtggaccccttcgccagacccagaggccacggcagaaagggcgaggacgccctgtgcagatacttcagcaacgagagaatcccccccatcatcgaggagagcagcagccccccctacagattcagcagacccaccaccgagagacacctggtgagaggcgccgactacatcagaggcagcagatgctacatcaacagcgacctgcacagcagcgccaccatccccttccaggaggagggcaccaagaagaagagcggcagcagcgccaccaagagcagcagcaccgagcccagcctgctggtgagctggttcaccagactgaagctgctgacccactag

SEQ ID NO: 250305 - DNA, 1668 bp, Artificial Sequence
  derived and/or modified sequence
atggagccagtgacaaagtggagccccaaacaagtagtagactggaccagggggctcgatgattgccttcagcagtacgtccacaagttcgaacgagaaaagatcaacggtgaacaactgctgcaaatcagccaccaggaccttgaggagctgggggtgacacgaatcgggcaccaggagttagtgctcgaagccgttgatcttttatgcgccctcaactacggattggaaacagacaacatgaaaaacttggtgcttaaactcagagctagttcgcataatctccaaaattatattagctcgagacgcaaatcaccagcttacgatggaaatacatcccggaaggcgccgaacgaattcctcacttctgttgttgagctgatcggcgcagcaaaggccctgctggcatggcttgacagggcaccttttacgggaataaccgactttagcgtgactaaaaataaaataatccaactgtgtcttgacttaaccacgaccgtgcaaaaagactgcttcgtcgcggagatggaggataaggtccttacagtagttaaagtgctgaacggaatttgcgacaagaccattcgctctaccacagatccagttatgagtcagtgcgcgtgccttgaagaagtccacttgccaaacatcaagccgggcgaaggcttgggaatgtatatcaaatctacatacgacggcctacacgttattactggcacaaccgaaaacagcccggccgaccgctcacaaaagatccatgcaggagatgaggtcatccaagtaaatcagcagaccgtggtgggctggcagcttaagaatctggtaaagaagttgcgggagaatccgacgggcgttgtgctcctcctcaagaagcgccctacaggctcgttcaactttaccccggcaccactcaagaacctgcgatggaaacccccgttggtccagacgagtccccccccagctacaactcagagccccgagtctacaatggatactagtttgaagaaggagaagtcagcaatcctggacttatatatacctcccccaccagctgtgccgtactctccacgcgacgaaaatggctccttcgtgtacgggggatcatctaagtgcaagcagcccctcccaggacctaaagggtcagagtccccaaattcctttctggatcaggagtcaaggagacgccgatttactattgccgactcggaccagcttccaggctattccgtggagaccaatatcttgccaactaaaatgagggagaagacgccatcctacggcaaacccaggcctcttagcatgcccgccgacggaaattggatgggaatcgtggatccattcgccaggccaagagggcacggcagaaagggggaggacgcgctctgtaggtacttctctaatgagagaattcctcccatcatagaagagtcttcctcaccgccctacaggtttagccgaccgacaactgaacgacacctagttcggggcgcggactacatccgcgggagtagatgttacatcaactctgatcttcattccagcgctacaattccatttcaggaggaaggtacgaagaaaaaatccggtagctcagccactaaaagctcctccactgaaccctccttgctggtgagctggttcactaggttaaagctcctgacccactag

SEQ ID NO: 250306 - DNA, 3281 bp, Artificial Sequence
  derived and/or modified sequence
gccagggcggcacgggagggcggcgcaggaggtgggacctgcgccgggaaggctccgggacgccagcgcacgcggagcggggaccccggagagccagcaggcgagaagaccggccgagggagagccgatcgcgcctcgagagatccgaggaagtggtcgcgggccgggaggctcccgtgccgagccgaggccaggggtctggggtcgcagcccggcgtgcctgcagctgccgtcgctcgggagcagcagctgtgcccgggatcccggcggcggcgggggaaggaggagctgcagctggactgtggcagctggagggagagggccgggctcccctggcggagccgcgctgggacgactggctgaccgcggccatgcagtcttgacggagtcgctcgggcgcaggggagcagccgcgggcgcgccctcccgggaaggggcaccggagcgcaggcagcagcactttatctgcgactctccagcccagcgagaggcgaagcggtttaccatggaacccgtgaccaagtggagccccaaacaagtggtggactggactagagggttggatgactgcctgcaacaatatgtccacaagtttgaacgagagaagatcaacggcgagcagctgctgcagatttcccatcaggacctggaggagctgggggtcacacggattggacaccaggagcttgtgttggaggctgtggaccttctctgtgcactgaattatggcctcgaaactgataacatgaagaacttggttctgaaactgagagcatcttcccacaatttacagaattacataagtagccgacggaaaagtcccgcttacgatggcaacacctcccgcaaggcccccaatgagttcctgacctcggtggtggagctcatcggcgccgccaaggccctgctggcgtggctggaccgggctccgtttacagggatcactgatttctcagtcacgaagaacaaaattatccagctttgcttggacctgaccactacagtccagaaggattgctttgtagcggaaatggaggataaagttttaactgtggtcaaggttttaaatggcatctgtgacaaaacaatccgatctaccacagatcctgtgatgagccagtgtgcatgtctggaggaagttcacttaccaaacattaaacctggggaaggcctgggcatgtacatcaaatcaacctatgatgggttacacgtgattactggaaccacagaaaatgtgggatggcagctgaaaaatctggtgaagaaattgagagagaatcccaccggagttgtgttactgcttaagaagcgccccaccgggtctttcaactttactcctgctcccctgaaaaacctacggtggaagccacctcttgtacagacctcacctccacccgcgacaacccagtcccctgaaagcactatggatacctcactgaagaaggagaagtcagccatcctggatctttatattcctcctccgcctgctgttccctactctccccgggatgagaatggcagttttgtttatggagggtccagtaagtgcaaacaaccattgcctggtcctaagggttcagagtccccgaattccttcttggaccaggaaagccggagacgaagattcaccattgcagactcggatcagttgcctgggtactcggtggaaaccaacattctgcccacaaaaatgagagagaaaacaccatcttatggcaagccacggcctttgtccatgcctgctgatgggaactggatggggattgtggacccttttgccagacctcgaggtcatggcaggaaaggggaggatgccctttgccggtatttcagtaacgagcggattcctccgatcattgaagagagctcctctcccccataccggttctccagacccacgaccgagcggcatctggtccggggtgcggactacatccgaggaagcaggtgctacatcaactcagatctccacagcagcgccacgattccattccaggaggaagggaccaaaaagaaatctggctcctcagctacgaagtcctcgtccacagaaccgtccctcctggtcagctggtttacgcgcctcaaactgttgactcactgagagggaccctgctcaggccacctgcctggctcctgccccaagtgccttgcttttacagtggacagcctcttctcgtttcagcctcagtattatgtagggaccttatgcaatttctttttcttttgaaaagttatctactgcccttcttggaagtttgcaggattggatgggaacaaattcagaggatcttaggtgctggcttgtggagacaaaaggagggaaatgggtagagcctgtttgtcttgcttccccagagatagaatgtgaagacacgcgctagaaatcgcagtcctggccagagacgttatggtcattgtgagggactggtggcattgttcctttttgaggggctggggggactcaaattggtggctgttttcacacagatgtgttggtttgtggtccaacttctttatctgaaaaagccagtgagaaaacatttttgatttgatttttctaaactatctaccatattttaagtgtagcagctttgactttgcaataacgtggcaagtatctgatttctcctttgaggcagaggtttaagtgtaggcctgttacacttgtttgatacctttttcatgacagtctcagtatagatcagttggtacagaaatacatgaacacattttgatagggcttatttcacacaaagaagtttatggttatttgtgtggggtggtgttgttatatattattgtctttaagggaaaagaagctataagattcgctgacagccaaagtatcatttagaaaagtgaagcaacaagatttaggttgatgaaagatacatgagtttgcattttgacctgttcagtgtctgtcttccagcacggtgtgtacacttcttcaaaattgtacacagtttgctaattagaaatatcttggaaagcctcatggtcactaattttcaactagcatcaggtattttgaaaacgtgtgtctggatattaactcttgtttaaactgaatgtatgatattttgttagaatggaaaagtactatcttgttaatttaagtattttaaatatagttgtatatttttcttactcttagtcacctgtaattgaaatatttctgttttgcgtcatacacgaagctagtgaaaaagaaagtgcaaggcattttcagatgagcaagtgactatcgtggctgttgccagcagggcagtattgtt

SEQ ID NO: 250307 - DNA, 3268 bp, Artificial Sequence
  derived and/or modified sequence
aactttgcaacccgagcgcgcacgctctgcgctcggccctgccagggcggcacgggagggcggcgcaggaggtgggacctgcgccgggaaggctccgggacgccagcgcacgcggagcggggaccccggagagccagcaggcgagaagaccggccgagggagagccgatcgcgcctcgagagatccgaggaagtggtcgcgggccgggaggctcccgtgccgagccgaggccaggggtctggggtcgcagcccggcgtgcctgcagctgccgtcgctcgggagcagcagctgtgcccgggatcccggcggcggcgggggaaggaggagctgcagctggactgtggcagctggagggagagggccgggctcccctggcggagccgcgctgggacgactggctgaccgcggccatgcagtcttgacggagtcgctcgggcgcaggggagcagccgcgggcgcgccctcccgggaaggggcaccggagcgcaggcagcagcactttatctgcgactctccagcccagcgagaggcgaagcggtttaccatggaacccgtgaccaagtggagccccaaacaagtggtggactggactagagggttggatgactgcctgcaacaatatgtccacaagtttgaacgagagaagatcaacggcgagcagctgctgcagatttcccatcaggacctggaggagctgggggtcacacggattggacaccaggagcttgtgttggaggctgtggaccttctctgtgcactgaattatggcctcgaaactgataacatgaagaacttggttctgaaactgagagcatcttcccacaatttacagaattacataagtagccgacggaaaagtcccgcttacgatggcaacacctcccgcaaggcccccaatgagttcctgacctcggtggtggagctcatcggcgccgccaaggccctgctggcgtggctggaccgggctccgtttacagggatcactgatttctcagtcacgaagaacaaaattatccagctttgcttggacctgaccactacagtccagaaggattgctttgtagcggaaatggaggataaagttttaactgtggtcaaggttttaaatggcatctgtgacaaaacaatccgatctaccacagatcctgtgatgagccagtgtgcatgtctggaggaagttcacttaccaaacattaaacctggggaaggcctgggcatgtacatcaaatcaacctatgatgggttacacgtgattactggaaccacagaaaattctcctgcagacagatctcagaagattcatgctggtgacgaagtcattcaagttaatcagcaaactgtggtgggatggcagctgaaaaatctggtgaagaaattgagagagaatcccaccggagttgtgttactgcttaagaagcgccccaccgggtctttcaactttactcctgctcccctgaaaaacctacggtggaagccacctcttgtacagacctcacctccacccgcgacaacccagtcccctgaaagcactatggatacctcactgaagaaggagaagtcagccatcctggatctttatattcctcctccgcctgctgttccctactctccccgggatgagaatggcagttttgtttatggagggtccagtaagtgcaaacaaccattgcctggtcctaagggttcagagtccccgaattccttcttggaccaggaaagccggagacgaagattcaccattgcagactcggatcagttgcctgggtactcggtggaaaccaacattctgcccacaaaaatgagagagaaaacaccatcttatggcaagccacggcctttgtccatgcctgctgatgggaactggatggggattgtggacccttttgccagacctcgaggtcatggcaggaaaggggaggatgccctttgccggtatttcagtaacgagcggattcctccgatcattgaagagagctcctctcccccataccggttctccagacccacgaccgagcggcatctggtccggggtgcggactacatccgaggaagcaggtgctacatcaactcagatctccacagcagcgccacgattccattccaggaggaagggaccaaaaagaaatctggctcctcagctacgaagtcctcgtccacagaaccgtccctcctggtcagctggtttacgcgcctcaaactgttgactcactgagagggaccctgctcaggccacctgcctggctcctgccccaagtgccttgcttttacagtggacagcctcttctcgtttcagcctcagtattatgtagggaccttatgcaatttctttttcttttgaaaagttatctactgcccttcttggaagtttgcaggattggatgggaacaaattcagaggatcttaggtgctggcttgtggagacaaaaggagggaaatgggtagagcctgtttgtcttgcttccccagagatagaatgtgaagacacgcgctagaaatcgcagtcctggccagagacgttatggtcattgtgagggactggtggcattgttcctttttgaggggctggggggactcaaattggtggctgttttcacacagatgtgttggtttgtggtccaacttctttatctgaaaaagccagtgagaaaacatttttgatttgatttttctaaactatctaccatattttaagtgtagcagctttgactttgcaataacgtggcaagtatctgatttctcctttgaggcagaggtttaagtgtaggcctgttacacttgtttgatacctttttcatgacagtctcagtatagatcagttggtacagaaatacatgaacacattttgatagggcttatttcacacaaagaagtttatggttatttgtgtggggtggtgttgttatatattattgtctttaagggaaaagaagctataagattcgctgacagccaaagtatcatttagaaaagtgaagcaacaagatttaggttgatgaaagatacatgagtttgcattttgacctgttcagtgtctgtcttccagcacggtgtgtacacttcttcaaaattgtacacagtttgctaattagaaatatcttggaaagcctcatggtcactaattttcaactagcatcaggtattttgaaaacgtgtgtctggatattaactcttgtttaaactgaatgtatgatattttgttagaatggaaaagtactatcttgttaatttaagtattttaaatatagttgtatatttttcttactctta

SEQ ID NO: 250308 - DNA, 1668 bp, Artificial Sequence
  derived and/or modified sequence
atggagcctgtgaccaagtggagccccaagcaggtggtggactggacccggggcctggatgactgcctgcagcagtatgtgcacaagtttgagcgggagaagatcaacggggagcagctgctgcagatcagccaccaggacctggaggagctgggcgtgacccgcatcggccaccaggagctggtgctggaggccgtggacctgctgtgtgccctgaactacggcctggagacagacaacatgaagaacctggtgctgaagctgcgggccagcagccacaacctgcagaactacatcagcagcaggaggaagagccctgcctatgatggcaacaccagcaggaaggccccaaatgagttcctgacctctgtggtggagctgattggagctgccaaggccctgctggcctggctggaccgggcccccttcaccggcatcacagacttctctgtgaccaagaacaagatcatccagctgtgcctggacctgaccaccaccgtgcagaaggactgctttgtggccgagatggaggacaaggtgctgactgtggtgaaggtgctgaatggcatctgtgacaagaccatccgcagcaccacagatcctgtgatgagccagtgtgcctgcctggaggaggtgcacctgcccaacatcaagccaggagagggcctgggcatgtacatcaagagcacctatgatggcctgcacgtgatcaccggcaccacagagaacagccctgctgacaggagccagaagatccacgccggagatgaggtgatccaggtgaaccagcagacagtggtgggctggcagctgaagaacctggtgaagaagctgcgggagaaccccactggagtggtgctgctgctgaagaagaggcccaccggcagcttcaacttcaccccagcccccctgaagaacctgcgctggaagccacccctggtgcagaccagccccccaccagccaccacccagagccctgagagcaccatggacaccagcctgaagaaggagaagagcgccatcctggacctgtacatccccccacctcctgctgtgccctacagccccagagatgaaaatggcagctttgtgtatggaggcagcagcaagtgcaagcagcccctgcccggccccaagggcagcgagagccccaacagcttcctggaccaggagagcagaagaagacgcttcaccatcgctgacagcgaccagctgcccggctacagcgtggagaccaacatcctgcccaccaagatgagggagaagacccccagctatggcaagccccggcccctgtccatgccagcagatggcaactggatgggcatcgtggacccctttgcccggccccggggccacggcaggaagggggaggatgccctgtgccgctacttcagcaatgaaagaattcctcccatcatcgaggagagcagcagccccccctaccgcttcagccggcccaccacagagcggcacctggtgagaggagctgactacatccggggcagccgctgctacatcaacagcgacctgcacagcagcgccaccatccccttccaggaggagggcaccaagaagaagagcggcagcagcgccaccaagagcagcagcacagagcccagcctgctggtgtcctggttcacccggctgaagctgctgacccactag

SEQ ID NO: 250309 - DNA, 1668 bp, Artificial Sequence
  derived and/or modified sequence
atggagcccgtgaccaagtggagccccaagcaggtggtggactggactagaggactcgacgactgcctgcagcagtacgtccataaatttgagcgcgaaaaaatcaatggggagcagctgctgcagatttcacaccaagaccttgaggaattaggagtcaccaggatagggcatcaggagctggttctagaagccgtggatctcctttgcgccttaaactatggacttgaaaccgacaacatgaagaatcttgtgcttaaactgagggccagcagtcacaatttgcagaactacatcagcagtcggagaaaaagccccgcatacgacgggaacacatcacgcaaggctccaaatgagtttttaacctctgtggtggagcttatcggcgccgcaaaggctcttctggcctggcttgaccgggccccgttcaccggaattacagactttagcgtgaccaaaaataagattatccagctatgtctagacctcacaactacggtgcagaaagactgtttcgtcgccgagatggaagataaggtgctgaccgttgttaaagtgctgaacggcatctgtgataaaaccatccggagtacgacggacccagtgatgtcccagtgtgcgtgtttggaggaggttcacttgcctaacatcaaaccgggagagggcctgggcatgtacatcaaatcaacttacgatggactgcatgtgatcacaggcaccaccgagaattccccagccgaccgttctcagaaaatccacgctggtgacgaagtgatccaggttaatcaacagaccgtggtgggatggcaattgaagaatttggttaagaaacttcgggaaaacccgaccggagtggtgctgctgctgaaaaaacgccctacaggaagcttcaacttcacgcctgcccccctgaaaaacctgcggtggaagcctccattggtccagacttctcctccccctgctacaacacaatcaccggagagcacaatggacacatctttaaagaaggagaaaagtgccattcttgacctttacattcctccgcctccagccgttccatactctccacgagatgaaaatggttcgttcgtatacggcggctcgtcaaagtgcaaacaacccctccccggaccaaaaggatccgagagccccaactctttcctggaccaggagagccggcgtaggcgttttacaatcgccgatagcgaccagttacccgggtacagtgtggagacaaatatccttccgaccaagatgcgcgagaagacacccagctatggcaagcccaggccgctgagcatgccagcagatggcaattggatgggcatcgtggatccatttgccaggcccaggggacacggcagaaagggagaggatgccttgtgtcgatacttctcaaatgagagaatcccccctattattgaagagtcctcctcccccccctacaggttcagcagacctaccaccgaacggcatcttgtgcggggagccgactatataaggggtagccgctgctacatcaatagtgacttgcattcgtctgccacaatcccattccaggaggagggaacaaaaaaaaaaagcgggtcttctgccaccaagtcttcctcaactgagccaagcctgttggttagttggtttacaaggctgaaactgcttacccactag

SEQ ID NO: 250310 - DNA, 1668 bp, Artificial Sequence
  derived and/or modified sequence
atggaacctgtaacaaaatggtcaccgaaacaggtagtggactggaccagggggctggatgactgcctgcaacagtacgtgcacaaattcgaacgtgaaaagataaatggtgagcagctcttgcagatctcacaccaggacctagaggagctcggagtcactagaatcggccaccaagagctggtcctggaagccgtggacttattgtgtgcccttaactatggccttgagaccgataatatgaagaacctggtgctgaagcttcgcgcttctagccataaccttcagaattatatcagtagcagacggaaatccccagcttacgatggaaataccagtcgaaaggcccctaatgagttcctaacctctgttgttgagctcattggagcagcaaaggcccttcttgcatggttggacagggccccattcacgggaattaccgacttctccgtgaccaaaaataaaattatccagttgtgtttagatctaaccactaccgtacaaaaagattgctttgtggctgaaatggaggacaaagttctcactgtcgtgaaagtactaaacgggatatgtgacaagacaatccgtagcacaactgatcccgtgatgtcgcagtgcgcctgtttggaggaagttcacttacctaacatcaagcccggagaaggtctcggcatgtatatcaagagcacttacgacggcctgcatgtgatcactggcaccaccgagaattcgcctgccgacagaagtcagaagattcacgccggtgacgaggttatccaggtcaaccagcaaacagtcgtgggttggcagctaaagaaccttgttaaaaagctgcgggaaaacccgacgggtgttgtgcttttgttgaaaaaaaggcccaccgggtcttttaacttcacgcctgccccattaaagaacctgaggtggaagccaccactcgttcaaaccagccctccaccagccacgacccagtccccggagtcaacaatggacactagcctgaaaaaagaaaaatctgcaattctcgatctgtacattcccccaccacccgctgttccatactcgcctagagacgagaatgggtcgttcgtttatggaggcagctctaaatgcaagcaacccctgcccggaccaaagggaagtgagagcccaaactcattcctggaccaggaatccaggaggcggagatttactattgccgatagtgaccagcttccaggctactcagttgaaacaaacattttacccacgaaaatgcgtgaaaaaaccccgagctacggtaagccaagacctctcagtatgcccgcagatgggaactggatgggaatcgtggaccccttcgccagaccacgaggacacgggagaaagggcgaggatgccctgtgtagatatttttccaacgaacggatccctccaattattgaagaatccagttcccctccttacagattctccaggcccacaaccgaaagacacctggtccggggtgcagactatatccggggttccaggtgctacatcaattctgacctacatagcagcgcgacaataccttttcaagaagaaggaacaaagaaaaaaagtggctccagcgccactaaatctagcagcactgagccttctctgctggtgagctggttcaccagactcaagctcctgacacactag

SEQ ID NO: 250311 - protein, 520 aa, Artificial Sequence
  derived and/or modified sequence
MFCTRGLLFFAFLAGLDIEFTGLRSNLSGPQQISLFDLPSEWYLKTRQSVQQFTVCQIGLSVFSAIEGEANKYIAHSCNFYLFPTTFGILDSEFSFQASSVQFLNQYGFNYNKFLKNGIPYMNEEQEKKIRHDILTGNWRVRSSPDKDQIKVVIDEVTRWLELAKEGDWMTLPGITGFQAFEVQLVLRQALPNIWTVLKDEGVVVKKVSKQHRWYLQNTSCDRESCWKENILLSARGFSVFFQMLVKAQKPLVGHNMMMDLLHLHEKFFRPLPESYDQFKQNIHSLFPVLIDTKSVTKDIWKEMNFPRVSNLSEVYEVLNSDLNPTKNSGPEIVHASRCEKYVETKCPHEAAYDAFLCGSVLLKVAHLLLQKIYHIDPVPESSFPQYLDVLAPYVNQVNLIRAGVPKINFSGPDYPSIRPPILILSVKRWPGVSEQQVYHKFQNLCKFDVRRLTRSQFLLLTNKFKDARNILKEYRDHPTLCISLYRYWRHSPNVNCLLQVCGIVTAWALLAFILGRSGT

SEQ ID NO: 250312 - DNA, 1563 bp, Artificial Sequence
  derived and/or modified sequence
atgttctgcaccagaggcctgctgttcttcgccttcctggccggcctggacatcgagttcaccggcctgagaagcaacctgagcggcccccagcagatcagcctgttcgacctgcccagcgagtggtacctgaagaccagacagagcgtgcagcagttcaccgtgtgccagatcggcctgagcgtgttcagcgccatcgagggcgaggccaacaagtacatcgcccacagctgcaacttctacctgttccccaccaccttcggcatcctggacagcgagttcagcttccaggccagcagcgtgcagttcctgaaccagtacggcttcaactacaacaagttcctgaagaacggcatcccctacatgaacgaggagcaggagaagaagatcagacacgacatcctgaccggcaactggagagtgagaagcagccccgacaaggaccagatcaaggtggtgatcgacgaggtgaccagatggctggagctggccaaggagggcgactggatgaccctgcccggcatcaccggcttccaggccttcgaggtgcagctggtgctgagacaggccctgcccaacatctggaccgtgctgaaggacgagggcgtggtggtgaagaaggtgagcaagcagcacagatggtacctgcagaacaccagctgcgacagagagagctgctggaaggagaacatcctgctgagcgccagaggcttcagcgtgttcttccagatgctggtgaaggcccagaagcccctggtgggccacaacatgatgatggacctgctgcacctgcacgagaagttcttcagacccctgcccgagagctacgaccagttcaagcagaacatccacagcctgttccccgtgctgatcgacaccaagagcgtgaccaaggacatctggaaggagatgaacttccccagagtgagcaacctgagcgaggtgtacgaggtgctgaacagcgacctgaaccccaccaagaacagcggccccgagatcgtgcacgccagcagatgcgagaagtacgtggagaccaagtgcccccacgaggccgcctacgacgccttcctgtgcggcagcgtgctgctgaaggtggcccacctgctgctgcagaagatctaccacatcgaccccgtgcccgagagcagcttcccccagtacctggacgtgctggccccctacgtgaaccaggtgaacctgatcagagccggcgtgcccaagatcaacttcagcggccccgactaccccagcatcagaccccccatcctgatcctgagcgtgaagagatggcccggcgtgagcgagcagcaggtgtaccacaagttccagaacctgtgcaagttcgacgtgagaagactgaccagaagccagttcctgctgctgaccaacaagttcaaggacgccagaaacatcctgaaggagtacagagaccaccccaccctgtgcatcagcctgtacagatactggagacacagccccaacgtgaactgcctgctgcaggtgtgcggcatcgtgaccgcctgggccctgctggccttcatcctgggcagaagcggcacctag

SEQ ID NO: 250313 - DNA, 1563 bp, Artificial Sequence
  derived and/or modified sequence
atgttttgcacccgcggcctgttgtttttcgctttcctcgcggggctcgacatcgagttcacaggcctgcggtccaacctgtctggaccacagcaaatctctctgttcgacctcccttctgaatggtacttaaaaaccaggcaatctgttcaacagttcaccgtatgccagatcggtctgtcagtatttagcgccattgagggtgaagccaacaaatatatagcacacagttgtaacttttacttattcccaaccactttcggaatcctcgattctgaattttcattccaggctagcagtgtccagtttctgaaccagtatgggttcaactacaataaattcttaaaaaatggtatcccttatatgaatgaggagcaggaaaaaaaaatccgccacgacatcctgaccgggaattggcgcgttagatccagcccagacaaagaccagataaaagttgtcatcgacgaggtcacccggtggttggagctcgcaaaagagggagactggatgaccctcccgggcatcacaggatttcaggctttcgaagtccagctggtgctccggcaggccctacctaacatttggaccgtcctgaaagacgagggagtagtggtgaaaaaagtctccaaacagcatcggtggtacctgcagaatactagttgcgatagggaaagctgctggaaagagaacatcctgttaagcgctcggggcttctctgtgttttttcagatgctggtgaaggctcagaagcctcttgtcggccacaatatgatgatggatttattgcacctccacgagaagtttttccgtcctctgcccgagtcatacgatcagttcaagcagaacattcattccctctttcctgttctcatcgacacgaaaagcgtgactaaggacatttggaaggaaatgaactttccacgcgtgtccaacctctccgaagtctatgaggtactgaatagcgatctgaatcccacaaaaaatagcggcccagagatcgtgcacgcgagtagatgtgaaaagtatgtggaaacaaaatgcccgcatgaggcggcctacgacgctttcttgtgtggtagcgtgctgctcaaggtggcacacctcctcctgcagaagatctatcacattgacccagtgccagaatcttcgtttccgcaatacctcgacgtgcttgccccctacgtcaatcaggtaaatctgatcagggccggcgttcccaagatcaattttagcggaccggattatccctctataagaccccccatactgattctgtccgtcaaacgctggcccggggtcagcgaacagcaagtttatcacaaattccagaatctgtgcaagtttgacgtgcggcgactgactcggagtcagtttctgctactcacaaacaagtttaaggatgcccgaaatatccttaaagagtatagagaccaccccactctctgtataagcctgtacagatactggcggcacagtcccaacgttaattgccttttacaggtctgcggcatagtgactgcatgggccctcctggctttcattctgggacgctcaggcacatag

SEQ ID NO: 250314 - DNA, 1563 bp, Artificial Sequence
  derived and/or modified sequence
atgttctgcacccggggcctgctcttctttgccttcctggccggcctggacatcgagttcaccggcctgcggagcaacctgagcggcccccagcagatcagcctgtttgacctgcccagcgagtggtacctgaagacccggcagagcgtgcagcagttcaccgtgtgccagatcggcctgtctgtgttcagcgccatcgagggggaggccaacaagtacatcgcccacagctgcaacttctacctgttccccaccaccttcggcatcctggacagcgagttctccttccaggccagctctgtgcagttcctgaaccagtatggcttcaactacaacaagttcctgaagaatggcatcccctacatgaatgaggagcaggagaagaagatcagacatgacatcctgaccggcaactggagggtgcgcagcagcccagacaaggaccagatcaaggtggtgattgatgaggtgacccgctggctggagctggccaaggagggggactggatgaccctgcccggcatcaccggcttccaggcctttgaggtgcagctggtgctgcggcaggccctgcccaacatctggacagtgctgaaggatgagggcgtggtggtgaagaaggtgtccaagcagcaccgctggtacctgcagaacaccagctgtgaccgggagagctgctggaaggagaacatcctgctgagcgcccggggcttctctgtgttcttccagatgctggtgaaggcccagaagcccctggtgggccacaacatgatgatggacctgctgcacctgcacgagaagttcttccggcccctgcctgagagctatgaccagttcaagcagaacatccacagcctcttccctgtgctgattgacaccaagtctgtgaccaaggacatctggaaggagatgaacttcccccgggtgagcaacctgtctgaggtgtatgaggtgctgaacagcgacctgaaccccaccaagaacagcggccctgagatcgtgcacgccagccgctgtgagaagtatgtggagaccaagtgcccccatgaagctgcctatgatgccttcctgtgtggctctgtgctgctgaaggtggcccacctgctgctgcagaagatctaccacatcgaccctgtgcctgagagcagcttcccccagtacctggatgtgctggccccctacgtgaaccaggtgaacctgatccgggccggcgtgcccaagatcaacttcagcggccctgactaccccagcatccggccccccatcctgatcctgtctgtgaagcgctggccaggagtgtctgagcagcaggtgtaccacaagttccagaacctgtgcaagtttgatgtgcggcggctgaccaggagccagttcctgctgctgaccaacaagttcaaggatgccaggaacatcctgaaggagtacagagaccaccccaccctgtgcatcagcctgtaccgctactggaggcacagccccaacgtgaactgcctgctgcaggtgtgtggcatcgtgacagcctgggccctgctggccttcatcctgggccgcagcggcacctag

SEQ ID NO: 250315 - DNA, 1563 bp, Artificial Sequence
  derived and/or modified sequence
atgttctgcacccggggcctgctgttcttcgccttcctggccggcttagacatagaatttaccgggctgcgttccaacctgtccggtccccaacagatctccctcttcgatctgccgtctgagtggtacctcaagactagacagagcgtgcagcagttcacagtgtgccaaatcggcctttcagtgtttagtgcaattgaaggggaagccaacaaatatatcgctcacagttgcaatttttacttgtttccaacaacatttggaatactggattccgagttttcctttcaagcctcatccgtgcagttcttgaaccagtacggattcaattacaataaattcttgaagaatggcattccctatatgaacgaagagcaggaaaagaagattaggcatgacatcctgacaggtaattggcgtgtgaggtccagcccagacaaggatcaaataaaggtggtcattgatgaagtgacacgctggctcgagctcgccaaggagggggactggatgactctgccggggatcactggctttcaagcctttgaggtgcaactggttttacggcaggcacttcccaatatctggaccgtgctgaaggacgagggagtggtggtgaaaaaagtcagtaagcagcacagatggtaccttcagaatacctcatgtgatcgcgagagctgctggaaggagaatatcctgctctcggctcgaggattctcagtattctttcagatgcttgtgaaggcccagaagccacttgtggggcataatatgatgatggacctgctacaccttcatgaaaagttcttccggccactacctgaatcctacgaccagtttaaacaaaacattcactctctgttcccggtgctcatcgacacaaaatcggtaaccaaagacatttggaaggagatgaacttccctcgagtgagtaacttatctgaagtctatgaagttctgaattctgacttaaatcccacaaaaaactccggccccgaaatcgtgcacgcctctcgatgtgagaaatatgtcgagacaaaatgcccacatgaagcagcttatgatgcgttcctgtgcggatcagtgctcctcaaggtggcgcatctgctattgcagaagatatatcatatcgacccagtgccagagtcttcttttcctcagtaccttgatgtgctggctccatacgtaaaccaggtgaatcttatacgcgccggtgtgccaaagattaacttttctggccctgactatcctagtatcaggccacccattcttatattgtcggtgaaacgatggccgggagttagcgagcagcaagtgtatcacaaattccaaaacctgtgcaagtttgatgtgagacgtttgactaggagccagttcctgcttctgaccaacaaatttaaggacgctcgcaatatcctcaaagaataccgcgaccatccgaccttgtgcatttccctgtaccggtattggagacacagtcctaacgttaactgcctactgcaggtctgtggaattgtgaccgcatgggctcttctcgcatttatcctcggaaggtctggaacctag

SEQ ID NO: 250316 - DNA, 1563 bp, Artificial Sequence
  derived and/or modified sequence
atgttctgcacacggggactgctgtttttcgcattccttgctggtcttgatatcgaatttacaggcctacggagcaatttgagtggacctcagcagatatccctgttcgatcttccgtctgagtggtacctgaaaaccagacaatctgtgcaacagttcacagtatgtcaaattggcctgtcggtcttctccgcaattgaaggggaagcaaataaatatattgcccacagctgcaacttttacctgttccccacgaccttcggtatacttgatagtgaattctcattccaagcgagtagtgtccagtttctgaatcaatatggcttcaattataataagttcctaaagaatggcataccctacatgaacgaggaacaggagaagaaaatcaggcacgatatattgacgggcaattggcgggtccggagcagtcctgataaggaccagatcaaagtagtgattgacgaagttacgcggtggttggaactggctaaggagggcgattggatgaccctgcccggaatcacaggctttcaggccttcgaagtccaactggtgctgcgacaggccctccccaatatttggactgtgcttaaggatgaaggcgtcgtggtgaagaaggtttcaaaacagcaccggtggtatctccaaaacacatcttgtgatagagagtcttgctggaaggagaacatcttgctctccgcacggggtttttctgtttttttccagatgctggttaaggcccagaaacccctggttgggcataacatgatgatggacctgctgcacttacatgaaaaatttttccggcctttgcccgaatcgtacgatcaatttaagcagaatatccactctctgtttcctgtgttgattgataccaaaagtgtgacaaaagatatttggaaagagatgaactttccgagggtgtctaacctttctgaagtttacgaagtattgaatagtgatctgaaccccactaagaatagcggacccgagatcgtgcatgccagccgatgcgagaaatacgttgagacaaagtgtcctcatgaagcagcatatgacgccttcctctgtggctcagtcttgcttaaagtcgctcatctgctgcttcagaaaatttaccacattgaccctgtgcccgagtcgtccttccctcagtacctggatgtattggccccttacgttaaccaggttaacctgatccgggctggagtccccaaaatcaacttttcaggaccagactatccttcgatccgccctcctatcttgatcctctctgttaagcgatggcctggtgtgagcgagcagcaggtctaccacaaattccaaaacctctgcaaattcgacgtgcggaggctgacgcggtcacagttcctgctgctgacaaacaaattcaaggacgcaaggaacatcctcaaagagtacagggatcaccctacgttgtgcataagcttgtataggtattggcggcattcaccgaatgtcaactgtttgctacaggtatgtggcattgttacggcgtgggcgttgttggccttcattctgggacgtagcgggacctag

SEQ ID NO: 250317 - protein, 354 aa, Artificial Sequence
  derived and/or modified sequence
MGPVSLLPKYQKLNTWNGDLAKMTHLQAGLSPETIEKARLELNENPDVLHQDIQQVRDMIITRPDIGFLRTDDAFILRFLRARKFHQADAFRLLAQYFQYRQLNLDMFKNFKADDPGIKRALIDGFPGVLENRDHYGRKILLLFAANWDQSRNSFTDILRAILLSLEVLIEDPELQINGFILIIDWSNFSFKQASKLTPSILKLAIEGLQDSFPARFGGVHFVNQPWYIHALYTLIKPFLKDKTRKRIFLHGNNLNSLHQLIHPEFLPSEFGGTLPPYDMGTWARTLLGPDYSDENDYTHTSYNAMHVKHTSSNLERECSPKLMKRSQSVVEAGTLKHEEKGENENTQPLLALD

SEQ ID NO: 250318 - DNA, 3486 bp, Artificial Sequence
  derived and/or modified sequence
ctcctaccaaaatcacagccccttgtggagcccgagctctcattcacagctttctagagaaatctgagcccgaacctgccagaataggggatctcacccacccagttcagcagcgaggacacctgcagaaatacattcccaaagcaaggctgggcggccgtgtgaagtaagcaatggcctcagttttgcttctgttttggatgaacaccaccacatagggcctgaatgtgaaagaagaccctctatttgtctgttccggggcagcctggtagtaaaacactgttgaatgggccacagtttcagcagaccatcaggtgaatgggaccagtctctcttcttccaaaatatcagaagttaaacacttggaacggagatttggccaagatgacccatttacaggctggactcagtccagagactatagagaaagctcgcctggaactgaatgaaaaccccgatgttttacatcaggatattcagcaagtcagggacatgatcatcaccaggcctgacattggatttttacgtacagatgatgccttcatcctgagatttctccgagccaggaagtttcaccaagcggatgcctttagactcctggctcagtatttccagtaccgccagctaaacctggacatgttcaaaaacttcaaggcagatgatcccggcattaagagggctctgatcgatgggttccccggggtgctggaaaaccgagaccattacggcaggaagattcttttgctgtttgcagccaattgggatcagagtaggaactccttcacagacatccttcgtgccatcctgctgtcattggaagtcctaatcgaagatccggagcttcagataaatggcttcattttaattatagactggagtaatttttccttcaaacaagcctccaaactgacaccttcaatccttaaactggccattgaagggttgcaggacagctttcctgcccgctttggaggagtccactttgtcaaccagccctggtacattcatgccctctacacactcatcaagccatttcttaaagacaagaccaggaaacggattttcctgcatggaaacaatttaaacagccttcaccagctaatacaccctgaatttttgccctctgaatttggaggaactcttcctccttatgacatgggaacttgggcccggacgttactcggtcccgactacagcgatgaaaatgactatactcacacatcctataatgcaatgcacgtgaagcatacgtcctcgaatctggagagagaatgctcacccaagctgatgaaaagatctcagtctgtggtagaagctgggaccctgaaacatgaggagaagggagagaatgagaacacccagccactcctggctctggactgaaccctgagtcaccccaatgctcctgcacactggccttcagtggtatcagccacccaggaagcacatgcacaactgacccatgcagacacgtgtgttctgcttgacacaaggtcctccactcctgaacccctgcagtgactgtcaccagccatcggtctgagcagccaaagttggacaaagacttgagagatgctttttttttcccccagtgaggggactggaggatgatgcaaggcatttatgtaaaaaagattctccctcctttcatatttattgtagtaaattgaaaaaataaagactaaatttgatggacacactgcattaggacaagaatttttctgaggtatcacacagggaccctctccagtttttgaaaattaagtgcatttccaagtaaatgtatcagagttaaactgtacagacaccactgtcaagtttcatgtagtacaaagccctgagacaatagtatctccagtaatttccattcttactgaattatttcctttgacctcatcaccagcatcgaattgttcagcctaagagcatgttctcataggtctgggtatttgcaaagtttgcttattttgatgatatcctgcaaaaaattattttgatgtcacatctcttgtcaggtcactagctgactgtcatgagctgacgttaaaggaagacacatggacgtgaaatacgattatttcatctgagcaatgtgagttaccacaggcagctcaaaagcccattagtgcagcatgtgtctgcagaggagatgtctcatgaaaatcacatgtcagtgattaatgaatccattccagttgcctcaactgggtcactacagcaaagaaaagtgctatcaaaccatttacccttgcccccacaaccctcctgcaaccattaaagatgtggagaaagaccatggttgttgctgagagggtaaatattcaatcatggagcatgacccatatggatggctaaatatgcaagtactgaagtaagagaagactagaaatgcaggatgaaatgtcaaaggtcattttatttacctagtctccttagaaatggagtccccaactactcattcaaaagaaatcagacataaaataaacagacatcatatatgatatccttacttgtgccatgttttccaagaccagtgcatatttttagacatctcttattcgcccagccatctgcatgacatgggtatttattagtattaccagttggtgctcaaagtcaaacaaaaatattttagttaataatgggcagtaaaatatgattttacattattttaaatatttgggagagttaatttgttagctaaataattcaagggaaagagattattcaactggtcataatcacccctgataatattattactaatcttaattatttattacatcatctctttctcaatggatctaatgttttaattttttcccctattggtagagaacaataacagaagtaatttttatattatacacttggagaaataaagttgaaacagaattaaaaatatttctcaaacaactgtatcacaatataaattaaactaattcatttttgtgtagacatacgaaatcacaaaaataataacactgaaataattctaccaatgcagtgatggaaacacttttcttatgtaccaagacatagataggtaagagaaataaagaattgaagtgaattagaaaatccattttattgcttgggtttaaaatagttgtgggatacaagtatttacaatgctattggagtcaattattgacaacactttgcaacagtaataccatttctagcttttcaattggcaatacttagaaccttactgtagtgacctgattttaaataccatattatatttactaagttaagagctagtttttactctcttccataatttcattacatgaatgtaagatgatggctcaaaaatgacgacttatagtttgaatttatgtgtatgcaatatacatatgagaaccaaattcaacaagtgacatgaatgttactacatgaacattgaattgtattgcccttgtcagttatttcctctgttcaataaatactgaaggtcacaaacacctttttacttttcaa

SEQ ID NO: 250319 - DNA, 3622 bp, Artificial Sequence
  derived and/or modified sequence
gaatcgggcgcacacgcctcctaccaaaatcacagccccttgtggagcccgagctctcattcacagctttctagagaaatctgagcccgaacctgccagaataggggatctcacccacccagttcagcagcgaggacacctgcagaaatacattcccaaagcaaggctgggcggccgtgtgaaggcagttttcttagctgtgattcccactgctgccattgtctgtgcaatcacatccagaagaagggtcacggttacatggatctgctgggaaaacaattagtggaaaagggggcaaatagagttaatggccgtttttggtaagcaatggcctcagttttgcttctgttttggatgaacaccaccacatagggcctgaatgtgaaagaagaccctctatttgtctgttccggggcagcctggtagtaaaacactgttgaatgggccacagtttcagcagaccatcaggtgaatgggaccagtctctcttcttccaaaatatcagaagttaaacacttggaacggagatttggccaagatgacccatttacaggctggactcagtccagagactatagagaaagctcgcctggaactgaatgaaaaccccgatgttttacatcaggatattcagcaagtcagggacatgatcatcaccaggcctgacattggatttttacgtacagatgatgccttcatcctgagatttctccgagccaggaagtttcaccaagcggatgcctttagactcctggctcagtatttccagtaccgccagctaaacctggacatgttcaaaaacttcaaggcagatgatcccggcattaagagggctctgatcgatgggttccccggggtgctggaaaaccgagaccattacggcaggaagattcttttgctgtttgcagccaattgggatcagagtaggaactccttcacagacatccttcgtgccatcctgctgtcattggaagtcctaatcgaagatccggagcttcagataaatggcttcattttaattatagactggagtaatttttccttcaaacaagcctccaaactgacaccttcaatccttaaactggccattgaagggttgcaggacagctttcctgcccgctttggaggagtccactttgtcaaccagccctggtacattcatgccctctacacactcatcaagccatttcttaaagacaagaccaggaaacggattttcctgcatggaaacaatttaaacagccttcaccagctaatacaccctgaatttttgccctctgaatttggaggaactcttcctccttatgacatgggaacttgggcccggacgttactcggtcccgactacagcgatgaaaatgactatactcacacatcctataatgcaatgcacgtgaagcatacgtcctcgaatctggagagagaatgctcacccaagctgatgaaaagatctcagtctgtggtagaagctgggaccctgaaacatgaggagaagggagagaatgagaacacccagccactcctggctctggactgaaccctgagtcaccccaatgctcctgcacactggccttcagtggtatcagccacccaggaagcacatgcacaactgacccatgcagacacgtgtgttctgcttgacacaaggtcctccactcctgaacccctgcagtgactgtcaccagccatcggtctgagcagccaaagttggacaaagacttgagagatgctttttttttcccccagtgaggggactggaggatgatgcaaggcatttatgtaaaaaagattctccctcctttcatatttattgtagtaaattgaaaaaataaagactaaatttgatggacacactgcattaggacaagaatttttctgaggtatcacacagggaccctctccagtttttgaaaattaagtgcatttccaagtaaatgtatcagagttaaactgtacagacaccactgtcaagtttcatgtagtacaaagccctgagacaatagtatctccagtaatttccattcttactgaattatttcctttgacctcatcaccagcatcgaattgttcagcctaagagcatgttctcataggtctgggtatttgcaaagtttgcttattttgatgatatcctgcaaaaaattattttgatgtcacatctcttgtcaggtcactagctgactgtcatgagctgacgttaaaggaagacacatggacgtgaaatacgattatttcatctgagcaatgtgagttaccacaggcagctcaaaagcccattagtgcagcatgtgtctgcagaggagatgtctcatgaaaatcacatgtcagtgattaatgaatccattccagttgcctcaactgggtcactacagcaaagaaaagtgctatcaaaccatttacccttgcccccacaaccctcctgcaaccattaaagatgtggagaaagaccatggttgttgctgagagggtaaatattcaatcatggagcatgacccatatggatggctaaatatgcaagtactgaagtaagagaagactagaaatgcaggatgaaatgtcaaaggtcattttatttacctagtctccttagaaatggagtccccaactactcattcaaaagaaatcagacataaaataaacagacatcatatatgatatccttacttgtgccatgttttccaagaccagtgcatatttttagacatctcttattcgcccagccatctgcatgacatgggtatttattagtattaccagttggtgctcaaagtcaaacaaaaatattttagttaataatgggcagtaaaatatgattttacattattttaaatatttgggagagttaatttgttagctaaataattcaagggaaagagattattcaactggtcataatcacccctgataatattattactaatcttaattatttattacatcatctctttctcaatggatctaatgttttaattttttcccctattggtagagaacaataacagaagtaatttttatattatacacttggagaaataaagttgaaacagaattaaaaatatttctcaaacaactgtatcacaatataaattaaactaattcatttttgtgtagacatacgaaatcacaaaaataataacactgaaataattctaccaatgcagtgatggaaacacttttcttatgtaccaagacatagataggtaagagaaataaagaattgaagtgaattagaaaatccattttattgcttgggtttaaaatagttgtgggatacaagtatttacaatgctattggagtcaattattgacaacactttgcaacagtaataccatttctagcttttcaattggcaatacttagaaccttactgtagtgacctgattttaaataccatattatatttactaagttaagagctagtttttactctcttccataatttcattacatgaatgtaagatgatggctcaaaaatgacgacttatagtttgaatttatgtgtatgcaatatacatatgagaaccaaattcaacaagtgacatgaatgttactacatgaacattgaattgtattgcccttgtcagttatttcctctgttcaataaatactgaaggtcacaaa

SEQ ID NO: 250320 - DNA, 552 bp, Artificial Sequence
  derived and/or modified sequence
gctagttctgctccaagaacccaagaggtaaggccttcagtcaagaggacagcccacgtctcattgttccagtggcctaatcaagggaatggaagatgaggagaatgaaggctctgggaatttattttcatcgtggaccggactttttatcagccaggaaaaagtaagcaatggcctcagttttgcttctgttttggatgaacaccaccacatagggcctgaatgtgaaagaagaccctctatttgtctgttccggggcagcctggtagtaaaacactgttgaatgggccacagtttcagcagaccatcaggtgaatgggaccagtctctcttcttccaaaatatcagaagttaaacacttggaacggagatttggccaagatgacccatttacaggctggactcagtccagagactatagagaaagctcgcctggaactgaatgaaaaccccgatgttttacatcaggatattcagcaagtcagggacatgatcatcaccaggcctgacattggatttttacgtacagatgatgccttcatcctgagattt

SEQ ID NO: 250321 - DNA, 1065 bp, Artificial Sequence
  derived and/or modified sequence
atgggccccgtgagcctgctgcccaagtaccagaagctgaacacctggaacggcgacctggccaagatgacccacctgcaggccggcctgagccccgagaccatcgagaaggccagactggagctgaacgagaaccccgacgtgctgcaccaggacatccagcaggtgagagacatgatcatcaccagacccgacatcggcttcctgagaaccgacgacgccttcatcctgagattcctgagagccagaaagttccaccaggccgacgccttcagactgctggcccagtacttccagtacagacagctgaacctggacatgttcaagaacttcaaggccgacgaccccggcatcaagagagccctgatcgacggcttccccggcgtgctggagaacagagaccactacggcagaaagatcctgctgctgttcgccgccaactgggaccagagcagaaacagcttcaccgacatcctgagagccatcctgctgagcctggaggtgctgatcgaggaccccgagctgcagatcaacggcttcatcctgatcatcgactggagcaacttcagcttcaagcaggccagcaagctgacccccagcatcctgaagctggccatcgagggcctgcaggacagcttccccgccagattcggcggcgtgcacttcgtgaaccagccctggtacatccacgccctgtacaccctgatcaagcccttcctgaaggacaagaccagaaagagaatcttcctgcacggcaacaacctgaacagcctgcaccagctgatccaccccgagttcctgcccagcgagttcggcggcaccctgcccccctacgacatgggcacctgggccagaaccctgctgggccccgactacagcgacgagaacgactacacccacaccagctacaacgccatgcacgtgaagcacaccagcagcaacctggagagagagtgcagccccaagctgatgaagagaagccagagcgtggtggaggccggcaccctgaagcacgaggagaagggcgagaacgagaacacccagcccctgctggccctggactag

SEQ ID NO: 250322 - DNA, 240 bp, Artificial Sequence
  derived and/or modified sequence
atgggccccgtgagcctgctgcccaagtaccagaagctgaacacctggaacggcgacctggccaagatgacccacctgcaggccggcctgagccccgagaccatcgagaaggccagactggagctgaacgagaaccccgacgtgctgcaccaggacatccagcaggtgagagacatgatcatcaccagacccgacatcggcttcctgagaaccgacgacgccttcatcctgagattctag

SEQ ID NO: 250323 - DNA, 1065 bp, Artificial Sequence
  derived and/or modified sequence
atggggcctgtgtccctcctgcccaagtatcaaaagctgaacacttggaacggagaccttgccaaaatgacacacctgcaggccggactctccccggaaaccattgagaaagcaaggcttgaactgaatgagaaccctgacgtcctccaccaagacatccagcaggtccgagacatgattatcactcgccctgacattggttttctgaggacggatgacgccttcatactaagatttctcagggcaagaaaattccaccaagcagacgcttttcggctcctggcccaatattttcagtaccgccagctcaatctcgacatgtttaaaaatttcaaggctgacgatccaggcattaaaagagccctgatcgacggattccctggagtgctggaaaacagagaccactacgggcggaagattctcctgctgtttgccgccaactgggatcagtccaggaactcctttaccgacattctaagagcaattctgttgtcattggaggtgctcattgaggatcccgagctgcagatcaatggctttatactcatcatcgactggtctaattttagtttcaagcaggcctccaagttaaccccgagcattcttaagttggctatcgagggcctgcaggatagcttcccggctcgcttcgggggggtacattttgtgaaccagccctggtatatccacgccctgtataccttaatcaaacccttcttaaaggacaagacacggaagagaatcttcttgcacggcaacaatctcaactccctgcatcagctcatacatccagagtttttgcctagcgagttcggaggtacactacccccttacgatatgggaacttgggcgaggacactgctcgggcctgattactcggacgagaatgactatactcacaccagctacaatgctatgcacgtcaaacacaccagttcaaatctggagcgagagtgttctccaaaattgatgaagcggtcccagtccgtcgtggaagcaggaaccctgaagcacgaggaaaaaggcgagaacgagaacacacagcctctgctcgctctggactag

SEQ ID NO: 250324 - DNA, 1065 bp, Artificial Sequence
  derived and/or modified sequence
atgggtccagtttctctgctgcctaagtaccagaagctgaatacatggaacggggatctagccaaaatgacccaccttcaggcagggttgtcccctgagactattgaaaaggcgcgcttagagctcaatgaaaatcccgatgtcttacatcaagacattcagcaggtccgagatatgataatcacacggcctgatatcggatttcttaggaccgacgatgcctttatcctcaggtttctgcgcgccaggaagttccaccaggccgacgccttccggctgctcgcccagtacttccagtatcggcagttaaacctggatatgtttaagaatttcaaggctgatgaccctggcatcaaacgagctttgatcgatggcttccccggcgtactagaaaacagagaccactacggcagaaagatcttgctgctattcgccgccaactgggaccagtctcgtaactctttcacggacattctgagggcaatcctgctgagcctggaagtgctgattgaggatccagagctgcaaatcaacggcttcatactgattatcgactggtccaacttcagctttaaacaagcgtccaagttgacaccatctatcctgaaacttgcaatcgaggggttacaagattcatttccggctagattcggaggtgttcactttgtcaaccagccctggtatatccacgcgctttacaccctgatcaagccttttctgaaagataaaactaggaaacgaatttttctccacggcaataatctgaatagcctgcaccaactcattcatcctgagttcctcccgtccgaatttgggggcaccctcccgccatacgatatgggtacgtgggctcgaaccctgctcgggcccgactattctgatgagaatgactacacacatacctcgtataatgcgatgcatgtgaagcatacctcttccaatctggaacgcgaatgctccccaaaactgatgaagagatcacagagcgtggtggaggctgggacactcaaacacgaagagaaaggggaaaatgaaaacacccaaccccttctggctttggactag

SEQ ID NO: 250325 - DNA, 240 bp, Artificial Sequence
  derived and/or modified sequence
atgggtcccgtgagcctacttccgaaataccagaaacttaacacttggaatggagacctggctaaaatgacccacctccaagccggcctgtctccagagactatcgagaaggcacgattagaactgaacgagaatccagatgtgctgcatcaggatatccaacaggttagggatatgataattactcgtccagacatcggcttccttcgcaccgacgacgcatttatactaagattttag

SEQ ID NO: 250326 - DNA, 1065 bp, Artificial Sequence
  derived and/or modified sequence
atgggccctgtgtccctgctgcccaagtaccagaagctgaacacctggaatggagacctggccaagatgacccacctgcaggccggcctgagccctgagaccatcgagaaggcccggctggagctgaatgaaaatccagatgtgctgcaccaggacatccagcaggtgcgggacatgatcatcaccaggccagacatcggcttcctgaggacagatgatgccttcatcctgcgcttcctgcgggccaggaagttccaccaggctgatgccttccggctgctggcccagtacttccagtaccggcagctgaacctggacatgttcaagaacttcaaggcagatgaccccggcatcaagagggccctgattgatggcttccctggggtgctggagaacagagaccactacggcaggaagatcctgctgctgtttgctgccaactgggaccagagcaggaacagcttcacagacatcctgcgggccatcctgctgagcctggaggtgctgattgaagatcctgagctgcagatcaatggcttcatcctgatcatcgactggagcaacttctccttcaagcaggccagcaagctgacccccagcatcctgaagctggccatcgagggcctgcaggacagcttccctgccaggtttggaggagtgcactttgtgaaccagccctggtacatccacgccctgtacaccctcatcaagcccttcctgaaggacaagaccaggaagaggatcttcctgcacggcaacaacctgaacagcctgcaccagctgatccaccctgagttcctgcccagcgagtttggaggcaccctgcccccctatgacatgggcacctgggcccggaccctgctgggccctgactacagtgatgaaaatgactacacccacaccagctacaatgccatgcacgtgaagcacaccagcagcaacctggagcgggagtgcagccccaagctgatgaagaggagccagagcgtggtggaggccggcaccctgaagcatgaggagaagggagaaaatgaaaacacccagcccctgctggccctggactag

SEQ ID NO: 250327 - DNA, 240 bp, Artificial Sequence
  derived and/or modified sequence
atgggccctgtgtccctgctgcccaagtaccagaagctgaacacctggaatggagacctggccaagatgacccacctgcaggccggcctgagccctgagaccatcgagaaggcccggctggagctgaatgaaaatccagatgtgctgcaccaggacatccagcaggtgcgggacatgatcatcaccaggccagacatcggcttcctgaggacagatgatgccttcatcctgcgcttctag

SEQ ID NO: 250328 - DNA, 1065 bp, Artificial Sequence
  derived and/or modified sequence
atgggccccgtgagcctgctgcccaagtaccagaagctgaacacctggaacggagatctcgctaagatgactcaccttcaggctggactcagcccagagactatcgagaaagcacgtctcgagttgaatgaaaaccccgatgtcttgcaccaagatatccagcaggtgcgcgatatgattattacaagacctgacataggttttttgcggactgatgacgccttcatcctacgctttctgcgagcaaggaagttccatcaggcggatgcctttcggctgctggcccagtacttccagtaccggcagctgaatctggacatgttcaaaaactttaaggcagacgaccccgggattaagagagccctgatcgatgggttccctggtgttttggagaacagggaccactacggaagaaagatcctcctcctcttcgctgctaattgggaccagagccgaaattccttcactgatatcctaagggcaattctgctgtctttagaagtgctcatcgaagatccagagctgcaaataaacgggtttatactgatcattgactggagcaacttcagctttaaacaagcgtcaaagctgacaccgagcatcctcaagctcgcaatagaagggcttcaggactctttcccagccagatttggaggggtgcattttgtgaaccagccttggtacattcacgccttatatacactcattaaaccttttctgaaagacaagacaagaaagaggattttcctccacggaaacaatctgaactctcttcaccagctgatccacccggaattcttacccagcgagttcgggggcacgctgcccccttatgacatgggaacatgggcacgcacactgcttggaccagactattccgacgaaaatgactacacccacacttcctacaatgccatgcacgtcaagcatacatcttcgaaccttgagcgagagtgctcaccaaaactcatgaagaggtctcagtctgtagtggaggctgggacgctaaagcacgaggaaaagggggaaaatgaaaacacccagcccctgctggctttggactag

SEQ ID NO: 250329 - DNA, 1065 bp, Artificial Sequence
  derived and/or modified sequence
atgggccccgtgagcctgctgcccaagtaccagaagctgaacacctggaatggtgaccttgccaagatgactcatctccaagcggggctgtctcctgaaaccattgaaaaggctcgcttggagcttaatgaaaaccctgacgtccttcaccaggacatccaacaggttcgagatatgatcattactcggcctgatatcggttttctgcggactgacgacgcatttatcttgagatttctacgtgcccggaaatttcaccaagccgacgcctttaggctgttggcacagtacttccaatacaggcagttgaatctcgatatgttcaaaaactttaaggctgatgaccccggaataaagcgagccctgatagacgggttcccaggcgttttagaaaatcgagaccactacggacgcaagattctccttctcttcgccgctaattgggaccagagcagaaacagctttactgatatattgcgggctattttactgagccttgaggtcctgatcgaggatccggaactccagataaacggattcatcctcattatcgattggtccaatttcagtttcaaacaggcttctaagctcacgccatccatcttgaagctggcaattgagggcttgcaggactcctttcccgctcggtttggtggcgtgcactttgtcaaccaaccgtggtacattcacgccctttacacactaatcaaaccatttttgaaggacaagacccgcaaaaggatctttcttcacggtaataacctgaattctttgcatcagctcattcatccggaatttcttccaagtgagtttgggggcactctgcctccctacgacatgggtacttgggcacgaactctattgggccccgattacagcgacgaaaatgactacacacacacaagctacaacgccatgcatgtgaaacacaccagttctaacctggaaagagagtgctccccaaaattaatgaaaaggtctcagtccgtggtggaagcaggaactctgaaacacgaggagaagggtgaaaatgagaacacacagcctctattggccctggactag

SEQ ID NO: 250330 - DNA, 240 bp, Artificial Sequence
  derived and/or modified sequence
atgggccccgtgagcctgctgcccaagtaccagaagctgaacacctggaatggtgacctggcgaagatgacccaccttcaggcaggcctgtctccggagacgatcgagaaggcacgcctggagctgaacgaaaatcctgacgtgttgcatcaggatatccagcaggtgagagacatgattatcacaaggcccgacattggctttctgcgcacagatgatgctttcatcttgcggttctag

SEQ ID NO: 250331 - DNA, 1065 bp, Artificial Sequence
  derived and/or modified sequence
atggggccagttagccttctgccgaaataccaaaagttgaacacctggaacggagacctggctaaaatgacacacctacaggctggcctgtcacccgagactatcgagaaggctcgtcttgagctgaacgaaaatcccgatgtcctgcaccaggacatccagcaggtacgagatatgataataacccggccagatatcggctttctgagaaccgacgatgctttcatcctgcgtttcttgcgagccaggaagttccaccaagctgatgcgtttcgcctgctggcccagtatttccagtaccgacagctgaatctggacatgttcaaaaactttaaggctgatgatcctggcatcaaaagagccttgatcgacggatttccgggagtcttggaaaatcgggatcactacggaagaaagatcctactgctgttcgccgctaattgggatcaatcccgaaactcctttacagacatcctacgcgcaattctgctttctcttgaggtgcttatcgaggatcctgagttgcagatcaatggtttcatcctcattatcgattggtccaattttagctttaaacaggcatccaaacttacaccttcaatcttgaaactggccatcgagggcctgcaagactcattccctgcaagatttgggggagttcatttcgtgaaccaaccatggtatatacacgctctctatacgctaatcaaacccttcctcaaggacaaaacacgcaagcggatcttcctccacggaaataatcttaactcattacaccagctgatccacccagaatttttgccatcagaattcggcggaaccctgcctccgtatgatatgggaacatgggcccgtacactgctgggcccagattattctgatgaaaatgattacacccataccagctacaatgcgatgcacgtaaaacacacttctagtaacttggagcgcgaatgtagccccaagctcatgaaaaggtcacagtctgtggtggaagccggaacgctgaaacatgaagagaaaggcgagaacgagaatacacagcccctgctggcactggattag

SEQ ID NO: 250332 - DNA, 1065 bp, Artificial Sequence
  derived and/or modified sequence
atggggcctgttagccttctgcctaaatatcagaagctcaacacatggaacggggacctggcaaagatgacccacttacaggcgggtctttcccctgagactattgagaaagcacgcctagaattaaacgaaaaccctgacgtgctgcaccaggacattcagcaggtccgtgacatgatcataacacgccctgacattggatttttgagaaccgacgacgctttcatcctacggttcctgagggccaggaagttccaccaggccgacgcctttcgcctgctggcccagtacttccagtaccggcagctgaacctcgacatgtttaaaaactttaaggccgacgaccctggcattaagcgcgctctgattgatggattccctggcgttcttgaaaatagggaccactacggtaggaagattcttctactttttgcagccaattgggaccagtctcgcaacagctttaccgatattttgcgtgcaatcctactctcactggaagtattgattgaagatcccgagttgcagattaatgggttcatcttgataatcgactggtctaacttttcttttaagcaggcgtcaaagcttaccccatcaattcttaagctcgcaattgaaggcctgcaggactcattcccggctcgatttggcggagtgcacttcgtgaaccaaccatggtacattcacgccctgtatacattaatcaaaccctttctcaaagataagactagaaaacggatatttttgcacggcaacaatctgaactccctgcatcaactgattcatcctgagtttctgccctctgagtttggtgggaccctaccgccttatgacatgggcacatgggcccgaacactgttagggcctgactactcagacgaaaacgattatacacatacctcatataatgccatgcacgtcaagcacacgagctccaacctggagcgcgaatgttcacccaaactgatgaagaggagccaatccgtggtcgaggccggtacactgaaacatgaggagaaaggtgagaacgaaaacactcagccattgctagctttagactag

SEQ ID NO: 250333 - DNA, 240 bp, Artificial Sequence
  derived and/or modified sequence
atgggaccagtctcactcctacctaagtatcaaaagctaaatacctggaacggagacctggctaaaatgacgcatctgcaagccggactctctcctgaaacaatagaaaaggcgagattggagcttaacgagaaccccgatgtgcttcaccaggacattcagcaggtgcgggatatgataattacccgtcctgacattggcttccttcgaaccgatgatgctttcatcctgaggttctag

SEQ ID NO: 250334 - protein, 407 aa, Artificial Sequence
  derived and/or modified sequence
MPRGHKSKLRTCEKRQETNGQPQGLTGPQATAEKQEESHSSSSSSRACLGDCRRSSDASIPQESQGVSPTGSPDAVVSYSKSDVAANGQDEKSPSTSRDASVPQESQGASPTGSPDAGVSGSKYDVAANGQDEKSPSTSHDVSVPQESQGASPTGSPDAGVSGSKYDVAAEGEDEESVSASQKAIIFKRLSKDAVKKKACTLAQFLQKKFEKKESILKADMLKCVRREYKPYFPQILNRTSQHLVVAFGVELKEMDSSGESYTLVSKLGLPSEGILSGDNALPKSGLLMSLLVVIFMNGNCATEEEVWEFLGLLGIYDGILHSIYGDARKIITEDLVQDKYVVYRQVCNSDPPCYEFLWGPRAYAETTKMRVLRVLADSSNTSPGLYPHLYEDALIDEVERALRLRA

SEQ ID NO: 250335 - DNA, 1224 bp, Artificial Sequence
  derived and/or modified sequence
atgccacgaggccacaagagcaaattaaggacttgcgaaaagagacaggaaaccaacgggcaaccgcagggactgactggaccccaggccacagctgagaaacaagaggagtctcacagttccagctcctcttcacgtgcttgtctgggagattgtcggaggagtagtgacgcctcaattccacaagagagccagggcgtcagccctactgggtcacctgacgcagtggtatcttattctaaatcagacgtagccgcaaatggccaggacgaaaaatcacccagtacaagtcgtgatgctagtgtcccgcaggagagtcagggcgcttctccaaccggcagccctgacgccggtgtttctggaagcaagtacgatgtggcagctaacggccaggacgaaaaatcaccttcaacatcacacgatgtaagcgtgccgcaggagtcccagggggcatcacctaccggcagccccgatgctggggtatcgggaagtaaatatgatgttgctgcggagggagaggacgaggagtccgttagtgctagtcagaaggccattatcttcaagcgcctgagcaaggatgcagtgaaaaagaaggcatgcacactcgcccagttcctgcagaagaaattcgaaaaaaaagaatcaatccttaaggctgacatgctcaaatgtgttcgtcgcgaatataagccctattttccgcagatcctgaaccggacctcacagcacttagtggtagccttcggggtggaattaaaggagatggatagttcaggggaaagttacactcttgtctcaaaactgggcctgccctctgagggcattctgtccggagacaacgctcttcccaaatctggcttgctcatgagcctgctcgtggtcatttttatgaatggcaactgcgctaccgaagaggaggtctgggaattcctgggcctgctgggcatctatgatgggattctgcactctatttacggtgacgcccggaagatcattaccgaagatctggtgcaggacaagtacgtggtataccggcaggtctgcaactcagaccccccttgctacgagtttctgtggggtccacgcgcctatgctgaaaccacgaagatgcgagttttgcgcgtgctggccgattcctccaacacgtctccaggactatatccacatctttacgaagatgccttgattgacgaagtcgagagggcactcaggttgagggcctag

SEQ ID NO: 250336 - DNA, 1224 bp, Artificial Sequence
  derived and/or modified sequence
atgccccggggccacaagagcaagctgcggacctgtgagaagaggcaggagaccaacggccagccccagggcctgaccggcccccaggccacagctgagaagcaggaggagagccacagcagcagcagcagcagccgggcctgcctgggggactgcagaagaagcagtgatgccagcatcccccaggagagccagggcgtgagccccaccggcagcccagatgctgtggtgtcctacagcaagagtgatgtggccgccaacggccaggatgagaagagccccagcaccagcagagatgcctctgtgccccaggagagccagggcgccagccccaccggcagcccagatgctggggtgtctggcagcaaatatgatgtggccgccaacggccaggatgagaagagccccagcaccagccatgatgtgtctgtgccccaggagagccagggcgccagccccaccggcagcccagatgctggggtgtctggcagcaaatatgatgtggccgcagaaggagaagatgaggagagcgtgtctgccagccagaaggccatcatcttcaagaggctgagcaaggatgctgtgaagaagaaggcctgcaccctggcccagttcctgcagaagaagtttgagaagaaggagagcatcctgaaggctgacatgctgaagtgtgtgcggcgggagtacaagccctacttcccccagatcctgaacagaaccagccagcacctggtggtggccttcggcgtggagctgaaggagatggacagcagcggggagagctacaccctggtgtccaagctgggcctgcccagcgagggcatcctgagcggggacaatgccctgcccaagagcggcctgctgatgagcctgctggtggtgatcttcatgaatggaaactgtgccacagaggaggaggtgtgggagttcctgggcctgctgggcatctatgatggcatcctgcacagcatctatggagatgccaggaagatcatcacagaggacctggtgcaggacaagtatgtggtgtaccggcaggtgtgcaacagcgaccccccctgctatgagttcctgtggggcccccgggcctatgcagagaccaccaagatgagggtgctgcgggtgctggccgacagcagcaacaccagccctggcctgtacccccacctgtatgaagatgccctgattgatgaggtggagcgggccctgcggctgcgggcctag

SEQ ID NO: 250337 - DNA, 1949 bp, Artificial Sequence
  derived and/or modified sequence
aataaaggggtctgagccggtcgcctgagcctgaaaagtgctgtcacgtcagcggaaggaggcgtcccagatcttctcagctgtcttggtgccagccttcctagtcttcctacccacactcctacctgctgtcacaggccacagccatcatgcctcggggtcacaagagtaagctccgtacctgtgagaaacgccaagagaccaatggtcagccacagggtctcacgggtccccaggccactgcagagaagcaggaagagtcccactcttcctcatcctcttctcgcgcttgtctgggtgattgtcgtaggtcttctgatgcctccattcctcaggagtctcagggagtgtcacccactgggtctcctgatgcagttgtttcatattcaaaatccgatgtggctgccaacggccaagatgagaaaagtccaagcacctcccgtgatgcctccgttcctcaggagtctcagggagcttcacccactggctctcctgatgcaggtgtttcaggctcaaaatatgatgtggctgccaacggccaagatgagaaaagtccaagcacttcccatgatgtctccgttcctcaggagtctcagggagcttcacccactggctcgcctgatgcaggtgtttcaggctcaaaatatgatgtggctgccgagggtgaagatgaggaaagtgtaagcgcctcacagaaagccatcatttttaagcgcttaagcaaagatgctgtaaagaagaaggcgtgcacgttggcgcaattcctgcagaagaagtttgagaagaaagagtccattttgaaggcagacatgctgaagtgtgtccgcagagagtacaagccctacttccctcagatcctcaacagaacctcccaacatttggtggtggcctttggcgttgaattgaaagaaatggattccagcggcgagtcctacacccttgtcagcaagctaggcctccccagtgaaggaattctgagtggtgataatgcgctgccgaagtcgggtctcctgatgtcgctcctggttgtgatcttcatgaacggcaactgtgccactgaagaggaggtctgggagttcctgggtctgttggggatatatgatgggatcctgcattcaatctatggggatgctcggaagatcattactgaagatttggtgcaagataagtacgtggtttaccggcaggtgtgcaacagtgatcctccatgctatgagttcctgtggggtccacgagcctatgctgaaaccaccaagatgagagtcctgcgtgttttggccgacagcagtaacaccagtcccggtttatacccacatctgtatgaagacgctttgatagatgaggtagagagagcattgagactgagagcttaaggcagggctggcactatttccttggccagggtaccttatggggccatatcctacagatcctcccatttctagggaggtctgaagtagaattttcactttatgttagaagagagtagtgagctttctaagtagtgcagtatagtagaggctggagggaacaagatatgtatctttcttttgttacacatgagtaacttgcagatttatgttttatctctgtcagttatcaacattgttcctgttaagtgaaggtttattttgcttcagattatacaattatcaataacatagctctcacattcatggctgtttaaccaatctgaaagttacggtttgggaattaataaaacaaagtcatacaacacattttctttgtaattgagaactagataacatggtaacagagaattgattttcatatgaatcttaactccacagtaaaatagttgacatcataatatgaagagaaagaaaaggaaaaacagaaatgtaaaagttgtttaattcttggtttgcctaattcgttttcctatttcttttcatacaaataaaggatacctggatttatttaggtta

SEQ ID NO: 250338 - DNA, 1224 bp, Artificial Sequence
  derived and/or modified sequence
atgccccggggccacaagagcaagctgcggacctgcgagaagcggcaagagactaatggacagccccagggcctgaccgggccccaggcgacagctgagaaacaggaagaatcacacagctcttcttcttcgtcaagagcatgtctcggagactgcaggcgcagctcagatgctagcattccgcaggaatcacaaggggtgagtcctactggctcccccgatgctgtggtgagttattccaaaagcgatgtggctgccaacggtcaggacgaaaagagtcccagcacgtcccgtgatgctagcgtacctcaggagtctcagggcgcgtcaccgactggatcgccggatgccggcgtgtcagggtccaagtacgacgttgcagccaacggtcaggatgagaaaagtcctagtacatcacacgacgtttcagtgcctcaagagtctcagggggcttccccgacgggctctcccgacgccggtgtgtccggatctaagtatgacgtagccgcagaaggagaggacgaagagagtgtgagcgcatcacaaaaagctataatcttcaagaggctctcaaaggatgctgtaaagaaaaaggcctgcaccctcgcccagtttctgcagaagaaatttgaaaaaaaagagtctatcctgaaagctgatatgctgaagtgcgtgcgtagggaatataagccatacttcccacagattcttaatcgcacttcccagcatctggtggtggcctttggtgtagaactgaaagaaatggattcctcaggggaaagctacactctggtttccaaactgggactaccatccgaagggattctaagcggagacaacgctttgcccaaatcaggcttacttatgagtctactcgtggtcatttttatgaatggcaattgtgccacggaggaggaggtctgggaattcctcggattgctcggaatctacgacggtattttacactccatctacggcgatgcccggaagatcatcacagaggacttggtgcaggataagtatgtggtataccggcaagtatgtaatagtgatcccccttgctatgagttcctatgggggccccgggcatacgcagagacaaccaagatgcgcgtgcttcgggtgctggccgattcatctaatacttcgcctggactgtacccccacttatatgaggacgcccttatcgatgaagtggagcgggccttgagactccgagcatag

SEQ ID NO: 250339 - DNA, 1224 bp, Artificial Sequence
  derived and/or modified sequence
atgccccgaggacacaagtctaaactcagaacctgtgagaagagacaagagacaaatgggcagccccaaggacttacagggcctcaggcgactgcagagaaacaggaggaatcccacagctctagcagtagttctcgagcctgcttgggcgactgtaggcgcagctcagacgcttctataccccaggagtcccagggagtctccccaaccgggagccctgacgccgtcgtgtcatactctaagtctgatgtcgccgctaatggacaggatgagaaatcgccgtctacatccagagatgcttccgtgccacaggagagccagggcgcttcgcctaccggcagtccagacgccggtgtgagtgggtccaagtatgatgtagctgcaaacgggcaggacgagaagagcccgtccactagccacgacgtctcagtcccccaggagagccaaggggcaagcccaactggctccccggacgctggcgtgtccggtagcaagtacgacgtggcggcagaaggcgaagatgaagaaagtgtgagcgcctcacaaaaagcaatcatctttaagagactttctaaggacgctgtcaagaaaaaggcttgtaccttagcccagtttttgcagaagaagtttgagaaaaaggagtctatccttaaggcagacatgctgaagtgcgttcgcagagagtataagccctactttccccagatcctcaacagaacttcccagcatctggtggtggccttcggagtggagttgaaggagatggactctagtggagagtcttatactctcgtctctaagctggggcttccatccgaggggatcctgagtggcgacaatgctctgccaaagagtgggctgctgatgagcttacttgtcgtgattttcatgaatggaaattgcgctacagaggaagaggtctgggagtttctgggcttgttgggcatttacgatggaatcctgcactctatttacggtgatgcgaggaagataatcaccgaggatctggtgcaagacaaatatgtggtctatcggcaggtgtgcaactccgatcctccctgctacgaattcctgtggggtccacgggcttatgcggagactacaaaaatgcgtgttttgagagttctggctgattcatccaatacttctcccggtctgtatccacatctgtatgaggacgctttaattgacgaggtcgagagagccctccgtctccgtgcttag

SEQ ID NO: 250340 - DNA, 1224 bp, Artificial Sequence
  derived and/or modified sequence
atgcccagaggccacaagagcaagctgagaacctgcgagaagagacaggagaccaacggccagccccagggcctgaccggcccccaggccaccgccgagaagcaggaggagagccacagcagcagcagcagcagcagagcctgcctgggcgactgcagaagaagcagcgacgccagcatcccccaggagagccagggcgtgagccccaccggcagccccgacgccgtggtgagctacagcaagagcgacgtggccgccaacggccaggacgagaagagccccagcaccagcagagacgccagcgtgccccaggagagccagggcgccagccccaccggcagccccgacgccggcgtgagcggcagcaagtacgacgtggccgccaacggccaggacgagaagagccccagcaccagccacgacgtgagcgtgccccaggagagccagggcgccagccccaccggcagccccgacgccggcgtgagcggcagcaagtacgacgtggccgccgagggcgaggacgaggagagcgtgagcgccagccagaaggccatcatcttcaagagactgagcaaggacgccgtgaagaagaaggcctgcaccctggcccagttcctgcagaagaagttcgagaagaaggagagcatcctgaaggccgacatgctgaagtgcgtgagaagagagtacaagccctacttcccccagatcctgaacagaaccagccagcacctggtggtggccttcggcgtggagctgaaggagatggacagcagcggcgagagctacaccctggtgagcaagctgggcctgcccagcgagggcatcctgagcggcgacaacgccctgcccaagagcggcctgctgatgagcctgctggtggtgatcttcatgaacggcaactgcgccaccgaggaggaggtgtgggagttcctgggcctgctgggcatctacgacggcatcctgcacagcatctacggcgacgccagaaagatcatcaccgaggacctggtgcaggacaagtacgtggtgtacagacaggtgtgcaacagcgaccccccctgctacgagttcctgtggggccccagagcctacgccgagaccaccaagatgagagtgctgagagtgctggccgacagcagcaacaccagccccggcctgtacccccacctgtacgaggacgccctgatcgacgaggtggagagagccctgagactgagagcctag

SEQ ID NO: 250341 - protein, 372 aa, Artificial Sequence
  derived and/or modified sequence
MAKSKTKHRLCSQESSVSALLASCTLSGSNSSNSDGSFHYKDKLYRSASQALQAYIDDFDLGQIYPGASTGKINIDEDFTNMSQFCNYIYKPNNAFENLDHKKHSNFISCRRHTVNDIDSMSLTTDDLLRLPADGSFSYTYVGPSHRTSKKNKKCRGRLGSLDIEKNPHFQGPYTSMGKDNFVTPVIRSNINGKQCGDKIELLILKAKRNLEQCTEELPKSMKKDDSPCSLDKLEADRSWENIPVTFKSPVPVNSDDSPQQTSRAKSAKGVLEDFLNNDNQSCTLSGGKHHGPVEALKQMLFNLQAVQERFNQNKTTDPKEEIKQVSEDDFSKLQLKESMIPITRSLQKALHHLSRLRDLVDDTNGERSPKM

SEQ ID NO: 250342 - DNA, 1119 bp, Artificial Sequence
  derived and/or modified sequence
atggctaagtctaagacaaagcataggctatgctctcaagagtcatcagtcagtgcgttactggcatcttgtacactgagcgggtcaaatagcagtaatagcgacgggtcattccattataaagacaagctgtaccgtagcgcatcacaggcactacaggcctacattgacgactttgacctgggccagatctatccaggcgcttccactggcaaaattaacatagatgaggacttcacaaacatgtctcaattttgtaattatatctacaaaccaaacaatgcttttgagaacctggaccacaaaaagcatagcaactttatctcgtgccgccgtcacactgtgaacgatattgattccatgagcctgacaacagatgatctgctgagactgcccgcagacggaagtttttcatatacgtatgtgggccccagtcaccgcaccagcaagaaaaataaaaaatgcagggggagactgggcagtctggacattgagaagaatccgcattttcagggcccttacacctcaatgggtaaagacaatttcgtgacccccgtcatccggtctaatatcaacggaaaacagtgcggcgataaaatagagttgttgatccttaaggcaaagcggaacctcgaacagtgcaccgaagagctgcctaagagcatgaaaaaggatgatagcccttgcagcctggacaaactggaggcagacagatcttgggagaacattccggttacgttcaagagccccgtgcccgtgaactcagacgactccccacagcagacctcccgggcgaagagcgcaaagggagtgctggaagatttcctaaataacgacaatcagtcttgtacattatctgggggcaagcatcatggacccgtggaagcccttaagcagatgttattcaacctgcaagctgtccaggaacgcttcaatcagaataaaactacagaccccaaggaagagatcaaacaggtttcggaagacgacttctctaagcttcaattaaaggagtctatgatccctattacacgcagcctccagaaggctctgcatcaccttagtcgcttaagggacctggttgacgatacaaatggggagaggtcgccaaagatgtag

SEQ ID NO: 250343 - DNA, 1119 bp, Artificial Sequence
  derived and/or modified sequence
atggccaagagcaagaccaagcaccggctgtgcagccaggagagctctgtgtctgccctgctggccagctgcaccctgagcggcagcaacagcagcaacagtgatggcagcttccactacaaggacaagctgtacagaagtgccagccaggccctgcaggcctacattgatgactttgacctgggccagatctacccaggggccagcacaggcaagatcaacattgatgaggacttcaccaacatgagccagttctgcaactacatctacaagcccaacaatgcctttgagaacctggaccacaagaagcacagcaacttcatcagctgcagaagacacacagtgaatgacatcgacagcatgagcctgaccacagatgacctgctgcggctgcctgcagatggcagcttctcctacacctacgtgggccccagccacaggaccagcaagaagaacaagaagtgccggggccgcctgggcagcctggacatcgagaagaacccccacttccagggcccctacacctccatgggcaaggacaactttgtgacccctgtgatccgcagcaacatcaacgggaagcagtgtggggacaagattgagctgctgatcctgaaggccaagaggaacctggagcagtgcacagaggagctgcccaagtccatgaagaaggatgacagcccctgcagcctggacaagctggaggccgaccgctcctgggagaacatccctgtgaccttcaagagccctgtgcctgtgaacagtgatgacagcccccagcagaccagccgggccaagagcgccaagggcgtgctggaggacttcctgaacaatgacaaccagagctgcaccctgagcggcggcaagcaccacggccctgtggaggccctgaagcagatgctgttcaacctgcaggccgtgcaggagcgcttcaaccagaacaagaccacagaccccaaggaggagatcaagcaggtgtctgaagatgacttcagcaagctgcagctgaaggagagcatgatccccatcaccaggagcctgcagaaggccctgcaccacctgagccggctgcgggacctggtggatgacaccaatggagagaggagccccaagatgtag

SEQ ID NO: 250344 - DNA, 1119 bp, Artificial Sequence
  derived and/or modified sequence
atggccaagagcaagaccaagcaccggctgtgcagccaggagagctccgttagcgcgctcctggcctcttgtaccctgtccggctcaaacagttccaatagtgacggctcgtttcattataaagataaactctatagaagcgctagccaggcactgcaggcttacattgatgactttgacctaggtcaaatctacccaggagcaagcacgggcaagataaatatcgacgaggactttacgaacatgagtcagttctgtaattacatatataaaccaaacaacgcgtttgaaaacctggatcacaagaagcacagcaattttatttcttgcaggcgccacactgttaatgacattgatagtatgtcattgaccactgacgacctcctccgactaccagccgacgggtcgtttagttatacctatgttggtccctctcaccgtacatctaagaaaaacaagaagtgtagaggaagattgggcagcctcgatatcgagaagaatcctcacttccagggaccgtacacatctatgggcaaggacaattttgtaacgccagtaattaggagcaacataaatggcaagcagtgtggcgacaagatcgagctcctcattttgaaagcaaagcgaaacctggagcagtgtacagaagaacttcccaaaagcatgaagaaagacgactcgccatgctctctggataaactcgaagccgatcgaagctgggagaatatccctgttacattcaaatcgcctgtgcccgtgaactctgacgattctccccagcaaacgagccgggccaagagcgctaaaggagtccttgaagactttttgaataacgacaatcagtcatgcactctgtctggaggaaaacaccatggacctgtggaagccctgaaacagatgctcttcaatctgcaagccgttcaagagaggtttaaccagaataaaacgaccgaccccaaagaggaaatcaaacaggtgtctgaagatgatttcagcaaacttcagctgaaggagagtatgatcccaattacaaggtcgctccagaaggctctccatcacctctctagattacgcgatctggttgacgatacgaacggcgagaggtctccgaagatgtag

SEQ ID NO: 250345 - DNA, 1119 bp, Artificial Sequence
  derived and/or modified sequence
atggcaaagagcaagacaaagcatagactctgctcacaagaaagtagtgtgagcgccttactggcatcctgtacgctttcagggtcaaatagtagcaactcagacggctcatttcactacaaggacaaactgtatcggtccgcatctcaggccctgcaggcctacatcgacgattttgacctcggccagatctaccctggtgcttcaaccggcaagattaacatcgatgaggactttacaaacatgagtcagttttgcaactacatatacaagcccaataacgcatttgagaacctcgaccacaaaaaacattccaacttcattagttgcaggagacatacagtgaacgatatagatagcatgtccctcacgaccgatgacctgctgcggttgccggcagatgggtccttcagttatacctatgtggggccaagccatagaacatccaagaagaacaaaaaatgcaggggtcgtctgggctccttggacattgaaaagaacccgcattttcagggcccttacacgtctatgggtaaagataattttgtgacaccggtcatcaggagcaacatcaacggaaagcagtgcggtgacaagatcgagctgttaatactgaaggccaagcggaacctcgaacagtgtactgaagaacttcctaaaagtatgaagaaggatgactccccatgcagcctggacaaattggaggcggacagatcctgggagaatattccagtcaccttcaagtctccagtgcctgttaattcagatgactctcctcagcaaactagccgcgctaaaagcgccaagggagtcctcgaggacttcctaaataacgataaccagtcctgcactttgtccggcggtaaacaccacggtccggttgaggccctcaaacagatgctgtttaacctgcaggcggtgcaggaacggttcaatcagaataagaccacggaccctaaagaggaaattaaacaggtgagcgaggatgattttagcaaacttcagcttaaagaaagcatgattcccataacaagatcactgcaaaaagccctgcaccacttgtcacgcctccgggacctggttgacgataccaatggcgagcgtagcccaaaaatgtag

SEQ ID NO: 250346 - DNA, 5237 bp, Artificial Sequence
  derived and/or modified sequence
tgcgcactgctggagacgggcgaccttcgctggccggtcggtgggttcctggttttctgctgccgagtaaacaaacgttccctttcctaacttagcagtcacagagctatttccaagagttgttcttaatttcctgtgcgatattcccattggctatttaacactgaacattctgtttttgaatcaaagttagttaaaatttgttgtcaataagtttaacattctgttcttccgcgtgatggattttcttttggagattcgaactgaagcctgtacggaggaaatgttgtttttaagggaaatgaatagaaacaatccactttgaagaagccatggcgaaatcaaagacaaaacatagactttgttctcaggaatcttcagtatctgccctgctggcaagctgcaccctgagtggtagtaattcctctaattctgatggctcgtttcactataaagataagctgtacagatctgcttctcaagctctacaggcttatattgatgattttgatctaggccaaatatatcctggtgcaagcactggaaaaattaacattgatgaggattttactaatatgtcacagttctgcaactatatttacaaaccaaacaatgcttttgaaaaccttgatcacaaaaagcactcaaacttcatatcctgtagaagacacaccgttaatgacatagactccatgagcctaacaactgatgatctattaagactcccagcagatggatcattttcttatacttatgttggaccgagtcaccgaacgagcaagaaaaacaagaaatgccgtggaagactgggttcattggacattgagaagaatccacattttcaaggaccctacacttccatgggcaaggataactttgttactcctgttatacgctcaaatataaatggaaagcaatgtggtgacaaaattgaattgcttatcttgaaggccaagagaaatctagagcagtgtactgaagaattaccaaagtccatgaaaaaggatgacagtccttgctcattagataaacttgaagcagacagatcatgggaaaatattcctgttactttcaaatctcctgttcccgttaactctgatgatagtcctcaacaaacttcaagggcaaagagtgctaaaggggttcttgaagactttctaaataatgataatcagagctgtactctctctggaggcaaacatcatggtcctgttgaagccctgaaacaaatgttatttaaccttcaagcagtacaagaacgttttaatcaaaataagaccacagatccaaaagaagagattaaacaagtttcagaagatgatttctctaaattacagttgaaggaaagtatgattcctattactaggtcacttcagaaggctttgcaccatttatctcgcctgagagacctggttgatgatacgaatggagaacggtcaccgaaaatgtgaagaggaaaatgaaactgtcaccacaatgaatagtcaccacagaacaaataggcattttttctattacttaaactgacaaagtaaatataagccatacattattttgtggttggttcaaggattatatatttctaaaacactaaacttgaaaatacccataggttttgggacctatctttattttgtgccaacatactagaatgtgaactgcaaggacccacaatatatcctgaagtcttactttcgccttctggccagcaaatgtctaatatttaaagatggatgacttctgttcttgaagcttacctggatttaaccttcttcagcatcctcaacattttattacctggttcaggatcattaagaaacttactggtttttatccaaaatcttttacgttaaatagacttttttaaagatatagttagcatcacttttaaacagcttaaaggaatatcaaaattgttattgtgtatctcatctataaggaagtctgttactttgaaattttcataaatttaatatttaagatacattgtatttgaaaattgcattaatagtggggtgatactgtgttaaaaggaatgttgtgttgtgacattcaagagaacctcctcatttaattagtactttgattctgtgtaagataatcttggtagtgcttgacagtttccaaacctttttttggagagatatttaagaatttaatattttgatattagattgtttcccagattttaattttggggttggctcaaactagtgaaaactatgactcaatggccaattgctttatcaaatttgataactaaaacttaaaatgaatatggaaaatcagaaagcaactctattttagagctattttgtaagagttgtgctttctttaacaccatctgtagtcttaagtttgtctctagctagaactgaacaaagctctataatttttaccaagcacttattattaatacttcttataagtagtaagcatctttactaacacaactgagaattaagtcataaaacataactaatacagcacattactgcctgacaaaattaaagagtactgtgtgtatgtataactactacaggttaacacttcacccaaatgatagcgtttttcctcagtagattattgtcaaataggaatttctaagcacattgagtcaaagcattttttccaagttaataaagtgttatttactatctttgttagaggtgacatgtcaaacactacagtgagctctgtggggttttttttttttttttttgcccgtgagttttttaccatgctgctctgaccagtttgagtggcaattaccaatagatttgttttctttattctatggagatgtttttaccactgacactgttttctgattatagtctgcttcatagaaaatagcctgcataatcaaacaaggagttactttgaaattaaagtatgcctggctattaaaaatgcagattttaggtgggtaaacatcaggtaggtctgggtgggtcatgttctaggcctagaaaaatacactattagacaagttctaaagaaggcaaggagataaaggcatcaggtggtaacttctaattgaatattatatgttgatcatacataatatatactatgcctggaaattatgactgaaaagcacctattcggttagtgctcctattcatgagaacatatctccaatactaaatgagataagcctgttctaaaatcttatagccagtattttaagaaacttgattatacttaccaaaggaacattgtttgttttctcttgttttaaatatggagaggtttaatcctttacataacaaaggaattaattttagcaaaatgattcattccaaccttcttataagaaatatctaggagagtcaagtaagaaaaataacgaatctaagtgataaacattcaagaaattctctaaataagagatttatttataattttaatatctcagggttctttttaggtttccaggggaaaagagcaggataacagtgtggagactgctaagttgagaatttaaaacaaatgagaacataagatttttaaaattgcattgtgaatgtaaaatttttatcaatcctttgctctcttttagacatattgagaaaatgttaaatagaaaaaattaagaaattttaataagatgtttcagatctttgagtatgaaaaacataacaaaaaaagcctaatttcaaaaaactatttgagatcaagggacaatggtgtgaccaatatgaagggtcaagactgaaatgtattgtctttactatcaagaactctactttcagttgtttctcagacagttaatttcagcttcatagagatttctgagcaaattaagaaacactgttttcctgggtttgttttgggtatatgtcattatagttatgttatttcttgttgaaatttataattgtaggttttttgtattgttttagtatttaatggtgtataatgtgttattacattatatgtagttataccaaaatattgcctgaagataaatcatgacaaggtcccctgtttattcctgtgttacagacgcatggaattgctcctgtagatttgaatttttgtttcatttttttctgtcccacccttcactctctctgtttcagaacatttttggtagaagtgctatccagaagtgaacttgtcaaaaggcaagtagcatgaaagaagacagaagaagcaaaaggctaatacagtggataatttctgagcacttgaagtttcttcaaatgtgcaagactgtgtgtcttcctattagatgtataaattggatatttcatgcctaattaaatgttgcgttggattgcagtgcctatcatacagtgattggagtaaattgaggcctaatcctgaacacatatagagcatattgttagatatttttcctgtgacatttgaagttattattctcccatttcctttttctttttttgtttataatcatatgtccctaagattgttttccttttttggaccaaaaaaaagaaaaaaaaaatcttagcttttcatcctcccagtgtattctgcattgtccttaccctagatcagccccttctgtgttaacagtttttctcacaatgtagcaacttttatccacccttcaggaccttcactgggactagttcattcattttcaaatagctatttcaacctttaacatctactgtcttagtcttttacacagaagccagagtgactggtcttggcaagactctgttgtgtatcaccactctaaccttactgatttgtttcagcaaatttgctttagttaaattgctttactcagattcccccaaactttatatgtgtattgtcatctttgtgcatattatttctcatgcatgaaatactcaatttttattcttttatctaacgcttactcttacatttctttaaagctctggccaagtattttatttcgtccctaaacattctaactatccaccaaactggtaagttggcttttctttttcctccccctgtcattcatttagctgttatatttcattttaatgttttgggtggtgcctcttatactatgttgtattcctagacaaggaaatgtatatcaaaatatgttagatgattgattgttttatctccttgatgatagcacctcttatactgctttacagaatcaggaaaaagtaaactgcattttacatagtggttttaaatattgattgattgatattctaaacctggtttcctatataaagttgtaagttcaagataaagagaccacattctttact

SEQ ID NO: 250347 - DNA, 1119 bp, Artificial Sequence
  derived and/or modified sequence
atggccaagagcaagaccaagcacagactgtgcagccaggagagcagcgtgagcgccctgctggccagctgcaccctgagcggcagcaacagcagcaacagcgacggcagcttccactacaaggacaagctgtacagaagcgccagccaggccctgcaggcctacatcgacgacttcgacctgggccagatctaccccggcgccagcaccggcaagatcaacatcgacgaggacttcaccaacatgagccagttctgcaactacatctacaagcccaacaacgccttcgagaacctggaccacaagaagcacagcaacttcatcagctgcagaagacacaccgtgaacgacatcgacagcatgagcctgaccaccgacgacctgctgagactgcccgccgacggcagcttcagctacacctacgtgggccccagccacagaaccagcaagaagaacaagaagtgcagaggcagactgggcagcctggacatcgagaagaacccccacttccagggcccctacaccagcatgggcaaggacaacttcgtgacccccgtgatcagaagcaacatcaacggcaagcagtgcggcgacaagatcgagctgctgatcctgaaggccaagagaaacctggagcagtgcaccgaggagctgcccaagagcatgaagaaggacgacagcccctgcagcctggacaagctggaggccgacagaagctgggagaacatccccgtgaccttcaagagccccgtgcccgtgaacagcgacgacagcccccagcagaccagcagagccaagagcgccaagggcgtgctggaggacttcctgaacaacgacaaccagagctgcaccctgagcggcggcaagcaccacggccccgtggaggccctgaagcagatgctgttcaacctgcaggccgtgcaggagagattcaaccagaacaagaccaccgaccccaaggaggagatcaagcaggtgagcgaggacgacttcagcaagctgcagctgaaggagagcatgatccccatcaccagaagcctgcagaaggccctgcaccacctgagcagactgagagacctggtggacgacaccaacggcgagagaagccccaagatgtag

SEQ ID NO: 250348 - protein, 465 aa, Artificial Sequence
  derived and/or modified sequence
MGPLKAFLFSPFLLRSQSRGVRLVFLLLTLHLGNCVDKADDEDDEDLTVNKTWVLAPKIHEGDITQILNSLLQGYDNKLRPDIGVRPTVIETDVYVNSIGPVDPINMEYTIDIIFAQTWFDSRLKFNSTMKVLMLNSNMVGKIWIPDTFFRNSRKSDAHWITTPNRLLRIWNDGRVLYTLRLTINAECYLQLHNFPMDEHSCPLEFSSYGYPKNEIEYKWKKPSVEVADPKYWRLYQFAFVGLRNSTEITHTISGDYVIMTIFFDLSRRMGYFTIQTYIPCILTVVLSWVSFWINKDAVPARTSLGITTVLTMTTLSTIARKSLPKVSYVTAMDLFVSVCFIFVFAALMEYGTLHYFTSNQKGKTATKDRKLKNKASMTPGLHPGSTLIPMNNISVPQEDDYGYQCLEGKDCASFFCCFEDCRTGSWREGRIHIRIAKIDSYSRIFFPTAFALFNLVYWVGYLYL

SEQ ID NO: 250349 - protein, 419 aa, Artificial Sequence
  derived and/or modified sequence
MGPLKAFLFSPFLLRSQSRGVRLVFLLLTLHLGNCVDKADDEDDEDLTVNKTWVLAPKIHEGDITQILNSLLQGYDNKLRPDIGVRPTVIETDVYVNSIGPVDPINMEYTIDIIFAQTWFDSRLKFNSTMKVLMLNSNMVGKIWIPDTFFRNSRKSDAHWITTPNRLLRIWNDGRVLYTLRLTINAECYLQLHNFPMDEHSCPLEFSSYGYPKNEIEYKWKKPSVEVADPKYWRLYQFAFVGLRNSTEITHTISGDYVIMTIFFDLSRRMGYFTIQTYIPCILTVVLSWVSFWINKDAVPARTSLGITTVLTMTTLSTIARKSLPKVSYVTAMDLFVSVCFIFVFAALMEYGTLHYFTSNQKGKTATKDRKLKNKASMTPGLHPGSTLIPMNNISVPQEDDYGYQCLEGRKDTHTHCQN

SEQ ID NO: 250350 - DNA, 1398 bp, Artificial Sequence
  derived and/or modified sequence
atgggccctctgaaggcatttctcttttcacccttcttgctgaggagtcagagtcggggcgtgaggcttgtcttcttgctactgactctccatttaggtaactgtgtggataaagctgacgatgaagatgatgaggatttgacagtgaacaagacttgggttctggccccaaaaatccacgagggtgacatcactcagatcctgaactctctacttcaagggtatgataacaagctcagaccggacatcggcgtcaggcctacggtaattgaaacagacgtctatgttaactccattggcccggttgatcccattaatatggagtatactatcgacatcattttcgctcaaacgtggtttgattctcggctaaaatttaactccaccatgaaggtactcatgctcaactctaatatggtgggcaaaatctggattccagacacctttttcaggaactcccgaaagtccgatgcacattggatcaccacccctaacagattgcttaggatatggaacgacggtagagtactgtataccctgaggctgacaataaacgctgaatgttacctgcagcttcataatttccctatggatgaacacagctgcccattagagttctcttcatacgggtatccgaaaaatgaaatcgaatacaagtggaaaaagccatcagtggaagtcgcagatcccaagtattggcggctttaccagtttgcttttgtcggcctccgtaactctactgaaataacccatacgatttccggagactatgtgattatgaccatttttttcgatctcagcagacgcatgggctactttaccatacaaacatacattccatgcatcctcaccgtggtgctctcatgggtgagtttctggataaacaaggatgctgtcccggcccggacatctttaggcatcacaaccgttctgaccatgacgaccttaagcacgatcgcccgtaaatctctgcccaaagtgtcctacgtcaccgccatggacctttttgtgtctgtgtgtttcatctttgtgttcgctgccttgatggaatacggtacgctgcactattttacctccaaccagaagggaaagaccgccaccaaggatcgaaaattgaagaataaagctagcatgacacctggtcttcatccaggaagtacactgatccctatgaataatatttccgtccctcaggaagacgattatggctaccagtgcctggaaggcaaagattgcgcaagtttcttttgttgtttcgaggattgtcgcactggaagctggcgagaaggacggatccatatccggattgctaagatagattcatatagccggattttctttccaaccgccttcgctttgtttaacctcgtctactgggtgggatacttatatctgtag

SEQ ID NO: 250351 - DNA, 1260 bp, Artificial Sequence
  derived and/or modified sequence
atggggccactgaaggcttttttgttttcaccttttcttcttaggagccagagcaggggagtgagactggttttcctcctgcttacactgcaccttggaaactgcgttgacaaggcagacgatgaggatgacgaggacttgacggtaaataaaacttgggtgctggcccccaagattcacgagggcgacatcacacagattcttaattccttgttgcagggctatgacaacaagcttagaccggacattggtgtgcgccccaccgtaatagagaccgacgtatacgtcaactctattgggcccgtggatcccataaatatggagtatactatcgatatcatcttcgctcaaacatggtttgacagccgtctgaaatttaactccaccatgaaggtcctgatgctgaatagcaacatggtagggaagatttggattccggacacattcttcagaaactcacgcaaatctgacgcacactggattaccaccccaaacagactcctccggatatggaacgacgggagagtgttgtataccctaagacttactatcaatgccgaatgctatcttcagctgcataacttccccatggacgagcactcttgcccgctagagttctcctcctatggctaccccaagaatgagatcgaatataaatggaagaagccaagtgttgaagtggccgatcctaagtactggagactgtatcaattcgcgtttgtagggctgagaaattctactgaaatcactcataccatatcaggagattatgtcattatgacaattttctttgacttaagtcggaggatgggctacttcacgatccagacctatataccatgcatcttgaccgttgttctcagttgggtcagcttctggatcaacaaggacgctgtgccggcaaggacctcactcggcataaccaccgtcctcaccatgacgaccctgtccactatcgctcggaagtccctgccgaaggtgagctatgtgacggctatggatctatttgtaagtgtgtgcttcatcttcgtctttgcggccctcatggagtacgggaccttgcattatttcactagtaatcaaaagggtaagacagcaaccaaagatcggaaactgaaaaacaaggcatctatgacgcctgggctgcatcctgggagcactttaatccctatgaacaacatttcagtaccacaggaagatgactacggctatcagtgtttagagggacggaaagacacccacactcactgtcagaattag

SEQ ID NO: 250352 - DNA, 6785 bp, Artificial Sequence
  derived and/or modified sequence
attggctccctggctcaattctgctgggagtcgcatcctacctgtttgggaggtgcactgcctttccacactctcccttctgtactcagccagctgctgctgaggtgggaggaaaagtcctggctgggagaattgagctagtgcagcacacgtaaaaaagcgattccgatgggtcctttgaaagcttttctcttctccccttttcttctgcggagtcaaagtagaggggtgaggttggtcttcttgttactgaccctgcatttgggaaactgtgttgataaggcagatgatgaagatgatgaggatttaacggtgaacaaaacctgggtcttggccccaaaaattcatgaaggagatatcacacaaattctgaattcattgcttcaaggctatgacaataaacttcgtccagatataggagtgaggcccacagtaattgaaactgatgtttatgtaaacagcattggaccagttgatccaattaatatggaatatacaatagatataatttttgcccaaacctggtttgacagtcgtttaaaattcaatagtaccatgaaagtgcttatgcttaacagtaatatggttggaaaaatttggattcctgacactttcttcagaaactcaagaaaatctgatgctcactggataacaactcctaatcgtctgcttcgaatttggaatgatggacgagttctgtatactctaagattgacaattaatgcagaatgttatcttcagcttcataactttcccatggatgaacattcctgtccactggaattttcaagctatggataccctaaaaatgaaattgagtataagtggaaaaagccctccgtagaagtggctgatcctaaatactggagattatatcagtttgcatttgtagggttacggaactcaactgaaatcactcacacgatctctggggattatgttatcatgacaattttttttgacctgagcagaagaatgggatatttcactattcagacctacattccatgcattctgacagttgttctttcttgggtgtctttttggatcaataaagatgcagtgcctgcaagaacatcgttgggtatcactacagttctgactatgacaaccctgagtacaattgccaggaagtctttacctaaggtttcttatgtgactgcgatggatctctttgtttctgtttgtttcatttttgtttttgcagccttgatggaatatggaaccttgcattattttaccagcaaccaaaaaggaaagactgctactaaagacagaaagctaaaaaataaagcctcgatgactcctggtctccatcctggatccactctgattccaatgaataatatttctgtgccgcaagaagatgattatgggtatcagtgtttggagggcaaagattgtgccagcttcttctgttgctttgaagactgcagaacaggatcttggagggaaggaaggatacacatacgcattgccaaaattgactcttattctagaatatttttcccaaccgcttttgccctgttcaacttggtttattgggttggctatctttacttataaaatctacttcataagcaaaaatcaaaagaagtctgactaaattcagtagaatcttttgtgcttcagtaacttgaagtttaaatttaaaatgcagagagaccaatggttaaaatgtgaatagtattgtaactattttaaggccttcagaagtaaataaagtagcagctttcaggctaatttacgtgaaactgattagttgcaaaatccagtaggttaaaatactcacatatttttacttaaattttctttaatttacttatatgttattataattttgaatttttaagttctatgattcatgttttaaagatggaataattttaatacatattttgtttaaatataatctataattgttttgtaatgtaagactaattactaatatttatgtagcaacttttgtgccagaaaaaagactgttaatttgttttttcttgcttttcatttgattaccctgcttgaaatacagttagttgataacataaagccatagttttcttggattttcttccaagatattgtattcccaagaagaaattgatttatttttaaactatcagttactgaagacttatgaaaaggtcaatttttacctgtcttttaatccagtccattttctgacacaatattaaacagaacgccagttgcatttactttggtgatttgcaaacttggaatgaagccaccagtcattttttaagaatgcaagatgaaaaaatcaggtaaaatctaaccattttattctctgcttcatagcatttataatgtatgatgaggttaacactgaaatattaaaatctgcaaatgcacattaatgcaaattaaatgcagagagaaatgattatttttttctttatgttttatgaaagtgttgcagtccctaaaataaaaatattgaggaacattgcttgtatttactcacgtggttaaaaaattattacctggcaaactgagttgccggtcatattgaggacaaaatcttaaatatgtgctattagcattgtttttagactagtaatatgcagaaaacagttttaggcctgcgttacatattgcctcttccagctccaaagttttggaccctgtcagttttgcaactacattatacattattataatattcttttttttttctagaaactgggggcagcctcaaaatcatgttaaagagggagttttgttagaggcatctttaatgaacatgaatgtgagtgctctctaaattcttagcatctcactggatgtaaaatctatcagttaatagttttaaaaatgtctcttttgttaagaataaatttaggcttcaatcattataatcctgtaagtagcttgacataccaattgtttataagattcatcacataaatttctggagaaccaccaggtttagcttggaaataacctttaaagattgtttctgttgccaagaccaatgaccatgatgaagagttttatgatcacagcctatcttacttaaggtttgagaggaaacctgtcacctctgcaattgttactctagtttttaatgttataattccgctgcgtggttagtgaatgtctggcatgattatacacgtgtattggaaatatctagttttttaaatttttaattaatttatttataatttactgtgtgttcccagctaactctattttttttttcacttgctcataaacttctggaaaaaaataagcatgaatcaaatggtaatgcccaatatccaccgacactgcttttcttgaatgaacagccaaactaaactttggccatctatatattcatttacagattattcatacattcattttaataacattgagtactgatggatgttttgaaagtgagcattcatttaaggataaataaaaaataaagtagtaataaagaataaaatactttactaaaatattgtatggctattttcatgtttgaagctatagcttactatcatgagacagttttgattttgggactctttcaagtgtatctgagcatgactgtattttaaaatacttaaaagtgcttgatataaatagcttttccttctgaaccacgttctatgtaaaagaaaaaaaatagctttgattttctcactggtgtttcattaacttggttttaaatgttgacaatatttacaagtggaaataaaatttgtaaatatatgaaagatgcctttccttgtatataccatcaagcaagcactttgttttcaaagcaagtggtattttgatcagttttatttaaatgtgtgatcagaaagaatggcgtacaaatcttattatttctaaaaataagaataaaaaggtaaaactacatttagacttctttctcaagaaatcaaatacagctttttttcaaagctgattcagttcatttcctgttcctctattccaagtataagtttcaccaccttgagaaataatttttttaaaaaatcttcctctttctctggggagttatataataatttattgaatttattggaacttgattttcctggatgctttcaatgtttttaatgctaacatagaccccaaaattagatataaagaattgggaaggatacctggagcacaaggaataagatcatttgtaaaaatgtttgtttatatagacctatcctctaaatatgtgacaaggatctagaaattctgagaggggaaaatgtgattttggatttacaatgacagggtaatattttatttatcttcgaattccatggacaaaattaggctcacttaaattaatttttgtaaacccaagtaagttctaaaaaaaagtaaaaaatacatagaatacttgagaatttagcagggacagggaaaaatttcccagtaagtctgaagtcttgatgtaagtgggaattagataactaattggaggcattttattttaagttaaagacagatttctttaataagtttttaaaattgatcaactttaaattaagcacagtaaatgtgtataaatatgaaggcaatcataaggattttttcacttgtgtttccatattctggcattagtatatcatcataaaatagacaatgtttttgtctcaagaacaagaataaaattgaaatctgcattcatgccaattcagcataaaaaagaataggctacagttctctcacaccaagggccccatagttataaatgtgaaattatattccaggtcaaaatttgtgaaaaatacacaaaacactttgattttacaagagaggagctttaaataagatgattttagtagattgaaataaataaccagtatttaagtaaatgtataacgaatgaataaatacatgcataatattttcaaagttctataccagtacctatttttactcttacaaaatttcctgtaaaaaaatactacatttgaaattatttcattggttttagaactggcattgaaggtacccagtagactcttaagcctttactgcttgtctcactagaaacatttatttctgacctaccaagttttcttcacatcatcaaatttattcagcttctcagtgctgtaccgtatgatggcaagacatacttggtatttccatttttgttggtcattctttattgctttttactgctaggaaggtcttgccaggcttctatacagttacaaaaaccattaccaaactttatcaaggactttccaaatggagttttcaaatactattgaccacattgctctagttaatgtaaggtcagctctgactttttgtgtttgcatttcggaagtgaggtaacctcattcaaatatatatgcagcactttctgtgtacaaagtactgttctaaatacaaaagggaatataaagatgactttcaaggaacatataatgtagtcagaaagatgagaggattagttatacaatttaaggaagggaggataactttgggaaggttttgtggaggatatgtgtttagagatgcgagctggggattcaacaggtaagagggagagagatcacaatttccaactgggtaaacagcttgaaaaaagaaacagaagcctgggcacaaatgaaaattccatattaattggaagttaagattcatatagagacaatgaaaggttaggttagaacaataaactgagaagtacgaatgtggacttcaggaggctaggggaaattacgaagtcataaaaagttcacagagatacttgagtacaaaagatacattattaaaatttctgcagaagtttcatcttatttgtgtgtgatggtttggaatataacaagccagttaggcgtataagcttatagtggctaatatgaggatgaaatccgtactcttgtgacacaagtcttcagcggagatgggggatgataggcccaaatagaaagaaaagtggcagacattaagctttgactaacagacaacataactgagagacatggtgtgttgggtggaagggatcctgtagtagatacttgcttgcatgtagatgggtacaaagacaccataaggaaattctgaatgtaatacaaaggcttatttttcctgttgatttatctttttcacacataaaagatgaagaaaaaaataatctgaaatgtaaatcctaaagtgatctgtctagattcttattttttgaaaaatgttcctcactaaaagagttttctattcaaataaccatttccagttttctaactgagacatacatacatatatatatgtataaaattatatatatatttggacaaagagaataagagaattgcaggtagaaatagtctactgtgtgtagacaaatccagaaagttgatttctgttcctcaaacaatttctgaaatatttatgtcagaataaataaaagaattgttattgttggacaatgaaacatacctggaccctttgagtgtgtgaatagtaaaggctgtgataactgaaatgcagctaagcaaaaagggctaattagaagacttttgagacatgatttacctaaatggaaatagtttggttttcaatccttcactgtaataacaattatttgcatctattaagtgtttgtagtcactttgtataataaagttttatggcttgtgattataatggcttctgttattctgctactgcctcattgttttgaggaacatttgtaattttgtggcaaaggtgtctcaatttttcagtgttctttactctcatgatccttagaacaaaaaaaataccagtaacttgttataaataaagagtcacattctcttaaa

SEQ ID NO: 250353 - DNA, 1885 bp, Artificial Sequence
  derived and/or modified sequence
aattctgctgggagtcgcatcctacctgtttgggaggtgcactgcctttccacactctcccttctgtactcagccagctgctgctgaggtgggaggaaaagtcctggctgggagaattgagctagtgcagcacacgtaaaaaagcgattccgatgggtcctttgaaagcttttctcttctccccttttcttctgcggagtcaaagtagaggggtgaggttggtcttcttgttactgaccctgcatttgggaaactgtgttgataaggcagatgatgaagatgatgaggatttaacggtgaacaaaacctgggtcttggccccaaaaattcatgaaggagatatcacacaaattctgaattcattgcttcaaggctatgacaataaacttcgtccagatataggagtgaggcccacagtaattgaaactgatgtttatgtaaacagcattggaccagttgatccaattaatatggaatatacaatagatataatttttgcccaaacctggtttgacagtcgtttaaaattcaatagtaccatgaaagtgcttatgcttaacagtaatatggttggaaaaatttggattcctgacactttcttcagaaactcaagaaaatctgatgctcactggataacaactcctaatcgtctgcttcgaatttggaatgatggacgagttctgtatactctaagattgacaattaatgcagaatgttatcttcagcttcataactttcccatggatgaacattcctgtccactggaattttcaagctatggataccctaaaaatgaaattgagtataagtggaaaaagccctccgtagaagtggctgatcctaaatactggagattatatcagtttgcatttgtagggttacggaactcaactgaaatcactcacacgatctctggggattatgttatcatgacaattttttttgacctgagcagaagaatgggatatttcactattcagacctacattccatgcattctgacagttgttctttcttgggtgtctttttggatcaataaagatgcagtgcctgcaagaacatcgttgggtatcactacagttctgactatgacaaccctgagtacaattgccaggaagtctttacctaaggtttcttatgtgactgcgatggatctctttgtttctgtttgtttcatttttgtttttgcagccttgatggaatatggaaccttgcattattttaccagcaaccaaaaaggaaagactgctactaaagacagaaagctaaaaaataaagcctcgatgactcctggtctccatcctggatccactctgattccaatgaataatatttctgtgccgcaagaagatgattatgggtatcagtgtttggagggaaggaaggatacacatacgcattgccaaaattgactcttattctagaatatttttcccaaccgcttttgccctgttcaacttggtttattgggttggctatctttacttataaaatctacttcataagcaaaaatcaaaagaagtctgactaaattcagtagaatcttttgtgcttcagtaacttgaagtttaaatttaaaatgcagagagaccaatggttaaaatgtgaatagtattgtaactattttaaggccttcagaagtaaataaagtagcagctttcaggctaatttacgtgaaactgattagttgcaaaatccagtaggttaaaatactcacatatttttacttaaattttctttaatttacttatatgttattataattttgaatttttaagttctatgattcatgttttaaagatggaataattttaatacatattttgtttaaatataatctataattgttttgtaatgtaagactaattactaatatttatgtagc

SEQ ID NO: 250354 - DNA, 1398 bp, Artificial Sequence
  derived and/or modified sequence
atgggccccctgaaggccttcctgttcagccccttcctgctgcggagccagagccggggcgtgcggctggtgttcctgctgctgaccctgcacctgggcaactgtgtggacaaggcagatgatgaagatgatgaggacctgactgtgaacaagacctgggtgctggcccccaagatccacgagggggacatcacccagatcctgaacagcctgctgcagggctatgacaacaagctgcggccagacattggagtgcggcccaccgtcatcgagacagatgtgtatgtgaacagcatcggccctgtggaccccatcaacatggagtacaccatcgacatcatctttgcccagacctggtttgacagccggctgaagttcaacagcaccatgaaggtgctgatgctgaacagcaacatggtgggcaagatctggatcccagacaccttcttcaggaacagcaggaagagtgatgcccactggatcaccacccccaaccggctgctgcgcatctggaatgatggccgggtgctgtacaccctgcggctgaccatcaatgctgagtgctacctgcagctgcacaacttccccatggatgagcacagctgccccctggagttcagcagctatggctaccccaagaatgaaattgagtacaagtggaagaagcccagcgtggaggtggccgaccccaagtactggaggctgtaccagtttgcctttgtgggcctgaggaacagcacagagatcacccacaccatcagcggggactatgtgatcatgaccatcttctttgacctgagcaggaggatgggctacttcaccatccagacctacatcccctgcatcctgactgtggtgctgtcctgggtgtccttctggatcaacaaggatgctgtgcctgcccggaccagcctgggcatcaccaccgtgctgaccatgaccaccctgagcaccatcgccaggaagagcctgcccaaggtgtcctatgtgacagccatggacctgtttgtgtctgtgtgcttcatctttgtgtttgctgccctgatggagtatggcaccctgcactacttcaccagcaaccagaagggcaagacagccaccaaggacaggaagctgaagaacaaggcctccatgaccccaggcctgcaccctggcagcaccctcatccccatgaacaacatctctgtgccccaggaggatgattatggctaccagtgcctggagggcaaggactgtgccagcttcttctgctgctttgaggactgcaggacaggctcctggagggagggccgcatccacatccgcatcgccaagattgacagctacagccgcatcttcttccccacagcctttgccctcttcaacctggtgtactgggtgggctacctgtacctgtag

SEQ ID NO: 250355 - DNA, 1260 bp, Artificial Sequence
  derived and/or modified sequence
atgggccccctgaaggccttcctgttcagccccttcctgctgcggagccagagccggggcgtgcggctggtgttcctgctgctgaccctgcacctgggcaactgtgtggacaaggcagatgatgaagatgatgaggacctgactgtgaacaagacctgggtgctggcccccaagatccacgagggggacatcacccagatcctgaacagcctgctgcagggctatgacaacaagctgcggccagacattggagtgcggcccaccgtcatcgagacagatgtgtatgtgaacagcatcggccctgtggaccccatcaacatggagtacaccatcgacatcatctttgcccagacctggtttgacagccggctgaagttcaacagcaccatgaaggtgctgatgctgaacagcaacatggtgggcaagatctggatcccagacaccttcttcaggaacagcaggaagagtgatgcccactggatcaccacccccaaccggctgctgcgcatctggaatgatggccgggtgctgtacaccctgcggctgaccatcaatgctgagtgctacctgcagctgcacaacttccccatggatgagcacagctgccccctggagttcagcagctatggctaccccaagaatgaaattgagtacaagtggaagaagcccagcgtggaggtggccgaccccaagtactggaggctgtaccagtttgcctttgtgggcctgaggaacagcacagagatcacccacaccatcagcggggactatgtgatcatgaccatcttctttgacctgagcaggaggatgggctacttcaccatccagacctacatcccctgcatcctgactgtggtgctgtcctgggtgtccttctggatcaacaaggatgctgtgcctgcccggaccagcctgggcatcaccaccgtgctgaccatgaccaccctgagcaccatcgccaggaagagcctgcccaaggtgtcctatgtgacagccatggacctgtttgtgtctgtgtgcttcatctttgtgtttgctgccctgatggagtatggcaccctgcactacttcaccagcaaccagaagggcaagacagccaccaaggacaggaagctgaagaacaaggcctccatgaccccaggcctgcaccctggcagcaccctcatccccatgaacaacatctctgtgccccaggaggatgattatggctaccagtgcctggagggcaggaaggacacccacacccactgccagaactag

SEQ ID NO: 250356 - DNA, 1398 bp, Artificial Sequence
  derived and/or modified sequence
atgggccccctgaaggccttcctgttcagccccttcctgctgcggtcccaaagtagaggcgttcgcctggtgttccttttgctgacactccatctggggaactgtgttgacaaggcagatgatgaagacgacgaagatctgacagtcaataagacctgggttctcgctcctaagatccacgaaggcgacatcacacagatcttgaattccctactccaaggctacgacaataagctgcggcccgacattggtgtgcgaccgaccgttattgagacagatgtttatgttaactccattggccccgtagatcctatcaacatggaatataccatcgatattattttcgcccagacttggtttgatagccgactgaaattcaactccacgatgaaggtactcatgctgaactcaaacatggtgggtaagatttggatccccgataccttctttcgcaactccagaaagtcagacgcgcactggatcaccacaccaaaccgcctgctgcggatttggaacgacggcagagtactctatactctgaggctgacaatcaatgccgagtgctatttgcagctgcacaatttcccaatggacgagcactcctgtccgcttgagtttagcagctatggataccctaagaacgagatcgaatacaaatggaagaagcctagtgtggaagtggccgacccgaaatactggaggctatatcaattcgcgtttgtcggcctgaggaatagtacagagatcactcacaccatttccggggactacgtgatcatgacaatctttttcgatttgagcaggcgcatgggctacttcaccattcaaacctacatcccatgtatacttaccgttgtgttgtcttgggtgtctttttggattaataaggatgcagtcccggctagaactagtctcggcatcacgacagtgctcacaatgactacactgagcactattgcccggaaaagtttgcccaaggtgagttacgtgacggccatggatctcttcgtgagcgtttgcttcatcttcgtattcgccgcgctcatggagtatggcacattgcattacttcacatccaaccagaagggtaaaacagcgactaaagacagaaagctgaagaacaaggcctctatgaccccgggcttacaccccggctcgacactgatcccgatgaacaatatctctgtcccccaggaggatgattacgggtatcaatgtctggagggcaaagactgtgcttccttcttttgctgttttgaggattgcaggaccggaagttggcgggaaggcagaatccatattcggatcgccaaaatcgatagttatagccgtatttttttccccacagccttcgccctatttaacttggtctattgggtgggctatctgtacctgtag

SEQ ID NO: 250357 - DNA, 1260 bp, Artificial Sequence
  derived and/or modified sequence
atgggccccctgaaggccttcctgttcagccccttcctgctgcggagccaatcccggggggtccgtctggtctttcttcttctcacactccatctcgggaactgtgttgataaagcagatgacgaggacgatgaggatctgactgtaaacaagacctgggtcctggcaccaaaaattcacgaaggcgatattacccaaatcctcaacagcctcttgcagggttacgacaataaactccgtcccgacatcggcgtcaggcctactgtgattgagactgatgtgtacgtgaacagtattggacccgtggatcccatcaatatggagtatacaatcgacataatctttgcacaaacctggtttgactccaggctgaaattcaatagtaccatgaaagtattgatgctgaattccaatatggtgggcaaaatctggatccccgataccttcttccggaatagcaggaagtcggatgctcactggatcactacccccaacaggttgctgcgcatttggaacgacggaagggtgctctatactctccggctgactatcaacgccgaatgctacctacagctccacaacttccccatggacgaacactcatgtcctctggaattcagctcatacggatatcccaagaacgaaatcgaatataagtggaagaagccatcggttgaagtggcagaccccaaatactggcgcctataccaattcgcattcgtgggtctgcggaattctactgagattacccacaccattagcggagactacgttataatgactatattctttgatctatcaagacggatgggctattttacaatccagacatatatcccatgcatccttacagtcgtgctgtcttgggtgtccttttggataaataaggacgctgtacccgctcggacctctttgggcatcaccaccgtgctgactatgacaaccctgtcaactattgcaagaaaatccctgccaaaggtgagttatgttacggccatggacctttttgtgagtgtatgcttcatcttcgtgttcgctgctttgatggagtacggcacactccactattttaccagcaatcagaaagggaaaactgctacaaaggacagaaagctcaaaaacaaggcttcaatgactccaggcctgcacccgggatcaaccctaattcctatgaacaatatcagcgtcccccaggaagatgactacggttatcaatgtctggaaggtaggaaggacacccatacccactgtcagaattag

SEQ ID NO: 250358 - DNA, 1398 bp, Artificial Sequence
  derived and/or modified sequence
atgggaccgctgaaggccttccttttctcaccgttcctgctccgcagccagtcccgcggagtgcggctggtgttcctcctcttgacattgcacttaggcaattgtgtagacaaagctgatgatgaggacgatgaggatctcaccgttaataagacatgggtattggccccaaaaatacacgagggcgatataacccagatccttaatagtctccttcagggctatgataacaagctccggccagatatcggtgtacggcctacagtgatagagaccgacgtttatgtaaattctatcggacccgtagaccctattaacatggagtacaccatcgatattatttttgcccagacatggtttgattcccggttgaagttcaactccacaatgaaggtgctgatgctcaactccaatatggtggggaaaatttggatacctgatactttctttcggaacagcaggaaatccgatgcgcattggatcacaacgcctaacagactgctccggatttggaatgacggcagggtgctatacactttgagactgaccattaatgccgaatgctatttacaactccataactttccgatggacgagcattcctgtcctctggagtttagtagttatggctatcccaaaaatgaaattgaatacaaatggaaaaagcccagtgtggaggtggctgaccctaagtactggaggctctatcagtttgcatttgtgggcctcaggaattcgactgaaattacccacacaatatccggcgactacgtgataatgacaatttttttcgacctgtcgcggagaatgggttatttcaccatacagacatatatcccgtgtatactaacagttgtgctctcttgggtgtcattctggatcaataaggacgccgtccccgctagaactagcttggggatcaccaccgtcttgacgatgaccacactttcgacaattgctcggaagtctctacctaaagtgagttatgtcactgccatggatttgtttgtcagtgtttgcttcatcttcgtctttgccgctctgatggagtacgggacactgcactattttacttctaatcagaagggaaaaactgctaccaaagaccgcaagctaaagaataaagcctccatgactccgggtcttcaccctgggtccacactcatccccatgaacaatatcagtgtgccccaagaagatgattatggttatcagtgcttggaagggaaggactgcgcttcatttttttgctgcttcgaggattgccgcacggggagctggcgggagggtaggatccatatacgtatcgcaaaaattgattcttacagtcgtatcttcttccctactgcttttgctctgttcaatctggtgtattgggttggatacctctatctgtag

SEQ ID NO: 250359 - DNA, 1260 bp, Artificial Sequence
  derived and/or modified sequence
atgggcccactgaaagcgttcttgttttctcccttcttgctgcgcagccagtctcggggtgtgaggctggtttttttgcttctgacccttcatttaggcaattgcgttgacaaagcagacgacgaggacgatgaggacttgaccgtgaacaagacttgggtcctggctccaaagattcatgaaggcgacataacccaaatcttgaatagcctgctgcagggctacgacaataaattgcgacctgatataggggtgagacctactgtgatcgaaacagatgtgtacgttaacagtattggcccagtcgatccaattaacatggaatacaccattgatatcatatttgcccagacctggtttgactcccgcctgaaattcaacagtacaatgaaagtgctcatgttgaactcaaatatggtggggaagatatggattcccgatacgtttttcagaaatagcaggaaatctgacgcccactggataacgacccctaatcgacttctccgaatctggaatgatggacgggtgttgtacactctccggctcactataaacgccgaatgctaccttcagctccataatttcccaatggacgagcattcttgccccctggaattcagtagttatggctacccaaagaatgaaatcgagtacaagtggaagaagccaagcgttgaagtcgcagaccccaaatactggaggctttaccagttcgcctttgttggtctgcgcaactccaccgagatcactcacacgatcagcggcgactatgtgataatgacgatcttttttgatctctcgaggagaatgggttactttaccattcagacctacatcccatgtattctgacagttgtgctcagctgggtgtccttttggatcaacaaagacgccgtccccgctagaacaagccttggcattacaacagttcttaccatgaccactctttccactattgcccgaaagagcctccctaaggtgtcatacgtgacagccatggatctattcgtgagcgtttgtttcatcttcgtgttcgcggcactgatggaatacggtactcttcactattttacaagcaaccaaaaaggaaaaaccgcgaccaaagaccggaaactcaagaacaaagctagcatgacacccggattgcatcccggatcaacactgattccaatgaataatatcagcgtaccccaagaggatgattatggctaccagtgtctggaaggtcgcaaagatacccacacacattgtcagaactag

SEQ ID NO: 250360 - DNA, 1398 bp, Artificial Sequence
  derived and/or modified sequence
atgggccccctgaaggccttcctgttcagccccttcctgctgagaagccagagcagaggcgtgagactggtgttcctgctgctgaccctgcacctgggcaactgcgtggacaaggccgacgacgaggacgacgaggacctgaccgtgaacaagacctgggtgctggcccccaagatccacgagggcgacatcacccagatcctgaacagcctgctgcagggctacgacaacaagctgagacccgacatcggcgtgagacccaccgtgatcgagaccgacgtgtacgtgaacagcatcggccccgtggaccccatcaacatggagtacaccatcgacatcatcttcgcccagacctggttcgacagcagactgaagttcaacagcaccatgaaggtgctgatgctgaacagcaacatggtgggcaagatctggatccccgacaccttcttcagaaacagcagaaagagcgacgcccactggatcaccacccccaacagactgctgagaatctggaacgacggcagagtgctgtacaccctgagactgaccatcaacgccgagtgctacctgcagctgcacaacttccccatggacgagcacagctgccccctggagttcagcagctacggctaccccaagaacgagatcgagtacaagtggaagaagcccagcgtggaggtggccgaccccaagtactggagactgtaccagttcgccttcgtgggcctgagaaacagcaccgagatcacccacaccatcagcggcgactacgtgatcatgaccatcttcttcgacctgagcagaagaatgggctacttcaccatccagacctacatcccctgcatcctgaccgtggtgctgagctgggtgagcttctggatcaacaaggacgccgtgcccgccagaaccagcctgggcatcaccaccgtgctgaccatgaccaccctgagcaccatcgccagaaagagcctgcccaaggtgagctacgtgaccgccatggacctgttcgtgagcgtgtgcttcatcttcgtgttcgccgccctgatggagtacggcaccctgcactacttcaccagcaaccagaagggcaagaccgccaccaaggacagaaagctgaagaacaaggccagcatgacccccggcctgcaccccggcagcaccctgatccccatgaacaacatcagcgtgccccaggaggacgactacggctaccagtgcctggagggcaaggactgcgccagcttcttctgctgcttcgaggactgcagaaccggcagctggagagagggcagaatccacatcagaatcgccaagatcgacagctacagcagaatcttcttccccaccgccttcgccctgttcaacctggtgtactgggtgggctacctgtacctgtag

SEQ ID NO: 250361 - DNA, 1260 bp, Artificial Sequence
  derived and/or modified sequence
atgggccccctgaaggccttcctgttcagccccttcctgctgagaagccagagcagaggcgtgagactggtgttcctgctgctgaccctgcacctgggcaactgcgtggacaaggccgacgacgaggacgacgaggacctgaccgtgaacaagacctgggtgctggcccccaagatccacgagggcgacatcacccagatcctgaacagcctgctgcagggctacgacaacaagctgagacccgacatcggcgtgagacccaccgtgatcgagaccgacgtgtacgtgaacagcatcggccccgtggaccccatcaacatggagtacaccatcgacatcatcttcgcccagacctggttcgacagcagactgaagttcaacagcaccatgaaggtgctgatgctgaacagcaacatggtgggcaagatctggatccccgacaccttcttcagaaacagcagaaagagcgacgcccactggatcaccacccccaacagactgctgagaatctggaacgacggcagagtgctgtacaccctgagactgaccatcaacgccgagtgctacctgcagctgcacaacttccccatggacgagcacagctgccccctggagttcagcagctacggctaccccaagaacgagatcgagtacaagtggaagaagcccagcgtggaggtggccgaccccaagtactggagactgtaccagttcgccttcgtgggcctgagaaacagcaccgagatcacccacaccatcagcggcgactacgtgatcatgaccatcttcttcgacctgagcagaagaatgggctacttcaccatccagacctacatcccctgcatcctgaccgtggtgctgagctgggtgagcttctggatcaacaaggacgccgtgcccgccagaaccagcctgggcatcaccaccgtgctgaccatgaccaccctgagcaccatcgccagaaagagcctgcccaaggtgagctacgtgaccgccatggacctgttcgtgagcgtgtgcttcatcttcgtgttcgccgccctgatggagtacggcaccctgcactacttcaccagcaaccagaagggcaagaccgccaccaaggacagaaagctgaagaacaaggccagcatgacccccggcctgcaccccggcagcaccctgatccccatgaacaacatcagcgtgccccaggaggacgactacggctaccagtgcctggagggcagaaaggacacccacacccactgccagaactag

SEQ ID NO: 250362 - protein, 496 aa, Artificial Sequence
  derived and/or modified sequence
MSVSKEYNLRRHYQTNHSKHYDQYMERMRDEKLHELKKGLRKYLLGLSDTECPEQKQVFAHPSPTQKSPVQPVEDLAGNLWEKLREKIRSFVAYSIAIDEITDINNTTQLAIFIRGVDENFDVSEELLDTVPMTGTKSGNEIFSRVEKSLKKFCIDWSKLVSVASTGTPAMVDANNGLVTKLKSRVATFCKGAELKSICCIIHPESLCAQKLKMDHVMDVVVKSVNWICSRGLNHSEFTTLLYELDSQYGSLLYYTEIKWLSRGLVLKRFFESLEEIDSFMSSRGKPLPQLSSIDWIRDLAFLVDMTMHLNALNISLQGHSQIVTQMYDLIRAFLAKLCLWETHLTRNNLAHFPTLKLASRNESDGLNYIPKIAELKTEFQKRLSDFKLYESELTLFSSPFSTKIDSVHEELQMEVIDLQCNTVLKTKYDKVGIPEFYKYLWGSYPKYKHHCAKILSMFGSTYICEQLFSIMKLSKTKYCSQLKDSQWDSVLHIAT

SEQ ID NO: 250363 - DNA, 2850 bp, Artificial Sequence
  derived and/or modified sequence
atggcacaagtggctgtctctacattgcccgtcgaggaagagtccagtagtgagacgaggatggtggtaactttcctggtgagcgccctggaaagtatgtgcaaggagctggcgaagtcaaaagccgaggtggcgtgtatcgcagtatacgagactgatgtcttcgtcgtgggtacggagcgggggtgtgcatttgtgaatgcaagaaccgatttccagaaagatttcgcgaagtactgcgttgctgaggggctatgcgaggttaagcctccttgccctgtcaacggcatgcaggtgcactccggggagacggaaatacttaggaaggccgtcgaagactacttctgtttttgttacggtaaggctcttggaactaccgtcatggtcccagtcccctacgagaagatgctccgagatcagtcagccgtggtagtccagggtctgcccgagggcgtagcctttcagcaccccgagaactacgatcttgcaacgttaaaatggattctcgaaaataaggctggcataagctttatcattaaccggccattccttggccctgagagtcagctggggggcccaggtatggtcactgatgccgaacggtcgatcgtgtctccctcagagtcatgtggccccatcaacgttaagacagaaccaatggaagatagtggcatctcactgaaggcggaggctgtatccgtaaaaaaagaatcagaggaccccaactactaccaatacaacatgcagggttctcaccccagcagtacttcaaatgaggtgatcgaaatggagctccctatggaggactctacacctttggtgccctcagaggaacccaacgaggacccagaggcagaggtgaagatcgagggaaacacgaatagctcatctgtgactaattcagccgctggggtggaggatctgaacatagtccaggtgaccgttcctgacaacgagaaggaaagactgtcctctatcgagaaaattaagcagttgagggagcaggtaaacgatctattctcccggaaatttggggaggcaattggtgtggatttccctgtgaaggtgccctatcggaaaattaccttcaaccccggctgtgtggtcatcgacgggatgccacctggagtggtgtttaaggcaccagggtacttggagatttcgtcgatgagaagaattctggaggccgccgaatttattaagttcacagtaattcggccactgccagggctcgagctgtctaatgtgggtaagcggaaaatcgaccaggaagggagagtcttccaggaaaagtgggaaagagcttatttcttcgtggaggtgcagaatatcccgacttgcctcatctgtaaacagtccatgtctgttagcaaagagtataatctgcgcagacactatcagacaaaccattccaagcattatgatcaatacatggagagaatgcgcgacgagaagctccatgagctgaaaaagggcctgcgaaagtacctcttggggctgtccgacaccgaatgcccggaacaaaaacaggttttcgcccacccttcacctacacagaagagccccgtccaacccgttgaggatctggctggaaatctgtgggaaaaactgagagagaagatcaggtcttttgttgcatatagcatcgccatcgatgagattaccgacattaacaacactacacagctagcaatcttcattagaggagtggatgagaatttcgacgtcagcgaggagttacttgacaccgtgcccatgactggaactaaatcaggcaatgagatttttagccgtgtagagaagtccctcaaaaagttctgtatagattggagtaagctcgtgtctgtggcttcaactggaacgcctgccatggtagacgcgaataatggactggtgacaaagctcaagagcagggtagccacgttttgcaagggagctgaactgaaatccatttgttgcattatacaccccgagagcctatgtgcccagaagctgaagatggatcacgtaatggacgtggtggtaaaatcagtgaattggatatgtagccgtgggctgaaccactccgaatttacaacccttctgtatgaactcgactctcagtacggctccctgctatactataccgaaatcaagtggctgagtcggggactggtgctaaaacgattctttgagagcctggaagaaatagattctttcatgagctcccgggggaagccacttcctcaattgtcatccattgactggattcgcgatcttgcctttttggtggacatgaccatgcacctcaacgcgctgaacatctcgcttcagggacactcacagatagtcacacagatgtacgacctgattcgcgcattcctggcaaagctttgcctttgggagacccacctgaccaggaataatctcgcccattttcccactctgaaactggcgagcaggaatgaatccgatggccttaattacatcccaaagatcgccgagctgaaaactgagttccaaaaacgcctctctgactttaagctgtacgagagcgagctcaccctcttctcctcccccttttccactaaaatcgattctgttcatgaggagctgcagatggaggtcatcgacctgcagtgcaataccgtgctgaagactaagtatgataaggtggggattccggaattttacaaatatctgtggggctcttatcctaagtataagcaccattgcgccaagattctgtctatgttcggaagtacctatatttgtgagcagctgtttagtatcatgaaactttcgaagacaaaatattgctcccaactgaaggactctcaatgggacagcgtcctgcatattgctacatag

SEQ ID NO: 250364 - DNA, 1491 bp, Artificial Sequence
  derived and/or modified sequence
atgtcagtctctaaagaatacaatttgcggagacattaccaaaccaaccactccaagcactatgaccagtacatggagcgcatgcgggacgaaaaactgcacgagctgaagaaaggactccggaaataccttctgggcctgtccgacactgagtgcccggaacagaagcaggtgttcgctcaccctagccccacccagaaatcgccagtacaaccagttgaagacctcgcaggaaacctttgggaaaagctgcgagagaaaattagatcttttgtggcatactctattgccatagatgagatcacagacatcaacaacaccacccagctggcaatcttcatcaggggggtcgatgagaacttcgacgtcagcgaagagttattggacactgttccgatgaccgggaccaagtctggcaatgagatcttttcccgagtggaaaagagtttaaagaagttttgcatcgattggtcgaagttggttagcgttgcaagtaccgggacgcccgctatggttgatgctaacaacggcttggttacaaaactcaaaagcagagtggctaccttttgcaagggtgccgagcttaaatctatatgctgcattatccatccagagtcactgtgcgcccagaagttgaagatggaccacgtgatggatgtcgttgtcaaatccgtcaattggatatgctcaagaggcttgaaccattctgagtttaccaccctcctgtacgaactcgactctcagtacggaagtctgttgtattacactgagatcaaatggttgagcaggggactcgtgctgaaacgatttttcgaaagtctggaagagatcgatagctttatgagttcgagagggaagcctttgccgcagctgtctagcatcgattggattcgggatctcgcatttctggtagacatgactatgcacctaaacgcacttaacatcagcttacagggccattcgcagattgtcacccagatgtacgatctcattcgagcgttcctcgccaagttgtgcttgtgggagacacatctgacgcggaacaatctggctcacttcccaactctgaaactcgcttcccgcaacgagagcgacggcctgaattacatcccaaagattgcagagcttaagacggagtttcagaaacgcctttcagacttcaaactctatgagtccgaactaactctcttctcttccccgttctccacgaagatcgacagcgtccatgaggaactgcagatggaggtgattgatctgcaatgcaatactgttttgaaaactaagtatgataaggtcggtattcctgaattttacaagtacctgtggggttcctaccccaagtataaacaccactgcgcgaaaattctctccatgttcgggtccacctatatttgtgagcagctcttttcaataatgaagctgtcaaagacaaagtactgttcccaactgaaagattctcagtgggacagtgtgttgcacatagctacctag

SEQ ID NO: 250365 - DNA, 681 bp, Artificial Sequence
  derived and/or modified sequence
atggcccaggtggcggtgtcaaccttgcccgtcgaggaagagagcagttccgagacgaggatggttgtgaccttcctcgtttccgctttggagagcatgtgcaaggaactggcgaaaagtaaggccgaagtggcatgcatcgccgtatatgaaaccgacgtgttcgtagtcggtacagaacgcgggtgtgctttcgtaaacgcgcgaaccgacttccaaaaagattttgcaaaatattgcgtggcggaagggctttgtgaagtaaagcctccttgccccgttaatggaatgcaggtacactcaggcgagaccgagatccttcgaaaggcggtcgaggactacttctgcttctgttacggcaaggcattgggcaccaccgtcatggtgcccgtgccatacgaaaagatgcttcgcgatcaatcggcagtggtggttcaggggctccccgagggagtggccttccagcaccctgaaaactacgatcttgccacactgaagtggatcttggaaaataaagccgggatctcttttataattaacaggccgtttctgggccccgaaagtcagctcggtgggcctggtatggtgacagacgcagagcgcagtatcgtctctcctagtgaacgacacttcaccgagagtcggtcgtgcctgtctcaggagagaatccgtcgctcctag

SEQ ID NO: 250366 - DNA, 681 bp, Artificial Sequence
  derived and/or modified sequence
atggcccaggtcgcggtttctacactccctgtggaggaagagagtagttcagaaacgcgtatggtggtgacattcctcgtgtctgctctagagagtatgtgtaaggaactggctaaatctaaagccgaggtggcatgcattgccgtctatgaaacagacgtgttcgtcgtcggcacagagagaggatgcgcctttgtaaacgcccgaaccgactttcagaaggacttcgccaaatattgtgtcgccgagggcctttgtgaagtcaaaccaccctgtccagtgaatggtatgcaagtgcattctggggagaccgaaattcttaggaaggctgtagaagattacttttgtttctgttacggaaaagcgctcggcacaacagtgatggttccagttccatacgagaagatgctccgagaccaatctgccgtggtggttcagggactccccgaaggcgtggcatttcaacacccggaaaattatgatctggccaccctcaaatggatcctagagaacaaggccggcatctccttcattatcaaccggcccttcctggggcctgagtcacagctcggcgggcccgggatggtgaccgacgccgaacgcagcatcgtttccccgtcggaaagacatttcactgagagccgctcctgcttaagtcaggagaggattcgtcgttcatag

SEQ ID NO: 250367 - DNA, 2850 bp, Artificial Sequence
  derived and/or modified sequence
atggcccaggtggccgtgtccaccctgcctgtggaggaggagagcagcagcgagaccaggatggtggtgaccttcctggtgtctgccctggagagcatgtgcaaggagctggccaagagcaaggccgaggtggcctgcatcgctgtgtatgaaacagatgtgtttgtggtgggcacagagcggggctgtgcctttgtgaatgccaggacagacttccagaaggactttgccaagtactgtgtggccgagggcctgtgtgaggtgaagccaccctgccctgtgaatggcatgcaggtgcacagcggggagacagagatcctgaggaaggctgtggaggactacttctgcttctgctacggcaaggccctgggcaccaccgtgatggtgcctgtgccctatgagaagatgctgcgggaccagagcgctgtggtggtgcagggcctgcctgagggcgtggccttccagcaccctgagaactatgacctggccaccctgaagtggatcctggagaacaaggccggcatctccttcatcatcaaccggcccttcctgggccctgagagccagctgggcggccctggcatggtgacagatgctgagaggagcatcgtgagccccagcgagagctgtggccccatcaacgtgaagacagagcccatggaggacagcggcatcagcctgaaggccgaggccgtgtctgtgaagaaggagagcgaggaccccaactactaccagtacaacatgcagggcagccaccccagcagcaccagcaatgaggtgattgagatggagctgcccatggaggacagcacccccctggtgcccagcgaggagcccaatgaagatcctgaggccgaggtgaagattgagggcaacaccaacagcagctctgtgaccaacagcgctgctggggtggaggacctgaacatcgtgcaggtgacagtgcctgacaatgagaaggagcggctgagcagcattgagaagatcaagcagctgcgggagcaggtgaatgacctcttcagcaggaagtttggagaggccatcggcgtggacttccctgtgaaggtgccctacaggaagatcaccttcaaccctggctgtgtggtgattgatggcatgcctcctggggtggtgttcaaggcccctggctacctggagatcagctccatgaggcgcatcctggaggccgctgagttcatcaagttcaccgtcatccggcccctgcccggcctggagctgagcaatgtgggcaagaggaagattgaccaggagggccgggtcttccaggagaagtgggagcgggcctacttctttgtggaggtgcagaacatccccacctgcctgatctgcaagcagagcatgtctgtgtccaaggagtacaacctgcggcggcactaccagaccaaccacagcaagcactatgaccagtacatggagaggatgagagatgagaagctgcacgagctgaagaagggcctgaggaagtacctgctgggcctgagtgacacagagtgcccagagcagaagcaggtgtttgcccaccccagccccacccagaagagccctgtgcagcctgtggaggacctggccggcaacctgtgggagaagctgcgggagaagatccgcagctttgtggcctacagcatcgccattgatgagatcacagacatcaacaacaccacccagctggccatcttcatccggggcgtggatgagaactttgatgtgtctgaggagctgctggacacagtgcccatgacaggcaccaagtctggaaatgagatcttcagccgggtggagaagagcctgaagaagttctgcatcgactggagcaagctggtgtctgtggccagcacaggcaccccagccatggtggatgccaacaacggcctggtgaccaagctgaagagccgggtggccaccttctgcaagggagctgagctgaagagcatctgctgcatcatccaccctgagagcctgtgtgcccagaagctgaagatggaccacgtgatggatgtggtggtgaagtctgtgaactggatctgcagccggggcctgaaccacagcgagttcaccaccctgctgtatgagctggacagccagtatggcagcctgctgtactacacagagatcaagtggctgagccggggcctggtgctgaagcgcttctttgagagcctggaggagattgacagcttcatgagcagccggggcaagcccctgccccagctgagcagcattgactggatccgggacctggccttcctggtggacatgaccatgcacctgaatgccctgaacatcagcctgcagggccacagccagatcgtgacccagatgtatgacctgatccgggccttcctggccaagctgtgcctgtgggagacccacctgaccaggaacaacctggcccacttccccaccctgaagctggccagcagaaatgaaagtgatggcctgaactacatccccaagattgctgagctgaagacagagttccagaagaggctgagtgacttcaagctgtatgaaagtgagctgaccctcttcagcagccccttcagcaccaagattgacagcgtgcatgaggagctgcagatggaggtgattgacctgcagtgcaacacagtgctgaagaccaagtatgacaaggtgggcatccctgagttctacaagtacctgtggggcagctaccccaagtacaagcaccactgtgccaagatcctgtccatgtttggcagcacctacatctgtgagcagctgttcagcatcatgaagctgagcaagaccaagtactgcagccagctgaaggacagccagtgggacagcgtgctgcacatcgccacctag

SEQ ID NO: 250368 - DNA, 1491 bp, Artificial Sequence
  derived and/or modified sequence
atgtctgtgtccaaggagtacaacctgcggcggcactaccagaccaaccacagcaagcactatgaccagtacatggagaggatgagagatgagaagctgcacgagctgaagaagggcctgaggaagtacctgctgggcctgagtgacacagaatgtcctgagcagaagcaggtgtttgcccaccccagccccacccagaagagccctgtgcagcctgtggaggacctggccggcaacctgtgggagaagctgcgggagaagatccgcagctttgtggcctacagcatcgccattgatgagatcacagacatcaacaacaccacccagctggccatcttcatccggggcgtggatgaaaattttgatgtgtctgaggagctgctggacacagtgcccatgacaggcaccaagtctggaaatgagatcttcagccgggtggagaagagcctgaagaagttctgcatcgactggagcaagctggtgtctgtggccagcacaggcaccccagccatggtggatgccaacaacggcctggtgaccaagctgaagagccgggtggccaccttctgcaagggagctgagctgaagagcatctgctgcatcatccaccctgagagcctgtgtgcccagaagctgaagatggaccacgtgatggatgtggtggtgaagtctgtgaactggatctgcagccggggcctgaaccacagcgagttcaccaccctgctgtatgagctggacagccagtatggcagcctgctgtactacacagagatcaagtggctgagccggggcctggtgctgaagcgcttctttgagagcctggaggagattgacagcttcatgagcagccggggcaagcccctgccccagctgagcagcattgactggatccgggacctggccttcctggtggacatgaccatgcacctgaatgccctgaacatcagcctgcagggccacagccagatcgtgacccagatgtatgacctgatccgggccttcctggccaagctgtgcctgtgggagacccacctgaccaggaacaacctggcccacttccccaccctgaagctggccagcagaaatgaaagtgatggcctgaactacatccccaagattgctgagctgaagacagagttccagaagaggctgagtgacttcaagctgtatgagagcgagctgaccctcttcagcagccccttcagcaccaagattgattctgtgcatgaggagctgcagatggaggtgattgacctgcagtgcaacacagtgctgaagaccaagtatgacaaggtgggcatccctgagttctacaagtacctgtggggcagctaccccaagtacaagcaccactgtgccaagatcctgtccatgtttggcagcacctacatctgtgagcagctgttcagcatcatgaagctgagcaagaccaagtactgcagccagctgaaggacagccagtgggacagcgtgctgcacatcgccacctag

SEQ ID NO: 250369 - DNA, 681 bp, Artificial Sequence
  derived and/or modified sequence
atggcccaggtggccgtgtccaccctgcctgtggaggaggagagcagcagcgagaccaggatggtggtgaccttcctggtgtctgccctggagagcatgtgcaaggagctggccaagagcaaggccgaggtggcctgcatcgctgtgtatgaaacagatgtgtttgtggtgggcacagagcggggctgtgcctttgtgaatgccaggacagacttccagaaggactttgccaagtactgtgtggccgagggcctgtgtgaggtgaagccaccctgccctgtgaatggcatgcaggtgcacagcggggagacagagatcctgaggaaggctgtggaggactacttctgcttctgctacggcaaggccctgggcaccaccgtgatggtgcctgtgccctatgagaagatgctgcgggaccagagcgctgtggtggtgcagggcctgcctgagggcgtggccttccagcaccctgagaactatgacctggccaccctgaagtggatcctggagaacaaggccggcatctccttcatcatcaaccggcccttcctgggccctgagagccagctgggcggccctggcatggtgacagatgctgagaggagcatcgtgagccccagcgagcggcacttcacagagagccgcagctgcctgagccaggagcgcatccgccgctcctag

SEQ ID NO: 250370 - DNA, 2850 bp, Artificial Sequence
  derived and/or modified sequence
atggcccaggtggccgtgagcaccctgcccgtggaggaggagagcagcagcgaaacgcgcatggtggttaccttcctggtcagcgctctagaatccatgtgcaaggaactcgctaaaagcaaggccgaagtggcgtgcatcgcggtgtatgagacagatgtgttcgtggtcgggaccgagcgcggttgtgcttttgtgaacgctcggactgattttcagaaagactttgccaaatactgcgtggcagaagggttatgtgaagtgaagcccccttgccctgtgaacgggatgcaggtgcatagcggcgaaacggagatcctgcgcaaagccgtcgaggattatttctgcttttgctacggcaaagctcttggcactactgtcatggtgccagtgccttacgagaaaatgcttcgtgatcagagcgctgtggtcgttcagggcctgccggagggcgtggcttttcagcatccggaaaactatgaccttgccaccctgaaatggattcttgaaaacaaggcgggcataagctttatcatcaatcgacccttcctcggcccagagtcacagttagggggtccaggcatggtgacagacgctgagcgctctattgtgagcccctcagaaagttgcggtcctattaacgtcaagacagagcccatggaagattctgggatctccctgaaggcagaggccgtctccgtgaagaaagagagtgaggaccctaactactaccagtataacatgcaggggtcccatccttcctcgacgtcgaacgaagtgatcgagatggagctacctatggaagattcaaccccacttgttccctcagaagaacctaacgaggacccagaggcagaggtgaagatcgaaggcaatacaaactcatcttcggtgacgaactcagccgcaggcgtggaggacctcaacatcgtacaggtgaccgtgccagataacgaaaaggagcggctgagctccattgagaagattaaacagctccgagagcaagttaatgatctgttctctcggaaattcggagaagccataggcgtcgatttccctgttaaggttccgtacaggaagataacgttcaaccccggatgcgtggtaattgacggcatgccacctggagtggtgttcaaggcacccgggtatctagagattagttcaatgcggaggatcctcgaagctgcagagtttattaaattcacagttatacgtccactgcctgggttagagctgagcaatgtgggaaaaaggaagatagaccaggaaggcagggtgttccaggaaaagtgggagcgggcatatttcttcgtagaggtgcaaaacattcctacctgcctgatttgtaagcagagtatgagcgtttcaaaagaatacaatctgcggcggcattatcaaactaaccattcaaaacactacgaccagtacatggagcgcatgcgcgacgagaagctgcacgaactcaagaaggggctgcggaaatacctattggggttgtctgatactgagtgtcctgaacagaaacaggtgtttgcccatccttcccctacgcagaaatcccccgtccagcccgtcgaggatctggccgggaacttgtgggagaaacttcgggaaaaaattcgctcattcgtcgcttattcgatcgcgatcgatgagattactgatattaacaatacaacccagttggcgatatttataagaggcgtagacgaaaattttgacgtgtctgaggaactgctggacactgtgccgatgacaggaaccaaatctggcaatgaaatattttcacgggtagagaagtctctgaaaaaattttgtatcgattggagcaaacttgtgagcgtggcatcaactggaacacccgcaatggtggacgcaaataatggcctggtgaccaagctgaagtcccgtgtggcaaccttttgcaaaggcgcggagcttaagagcatttgttgtattatccatcccgagtccctgtgcgctcaaaagttaaaaatggatcacgttatggacgtggtcgttaagtcagtaaattggatctgctctcgtggcttgaatcatagcgagtttaccaccctcttgtacgaactggacagccaatacggcagtttgctgtattacacagaaatcaaatggctgtcccggggcctggtgctgaagcgattttttgagagtctcgaagaaatcgactctttcatgagttcacgaggaaagcccttgcctcagttgtcgtcgatagactggatcagggatctcgcctttctagtggacatgaccatgcatctgaacgcgctcaacatcagtctccagggtcactcacagatcgtcacccagatgtatgaccttattcgggcctttcttgctaagctgtgcttatgggaaactcacctgacacggaacaacttagcccacttccccacgctgaagttagcctctcgaaatgaatcggacggattgaattatatcccaaaaatcgccgagctaaagactgagttccagaagcgtctctccgactttaagctctacgaatcagaactgaccctcttcagctcacccttctctacgaaaatcgacagcgtccatgaagagctacagatggaagtgatcgatctacagtgcaatactgtgctcaaaaccaaatacgacaaagtgggaataccggaattctacaagtacttgtggggctcttaccccaaatataaacatcattgtgccaagatactgtcaatgttcggtagtacatacatctgtgagcaattattctctattatgaagctgtccaaaaccaaatactgctcacagttgaaagacagtcaatgggacagcgtgctacacatcgctacatag

SEQ ID NO: 250371 - DNA, 1491 bp, Artificial Sequence
  derived and/or modified sequence
atgagcgtgagcaaggagtacaacctgcggcggcactaccagaccaaccatagtaaacattacgatcagtatatggaacgcatgagagatgagaaactgcatgagttgaaaaagggtctaagaaagtaccttttagggctctccgacaccgagtgtcccgaacagaagcaggtattcgcgcacccatcaccaacacaaaagtccccagtccagcctgtggaggacttagctggcaatctgtgggagaagctgcgcgaaaaaatacgctcgttcgtcgcctacagcattgccatcgatgaaataaccgacattaataatacgacgcagctggccatttttattcgaggagtggacgagaacttcgacgtcagcgaagaactccttgacaccgtccctatgaccgggaccaaaagtggaaacgagatctttagcagggttgagaagagtctaaaaaaattttgtatagattggagcaagctcgtgtctgtggcctcaactggcaccccagccatggttgacgctaacaacgggttagtcaccaaactgaagtcccgcgtggcaacattctgcaagggggctgagctgaagagtatttgttgtataattcaccctgagagcctttgcgctcagaaacttaaaatggatcacgttatggatgtggtggtcaaaagcgttaactggatctgctcccgggggctcaatcactctgagtttaccactctgctgtacgaactggattctcagtacgggtcactgctttactataccgagattaaatggttaagtcgaggattggtcctgaagaggttcttcgagtctctcgaagaaatcgattcattcatgagctcccggggaaagccactgccccagctgtcctctatcgactggattcgggacctcgcctttctcgtggatatgactatgcatctcaacgccctgaacatttccttacaaggccacagtcaaatcgttactcagatgtatgatctaatccgcgccttcctggccaagctgtgtctgtgggagactcatctcacccgcaacaatcttgcccacttccccacccttaaactggcctccagaaatgagtcagacgggctgaattacattccgaagatcgcagagcttaagacagagttccagaagaggctgagcgacttcaagctctacgaaagtgagctcacactattttcatccccattttcaacgaaaatcgacagcgttcatgaggagctgcagatggaggtcatagacctacagtgtaacacagttctgaaaacaaagtatgataaggtcggaattcctgagttctataagtacctgtggggctcctaccctaagtataaacaccattgcgccaaaattcttagtatgttcggaagtacctacatctgtgaacagctgtttagcatcatgaagctcagcaagacaaagtactgcagccagcttaaggattcacagtgggattcggtactgcatatagctacctag

SEQ ID NO: 250372 - DNA, 681 bp, Artificial Sequence
  derived and/or modified sequence
atggcccaggtggccgtgagcaccctgcccgtggaggaggagagcagctccgaaacaaggatggtcgttaccttcctggtgtctgccctcgagtctatgtgcaaggaactggcaaaatctaaagccgaggtcgcatgtattgccgtgtacgagactgacgtctttgtcgttggaacggagaggggctgtgcttttgtgaacgctcgcaccgactttcagaaggattttgctaaatactgtgtcgccgaggggctatgtgaagtgaaaccgccgtgcccagtcaatgggatgcaagtccattcaggtgagaccgaaatacttaggaaggccgtagaggactatttctgtttctgttacggcaaggctcttgggacaaccgtaatggtgccagttccgtacgagaagatgctgcgggaccagagtgctgtggtggtacagggactgcctgagggggtagcatttcagcatcctgaaaattatgacctggccacgctcaaatggatcctcgagaataaggccggaatatcttttataattaataggccatttctgggaccggaatctcagctaggcggaccagggatggtgaccgatgccgagcggagtatcgtgtcgccaagtgagagacactttacagagtcaaggagctgtttaagtcaggagcggattagacgcagttag

SEQ ID NO: 250373 - DNA, 681 bp, Artificial Sequence
  derived and/or modified sequence
atggcccaggtggccgtgagcaccctgcccgtggaggaggagagctctagtgagacacgcatggtggttacctttctcgtaagcgccttagaatctatgtgcaaagagttggccaagagcaaagcggaagtggcctgtatagcagtttatgagacagatgtcttcgtggttggtacagagaggggatgtgccttcgtgaatgctcgaacagactttcaaaaagatttcgcaaagtactgtgttgccgaggggctctgcgaggttaagcctccatgcccagtcaatggaatgcaagtgcattccggcgagaccgaaattctccgcaaggcagttgaggactatttttgtttctgttacggaaaggctctcggtactacggtgatggtaccagtgccttatgagaaaatgctccgtgaccagagcgccgttgttgtgcaggggctacccgagggggttgcgttccagcatccggagaactatgatctggccacactcaagtggatcctggaaaacaaagctggaatttcttttatcattaacaggcctttcctgggacccgaaagccaattgggagggcccggtatggtcaccgacgccgagagatcaattgtgtccccatccgaaaggcatttcactgagtcgagaagctgcctgagccaggaaaggatcagacggtcttag

SEQ ID NO: 250374 - DNA, 2850 bp, Artificial Sequence
  derived and/or modified sequence
atggctcaggttgccgtatctactctcccagttgaagaagaatcatcttctgagacccgaatggtcgtcaccttcctggttagtgctctcgagtccatgtgcaaggagttagccaagtctaaagcagaggtggcatgtatcgcagtctatgagaccgacgtattcgttgtgggcaccgagcgaggttgcgcatttgtgaatgcccgaaccgatttccagaaggacttcgcgaaatactgtgtggctgagggtctctgtgaagtgaagccaccttgtcctgtcaacggcatgcaggttcactcaggcgagacagagatactacgaaaggcagtggaggattacttttgcttctgctatggcaaagccctgggcacaactgttatggtaccagttccatacgagaaaatgttgagagaccaaagcgcagtggttgtgcaaggactgcccgagggcgtggcgttccagcacccagagaattacgacctcgccactctgaagtggatccttgagaataaagccggtatcagttttatcattaaccgtccgtttctcggcccagaaagccaattgggtgggcctggaatggtcacagatgctgagaggtcaatcgtctccccgagtgaaagttgcgggccaattaatgttaaaaccgaaccaatggaggattccggcatctcactgaaggctgaagctgtttctgtgaaaaaggagagtgaggacccaaattactatcagtataatatgcaggggagccatcctagttccaccagcaacgaggtcatcgagatggagttgcccatggaggatagtacccccctagtcccctctgaggagcccaatgaagatcccgaagccgaggtgaagattgaagggaatactaatagcagctctgtcactaacagtgccgcaggagttgaggatttaaacattgtccaagtcaccgtcccagataacgaaaaggagaggctctcctccatagaaaagattaaacaactaagggagcaggtaaatgacctgttctctcgcaagttcggtgaggctattggcgtcgattttcccgtgaaggtcccataccgtaaaatcacgtttaaccctggttgcgtggtgattgacggcatgccacccggtgtggttttcaaagcgcctggatatttggagattagctccatgcggaggattctagaggctgccgagttcatcaaattcactgttattcgcccattgccaggactggaactgagcaacgttgggaagaggaaaattgaccaggaagggcgagttttccaggaaaagtgggagagagcgtactttttcgtagaggtacaaaatatcccgacctgcctgatctgtaaacagtctatgagcgtctcaaaggaatacaatttgcgccgacactaccagactaatcatagcaagcactacgaccagtatatggaaaggatgcgagacgaaaagctccacgaattaaaaaaggggctgcgaaagtaccttttgggactgagtgataccgaatgccccgaacaaaagcaggttttcgcacacccctctcctacccagaagagtccagtgcaaccagtggaagacctggcgggaaacctgtgggaaaagctaagggagaagatacgctcattcgttgcctacagcatcgctatcgacgagataaccgatataaacaacacaacccaactggccatctttatcagaggggtcgacgagaatttcgacgtgagtgaagaactgctagacaccgtccccatgacaggaaccaaatctggtaacgagatattttccagagtggaaaagagtcttaagaagttttgtatagattggtccaagctcgtgtctgtggcatctaccggaacccccgctatggtcgacgcaaacaacggtcttgtgacgaaactgaaaagtagggttgctaccttttgcaagggggcagaacttaagagcatatgctgcatcatccacccagaatccctgtgcgcgcagaaactcaaaatggatcacgtcatggacgtggtagtcaaaagcgtgaactggatttgtagccgaggacttaaccactccgaattcactacgctcttatatgaattggactcgcaatatggaagtttactttactatactgagattaagtggctctcacgtggtcttgtcttaaagaggttctttgaatcattggaagagatcgactcctttatgagctcacgaggtaaacctttgcctcagctctcctctatcgattggatccgagatctagcgtttttagtggatatgaccatgcacttaaatgcgctgaacatatctctgcagggtcatagccaaatcgtcacccagatgtatgacctaattcgggcttttctggcaaagttgtgtctgtgggagacacatctgacaaggaacaacctggcccattttcctaccctgaagctggcgtccagaaatgagtcagatggcctaaattacatccccaaaattgccgaactgaagaccgaatttcagaaaagactgtcagattttaagttatacgagtccgagctgacactcttctcctcaccattcagcaccaaaatagatagcgtacacgaagaattgcagatggaagtgatagatctgcagtgcaacacagtgttgaaaaccaaatacgataaagtcgggattccggagttctataagtacctttggggctcttatccgaaatataagcaccattgcgctaaaatcctgagtatgttcggaagcacttatatttgtgaacaactcttttctattatgaagctgtccaaaaccaaatactgctctcagctaaaagattcgcaatgggattccgttttgcacattgcaacatag

SEQ ID NO: 250375 - DNA, 1491 bp, Artificial Sequence
  derived and/or modified sequence
atgtctgtgtctaaagagtacaacttacgaaggcactatcagacaaaccacagtaaacactacgatcaatatatggagcgaatgcgggatgaaaaactccacgagctgaagaagggattaaggaaatatctgctgggcctatctgacaccgagtgtcctgagcagaagcaagtgtttgcacacccctcacccacccaaaagtcaccggtgcagcctgtggaggatctggctgggaatctgtgggagaagttgcgcgagaagatccgaagctttgttgcatattccatcgctatcgatgagatcaccgatatcaacaacaccacacagcttgccatttttatccgcggtgtggatgaaaactttgatgtttccgaagagctgcttgacaccgtccccatgacaggaacaaagtcgggaaacgagatcttctccagggtcgagaagagtctgaagaaattttgcatagactggagcaagctggtatctgtggcttcaacgggcacaccggctatggtcgatgctaacaatggactggttacaaagctgaagtctagagtggcaaccttctgcaagggggcagaacttaagtcgatctgttgtatcattcaccccgaatccctttgtgctcagaaattgaagatggaccacgtgatggatgtcgttgtcaagtctgtgaactggatatgctccagaggcctgaaccatagcgagtttacaaccctcctgtacgagctcgactcccaatatggcagtctcctatattataccgaaatcaagtggctgtctagagggctggtactgaagaggttctttgaatccctggaggaaatcgattcctttatgagctcaaggggtaagccactgccacagctcagcagtatcgattggatcagagacctggctttcttagtcgacatgaccatgcatctaaacgcactcaacattagcctgcagggccactcacagatagtgactcaaatgtacgacctgatccgagcctttctcgcaaagctctgcctgtgggagacacatctcacacgaaacaacctggcacacttccccacgctaaaactggcctccaggaatgagtccgatggtctcaactatatcccaaaaatcgccgaattgaaaacagagtttcaaaaaagactgagtgacttcaaactgtacgagtcagagctgactctcttcagctccccgttctcaaccaaaattgattccgtgcacgaggaactgcagatggaggtgatcgatttgcagtgcaacacagtgctcaaaaccaaatatgacaaagttgggatccctgaattttacaagtacctctggggctcatatcccaaatataaacaccactgtgctaaaatactgagcatgttcggatcaacgtacatttgcgagcagctgttcagcattatgaagctgtctaaaacgaagtattgttcccagctgaaagatagccagtgggattccgtgctgcacatcgccacttag

SEQ ID NO: 250376 - DNA, 681 bp, Artificial Sequence
  derived and/or modified sequence
atggctcaggtggcggtctctaccctgcccgtcgaggaggagtcaagttcagaaactcgaatggtggttacctttctggtgtccgccttggagtccatgtgcaaagagctcgccaagagcaaagcggaggtcgcctgcatcgccgtctacgagaccgatgtcttcgtcgttgggaccgaacgaggatgcgcgtttgtgaatgcgcgaactgacttccagaaggacttcgccaagtattgtgtggccgagggcctctgcgaggtcaaacccccatgcccagttaacgggatgcaggtgcactctggcgagaccgagatccttcgcaaggcagtcgaggattatttctgtttttgctatgggaaggctctgggaacgacagtaatggtcccagtcccttatgagaagatgcttcgagatcagagcgcagtggtagtgcagggccttcctgagggtgtggccttccagcatccggagaattatgatttggcaaccctcaagtggatcctagaaaacaaggcaggcatttctttcattatcaatagaccgttcctgggcccagagtctcagctcgggggaccaggcatggtaacagacgcagaacgcagtatcgttagccccagtgagagacactttactgaatcacgctcatgcctctcccaggagaggattcgtcgatcatag

SEQ ID NO: 250377 - DNA, 681 bp, Artificial Sequence
  derived and/or modified sequence
atggcacaggtggcagtctccacgctcccagtggaagaagagtcgtcctcagaaaccagaatggtcgtgacatttctggtgagcgctctcgaatcaatgtgtaaagaactggccaaaagcaaagcagaggtggcctgcattgcagtctacgaaactgatgtgtttgttgttggaacagagcggggatgcgccttcgtcaatgctaggacagatttccagaaagattttgccaaatattgcgttgctgagggcctatgcgaggttaaaccgccatgtccagttaacggtatgcaggtacattctggagagactgaaatcctaaggaaggcggttgaggattatttttgtttttgttacggtaaggccctgggtacaacggtcatggttccagttccctatgagaagatgttacgtgatcaatcagccgtagtggtgcaggggttaccggaaggagtggcattccagcatcctgagaattatgacttagctaccctaaagtggatcctggagaataaagccggtatttcatttatcattaatcgccctttcctgggcccagagtcccagcttgggggacccggaatggttaccgatgccgaaaggagcatagtctctccaagcgaaaggcatttcaccgagtctcggtcgtgcctctcacaggaacggatccggagatcttag

SEQ ID NO: 250378 - DNA, 2242 bp, Artificial Sequence
  derived and/or modified sequence
agtgactgttccagataatgagaaggaaagattatcaagcattgaaaagattaaacagctaagagaacaagttaatgacctctttagccgaaaatttggccgcttccagggcttgagctcagtaatgtgggaaaacgcaagatagaccaggagggccgtgtgtttcaagaaaagtgggagagagcgtatttcttcgtggaagtacagaatattccaacatgtctcatatgcaaacaaagcatgtctgtgtccaaagaatataacctaagacgccactatcaaaccaatcacagcaagcattatgaccagtatatggaaagaatgcgtgacgagaagcttcacgagctgaaaaaagggctcaggaagtatctcttaggcttgtcagacaccgagtgtcccgagcaaaaacaagtgtttgcacacccaagtccaacccagaaatcccccgtgcagcctgtagaggacctagctgggaacttatgggagaagttacgtgaaaaaatcaggtcttttgtggcatattctatcgcaatcgatgagatcacggatataaataataccacccagttggccatattcatccgtggtgtcgatgagaatttcgatgtgtccgaagaacttctggacacggtgcccatgacgggtacaaaatctggcaacgagatcttttcgcgtgttgagaagagcctgaaaaagttctgtatcgactggtcgaaattagtaagcgtggcctccactggcaccccagcgatggtggatgccaataacgggcttgtcacaaaactgaagtccagggtggcgacgttctgcaagggtgcggaactgaagtccatctgttgtataattcatccggaatcactctgtgctcagaagttgaagatggaccacgtcatggacgtggtagtgaagtccgtgaactggatatgctcccggggactgaaccacagtgagttcacaaccttgctctatgagctggacagccagtatggtagcctcctgtactacacggagattaagtggctcagtcgcgggctcgtgctaaagagatttttcgaatccttggaagaaatcgactccttcatgtcatccagagggaaacccctgcctcaactgagctccatagattggatccgagacctggccttcttggttgacatgacgatgcatctgaacgctttgaacatctctctccaaggacactcccaaatcgtcacgcagatgtatgacctgatccgggcgttcctagcaaaactgtgcctctgggagactcatttgacgaggaataatctggcccactttcccaccctgaaattggcttccagaaatgaaagcgatggcctgaactacattcccaaaatcgcggaactcaagaccgaattccagaaaaggctgtctgatttcaaactctacgaaagcgaactgactctgttcagctccccgttctccacgaagatcgacagtgtgcacgaggagctccagatggaggttatcgacctgcaatgcaacacggtcctgaagacgaaatacgacaaggtgggaataccagaattctacaagtacctctggggtagctacccgaaatacaagcaccattgcgcaaagattctttccatgttcgggagcacctacatctgcgaacagctgttctccattatgaaactgagcaaaacaaaatactgctcccagttaaaggattcccagtgggattctgtactccacatcgcaacgtgatggagagaaaactcctggcagggccctatggtgggaaaggctggagtcttctagtcccaagggattgggagatgacaaaatgaatttttttttcttttttgagatggagtcttgctctgtcgcccaggttggagtgcagtggcgtgatctcggcttactgcaacttccagctcctgggttcgaacgattctcctgcctcagcctcccgagcagctgggactacaggcgtgcgccaccatgcctggctaatttttgtattagtagagatgaggtttcaccatgttggccaggctggtctccaactcctgacctcaggtgatccacctgcctcgacctcacaaagtgctgggattacaggcatgaaccactgtgcccagctgacaaaatgagttcttaaacttttttttttttcagttttttttccactttgaatcagaaatataatctgcagtatcatacttgtttatattacattgtgtgcctcactattcattaaaaatcaagaaagttt

SEQ ID NO: 250379 - DNA, 2850 bp, Artificial Sequence
  derived and/or modified sequence
atggcccaggtggccgtgagcaccctgcccgtggaggaggagagcagcagcgagaccagaatggtggtgaccttcctggtgagcgccctggagagcatgtgcaaggagctggccaagagcaaggccgaggtggcctgcatcgccgtgtacgagaccgacgtgttcgtggtgggcaccgagagaggctgcgccttcgtgaacgccagaaccgacttccagaaggacttcgccaagtactgcgtggccgagggcctgtgcgaggtgaagcccccctgccccgtgaacggcatgcaggtgcacagcggcgagaccgagatcctgagaaaggccgtggaggactacttctgcttctgctacggcaaggccctgggcaccaccgtgatggtgcccgtgccctacgagaagatgctgagagaccagagcgccgtggtggtgcagggcctgcccgagggcgtggccttccagcaccccgagaactacgacctggccaccctgaagtggatcctggagaacaaggccggcatcagcttcatcatcaacagacccttcctgggccccgagagccagctgggcggccccggcatggtgaccgacgccgagagaagcatcgtgagccccagcgagagctgcggccccatcaacgtgaagaccgagcccatggaggacagcggcatcagcctgaaggccgaggccgtgagcgtgaagaaggagagcgaggaccccaactactaccagtacaacatgcagggcagccaccccagcagcaccagcaacgaggtgatcgagatggagctgcccatggaggacagcacccccctggtgcccagcgaggagcccaacgaggaccccgaggccgaggtgaagatcgagggcaacaccaacagcagcagcgtgaccaacagcgccgccggcgtggaggacctgaacatcgtgcaggtgaccgtgcccgacaacgagaaggagagactgagcagcatcgagaagatcaagcagctgagagagcaggtgaacgacctgttcagcagaaagttcggcgaggccatcggcgtggacttccccgtgaaggtgccctacagaaagatcaccttcaaccccggctgcgtggtgatcgacggcatgccccccggcgtggtgttcaaggcccccggctacctggagatcagcagcatgagaagaatcctggaggccgccgagttcatcaagttcaccgtgatcagacccctgcccggcctggagctgagcaacgtgggcaagagaaagatcgaccaggagggcagagtgttccaggagaagtgggagagagcctacttcttcgtggaggtgcagaacatccccacctgcctgatctgcaagcagagcatgagcgtgagcaaggagtacaacctgagaagacactaccagaccaaccacagcaagcactacgaccagtacatggagagaatgagagacgagaagctgcacgagctgaagaagggcctgagaaagtacctgctgggcctgagcgacaccgagtgccccgagcagaagcaggtgttcgcccaccccagccccacccagaagagccccgtgcagcccgtggaggacctggccggcaacctgtgggagaagctgagagagaagatcagaagcttcgtggcctacagcatcgccatcgacgagatcaccgacatcaacaacaccacccagctggccatcttcatcagaggcgtggacgagaacttcgacgtgagcgaggagctgctggacaccgtgcccatgaccggcaccaagagcggcaacgagatcttcagcagagtggagaagagcctgaagaagttctgcatcgactggagcaagctggtgagcgtggccagcaccggcacccccgccatggtggacgccaacaacggcctggtgaccaagctgaagagcagagtggccaccttctgcaagggcgccgagctgaagagcatctgctgcatcatccaccccgagagcctgtgcgcccagaagctgaagatggaccacgtgatggacgtggtggtgaagagcgtgaactggatctgcagcagaggcctgaaccacagcgagttcaccaccctgctgtacgagctggacagccagtacggcagcctgctgtactacaccgagatcaagtggctgagcagaggcctggtgctgaagagattcttcgagagcctggaggagatcgacagcttcatgagcagcagaggcaagcccctgccccagctgagcagcatcgactggatcagagacctggccttcctggtggacatgaccatgcacctgaacgccctgaacatcagcctgcagggccacagccagatcgtgacccagatgtacgacctgatcagagccttcctggccaagctgtgcctgtgggagacccacctgaccagaaacaacctggcccacttccccaccctgaagctggccagcagaaacgagagcgacggcctgaactacatccccaagatcgccgagctgaagaccgagttccagaagagactgagcgacttcaagctgtacgagagcgagctgaccctgttcagcagccccttcagcaccaagatcgacagcgtgcacgaggagctgcagatggaggtgatcgacctgcagtgcaacaccgtgctgaagaccaagtacgacaaggtgggcatccccgagttctacaagtacctgtggggcagctaccccaagtacaagcaccactgcgccaagatcctgagcatgttcggcagcacctacatctgcgagcagctgttcagcatcatgaagctgagcaagaccaagtactgcagccagctgaaggacagccagtgggacagcgtgctgcacatcgccacctag

SEQ ID NO: 250380 - DNA, 1491 bp, Artificial Sequence
  derived and/or modified sequence
atgagcgtgagcaaggagtacaacctgagaagacactaccagaccaaccacagcaagcactacgaccagtacatggagagaatgagagacgagaagctgcacgagctgaagaagggcctgagaaagtacctgctgggcctgagcgacaccgagtgccccgagcagaagcaggtgttcgcccaccccagccccacccagaagagccccgtgcagcccgtggaggacctggccggcaacctgtgggagaagctgagagagaagatcagaagcttcgtggcctacagcatcgccatcgacgagatcaccgacatcaacaacaccacccagctggccatcttcatcagaggcgtggacgagaacttcgacgtgagcgaggagctgctggacaccgtgcccatgaccggcaccaagagcggcaacgagatcttcagcagagtggagaagagcctgaagaagttctgcatcgactggagcaagctggtgagcgtggccagcaccggcacccccgccatggtggacgccaacaacggcctggtgaccaagctgaagagcagagtggccaccttctgcaagggcgccgagctgaagagcatctgctgcatcatccaccccgagagcctgtgcgcccagaagctgaagatggaccacgtgatggacgtggtggtgaagagcgtgaactggatctgcagcagaggcctgaaccacagcgagttcaccaccctgctgtacgagctggacagccagtacggcagcctgctgtactacaccgagatcaagtggctgagcagaggcctggtgctgaagagattcttcgagagcctggaggagatcgacagcttcatgagcagcagaggcaagcccctgccccagctgagcagcatcgactggatcagagacctggccttcctggtggacatgaccatgcacctgaacgccctgaacatcagcctgcagggccacagccagatcgtgacccagatgtacgacctgatcagagccttcctggccaagctgtgcctgtgggagacccacctgaccagaaacaacctggcccacttccccaccctgaagctggccagcagaaacgagagcgacggcctgaactacatccccaagatcgccgagctgaagaccgagttccagaagagactgagcgacttcaagctgtacgagagcgagctgaccctgttcagcagccccttcagcaccaagatcgacagcgtgcacgaggagctgcagatggaggtgatcgacctgcagtgcaacaccgtgctgaagaccaagtacgacaaggtgggcatccccgagttctacaagtacctgtggggcagctaccccaagtacaagcaccactgcgccaagatcctgagcatgttcggcagcacctacatctgcgagcagctgttcagcatcatgaagctgagcaagaccaagtactgcagccagctgaaggacagccagtgggacagcgtgctgcacatcgccacctag

SEQ ID NO: 250381 - DNA, 681 bp, Artificial Sequence
  derived and/or modified sequence
atggcccaggtggccgtgagcaccctgcccgtggaggaggagagcagcagcgagaccagaatggtggtgaccttcctggtgagcgccctggagagcatgtgcaaggagctggccaagagcaaggccgaggtggcctgcatcgccgtgtacgagaccgacgtgttcgtggtgggcaccgagagaggctgcgccttcgtgaacgccagaaccgacttccagaaggacttcgccaagtactgcgtggccgagggcctgtgcgaggtgaagcccccctgccccgtgaacggcatgcaggtgcacagcggcgagaccgagatcctgagaaaggccgtggaggactacttctgcttctgctacggcaaggccctgggcaccaccgtgatggtgcccgtgccctacgagaagatgctgagagaccagagcgccgtggtggtgcagggcctgcccgagggcgtggccttccagcaccccgagaactacgacctggccaccctgaagtggatcctggagaacaaggccggcatcagcttcatcatcaacagacccttcctgggccccgagagccagctgggcggccccggcatggtgaccgacgccgagagaagcatcgtgagccccagcgagagacacttcaccgagagcagaagctgcctgagccaggagagaatcagaagaagctag

SEQ ID NO: 250382 - protein, 436 aa, Artificial Sequence
  derived and/or modified sequence
MPMSSLPAAILSHMTAINNVPPPPLHSIPNLKKSKHINYGQLNALCHIRGQHSRSMSNILSAHDTFMKQYPKVFLHQKPRLPKLFKQEEQRELNEGKEESQHQQPDDSNNIAVHVQRAHGGHILYRPKRATEKFEEFLAILKKLPIHRTPYEHKTVWKFLKTIPDLTFQLNDKHLKTLSKTVFSETWLKGSTVVANDGFYVILKGLARPQTNVYKNLIEGSDSPDSFISQSFHSFIWSEEFKNSTLAEMYLPSYDSMLSKWSTFGTLEVMPQNESETQMFSVVTEDDCEILKIPAKGYAKIKEEKIKLENMQKLKLIRMCPYYEEWPTLSIYELIALLKWKKFPPGHVIVESGNIISFVGYINSGCCNIYRSIIGFVKLRSNKVKRSQKLVYMGKLKEKESFGEISVLLQVPFTCTIITKKEVEMAIIEDKDLFVA

SEQ ID NO: 250383 - DNA, 1311 bp, Artificial Sequence
  derived and/or modified sequence
atgcccatgagcagcctgcccgccgccatcctgagccacatgaccgccatcaacaacgtgccccccccccccctgcacagcatccccaacctgaagaagagcaagcacatcaactacggccagctgaacgccctgtgccacatcagaggccagcacagcagaagcatgagcaacatcctgagcgcccacgacaccttcatgaagcagtaccccaaggtgttcctgcaccagaagcccagactgcccaagctgttcaagcaggaggagcagagagagctgaacgagggcaaggaggagagccagcaccagcagcccgacgacagcaacaacatcgccgtgcacgtgcagagagcccacggcggccacatcctgtacagacccaagagagccaccgagaagttcgaggagttcctggccatcctgaagaagctgcccatccacagaaccccctacgagcacaagaccgtgtggaagttcctgaagaccatccccgacctgaccttccagctgaacgacaagcacctgaagaccctgagcaagaccgtgttcagcgagacctggctgaagggcagcaccgtggtggccaacgacggcttctacgtgatcctgaagggcctggccagaccccagaccaacgtgtacaagaacctgatcgagggcagcgacagccccgacagcttcatcagccagagcttccacagcttcatctggagcgaggagttcaagaacagcaccctggccgagatgtacctgcccagctacgacagcatgctgagcaagtggagcaccttcggcaccctggaggtgatgccccagaacgagagcgagacccagatgttcagcgtggtgaccgaggacgactgcgagatcctgaagatccccgccaagggctacgccaagatcaaggaggagaagatcaagctggagaacatgcagaagctgaagctgatcagaatgtgcccctactacgaggagtggcccaccctgagcatctacgagctgatcgccctgctgaagtggaagaagttcccccccggccacgtgatcgtggagagcggcaacatcatcagcttcgtgggctacatcaacagcggctgctgcaacatctacagaagcatcatcggcttcgtgaagctgagaagcaacaaggtgaagagaagccagaagctggtgtacatgggcaagctgaaggagaaggagagcttcggcgagatcagcgtgctgctgcaggtgcccttcacctgcaccatcatcaccaagaaggaggtggagatggccatcatcgaggacaaggacctgttcgtggcctag

SEQ ID NO: 250384 - DNA, 1594 bp, Artificial Sequence
  derived and/or modified sequence
atttgcctctcaagcagcctctggtcatctatctgcctttgagccatcaagatgccgatgtcttctcttccagcagctattttgtctcacatgacagctattaacaatgtgcctcctcctccacttcacagtataccaaacttgaaaaagtctaagcacattaattatggccagttgaatgcattatgccacattagaggacaacacagccggagtatgagcaatatcttatcagctcacgatacatttatgaagcaatatcctaaagtattcctgcaccaaaaacccagacttcctaaacttttcaaacaggaggaacaaagggaactcaatgaaggcaaagaggaaagtcaacatcaacaacctgatgattctaacaatatagctgtccatgttcagagagcacatggtggccatattttatatagaccaaaaagagccacagagaaatttgaagaattcctagctatcttaaagaaattgcccattcacaggacgccatatgaacacaaaactgtgtggaagttcctgaaaacaattccagatttaacctttcagctaaatgataagcatctgaaaacacttagtaagactgtcttttccgaaacctggttgaaaggcagcacagtggttgcaaatgatggattttatgtaatactgaaaggcctagctcgacctcaaacaaacgtgtataaaaatctgattgaaggaagtgattcaccagactcgttcatatctcagagtttccacagcttcatttggagtgaagaattcaaaaactctacacttgctgagatgtacctaccttcatatgactcaatgcttagcaaatggagtacctttgggactctggaagttatgcctcagaatgaatcggaaacacagatgttctcggtggtgacagaagacgattgtgaaattcttaaaatcccagcaaagggatatgcaaagataaaggaggaaaaaataaaacttgaaaatatgcaaaagttgaaattaatccgtatgtgtccttattatgaggaatggcctactttatccatatatgagctaattgcactccttaaatggaaaaaatttcctccaggtcatgtgatagtggaaagtggaaatataatttcttttgtgggttatattaactctggatgctgtaacatttatagaagtattataggatttgtgaaactacgatcaaataaagtgaaaagatctcaaaaacttgtttatatggggaaacttaaggagaaggagtcctttggtgagattagcgtccttcttcaagttcctttcacgtgcacaatcattaccaaaaaagaagttgagatggcaatcattgaagataaggacctatttgtggcctagatctagaaacaacctcagtgaacattaattaagaaagtattgactaaataatggaataattgcattctggaatactatcaaactaccagcaatgaatttggtctattgtgactacatatcctggattccccaggaaagtcccactttcgaattgcctttcaaacacagtttttattagcagtctttcttggtttggatactaaaataaatatagttatcattgcttgattta

SEQ ID NO: 250385 - DNA, 1311 bp, Artificial Sequence
  derived and/or modified sequence
atgcctatgtctagtttgcctgccgcgattttgagccacatgacagccataaacaacgtgccaccccccccacttcactctattcccaacctgaagaagtccaagcacattaactacggtcagttgaacgccctctgccatatacgaggccaacacagccgatcaatgtcgaatatcctatcagcccatgatacgtttatgaagcaataccctaaggtgttcctgcaccagaaacccagactcccaaagttgttcaaacaggaggaacaaagagagctgaacgaaggaaaggaagaatctcagcatcagcagccggatgatagcaacaatattgccgtacacgtccagagggcccatggcggtcacatcctgtaccggccaaagagggccacagagaaattcgaggaatttctggccattctgaagaaactgcccatccaccggacgccctacgagcataagacggtgtggaaattcctcaaaaccatccccgacctgacttttcagttgaatgataaacatctgaagacgctgagtaaaaccgtcttcagcgaaacttggctgaaaggttcaacagttgtggcgaatgacggcttctatgtgatcctaaaaggcctggcccgcccccagacgaacgtgtataaaaatcttattgaaggatccgatagtccagacagtttcattagccaatcttttcacagcttcatctggtccgaagagttcaaaaattccaccctggccgaaatgtatctccccagctacgacagcatgttgagcaagtggagcaccttcggtactctggaagtgatgccacagaacgaatccgagacacagatgttctcggttgttaccgaggacgactgcgaaatcctcaagatccccgctaaagggtatgctaaaattaaggaagagaaaatcaagctcgaaaatatgcagaaactgaagttaattcggatgtgtccctactatgaagagtggcccacattgagcatttatgagctcattgccctccttaagtggaaaaaatttccccccggacacgtgattgtagagtccggtaacattatctcctttgtagggtatataaactctggctgttgcaatatttacaggtccataattggattcgtgaagctgcgcagtaataaagtgaagagaagtcaaaaactcgtgtacatggggaaactgaaggagaaagagtccttcggggagatcagcgtgttgcttcaggtcccattcacatgtaccatcattacaaagaaagaagtggaaatggcaattattgaggacaaggacctgttcgtggcatag

SEQ ID NO: 250386 - DNA, 1311 bp, Artificial Sequence
  derived and/or modified sequence
atgcccatgagcagcctgcctgctgccatcctgagccacatgacagccatcaacaacgtgcccccaccacccctgcacagcatccccaacctgaagaagagcaagcacatcaactacggccagctgaatgccctgtgccacatccggggccagcacagccgctccatgagcaacatcctgagcgcccatgacaccttcatgaagcagtaccccaaggtgttcctgcaccagaagccccggctgcccaagctgttcaagcaggaggagcagcgggagctgaatgaaggcaaggaggagagccagcaccagcagccagatgacagcaacaacattgctgtgcacgtgcagagggcccatggaggccacatcctgtaccggcccaagagggccacagagaagtttgaggagttcctggccatcctgaagaagctgcccatccacaggaccccctatgagcacaagacagtgtggaagttcctgaagaccatcccagacctgaccttccagctgaatgacaagcacctgaagaccctgagcaagacagtgttcagcgagacctggctgaagggcagcacagtggtggccaatgatggcttctacgtgatcctgaagggcctggcccggccccagaccaacgtgtacaagaacctgattgagggcagtgacagcccagacagcttcatcagccagagcttccacagcttcatctggagcgaggagttcaagaacagcaccctggccgagatgtacctgcccagctatgacagcatgctgagcaagtggagcaccttcggcaccctggaggtgatgccccagaatgaaagtgagacccagatgttttctgtggtgacagaagatgactgtgagatcctgaagatcccagccaagggctacgccaagatcaaggaggagaagatcaagctggagaacatgcagaagctgaagctgatccgcatgtgcccctactatgaggagtggcccaccctgagcatctatgagctgattgccctgctgaagtggaagaagttccccccaggccacgtgattgtggagagcggcaacatcatcagctttgtgggctacatcaacagcggctgctgcaacatctaccgcagcatcatcggctttgtgaagctgcggagcaacaaggtgaagaggagccagaagctggtgtacatgggcaagctgaaggagaaggagagctttggagagatctctgtgctgctgcaggtgcccttcacctgcaccatcatcaccaagaaggaggtggagatggccatcatcgaggacaaggacctgtttgtggcctag

SEQ ID NO: 250387 - DNA, 1311 bp, Artificial Sequence
  derived and/or modified sequence
atgcccatgagcagcctgcccgccgccatcctgagccacatgaccgccataaacaacgtaccaccgccgcccctacattctataccgaatttaaagaagagtaaacacattaactatggccagctaaatgcgctgtgccacatacgaggtcagcactctcgctctatgagcaatattctcagtgcgcacgatacgttcatgaagcagtatccgaaagtgtttctacatcagaagccacgcctacccaaactgttcaagcaggaagagcaacgcgagctgaatgagggtaaggaggagagccagcaccagcagcccgatgactccaacaacattgccgtgcacgttcagagggcacacggcggtcacattttatatagacccaaacgcgcaacagaaaagttcgaggagtttctggcaatcctcaagaagctgccaatccataggacaccgtacgagcataaaacggtctggaagttcctgaaaaccatccctgacctgacctttcaattgaacgataaacacctgaagacactgtccaaaaccgttttttcagaaacctggctcaagggctctactgtggtggcgaacgacggtttttacgtcatcctcaagggactcgctaggccccaaactaacgtatacaagaacctgatcgaggggtctgatagcccggattcctttatctcccagtcctttcactccttcatctggtccgaggaatttaagaattccactctggctgaaatgtacttgccctcttacgactccatgctcagcaaatggtccacgtttggcactctcgaggtgatgcctcaaaacgaatcagaaacccagatgttctccgtggtaacggaagatgattgcgagatcctgaaaattccagctaagggttatgcaaaaattaaggaagagaaaattaaattggagaatatgcagaagcttaaacttattagaatgtgcccttactacgaagagtggcccactctgtccatctatgagctaatcgccctcctcaaatggaaaaagttccctccgggccatgtaattgttgagtctggcaacatcattagttttgtcggctatattaacagtggctgctgcaatatttacagatccatcattggttttgtcaagctgcgaagcaataaggtgaaacgctctcagaagttggtgtacatgggcaaattgaaagagaaagaatccttcggggagatctcggtgctgctccaggtgccattcacctgtaccataataacaaagaaagaagtggaaatggctataatcgaggacaaggacttgtttgttgcgtag

SEQ ID NO: 250388 - DNA, 1311 bp, Artificial Sequence
  derived and/or modified sequence
atgcccatgagctcactgcctgccgcaattctatctcatatgaccgctatcaataatgtacccccaccccctctccactccataccgaacctgaagaagtcaaaacatattaactatgggcaacttaatgcactttgtcacatccgtggtcaacacagtcggtctatgtccaacatcctgtccgcccatgataccttcatgaagcagtatcctaaggttttcctccaccaaaaaccacgcctacctaaacttttcaagcaggaagagcagcgagaactgaacgagggaaaggaagaaagtcagcatcagcaacccgacgattctaataacatcgcagtccacgtgcagagagcccacggcggtcacatactttaccggccaaagagagcgacagagaaattcgaagagttcctcgcaattctgaaaaaactgcccatccatcgaactccgtacgagcacaagacggtctggaagtttctgaaaacaatcccagatctgacctttcagttaaatgataaacacttaaagactttgtccaagacagtctttagtgaaacttggttgaaagggtcaaccgtggtggccaatgacggtttttatgtgatcttaaaggggctggccaggccccagaccaatgtgtacaagaatctcatcgaggggtcggatagtcctgacagctttatcagccagtcctttcactcttttatctggtcagaagagttcaaaaattctacccttgcagaaatgtacctcccctcgtatgattccatgctgtcaaagtggagcaccttcggaacactggaagtaatgcctcaaaatgaatccgaaactcagatgttcagtgtcgtgacagaagatgattgtgaaatcctgaaaatccctgcgaaggggtacgcgaaaattaaggaggaaaagatcaagctggagaacatgcaaaagctgaaactcatacgaatgtgtccttactacgaggagtggcctaccctttcaatctacgaacttatcgcattacttaaatggaaaaagttccccccaggtcatgtgattgtcgagtccggcaacataatttctttcgtgggttatatcaattcaggatgctgtaatatatacagaagtatcatcggattcgttaaactgcgtagtaataaagtcaagcgctcccagaaactagtgtacatgggtaagcttaaggagaaagaaagctttggagagatatctgtgctgctgcaggtaccctttacatgcaccattatcacaaagaaggaggtagagatggcaatcatagaggataaggatctgtttgtggcctag

SEQ ID NO: 250389 - protein, 492 aa, Artificial Sequence
  derived and/or modified sequence
MAAGPIRVVLVLLGVLSVCAASGHGSVAEREAGGEAEWAEPWDGAVFRPPSALGAVGVTRSSGTPRPGREEAGDLPVLLWWSPGLFPHFPGDSERIECARGACVASRNRRALRDSRTRALLFYGTDFRASAAPLPRLAHQSWALLHEESPLNNFLLSHGPGIRLFNLTSTFSRHSDYPLSLQWLPGTAYLRRPVPPPMERAEWRRRGYAPLLYLQSHCDVPADRDRYVRELMRHIPVDSYGKCLQNRELPTARLQDTATATTEDPELLAFLSRYKFHLALENAICNDYMTEKLWRPMHLGAVPVYRGSPSVRDWMPNNHSVILIDDFESPQKLAEFIDFLDKNDEEYMKYLAYKQPGGITNQFLLDSLKHREWGVNDPLLPNYLNGFECFVCDYELARLDAEKAHAASPGDSPVFEPHIAQPSHMDCPVPTPGFGNVEEIPENDSWKEMWLQDYWQGLDQGEALTAMIHNNETEQTKFWDYLHEIFMKRQHL

SEQ ID NO: 250390 - DNA, 1479 bp, Artificial Sequence
  derived and/or modified sequence
atggccgccggccccatcagagtggtgctggtgctgctgggcgtgctgagcgtgtgcgccgccagcggccacggcagcgtggccgagagagaggccggcggcgaggccgagtgggccgagccctgggacggcgccgtgttcagaccccccagcgccctgggcgccgtgggcgtgaccagaagcagcggcacccccagacccggcagagaggaggccggcgacctgcccgtgctgctgtggtggagccccggcctgttcccccacttccccggcgacagcgagagaatcgagtgcgccagaggcgcctgcgtggccagcagaaacagaagagccctgagagacagcagaaccagagccctgctgttctacggcaccgacttcagagccagcgccgcccccctgcccagactggcccaccagagctgggccctgctgcacgaggagagccccctgaacaacttcctgctgagccacggccccggcatcagactgttcaacctgaccagcaccttcagcagacacagcgactaccccctgagcctgcagtggctgcccggcaccgcctacctgagaagacccgtgcccccccccatggagagagccgagtggagaagaagaggctacgcccccctgctgtacctgcagagccactgcgacgtgcccgccgacagagacagatacgtgagagagctgatgagacacatccccgtggacagctacggcaagtgcctgcagaacagagagctgcccaccgccagactgcaggacaccgccaccgccaccaccgaggaccccgagctgctggccttcctgagcagatacaagttccacctggccctggagaacgccatctgcaacgactacatgaccgagaagctgtggagacccatgcacctgggcgccgtgcccgtgtacagaggcagccccagcgtgagagactggatgcccaacaaccacagcgtgatcctgatcgacgacttcgagagcccccagaagctggccgagttcatcgacttcctggacaagaacgacgaggagtacatgaagtacctggcctacaagcagcccggcggcatcaccaaccagttcctgctggacagcctgaagcacagagagtggggcgtgaacgaccccctgctgcccaactacctgaacggcttcgagtgcttcgtgtgcgactacgagctggccagactggacgccgagaaggcccacgccgccagccccggcgacagccccgtgttcgagccccacatcgcccagcccagccacatggactgccccgtgcccacccccggcttcggcaacgtggaggagatccccgagaacgacagctggaaggagatgtggctgcaggactactggcagggcctggaccagggcgaggccctgaccgccatgatccacaacaacgagaccgagcagaccaagttctgggactacctgcacgagatcttcatgaagagacagcacctgtag

SEQ ID NO: 250391 - DNA, 2056 bp, Artificial Sequence
  derived and/or modified sequence
ggggtcggtgctggccgagggggcgccggctgccggagtggacatggcggccggccccattagggtggtgttggtccttctaggggtgctcagtgtctgtgcagccagcggccatgggtccgtagcggagagggaggccggcggggaggcggagtgggcggaaccgtgggatggcgcggttttccggccgccctcggcgctgggcgcagtgggggtgacgcgcagctctgggacgccgcggccagggagggaggaggcgggggacttgccggtactgctgtggtggagcccagggctattcccccacttcccgggagactcggagcgcatcgagtgtgcgcgcggcgcgtgcgtggcgtcccggaaccgccgagcgctgagggactcgcggacgcgcgcgctgctcttctacggcacagacttccgcgcgtcggccgccccgctgccgcgcctggcgcaccagagctgggcgctcctccacgaggagtcgcccctcaacaacttcttgctgagccacggcccgggcatccgcctcttcaatcttacctccaccttcagtcgccactcggattacccgctgtcgctgcagtggctgcccgggaccgcctatctgcgccgcccggtgcctccgcccatggaacgcgcggagtggcgccgccgcggctacgcgccgctgctctatctgcagtcacactgcgacgtgccagcggaccgggaccgctacgtgcgcgagctcatgcgccacatcccggtagactcctacgggaaatgcctgcagaatcgggagctgcctaccgcgcggctacaggacacagccacggccaccaccgaggatccagagctcttggctttcttgtcccgctataagttccacttggccctggaaaatgccatctgtaacgactacatgacagaaaaactgtggcgtcccatgcacctgggcgctgtgcccgtgtaccgcggttctccctctgtgagggactggatgccgaacaatcactccgtcatcctgattgatgattttgagtctcctcagaagctggcagagtttattgactttctggacaagaatgatgaggagtatatgaaatacctggcatacaagcaacctgggggcatcaccaaccaatttcttctggatagtctgaagcatcgggagtggggagtgaatgatcctttgctgcctaactacctcaacggcttcgagtgtttcgtctgtgactacgaactggctcggctggatgccgagaaagcccacgcggcctctcccggggacagccccgtctttgagccccacattgcccagccctcacacatggactgcccagtgcccacacctggctttggcaatgtggaagagattcctgagaatgacagttggaaagagatgtggctgcaagattattggcaaggtctggaccagggggaagctctcactgccatgatccacaacaatgaaacagagcagacgaaattttgggattacctacatgaaatcttcatgaagaggcaacatctctaagtgcccttgcaagagcctttaacttggcggagctaaggagatcttattctaccatgggacataaggagcatccactgcacaaacccttaatgaacactgtcttttcatggattcaaggaattccagttttatctattaagattttatcttaatgatgagtagccaaggtctaacatagggcctctcctcaaggagagatggagggatacaattcttggttcagtgggaaacagaaccctaaaacatccatttgattcaaggtgctggtccaacagagtttttaaactactcacttctttatttcatcctttcgactgtacttgattaccagtgaagtaagatgggtcaggttacgacttacaacttttgttctattccccagactcctcattattcagtacatttcccaataatctctttttctcatctcttgctttataaattgttacgttggtggagaagcaaaacatttggtgagttgtattctggttttccggagttggatttttttatattatatactttcatgtcaaa

SEQ ID NO: 250392 - DNA, 1479 bp, Artificial Sequence
  derived and/or modified sequence
atggccgctggtcctataagggtcgtgttagttttgcttggcgtgctatccgtctgcgccgcgagcggacatggtagcgtggccgagcgcgaagccggcggcgaagcagagtgggcagaaccatgggacggcgcggtcttccggccaccgagcgctctaggcgcagtcggagtgacgaggagtagcggcaccccgagacccggaagggaagaagcgggggatctgcccgtcctcctctggtggtcccccggactgtttccgcacttccctggggactcggaaagaattgaatgcgcgcgcggagcatgcgtcgcctcacggaatcggcgcgctctgagggactcccgcaccagagcattgctgttttatgggaccgattttcgagctagcgccgctcctctgcctagactggcccaccagagttgggcactgctgcacgaagaaagccccctgaataattttctgttgagtcacggcccaggaatacgtctgtttaaccttacctctacattctcgcggcacagtgattaccccctgagtttacagtggctccccggaaccgcgtaccttaggcgccccgttcctccgcctatggagcgggcagaatggcggcgtagagggtacgccccgctgctttacttgcaaagccactgcgatgtgcccgccgacagggacagatatgtccgagagttgatgcggcatatccccgtggactcatacggtaagtgcctgcagaatagggagctgcccacagctcggcttcaagacacagccacagcgacaacagaggatcctgagcttctggctttcctttctaggtacaagttccatctcgcccttgaaaatgctatatgtaatgattacatgactgagaaattatggcgtcccatgcatctaggcgccgtgcccgtatacagggggtctcctagtgtcagagattggatgccaaacaaccactcagtgatcctgatcgacgacttcgaatcacctcagaagctggcggagtttatcgacttcctggacaaaaatgacgaagaatacatgaaatacctcgcttacaaacagccaggggggattactaaccagttcctcctcgacagtttgaagcaccgggaatggggcgtgaacgaccctcttctacctaattatctaaatggcttcgaatgctttgtatgcgattatgagttggcaagactggatgcagagaaggcacacgcagcctcccccggggactctcccgtcttcgagccccatatagcccagccatctcatatggattgtccggttcccactcccggttttggaaacgttgaagaaatacccgaaaacgatagctggaaggagatgtggctgcaagattactggcagggtctcgaccagggtgaggctctgaccgccatgatccataataacgaaacagagcaaaccaagttctgggattacctgcatgagattttcatgaaacggcagcacctgtag

SEQ ID NO: 250393 - DNA, 1479 bp, Artificial Sequence
  derived and/or modified sequence
atggctgctggccccatccgggtggtgctggtgctgctgggcgtgctgtctgtgtgtgccgccagcggccacggctctgtggccgagcgggaggccggcggggaggccgagtgggccgagccctgggatggagctgtgttccggcccccatctgccctgggcgctgtgggcgtgaccaggagcagcggcacccccaggcctggccgggaggaggccggggacctgcctgtgctgctgtggtggagccctggcctcttcccccacttccctggggacagcgagagaattgaatgtgcccggggggcctgtgtggccagcaggaacagaagagccctgcgggacagcaggacccgggccctgctcttctatggaacagacttccgggccagcgctgcccccctgccccggctggcccaccagagctgggccctgctgcacgaggagagccccctgaacaacttcctgctgagccacggccctggcatccgcctcttcaacctgaccagcaccttcagccgccacagcgactaccccctgagcctgcagtggctgcctggaacagcctacctgcggcggcctgtgcccccacccatggagagagctgagtggaggagaagaggctacgcccccctgctgtacctgcagagccactgtgatgtgcctgctgaccgggacagatatgtgcgggagctgatgaggcacatccctgtggacagctatggcaagtgcctgcagaaccgggagctgcccacagcccggctgcaggacacagccacagccaccacagaagatcctgagctgctggccttcctgagccgctacaagttccacctggccctggagaatgccatctgcaatgactacatgacagagaagctgtggaggcccatgcacctgggcgctgtgcctgtgtaccggggcagccccagcgtgcgggactggatgcccaacaaccacagcgtcatcctgattgatgactttgagagcccccagaagctggccgagttcatcgacttcctggacaagaatgatgaggagtacatgaagtacctggcctacaagcagcccggcggcatcaccaaccagttcctgctggacagcctgaagcaccgggagtggggcgtgaatgaccccctgctgcccaactacctgaatggatttgagtgctttgtgtgtgactatgagctggcccggctggatgctgagaaggcccacgccgccagccctggggacagccctgtgtttgagccccacatcgcccagcccagccacatggactgccctgtgcccaccccaggctttggaaatgtggaggagatcccagaaaatgacagctggaaggagatgtggctgcaggactactggcagggcctggaccagggcgaggccctgacagccatgatccacaacaatgaaacagagcagaccaagttctgggactacctgcacgagatcttcatgaagaggcagcacctgtag

SEQ ID NO: 250394 - DNA, 1479 bp, Artificial Sequence
  derived and/or modified sequence
atggccgccggccccatccgggtggtgctggtgctgctgggcgtgctcagtgtgtgtgctgccagcggacatggctctgtggctgagagggaagccgggggcgaggccgagtgggcagagccttgggacggcgcggtattccgcccaccgagtgctcttggcgccgtaggcgtgactaggtcaagcggtacaccaaggcccggaagagaggaagccggagacctcccggtcctgctgtggtggtcccctgggctcttcccacattttcccggtgatagtgaaagaatagaatgtgctcgaggggcctgcgtagcctcccggaatcggagggccctaagggacagccggactcgagccctcctgttttatggcacggatttccgcgccagcgccgcacctctccctaggctcgcgcaccagtcttgggcgttactccacgaagagagtccacttaacaattttctcctgagccatggccctggcattcgcctttttaacttaacctctaccttctccagacactccgattacccgttgtctctgcagtggctgccgggtacagcctacttacggcgacccgtccccccccccatggagcgagcggagtggaggagacggggatatgccccgctgctctaccttcagtcccactgcgacgtccccgctgatagggataggtacgtgagagaactgatgcggcacattcctgtggacagctacggcaagtgtctgcaaaatagggagctacccacagcccggctgcaggacactgctactgccaccacggaggatccagagctcttagcattcctttctcgctataagttccacttagccctggagaatgcaatttgtaatgactacatgaccgaaaaactctggcgcccaatgcatctgggggccgtgccagtgtatcgcggatcacccagcgtacgcgattggatgccaaacaaccactccgttattctgatcgacgacttcgagtcaccacagaagttggcagagtttatcgacttcctggacaaaaacgatgaggagtacatgaagtacctagcatacaagcagccaggtgggatcactaaccagttcttactggactccctcaaacaccgcgaatggggagtgaacgaccccctcctgccgaactacctgaatggctttgaatgtttcgtatgtgactacgagctcgccaggctagatgctgaaaaggcccatgctgccagccctggtgacagtccagtgttcgagccacatatcgcccagcccagccacatggattgtcccgtcccaacaccagggttcgggaatgtggaagaaatacctgagaatgactcttggaaggagatgtggctccaggactattggcagggcctggaccagggggaggcactgactgcgatgattcataacaacgaaactgaacagacgaaattttgggattacctgcatgagattttcatgaaaagacagcacttgtag

SEQ ID NO: 250395 - DNA, 1479 bp, Artificial Sequence
  derived and/or modified sequence
atggccgctggacccattcgggtcgtgcttgtgctgctgggggttttgtccgtgtgtgccgctagtggacatggtagcgttgccgagcgagaagcgggtggtgaggccgagtgggctgaaccatgggatggtgccgtgtttaggccacctagtgccctcggggcagttggtgtcactagatcctcagggacacctcgcccaggtcgagaagaagccggtgacctgcccgtgctgctgtggtggtctcctggtctgttcccacacttccccggtgactctgagcgaatagagtgcgcccgaggagcatgcgttgcttcccggaatagaagggcgcttcgagattctcgcacccgggcactcctgttttacggcaccgactttagagcctcagctgcgccactgccacgactggcgcatcagagctgggccctgctgcatgaagaatcccctctgaacaactttttgctctctcatgggccagggataagactgttcaacctgaccagtacattcagccgccatagcgactatcccctgagtctgcagtggctgccaggaacggcttacctgagaagacctgtgccacctccaatggagagagcggagtggcgccgtagaggatacgcgccactcctgtatttacaaagccactgtgacgttccagcagaccgcgatcggtatgtacgggagctgatgaggcacatccctgttgattcttacggcaaatgtctgcagaacagagagttgcctacagcacgactgcaggatacagccactgccacgactgaggaccctgaactactggctttcctcagccgttacaaattccatctcgctcttgagaacgctatctgcaacgactacatgactgaaaagctgtggagacccatgcacttaggcgcagttcccgtatatcggggatccccaagcgttagggattggatgcctaacaaccacagtgtgatcttgatagatgatttcgagtcacctcaaaaattggctgaatttatcgatttcttagataaaaatgacgaagagtacatgaagtacctcgcctataaacagcccggtggcatcactaaccagtttctcctggactccctgaagcatcgagaatggggggttaatgacccccttctgcctaactacctgaatggttttgagtgttttgtgtgcgattatgagcttgcgcgtctggatgccgagaaggcgcatgcagctagtcctggcgatagccctgtgtttgagccacatatcgcccagccatcccatatggactgtcctgtgcccacaccagggtttggaaatgtggaggagattcccgagaatgatagttggaaggagatgtggcttcaagactattggcagggcctggaccagggagaagcacttacggccatgatacacaataatgaaaccgagcaaaccaaattttgggattatctccatgaaatttttatgaagaggcaacacctttag

SEQ ID NO: 250396 - protein, 354 aa, Artificial Sequence
  derived and/or modified sequence
MSAGGGRAFAWQVFPPMPTCRVYGTVAHQDGHLLVLGGCGRAGLPLDTAETLDMASHTWLALAPLPTARAGAAAVVLGKQVLVVGGVDEVQSPVAAVEAFLMDEGRWERRATLPQAAMGVATVERDGMVYALGGMGPDTAPQAQVRVYEPRRDCWLSLPSMPTPCYGASTFLHGNKIYVLGGRQGKLPVTAFEAFDLEARTWTRHPSLPSRRAFAGCAMAEGSVFSLGGLQQPGPHNFYSRPHFVNTVEMFDLEHGSWTKLPRSLRMRDKRADFVVGSLGGHIVAIGGLGNQPCPLGSVESFSLARRRWEALPAMPTARCSCSSLQAGPRLFVIGGVAQGPSQAVEALCLRDGV

SEQ ID NO: 250397 - DNA, 1065 bp, Artificial Sequence
  derived and/or modified sequence
atgtcagccggcggaggacgagctttcgcctggcaagtgttccctccaatgccgacctgtagagtttacggcacagtggcacatcaggatggccatcttctggtgcttggcggttgcggtagagccggactccccctggacactgccgagactctcgatatggcatctcacacatggctggctctggcaccactgcccaccgcgagggcaggggccgccgccgtcgtcctaggcaagcaggtactggtggtgggaggagtcgatgaggttcagagtcccgtggcggctgtagaagcctttctaatggatgaggggagatgggagagaagagctactctgcctcaggccgccatgggcgtagcaactgtggagcgtgatgggatggtgtacgcacttggaggtatgggcccagacacggctccccaggcgcaggtccgagtgtatgagccccgtcgcgattgctggctgtctttgccaagtatgcccactccatgttatggcgcaagcacctttcttcatgggaataaaatttacgtattaggcggccgccagggcaaactacctgtgaccgcctttgaggccttcgatctcgaggccaggacttggactaggcatccatccctcccctcacgccgcgcttttgcgggttgtgccatggctgaaggttccgtattcagcctcggtgggctgcagcaacccggcccacacaacttttactcacgtccccactttgtgaacactgttgaaatgtttgatctcgagcacggttcatggactaagctgccaaggagtctgaggatgagggataagcgagcagactttgttgtcggtagtctgggcggccacatcgtggccatcggtgggctcggtaatcaaccatgcccgctgggttctgtggaatcgtttagcctggcaagacgccggtgggaggctctcccagcgatgcctacagcaagatgcagctgctcttctctgcaggctggtccgcgactgtttgtcatcgggggggtcgctcaaggaccttcgcaggccgtcgaggcgctgtgtttgagggacggcgtttag

SEQ ID NO: 250398 - DNA, 1957 bp, Artificial Sequence
  derived and/or modified sequence
agccccagccagatcccgcgtcaacggaggcggaacggcggaccccgtaccctggcagcatcggagcaccggcgggtgaaggcaaggtccctggactggtcatatacctcttgtggccctggcagaatcaagatgaggccctgtcatgcctccccagtgaggcctacagtctgagcagacagcatggcctgccactggcagtgaacaccatgtctgcaggaggtggccgggcctttgcttggcaagtgttcccccccatgcccacttgccgggtctatggcacagtggcacaccaagatgggcacctgctggtgttggggggttgtggccgggctggactgcccctggacactgctgagacactggacatggcctcgcacacatggctggcactggcacccctgcccactgcccgggctggtgcagctgcggtagttctgggcaagcaggtgctagtggtgggtggtgtggatgaggtccagagcccggtagctgctgtagaggccttcctgatggatgagggccgctgggagcgtcgggccaccctccctcaagcagccatgggggttgcaactgtggagagagatggtatggtgtatgctctggggggaatgggccctgacacggccccccaggcccaggtacgtgtgtatgagccccgtcgggactgctggctttcgctaccctccatgcccacaccctgctatggggcctccaccttcctgcacgggaacaagatctatgtcctggggggccgccagggcaagctcccggtgactgcttttgaagcctttgatctggaggcccgtacatggacccggcatccaagcctacccagccgtcgggcctttgctggctgcgccatggctgaaggcagcgtctttagcctgggtggcctgcagcagcctgggccccacaacttctactctcgcccacactttgtcaacactgtggagatgtttgacctggagcatgggtcctggaccaaattgccccgcagcctgcgcatgagggataagagggcagactttgtggttgggtcccttgggggccacattgtggccattgggggccttggaaaccagccatgtcctttgggctctgtggagagctttagccttgcacggcggcgctgggaggcattgcctgccatgcccactgcccgctgctcctgctctagtctgcaggctgggccccggctgtttgttattgggggtgtggcccagggccccagtcaagccgtggaggcactgtgtctgcgtgatggggtctgaaggcttggtgggagctgtccactggagcagctcattgccagaggcagctatttctatggctccttttgctgctgaggacactcactgtggctctgtgggatgagagaggcatgggggtgagcacttgaaacactgccttggggccttgggttaggggagcctttgtctttagtgcaggacacacatatgcttacacctacctttatcaccattcgttcatgaatcatgcctagctccatccttgccctgggacctactaggccttccatccaactgggaaatggggagaagcaaagctggcctcatgctcttcagggtcagttcctatctggagttgaccaggcctaccccagttgccattcctgaaaaatctcagctgccaggctgcctttagggtccctgcagacccaggagagttgagagggtgggggacacagagagaatagagaggatgtgggaactgccagagggccggagcgcaggagttcaagtggaggaatgctggctttgagccctctacactgctggttgtatgaccttggacaagtcacttcacctctctgtgcctcagcatcctcatctataaatggggatctctgaaaccttcctaccctacctacctcacagggctgttgtgaggacccagggagtttggatgtggaagtaaaagtgctgctaaaacc

SEQ ID NO: 250399 - DNA, 1930 bp, Artificial Sequence
  derived and/or modified sequence
cggaggcggaacggcggaccccgtaccctggcagcatcggagcaccggcgggtgaaggcaaggtccctggactggtcatatacctcttgtggccctggcagaatcaagatgaggccctgtcatgcctccccagtgaggcctacagtctgagcagacagcatggcctgccactggcagtgaacaccatgtctgcaggaggtggccgggcctttgcttggcaagtgttcccccccatgcccacttgccgggtctatggcacagtggcacaccaagatgggcacctgctggtgttggggggttgtggccgggctggactgcccctggacactgctgagacactggacatggcctcgcacacatggctggcactggcacccctgcccactgcccgggctggtgcagctgcggtagttctgggcaagcaggtgctagtggtgggtggtgtggatgaggtccagagcccggtagctgctgtagaggccttcctgatggatgagggccgctgggagcgtcgggccaccctccctcaagcagccatgggggttgcaactgtggagagagatggtatggtgtatgctctggggggaatgggccctgacacggccccccaggcccaggtacgtgtgtatgagccccgtcgggactgctggctttcgctaccctccatgcccacaccctgctatggggcctccaccttcctgcacgggaacaagatctatgtcctggggggccgccagggcaagctcccggtgactgcttttgaagcctttgatctggaggcccgtacatggacccggcatccaagcctacccagccgtcgggcctttgctggctgcgccatggctgaaggcagcgtctttagcctgggtggcctgcagcagcctgggccccacaacttctactctcgcccacactttgtcaacactgtggagatgtttgacctggagcatgggtcctggaccaaattgccccgcagcctgcgcatgagggataagagggcagactttgtggttgggtcccttgggggccacattgtggccattgggggccttggaaaccagccatgtcctttgggctctgtggagagctttagccttgcacggcggcgctgggaggcattgcctgccatgcccactgcccgctgctcctgctctagtctgcaggctgggccccggctgtttgttattgggggtgtggcccagggccccagtcaagccgtggaggcactgtgtctgcgtgatggggaaggcttggtgggagctgtccactggagcagctcattgccagaggcagctatttctatggctccttttgctgctgaggacactcactgtggctctgtgggatgagagaggcatgggggtgagcacttgaaacactgccttggggccttgggttaggggagcctttgtctttagtgcaggacacacatatgcttacacctacctttatcaccattcgttcatgaatcatgcctagctccatccttgccctgggacctactaggccttccatccaactgggaaatggggagaagcaaagctggcctcatgctcttcagggtcagttcctatctggagttgaccaggcctaccccagttgccattcctgaaaaatctcagctgccaggctgcctttagggtccctgcagacccaggagagttgagagggtgggggacacagagagaatagagaggatgtgggaactgccagagggccggagcgcaggagttcaagtggaggaatgctggctttgagccctctacactgctggttgtatgaccttggacaagtcacttcacctctctgtgcctcagcatcctcatctataaatggggatctctgaaaccttcctaccctacctacctcacagggctgttgtgaggacccagggagtttggatgtggaagtaaaagtgctgctaaaacct

SEQ ID NO: 250400 - DNA, 1065 bp, Artificial Sequence
  derived and/or modified sequence
atgtctgctgggggcggccgggcctttgcctggcaggtgtttcctcccatgcccacctgccgggtgtatggaacagtggcccaccaggacggccacctgctggtgctgggcggctgcggccgggccggcctgcccctggacacagctgagaccctggacatggccagccacacctggctggccctggcccccctgcccacagcccgggccggggctgctgctgtggtgctgggcaagcaggtgctggtggtgggcggcgtggatgaggtgcagagccctgtggccgctgtggaggccttcctgatggatgagggccgctgggagcggcgggccaccctgccccaggccgccatgggcgtggccaccgtggagagagatggcatggtgtatgccctgggcggcatgggccctgacacagccccccaggcccaggtgcgggtgtatgagccccggcgggactgctggctgagcctgcccagcatgcccaccccctgctacggggccagcaccttcctgcacggcaacaagatctacgtgctgggcggccggcagggcaagctgcctgtgacagcctttgaggcctttgacctggaggcccggacctggaccaggcaccccagcctgcccagcagaagagcctttgctggctgtgccatggccgagggctctgtgttcagcctgggcggcctgcagcagcccggcccccacaacttctacagccggccccactttgtgaacacagtggagatgtttgacctggagcacggctcctggaccaagctgcccaggagcctgaggatgagggacaagagagctgactttgtggtgggcagcctgggcggccacatcgtggccatcggcggcctgggcaaccagccctgccccctgggctctgtggagagcttcagcctggcccggcggcgctgggaggccctgcctgccatgcccacagcccgctgcagctgcagcagcctgcaggccggccccaggctcttcgtcatcggcggcgtggcccagggccccagccaggccgtggaggccctgtgcctgagagatggagtgtag

SEQ ID NO: 250401 - DNA, 1065 bp, Artificial Sequence
  derived and/or modified sequence
atgagcgccggcggcggccgggccttcgcctggcaggtgttcccccccatgcctacctgcagggtgtatggtacggtggcgcatcaggatggacacctgcttgtactgggaggctgtggccgcgccggcctgcccctcgacaccgcagagaccctcgacatggcgagtcacacatggctagctcttgctccacttccaaccgctcgcgcaggagccgcggccgtcgttttagggaagcaggtccttgtcgttggaggtgtggatgaagtgcagagtccggttgctgcagtggaagcctttctgatggacgaggggagatgggagcggagagccaccttgccccaggctgcaatgggggttgccaccgttgagcgcgatgggatggtctacgccctcggcgggatgggtccagatactgcacctcaagcccaggtccgagtgtatgaaccacgtagagactgttggctgagcctgccatcgatgcccaccccttgttatggcgctagcacattcctccacggcaacaaaatatacgtgttgggaggtcggcagggaaagttgcctgtgaccgccttcgaagctttcgacttagaggctcgcacctggacccgccatccatccctcccctcccggcgggcttttgccggttgcgctatggctgaaggttctgtctttagtctgggaggtctccagcaaccagggcctcacaatttctatagccggccacatttcgtgaatacagtggaaatgtttgacctcgagcatggcagctggactaaacttcccagatcactaagaatgcgggacaaaagagcagattttgtcgttgggtctctgggcggtcacatagtggctattggagggcttggcaaccagccctgccctcttggcagtgtggaatcatttagtcttgcgagacgaagatgggaagccttacccgccatgccaaccgccagatgcagctgtagctctttgcaagcaggtccccgtctcttcgtaataggaggagtcgcacaagggcctagccaggccgtagaggcattgtgcttgagagatggtgtctag

SEQ ID NO: 250402 - DNA, 1065 bp, Artificial Sequence
  derived and/or modified sequence
atgtccgccggaggaggcagggcctttgcatggcaggtatttccacctatgccgacttgcagagtatacgggacagttgctcatcaagacggccacctgctggtcctcgggggatgtgggcgagctggccttcccttggataccgcggagacactggatatggcatcacacacttggctagcattagctcctttgccaacagctcgtgccggagcagcagctgtggtgctgggtaaacaagtgctggtggtcggaggcgtggatgaagtgcaatcccccgtcgccgctgtcgaggccttccttatggatgaaggacgatgggagcgtagagcgactctgccacaggccgctatgggcgtggctactgtagagcgagacggaatggtgtacgcactgggcggaatgggtcctgatactgcaccacaggcacaggttcgggtttacgaacctcggagggactgctggctgagtctcccatccatgcccaccccctgttacggggctagcacctttcttcacggcaacaagatttacgtgcttggtggtaggcaaggcaaactgcccgtaactgcatttgaagcctttgatctagaggccaggacgtggacacggcacccttctctgccttctcgccgagcattcgctggctgcgccatggcagaaggaagcgttttcagtctggggggattgcagcagcccggaccccataacttttattcccgccctcatttcgttaacactgtggagatgttcgacctagagcacggtagttggaccaaattgcctaggtccctccgtatgagggataagagggctgactttgttgtgggatcgctgggcggacacatagtggccataggcggtctgggcaatcagccctgcccactggggtccgtggaaagcttcagcctcgccagacgaaggtgggaggccttaccggcaatgcccaccgcacggtgctcatgttcctcccttcaggccggtcccagactgttcgtcattgggggtgtcgctcagggaccctcacaagcagtggaggctttatgtctgagggatggcgtgtag

SEQ ID NO: 250403 - DNA, 1065 bp, Artificial Sequence
  derived and/or modified sequence
atgagcgccggcggcggcagagccttcgcctggcaggtgttcccccccatgcccacctgcagagtgtacggcaccgtggcccaccaggacggccacctgctggtgctgggcggctgcggcagagccggcctgcccctggacaccgccgagaccctggacatggccagccacacctggctggccctggcccccctgcccaccgccagagccggcgccgccgccgtggtgctgggcaagcaggtgctggtggtgggcggcgtggacgaggtgcagagccccgtggccgccgtggaggccttcctgatggacgagggcagatgggagagaagagccaccctgccccaggccgccatgggcgtggccaccgtggagagagacggcatggtgtacgccctgggcggcatgggccccgacaccgccccccaggcccaggtgagagtgtacgagcccagaagagactgctggctgagcctgcccagcatgcccaccccctgctacggcgccagcaccttcctgcacggcaacaagatctacgtgctgggcggcagacagggcaagctgcccgtgaccgccttcgaggccttcgacctggaggccagaacctggaccagacaccccagcctgcccagcagaagagccttcgccggctgcgccatggccgagggcagcgtgttcagcctgggcggcctgcagcagcccggcccccacaacttctacagcagaccccacttcgtgaacaccgtggagatgttcgacctggagcacggcagctggaccaagctgcccagaagcctgagaatgagagacaagagagccgacttcgtggtgggcagcctgggcggccacatcgtggccatcggcggcctgggcaaccagccctgccccctgggcagcgtggagagcttcagcctggccagaagaagatgggaggccctgcccgccatgcccaccgccagatgcagctgcagcagcctgcaggccggccccagactgttcgtgatcggcggcgtggcccagggccccagccaggccgtggaggccctgtgcctgagagacggcgtgtag

SEQ ID NO: 250404 - protein, 374 aa, Artificial Sequence
  derived and/or modified sequence
MGCSSSALNKAGDSSRFPSVTSNEHFSTAEESESCFAQPKPHALGRESTVDGNVQRESRPPLQKLKVSAEPTANGVKPLQEQPLAKDVAPGRDATDQSGSTEKTQPGEGLEESGPPQPGGKEDAPAAEGKKKDAGAGTEAESLKGNAEAQPLGPEAKGQPLQAAVEKDSLRAVEVTENPQTAAEMKPLGTTENVLTLQIAGELQPQGTVGKDEQAPLLETISKENESPEILEGSQFVETAEEQQLQATLGKEEQPQLLERIPKENVTPEVLDRSQLVEKPVMNDPFHKTPEGPGNMEQIQPEGIVGSMEHPARNVEAGAYVEMIRNIHTNEEDQRIEGETGEKVETDMENEKVSEGAETKEEETGEVVDLSAAT

SEQ ID NO: 250405 - DNA, 1125 bp, Artificial Sequence
  derived and/or modified sequence
atgggctgcagcagcagcgccctgaacaaggccggcgacagcagcagattccccagcgtgaccagcaacgagcacttcagcaccgccgaggagagcgagagctgcttcgcccagcccaagccccacgccctgggcagagagagcaccgtggacggcaacgtgcagagagagagcagaccccccctgcagaagctgaaggtgagcgccgagcccaccgccaacggcgtgaagcccctgcaggagcagcccctggccaaggacgtggcccccggcagagacgccaccgaccagagcggcagcaccgagaagacccagcccggcgagggcctggaggagagcggccccccccagcccggcggcaaggaggacgcccccgccgccgagggcaagaagaaggacgccggcgccggcaccgaggccgagagcctgaagggcaacgccgaggcccagcccctgggccccgaggccaagggccagcccctgcaggccgccgtggagaaggacagcctgagagccgtggaggtgaccgagaacccccagaccgccgccgagatgaagcccctgggcaccaccgagaacgtgctgaccctgcagatcgccggcgagctgcagccccagggcaccgtgggcaaggacgagcaggcccccctgctggagaccatcagcaaggagaacgagagccccgagatcctggagggcagccagttcgtggagaccgccgaggagcagcagctgcaggccaccctgggcaaggaggagcagccccagctgctggagagaatccccaaggagaacgtgacccccgaggtgctggacagaagccagctggtggagaagcccgtgatgaacgaccccttccacaagacccccgagggccccggcaacatggagcagatccagcccgagggcatcgtgggcagcatggagcaccccgccagaaacgtggaggccggcgcctacgtggagatgatcagaaacatccacaccaacgaggaggaccagagaatcgagggcgagaccggcgagaaggtggagaccgacatggagaacgagaaggtgagcgagggcgccgagaccaaggaggaggagaccggcgaggtggtggacctgagcgccgccacctag

SEQ ID NO: 250406 - DNA, 1761 bp, Artificial Sequence
  derived and/or modified sequence
ccccctgacatcctccctatccctgctttaggggcttttcctctcttactgtgccataccctccaccgtctcccctcctgtctcctgggctctactcctccctgccctcctctgcgtcctggccctcccgctctcttccgctttgcgctcccaggctccttccacctcctgccagctcccttcctcctccaggtgcgcaccccctaccattagccccgctgcgcgcttgcgctctacgcccaagggagccgggctgcagagctggagaaacttccgcggctacgggtgcagttgccttcggttcccggttccgggccgacacccgcgcagggctgagacaggtgtctgcgctccccgcaatgggctgctccagcagcgccctcaacaaggccggcgacagcagcaggttccccagcgtaacttcaaatgagcatttttcaactgcagaagaaagtgagtcctgctttgcccaaccaaagccacatgcactgggaagagaatctactgttgatggcaatgtacaaagggaaagccgtcctcccttacaaaagctcaaggtttcagcagagcctacagctaatggtgttaaacccctccaagaacagcccctggccaaggacgtagcccctggaagggatgccacagaccaatcagggtccacagaaaagactcagcctggagagggactggaggaatctgggccgcctcaaccaggtggcaaagaggatgccccagcagcagaaggaaagaagaaagatgcaggagcagggacagaggccgagtctctaaaaggaaatgctgaagctcagcctttaggaccagaagccaagggtcagcctttgcaggcagcagtagagaaggactctctcagagcagtggaggtcactgagaatccacaaactgctgcagagatgaagcctctaggaacaactgagaacgttctgactctgcaaatagctggagagctacaacctcagggcacagtgggaaaggatgagcaggccccgcttctagaaacaatttccaaagagaatgaatctccagaaatattggaaggaagtcagtttgtggaaacagctgaagagcagcaacttcaggcaacattgggaaaagaggagcagccccagcttctagaaagaattcccaaagagaatgtaacaccagaagtattggacagaagtcagcttgtggaaaagcctgttatgaatgatccattccataaaactcctgaaggtccaggaaacatggagcagattcaacctgaaggaatagttggaagcatggagcatccagcacgaaatgtagaggcaggagcatatgtggaaatgatcaggaacatccatactaatgaagaggaccaacgcattgaaggtgagacaggggaaaaggtggaaacagacatggagaatgagaaagtgagtgaaggggctgaaaccaaagaagaagaaacaggagaagtggtggacctttcagcagccacatagatagaagagtgaaccgacacagtgtgttatcatagaggagacaaaaatggtagtgaagcttgtggttatgtatcttatctttctacatttacatgttttctgtaaggagtgtggttatagagagactgttggaaccatgagaaggatgtttctgtgttcttgattatattgttctgcaaaactgctaagccatgaacagttttcttagctacttagaatggttatacatttaaaagtataaaaaccaaagccaataaaaatgatgtgattatttaag

SEQ ID NO: 250407 - DNA, 1125 bp, Artificial Sequence
  derived and/or modified sequence
atgggatgtagctcttcagcactgaacaaggctggcgatagctcccgcttccctagcgtgacctctaacgagcacttttccacagccgaggagagcgaaagctgcttcgcccagcctaagcctcatgccctcggtagggagagtaccgtggatggcaacgttcagagggaatcgaggccccccctacaaaagctgaaagtgtcagccgaacctactgccaatggcgtcaaaccactgcaggagcagccacttgccaaggacgtcgctccaggacgggatgcgacggaccaatctgggtctacagagaagacccagccaggggagggcctggaggagagtggccctccgcagccaggggggaaagaagacgctccagcagcagaaggcaaaaagaaggatgctggagccggcacagaagccgagtccctaaaaggaaatgcagaggcgcagcccctgggaccggaggccaaaggtcaacccctgcaggctgccgtggaaaaggacagcctcagagctgtcgaagtaaccgagaaccctcagactgccgctgagatgaaacctctgggcacaaccgagaacgtccttaccctccaaattgctggcgaactgcagccacagggaactgtgggaaaagatgagcaagctcctttgctggagaccatcagcaaggagaatgaatctcccgaaatcctcgagggatcccagttcgtcgagacagctgaggagcaacagctacaagccaccttagggaaagaagaacagccgcagctgctagaacggatccctaaggagaatgtgacaccggaggtgctggacagatcccagcttgtcgagaagcctgtcatgaacgaccccttccataaaactcctgagggccctgggaatatggaacaaatacaacccgaggggattgtgggctctatggaacaccccgctcgcaacgtggaagccggtgcttacgtggagatgatccgaaacattcacacaaacgaagaggaccagaggattgagggggaaaccggagaaaaagttgaaaccgatatggagaatgagaaagtctccgagggagcagaaactaaggaggaagagacgggagaggttgtcgacctgtctgctgccacttag

SEQ ID NO: 250408 - DNA, 1125 bp, Artificial Sequence
  derived and/or modified sequence
atgggctgcagcagcagcgccctgaacaaggccggggacagcagccgcttccccagcgtgaccagcaatgagcacttcagcacagctgaggagagcgagagctgctttgcccagcccaagccccacgccctgggccgggagagcacagtggatggaaatgtgcagcgggagagccggccccccctgcagaagctgaaggtgtctgctgagcccacagccaacggggtgaagcccctgcaggagcagcccctggccaaggatgtggcccctggaagagatgccacagaccagagcggcagcacagagaagacccagcccggggagggcctggaggagagcggccccccccagcccggcggcaaggaggatgccccagctgctgagggcaagaagaaggatgctggggccggcacagaggccgagagcctgaagggaaatgctgaggcccagcccctgggccctgaggccaagggccagcccctgcaggccgctgtggagaaggacagcctgcgggctgtggaggtgacagagaacccccagacagctgctgagatgaagcccctgggcaccacagaaaatgtgctgaccctgcagattgctggggagctgcagccccagggcaccgtgggcaaggatgagcaggcccccctgctggagaccatcagcaaagaaaatgaaagccctgagatcctggagggcagccagtttgtggagacagctgaggagcagcagctgcaggccaccctgggcaaggaggagcagccccagctgctggagcgcatccccaaggaaaatgtgaccccagaggtgctggacaggagccagctggtggagaagcctgtgatgaatgaccccttccacaagaccccagagggccctggcaacatggagcagatccagcctgagggcatcgtgggctccatggagcacccagccagaaatgtggaggccggggcctacgtggagatgatccggaacatccacaccaatgaggaggaccagagaattgaaggagagaccggggagaaggtggagacagacatggagaatgagaaggtgtctgagggcgctgagaccaaggaggaggagaccggggaggtggtggacctgtctgctgccacctag

SEQ ID NO: 250409 - DNA, 1125 bp, Artificial Sequence
  derived and/or modified sequence
atgggctgcagcagcagcgccctgaacaaggccggcgacagcagccgctttccttcagttacgtctaatgagcacttttctaccgctgaagagtctgagagttgttttgcgcagcctaagcctcacgccttgggacgggagtctaccgtggatggtaacgtacagcgggagagccgccccccactgcaaaagctcaaggtgtctgctgaacctacagcgaacggcgtaaaaccattacaggagcaaccacttgccaaggatgtggcccccggcagagatgccactgaccaatctggatccaccgaaaagacgcagccaggggagggcctggaagaatctggacctccacagcctggcggtaaggaggatgcacctgctgctgagggtaaaaagaaggacgctggagcagggacagaggctgagtcactgaaaggaaacgcagaagcccagcccctcggtccagaggccaagggccagccactgcaggctgccgttgagaaagacagtcttagagccgtggaggtaacagagaacccacagaccgctgcagagatgaagcccctggggacaactgagaacgttctcacacttcaaattgccggggaactccagccgcaaggaaccgttggaaaggatgagcaggcccctctactggaaactatttcaaaggaaaatgaatctccagagatcttggagggatcgcagttcgttgagacagctgaggagcagcaactgcaggcgaccttgggaaaggaggaacaacctcagcttttggaacggatccctaaggagaatgtcaccccagaagttctggatcgatcacagctggtagagaaacccgttatgaacgacccattccataaaacacctgagggaccaggcaatatggagcagatccaacccgaggggatcgtcggtagtatggaacaccctgcacggaatgtggaggctggagcgtacgtcgaaatgattcgcaacatccatacaaacgaagaggatcaacgcatagagggggagacaggagaaaaggtcgagacggatatggagaatgagaaagtgtccgagggggccgaaaccaaggaggaggagaccggagaggtggtagatctatccgccgccacttag

SEQ ID NO: 250410 - DNA, 1125 bp, Artificial Sequence
  derived and/or modified sequence
atgggctgcagttcatcggccctcaataaggcaggggactcttcccgcttcccaagcgtgacgtccaacgagcatttctccacagctgaagaatctgaatcctgctttgctcagccaaaaccccatgccctgggaagagaatctaccgtggacgggaatgttcagcgggaaagtcggccaccgttgcagaagctcaaggtgtctgccgaacctacggccaatggggttaagcccctccaggagcagcccctggccaaagacgttgcaccgggtcgcgatgccacagaccagtcaggctccaccgagaagacgcaacccggagagggcctggaggagtctggaccgcctcagcccggaggtaaggaagatgccccagccgctgaaggtaaaaaaaaagatgccggtgccggaactgaggcggaatcgctgaagggcaacgccgaggcccagcctctcggccctgaagcaaaaggccagcccctgcaggctgctgttgaaaaagactctttgcgggcagtggaagtgacagagaatcctcaaaccgctgcagagatgaaacccctggggactacggagaatgtgctcactctgcaaatcgctggtgaactgcaaccacagggcacggtgggcaaggatgaacaggcccctctgctggaaactataagcaaggagaacgaatcgccagaaatcctggaagggtcccagtttgtggagaccgccgaagagcagcagcttcaggccaccctcggaaaagaagaacagccccagttattagaacggatcccgaaggagaatgtaacgcccgaggtgcttgatcggtctcagttggtcgagaaacccgtaatgaacgatccattccacaaaacacccgagggtccgggtaatatggaacagattcagccggaagggatcgtaggaagcatggagcatccggctcgaaatgtggaagctggtgcttacgtggaaatgatcagaaacatccacacaaatgaggaagaccaaaggatagagggcgaaaccggggagaaggtggagaccgatatggagaacgaaaaggtctccgaaggtgcggagactaaggaagaggaaacaggagaggtagtcgatttatccgccgcaacttag

SEQ ID NO: 250411 - protein, 1229 aa, Artificial Sequence
  derived and/or modified sequence
MNLNTSSNTGDTQRLKIASLDVKQILKNETELDITDNLRKKLHWAKKEKLEITTKHNAELASYESQIAKLRSEVEKGEALRQSLEYDLAVARKEAGLGRRAAEERLAEAHRIQEKLCAQNSELQAKTNETEKAFQTSQQKWKEECRRFEHDLEERDNMIQNCNREYDLLMKEKSRLEKTLQEALEKHQREKNEMESHIRETALEEFRLQEEQWEAERRELQFIVQEQDTAVQNMHKKVEKLETEHMDCSDLLRRQTSELEFSTQREERLRKEFEATTLRVRKLEENIEAERAAHLESKFNSEIIQLRIRDLEGALQVEKASQAEAVADLEIIKNEFKEVESAYEREKHNAQESFAKLNLLEKEYFSKNKKLNEDIEEQKKVIIDLSKRLQYNEKSCSELQEELVMAKKHQAFLVETCENNVKELESILDSFTVSGQWTSGIHKDKDKPPSFSVVLERLRRTLTDYQNKLEDASNEEKACNELDSTKQKIDSHTKNIKELQDKLADVNKELSHLHTKCADREALISTLKVELQNVLHCWEKEKAQAAQSESELQKLSQAFHKDAEEKLTFLHTLYQHLVAGCVLIKQPEGMLDKFSWSELCAVLQENVDALIADLNRANEKIRHLEYICKNKSDTMRELQQTQEDTFTKVAEQIKAQESCWHRQKKELELQYSELFLEVQKRAQKFQEIAEKNMEKLNHIEKSHEQLVLENSHFKKLLSQTQREQMSLLAACALMAGALYPLYSRSCALSTQRDFLQEQVNTFELFKLEIRTLAQALSTVEEKKQEEAKMKKKTFKGLIRIFRKGVIAVLAANRLKILGQSCASLFTWMESFKEGIGMLVCTGEPQDKHKFPKHQKEQLRCLQALSWLTSSDLLAAIISSMAELQDVIGKADPNSRICGHLLIGAAKNSFAKLMDKISLVMECIPLHSSRSITYVEKDSLVQRLAHGLHKVNTLALKYGLRGHVPITKSTASLQKQILGFTQRLHAAEVERRSLRLEVTEFKRSVNEMKKELDKAQGLQMQLNEFKQSKLITHEKFESACEELNNALLREEQAQMLLNEQAQQLQELNYKLELHSSEEADKNQTLGEAVKSLSEAKMELRRKDQSLRQLNRHLTQLEQDKRRLEENIHDAESALRMAAKDKECVANHMRAVENTLHKVRDQISLSWSAASRNDFTLQLPKLHLETFAMEGLKGGPEVVACQVRVQWCDHSSLQSQMPGLKQSSCLSLLST

SEQ ID NO: 250412 - protein, 1326 aa, Artificial Sequence
  derived and/or modified sequence
MNLNTSSNTGDTQRLKIASLDVKQILKNETELDITDNLRKKLHWAKKEKLEITTKHNAELASYESQIAKLRSEVEKGEALRQSLEYDLAVARKEAGLGRRAAEERLAEAHRIQEKLCAQNSELQAKTNETEKAFQTSQQKWKEECRRFEHDLEERDNMIQNCNREYDLLMKEKSRLEKTLQEALEKHQREKNEMESHIRETALEEFRLQEEQWEAERRELQFIVQEQDTAVQNMHKKVEKLETEHMDCSDLLRRQTSELEFSTQREERLRKEFEATTLRVRKLEENIEAERAAHLESKFNSEIIQLRIRDLEGALQVEKASQAEAVADLEIIKNEFKEVESAYEREKHNAQESFAKLNLLEKEYFSKNKKLNEDIEEQKKVIIDLSKRLQYNEKSCSELQEELVMAKKHQAFLVETCENNVKELESILDSFTVSGQWTSGIHKDKDKPPSFSVVLERLRRTLTDYQNKLEDASNEEKACNELDSTKQKIDSHTKNIKELQDKLADVNKELSHLHTKCADREALISTLKVELQNVLHCWEKEKAQAAQSESELQKLSQAFHKDAEEKLTFLHTLYQHLVAGCVLIKQPEGMLDKFSWSELCAVLQENVDALIADLNRANEKIRHLEYICKNKSDTMRELQQTQEDTFTKVAEQIKAQESCWHRQKKELELQYSELFLEVQKRAQKFQEIAEKNMEKLNHIEKSHEQLVLENSHFKKLLSQTQREQMSLLAACALMAGALYPLYSRSCALSTQRDFLQEQVNTFELFKLEIRTLAQALSTVEEKKQEEAKMKKKTFKGLIRIFRKGVIAVLAANRLKILGQSCASLFTWMESFKEGIGMLVCTGEPQDKHKFPKHQKEQLRCLQALSWLTSSDLLAAIISSMAELQDVIGKADPNSRICGHLLIGAAKNSFAKLMDKISLVMECIPLHSSRSITYVEKDSLVQRLAHGLHKVNTLALKYGLRGHVPITKSTASLQKQILGFTQRLHAAEVERRSLRLEVTEFKRSVNEMKKELDKAQGLQMQLNEFKQSKLITHEKFESACEELNNALLREEQAQMLLNEQAQQLQELNYKLELHSSEEADKNQTLGEAVKSLSEAKMELRRKDQSLRQLNRHLTQLEQDKRRLEENIHDAESALRMAAKDKECVANHMRAVENTLHKVRDQISLSWSAASRNDFTLQLPKLHLETFAMEGLKGGPEVVACQAMIKSFMDVYQLASTRIMTLEKEMTSHRSHIAALKSELHTACLRENASLQSIGSRDHSNLSIPSRAPLPADTTGIGDFLPLKAELDTTYTFLKETFINTVPHALTSSHSSPVTMSANANRPTQIGL

SEQ ID NO: 250413 - DNA, 3690 bp, Artificial Sequence
  derived and/or modified sequence
atgaacctgaacaccagcagcaacaccggcgacacccagagactgaagatcgccagcctggacgtgaagcagatcctgaagaacgagaccgagctggacatcaccgacaacctgagaaagaagctgcactgggccaagaaggagaagctggagatcaccaccaagcacaacgccgagctggccagctacgagagccagatcgccaagctgagaagcgaggtggagaagggcgaggccctgagacagagcctggagtacgacctggccgtggccagaaaggaggccggcctgggcagaagagccgccgaggagagactggccgaggcccacagaatccaggagaagctgtgcgcccagaacagcgagctgcaggccaagaccaacgagaccgagaaggccttccagaccagccagcagaagtggaaggaggagtgcagaagattcgagcacgacctggaggagagagacaacatgatccagaactgcaacagagagtacgacctgctgatgaaggagaagagcagactggagaagaccctgcaggaggccctggagaagcaccagagagagaagaacgagatggagagccacatcagagagaccgccctggaggagttcagactgcaggaggagcagtgggaggccgagagaagagagctgcagttcatcgtgcaggagcaggacaccgccgtgcagaacatgcacaagaaggtggagaagctggagaccgagcacatggactgcagcgacctgctgagaagacagaccagcgagctggagttcagcacccagagagaggagagactgagaaaggagttcgaggccaccaccctgagagtgagaaagctggaggagaacatcgaggccgagagagccgcccacctggagagcaagttcaacagcgagatcatccagctgagaatcagagacctggagggcgccctgcaggtggagaaggccagccaggccgaggccgtggccgacctggagatcatcaagaacgagttcaaggaggtggagagcgcctacgagagagagaagcacaacgcccaggagagcttcgccaagctgaacctgctggagaaggagtacttcagcaagaacaagaagctgaacgaggacatcgaggagcagaagaaggtgatcatcgacctgagcaagagactgcagtacaacgagaagagctgcagcgagctgcaggaggagctggtgatggccaagaagcaccaggccttcctggtggagacctgcgagaacaacgtgaaggagctggagagcatcctggacagcttcaccgtgagcggccagtggaccagcggcatccacaaggacaaggacaagccccccagcttcagcgtggtgctggagagactgagaagaaccctgaccgactaccagaacaagctggaggacgccagcaacgaggagaaggcctgcaacgagctggacagcaccaagcagaagatcgacagccacaccaagaacatcaaggagctgcaggacaagctggccgacgtgaacaaggagctgagccacctgcacaccaagtgcgccgacagagaggccctgatcagcaccctgaaggtggagctgcagaacgtgctgcactgctgggagaaggagaaggcccaggccgcccagagcgagagcgagctgcagaagctgagccaggccttccacaaggacgccgaggagaagctgaccttcctgcacaccctgtaccagcacctggtggccggctgcgtgctgatcaagcagcccgagggcatgctggacaagttcagctggagcgagctgtgcgccgtgctgcaggagaacgtggacgccctgatcgccgacctgaacagagccaacgagaagatcagacacctggagtacatctgcaagaacaagagcgacaccatgagagagctgcagcagacccaggaggacaccttcaccaaggtggccgagcagatcaaggcccaggagagctgctggcacagacagaagaaggagctggagctgcagtacagcgagctgttcctggaggtgcagaagagagcccagaagttccaggagatcgccgagaagaacatggagaagctgaaccacatcgagaagagccacgagcagctggtgctggagaacagccacttcaagaagctgctgagccagacccagagagagcagatgagcctgctggccgcctgcgccctgatggccggcgccctgtaccccctgtacagcagaagctgcgccctgagcacccagagagacttcctgcaggagcaggtgaacaccttcgagctgttcaagctggagatcagaaccctggcccaggccctgagcaccgtggaggagaagaagcaggaggaggccaagatgaagaagaagaccttcaagggcctgatcagaatcttcagaaagggcgtgatcgccgtgctggccgccaacagactgaagatcctgggccagagctgcgccagcctgttcacctggatggagagcttcaaggagggcatcggcatgctggtgtgcaccggcgagccccaggacaagcacaagttccccaagcaccagaaggagcagctgagatgcctgcaggccctgagctggctgaccagcagcgacctgctggccgccatcatcagcagcatggccgagctgcaggacgtgatcggcaaggccgaccccaacagcagaatctgcggccacctgctgatcggcgccgccaagaacagcttcgccaagctgatggacaagatcagcctggtgatggagtgcatccccctgcacagcagcagaagcatcacctacgtggagaaggacagcctggtgcagagactggcccacggcctgcacaaggtgaacaccctggccctgaagtacggcctgagaggccacgtgcccatcaccaagagcaccgccagcctgcagaagcagatcctgggcttcacccagagactgcacgccgccgaggtggagagaagaagcctgagactggaggtgaccgagttcaagagaagcgtgaacgagatgaagaaggagctggacaaggcccagggcctgcagatgcagctgaacgagttcaagcagagcaagctgatcacccacgagaagttcgagagcgcctgcgaggagctgaacaacgccctgctgagagaggagcaggcccagatgctgctgaacgagcaggcccagcagctgcaggagctgaactacaagctggagctgcacagcagcgaggaggccgacaagaaccagaccctgggcgaggccgtgaagagcctgagcgaggccaagatggagctgagaagaaaggaccagagcctgagacagctgaacagacacctgacccagctggagcaggacaagagaagactggaggagaacatccacgacgccgagagcgccctgagaatggccgccaaggacaaggagtgcgtggccaaccacatgagagccgtggagaacaccctgcacaaggtgagagaccagatcagcctgagctggagcgccgccagcagaaacgacttcaccctgcagctgcccaagctgcacctggagaccttcgccatggagggcctgaagggcggccccgaggtggtggcctgccaggtgagagtgcagtggtgcgaccacagcagcctgcagagccagatgcccggcctgaagcagagcagctgcctgagcctgctgagcacctag

SEQ ID NO: 250414 - DNA, 3981 bp, Artificial Sequence
  derived and/or modified sequence
atgaacctgaacaccagcagcaacaccggcgacacccagagactgaagatcgccagcctggacgtgaagcagatcctgaagaacgagaccgagctggacatcaccgacaacctgagaaagaagctgcactgggccaagaaggagaagctggagatcaccaccaagcacaacgccgagctggccagctacgagagccagatcgccaagctgagaagcgaggtggagaagggcgaggccctgagacagagcctggagtacgacctggccgtggccagaaaggaggccggcctgggcagaagagccgccgaggagagactggccgaggcccacagaatccaggagaagctgtgcgcccagaacagcgagctgcaggccaagaccaacgagaccgagaaggccttccagaccagccagcagaagtggaaggaggagtgcagaagattcgagcacgacctggaggagagagacaacatgatccagaactgcaacagagagtacgacctgctgatgaaggagaagagcagactggagaagaccctgcaggaggccctggagaagcaccagagagagaagaacgagatggagagccacatcagagagaccgccctggaggagttcagactgcaggaggagcagtgggaggccgagagaagagagctgcagttcatcgtgcaggagcaggacaccgccgtgcagaacatgcacaagaaggtggagaagctggagaccgagcacatggactgcagcgacctgctgagaagacagaccagcgagctggagttcagcacccagagagaggagagactgagaaaggagttcgaggccaccaccctgagagtgagaaagctggaggagaacatcgaggccgagagagccgcccacctggagagcaagttcaacagcgagatcatccagctgagaatcagagacctggagggcgccctgcaggtggagaaggccagccaggccgaggccgtggccgacctggagatcatcaagaacgagttcaaggaggtggagagcgcctacgagagagagaagcacaacgcccaggagagcttcgccaagctgaacctgctggagaaggagtacttcagcaagaacaagaagctgaacgaggacatcgaggagcagaagaaggtgatcatcgacctgagcaagagactgcagtacaacgagaagagctgcagcgagctgcaggaggagctggtgatggccaagaagcaccaggccttcctggtggagacctgcgagaacaacgtgaaggagctggagagcatcctggacagcttcaccgtgagcggccagtggaccagcggcatccacaaggacaaggacaagccccccagcttcagcgtggtgctggagagactgagaagaaccctgaccgactaccagaacaagctggaggacgccagcaacgaggagaaggcctgcaacgagctggacagcaccaagcagaagatcgacagccacaccaagaacatcaaggagctgcaggacaagctggccgacgtgaacaaggagctgagccacctgcacaccaagtgcgccgacagagaggccctgatcagcaccctgaaggtggagctgcagaacgtgctgcactgctgggagaaggagaaggcccaggccgcccagagcgagagcgagctgcagaagctgagccaggccttccacaaggacgccgaggagaagctgaccttcctgcacaccctgtaccagcacctggtggccggctgcgtgctgatcaagcagcccgagggcatgctggacaagttcagctggagcgagctgtgcgccgtgctgcaggagaacgtggacgccctgatcgccgacctgaacagagccaacgagaagatcagacacctggagtacatctgcaagaacaagagcgacaccatgagagagctgcagcagacccaggaggacaccttcaccaaggtggccgagcagatcaaggcccaggagagctgctggcacagacagaagaaggagctggagctgcagtacagcgagctgttcctggaggtgcagaagagagcccagaagttccaggagatcgccgagaagaacatggagaagctgaaccacatcgagaagagccacgagcagctggtgctggagaacagccacttcaagaagctgctgagccagacccagagagagcagatgagcctgctggccgcctgcgccctgatggccggcgccctgtaccccctgtacagcagaagctgcgccctgagcacccagagagacttcctgcaggagcaggtgaacaccttcgagctgttcaagctggagatcagaaccctggcccaggccctgagcaccgtggaggagaagaagcaggaggaggccaagatgaagaagaagaccttcaagggcctgatcagaatcttcagaaagggcgtgatcgccgtgctggccgccaacagactgaagatcctgggccagagctgcgccagcctgttcacctggatggagagcttcaaggagggcatcggcatgctggtgtgcaccggcgagccccaggacaagcacaagttccccaagcaccagaaggagcagctgagatgcctgcaggccctgagctggctgaccagcagcgacctgctggccgccatcatcagcagcatggccgagctgcaggacgtgatcggcaaggccgaccccaacagcagaatctgcggccacctgctgatcggcgccgccaagaacagcttcgccaagctgatggacaagatcagcctggtgatggagtgcatccccctgcacagcagcagaagcatcacctacgtggagaaggacagcctggtgcagagactggcccacggcctgcacaaggtgaacaccctggccctgaagtacggcctgagaggccacgtgcccatcaccaagagcaccgccagcctgcagaagcagatcctgggcttcacccagagactgcacgccgccgaggtggagagaagaagcctgagactggaggtgaccgagttcaagagaagcgtgaacgagatgaagaaggagctggacaaggcccagggcctgcagatgcagctgaacgagttcaagcagagcaagctgatcacccacgagaagttcgagagcgcctgcgaggagctgaacaacgccctgctgagagaggagcaggcccagatgctgctgaacgagcaggcccagcagctgcaggagctgaactacaagctggagctgcacagcagcgaggaggccgacaagaaccagaccctgggcgaggccgtgaagagcctgagcgaggccaagatggagctgagaagaaaggaccagagcctgagacagctgaacagacacctgacccagctggagcaggacaagagaagactggaggagaacatccacgacgccgagagcgccctgagaatggccgccaaggacaaggagtgcgtggccaaccacatgagagccgtggagaacaccctgcacaaggtgagagaccagatcagcctgagctggagcgccgccagcagaaacgacttcaccctgcagctgcccaagctgcacctggagaccttcgccatggagggcctgaagggcggccccgaggtggtggcctgccaggccatgatcaagagcttcatggacgtgtaccagctggccagcaccagaatcatgaccctggagaaggagatgaccagccacagaagccacatcgccgccctgaagagcgagctgcacaccgcctgcctgagagagaacgccagcctgcagagcatcggcagcagagaccacagcaacctgagcatccccagcagagcccccctgcccgccgacaccaccggcatcggcgacttcctgcccctgaaggccgagctggacaccacctacaccttcctgaaggagaccttcatcaacaccgtgccccacgccctgaccagcagccacagcagccccgtgaccatgagcgccaacgccaacagacccacccagatcggcctgtag

SEQ ID NO: 250415 - DNA, 4097 bp, Artificial Sequence
  derived and/or modified sequence
aaaaagtggggccgggcctgagttgggctgacctgtgaaagtctgggaaggtctgcgagagaagcggagtgttttcagctccggaagtggcagttgtaaacttcacctcccgggggctcttccccttctgtacccctttgctgtttgtccccctcctcccgggtcctggagtccgtcgtgttccaacagtttttgctcttattcccgtgggctgcctgggcctcctttcacccgtgagacttggagcggcccctggggtcttgggtgtgcagcacggatcacgcgagacccctgagacctcaaatcatctaacgtgaagccacagacatcttgggcaattttaatcatcaagaaagaaatatgtcattaagaaatagcagggtattttgaaagagttggaaaacatcatgaatttgaatacttcaagtaatactggtgatacccaaaggttgaagattgcctcattggatgtaaaacaaatacttaaaaatgaaacagagttggatattactgataatctcaggaagaaactccattgggctaaaaaagaaaagttagaaataacaaccaaacacaatgcagagctggcaagctatgagagccagattgccaagctacggtccgaggttgaaaagggagaagcattgcgacaaagtctggaatatgacctagctgttgctagaaaggaagctggtcttggaagacgggctgctgaagaaagattagccgaggcacataggatccaagaaaaactctgtgcacagaattcagaacttcaagcaaagacaaatgagactgagaaagcatttcagacttctcagcaaaaatggaaagaagaatgcagaagatttgaacatgatttggaggaaagagacaatatgatccaaaattgcaatcgagaatatgatttacttatgaaagaaaaaagcagactagagaaaactctacaggaagcgttggaaaaacatcaacgggagaagaatgagatggagtctcatatcagggagacagcattggaggagtttagattacaagaagaacaatgggaagcagaaagaagagaattacaatttatagtacaggagcaagatactgctgtgcaaaatatgcataagaaagtagaaaaattagaaacagaacatatggactgctctgaccttttacggcgacaaacaagtgaacttgaatttagcactcaacgagaggaacgccttagaaaagaatttgaggcaactactctaagagtgaggaaattagaagaaaacattgaagcagaaagagcagcgcatttggaatcaaaatttaattctgaaattattcagttacggattcgagaccttgaaggagctttgcaagtagagaaggccagtcaagcagaagctgttgctgatttggaaattatcaagaatgaattcaaagaagttgaaagtgcatatgagcgagaaaagcataatgcacaagagagctttgcaaaactaaatttattagaaaaagagtatttctccaaaaataagaaactaaatgaagacatcgaggaacagaagaaagtaattatagacctttcaaagagactccagtataatgaaaaaagttgcagtgaattacaggaagaactagtaatggctaagaagcaccaggccttcctagtagagacatgtgaaaataacgtgaaagaattggaatcgatcttggacagctttactgtgtcgggccagtggacatcaggcatccacaaggacaaagataaacctcccagcttctctgttgtccttgagagattgaggcgtaccttgacagattaccagaacaagctggaagatgcatctaatgaggaaaaggcatgtaatgaacttgattctacgaaacagaagatagactctcacactaaaaatataaaggaacttcaggataaactggctgatgttaataaagagttaagtcatttacacactaaatgtgcagaccgagaggctttaataagcactttaaaagtggaactacaaaatgtgctgcactgttgggagaaagaaaaggctcaggcagcccagtctgaaagtgaactgcagaagctttcccaggctttccataaggatgcagaggagaagctaaccttccttcacaccttatatcagcacttggtagcaggctgtgtgctcataaaacaaccagaaggcatgctggataaattctcttggtctgagctttgtgcagtcttacaggagaatgttgatgccctgattgcagacctcaacagggctaatgagaagataaggcatctagagtatatctgtaaaaacaagtctgacacgatgagagagcttcagcagactcaggaagacacctttaccaaagtggcagaacagatcaaagcccaagagagctgctggcacagacaaaagaaggaactagagctgcagtattctgaactcttcctggaggtgcagaagagggcacagaaatttcaagaaattgctgaaaaaaacatggaaaaattgaaccatattgagaagtcacatgaacagttggttcttgaaaattcgcacttcaaaaaactgttatcacagactcaaagggaacagatgtccttgctggcagcctgtgcattaatggctggtgccttatatcccctctatagccgatcatgcgccttgtctacacagagagattttctccaggagcaggtcaacacctttgagttgttcaaactggaaattagaactctagcccaggctttgtcaactgtagaggaaaagaagcaagaggaagccaagatgaaaaagaaaacattcaaaggattgatacgtatatttcggaaaggtgttattgctgttttggcagcaaacagactcaagattttgggccaatcatgtgcctctctttttacctggatggagagtttcaaagaaggcataggcatgttagtgtgcacaggagagccccaagacaagcataaatttccaaaacatcaaaaggagcagttgcgttgtttacaagcgctcagttggctcaccagttctgaccttcttgctgcaataatcagttctatggctgaattacaagacgtcattggtaaagcagatccaaattccagaatttgtggacatttactcataggtgcagccaagaattcttttgcaaaactcatggataaaattagtctggtaatggaatgtatacctctgcacagtagcaggagtattacatatgtagaaaaagattccctggttcagaggctggcccatggacttcataaagtaaacacactggccctgaaatatggtttgcgtggccatgtgcccattacgaaaagcacagcatcgttgcagaagcaaatacttggatttacacaaagactgcatgctgcagaagtggagcgccgctcactacgcttagaggtcacagaattcaaacgaagtgtgaatgaaatgaaaaaggagcttgacaaagcccagggtctgcaaatgcaattaaatgaatttaagcagtctaaattgatcacccatgagaagtttgaaagtgcatgtgaagaactaaataatgcattacttcgggaagagcaggcacaaatgctattgaatgaacaggcacaacaactacaggaattgaattataaacttgaattgcactccagtgaggaagctgacaaaaaccaaactcttggagaagctgttaagagtctctccgaggcaaagatggagctgagaagaaaagatcaatctctgcgtcagctcaatagacatcttacccagctggagcaggacaagcgtcgactggaggagaacatccatgatgcagagagtgccctccgcatggcagccaaagacaaagaatgtgttgctaatcacatgagagcagtagaaaatacgcttcacaaggtcagagatcagatctcgctgtcatggtctgcggcaagtaggaatgacttcaccctacagctacccaaactgcacctggagacctttgcaatggaggggctcaagggcgggccagaggtggtagcatgccaggttagagtgcagtggtgtgatcatagctcactgcagtctcaaatgccagggctcaagcaatcttcctgcctcagcctgctgagtacctag

SEQ ID NO: 250416 - DNA, 6512 bp, Artificial Sequence
  derived and/or modified sequence
tccggaagtggcagttgtaaacttcacctcccgggggctcttccccttctgtacccctttgctgtttgtccccctcctcccgggtcctggagtccgtcgtgttccaacagtttttgctcttattcccgtgggctgcctgggcctcctttcacccgtgagacttggagcggcccctggggtcttgggtgtgcagcacggatcacgcgagacccctgagacctcaaatcatctaacgtgaagccacagacatcttgggcaattttaatcatcaagaaagaaatatgtcattaagaaatagcagggtattttgaaagagttggaaaacatcatgaatttgaatacttcaagtaatactggtgatacccaaaggttgaagattgcctcattggatgtaaaacaaatacttaaaaatgaaacagagttggatattactgataatctcaggaagaaactccattgggctaaaaaagaaaagttagaaataacaaccaaacacaatgcagagctggcaagctatgagagccagattgccaagctacggtccgaggttgaaaagggagaagcattgcgacaaagtctggaatatgacctagctgttgctagaaaggaagctggtcttggaagacgggctgctgaagaaagattagccgaggcacataggatccaagaaaaactctgtgcacagaattcagaacttcaagcaaagacaaatgagactgagaaagcatttcagacttctcagcaaaaatggaaagaagaatgcagaagatttgaacatgatttggaggaaagagacaatatgatccaaaattgcaatcgagaatatgatttacttatgaaagaaaaaagcagactagagaaaactctacaggaagcgttggaaaaacatcaacgggagaagaatgagatggagtctcatatcagggagacagcattggaggagtttagattacaagaagaacaatgggaagcagaaagaagagaattacaatttatagtacaggagcaagatactgctgtgcaaaatatgcataagaaagtagaaaaattagaaacagaacatatggactgctctgaccttttacggcgacaaacaagtgaacttgaatttagcactcaacgagaggaacgccttagaaaagaatttgaggcaactactctaagagtgaggaaattagaagaaaacattgaagcagaaagagcagcgcatttggaatcaaaatttaattctgaaattattcagttacggattcgagaccttgaaggagctttgcaagtagagaaggccagtcaagcagaagctgttgctgatttggaaattatcaagaatgaattcaaagaagttgaaagtgcatatgagcgagaaaagcataatgcacaagagagctttgcaaaactaaatttattagaaaaagagtatttctccaaaaataagaaactaaatgaagacatcgaggaacagaagaaagtaattatagacctttcaaagagactccagtataatgaaaaaagttgcagtgaattacaggaagaactagtaatggctaagaagcaccaggccttcctagtagagacatgtgaaaataacgtgaaagaattggaatcgatcttggacagctttactgtgtcgggccagtggacatcaggcatccacaaggacaaagataaacctcccagcttctctgttgtccttgagagattgaggcgtaccttgacagattaccagaacaagctggaagatgcatctaatgaggaaaaggcatgtaatgaacttgattctacgaaacagaagatagactctcacactaaaaatataaaggaacttcaggataaactggctgatgttaataaagagttaagtcatttacacactaaatgtgcagaccgagaggctttaataagcactttaaaagtggaactacaaaatgtgctgcactgttgggagaaagaaaaggctcaggcagcccagtctgaaagtgaactgcagaagctttcccaggctttccataaggatgcagaggagaagctaaccttccttcacaccttatatcagcacttggtagcaggctgtgtgctcataaaacaaccagaaggcatgctggataaattctcttggtctgagctttgtgcagtcttacaggagaatgttgatgccctgattgcagacctcaacagggctaatgagaagataaggcatctagagtatatctgtaaaaacaagtctgacacgatgagagagcttcagcagactcaggaagacacctttaccaaagtggcagaacagatcaaagcccaagagagctgctggcacagacaaaagaaggaactagagctgcagtattctgaactcttcctggaggtgcagaagagggcacagaaatttcaagaaattgctgaaaaaaacatggaaaaattgaaccatattgagaagtcacatgaacagttggttcttgaaaattcgcacttcaaaaaactgttatcacagactcaaagggaacagatgtccttgctggcagcctgtgcattaatggctggtgccttatatcccctctatagccgatcatgcgccttgtctacacagagagattttctccaggagcaggtcaacacctttgagttgttcaaactggaaattagaactctagcccaggctttgtcaactgtagaggaaaagaagcaagaggaagccaagatgaaaaagaaaacattcaaaggattgatacgtatatttcggaaaggtgttattgctgttttggcagcaaacagactcaagattttgggccaatcatgtgcctctctttttacctggatggagagtttcaaagaaggcataggcatgttagtgtgcacaggagagccccaagacaagcataaatttccaaaacatcaaaaggagcagttgcgttgtttacaagcgctcagttggctcaccagttctgaccttcttgctgcaataatcagttctatggctgaattacaagacgtcattggtaaagcagatccaaattccagaatttgtggacatttactcataggtgcagccaagaattcttttgcaaaactcatggataaaattagtctggtaatggaatgtatacctctgcacagtagcaggagtattacatatgtagaaaaagattccctggttcagaggctggcccatggacttcataaagtaaacacactggccctgaaatatggtttgcgtggccatgtgcccattacgaaaagcacagcatcgttgcagaagcaaatacttggatttacacaaagactgcatgctgcagaagtggagcgccgctcactacgcttagaggtcacagaattcaaacgaagtgtgaatgaaatgaaaaaggagcttgacaaagcccagggtctgcaaatgcaattaaatgaatttaagcagtctaaattgatcacccatgagaagtttgaaagtgcatgtgaagaactaaataatgcattacttcgggaagagcaggcacaaatgctattgaatgaacaggcacaacaactacaggaattgaattataaacttgaattgcactccagtgaggaagctgacaaaaaccaaactcttggagaagctgttaagagtctctccgaggcaaagatggagctgagaagaaaagatcaatctctgcgtcagctcaatagacatcttacccagctggagcaggacaagcgtcgactggaggagaacatccatgatgcagagagtgccctccgcatggcagccaaagacaaagaatgtgttgctaatcacatgagagcagtagaaaatacgcttcacaaggtcagagatcagatctcgctgtcatggtctgcggcaagtaggaatgacttcaccctacagctacccaaactgcacctggagacctttgcaatggaggggctcaagggcgggccagaggtggtagcatgccaggctatgattaaaagtttcatggatgtctaccagcttgcaagcactagaatcatgacattagagaaggaaatgacatctcatcgaagtcacattgcagccttgaaatcagaacttcacacagcttgtttacgtgaaaatgcaagtttacaatcaataggatcacgagaccattcaaatctctccattccttcaagagctcctcttcctgctgacacaactggtattggggatttcttaccattgaaagctgaacttgatactacttacactttcttaaaggagacatttataaatactgtgccccatgctctgacatcatctcactcctctccagtgactatgtctgctaatgccaacagaccaactcagattggattatgacttcatgaaattaaaaaatggaggaagagttaacagtacaattaaaattgttttgaatgggaattttcttatcagttgacttttgtttcagcagaagtggcagtggatttaaaaaatttgtgcgctatcttgatgtattctggtagctctgtctccttgaataaggaaatagccaacttttttctctccaagttttatttgttatcacagttgctcatttttatgtaacatatttttaaatgttaaggaatgacacattttgggtaatttccctcagacttaaaaaaatcaataagccattttagtctctatctatcaaagttgtttcatacttgtctattttaaagcaggactgcaatgctttaataggattgagagagctatttgaaatgtatgccaatgattcctgtcatttcatggcagcccggccatggttcactgagccccctcttctctcttgtcagctcaactgaagacaagcatttagttgcaaactttaagcaggttgtgcaaaacagaaatgatgtgactgcttctcctcctgcacaataatgtcactcctggtcaatgtgagaaggtcaggttgctccttgtaaagctacatgataccacttgcccatttgaacaagttaagttaactgctgaatctggtccctgaaggcactgaaaactcattcttttagcaagtctgcatttgataagaaagtagagcaattgtgctggaggatttctgtggtatgtttaggcacttcataaggacagttcccacactaggatagcaggtaatatatttagtataagctgaaaaacttcaaggtaatggctgttttgaccttcaaaatagactccttttttgtttttgttgttggtaggacccaagagtgacacccatctttgatgctgacagaatttaaaacaaggccattgccctgcattttctgccttgtagcacacaaaagtaaaattgtatgtcaggccgagatgtcggggagctgacaagatgccccagtgacatttcagctagaaagagcaagtgtcttgcaaccaagtggtcaaatatcaaataataggtcaagcaggaaggagctgagttctaaccacaaagaggtttctggtaacttacttgacaagcttttgggtgctttgtggcttgacaaagtgatgttctgttgggtatcgctagacagactgttctttatcgccttcagaagatcagacattgacattgattaaactctttaacccttaaaggttaaatccttgcagtttgcatcatggtaagtgaagaacaaaagaatatttgtagtaagaatttgtttttgtattaatcatttaactccctagtgctattaacttctgatgtgaactatagcttttgacaaagagtcttgatacataatctattttttatattatttttcattatggaatctttcattatggatacattagagtataacagtatgtattacagaagtttttttgtcttatctttacagtgacatttgattcaaattacccaactgctgagaatttttttattggccttggtaaataagattttatactaactatttattagtagccaaattagccaagtgatttatgccatctgagggaacacagcagtattactgtcgtactgtgtaacacatcctattcttgtaatactgaaccactataattagctttatataaaactttagaaagcttatatggagtaaaattatatctttaaccaaatttctcttaattctttccttggaattatttttaatatgacctgtgtaacatgacctgtatgaaattcaacttgcaaatttattataacatggaagtgctatttattgtttttatacagatcatataatttctgcacatttcagaacacctttctctgctgttccaaacaatgattaggatattgttcatacagaaattgatagacaattttttagttcatgtgatatcactgagcttacaattctcactagagaagaacaaggttactatatgtaacctctatgtctaagtgtttgtgtgtgtgtatgcttgtgttgaatctgttttcagatcctactgattttagaggaacaagcagctttgtaaaatgtgccttggaaaggccttggtcttcttgccttgattttataatctgttaatgggataactccaaaaataaatgtgtatgtgtctccatata

SEQ ID NO: 250417 - DNA, 3690 bp, Artificial Sequence
  derived and/or modified sequence
atgaatctaaatacatctagcaacacaggtgacacacagagactaaaaatcgcctctctagacgtcaagcagatcctgaagaatgagaccgagctggacattacagataacttgcgcaaaaaactacattgggctaaaaaggagaaactggaaattaccacaaaacataacgccgagctggcttcatatgagagccagattgctaagctgcggtcagaagtggagaaaggggaagccttacgccagagcttggaatacgacctggccgtagcaaggaaggaagcgggtctcgggcgtagagcagctgaggagagactcgccgaagcccacagaatccaggaaaaactgtgcgctcagaactctgagctgcaggccaagaccaatgagaccgagaaggccttccaaacaagccagcagaagtggaaagaagaatgcagacggtttgaacacgacctggaagaacgagataacatgatccagaattgcaatagggaatacgatttactgatgaaagagaagagtaggctggaaaagacactgcaggaggccttagagaaacaccaacgtgagaagaatgagatggaatcgcacattcgtgaaaccgcacttgaagaatttcggctgcaggaagaacagtgggaggcggagaggcgagaactgcagttcattgtccaagagcaggatacggctgtccagaatatgcataaaaaagttgaaaagctggaaactgagcatatggactgttcagatttgctgagacggcaaacatccgaactggaattttccacacagcgcgaggaacgactccgaaaagaatttgaagctacaactctgcgcgttagaaaactcgaagagaacatcgaagccgaaagggccgcacacttggagtctaaatttaattccgaaatcattcaactaagaatcagagacttagaaggagccctccaggttgagaaggcctcgcaggcagaagctgtggcagacctggaaatcataaagaatgaatttaaggaggtagaaagtgcatacgaacgggaaaagcataatgcacaggagtcctttgcaaaactgaaccttcttgaaaaggagtacttcagcaaaaacaagaaactcaatgaggatattgaagagcagaaaaaggttatcatcgatctttctaagagattacaatacaatgagaagtcatgcagcgagttgcaagaagagcttgtcatggcaaaaaagcatcaggcctttttagtggagacatgcgaaaataacgtcaaagaactggaaagcatcttggattcctttaccgtgtcggggcaatggacgtccggcatacacaaggacaaggacaagcccccatccttcagcgtagtactagagagactgaggaggacactgacagattatcaaaacaaacttgaggatgccagcaacgaagagaaagcatgcaatgaactggacagcacaaagcagaaaatagattctcataccaagaatataaaggagctgcaggataagttagcagatgtgaacaaggagctgagccacctccatactaagtgcgccgacagagaagccctgatatctacgctgaaagtggagttgcagaatgtactgcattgctgggaaaaggaaaaagcccaggccgcccagagcgagtcagagttacaaaagctctcccaggccttccataaggacgccgaggagaagctgactttcctgcacactctgtatcagcatctcgtggctgggtgtgtgcttataaagcagccagaaggtatgctggataagtttagctggagtgagttgtgcgctgtgcttcaggaaaacgtagatgccttaatcgctgatctcaatcgggcaaacgagaagattcggcatctcgaatacatttgtaagaacaaatccgatacaatgcgagaactccagcaaacacaggaagacacctttaccaaggtggccgaacagatcaaggcgcaagaatcatgttggcataggcaaaagaaagagctggagctccagtattcggaactgtttctggaagtgcaaaagcgggcccaaaagttccaggaaatcgctgagaagaacatggaaaagctcaaccacatagaaaagagccatgagcagctcgtgctcgaaaactcccacttcaaaaagctcctgtcccagactcagagggagcagatgagcctgcttgcggcctgcgccttaatggcaggcgctttgtatcccctgtatagcagatcatgcgccctgtccacacaacgagatttcctgcaggagcaggtgaacacattcgaactgtttaagttggaaatcaggactctcgctcaagccctctctacggtagaagagaaaaagcaggaagaggctaagatgaagaagaagacttttaagggcctcattcgcatttttcgaaaaggcgttatagctgtcctcgcagcaaaccgcttgaagattcttggtcaaagttgcgcctccctgttcacatggatggagtctttcaaggagggcatcggcatgttagtttgtaccggcgagccacaagacaaacacaagttcccaaagcaccaaaaggagcagctgagatgtctgcaggctctttcatggctaacctcatcagatttattggctgcaattatctcttccatggctgaactccaggacgtgatcgggaaagctgatccaaacagcagaatttgtggacacctcttgatcggtgccgcaaaaaatagctttgctaaactgatggacaaaattagccttgttatggaatgtatcccccttcactccagccgctccatcacatacgtcgagaaagactctctggtccagcgtctggcacacgggcttcacaaggtgaataccctggcgctgaagtatgggctgagaggacacgttcccattactaagtctactgcatctcttcagaaacagatactcggatttactcagcggctgcacgcagccgaggtcgagcgacgatcacttaggctggaagtcaccgaattcaaaaggagtgttaacgagatgaaaaaggagttggacaaagcccaaggcctgcagatgcagctgaacgaattcaagcagagcaaactgatcacgcatgagaaattcgagtccgcctgcgaggaactcaataacgctttactgagggaggagcaagcacagatgctcttaaatgagcaggcacagcagctacaagagctaaactataagcttgagcttcacagctccgaggaagccgataaaaaccagactctaggagaggcagtgaagtcgctgagcgaggccaagatggaactgagaaggaaggatcagtcccttcgtcaactgaatcgacaccttacacagctggagcaggataagcgccgcctggaggagaacatacatgatgccgaatccgccctccggatggcagcaaaggataaagagtgtgtggccaaccatatgcgagcagtcgaaaacactttgcacaaagtgcgggatcagatttctctcagctggtctgccgcctccaggaatgacttcaccctccagttgcccaagctgcacctggagaccttcgcaatggaaggacttaagggagggccagaagtagtggcctgtcaagtgcgtgttcagtggtgcgatcactccagccttcaatcccagatgccaggactcaaacaaagctcctgcctctctcttctgtctacctag

SEQ ID NO: 250418 - DNA, 3981 bp, Artificial Sequence
  derived and/or modified sequence
atgaacttgaatacaagttcaaatacgggcgacacccaaagactgaagattgcctcccttgacgtgaagcagatcttgaagaatgagaccgaattagatataacggacaaccttcgaaaaaagctgcactgggctaagaaagaaaagctggagattaccacaaaacataacgcggaattagcgagctatgagtcccagatcgccaagttaagatccgaggtcgaaaagggagaggccttgagacaaagcctcgaatatgacctggcagttgctcggaaggaagctggactcgggcggagggcagcggaggaaagactggccgaggcacatcgaattcaggaaaaactgtgtgcccagaactcggaactgcaggccaagaccaacgaaaccgagaaagcatttcagactagccaacagaaatggaaggaagaatgtcggaggtttgaacacgatctcgaggagagagataatatgatccaaaattgtaacagagaatacgacctgctgatgaaggaaaaatcacgtctggaaaagacactccaggaagccctggaaaagcatcagcgcgaaaaaaatgagatggagtctcacatcagggagaccgccctggaagaattccgtctccaagaggaacagtgggaagctgaacgacgcgaactccagttcattgtacaggagcaggacaccgcagtgcagaacatgcacaagaaggtagaaaaattggaaacggaacacatggactgtagcgacctgctgagaagacagactagcgagctggaattctccacccagagagaagaacggttacgaaaagaatttgaggccacaaccttacgcgtgaggaaattagaagagaacatcgaagctgagagggctgctcatctggagtccaagttcaattccgaaattatccagctccggattcgtgacctggagggggcactgcaggtcgagaaagcttcccaagccgaggcggttgcggatctggaaataattaagaacgagtttaaggaagtagagagcgcttatgaacgcgagaaacacaatgcccaggaatcgttcgcaaagctaaatttgctcgaaaaagaatacttctccaagaacaagaagcttaacgaagatatcgaagaacaaaaaaaggtaataatcgatcttagcaaaaggctccagtataacgagaagtcatgctccgagctgcaggaagaactcgttatggcaaaaaagcaccaggcatttctggtggagacttgcgaaaacaacgtgaaggaactggaaagtatattagactccttcaccgtgagtggacagtggacatcagggattcataaggataaggacaaaccaccaagcttctccgtggtgctagagaggctgagacggactctgaccgactatcaaaataagctggaggacgccagtaacgaagagaaggcttgtaacgagctggattcaacaaagcaaaaaatcgactcccacactaagaatattaaggagcttcaggacaaacttgctgatgtcaacaaggaactttcccacctgcataccaaatgtgccgaccgggaggcgctgatttcgactttaaaagtcgagctccagaatgtgctgcattgctgggagaaggaaaaagctcaggctgcacagtccgagtccgagctgcaaaaactctcccaggcctttcataaggatgccgaggagaagctgacgttcctgcacacactgtatcagcaccttgtggctggatgtgtgcttataaaacagccagaggggatgttggacaagtttagctggtcagagctgtgtgccgtactccaagaaaatgtagatgctctcatcgccgacttgaatcgggccaacgaaaaaattaggcacctggaatacatatgcaagaataagtcagatacaatgagagaactccagcagacgcaggaggatactttcaccaaagtggcagaacagatcaaagcccaggaatcatgttggcataggcaaaagaaggagctcgaactacaatattctgagctcttcctggaggttcagaaacgggcgcagaagttccaagagatagccgagaaaaatatggagaagctcaatcatatcgagaaaagccatgagcaactggtcctggaaaattcccactttaagaaactcctgagtcagacccagagagagcaaatgagtctgctcgccgcgtgtgctctcatggccggagccctgtaccccctatactccaggagttgcgcactaagtacacagagagattttctccaagagcaggtgaacaccttcgagttgttcaagttagagataaggaccctagcccaagctctcagcaccgtggaggaaaaaaagcaggaagaagcgaagatgaagaagaaaactttcaaaggcctgattaggattttccgcaaaggggtcatcgctgttctcgctgcaaaccggctgaaaatattggggcaatcgtgcgcctcattatttacctggatggagtcctttaaagaaggaatcgggatgttggtgtgcaccggggaaccacaagacaaacacaaattccctaagcatcagaaagagcagctgaggtgtttacaggccctgtcatggctcacttcatcggacctgctggcagctatcattagttccatggcagaacttcaggacgtaatcggaaaggcggacccgaactcaagaatatgcggtcatctgctcatcggagccgcaaaaaattcatttgctaaactgatggacaagatttcactggtgatggagtgtattcctctgcacagttcacgcagcatcacttacgtcgagaaggatagtctggtccagcgacttgctcacggcttgcacaaggtaaatactctcgcgctaaagtacggcctgcggggccacgtgcctattaccaagagtaccgcgtccctgcagaagcaaatcctgggattcacacagagacttcacgcggccgaggtcgagagacggagcttacgattggaggtgacagagttcaaacggagcgtcaatgaaatgaaaaaagagctggataaggctcaaggtctgcagatgcaattgaacgaatttaagcagagcaaactgataactcacgagaaatttgagtctgcctgtgaggagctaaataacgccctgttgcgtgaggagcaggctcaaatgttgctgaatgagcaggcgcagcaactccaagagcttaactacaagctcgaactgcattcttccgaggaagccgataaaaatcagactctaggagaagccgtcaaatcactcagcgaggccaaaatggaactgagaagaaaagaccagagtctgaggcaactaaatagacatctcactcagctcgagcaggacaaaagaaggctggaggagaacattcacgacgctgaatctgcactcagaatggcagctaaggacaaggaatgtgttgcgaaccacatgcgcgctgtcgagaacacgctccacaaggttagggatcagatttctcttagttggtccgcggcctcacggaatgactttacattgcagcttccgaagctgcacctggaaacattcgcaatggagggccttaaaggtggccccgaggtggttgcttgccaggcaatgatcaagtcctttatggacgtctaccaactggctagcacgcggatcatgaccctcgaaaaggagatgaccagccacaggtctcatattgcagcactaaagtctgagctccatactgcttgcctaagggagaacgccagtctgcagagcatcggaagcagagaccactccaatctgagtatcccctcccgcgccccacttccagccgatactacgggtatcggtgattttctacccctcaaggcagaactcgacactacttacacgtttttaaaagagacctttatcaatactgtcccacacgcgttgacttccagccattcaagtcctgtgaccatgtccgctaatgccaaccggccaacacaaatcggactgtag

SEQ ID NO: 250419 - DNA, 3690 bp, Artificial Sequence
  derived and/or modified sequence
atgaacctgaacaccagcagcaacacaggagacacccagaggctgaagatcgccagcctggatgtgaagcagatcctgaagaatgaaacagagctggacatcacagacaacctgaggaagaagctgcactgggccaagaaggagaagctggagatcaccaccaagcacaatgctgagctggccagctatgagagccagatcgccaagctgcggtctgaggtggagaagggggaggccctgcggcagagcctggagtatgacctggccgtggccaggaaggaggccggcctgggcagaagagctgctgaggagcggctggccgaggcccaccgcatccaggagaagctgtgtgcccagaacagcgagctgcaggccaagaccaatgaaacagagaaggccttccagaccagccagcagaagtggaaggaggagtgccgccgctttgaacatgacctggaggagcgggacaacatgatccagaactgcaaccgggagtatgacctgctgatgaaggagaagagccggctggagaagaccctgcaggaggccctggagaagcaccagcgggagaagaatgagatggagagccacatccgggagacagccctggaggagttccggctgcaggaggagcagtgggaggccgagcggcgggagctgcagttcatcgtgcaggagcaggacacagctgtgcagaacatgcacaagaaggtggagaagctggagacagagcacatggactgcagcgacctgctgcggcggcagaccagcgagctggagttcagcacccagcgggaggagcggctgaggaaggagtttgaggccaccaccctgcgggtgaggaagctggaggagaacattgaagctgagcgggccgcccacctggagagcaagttcaacagcgagatcatccagctgcgcatccgggacctggagggcgccctgcaggtggagaaggccagccaggccgaggccgtggccgacctggagatcatcaagaatgagttcaaggaggtggagagcgcctatgagcgggagaagcacaatgcccaggagagctttgccaagctgaacctgctggagaaggagtacttcagcaagaacaagaagctgaatgaagatattgaggagcagaagaaggtgatcatcgacctgagcaagaggctgcagtacaatgagaagagctgcagcgagctgcaggaggagctggtgatggccaagaagcaccaggccttcctggtggagacctgtgagaacaacgtgaaggagctggagagcatcctggacagcttcaccgtgtctggccagtggaccagcggcatccacaaggacaaggacaagccacccagcttctctgtggtgctggagcggctgcggaggaccctgacagactaccagaacaagctggaggatgccagcaatgaggagaaggcctgcaatgagctggacagcaccaagcagaagattgacagccacaccaagaacatcaaggagctgcaggacaagctggctgatgtgaacaaggagctgagccacctgcacaccaagtgtgccgaccgggaggccctgatcagcaccctgaaggtggagctgcagaatgtgctgcactgctgggagaaggagaaggcccaggccgcccagagcgagagcgagctgcagaagctgagccaggccttccacaaggatgctgaggagaagctgaccttcctgcacaccctgtaccagcacctggtggccggctgtgtgctgatcaagcagcctgagggcatgctggacaagttctcctggagcgagctgtgtgctgtgctgcaggagaatgtggatgccctgattgctgacctgaacagagccaatgagaagatccgccacctggagtacatctgcaagaacaagagtgacaccatgagggagctgcagcagacccaggaggacaccttcaccaaggtggccgagcagatcaaggcccaggagagctgctggcaccggcagaagaaggagctggagctgcagtacagcgagctgttcctggaggtgcagaagagggcccagaagttccaggagattgctgagaagaacatggagaagctgaaccacatcgagaagagccatgagcagctggtgctggagaacagccacttcaagaagctgctgagccagacccagcgggagcagatgagcctgctggccgcctgtgccctgatggccggggccctgtaccccctgtacagccgcagctgtgccctgagcacccagagggacttcctgcaggagcaggtgaacacctttgagctgttcaagctggagatccgcaccctggcccaggccctgagcacagtggaggagaagaagcaggaggaggccaagatgaagaagaagaccttcaagggcctcatccgcatcttcagaaaaggagtgattgctgtgctggccgccaaccggctgaagatcctgggccagagctgtgccagcctcttcacctggatggagagcttcaaggagggcatcggcatgctggtgtgcacaggagagccccaggacaagcacaagttccccaagcaccagaaggagcagctgcgctgcctgcaggccctgtcctggctgaccagcagtgacctgctggccgccatcatcagctccatggccgagctgcaggatgtgattggcaaggctgaccccaacagccgcatctgtggccacctgctgattggagctgccaagaacagctttgccaagctgatggacaagatcagcctggtgatggagtgcatccccctgcacagcagccgcagcatcacctacgtggagaaggacagcctggtgcagaggctggcccacggcctgcacaaggtgaacaccctggccctgaagtatggcctgcggggccacgtgcccatcaccaagagcacagccagcctgcagaagcagatcctgggcttcacccagaggctgcatgctgctgaggtggagcggcgcagcctgcggctggaggtgacagagttcaagaggtctgtgaatgagatgaagaaggagctggacaaggcccagggcctgcagatgcagctgaatgagttcaagcagagcaagctgatcacccatgagaagtttgaaagtgcctgtgaggagctgaacaatgccctgctgcgggaggagcaggcccagatgctgctgaatgagcaggcccagcagctgcaggagctgaactacaagctggagctgcacagcagcgaggaggccgacaagaaccagaccctgggggaggccgtgaagagcctgtctgaggccaagatggagctgcggaggaaggaccagagcctgcggcagctgaacagacacctgacccagctggagcaggacaagaggcggctggaggagaacatccatgatgctgagagcgccctgaggatggccgccaaggacaaggaatgtgtggccaaccacatgagagctgtggagaacaccctgcacaaggtgcgggaccagatcagcctgtcctggagcgctgccagcagaaatgacttcaccctgcagctgcccaagctgcacctggagacctttgccatggagggcctgaagggcggccctgaggtggtggcctgccaggtgcgggtgcagtggtgtgaccacagcagcctgcagagccagatgcctggcctgaagcagagcagctgcctgagcctgctgagcacctag

SEQ ID NO: 250420 - DNA, 3981 bp, Artificial Sequence
  derived and/or modified sequence
atgaacctgaacaccagcagcaacacaggagacacccagaggctgaagatcgccagcctggatgtgaagcagatcctgaagaatgaaacagagctggacatcacagacaacctgaggaagaagctgcactgggccaagaaggagaagctggagatcaccaccaagcacaatgctgagctggccagctatgagagccagatcgccaagctgcggtctgaggtggagaagggggaggccctgcggcagagcctggagtatgacctggccgtggccaggaaggaggccggcctgggcagaagagctgctgaggagcggctggccgaggcccaccgcatccaggagaagctgtgtgcccagaacagcgagctgcaggccaagaccaatgaaacagagaaggccttccagaccagccagcagaagtggaaggaggagtgccgccgctttgaacatgacctggaggagcgggacaacatgatccagaactgcaaccgggagtatgacctgctgatgaaggagaagagccggctggagaagaccctgcaggaggccctggagaagcaccagcgggagaagaatgagatggagagccacatccgggagacagccctggaggagttccggctgcaggaggagcagtgggaggccgagcggcgggagctgcagttcatcgtgcaggagcaggacacagctgtgcagaacatgcacaagaaggtggagaagctggagacagagcacatggactgcagcgacctgctgcggcggcagaccagcgagctggagttcagcacccagcgggaggagcggctgaggaaggagtttgaggccaccaccctgcgggtgaggaagctggaggagaacattgaagctgagcgggccgcccacctggagagcaagttcaacagcgagatcatccagctgcgcatccgggacctggagggcgccctgcaggtggagaaggccagccaggccgaggccgtggccgacctggagatcatcaagaatgagttcaaggaggtggagagcgcctatgagcgggagaagcacaatgcccaggagagctttgccaagctgaacctgctggagaaggagtacttcagcaagaacaagaagctgaatgaagatattgaggagcagaagaaggtgatcatcgacctgagcaagaggctgcagtacaatgagaagagctgcagcgagctgcaggaggagctggtgatggccaagaagcaccaggccttcctggtggagacctgtgagaacaacgtgaaggagctggagagcatcctggacagcttcaccgtgtctggccagtggaccagcggcatccacaaggacaaggacaagccacccagcttctctgtggtgctggagcggctgcggaggaccctgacagactaccagaacaagctggaggatgccagcaatgaggagaaggcctgcaatgagctggacagcaccaagcagaagattgacagccacaccaagaacatcaaggagctgcaggacaagctggctgatgtgaacaaggagctgagccacctgcacaccaagtgtgccgaccgggaggccctgatcagcaccctgaaggtggagctgcagaatgtgctgcactgctgggagaaggagaaggcccaggccgcccagagcgagagcgagctgcagaagctgagccaggccttccacaaggatgctgaggagaagctgaccttcctgcacaccctgtaccagcacctggtggccggctgtgtgctgatcaagcagcctgagggcatgctggacaagttctcctggagcgagctgtgtgctgtgctgcaggagaatgtggatgccctgattgctgacctgaacagagccaatgagaagatccgccacctggagtacatctgcaagaacaagagtgacaccatgagggagctgcagcagacccaggaggacaccttcaccaaggtggccgagcagatcaaggcccaggagagctgctggcaccggcagaagaaggagctggagctgcagtacagcgagctgttcctggaggtgcagaagagggcccagaagttccaggagattgctgagaagaacatggagaagctgaaccacatcgagaagagccatgagcagctggtgctggagaacagccacttcaagaagctgctgagccagacccagcgggagcagatgagcctgctggccgcctgtgccctgatggccggggccctgtaccccctgtacagccgcagctgtgccctgagcacccagagggacttcctgcaggagcaggtgaacacctttgagctgttcaagctggagatccgcaccctggcccaggccctgagcacagtggaggagaagaagcaggaggaggccaagatgaagaagaagaccttcaagggcctcatccgcatcttcagaaaaggagtgattgctgtgctggccgccaaccggctgaagatcctgggccagagctgtgccagcctcttcacctggatggagagcttcaaggagggcatcggcatgctggtgtgcacaggagagccccaggacaagcacaagttccccaagcaccagaaggagcagctgcgctgcctgcaggccctgtcctggctgaccagcagtgacctgctggccgccatcatcagctccatggccgagctgcaggatgtgattggcaaggctgaccccaacagccgcatctgtggccacctgctgattggagctgccaagaacagctttgccaagctgatggacaagatcagcctggtgatggagtgcatccccctgcacagcagccgcagcatcacctacgtggagaaggacagcctggtgcagaggctggcccacggcctgcacaaggtgaacaccctggccctgaagtatggcctgcggggccacgtgcccatcaccaagagcacagccagcctgcagaagcagatcctgggcttcacccagaggctgcatgctgctgaggtggagcggcgcagcctgcggctggaggtgacagagttcaagaggtctgtgaatgagatgaagaaggagctggacaaggcccagggcctgcagatgcagctgaatgagttcaagcagagcaagctgatcacccatgagaagtttgaaagtgcctgtgaggagctgaacaatgccctgctgcgggaggagcaggcccagatgctgctgaatgagcaggcccagcagctgcaggagctgaactacaagctggagctgcacagcagcgaggaggccgacaagaaccagaccctgggggaggccgtgaagagcctgtctgaggccaagatggagctgcggaggaaggaccagagcctgcggcagctgaacagacacctgacccagctggagcaggacaagaggcggctggaggagaacatccatgatgctgagagcgccctgaggatggccgccaaggacaaggaatgtgtggccaaccacatgagagctgtggagaacaccctgcacaaggtgcgggaccagatcagcctgtcctggagcgctgccagcagaaatgacttcaccctgcagctgcccaagctgcacctggagacctttgccatggagggcctgaagggcggccctgaggtggtggcctgccaggccatgatcaagagcttcatggatgtgtaccagctggccagcacccgcatcatgaccctggagaaggagatgaccagccacaggagccacatcgccgccctgaagtctgagctgcacacagcctgcctgagagaaaatgccagcctgcagagcatcggcagccgggaccacagcaacctgagcatccccagccgggcccccctgcctgctgacaccactggaattggagacttcctgcccctgaaggccgagctggacaccacctacaccttcctgaaggagaccttcatcaacacagtgccccacgccctgaccagcagccacagcagccctgtgaccatgtctgccaatgccaaccggcccacccagatcggcctgtag

SEQ ID NO: 250421 - DNA, 3690 bp, Artificial Sequence
  derived and/or modified sequence
atgaacctgaacaccagcagcaacaccggcgacacccagcggctgaagatcgctagcctggacgtgaagcagattcttaagaatgaaacagagctcgacatcacggataacctgcggaagaaactgcactgggcaaagaaagagaaacttgagattaccacgaagcacaatgcagagttagcctcctacgagagccaaattgccaagctcaggtcagaggtagaaaaaggggaagccctccgacagtctctggagtacgatctggctgtggccaggaaagaagccggccttggaaggagggctgctgaggagaggttggctgaagcacaccgcattcaagaaaagctgtgtgcccaaaactcggagctgcaagccaaaacaaacgagacggagaaggctttccagacaagccagcaaaaatggaaggaggaatgccgtaggttcgaacatgaccttgaggaacgggataacatgatccagaactgtaaccgcgagtatgacttgctcatgaaggagaaatctagattggagaaaactttacaggaggctctggaaaaacaccagcgggagaagaacgaaatggagagccatatcagggagacagcccttgaggagttccgattgcaggaggagcagtgggaggcagaaagacgggagctacagttcattgtgcaggagcaagacaccgctgtgcagaacatgcacaaaaaagtggagaagctcgaaaccgagcacatggactgtagcgacctcctgagacgccaaaccagcgaactggagttttctacacagcgggaagaacgcctgcggaaggagttcgaggccactaccctccgagtccgaaagctggaggaaaatattgaggctgaacgagccgctcaccttgaaagtaaatttaattctgagatcatacagctacggatccgtgatcttgaaggggccctccaagtggaaaaagcttctcaagccgaggcggtcgccgacctggaaattataaaaaatgagttcaaggaggtggagtcagcctatgaaagggagaaacataatgcccaggagagctttgctaaactgaaccttctggagaaggagtacttcagcaaaaacaaaaaacttaacgaagacatagaagaacaaaaaaaagtaataattgacctgagcaagcggttgcagtacaatgagaagagctgcagcgagctgcaggaggagctcgttatggcaaagaagcaccaagcatttttagtcgagacctgcgaaaacaatgtgaaagagctggaatccatacttgattcttttaccgtgagcggccagtggacaagcgggatacacaaggacaaggataaaccaccgagtttcagtgtggtattagaacgtctcagacggacacttaccgattaccagaacaaactggaggatgcttctaacgaagagaaggcctgcaatgagctggatagtacaaaacagaagatcgatagtcacacaaaaaatataaaggagctgcaagacaaactcgcagacgtgaacaaagagctgtcgcatctgcatactaagtgcgctgatcgcgaggccctgatatccaccctgaaggtggagcttcaaaacgtcctccattgctgggagaaagagaaggctcaggctgcccagtctgagtctgagcttcagaaattatctcaggcctttcataaagacgccgaggagaagctgacattccttcatactctgtatcagcatctcgtcgccggatgtgtgctgattaaacagcccgagggcatgttggataagttttcctggtctgagctttgcgctgtgttacaggaaaatgtggatgccctgatcgcggaccttaaccgcgccaatgagaagatccgccatttggagtacatatgtaaaaacaaaagtgatactatgagagagttacaacagacacaggaggacactttcaccaaagtggctgagcagataaaagctcaggaatcctgttggcatagacagaagaaggaactggagctgcagtattccgagcttttcctggaggttcagaaacgcgctcagaagttccaggagatcgctgagaagaatatggagaaattaaaccatatcgagaaaagtcacgagcaacttgtcctggagaactcccatttcaagaaattgttgagccagacacagcgggagcaaatgtcactcctggccgcctgcgcactcatggctggagcactgtatccgttatattctcgatcatgcgctctgtccacacagcgggatttcctgcaggagcaggtgaatacttttgagctctttaagctggagattcgaacccttgcccaggctctttctaccgtggaggaaaaaaaacaggaagaagcaaagatgaaaaagaagacattcaaggggctcattcggattttccggaaaggagtgatcgctgttttagctgctaatcgcctgaaaatattgggacaatcttgcgcttccctgttcacttggatggagtcctttaaggagggcattggtatgctagtatgtacaggcgagccccaggacaagcacaagtttcctaagcaccagaaggagcagcttcgttgtttgcaagccttgtcctggttaacatcatccgacctgctggccgccatcattagcagcatggccgagctgcaggatgtcattggcaaggcggaccccaatagtagaatctgtggccatttgctgatcggggcagccaagaactctttcgccaaactcatggacaagattagcctcgtgatggagtgtattccacttcacagttcgcggtctataacttacgtagaaaaagattcgctggtccaacgcctggcccatgggcttcataaagttaacacactggctcttaagtacgggctgagaggtcacgtcccaataacaaaatccaccgccagcctgcagaagcagattctgggcttcacgcagagattacacgcggcggaggtggagaggcgctctctcagactggaagttactgaattcaaacgcagcgttaatgagatgaaaaaagaactcgataaggcacagggattgcagatgcagcttaatgagtttaagcagtcaaagttaatcactcatgaaaagttcgagagtgcttgcgaggaactcaacaacgcgctccttcgagaagaacaggcccaaatgctcctgaatgagcaggctcagcagctgcaagaactgaactataagcttgaactgcacagctcagaggaggctgacaaaaaccagaccctaggtgaggccgttaagagtctctctgaggctaagatggaactaagacggaaggatcagtctctgcgacagctgaaccggcatctcacccagcttgagcaggataagcggcgactggaagaaaatattcatgatgcagaaagtgcgctgaggatggctgctaaggacaaggaatgtgtggccaaccatatgagggccgtggaaaatacactgcataaggtgcgggaccagatttctctaagctggtctgccgctagtcgcaatgatttcactctgcaactgccaaaactgcacctggagacctttgctatggaaggtctaaagggtggccctgaggttgtagcgtgccaggtcagagtgcagtggtgcgatcactcctccttacagagtcaaatgccgggtctgaaacagtcgtcgtgcctgagcctgctcagtacatag

SEQ ID NO: 250422 - DNA, 3981 bp, Artificial Sequence
  derived and/or modified sequence
atgaacctgaacaccagcagcaacaccggcgacacccagcggctgaagattgccagtctagacgtgaagcagatcctgaagaacgagacggaacttgatattactgataatttgaggaagaagttgcactgggccaagaaggagaaactcgagattacaaccaaacataatgccgagctggcctcatatgagtcccagatcgcgaagctgaggagtgaagttgagaagggtgaggctctgcggcagtccctggagtatgacttagcggtggcccgcaaggaggctggcctgggacggcgggcggctgaggagcggctggccgaggcgcacaggattcaggagaaactatgtgcccagaacagtgagctccaggccaaaaccaatgagaccgagaaggctttccagaccagccagcagaagtggaaggaagagtgtcgcaggtttgagcatgatctggaggaaagagacaacatgatccagaactgtaatagagaatacgacctactgatgaaggaaaagtcaaggcttgaaaaaaccctgcaggaagccctcgaaaaacaccaacgcgaaaagaatgagatggaaagtcacatccgcgagacggcgttggaggagttccggttgcaggaagaacagtgggaagccgaacgccgagaacttcagttcatcgtacaggagcaggatacagcggtgcaaaatatgcacaagaaagtcgaaaaacttgagactgagcacatggactgctccgatctcctgaggagacagacatctgaactcgagtttagtacccagagagaagagcgcctcagaaaagagtttgaggcgactactctgagggtgcgaaaacttgaagaaaacatcgaggccgagagagctgcacatttagagagcaagtttaatagcgagataatacagcttagaattagggatctggaaggggcgctccaggtcgaaaaagcctcacaggcagaggctgtcgccgatctggagattattaagaacgaatttaaagaggtggagagtgcctatgaaagagaaaagcacaacgcacaggaatcttttgcaaagttgaatctactggagaaggagtacttctccaagaataagaaacttaacgaagacatcgaggaacaaaagaaagttatcatcgacctgagcaaacgcctacagtacaacgagaaatcctgcagcgagctacaggaggaactggtgatggccaaaaaacaccaagccttccttgtggagacctgcgaaaataatgtaaaagagttggagagcattttggactcctttactgtgtccggccaatggacaagcgggatccacaaagacaaggacaaaccgcctagcttctccgtagtcctcgaaaggctgcgtagaacactgaccgactatcagaataagctggaggatgcctccaatgaggagaaggcatgcaacgagctcgattctactaaacagaagattgactcccacacaaaaaacattaaggaactgcaggacaaattagcggacgtgaataaggaactcagccatctgcacaccaagtgtgcagacagagaagccctgatttcaacattgaaagtagaactccagaacgttctgcactgttgggaaaaagaaaaggcccaggcagcacaatccgaatctgaactgcagaaactttcacaggcatttcacaaagacgcagaagagaaattaacattcctacatactctttaccaacatctggtcgccgggtgtgttctgatcaagcagcctgaagggatgttggataaatttagttggtcagaactttgtgctgtcctccaggagaatgttgacgccctgatcgcagatctcaatagagctaatgagaaaatccggcacctggagtatatttgcaagaataagtccgacacaatgcgggaacttcagcagacacaagaggacactttcacaaaggtagccgagcagataaaagcacaggaaagctgctggcaccgccagaagaaggagctggagctccagtatagcgagctgttcctggaagttcagaagagagcgcagaagtttcaggaaattgcagaaaaaaatatggagaaactgaaccacatcgagaaaagccatgaacagctcgtcctggaaaattctcacttcaagaagctgctgtctcaaacacagagggagcagatgagcctgctagcggcatgcgctcttatggcaggggccctttatcccttgtacagtaggagctgcgctctctctactcagcgggatttcctgcaggagcaggtgaacacttttgaactgtttaagctagaaatcaggacactggcccaggccctgtcaactgttgaggaaaagaagcaggaggaggccaagatgaagaagaagacctttaagggtttgattaggatattccgcaagggtgtcatagccgttctggctgccaaccgtcttaaaatactgggacaatcgtgtgcctctctttttacgtggatggaaagtttcaaggaggggatcggcatgcttgtgtgtacgggggagccacaggacaagcataagttcccgaagcaccagaaggaacagctgaggtgtctgcaagcgctgagttggctaacgtctagcgatctcttggcggccattatctcctccatggccgaactccaggatgtgattgggaaggccgatcccaacagtcgtatctgcggacacctgttgatcggggccgcgaaaaattcttttgctaagcttatggacaagatcagtcttgtgatggagtgtatccccctgcactcatcgcggtcaattacctacgtcgagaaggattccctggtccagcgactggcccacggactgcataaggtcaacaccctagcactgaaatacggccttcgtggtcacgtgcctatcaccaaatccacggctagcctgcagaaacagatcctcggttttactcaaaggctgcacgccgccgaagtggaacggcggagcttgcggctcgaggtgactgagttcaaaaggagtgtgaacgaaatgaagaaggaacttgacaaagcccaggggttacagatgcagctgaacgagttcaagcagtctaagttgatcactcatgaaaagttcgagagcgcctgtgaagagttaaacaatgccctgctgagggaagagcaagcgcagatgctcctgaatgaacaggctcagcaacttcaggaactgaactataagctggaactgcacagcagcgaggaggccgacaaaaatcagaccttgggcgaggctgtgaagtccctgtcagaggccaagatggagcttcgtcggaaagaccagtccctcagacagctaaaccgtcacctgacccagcttgaacaggataaaagacgtttggaagagaatattcacgacgcggagtctgctctgcggatggcagccaaagataaagaatgcgtcgctaatcacatgagagcagtcgagaacactctccacaaggtaagggaccagatatcactgtcatggagcgccgcttccagaaatgactttactttacagttgccaaagctccatcttgaaacatttgcaatggagggcctgaagggcggacccgaggtggtagcatgccaggctatgataaagagctttatggatgtatatcaacttgcttcgacccgtatcatgacattagaaaaggaaatgacttcccaccgctctcacatagcggccctgaagagcgagctacatacggcttgtttgcgagaaaatgcttccctgcagtctatagggtcaagagatcactctaatctctctatcccaagccgggcccctctccctgcagacaccacgggcatcggcgatttcctgccactgaaggcagaactagacactacctacacatttttgaaggagactttcatcaataccgtgcctcatgccctcacaagttcccactcgtctccagtaaccatgagtgcgaatgccaatagacctacccaaattggactgtag

SEQ ID NO: 250423 - DNA, 3690 bp, Artificial Sequence
  derived and/or modified sequence
atgaacttgaatacatcctcaaacacaggggatactcagaggctgaagattgcttcactagatgtcaagcagatcttaaaaaacgagactgagcttgatataacagacaatttacgcaaaaagctccactgggccaagaaggagaagctggagatcacaacaaagcacaacgcagagctcgcttcatacgaatctcaaattgcgaagttaaggtccgaagtagaaaaaggtgaggcactgcgccagtccctggagtatgacctggcggtagcaagaaaagaggcgggactgggcagaagggctgccgaggagcgcctagcagaggctcaccggatccaggaaaaattgtgcgcccagaattccgagctacaggctaagaccaacgaaacagagaaggcttttcaaacctcccaacagaaatggaaggaggaatgcaggaggttcgagcacgacttggaagagagagacaatatgatccagaattgcaatcgagagtatgatctgcttatgaaggaaaaaagtcgcctcgaaaaaaccctgcaggaggccctcgagaagcatcagagggaaaagaacgagatggaatcccatattagggagaccgctctggaagagttccgcctgcaggaagaacagtgggaagccgagaggcgagaactgcaattcattgtgcaggagcaggatacagccgtgcaaaatatgcataagaaggtcgagaaactggagaccgagcatatggactgctccgatctcctgcggcgtcagacatccgagcttgaatttagtacacagagagaagaaagactgaggaaggagttcgaggctaccactcttcgagtgagaaagttggaggaaaacatcgaggccgagagagctgcccatctggagtcaaagtttaattcagaaattatccagctgcgaattcgagacctcgaaggcgcattgcaggtggagaaagccagccaggctgaggccgtggcagatttagaaattataaaaaatgagttcaaggaggtcgagtctgcgtatgagagggaaaagcacaacgcacaggaatcgtttgcaaaattgaatctgctcgaaaaagagtatttctctaagaataagaaattaaacgaggacattgaggaacaaaagaaggtaatcatcgacttatctaaaaggctgcagtacaacgaaaaatcttgttccgaattgcaggaagagctggtgatggcaaagaagcaccaggccttccttgtcgagacatgcgagaataacgtcaaggagctggagtcaattttagactccttcaccgtgtctggtcagtggaccagcgggatccataaagacaaagataaaccacccagcttttcagtggtcctggaacgccttcgcagaaccctcactgattatcagaataaactggaggatgcttccaacgaagagaaagcctgtaacgagctggactctaccaaacaaaaaattgacagtcacactaaaaacatcaaggagctgcaggacaagctagcagatgtaaataaggaactgtcacatctgcacactaagtgcgcagaccgggaggccctgatatctaccttgaaagtggagctgcagaatgttctccattgttgggagaaggagaaagctcaggcagcccaatctgaatccgaactccagaagctgtctcaagccttccataaggacgctgaagagaagcttaccttcctccacactctttaccaacacctggtggcaggatgcgtactgattaagcagcctgagggcatgctggataagttcagctggtcagagctatgtgctgttttgcaggagaacgttgacgctttgattgccgatctgaatcgcgcaaatgagaaaatacgtcatctggagtacatctgcaaaaacaagagcgacacaatgagagaactgcagcagacccaggaagataccttcaccaaagtggcagaacagatcaaagcacaggaaagctgctggcacaggcagaagaaagagctggaactgcagtattctgaactgtttctcgaggtgcagaagcgcgctcagaaatttcaagaaatcgcggaaaagaacatggaaaagctaaatcacatagagaagagccatgagcaactagtgcttgaaaacagccattttaagaagttactttcccagacacagcgagaacagatgagcctgttggccgcatgtgctctgatggctggggcattataccccctatattctcggagctgtgcgctgagtacacagagagatttccttcaggaacaagttaacactttcgaactgtttaaactcgagattcgcacactggcacaagctctgagtaccgtggaggaaaagaaacaggaagaggctaagatgaagaaaaaaactttcaagggcctgataagaatcttccggaagggggtaattgccgtgctggcagccaaccgtctcaagattctgggtcagtcttgcgccagcctctttacatggatggagtcttttaaggaaggaatcggaatgctcgtctgtactggagaaccgcaggacaagcataaattcccaaagcaccaaaaggagcagctccgctgtttgcaggccctctcctggctgaccagctccgacctcctcgcagctatcatttccagcatggcagaactgcaggacgtgataggaaaggccgatcccaactcacggatttgcgggcacctgctgatcggagctgccaagaattcttttgccaaactgatggacaagatcagtctagtcatggagtgcatcccactgcactccagccggagcataacctatgttgagaaagacagcctcgtgcagaggctagctcatggcctccataaggtcaacaccctcgccctaaagtacggcctaagaggccacgtgcctatcactaagtccaccgcttccttgcaaaagcagattctgggtttcacccagcgcctacatgcggcagaagtcgaacgccgatcactccggctcgaggtgactgagtttaagaggtccgtaaacgagatgaagaaagaattagataaggcccagggccttcagatgcaactgaatgagtttaagcagagtaagttgataacccatgaaaagtttgagagcgcatgcgaggagctcaataacgcattgcttcgggaggagcaggcccagatgctgctcaatgagcaggcacagcagctccaggaactgaattacaaactggagttgcacagctccgaggaggccgataagaaccagactctcggggaggctgtaaaatcactgagtgaagctaaaatggaactccgacggaaagaccagtctctgcgacagctcaaccgtcatctcacacagttggaacaggataagaggcgcttggaggagaatattcatgatgccgaatcggcacttcgcatggctgccaaggataaagaatgtgtagcaaaccacatgcgagctgtggagaataccttgcataaggtgcgggatcaaatctccctgtcctggagtgccgcatctcggaatgactttactctgcagttaccgaaactccacctggaaacctttgctatggaaggacttaaagggggaccagaggttgtggcctgccaggtgcgtgtccagtggtgcgaccacagtagcttgcaatcacagatgccaggcctgaagcaatcgtcatgcctgtctcttctgagcacttag

SEQ ID NO: 250424 - DNA, 3981 bp, Artificial Sequence
  derived and/or modified sequence
atgaacctgaatacttcctctaataccggggacactcagaggctcaagattgcctctttggacgtcaaacagattctgaagaatgagacggaattggatatcactgataacctgcgcaagaaactgcattgggcaaaaaaggagaagctcgagataacgaccaagcacaacgcagagctggcatcttatgaatctcagatcgccaaactgaggagcgaggttgagaagggagaggctctccgccagagtctggagtatgaccttgccgttgcgcgtaaagaggctggcctaggcagacgggctgcagaggagcgcttggctgaggctcatagaatccaagagaagctttgcgcacagaattccgaactgcaggccaaaaccaatgagaccgagaaggctttccagacctcccagcagaagtggaaagaggagtgtcggaggtttgagcacgacctggaagagagagacaatatgatccagaactgtaaccgagaatacgatctgctaatgaaggaaaaaagccggttggaaaagacgctgcaggaggctctggagaagcaccagcgggagaaaaatgaaatggagtcacacatcagggagacagccctcgaggagtttcggttgcaggaagagcagtgggaggcagagcggagggaactccagttcatcgtccaagagcaagacacggctgtgcaaaacatgcacaaaaaagtagagaagcttgagaccgagcacatggactgttctgacttactgcgaagacagacaagtgagctcgagttttcgactcagcgagaggaaagactgagaaaagagttcgaagccactaccctgagagtgcgcaaactggaggaaaatatcgaggctgagcgggctgcccacttggaatccaagtttaactccgagattatccaactgagaattagagacctggagggcgcactccaggtggaaaaagcctcccaggctgaagcagtagcggacctggagatcataaaaaacgagttcaaggaagtagagagcgcttacgagcgggagaagcataatgcacaggagtccttcgcaaagttaaacttgcttgagaaagagtattttagcaagaataagaaactgaacgaagatatagaggaacagaagaaagtgataatcgacctgagcaaaagattacagtataatgaaaagagttgctcggagcttcaagaggaattagttatggcaaaaaagcaccaggccttcctggtggaaacgtgtgagaacaatgtcaaagaattggaatcaattttagattcatttaccgtgtctgggcagtggacctcaggaattcacaaagataaggacaagccaccatcctttagcgtggttttggagagacttcgccgaactctgaccgattaccagaacaaactggaggatgcctctaatgaggagaaggcatgtaacgagttggatagcacaaagcaaaagatagactctcatactaagaacattaaagagttgcaagataagcttgctgatgtgaataaagagctatcccacctccatacaaaatgcgcggatcgtgaggccctcatcagcacacttaaggtcgaactccagaacgtgcttcattgttgggaaaaggaaaaagcccaggccgcacaatcggaatctgaattacaaaagttatcacaggcctttcacaaagatgcagaagaaaagttaacttttcttcacaccttataccaacatctggtggccggatgcgttctcatcaagcagcctgagggaatgttggataagttttcttggtctgagctatgcgccgtcctccaggaaaacgttgatgctttaatcgcagacttaaatcgggctaatgagaagattagacatctggagtatatttgcaagaataagagtgacacaatgagagaactgcaacaaacccaggaggatacttttacgaaggttgccgaacagattaaagcacaagaatcctgctggcaccggcagaagaaagagctcgagctgcagtattctgagctcttcttggaggttcagaaaagagcccagaagtttcaggaaatcgccgagaagaacatggagaagctgaatcacatcgagaagtcccacgagcagcttgtgttagagaactcacacttcaaaaagctactttcccagacccaaagagagcaaatgtccctgctcgcggcttgcgccctaatggctggagccttgtacccactttattctagaagttgtgcactgagcacacagagagattttctgcaagagcaggttaataccttcgagctttttaaactcgagatccggacgctggctcaggctctgtcaacagtggaggagaagaaacaggaagaggcaaagatgaagaagaagactttcaaaggcttaattcgtatttttagaaagggtgtcatcgcagtgcttgctgcaaatagactaaaaattttggggcaatcctgcgcctccctctttacatggatggagagttttaaagaggggatcggcatgctcgtttgcactggcgagccccaggataagcataaattccctaagcaccagaaggagcagcttagatgcctgcaggccctttcttggttaacatcctccgatctgctggctgcaatcattagcagcatggccgagttgcaggacgttattggaaaggctgacccaaactcacgcatctgcggccatttgctaatcggtgctgcgaaaaactcattcgccaagctgatggataaaattagcttagttatggagtgcattccacttcactcatcacggagcatcacttacgtggaaaaagattcactggtgcagagactggctcatgggttgcataaggttaacacccttgctctgaagtacgggctgcggggtcacgtaccgatcaccaaatcaaccgctagcttgcagaaacaaattcttggctttactcaacggctacacgcggctgaagtggagaggcgcagtctgcgattagaagtgaccgagtttaagagatccgtgaacgagatgaaaaaagagctggataaagcacagggcctgcagatgcaattaaacgagttcaagcagagtaaactgattacacacgaaaaattcgaaagtgcctgtgaggaactgaataatgctctgcttcgtgaggagcaagcccagatgctgctaaacgagcaggcccaacagctgcaggagcttaattacaagttggagcttcactctagcgaagaagcagacaaaaatcagacacttggcgaagcggtcaagagtctaagcgaggcgaagatggagcttcgccgtaaagatcagagccttcgccaactgaataggcacctcactcagctggagcaggataaacgcaggctcgaggagaatatacatgatgccgaaagcgctctaagaatggccgctaaggacaaagagtgcgttgccaatcacatgcgcgctgtggagaatacgttacacaaagtgagggatcaaatctccctgagttggagcgccgcatctcgcaatgattttaccctgcagctgcctaaacttcatttggagaccttcgcgatggagggcctgaaaggaggcccagaggtggtggcgtgccaggctatgataaagtctttcatggatgtgtatcagcttgcctcaaccagaataatgacgctcgagaaggagatgacaagtcaccgttcccacatagccgctttgaaatcagaattgcacaccgcatgcctcagagagaacgcgtccctccaatccattggatcccgggatcatagtaacctgagcatcccgtcccgggcacccctgccagccgacacaaccggaatcggcgacttccttccactgaaagcagagttggacaccacatacacattcctcaaggaaactttcattaacaccgttcctcacgccctgacctcaagtcacagtagtccagttacaatgtcggccaacgccaacaggcctacccaaattggcctgtag

SEQ ID NO: 250425 - protein, 871 aa, Artificial Sequence
  derived and/or modified sequence
MGEGGLPPAFQLLLRACDQGDTETARRLLEPGAAEPAERGAEPEAGAEPAGAEVAGPGAAAAGAVGAPVPVDCSDEAGNTALQFAAAGGHEPLVRFLLRRGASVNSRNHYGWSALMQAARFGHVSVAHLLLDHGADVNAQNRLGASVLTVASRGGHLGVVKLLLEAGAFVDHHHPSGEQLGLGGSRDEPLDITALMAAIQHGHEAVVRLLMEWGADPNHAARTVGWSPLMLAALTGRLGVAQQLVEKGANPDHLSVLEKTAFEVALDCKHRDLVDYLDPLTTVRPKTDEEKRRPDIFHALKMGNFQLVKEIADEDPSHVNLVNGDGATPLMLAAVTGQLALVQLLVERHADVDKQDSVHGWTALMQATYHGNKEIVKYLLNQGADVTLRAKNGYTAFDLVMLLNDPDTELVRLLASVCMQVNKDKGRPSHQPPLPHSKVRQPWSIPVLPDDKGGLKSWWNRMSNRFRKLKLMQTLPRGLSSNQPLPFSDEPEPALDSTMRAAPQDKTSRSALPDAAPVTKDNGPGSTRGEKEDTLLTTMLRNGAPLTRLPSDKLKAVIPPFLPPSSFELWSSDRSRTRHNGKADPMKTALPQRASRGHPVGGGGTDTTPVRPVKFPSLPRSPASSANSGNFNHSPHSSGGSSGVGVSRHGGELLNRSGGSIDNVLSQIAAQRKKAAGLLEQKPSHRSSPVGPAPGSSPSELPASPAGGSAPVGKKLETSKRPPSGTSTTSKSTSPTLTPSPSPKGHTAESSVSSSSSHRQSKSSGGSSSGTITDEDELTGILKKLSLEKYQPIFEEQEVDMEAFLTLTDGDLKELGIKTDGSRQQILAAISELNAGKGRERQILQETIHNFHSSFESSASNTRAPGNSPCA

SEQ ID NO: 250426 - protein, 676 aa, Artificial Sequence
  derived and/or modified sequence
MAAIQHGHEAVVRLLMEWGADPNHAARTVGWSPLMLAALTGRLGVAQQLVEKGANPDHLSVLEKTAFEVALDCKHRDLVDYLDPLTTVRPKTDEEKRRPDIFHALKMGNFQLVKEIADEDPSHVNLVNGDGATPLMLAAVTGQLALVQLLVERHADVDKQDSVHGWTALMQATYHGNKEIVKYLLNQGADVTLRAKNGYTAFDLVMLLNDPDTELVRLLASVCMQVNKDKGRPSHQPPLPHSKVRQPWSIPVLPDDKGGLKSWWNRMSNRFRKLKLMQTLPRGLSSNQPLPFSDEPEPALDSTMRAAPQDKTSRSALPDAAPVTKDNGPGSTRGEKEDTLLTTMLRNGAPLTRLPSDKLKAVIPPFLPPSSFELWSSDRSRTRHNGKADPMKTALPQRASRGHPVGGGGTDTTPVRPVKFPSLPRSPASSANSGNFNHSPHSSGGSSGVGVSRHGGELLNRSGGSIDNVLSQIAAQRKKAAGLLEQKPSHRSSPVGPAPGSSPSELPASPAGGSAPVGKKLETSKRPPSGTSTTSKSTSPTLTPSPSPKGHTAESSVSSSSSHRQSKSSGGSSSGTITDEDELTGILKKLSLEKYQPIFEEQEVDMEAFLTLTDGDLKELGIKTDGSRQQILAAISELNAGKGRERQILQETIHNFHSSFESSASNTRAPGNSPCA

SEQ ID NO: 250427 - DNA, 2616 bp, Artificial Sequence
  derived and/or modified sequence
atgggcgagggcggcctgccccccgccttccagctgctgctgagagcctgcgaccagggcgacaccgagaccgccagaagactgctggagcccggcgccgccgagcccgccgagagaggcgccgagcccgaggccggcgccgagcccgccggcgccgaggtggccggccccggcgccgccgccgccggcgccgtgggcgcccccgtgcccgtggactgcagcgacgaggccggcaacaccgccctgcagttcgccgccgccggcggccacgagcccctggtgagattcctgctgagaagaggcgccagcgtgaacagcagaaaccactacggctggagcgccctgatgcaggccgccagattcggccacgtgagcgtggcccacctgctgctggaccacggcgccgacgtgaacgcccagaacagactgggcgccagcgtgctgaccgtggccagcagaggcggccacctgggcgtggtgaagctgctgctggaggccggcgccttcgtggaccaccaccaccccagcggcgagcagctgggcctgggcggcagcagagacgagcccctggacatcaccgccctgatggccgccatccagcacggccacgaggccgtggtgagactgctgatggagtggggcgccgaccccaaccacgccgccagaaccgtgggctggagccccctgatgctggccgccctgaccggcagactgggcgtggcccagcagctggtggagaagggcgccaaccccgaccacctgagcgtgctggagaagaccgccttcgaggtggccctggactgcaagcacagagacctggtggactacctggaccccctgaccaccgtgagacccaagaccgacgaggagaagagaagacccgacatcttccacgccctgaagatgggcaacttccagctggtgaaggagatcgccgacgaggaccccagccacgtgaacctggtgaacggcgacggcgccacccccctgatgctggccgccgtgaccggccagctggccctggtgcagctgctggtggagagacacgccgacgtggacaagcaggacagcgtgcacggctggaccgccctgatgcaggccacctaccacggcaacaaggagatcgtgaagtacctgctgaaccagggcgccgacgtgaccctgagagccaagaacggctacaccgccttcgacctggtgatgctgctgaacgaccccgacaccgagctggtgagactgctggccagcgtgtgcatgcaggtgaacaaggacaagggcagacccagccaccagccccccctgccccacagcaaggtgagacagccctggagcatccccgtgctgcccgacgacaagggcggcctgaagagctggtggaacagaatgagcaacagattcagaaagctgaagctgatgcagaccctgcccagaggcctgagcagcaaccagcccctgcccttcagcgacgagcccgagcccgccctggacagcaccatgagagccgccccccaggacaagaccagcagaagcgccctgcccgacgccgcccccgtgaccaaggacaacggccccggcagcaccagaggcgagaaggaggacaccctgctgaccaccatgctgagaaacggcgcccccctgaccagactgcccagcgacaagctgaaggccgtgatcccccccttcctgccccccagcagcttcgagctgtggagcagcgacagaagcagaaccagacacaacggcaaggccgaccccatgaagaccgccctgccccagagagccagcagaggccaccccgtgggcggcggcggcaccgacaccacccccgtgagacccgtgaagttccccagcctgcccagaagccccgccagcagcgccaacagcggcaacttcaaccacagcccccacagcagcggcggcagcagcggcgtgggcgtgagcagacacggcggcgagctgctgaacagaagcggcggcagcatcgacaacgtgctgagccagatcgccgcccagagaaagaaggccgccggcctgctggagcagaagcccagccacagaagcagccccgtgggccccgcccccggcagcagccccagcgagctgcccgccagccccgccggcggcagcgcccccgtgggcaagaagctggagaccagcaagagaccccccagcggcaccagcaccaccagcaagagcaccagccccaccctgacccccagccccagccccaagggccacaccgccgagagcagcgtgagcagcagcagcagccacagacagagcaagagcagcggcggcagcagcagcggcaccatcaccgacgaggacgagctgaccggcatcctgaagaagctgagcctggagaagtaccagcccatcttcgaggagcaggaggtggacatggaggccttcctgaccctgaccgacggcgacctgaaggagctgggcatcaagaccgacggcagcagacagcagatcctggccgccatcagcgagctgaacgccggcaagggcagagagagacagatcctgcaggagaccatccacaacttccacagcagcttcgagagcagcgccagcaacaccagagcccccggcaacagcccctgcgcctag

SEQ ID NO: 250428 - DNA, 7164 bp, Artificial Sequence
  derived and/or modified sequence
gacgcggccggcggggcggacgggagcgggccgcgcgtggcggcggcgatgggcgagggcgggctgcccccggccttccagctgctgctgcgcgcgtgtgaccagggcgacacggagacggcgcggcggctgctggagccgggggcggcggagccagccgagcgcggcgcggagccggaggcgggcgcggagccggcgggggccgaggtggccgggcccggggccgcagcggcgggggcagtcggggctccggtgcccgtggattgctcggacgaggcgggcaacaccgcactgcagttcgccgcggccgggggccacgaaccgctggtgcgcttcctgctgcgccgcggtgcctcggtcaacagccgcaaccactacggctggagcgcgctcatgcaggcggccagatttgggcatgtgagtgtggcacacctcctgttggatcacggggctgatgtcaatgcccagaaccggctgggggccagtgtgctcactgtggcttctcggggcggccacctgggtgtggtgaagctgctcctggaagccggtgcctttgtggaccatcaccacccttcaggcgagcaactggggttgggcggcagcagggatgagcccttggacatcacagccctgatggctgccatccagcacgggcacgaggccgtggtgcgtctactgatggagtggggcgcggaccccaaccacgcagcccggaccgtgggctggagcccgctgatgctggccgcactcactgggcggcttggagtggcccagcagctggtggagaagggcgccaaccctgaccacctcagcgtgctggagaagaccgccttcgaggttgcactggactgcaagcacagggaccttgtagactacctggacccgctgaccaccgtcaggcccaaaacagatgaggagaaaaggcgacctgatattttccatgcattgaaaatgggaaacttccagctggtcaaagagattgccgatgaagaccccagccacgtgaacttggtcaatggggacggggcgacgccactgatgctagcagctgttacggggcagctggctctggtgcagctgctggtggagaggcacgcggatgttgacaagcaggacagcgtgcatggctggacggccctcatgcaggcaacctaccatgggaataaggaaattgtgaaatatctgctaaaccaaggggccgatgtcactcttcgtgcaaaaaatggatacacggcctttgacctggtgatgctgctgaatgatcccgacacggaacttgttcgactgctggcatctgtctgcatgcaggtgaataaagacaaaggccggccgagccaccagcctcccctgccccactcgaaggtccgacagccctggagcatcccagtgctgcccgatgacaagggtggactgaagtcctggtggaaccgaatgtccaatcggttccgaaagctcaaactgatgcagacgctgccccgtgggctgtccagcaaccagcctttgcctttctctgacgagcctgagccagctctggactccacaatgagggctgccccccaggacaagacaagccgctctgcactccctgatgcggcccctgtgaccaaagacaatggtcctgggagcacaagaggagaaaaggaagacacgttattgacaaccatgcttcgaaacggagctcccctcaccagactcccgagtgacaagctgaaagcagtcatccccccattcctacccccttccagttttgagctgtggagctctgatcggtcccggacgcgtcacaacgggaaggcagaccccatgaagactgcgctgccccagagagccagcaggggccaccccgtgggcggcgggggcacagacactacacccgtcaggcctgttaaatttccaagcctccccagaagcccagcctcttctgccaattctggaaacttcaaccactcgcctcattcatcgggcggctccagtggggtaggtgtgagccggcacggtggggagctgcttaaccgctcaggtggcagcatagacaatgtcttgtcccaaatcgctgcccagaggaaaaaagcagccggattattggagcagaaacccagccatcggtcaagccctgtggggccagcaccggggtccagcccgtctgagcttccagcctcccctgcaggtggcagcgctcctgttggcaagaaattggagaccagcaaaaggcctccatctggaacttccactacctccaagagcacctctccaaccctcacgccctccccctcacccaaagggcacactgcagagtcctcagtgtcttcctcgtcatcccatcggcagtccaagagcagtgggggctccagcagtggcaccatcacagatgaggatgaactgactggaatccttaagaaattatcacttgagaaatatcagcccatttttgaggaacaagaggtggacatggaagcgttcctcacactgactgacggtgacttgaaggagctgggaattaagacagatgggtccaggcagcagattctggcagcgatttctgaactgaacgcaggcaagggacgcgagagacaaattttacaggaaaccattcacaactttcactcttcctttgagagcagtgccagcaacaccagggcccctggcaacagcccctgtgcgtgatcctccttcccgcagccaccagcgtgagctctctgaatcccgggaccccttcacgtggccacagccccagccctgcccccgtcacactgctgtgccttagtcatgttgttccctttgctcgggatgcccacttcacgtcgacggcattcattggtagtacttcttgctgcaacaaacttcaacacacagagacagattcccatgtaacagtccagtgggggtgcttctgcttggcaggttggttcacacagtgatgcagggactcagctcctttcatcctgtgctctgccctccccgggagcctcagagtttgcttctggctggcggcaagggaaagggacgatggagaaggcacggctgcttcttacctgccttgctcttaactgacacacatcactcctgctcacgtcctcttggccactggtagtcatgtggccccacctggatgcagaggaggccaggatgtgcagtctccacatagtggcttcccagcaacaacttttgacttagatggggggtatgtattatggtgagaggttagccttcctggcacatcttcccttaaaacttctaacttgcccctcctagtccaagtcacctctcagatgaagtcttttttgaccccctttcagccactgggtcccttagtgctgtgtatgtgactgctgtagcattccactgcacctgctgcatacagcttacattggagatgtgtatgtcaaacgcatttttctttattgcaaagagagtctattatagaaggaaagaagtggaggcctgctgtgtggatcccttcttcttcctagctttcagtttccttatctgcaaagtggaaggtcagaccagatgatgctctggtactccacagtgctcacctgtatcactgcagggctttctgcactgaaagtggaagcagaaggctaatgggtcacattgtgtaaaggtctctggtgctcaaagtttctaggcaaagaagtgaaaatttggaattttgtctacatcctattaatgctgtgttcctcaaaagggaattggcttgtgtagtttcctaccatatcatattttattaaattagaggggccctgacttttaaaacccactggctttctgaagtgttttccagtgaatgactcattcagccagtgcttgttgcatttatgttagctaccaggtgccaagtgtgcagacacaatacagagccttcaggctctcgacaggcaagagaacacctgtaaatagatggtcccgacattgagaggcagcatggtagagtgggcagaccttgtgctctggactcaggttcaaagttcagatgaagctcaatggcctcttagttggagcttagaaccagtatgcccaaagtgctgggtctgcaggaagtacccagtcgatggtaggctgcacagaattctgatctctaccttgagccatgctgagccacaagttggtctccttgggaggtgccatctctcatctgtccctcccccagccatgaaagcccattcccctatgctggctttcagaggctgtcgttaacttactgcccagagcctcgtagttttcttcccctgccctgatggttgggtgtttttcctttaaattctctcagccttacactcacagaagccaactttccacaggactgaagacaaagtgtttcatttagctgttactgatagacacctttacaaaggttactaatgtcccagcctttttaaggagacacactcattcatcccctactatgtgctggcagctttacctttgtcatttcatcctcatggccaccctggaggtggcattgtgtaacctcatcttgcacattcgggaaacggatgcttaggagagggaagcagcttgccagttaaacagcccagaaggagcagatctggggtcagaaccggacctggtgggcttgcaagcctgtgccttttccactaactcctatagactcctggagctagaagcacttgtgattcttgttttaatttactgatggcttcaggggttaacagtaggcctagaattgtttgcctctgaaattcatggcccctgacgttatgtgctttgaggttttgtgcctgctttttgctgtggtcctgtttttttcataacaatatactggtatagcttccactcaggtaagtttgattgaacaatgatacacagctgcaccggggggtcaccttttcacaaatgtagacctccatgaactcattggatgaccctggacagagcggggctattcccattttgcagacaggacagcagaggctccagacaatgcctttcctttctttttcactggactcaagtgtccaaggcttttcatcctaggaagtttgtgtgctggttcacaagaggtccctggcaccctttctggggatgtttggatgcggctggtaggcagggaagagaaagggcaccccagcgggggcatgtgtggaggcagcacggaacatgtaggttatagatcgtcagggaggaggggtcagttgggtgcttgtttttctgatttttggtccttgatcacccccttcccttcccacacgtgtccccagcctgcctgtggctgttccccccacaagaagcacctcccttgcttggcaaccttcaccagcatttcccaaaagtatgctcctgggaaccctagttccacaggataataggtttttcataaagaaacgtagggtgtgtatgtgaaagtggggtgaggttccctggttgagtaggtttggcagacactaaagcgagctacacgatcatctttgctacaggcctctcacaaccttcagcatgccagcatgggtcaggcctcttcacagggccaagaaactcatagcatctcccacattactctcatcacttctccaaggtgcttttgcaagactggaattccttggacaccattggagaagccccgctttttctggaacagcggcaaccaagaggccttgcagccctggaagtgggtcagggcccttggtggtcacctttttctccccagcagctctgcagaggtggcctgcttggcagtgggacatcaggggaccggtcctgctttgagatggcagggtccctgttctgagagctctccagcctgagggcattgagctgaggctccaccctgagctctcctgcagggtggagggcattgtttcccagcacccaggcagtgtcttgctggtgtgtcgtgagtgctggatgtccaagtccctgctggccacggagggctcctgcctctcttcttcagcgccacaaaattacatggaggccagctggttttgtgaggagattgtttattttttaattcttttgtttaccgaacgtttactgagcatctaccctgtgccagccctactcgtacgctctgtctccaaagatgaaaaaggacttctctgccctcaagggaaccccacagtatcttagaggagacaatcatgtcggtgagatggtgtggtgatgaagcctgctgggtatacagctcagggaaagtcatcgatgatggctcaggctcagcctgggcacgccccagaggagagagatggagtggggcctcaaagggcaggtttaggcagaaaagaaaaagggcattccagctggggcatgtgcaaaggcagcacgtaatgtgtaagttctagatcgtcagggaggaagggtcagttgggtgcctgtttttctgtttttagtcctttaaaatgagtagaagcaacctgttaccctggaaagagcactggacatagacctagtgctgcgtgatgttgagcacgtttcttcttccctttgagtcccagtttcccttttggttacagggggatagtagcccccagggatcatgtgaaagtgagaaagcccttttcacactgtggagcggtgcagatgtgggaaacctcaaagatggttgcccattttaaatcctttcatctctcatctctctttcttctctcccttctgccctgacgtagccatggttgggtgggtgaggccagaagaaactgcctccggcaagaggtagcagccgctcaggtggctctgctggcatcggagcccacagaagtgaggagtggccgatggacctgccctccaaatgtgcctgactctgggtcttgctgtcactggatttcctggcatggcagacagaaagaaagatagtttgaccaagtcgtagaagctgatccagcgggtaaaaagggggcagggaactcgtcccttttattcttgcctcagagctgcctgaagacatgggccaggccggaggctggacaactttggataacgctgacctgtacttccaagtaaatgcctcctgaagagcccgggacccttcctgggagaattctgcagccagaatgaaggtgccatcagcaggaggcactgtgaagcaccatcctgtcgctgtccttgtccattcctagcaagttaatcgtgtcttgttaaccagcagttcctgttcaacgtgtaaagagacctgatgttttccctaataaagctgataacaga

SEQ ID NO: 250429 - DNA, 2031 bp, Artificial Sequence
  derived and/or modified sequence
atggccgccatccagcacggccacgaggccgtggtgagactgctgatggagtggggcgccgaccccaaccacgccgccagaaccgtgggctggagccccctgatgctggccgccctgaccggcagactgggcgtggcccagcagctggtggagaagggcgccaaccccgaccacctgagcgtgctggagaagaccgccttcgaggtggccctggactgcaagcacagagacctggtggactacctggaccccctgaccaccgtgagacccaagaccgacgaggagaagagaagacccgacatcttccacgccctgaagatgggcaacttccagctggtgaaggagatcgccgacgaggaccccagccacgtgaacctggtgaacggcgacggcgccacccccctgatgctggccgccgtgaccggccagctggccctggtgcagctgctggtggagagacacgccgacgtggacaagcaggacagcgtgcacggctggaccgccctgatgcaggccacctaccacggcaacaaggagatcgtgaagtacctgctgaaccagggcgccgacgtgaccctgagagccaagaacggctacaccgccttcgacctggtgatgctgctgaacgaccccgacaccgagctggtgagactgctggccagcgtgtgcatgcaggtgaacaaggacaagggcagacccagccaccagccccccctgccccacagcaaggtgagacagccctggagcatccccgtgctgcccgacgacaagggcggcctgaagagctggtggaacagaatgagcaacagattcagaaagctgaagctgatgcagaccctgcccagaggcctgagcagcaaccagcccctgcccttcagcgacgagcccgagcccgccctggacagcaccatgagagccgccccccaggacaagaccagcagaagcgccctgcccgacgccgcccccgtgaccaaggacaacggccccggcagcaccagaggcgagaaggaggacaccctgctgaccaccatgctgagaaacggcgcccccctgaccagactgcccagcgacaagctgaaggccgtgatcccccccttcctgccccccagcagcttcgagctgtggagcagcgacagaagcagaaccagacacaacggcaaggccgaccccatgaagaccgccctgccccagagagccagcagaggccaccccgtgggcggcggcggcaccgacaccacccccgtgagacccgtgaagttccccagcctgcccagaagccccgccagcagcgccaacagcggcaacttcaaccacagcccccacagcagcggcggcagcagcggcgtgggcgtgagcagacacggcggcgagctgctgaacagaagcggcggcagcatcgacaacgtgctgagccagatcgccgcccagagaaagaaggccgccggcctgctggagcagaagcccagccacagaagcagccccgtgggccccgcccccggcagcagccccagcgagctgcccgccagccccgccggcggcagcgcccccgtgggcaagaagctggagaccagcaagagaccccccagcggcaccagcaccaccagcaagagcaccagccccaccctgacccccagccccagccccaagggccacaccgccgagagcagcgtgagcagcagcagcagccacagacagagcaagagcagcggcggcagcagcagcggcaccatcaccgacgaggacgagctgaccggcatcctgaagaagctgagcctggagaagtaccagcccatcttcgaggagcaggaggtggacatggaggccttcctgaccctgaccgacggcgacctgaaggagctgggcatcaagaccgacggcagcagacagcagatcctggccgccatcagcgagctgaacgccggcaagggcagagagagacagatcctgcaggagaccatccacaacttccacagcagcttcgagagcagcgccagcaacaccagagcccccggcaacagcccctgcgcctag

SEQ ID NO: 250430 - DNA, 2616 bp, Artificial Sequence
  derived and/or modified sequence
atgggagagggcggcttgcctcctgccttccagctgctgctcagagcatgcgaccagggcgatacagaaaccgcaaggaggctgctggaacctggggccgctgaacccgccgagcgtggagcagagcccgaagctggcgctgaacctgcaggcgccgaagtcgctggtcccggggctgccgcagcaggcgcagtaggtgcccccgtgcctgtggactgtagcgatgaagccggaaacaccgctcttcaatttgccgccgccggagggcatgaacccctcgtccgattcctgctcagacgcggagcatcagtgaactcgcgaaatcactacgggtggagtgccttgatgcaagctgcccggttcgggcacgtcagtgtcgcccacctgttactggatcatggtgcggacgtcaacgcacagaaccggcttggagctagtgtgctgacggtcgcctctcgaggagggcacctcggcgtagtgaagctgctgctggaggcgggtgctttcgttgaccaccaccatccatctggggaacaactgggcttgggaggctctcgggacgaaccccttgacatcaccgctctcatggctgccatccagcatggccacgaagctgtggtgcgtctgctcatggagtggggggcagatcccaaccatgccgcccggaccgtgggctggtcacccctgatgctggccgcgcttacgggccggcttggggtggcccagcagctcgtggaaaaaggggccaaccctgatcatttgtccgtcctggagaaaactgcctttgaggtggcactggattgtaagcatcgggacctcgtggactacctggatcccctcacaaccgtcaggccaaagactgacgaggagaaaagacgccctgacatttttcacgccctgaaaatggggaattttcagctggttaaagaaattgcagacgaagacccgagtcacgttaacctcgtgaacggggatggcgccaccccattgatgctggccgctgtgactggtcaactcgcactggtccaactgctcgtggagagacacgccgatgtggacaaacaggactccgttcatggatggacagcacttatgcaggctacctatcatgggaataaggagatcgtgaaatacctgctgaatcagggcgccgatgtgacactgagagccaagaatgggtatactgcatttgatcttgttatgctgttaaatgatccagacacagagctggtacgcctccttgcctccgtgtgtatgcaggtgaataaggacaaaggtagacccagtcatcagccgcctctgccacattcaaaagttcgacaaccttggagcatcccagtactccctgatgacaaggggggactgaaatcctggtggaatagaatgagtaatcggttccgcaaattgaaactcatgcaaaccctccctagagggctctcctctaatcagcccttgcctttttcggatgaacctgaaccggcccttgatagcactatgagggcggcaccacaggacaaaacttcccgctctgccctcccagatgctgctcccgtcaccaaagacaatggtcctggcagtacaaggggggagaaagaagacactctccttacgactatgctgagaaacggagcgcccctgacaaggctgccttccgacaagctgaaagccgtgatccctccatttctgccacccagcagctttgaactgtggagctccgaccgttcaaggactcggcataacggtaaagcagatccaatgaaaactgccctgccccagagagcttcacggggtcaccctgttggaggcggtgggacagatacgaccccggtgcggccagtgaaattcccgtccctccccagatcacccgcttcgagcgcaaattcaggcaactttaaccactcacctcactcctcaggcggatcctcaggagtaggcgtatccaggcacggaggggaactcctgaatagaagcggaggcagtattgataacgtgctgtctcagatcgcggctcagaggaaaaaagctgcaggactactagagcagaaaccatcgcaccgctcttcccccgtgggacccgcacctggatctagtccttcagaactgccagcgagtcccgcaggcgggtctgcccccgtaggaaaaaagctggaaacttcgaaacgtccccccagcggcacgtccacaacctccaagagcacctccccaactcttacaccgagtccgtccccaaagggacacaccgctgaatccagtgtcagtagtagcagctctcaccgtcaaagcaagtcatctggaggtagcagctccggcacaattacagacgaagatgagctgactggtattctgaagaaactgtctctcgagaagtaccagccgatcttcgaagaacaggaagtcgacatggaggcctttctcacacttaccgacggtgacctgaaagagctagggatcaaaacagatggctccagacaacagatccttgcagctatttctgagctgaacgctggcaagggtagagaacgtcagatattgcaggaaaccatccataatttccattctagctttgagtccagcgcctcaaacaccagggcaccaggaaacagcccatgtgcttag

SEQ ID NO: 250431 - DNA, 2031 bp, Artificial Sequence
  derived and/or modified sequence
atggcagctatccagcacgggcatgaggccgtagtgcgcctattaatggagtggggcgcggatcctaatcacgccgccagaacagtaggatggagccccctgatgttggccgctttgaccggaaggttaggtgtagcccagcagctggttgaaaagggtgctaaccccgatcatttaagtgtgctagagaagaccgctttcgaagtggcactggattgcaagcacagagacctggtggactatctggatccccttaccacagtgaggcccaaaactgacgaagagaagcgccggccggacatatttcacgcgctcaagatgggaaacttccagctggtaaaggaaatcgccgacgaggatccatcgcacgtgaatctcgtaaatggggatggagcaactcctctaatgctggccgctgtcaccgggcagctggccttggtgcaactccttgtggaaaggcatgccgatgtggataaacaggactctgttcacggctggacagccctgatgcaggccacttaccacggcaataaggaaatagtcaagtatttgctgaatcaaggagcggatgtgacacttagggctaaaaatggctataccgcattcgacttagtgatgctgcttaatgatcctgatacagagctcgttagattactggcatctgtgtgtatgcaagtcaacaaagacaaggggcgcccatcccatcagccacctctgccccattccaaggtccgacagccttggagcataccagtactcccagacgacaagggaggattaaaaagttggtggaaccgcatgagcaatcgctttcggaagctgaaactaatgcagacgttgcctcgggggctgtcctctaaccaacccctgcctttcagtgacgaacccgagcctgccctggactctaccatgcgcgcggcgccccaggataaaacttcacgcagtgccttgcctgatgctgccccagtaaccaaggacaatgggcccggtagtaccaggggagagaaggaagacacccttcttacgacaatgctgagaaacggcgcacccctcactagattaccaagcgacaagctgaaagccgtgatcccacccttcctgccaccatccagctttgagctctggtcctccgaccggtccaggacccggcacaatggtaaggctgaccccatgaagaccgcgctgccacaacgcgcttcaagaggccatcctgtgggaggggggggcactgacaccacgcccgtgagaccagttaaattcccatccttgccccggagcccggcctcatctgctaattcaggaaattttaaccattctcctcactcgtcagggggatccagtggggttggcgtgtctcgccacgggggagagctgctgaacaggtcaggtggctctatagacaacgtgttgagccagattgccgcacagagaaagaaagccgcaggactcctggaacaaaagccgagccaccgtagcagtccagtgggcccagcccctgggtcttccccatcagaactgcctgcttcccctgcggggggttcggcccccgtagggaaaaagctagaaaccagcaaacgccctccaagtggcaccagcacaacctccaaatcaacaagccccaccctgaccccaagcccatcaccaaaaggccacacagctgaaagttctgtgagttcgagttcttcccacaggcagtctaaatcttccggggggtcgtcttccggtacaattacggacgaagacgaactgacaggtatacttaagaaattatccctggaaaagtatcagcctattttcgaagagcaggaggtcgatatggaggcattcctcaccctcacagatggtgacctcaaagagctcggcattaaaacagacggatctcgccaacaaatcctcgccgctatttcagaactgaacgcaggcaaaggccgcgaaaggcagatccttcaagagaccatccacaatttccattcatcttttgagagttccgcatcaaacactagggcgccagggaacagcccatgcgcctag

SEQ ID NO: 250432 - DNA, 2616 bp, Artificial Sequence
  derived and/or modified sequence
atgggagagggcggcctgcccccagccttccagctgctgctgcgggcctgtgaccagggcgacacagaaacagcccggcggctgctggagcctggagctgctgagcctgctgagagaggagctgagcctgaggccggggctgagcctgctggagctgaggtggccggccctggagctgctgctgctggagctgtgggcgcccctgtgcctgtggactgcagtgatgaagctggcaacacagccctgcagtttgctgctgctgggggccacgagcccctggtgcgcttcctgctgcggcggggggcctctgtgaacagcaggaaccactacggctggagcgccctgatgcaggccgccaggtttggacatgtgtctgtggcccacctgctgctggaccatggagcagatgtgaatgcccagaaccggctgggcgcctctgtgctgactgtggccagccggggcggccacctgggcgtggtgaagctgctgctggaggccggggcctttgtggaccaccaccaccccagcggggagcagctgggcctgggcggcagcagagatgagcccctggacatcacagccctgatggccgccatccagcacggccatgaagctgtggtgcggctgctgatggagtggggcgctgaccccaaccacgccgccaggacagtgggctggagccccctgatgctggccgccctgaccggccgcctgggcgtggcccagcagctggtggagaagggggccaacccagaccacctgtctgtgctggagaagacagcctttgaggtggccctggactgcaagcaccgggacctggtggactacctggaccccctgaccaccgtgcggcccaagacagatgaggagaagaggaggccagacatcttccacgccctgaagatgggcaacttccagctggtgaaggagattgctgatgaggaccccagccacgtgaacctggtgaatggagatggagccacccccctgatgctggccgctgtgacaggccagctggccctggtgcagctgctggtggagagacatgctgatgtggacaagcaggacagcgtgcacggctggacagccctgatgcaggccacctaccacggcaacaaggagatcgtgaagtacctgctgaaccagggcgcagatgtgaccctgcgggccaagaatggctacacagcctttgacctggtgatgctgctgaatgaccctgacacagagctggtgcggctgctggcctctgtgtgcatgcaggtgaacaaggacaagggccggcccagccaccagccccccctgccccacagcaaggtgcggcagccctggagcatccctgtgctgcctgatgacaagggcggcctgaagtcctggtggaacaggatgagcaaccgcttcaggaagctgaagctgatgcagaccctgccccggggcctgagcagcaaccagcccctgcccttcagtgatgagcctgagcccgccctggacagcaccatgagagctgccccccaggacaagaccagccgcagcgccctgcctgatgctgcccctgtgaccaaggacaatggacctggcagcaccagaggagagaaggaggacaccctgctgaccaccatgctgagaaatggagcccccctgacccggctgcccagcgacaagctgaaggccgtcatcccccccttcctgccccccagcagctttgagctgtggagcagtgacaggagcaggaccaggcacaacgggaaggctgaccccatgaagacagccctgccccagagggccagccggggccaccctgtgggcggcggcggcacagacaccacccctgtgcggcctgtgaagttccccagcctgcccaggagccctgccagcagcgccaacagcggcaacttcaaccacagcccccacagcagcggcggcagcagcggcgtgggcgtgtccagacatggaggagagctgctgaacagaagtggcggcagcattgacaacgtgctgagccagattgctgcccagaggaagaaggccgccggcctgctggagcagaagcccagccacaggagcagccctgtgggccctgcccctggcagcagccccagcgagctgcctgccagccctgctgggggcagcgcccctgtgggcaagaagctggagaccagcaagaggcctcccagcggcaccagcaccaccagcaagagcaccagccccaccctgacccccagccccagccccaagggccacacagctgagagctctgtgagcagcagcagcagccaccggcagagcaagagcagcggcggcagcagcagcggcaccatcacagatgaagatgagctgaccggcatcctgaagaagctgagcctggagaagtaccagcccatctttgaggagcaggaggtggacatggaggccttcctgaccctgacagatggagacctgaaggagctgggcatcaagacagatggcagccggcagcagatcctggccgccatcagcgagctgaatgctgggaagggccgggagcggcagatcctgcaggagaccatccacaacttccacagcagctttgagagcagcgccagcaacacccgggcccctggcaacagcccctgtgcctag

SEQ ID NO: 250433 - DNA, 2031 bp, Artificial Sequence
  derived and/or modified sequence
atggccgccatccagcacggccacgaggccgtggtgcggctgctgatggagtggggcgctgaccccaaccacgccgccaggacagtgggctggagccccctgatgctggccgccctgaccggccgcctgggcgtggcccagcagctggtggagaagggggccaacccagaccacctgtctgtgctggagaagacagcctttgaggtggccctggactgcaagcaccgggacctggtggactacctggaccccctgaccaccgtgcggcccaagacagatgaggagaagagaagaccagacatcttccacgccctgaagatgggcaacttccagctggtgaaggagattgctgatgaggaccccagccacgtgaacctggtgaatggagatggagccacccccctgatgctggccgctgtgacaggccagctggccctggtgcagctgctggtggagagacatgctgatgtggacaagcaggacagcgtgcacggctggacagccctgatgcaggccacctaccacggcaacaaggagatcgtgaagtacctgctgaaccagggcgcagatgtgaccctgcgggccaagaatggctacacagcctttgacctggtgatgctgctgaatgaccctgacacagagctggtgcggctgctggcctctgtgtgcatgcaggtgaacaaggacaagggccggcccagccaccagccccccctgccccacagcaaggtgcggcagccctggagcatccctgtgctgcctgatgacaagggcggcctgaagtcctggtggaacaggatgagcaaccgcttcaggaagctgaagctgatgcagaccctgccccggggcctgagcagcaaccagcccctgcccttcagtgatgagcctgagcccgccctggacagcaccatgagagctgccccccaggacaagaccagccgcagcgccctgcctgatgctgcccctgtgaccaaggacaatggacctggcagcaccagaggagagaaggaggacaccctgctgaccaccatgctgagaaatggagcccccctgacccggctgcccagcgacaagctgaaggctgtgatcccccccttcctgccccccagcagctttgagctgtggagcagtgacaggagcaggaccaggcacaacgggaaggctgaccccatgaagacagccctgccccagagggccagccggggccaccctgtgggcggcggcggcacagacaccacccctgtgcggcctgtgaagttccccagcctgcccaggagccctgccagcagcgccaacagcggcaacttcaaccacagcccccacagcagcggcggcagcagtggagtgggcgtgagccgccacggcggggagctgctgaacagaagtggcggcagcattgacaacgtgctgagccagattgctgcccagaggaagaaggctgctggcctgctggagcagaagcccagccacaggagcagccctgtgggccctgcccctggcagcagccccagcgagctgcctgccagccctgctgggggcagcgcccctgtgggcaagaagctggagaccagcaagaggcctccttctggcaccagcaccaccagcaagagcaccagccccaccctgacccccagccccagccccaagggccacacagctgagagctctgtgagcagcagcagcagccaccggcagagcaagagcagcggcggcagcagcagcggcaccatcacagatgaagatgagctgaccggcatcctgaagaagctgagcctggagaagtaccagcccatctttgaggagcaggaggtggacatggaggccttcctgaccctgacagatggagacctgaaggagctgggcatcaagacagatggcagccggcagcagatcctggccgccatcagcgagctgaatgctgggaagggccgggagcggcagatcctgcaggagaccatccacaacttccacagcagctttgagagcagcgccagcaacacccgggcccctggcaacagcccctgtgcctag

SEQ ID NO: 250434 - DNA, 2616 bp, Artificial Sequence
  derived and/or modified sequence
atgggcgagggcggcctgccccccgccttccagctgctgctgcgggcctgcgatcagggggacaccgaaaccgcccgccggcttctcgagcctggtgccgcagaacctgctgaaagaggcgccgaacctgaggcgggggccgagcccgctggggctgaagtggccggacctggcgccgcagccgctggggcggtcggagcaccagttcctgttgattgctccgatgaggccggcaatactgcactccaatttgcggcagctggtgggcatgaaccgctggttagattcctgctgcgacgaggcgccagtgtcaattcgcgcaatcattatggttggagtgccttgatgcaagcggctaggtttggacatgtctctgtagcgcatctgctcctggatcatggtgctgatgtcaatgcccaaaaccgtcttggagctagcgtgttgaccgtggcgtcccgcggtggccatctgggggttgtgaaactgctgctggaagcaggggccttcgtggaccaccaccatccctcgggcgaacagctgggtctgggaggctcacgcgatgaacctctcgacattaccgccctgatggctgcaattcaacatggacatgaggccgtagtgcggctactgatggagtggggagccgatccgaatcatgctgcccgcacagtgggctggtcccctctcatgctggccgcattgactggtagactcggggtggctcagcagctggtggagaagggtgccaaccccgaccatctgtcagtgctggagaagactgcctttgaggtggcccttgactgcaagcaccgtgacttggtggattacctagatcccttgaccaccgtgcgtcccaagaccgacgaggaaaaacgacggccagacatctttcacgcactcaagatgggtaacttccaactcgtgaaggagattgccgacgaagacccttcccacgtgaacctcgttaacggtgatggggcgacacccctcatgctggccgcggtcaccggccagttggctttagtgcagctgctggtagaacgacacgccgacgtcgacaagcaggactcagtgcacgggtggacagccctcatgcaagcaacttatcatggtaacaaagaaattgtcaaatacctactgaatcaaggagctgatgtgaccctccgagccaagaacggatatactgcctttgacctagtgatgctgctgaatgaccctgatacagaactcgtgcggttgttggcatcagtatgcatgcaggtgaacaaggacaaaggtcgtccttcccatcaaccacctctgccccacagcaaggtgcgacaaccgtggtccatcccggtcctacctgatgacaagggtgggttgaagagctggtggaaccgcatgtctaatcggtttcgtaaactcaaactgatgcagacacttcctcggggactctcttctaatcagcccttaccctttagtgacgagccagaacccgccttagactctacaatgcgggccgcaccacaggataaaacctcacggagcgctctgccagacgcagcccccgtgaccaaggacaatggcccaggcagtaccaggggggaaaaggaggacaccctactgacaacgatgctgagaaacggcgctccgctcacacgtctcccgagtgacaagctcaaggcggtgatccctcctttcttgcctccaagctcctttgagctgtggagctccgaccgctcccgaaccagacacaacggtaaggctgatcctatgaagaccgctcttcctcagcgagctagccggggacacccagtcggaggcggcggaaccgacaccacgcccgtgaggcctgtgaagtttccttcccttccgagatcccctgccagctctgccaactcaggcaatttcaaccactcgcctcactcatctgggggctcttcaggggtcggcgtgtctcgacacggcggggaactacttaacaggtctgggggttccattgataatgtcctgtcccagatcgcagcccaacggaaaaaagctgccggcctgctggaacaaaagcctagtcataggtccagccccgtcgggcctgcacccggcagctccccctccgagctcccagcttctcccgctggcgggtcagccccggttggcaagaagttagagaccagtaagcgcccccccagcggcaccagcacaacttcaaaatcaacaagcccaactctcactccatcaccgtcaccgaagggccacactgccgaatcttcagtgtcttctagcagcagtcatagacagtccaagtcttcaggaggttcatcaagcgggactattactgatgaggatgaactgaccggaatcttgaagaagctctcccttgagaagtatcagcccatcttcgaggagcaggaagtagatatggaagcctttcttaccctgacagacggggatctgaaggaacttggaatcaaaaccgatggaagccgccagcagattttagccgctatcagcgaactcaatgccggaaagggcagggaacggcaaatcctgcaagagacaatacacaactttcacagtagctttgagagctccgcgagtaacaccagggcgcccggaaacagcccatgcgcctag

SEQ ID NO: 250435 - DNA, 2031 bp, Artificial Sequence
  derived and/or modified sequence
atggccgccatccagcacggccacgaggccgtggtgcggctgctgatggagtggggggccgaccccaaccacgccgcaagaactgtgggctggtctcctcttatgctcgcagccctgacaggtcgcctcggggtcgctcaacagcttgtggagaagggagccaatcccgaccacctgtcagtgctggaaaaaacggcatttgaagttgcattggattgcaagcatcgtgatcttgtggattacttggatccattgaccacagtcaggcctaagaccgatgaggagaaacgacgccctgatatttttcatgcgctgaaaatgggcaacttccagctagttaaagagatcgcagacgaggatccgagccatgtcaatctcgtgaacggtgatggagccacccctctgatgctggctgctgtcaccgggcagctcgcgctggtccaactactagtcgagcgacacgcagatgtggacaagcaagatagcgtgcatggctggacagccctgatgcaagcaacctaccacgggaataaggagattgtgaagtatctcctcaatcagggggctgacgtcactttgagggctaagaacggctatactgcttttgaccttgtgatgctcttgaacgatccggataccgagctcgtgcgcctactggcatctgtctgcatgcaggtcaataaagataaaggtcgaccatcacatcagcctcctttaccccatagcaaggttcgtcaaccttggtctattccagtcctgcctgacgataaggggggtctcaagtcttggtggaacagaatgagcaatcgcttcaggaagctgaagcttatgcagacattgcctaggggcctgagcagcaaccaaccgcttccattttcagacgagcctgaaccagcactcgatagcacgatgagagccgctccacaggataagacgtctcgttctgcactgcccgatgcggccccagtcacaaaggacaacggcccgggcagtaccaggggagagaaggaagacactctgctgacaacaatgctgcgcaatggggcacctctgacgaggctgccctccgataaactgaaagcagtgatacctcccttcttacccccatcttcctttgaactatggtcttctgataggtcacggacccggcataatggcaaagccgatcctatgaagacagctctgcctcagagggctagtcgcggccatccagtgggcggcgggggcaccgatacgactcccgtccgacccgtgaaatttccctccctgcccagaagtcctgcctctagcgccaactctggcaacttcaaccatagtccgcattcatcaggaggatcctcaggcgtgggtgtatcgcgccacggcggcgaacttttaaaccggtccggtggctccatagacaacgtgctcagccaaattgccgctcagcggaagaaagctgcaggactgttggaacagaagccatcacataggtcctcccccgtcggcccagccccaggatctagtccctctgaactccccgcgagccctgctggtggctctgcccctgtgggcaagaagctggagactagcaagcggccgccatccggcacatccactacctcaaagtcaacctctccaaccttgaccccttcacccagccccaagggtcacacggcggagagctcagtatcttcatcctcgagccacaggcagtctaaatcatcaggcggatctagttctggtaccattacggacgaggacgaattgacaggtatcctgaagaaactctccttagagaagtaccaaccaattttcgaagaacaggaagtggacatggaggcctttctaacccttaccgacggggatctcaaggaactggggatcaaaactgatggctctcgccaacagattctggccgccatctctgaactgaatgcgggcaaagggagagagcgacagattttgcaggagactatccacaactttcactcttcttttgaatcttctgcatccaacactcgcgcccccggtaacagcccatgtgcatag

SEQ ID NO: 250436 - DNA, 2616 bp, Artificial Sequence
  derived and/or modified sequence
atgggagagggaggtctgcctcccgcatttcagttgctcctacgtgcgtgcgaccagggggatacagagactgcgcgtcgcctacttgagccaggggcagccgaaccagccgaaaggggggcagagcccgaagctggcgcagagccggcaggcgcagaagttgcgggtcccggagccgctgccgctggggcagtgggcgcaccggtgcccgtggactgttcggacgaggccggtaacaccgcgttacagttcgcggcagccggaggacatgagccgctggtgcgtttcctgctgagaaggggggcatctgtgaattcaagaaatcattatgggtggtcagctctgatgcaggcagccagattcgggcacgtctcagtcgcccacctcctcctggatcacggagcagacgtaaacgctcaaaatcggctgggggcttctgtactaactgtcgcctcccgtggcggtcaccttggcgtggttaaattgttgttggaagctggggcatttgtggaccaccaccatccttccggggagcagctggggctggggggatcacgcgacgaaccgctggacatcacagccctgatggccgctatacagcacggacatgaagcagttgtgaggttactgatggagtggggcgctgatccaaatcatgcagcgcgaacagtcgggtggagccctttgatgctggccgctctgaccgggagattgggcgtggctcaacagctggttgagaagggcgctaaccccgatcatctgagtgtgctggagaaaacagcttttgaggtggctttagattgtaaacacagagacttggtcgattatctggaccctttaacaacagtgcggccaaagaccgacgaagaaaagcgcagacctgacatcttccatgccctaaaaatgggaaacttccaactcgtcaaagagatcgcagacgaagacccgtcacatgtcaacctggtgaatggcgatggcgcaaccccactcatgttggctgccgtgaccggacagttagcattagtccagctactcgtcgagcggcatgctgacgtcgataagcaggattcagtacacggctggaccgcactcatgcaggccacatatcacggcaataaagaaattgtaaagtaccttctgaaccagggggctgatgtgactctccgcgcaaagaatggttacacagcttttgatctcgtgatgttgctaaatgacccagacacagagcttgtaaggcttctcgcctccgtctgtatgcaagtcaacaaggacaagggaaggccctcacaccaaccccctctgcctcattcaaaggtgcggcagccttggagcatacctgttttacctgatgataaaggcggtcttaaatcctggtggaatcgcatgtccaaccgatttcgcaagttgaaactaatgcaaacacttcctagagggctcagctctaaccagccactgcctttcagcgatgaaccagaaccagcgctggactcaacgatgcgcgcagccccacaagataaaacaagccgctccgctctcccagacgccgcacccgtgacgaaggacaacggacctgggtccaccaggggcgagaaagaggatacactgctgacgacaatgttgcgcaatggggctcctttgacaaggttaccttctgacaaactcaaggccgttattccgcctttcctcccaccttcctctttcgagctgtggtctagcgataggagcaggaccagacataacggcaaggctgaccccatgaaaaccgcccttcctcagagagcctccagaggccacccagtaggtgggggtggcaccgacaccactcccgtcaggcctgtgaagttcccatctttgcctcgcagtcccgcttcatcagcgaattccgggaatttcaaccatagcccccacagttcagggggaagttccggggtgggcgtttcgcgacacggaggtgagttgctgaaccggtccggcggaagcatcgataacgtgttgagccagatcgctgcccaaagaaaaaaagccgcaggattgctggagcagaagccctctcatagaagttcgcccgtagggccagcacccggaagctccccgtccgagctgccggcaagccctgctgggggaagcgcaccagtggggaagaagctcgaaacctccaagaggcccccaagcgggacttcaacgacctcaaagtcaacatcacccactctaacgccctccccatctcctaagggacataccgccgagtcttctgtgagtagctctagtagccaccggcagagcaaatcctctggaggctcctcctcaggtacgatcaccgatgaggacgagttaacaggtatcctgaagaagctgtcactagaaaagtaccagccaatttttgaggaacaggaggtcgatatggaagcttttctcactctgacggacggggatctcaaggagctgggcatcaagaccgacgggtcaagacagcagatattagcagctatctccgaactgaacgcgggaaaaggtagggaaaggcagatccttcaggagacaattcataacttccactctagtttcgagtcctccgcaagcaatactcgtgcacccggtaactccccatgcgcatag

SEQ ID NO: 250437 - DNA, 2031 bp, Artificial Sequence
  derived and/or modified sequence
atggcagcgatccagcacggtcacgaagctgtggtcaggctgctgatggagtggggagctgatcccaatcacgccgctcggactgtgggttggtccccacttatgctcgctgcactgactgggaggttgggcgtagcgcaacagcttgtggaaaagggggctaatcctgatcacttgtcagtcctagagaagacagcatttgaggttgcacttgactgtaaacacagagatctggtggactacctggatccgctgactaccgtgaggcctaaaacagacgaagagaagcgtcgccctgacatcttccacgccctaaaaatgggtaattttcaactagtgaaggaaattgccgatgaggacccaagccacgtaaatctggtgaatggtgatggggctacccccctcatgcttgcagctgtgacggggcagctggccctggtgcagctactcgtggagaggcacgccgacgttgataagcaagactctgtacacggttggactgccctgatgcaggcgacctatcacggcaacaaggagatcgtgaagtaccttcttaaccagggcgctgacgtaacactgcgagcaaagaacggctataccgccttcgacctggtcatgctcctgaacgaccccgacactgagttagtcagattgctcgcttcagtttgtatgcaagtgaacaaagacaaaggaaggcccagccatcaaccgcctctgccacacagcaaggtccggcagccctggagcattccagtgctgcccgatgataaaggtggtctcaagagttggtggaaccgcatgtcaaatagatttcgaaaactgaaactgatgcagacactccctcgcggtcttagttcgaaccaaccactccccttttctgatgagccagaaccggcattggactcaacaatgagagccgctccccaggataagaccagcaggagcgctctgcctgacgcagcccctgtgaccaaggataacgggcctgggagcacccggggagaaaaagaggacacattgctcaccacaatgctgagaaacggagctccactcaccagattgcctagcgataagctgaaagcagtgatcccacctttcttgcccccatcctcctttgagctgtggtcaagtgacagaagtcggacccggcataatgggaaagcagatcctatgaaaaccgcacttccacaacgggctagccgtggtcacccagtcgggggagggggtacagatacgacgccagttagaccagtaaaatttccctcactcccccgatcacctgcatcctctgccaatagcggcaactttaaccattccccacatagcagtggcggatcctcgggggtgggcgtatccagacatggcggtgagcttttgaatcggtcaggcggaagcatcgataatgtcctgagtcagattgcggctcagcgcaaaaaagctgcaggactcctggagcagaagccatcacaccggagcagccctgtcgggccagcaccaggatccagcccctccgaattgccggcttctcctgcaggagggagcgctcccgtaggcaagaaactggagacctccaagaggccgcctagcggcaccagcaccacgagcaagtccactagcccaactcttaccccgtcccccagccccaaaggccacacagccgagagctccgtgtccagcagctcatcccacaggcagtctaagtcgtctggcggtagcagtagtggaacaataacagacgaggatgagctaactggaattctgaagaagctgagccttgagaagtatcagcctatattcgaggaacaagaagtcgacatggaggcgtttctgaccttgactgatggtgacttgaaggaactcggtattaaaacagacggctctagacagcagatcttagctgccatctccgagctgaatgcgggaaagggacgcgagcggcagattctccaggaaactatccacaatttccatagtagttttgaatcatcagctagcaatacccgcgcacccggtaattcaccctgtgcatag

SEQ ID NO: 250438 - DNA, 3305 bp, Artificial Sequence
  derived and/or modified sequence
tgggcatgtgagtgtggcacacctcctgttggatcacggggctgatgtcaatgcccagaaccggctgggggccagtgtgctcactgtggcttctcggggcggccacctgggtgtggtgaagctgctcctggaagccggtgcctttgtggaccatcaccacccttcaggcgagcaactggggttgggcggcagcagggatgagcccttggacatcacagccctgatggctgccatccagcacgggcacgaggccgtggtgcgtctactgatggagtggggcgcggaccccaaccacgcagcccggaccgtgggctggagcccgctgatgctggccgcactcactgggcggcttggagtggcccagcagctggtggagaagggcgccaaccctgaccacctcagcgtgctggagaagaccgccttcgaggttgcactggactgcaagcacagggaccttgtagactacctggacccgctgaccaccgtcaggcccaaaacagatgaggagaaaaggcgacctgatattttccatgcattgaaaatgggaaacttccagctggtcaaagagattgccgatgaagaccccagccacgtgaacttggtcaatggggacggggcgacgccactgatgctagcagctgttacggggcagctggctctggtgcagctgctggtggagaggcacgcggatgttgacaagcaggacagcgtgcatggctggacggccctcatgcaggcaacctaccatgggaataaggaaattgtgaaatatctgctaaaccaaggggccgatgtcactcttcgtgcaaaaaatggatacacggcctttgacctggtgatgctgctgaatgatcccgacacggaacttgttcgactgctggcatctgtctgcatgcaggtgaataaagacaaaggccggccgagccaccagcctcccctgccccactcgaaggtccgacagccctggagcatcccagtgctgcccgatgacaagggtggactgaagtcctggtggaaccgaatgtccaatcggttccgaaagctcaaactgatgcagacgctgccccgtgggctgtccagcaaccagcctttgcctttctctgacgagcctgagccagctctggactccacaatgagggctgccccccaggacaagacaagccgctctgcactccctgatgcggcccctgtgaccaaagacaatggtcctgggagcacaagaggagaaaaggaagacacgttattgacaaccatgcttcgaaacggagctcccctcaccagactcccgagtgacaagctgaaagcagtcatccccccattcctacccccttccagttttgagctgtggagctctgatcggtcccggacgcgtcacaacgggaaggcagaccccatgaagactgcgctgccccagagagccagcaggggccaccccgtgggcggcgggggcacagacactacacccgtcaggcctgttaaatttccaagcctccccagaagcccagcctcttctgccaattctggaaacttcaaccactcgcctcattcatcgggcggctccagtggggtaggtgtgagccggcacggtggggagctgcttaaccgctcaggtggcagcatagacaatgtcttgtcccaaatcgctgcccagaggaaaaaagcagccggattattggagcagaaacccagccatcggtcaagccctgtggggccagcaccggggtccagcccgtctgagcttccagcctcccctgcaggtggcagcgctcctgttggcaagaaattggagaccagcaaaaggcctccatctggaacttccactacctccaagagcacctctccaaccctcacgccctccccctcacccaaagggcacactgcagagtcctcagtgtcttcctcgtcatcccatcggcagtccaagagcagtgggggctccagcagtggcaccatcacagatgaggatgaactgactggaatccttaagaaattatcacttgagaaatatcagcccatttttgaggaacaagaggtggacatggaagcgttcctcacactgactgacggtgacttgaaggagctgggaattaagacagatgggtccaggcagcagattctggcagcgatttctgaactgaacgcaggcaagggacgcgagagacaaattttacaggaaaccattcacaactttcactcttcctttgagagcagtgccagcaacaccagggcccctggcaacagcccctgtgcgtgatcctccttcccgcagccaccagcgtgagctctctgaatcccgggaccccttcacgtggccacagccccagccctgcccccgtcacactgctgtgccttagtcatgttgttccctttgctcgggatgcccacttcacgtcgacggcattcattggtagtacttcttgctgcaacaaacttcaacacacagagacagattcccatgtaacagtccagtgggggtgcttctgcttggcaggttggttcacacagtgatgcagggactcagctcctttcatcctgtgctctgccctccccgggagcctcagagtttgcttctggctggcggcaagggaaagggacgatggagaaggcacggctgcttcttacctgccttgctcttaactgacacacatcactcctgctcacgtcctcttggccactggtagtcatgtggccccacctggatgcagaggaggccaggatgtgcagtctccacatagtggcttcccagcaacaacttttgacttagatgggggccatggttgggtgggtgaggccagaagaaactgcctccggcaagaggtagcagccgctcaggtggctctgctggcatcggagcccacagaagtgaggagtggccgatggacctgccctccaaatgtgcctgactctgggtcttgctgtcactggatttcctggcatggcagacagaaagaaagatagtttgaccaagtcgtagaagctgatccagcgggtaaaaagggggcagggaactcgtcccttttattcttgcctcagagctgcctgaagacatgggccaggccggaggctggacaactttggataacgctgacctgtacttccaagtaaatgcctcctgaagagcccgggacccttcctgggagaattctgcagccagaatgaaggtgccatcagcaggaggcactgtgaagcaccatcctgtcgctgtccttgtccattcctagcaagttaatcgtgtcttgttaaccagcagttcctgttcaacgtgtaaagagacctgatgttttccctaataaagctgataacag

SEQ ID NO: 250439 - protein, 430 aa, Artificial Sequence
  derived and/or modified sequence
MWRLVPPKLGRLSRSLKLAALGSLLVLMVLHSPSLLASWQRNELTDRRFLQLNKCPACFGTSWCRRFLNGQVVFEAWGRLRLLDFLNVKNVYFAQYGEPREGGRRRVVLKRLGSQRELAQLDQSICKRATGRPRCDLLQAMPRTEFARLNGDVRLLTPEAVEGWSDLVHCPSQRLLDRLVRRYAETKDSGSFLLRNLKDSERMQLLLTLAFNPEPLVLQSFPSDEGWPFAKYLGACGRMVAVNYVGEELWSYFNAPWEKRVDLAWQLMEIAEQLTNNDFEFALYLLDVSFDNFAVGPRDGKVIIVDAENVLVADKRLIRQNKPENWDVWYESKFDDCDKEACLSFSKEILCARATVDHNYYAVCQNLLSRHATWRGTSGGLLHDPPSEIAKDGRLEALLDECANPKKRYGRFQAAKELREYLAQLSNNVR

SEQ ID NO: 250440 - DNA, 1293 bp, Artificial Sequence
  derived and/or modified sequence
atgtggcgcctcgttccaccaaagcttggcaggttgtcaagaagcttgaaactggccgctcttggctcgctattggtgttaatggtgctgcattcccctagcttgctcgccagctggcagcgcaacgaactgaccgatcggcgcttcttgcagttaaataagtgtcctgcatgcttcgggacttcctggtgccggcgctttctcaatggccaggttgtttttgaggcatggggaaggctgcgcttactggacttcctgaatgttaaaaatgtgtattttgcccagtatggcgaaccacgggagggtgggaggcgtcgtgtggtgctcaaacggctcggatcccagcgcgagttagcgcagctggatcagtcaatctgcaaacgcgctacaggccgccctaggtgtgacttgctgcaggccatgccacgtaccgaattcgcacggctgaacggcgatgtgcggctcctgacgcctgaggcagttgaaggctggagcgaccttgtccattgcccaagtcagcgactcctggacagactggtgcggcgatacgctgaaacaaaggatagcggctcattcctgttacggaatcttaaggacagcgagcgaatgcagctgcttttgactctggccttcaaccccgagccacttgtgcttcaaagtttcccctctgacgaaggctggccattcgcaaaatacctgggggcctgtggacgcatggtcgctgtgaactatgtcggggaagagctttggagttatttcaatgccccttgggagaagagagtggacttggcctggcagctgatggagatcgccgaacagctcaccaataacgacttcgaatttgccttgtatctgttggacgtctcatttgacaactttgcagtggggccgcgcgatgggaaggtgataattgttgatgcagagaacgtacttgttgcagacaagcgccttattagacagaataagcccgagaattgggacgtatggtacgaaagtaagttcgatgattgcgataaggaggcttgcctaagcttttccaaagagattctctgtgcccgggcaactgtggaccataattactatgcagtttgtcagaatctgttgagcaggcacgccacatggagaggaacttcaggaggactgctccatgatccaccctctgagattgccaaagatggcaggctggaggccttactcgacgagtgcgcaaatcccaaaaagaggtatggccgtttccaggctgccaaggagctgagagagtacctggctcagctctccaataatgtccggtag

SEQ ID NO: 250441 - DNA, 1293 bp, Artificial Sequence
  derived and/or modified sequence
atgtggaggctggtgccccccaagctgggccgcctgagccgcagcctgaagctggccgccctgggcagcctgctggtgctgatggtgctgcacagccccagcctgctggcctcctggcagagaaatgagctgacagaccggcgcttcctgcagctgaacaagtgcccagcctgcttcggcacctcctggtgccgccgcttcctgaatggccaggtggtgtttgaggcctggggccgcctgcggctgctggacttcctgaatgtgaagaatgtgtactttgcccagtacggggagccccgggagggcggcagaagaagagtggtgctgaagaggctgggcagccagcgggagctggcccagctggaccagagcatctgcaagagggccaccggccggccccgctgtgacctgctgcaggccatgcccaggacagaatttgcccggctgaatggagatgtgcggctgctgaccccagaggccgtggagggctggagcgacctggtgcactgccccagccagaggctgctggaccggctggtgagaagatatgcagagaccaaggacagcggcagcttcctgctgaggaacctgaaggacagcgagaggatgcagctgctgctgaccctggccttcaaccctgagcccctggtgctgcagagcttccccagtgatgagggctggccctttgccaagtacctgggcgcctgtggccgcatggtggccgtgaactacgtgggggaggagctgtggagctacttcaatgccccctgggagaagagggtggacctggcctggcagctgatggagattgctgagcagctgaccaacaatgactttgaatttgccctgtacctgctggatgtgtcctttgacaactttgctgtgggccccagagatggcaaggtgatcatcgtggatgctgaaaatgtgctggtggccgacaagaggctcatccggcagaacaagccagagaactgggatgtgtggtatgagagcaagtttgatgactgtgacaaggaggcctgcctgtccttcagcaaggagatcctgtgtgcccgggccaccgtggaccacaactactatgctgtgtgccagaacctgctgagcagacatgccacctggaggggcaccagcggcggcctgctgcatgaccccccatctgaaattgccaaggatggccgcctggaggccctgctggatgaatgtgccaaccccaagaagagatatggccgcttccaggccgccaaggagctgcgggagtacctggcccagctgagcaacaacgtgaggtag

SEQ ID NO: 250442 - DNA, 1293 bp, Artificial Sequence
  derived and/or modified sequence
atgtggcggctggtgccccccaagctgggccggctgagccggagcctgaagctcgcagcactgggctcactgctggtacttatggtgctgcactcccctagtctgctggcatcttggcaaaggaatgagctaacagataggcgcttcttgcagctgaataaatgtccagcttgcttcggcaccagttggtgtaggaggttcctgaacggacaggttgtctttgaagcatggggcagactaaggcttttggatttcctgaatgtcaagaatgtatacttcgcccaatatggcgagccccgggagggcgggagaagaagggttgtgctcaagagattggggtcccagagagagcttgcccaactagaccagtccatttgtaagcgcgctactggaaggccacgctgtgacctcctgcaagccatgccacgtacagaatttgcaaggctgaacggtgatgtgaggctgctcacccctgaggccgtggagggctggagtgatctggtccattgtcccagtcagaggctgttggaccgactcgtgcggcggtacgcagagaccaaggactctggcagcttcttgctgaggaacctcaaagattccgagcgcatgcagctgcttttaacactggccttcaaccccgagcctctagtcttgcagtccttcccctccgatgagggctggcccttcgcaaagtatctcggagcatgcggacgcatggttgccgttaattacgtgggcgaggagctgtggtcttactttaatgccccctgggagaaaagagtcgatctcgcttggcagctgatggaaattgctgaacagctgacaaataatgatttcgagtttgcgctgtatttgcttgatgtttcttttgacaacttcgccgtcggcccacgtgacggaaaagtgattattgtcgacgccgagaatgtcctcgtggctgacaaaaggctaattcgtcagaataagccagaaaactgggatgtgtggtatgaatcgaagttcgatgattgtgacaaggaagcctgtctgtccttcagcaaagaaatcctgtgtgcccgggctactgtggaccataattactatgcagtgtgtcagaatctcctgtcgagacatgctacgtggcgcggtacgtctggaggattgctccacgatccgccaagcgagatcgcaaaggatgggaggctcgaggctctcttggatgagtgtgcaaaccctaaaaagaggtatggcaggtttcaggccgcaaaggagctgagggagtacctggctcagctgagcaataatgtaagatag

SEQ ID NO: 250443 - DNA, 1293 bp, Artificial Sequence
  derived and/or modified sequence
atgtggcggctcgttcccccaaagttgggccgactttctcggagtttaaagctagctgccctcggttccctgttggtactcatggtgctgcacagtcctagtctgttggccagttggcagaggaatgagctgacagataggcgttttctgcagctgaacaaatgccccgcttgtttcgggacaagctggtgtcgcagatttttgaatggacaggtggtttttgaggcctggggcaggttacggttactggatttcctcaatgtaaagaacgtctatttcgcccagtacggagaaccaagggagggtggtcggagacgcgtggtactgaaaagactcggcagccagcgcgagctcgctcaactagaccagagcatctgtaagagggccactggcaggccaagatgtgacctgctacaagccatgccccgaacggaatttgcgaggttgaacggggatgttcgcttgcttacgcccgaagcggttgagggctggtctgatctggttcactgcccttctcagagattgctggacagactggtccgaaggtatgccgaaaccaaagatagtggatcctttctgctgaggaacttgaaggactctgagagaatgcagcttctcttgaccctcgcctttaacccagaacctctcgtgctacaatcttttcctagcgatgagggttggccctttgccaaatatctgggggcatgtggacgcatggtggccgtgaattacgtgggcgaagaactctggtcttactttaacgctccatgggagaaaagagtggacctggcctggcaacttatggaaattgccgagcagctgacaaataacgactttgaatttgccctctatctcctggacgtgtccttcgacaattttgccgtgggccctagggatgggaaggtaatcatcgtggatgctgaaaacgtgcttgtggccgacaagcgtctgattcgacaaaacaagcccgagaactgggatgtttggtatgaatccaagttcgacgattgcgataaagaggcatgtctcagcttttctaaagaaatcctttgcgcccgtgccaccgtcgaccacaactactatgcagtatgtcagaatctcctgtctcggcatgccacctggaggggaacaagcggcggtcttctgcatgatcccccatctgaaatcgccaaagacggcagactggaagcactcctcgatgagtgtgccaacccgaagaagagatacggcagatttcaggcagcgaaagagctgagggagtatttggcccagctgtctaacaatgtccgttag

SEQ ID NO: 250444 - DNA, 4346 bp, Artificial Sequence
  derived and/or modified sequence
cttggtctcaggagagccagcgcgcacaagcaagggtgtgcggctctgagacgtgcgttgctgcttgtgggtgtgagacatcctagctcctcttccccttccgtgagtccctcctttcctcgcagaccccacttgtcgtggctggctgccgccgcagctcttgtgcgaagccagcagtgcgcgtgcgcgcgggcacgggcgcgcgaccgtcgggtccccgcgctccctccccctcccgctcctctataacttggctggcgtggaggaggcgccgccggagtcggagggcggggagctaggaggagggagctcgagagttgtggagactagtgactgggagaagtcgcagcccgctcaggcccgcgccttcccgctccccgtcttcctctctcacacacctactccgccctccgccccagcccgcgcgctagctccttctctcgcccggggttcctgccggtagctctccgggtcttggcgcggcgggggcgccccgggggtgccctcgccctcccgttgcgggcgggcgggcggtatgtggcgcctggtgcccccgaagctgggccgcctgtcccgctcgctgaagctggcggcgctgggcagcctgttggtgctgatggtgctgcactcgccgtcgctgctcgcctcttggcagcgcaacgaactgaccgaccggcgcttcctgcagctcaataagtgcccggcgtgcttcggcacgagctggtgccgccgcttcctcaacgggcaggtggtattcgaggcgtggggccgcttgcgcctgctggacttcctcaacgtgaagaacgtgtacttcgcgcagtacggcgagccccgcgagggcggccgccgccgagtggtgctcaagcgcctcggctcgcagcgcgagctggcgcagctcgaccagagcatctgcaagcgggccaccggccggccccgctgcgacctgctgcaggccatgccccggaccgagttcgcgcgcctcaacggcgacgtgcgtctgctcacgcccgaggcggtggagggctggtcggacctggtgcactgcccctcgcagcgccttctcgaccgcctggtgcgccgctacgcggagaccaaggactcgggcagcttcctgcttcgcaacctcaaggactcggagcgcatgcagctgctgctgaccctggccttcaaccccgagccgctggtgctacagagttttccgtctgatgaaggttggccatttgcaaagtatcttggagcttgtggaagaatggtggctgtaaattatgttggagaagaactgtggagttactttaatgcgccatgggaaaaacgagttgacctcgcttggcaattaatggaaatagcagaacagcttacaaacaatgactttgaatttgcactctacctcctggacgtcagctttgacaattttgcagttggtcctagagatgggaaggtaatcattgtggatgctgaaaatgttttggttgctgacaaaagattaattagacaaaataaacctgaaaattgggatgtatggtatgaaagcaagtttgatgactgtgataaggaggcttgcttatcattttcaaaagaaattctttgtgctcgtgccactgtggaccacaattactatgctgtttgtcagaacctcttatccagacatgccacctggcgtggcacttctggaggactccttcatgatccaccaagtgaaattgccaaagatggccggctcgaggccttgctggatgagtgtgccaacccaaagaagcgctatggcagattccaggctgcaaaagaactgcgtgaatacctagcacaattaagtaacaacgtgaggtagtctatggtgaacttttctttttttctccatttaaacagcactggctaaaactaaaccaccaaaaaacgatctgaaaaaatgaaatttggaagtgttacattcagaggatgataaacttgcactgatagatcttaatgttaacatccatcaaaataagacattacttcaaaaatcacatgatgcttctgcaaataagtatgttcttatactttggaggcttgagctgtcatcagctgctccccactaccccggaatgcttgagtggattaatgaatattgttaagctattggaaatgagtctgatagtacattggcttgtgtatcaaagggtacttggtacttagtttgcatttactatcatgattttgtgaatctcttgcatttactttgaatgtcaagtcagattggtctgttttataggccgctttttccttctgatgtgtagggttttttccccctttttttttttaattaaattttgaaaattcaggttactgtaggtgttcatttaaatttttaatagttgtcattcagtgctatttggtacatatttactgttagggcaggattcccaggtttactgtgttttttttttttttttttaaagaaagctaaatattacattatgtaaatacttcttttcaccaacttctgtagtttcaccattgcatggtgtcatttcaggttatttaacagttatatccctctatgccaataattagaagtgtacactaaacatgaagtttggcatatgttgcaaaatgtcattttatcttttctaaaggctttaagaagaatatactagaatctatatattgatgttaattttgattcagaaaaaaaatacaacccagtatctaaaaagtgttaactagtccaagatagtaatgcatatgccaaagaaatattacacctaatctcatgtttagaatttaaaatagaattggtcagctacttattcttaccaccctacttccagtattttagctctgtcattattaaattcagatcttcctgattattttttctgttgaaagttaaactactgctttcaagtaatttaaagttatcctaccttttattcatgggtagttttgcaaaattaacatggtagccattgtttgaatttaatcgggcatcataacttttcatttattgaggaactaatcattattactataaagcatacaaattagccagtcagcacactttggtcttctttacctaagggttaaacatcagaacatcaaatttaattatttgcatagaaatgtgtgggctctttatataagttgactatcactaacaggtaatatttttctgtttgaagttgttacttttgtttacagcaaagtttgatgtagtgtgcagtagtgagctctagactgatctttttctaaatcagaaagtgattaaagtatgcacaaccaaaggcaggtttttctttttcatttattcagcaactatttattaagcatcaactctgtgccaggcacgttactagctgctacatactgtctgaacatgacatacggttaagtaactttacaattattatcaaatacttcaatgtagatatttcttaagttgaaatagcattaactaggataatgctttcatgttattttattgtcttgtgatagaaattcaacttgtaccatctaaaactaggttgctataaaaataggaggatgaagtcaataaagtttatgccagtttaaaaactggaaggaaaaggtaagagctctccattataaaatagttgcattcggttaatttttacacattagtgcattgcgtatatcaactggccctcaatgaagcatttaagtgcttggaattttactaaactgacttttttgcaactttgggagatttttgaggggagtgttgaaaattgccaaacactcacctcttactcaaaacttcaaataaaatacacattttcaagagggagcaccttttatatttgataagttttcattataaaccttataataccagtcacaaagaggttgtctgtctatggtttagcaaacatttgcttttctttttggaagtgtgattgcaattgcagaacagaaagtgagaaaacactgccagcggtgattgctacttgaggtagttttttacaactaccatttcccctccatgaaattatgtgaaatttattttatctttgggaaaagttgagaagatagtaaaagaattaggaatttaaaattacagggaaaaatatgtaagtgaaaagcaataaatattttgttcactttgctatcaagatgttcactatcagatatttattatatggcagcaatttatatttttaatcattgcccattaatagacgcagtaaaatatttttgaatcagacatttggggtttgtatgtgcattaaaattgtcttttgtactgtaagttactgttaatttgaatattttattgaactgtctccctgtgcctttataatataaagttgtttctacaacttttaatgatcttaataaagaatacttta

SEQ ID NO: 250445 - DNA, 1293 bp, Artificial Sequence
  derived and/or modified sequence
atgtggagactggtgccccccaagctgggcagactgagcagaagcctgaagctggccgccctgggcagcctgctggtgctgatggtgctgcacagccccagcctgctggccagctggcagagaaacgagctgaccgacagaagattcctgcagctgaacaagtgccccgcctgcttcggcaccagctggtgcagaagattcctgaacggccaggtggtgttcgaggcctggggcagactgagactgctggacttcctgaacgtgaagaacgtgtacttcgcccagtacggcgagcccagagagggcggcagaagaagagtggtgctgaagagactgggcagccagagagagctggcccagctggaccagagcatctgcaagagagccaccggcagacccagatgcgacctgctgcaggccatgcccagaaccgagttcgccagactgaacggcgacgtgagactgctgacccccgaggccgtggagggctggagcgacctggtgcactgccccagccagagactgctggacagactggtgagaagatacgccgagaccaaggacagcggcagcttcctgctgagaaacctgaaggacagcgagagaatgcagctgctgctgaccctggccttcaaccccgagcccctggtgctgcagagcttccccagcgacgagggctggcccttcgccaagtacctgggcgcctgcggcagaatggtggccgtgaactacgtgggcgaggagctgtggagctacttcaacgccccctgggagaagagagtggacctggcctggcagctgatggagatcgccgagcagctgaccaacaacgacttcgagttcgccctgtacctgctggacgtgagcttcgacaacttcgccgtgggccccagagacggcaaggtgatcatcgtggacgccgagaacgtgctggtggccgacaagagactgatcagacagaacaagcccgagaactgggacgtgtggtacgagagcaagttcgacgactgcgacaaggaggcctgcctgagcttcagcaaggagatcctgtgcgccagagccaccgtggaccacaactactacgccgtgtgccagaacctgctgagcagacacgccacctggagaggcaccagcggcggcctgctgcacgacccccccagcgagatcgccaaggacggcagactggaggccctgctggacgagtgcgccaaccccaagaagagatacggcagattccaggccgccaaggagctgagagagtacctggcccagctgagcaacaacgtgagatag

SEQ ID NO: 250446 - protein, 566 aa, Artificial Sequence
  derived and/or modified sequence
MRRQWGSAMRAAEQAGCMVSASRAGQPEAGPWSCSGVILSRSPGLVLCHGGIFVPFLRAGSEVLTAAGAVFLPGDSCRDDLRLHVQWAPTAAGPGGGAERGRPGLCTPQCASLEPGPPAPSRGRPLQPRLPAELLLLLSCPAFWAHFARLFGDEAAEQWRFSSAARDDEVSEDEEADQLRALGWFALLGVRLGQEEVEEERGPAMAVSPLGAVPKGAPLLVCGSPFGAFCPDIFLNTLSCGVLSNVAGPLLLTDARCLPGTEGGGVFTARPAGALVALVVAPLCWKAGEWVGFTLLCAAAPLFRAARDALHRLPHSTAALAALLPPEVGVPWGLPLRDSGPLWAAAAVLVECGTVWGSGVAVAPRLVVTCRHVSPREAARVLVRSTTPKSVAIWGRVVFATQETCPYDIAVVSLEEDLDDVPIPVPAEHFHEGEAVSVVGFGVFGQSCGPSVTSGILSAVVQVNGTPVMLQTTCAVHSGSSGGPLFSNHSGNLLGIITSNTRDNNTGATYPHLNFSIPITVLQPALQQYSQTQDLGGLRELDRAAEPVRVVWRLQRPLAEAPRSKL

SEQ ID NO: 250447 - DNA, 1701 bp, Artificial Sequence
  derived and/or modified sequence
atgagaagacagtggggcagcgccatgagagccgccgagcaggccggctgcatggtgagcgccagcagagccggccagcccgaggccggcccctggagctgcagcggcgtgatcctgagcagaagccccggcctggtgctgtgccacggcggcatcttcgtgcccttcctgagagccggcagcgaggtgctgaccgccgccggcgccgtgttcctgcccggcgacagctgcagagacgacctgagactgcacgtgcagtgggcccccaccgccgccggccccggcggcggcgccgagagaggcagacccggcctgtgcaccccccagtgcgccagcctggagcccggcccccccgcccccagcagaggcagacccctgcagcccagactgcccgccgagctgctgctgctgctgagctgccccgccttctgggcccacttcgccagactgttcggcgacgaggccgccgagcagtggagattcagcagcgccgccagagacgacgaggtgagcgaggacgaggaggccgaccagctgagagccctgggctggttcgccctgctgggcgtgagactgggccaggaggaggtggaggaggagagaggccccgccatggccgtgagccccctgggcgccgtgcccaagggcgcccccctgctggtgtgcggcagccccttcggcgccttctgccccgacatcttcctgaacaccctgagctgcggcgtgctgagcaacgtggccggccccctgctgctgaccgacgccagatgcctgcccggcaccgagggcggcggcgtgttcaccgccagacccgccggcgccctggtggccctggtggtggcccccctgtgctggaaggccggcgagtgggtgggcttcaccctgctgtgcgccgccgcccccctgttcagagccgccagagacgccctgcacagactgccccacagcaccgccgccctggccgccctgctgccccccgaggtgggcgtgccctggggcctgcccctgagagacagcggccccctgtgggccgccgccgccgtgctggtggagtgcggcaccgtgtggggcagcggcgtggccgtggcccccagactggtggtgacctgcagacacgtgagccccagagaggccgccagagtgctggtgagaagcaccacccccaagagcgtggccatctggggcagagtggtgttcgccacccaggagacctgcccctacgacatcgccgtggtgagcctggaggaggacctggacgacgtgcccatccccgtgcccgccgagcacttccacgagggcgaggccgtgagcgtggtgggcttcggcgtgttcggccagagctgcggccccagcgtgaccagcggcatcctgagcgccgtggtgcaggtgaacggcacccccgtgatgctgcagaccacctgcgccgtgcacagcggcagcagcggcggccccctgttcagcaaccacagcggcaacctgctgggcatcatcaccagcaacaccagagacaacaacaccggcgccacctacccccacctgaacttcagcatccccatcaccgtgctgcagcccgccctgcagcagtacagccagacccaggacctgggcggcctgagagagctggacagagccgccgagcccgtgagagtggtgtggagactgcagagacccctggccgaggcccccagaagcaagctgtag

SEQ ID NO: 250448 - DNA, 1701 bp, Artificial Sequence
  derived and/or modified sequence
atgaggcgacagtggggtagcgctatgcgcgcagctgaacaggcggggtgtatggtgagcgcgagtcgggctggccagcctgaagccggcccttggagctgctccggcgttatcctcagcaggtctcccgggttagttctctgtcacggggggatatttgtcccatttctgagggcaggctctgaagtgcttaccgctgccggagcggttttcctgcccggtgacagctgcagagacgacctgagactccacgtccaatgggccccaacagccgccggccccggggggggggctgagcgcgggaggcctggactttgcacccctcaatgtgccagcctcgagcctggtcctccagccccatctcgtgggcggcctctgcagccccgtctccccgctgagctgctcctgctgttgtcctgtccagctttctgggcccattttgcccgactgttcggggatgaggccgccgaacagtggcgtttcagctccgcagcccgagatgacgaagtgtcggaagacgaggaggccgatcagctgcgtgccctcgggtggtttgcattactaggagtgcggctgggacaagaagaagtggaggaggagagaggaccggccatggcagtttctcctctgggggccgttcccaagggcgctccactgctggtatgtggtagtccattcggcgcgttttgccctgatatctttttgaatactctgagctgcggagtcctcagtaacgttgctgggcctctgttgctcacagacgcacgctgcctaccaggcaccgaggggggtggggttttcactgcaagacctgctggcgctctggtggcactggtggttgcccccctctgctggaaagcaggcgaatgggtcggctttaccctcctttgcgcagccgctccacttttcagggctgcgagggacgccctgcatcgcctgcctcactcgactgcagctttggcagccctcctcccgccagaagtaggtgtcccgtggggactgcctctgagggactctggacctctgtgggcagccgcagctgtgctggtagagtgtggcaccgtctggggcagcggagtcgccgtcgcccccagactagtagtgacctgccgccacgtgtcgcctcgagaggcggccagggttctcgtgcgaagcactacccctaagagtgtggccatctggggtcgggttgtgtttgctacccaggaaacatgcccgtatgatatagctgtggtgagcctggaggaggatctggatgatgttcccatccccgttccggctgaacatttccacgagggggaagccgtgagtgttgtgggtttcggcgtcttcggacagagttgcgggcccagcgtaacatccggcatcctaagcgcagtcgttcaggtgaatgggaccccagtgatgctacaaactacatgcgcagtccacagcggttccagtgggggaccccttttttctaatcattctggaaacctactgggcatcatcacctccaatacaagggacaacaatactggggccacctacccccatctaaactttagtatccctattaccgtcctacaaccagctctgcagcaatacagtcagactcaggatttaggggggttgcgggagctagatagagccgcagaaccagttagggtagtttggcggctccagcggcccctggccgaggctccgcgctccaagttgtag

SEQ ID NO: 250449 - DNA, 1701 bp, Artificial Sequence
  derived and/or modified sequence
atgaggcggcagtggggcagcgccatgagagctgctgagcaggccggctgcatggtgtctgccagccgggccggccagcctgaggccggcccctggagctgcagcggggtcatcctgagccgcagccctggcctggtgctgtgccacggcggcatctttgtgcccttcctgcgggccggcagcgaggtgctgacagctgctggagctgtgttcctgcccggggacagctgcagagatgacctgcggctgcacgtgcagtgggcccccacagctgctggccctgggggcggcgctgagcggggccggcccggcctgtgcaccccccagtgtgccagcctggagcccggccccccagcccccagccggggccggcccctgcagccccggctgcctgctgagctgctgctgctgctgagctgcccagccttctgggcccactttgcccggctgtttggagatgaagctgctgagcagtggaggttcagcagcgctgccagagatgatgaggtgtctgaagatgaggaggccgaccagctgcgggccctgggctggtttgccctgctgggcgtgcggctgggccaggaggaggtggaggaggagcggggccctgccatggctgtgagccccctgggcgctgtgcccaagggggcccccctgctggtgtgtggcagcccctttggagccttctgcccagacatcttcctgaacaccctgagctgtggggtgctgagcaatgtggccggccccctgctgctgacagatgcccgctgcctgcctggaacagaaggaggaggagtcttcaccgcccggcctgctggggccctggtggccctggtggtggcccccctgtgctggaaggccggggagtgggtgggcttcaccctgctgtgtgccgccgcccccctcttccgggccgccagagatgccctgcaccggctgccccacagcacagctgccctggccgccctgctgcccccagaggtgggcgtgccctggggcctgcccctgcgggacagcggccccctgtgggccgctgctgctgtgctggtggagtgtggcaccgtgtggggcagcggcgtggccgtggccccccggctggtggtgacctgccgccacgtgagcccccgggaggccgcccgggtgctggtgcgcagcaccacccccaagtctgtggccatctggggccgggtggtgtttgccacccaggagacctgcccctatgacattgctgtggtgtccctggaggaggacctggatgatgtgcccatccctgtgcctgctgagcacttccatgaaggagaggccgtgtctgtggtgggctttggagtgtttggccagagctgtggccccagcgtgaccagcggcatcctgtctgctgtggtgcaggtgaatggcacccctgtgatgctgcagaccacctgtgctgtgcacagcggcagcagcggcggccccctcttcagcaaccacagcggcaacctgctgggcatcatcaccagcaacacccgggacaacaacacaggagccacctacccccacctgaacttcagcatccccatcaccgtgctgcagcctgccctgcagcagtacagccagacccaggacctgggcggcctgcgggagctggacagagctgctgagcctgtgcgggtggtgtggaggctgcagaggcccctggccgaggcccccaggagcaagctgtag

SEQ ID NO: 250450 - DNA, 1701 bp, Artificial Sequence
  derived and/or modified sequence
atgcggcggcagtggggcagcgccatgcgggccgccgagcaggccggctgcatggtgagtgccagccgcgcgggtcagccggaagctgggccttggtcttgtagtggggtgattctgagccgctcacccggacttgtgctctgtcatgggggtatcttcgtcccgtttctgcgtgcgggcagtgaagttctgacagccgctggcgccgtgttcttgccgggggattcatgcagagatgacctgaggctgcatgtgcaatgggcccctacagccgcaggtcctggcgggggtgctgagaggggcagaccaggactgtgtacaccacagtgcgcgtcccttgaaccaggacctcccgccccatccagaggccggcctctgcagcctagactacctgctgagttattgttgctcctgtcctgcccagctttctgggcacacttcgctcggctctttggcgatgaggctgcagaacagtggagattctccagcgcggcccgagacgacgaggtgtcggaagacgaggaggctgatcagctgcgtgccttaggttggtttgcgttgctgggagtgcggctcggccaggaggaggttgaagaggaacgtggtcccgccatggccgttagtccactgggcgccgttccaaagggtgccccactgctcgtttgtggcagtccatttggtgccttttgcccagatattttcctcaacactctgtcttgcggcgtgttgtccaatgttgccggtcctctgctgctgactgacgccaggtgtctgcctggaactgagggcggcggcgtgtttacggccaggcccgctggcgctttagtggccctcgtcgtggcccctctatgctggaaggcaggcgagtgggtgggttttactcttttatgtgccgcagccccactgttcagggcggctagagatgctttacatcggctcccgcattccaccgctgccctcgctgccctactccctccagaggtgggggtcccctggggcctaccgctgcgggactccggtccattgtgggccgctgctgccgtattggtggagtgcggaacagtttggggatccggtgtggcggtcgcccctcgcttggtggtcacctgtcgtcatgttagtccgcgcgaggcagccagagtgctcgtcaggagtactacacccaagagcgtggccatatggggccgagtggtgttcgccactcaagaaacttgcccttatgacatcgctgtcgtatcactcgaagaagatctggatgacgttcctatacctgtgcccgcagaacacttccatgagggggaggccgtctctgtggttgggtttggcgtgtttggacagtcttgcggcccctccgtaacttcaggcatcctttccgccgtggttcaggtgaacggcacccccgttatgctccagaccacatgcgccgttcattcaggaagcagcggcggcccgctgtttagtaatcactccggaaatcttctcggcattattacaagcaacactcgtgataacaatactggcgctacatatccccatctgaatttttctatccctattacggtgctgcagcctgcattacagcagtatagtcagacccaggatttggggggccttcgcgagttagatcgggcggctgaaccagtcagagtggtgtggcgcctgcagcgacctctggcggaggcccctagatctaagctgtag

SEQ ID NO: 250451 - DNA, 1701 bp, Artificial Sequence
  derived and/or modified sequence
atgagacggcagtggggctcagcaatgcgggctgcggagcaagctgggtgcatggtctcagcctctcgggcagggcagcccgaggctgggccttggtcctgcagcggagtcatactctcccggtcaccaggcctcgtgctatgccacgggggaatctttgtgccatttttacgagcaggaagcgaagtactgacagcggcaggggctgtttttctccctggcgatagctgtagagacgatttgcggctgcatgtgcagtgggcccctaccgccgctggtcctgggggtggcgcagaaagaggacgaccaggtctctgtacacctcagtgcgcttccctggaacccggaccaccagctccatctcggggacgacctctccaacctcggctgccagcggagctgctgctgttgctgagctgtccagcgttttgggcccatttcgctcgattgtttggcgatgaagcagcagagcagtggaggttttcttccgccgcaagagatgacgaggtgtctgaggacgaagaagccgatcagttgcgcgctctgggttggtttgccctgctcggcgttaggctggggcaggaggaagtcgaagaggaacggggacccgctatggctgtgagccccctgggcgcagtccctaaaggtgctccactgctggtctgtggcagcccctttggcgcattttgccccgacatcttcctgaacacactgtcttgcggagtgctcagtaatgtcgctggccctcttctccttacagatgccagatgcttgcccggaactgagggaggcggagtgttcaccgcccgaccagccggtgcactggtggcgctggttgtggccccactgtgttggaaggcaggagagtgggttggttttaccctgctctgtgctgccgctccactgttccgggctgcacgtgatgcgctgcaccgtctgccccactccacagcagcactcgccgcactgctcccacctgaggtgggggtgccatggggcctgccccttagggattctggtcctctgtgggcggcagccgctgttctggtggagtgcggaaccgtgtggggctccggcgtggctgtggcgcctagactcgtggtgacatgcagacacgtttctccacgagaggcagctcgggtcttagtgcggtctaccacgccaaagtctgtggcaatttggggccgagtagtcttcgccactcaggaaacatgcccctatgatatcgccgtcgtctcacttgaagaggatttggatgacgtgcctatccctgtccctgcagaacattttcacgagggcgaggcagtatccgtggtcggatttggggttttcggtcagtcatgtggaccatccgtgaccagtggcatcttgtcagcagtggtgcaagtgaacggaaccccggtcatgctgcagaccacttgtgccgtgcatagcgggtcatccgggggacctctcttctcgaaccactcgggaaatctcttgggcataattacctccaacacgagagataataacaccggagccacatatccacacttgaatttcagcatccctattacagtcctgcagcccgcattacagcagtacagccaaacccaagatctggggggactgcgcgagctggacagagcagccgagcctgttcgggtggtgtggcgacttcagaggccgctggctgaggcccctcgtagcaagctatag

SEQ ID NO: 250452 - DNA, 3644 bp, Artificial Sequence
  derived and/or modified sequence
atgagaaggcagtgggggtctgccatgagggcggccgagcaggcgggctgcatggtgagcgcctcccgggccggacagcccgaggcgggcccgtggagctgcagcggggtaatcctgagccgtagcccgggcctggtgctttgccacgggggcatcttcgtccccttcctgcgagctggcagcgaagtcctgaccgcggccggcgccgtcttcctgcctggcgacagttgcagggacgacctgcgcctgcacgtgcagtgggccccaacggccgcgggtcccgggggcggcgcggagcggggccgcccagggctgtgcacgccccagtgcgcgagcctcgagcccggcccacctgccccgtcccgcgggcgtcccctgcagccccggcttcctgctgagctgctgctgctgctgagctgcccggccttctgggcccacttcgcgcgcctcttcggggacgaggcagcggaacagtggcgcttctcgagcgcggcgcgggatgacgaagtgtcggaggacgaggaggcggatcaactgagagcgctgggctggtttgcgctgctgggcgtgcggctaggccaggaggaggtggaggaggagcgcgggccagccatggcggtgtcgcctctcggggccgtgcccaagggtgcgccattgctggtctgcggctcccctttcggcgccttctgccccgacatctttctcaacacgctgagctgcggggtgctcagcaacgtggccggcccactgctgcttaccgacgcacgctgcctgcccggcaccgagggcggcggcgtgttcaccgcgcggcccgcgggggcgctggtggcgctggtggtggcgccgctctgttggaaggccggcgaatgggtgggcttcacgctgctctgcgccgccgccccccttttccgcgccgcccgcgacgcgcttcaccgcctgccgcacagcaccgctgccctggccgcccttctgccgccagaggtgggcgtcccgtggggtctgcccctccgagactccgggcccctgtgggcagccgcggcagtgttggtggagtgcggcaccgtatggggctccggagtggctgtggcaccccgccttgtagtgacctgtcggcacgtgtcccctcgggaagcagccagggtcctggtgcgctccaccacccccaagagtgtggccatctggggccgtgtggtatttgccactcaggagacatgtccctatgacatagcagtggtgagcctggaggaggacctggatgatgtccccatccctgtgcccgctgagcacttccatgaaggcgaggctgtgagtgtggtgggctttggcgtctttggccagtcttgcgggccctcggtgacctcaggcatcctttcggctgtggtgcaggtgaatggcacgcccgtaatgctgcagaccacgtgtgctgtgcacagcggctccagtgggggacccctcttctccaaccactcaggaaacctccttggcataatcaccagcaacacccgggacaataatacgggggccacctacccccacctgaacttcagcattcccatcacggtgctccagccggccctgcagcagtacagccagacccaagacctaggtggcctccgtgagctggaccgcgctgctgagccagtcagggtggtgtggcggttgcagcggcccctggcagaggccccgcggagcaagctctgaggctgtgttaccacctttggaaagaagagtgacctttttctgctgtaggaagtgatgttgaggtgacggtggcctcaggattcagggcccagcccctgcaggggcccaggctgcctctcatctccacccactgactgcagactgggctttgggctctggggcaaacttctcttcagccccatggatccttaacctggcagcccgttttggggtgctttcttgagcccccagttctctgtcccctagcactagactcagctgtattgtttttccttctggggagcccactccaactgcacagaagttctgggcctgacaggtagattccagctggaaggcaggcccgtgcctggttttgcgtctgttcccctgagggccatcgtcatcctggagcttcaatggggccttggctcctgtctgcctctcagtcagagtcagggctgacaaaggactcagcttccttagcatctcagcagaaaccttgctctgaagaccagagacagaagggacagaaacaggagtgcctcctgctgtgccaggcccatgggcagtgcaggcagatccctgaaggtcagcactcctgggtcttcatatgccaacaggggcgctcttgacactgtgccttcattttccagcccacagcctgggtctcagggatcttgaggggtagaacatgtctggttggggcttgggaataaacatgatctattgaaaaacctctgtatttatatatcaaattgtttctttttttcaggagttgaactgggaataggcaagtaccaggcaaagaaacacaccctttccttttttttttttttttttctttagagctgtggtcttgctctctcacccaggctggagtgcagtgttgcgatcacagctcactgcagcctcaaactcctgggctccaggagacctcctgcctcagcctcctgaatagctgggactacagtcgcgcaccaccacgcctggctaattttttatttttgtagaaatggggtattgctttgttgcccgtgctggcttcagccttctggtttcaagcagtcctcctgcctcagcttcccaaagtgctgggattacaggtgtgagccactgtgcccaacccagaaatacaccctttctgtgctgttttctcagcagggtgtgagctcacgggatacggtcctgccagactggccctcatagctggtcatgtgccagtcagagctgggtggggcttgcaggtcccggaaggtggtggtcttgacctggcagcagatgcttaaagaatgcctaaggtgggtggcagttggggagttcaagggtgaatgaggccagggcagcccccaggagctgaggccaactctttgagtcaggactgtgccgtgtgcccagggccttgcatgtgtgggccctcgagtgatttctactggcaggctgaaagccctgtgaggggcggctgtgggcggaggccacgcaggaagagtgcttaggagtaacttgtttctaacacctgtgtgctgagtgccaatgctgggtgtggtgttatgatatatattggttttcatccagcattcctgactcgtaactctcatagtccttgttccagtctttgttagaatactgggtatgttagggcttgggacaggcctctgacctctgggtatcctttcactaatgttcgcccacctttttcacagtgggtcctaaagaccttcccatgagagggtctcaatcctaggggaaggaatgttgatgtcatgaaccttccataaaaacccaagaggacagggttcagagagcttctggatagctgaacacctggcacttcctggagtgtggcgtgcccagggagggcacggaagctctgcactccttccccttccctcattccttgctctatgtgcatctcttcatctgtatcctttgcgatatcctttataataaaccggtaaacataa

SEQ ID NO: 250453 - protein, 203 aa, Artificial Sequence
  derived and/or modified sequence
METLSQDSLLECQICFNYYSPRRRPKLLDCKHTCCSVCLQQMRTSQKDVRCPWCRGVTKLPPGFSVSQLPDDPEVLAVIAIPHTSEHTPVFIKLPSNGCYMLPLPISKERALLPGDMGCRLLPGSQQKSVTVVTIPAEQQPLQGGAPQEAVEEEQDRRGVVKSSTWSGVCTVILVACVLVFLLGIVLHNMSCISKRFTVISCG

SEQ ID NO: 250454 - DNA, 612 bp, Artificial Sequence
  derived and/or modified sequence
atggagaccctgagccaggacagcctgctggagtgccagatctgcttcaactactacagccccagaagaagacccaagctgctggactgcaagcacacctgctgcagcgtgtgcctgcagcagatgagaaccagccagaaggacgtgagatgcccctggtgcagaggcgtgaccaagctgccccccggcttcagcgtgagccagctgcccgacgaccccgaggtgctggccgtgatcgccatcccccacaccagcgagcacacccccgtgttcatcaagctgcccagcaacggctgctacatgctgcccctgcccatcagcaaggagagagccctgctgcccggcgacatgggctgcagactgctgcccggcagccagcagaagagcgtgaccgtggtgaccatccccgccgagcagcagcccctgcagggcggcgccccccaggaggccgtggaggaggagcaggacagaagaggcgtggtgaagagcagcacctggagcggcgtgtgcaccgtgatcctggtggcctgcgtgctggtgttcctgctgggcatcgtgctgcacaacatgagctgcatcagcaagagattcaccgtgatcagctgcggctag

SEQ ID NO: 250455 - DNA, 612 bp, Artificial Sequence
  derived and/or modified sequence
atggaaaccttgtctcaggactccctgttggagtgccagatttgtttcaattactatagtccgaggcgccgccccaaactgctggactgtaaacacacttgttgttccgtgtgcctgcagcagatgcggacttcccagaaggacgtgcgatgtccgtggtgtcgtggtgttacaaaactaccgcccggtttctccgtttcgcaactgcccgatgaccctgaagttctggccgtgatcgccattccgcacacatctgaacataccccagtgtttataaaactgccttccaacggctgttacatgctgccactcccaattagcaaggagagggccctgctgcctggggacatgggatgccgcttgctaccggggtcacaacagaagtcagtgactgtagtgaccatacctgctgaacagcagcccctacagggcggcgcaccacaggaagcggtcgaggaggagcaggatcgcagaggggtggtgaaatcctccacgtggtctggagtctgcaccgttattctggtcgcttgtgtgttggtgttcctcctcggcattgtgctgcacaacatgagctgcatctctaagaggtttaccgtaatctcctgcggctag

SEQ ID NO: 250456 - DNA, 612 bp, Artificial Sequence
  derived and/or modified sequence
atggagaccctgagccaggacagcctgctggagtgccagatctgcttcaactactacagccccaggagaagacccaagctgctggactgcaagcacacctgctgcagcgtgtgcctgcagcagatgaggaccagccagaaggatgtgcgctgcccctggtgccggggcgtgaccaagctgcccccaggcttctctgtgtcccagctgcctgatgatcctgaggtgctggccgtgattgccatcccccacaccagcgagcacacccctgtgttcatcaagctgcccagcaatggctgctacatgctgcccctgcccatcagcaaggagcgggccctgctgcccggggacatgggctgccgcctgctgcccggcagccagcagaagtctgtgacagtggtgaccatcccagctgagcagcagcccctgcagggcggggccccccaggaggccgtggaggaggagcaggacagaagaggagtggtgaagagcagcacctggagcggcgtgtgcaccgtcatcctggtggcctgtgtgctggtgttcctgctgggcatcgtgctgcacaacatgagctgcatcagcaagcgcttcaccgtcatcagctgtggctag

SEQ ID NO: 250457 - DNA, 612 bp, Artificial Sequence
  derived and/or modified sequence
atggagaccctgagccaggacagcctgctggagtgccagatctgctttaattactacagcccccggcgcagaccgaagctgttggattgtaagcacacatgttgcagcgtctgtcttcagcagatgcgcacttctcagaaggatgtgcgctgcccttggtgcagaggagtgactaaactgccgcccggatttagcgtttcccaactaccagatgaccccgaggttcttgctgtgattgcgatcccacatacgtccgaacacacccccgtgttcattaagctcccctctaacggttgctatatgctacccttgccaataagtaaagaacgagcattactgcctggtgacatgggttgccggctgctgcccggatcccaacagaaaagcgttaccgtggtgaccatacctgccgaacagcagccgctgcaagggggtgctccgcaagaagctgtggaggaggaacaagaccgcaggggcgtagtgaagtcgagtacttggtccggtgtctgtacggtcatcctggttgcatgtgtgctggtttttctgttgggcatagtgctccacaatatgagctgtatctcaaaaagattcacagtcatctcatgtggatag

SEQ ID NO: 250458 - DNA, 612 bp, Artificial Sequence
  derived and/or modified sequence
atggaaacactgtcccaggattcgctcctcgaatgccagatttgcttcaattattactcaccacggaggcgcccaaaacttctggattgtaaacacacatgctgctcagtttgtctgcagcagatgcgaacgtcgcagaaggacgtgcggtgcccatggtgtcgcggagtgaccaagctccctcccggatttagtgtaagtcagctgcccgatgaccccgaggtcttagccgtcattgccatccctcacacctccgaacacactccggtgttcatcaagctgccgagcaatggatgctatatgttaccgctgccaatatctaaggagagggccctgttaccgggagatatgggttgtcggctgttgcccggttcgcaacagaaaagtgtgacagtggtgacaatcccagcggaacagcaacctctccaaggcggtgcaccgcaagaggctgtggaagaggagcaagaccgtcggggagtggtgaagtcttctacatggtctggggtgtgtacagttattttggtcgcctgtgtactggtgttcttgttagggatcgtgctgcacaacatgagctgtatatcaaagagatttaccgttatttcatgcggatag

SEQ ID NO: 250459 - DNA, 9501 bp, Artificial Sequence
  derived and/or modified sequence
gtgcacgtgcgcgcgcgcccgccccagttgcgcccccggcccgcacacaccccggctcatcttctcccggtccccttgtctcgcgccttctccagccctagaagttgccccagggcccctcccgggattagagagcgctgtgaagggccagatgttgggggtcttttgtgcagacacacgcgcctggggcgcttgctcctggaaggacagcggcaggacaaagccagctggactcgtggggcgctgctcgggaagcggcggtccccaatcccgcctggggtcggggcatggcttggggagcgctgcctgggtctggagagagtagagaaatcgccaaagcagagtgacggtgacttgatgaggtgacggtgacttgatgaggtggcggtgacttgatgaggtggcggacaggggcaaacgaaagaaagatgctcgggattgccgcgctgtgtgcctgtctgcgcggctgactaggcgccccgcattcccatatgaccgggttacctggtagattttgccagtgtgtctttgccccaagatgttattccccacctgctccgatttctttctttcctagggcttactgttgctagtaggcgctctgccaccagaggggaactcgtgggcgggggagactgcggaggaggggggaggtggttatttatcctgtagagacaattaggagccgtgacgcccccttctcggccgccagccctccacacctcatctgccttgctccacctccctagtgcacccgctccagccccgtctgcccaggagggcgcttggatttccttctccgcggcgcgtatctaacccttcctgcatgtatttcactgcaggctgaagaaagctcagtctcaattgtgtttcctgcctgtcagcctcttgcctcctaaacgtgtaccatttccacttgatgtcatcacgcagaaggggtgaaagagactcggtgacagatacagaaatgaacacacctgtgagtactggatgcctgtgagcttgccattacctgcactgcaaagacacagggcggtggcctctgagaagcagctccttccccttcaccttggccttgcccttcctgctcacggtccaccatggagacgctgtcccaggactctctgctggaatgtcagatctgtttcaattactacagcccccggcgcaggcccaagttgctggactgcaagcacacctgctgttcagtgtgcctgcagcagatgaggaccagccagaaggatgtgcggtgcccctggtgccgcggtgtcaccaagctgcctcccggcttctccgtgtcgcagctcccggacgacccggaggtcctggctgtcatcgccattccacacacttccgaacacaccccggtcttcatcaaacttcccagcaatgggtgctacatgctgcccctgcccatctccaaggagcgtgcgctgctgcccggagacatgggctgccgcctgctgcccgggagccagcagaagtccgtcaccgtggtgaccatccctgctgaacagcagcctctgcaaggtggggctccccaggaggcggtggaggaggagcaggacaggcggggcgtggtgaaaagctccacctggtcgggggtgtgcactgtcatcttggtggcttgcgtcttggtcttcctcctcggcatcgtgcttcacaacatgtcttgcatttctaagcgcttcactgtgatatcctgtggctgaagagggctgcagggaagtctcttgtgggtgccaacttaggggttgagcaggttgatgatgagatcccagtgagaagatggggggcaacactgaccatttggtgctgagcgctggcctctgggttgcctcttgattaccccaagacagacacaaagggcagaaggtgcggtctcaacaagataccaggtgaattgttctgagtgttgatggcaacagcttggaagatgattgcatgcatcctcataatcatgtattcaatggactgtaatttatgatttttcaaaatcatgttacaagatagacatattctacttagacgttaaactgtacaagtgcgtacaatgtgaccttctctaaatgcggtagattcaaacaaagatgctctgtagacaagtagaattaaacctgcgaatccgtgtaaaaattcagtgaagacatgcactgctggcttctttattttttttttctttttattgaaacccagtcttcatttagttgctaaggcttttaatacattttgaatggcaccaaaacaaaataagtcaaaatggacagtcattttatttggaggaaatatttgaacaagtgtctccaatgtgttgtgttttgtcatgaaccttcattttcttcacttgtaattagagcttgctacgtgtttatggaactgaaagctcaacaggggagcaataaaccgagaaatcatgagaaatgtctaatcccatgggaaaacctgtatgccgattttcctcaagccatctcacaaaataagaatttcaaatgtaaatattgtgtatttgtgtgtgtatgtgtgtgtgtctaatttgatttacctcaggtgtttgagtctttgctgaagaatcctgggatgaagacttcattgggcatgaatgagtcaagtctctgaagcggtggccacttcttggacatcttgacccagcgagtggtctcctacacgtcacctgcaacactcgctcctcttctgtgtatttaagtcctgcattttgtaagaggcaaatggagagtaacagaagagtgtcttttctcctggttttggagtcttgcactggccatgagtgttgtgactgatggtcaacccaggcgggcattttaataaatggcctgtgattcttttttgaaagatgctcttccacaagagttaagccagttagaattcctgtttcctcttgttgatatgagagaagatctcctgtattttaacacgtttttaccaagaaaggtggcaaggtaaactaacagctcaaattcccaatataagtggaccagttcctcataaactgtcaaatgttcttaaatgtgtaatgatctatagatgctcatgaagaaagatctgctacaagtacgtgataaattcctatccctgggtgcatgtgcattcagaaatagctgtgagctttacagctctcatctaacttcttttatggaattcatgaagcaagtggtatgtgacaaggactccacttataaatataactgtttttatgttccactgaatccctgaaaatggtgaggagggtggggggaagtgaaggaaagacaagcagggctaattccaaaaagcaaggctagaaaatagccctgtgaggtcaagacaatttaatttatttacatgctgtctgttatcttcaagcagcacaaaatatgcatataaaagtgatggaattaatgtgaaataaaacaaaaatataatggctagaatacaaagctaatactgctaattggcatgagaattcaacataaaattgtgagctctgatttttcaaattgatcataaaacctttaggaaatgtatttgaaagctcaaaatagaaattaggttaaaatgccattttattgtgtaagctcttgggcattatacaacaaataatctaggatttatttggtattaataatttaggtgtcatattagctgaatactatcctctattacataacataatatactgttgggttagtgtcaatttctcaaactctcccaggctgccataatgcatgtctgacctaatttctatttctcttggaggaaaatacacacacacacacaccacagaagtgttgcattaagaatgctacatttcgaatagactttgcccttgcaattttaagctatgccatattcagattaattttgtgagtgatatctgcatatgtttctgtacagtgtgaaatgactgaccctgtagtatagtacgtgatagagttctacttgttaaagtaggttagatatagacactaatgtgtgtgatgatagtgtcctgtgtttcttagtgcaaatctgtagagtaaaaatgtccatagaacttttacttaaaaacaatcccatgctagagttgccattaagcagtgcaaaattaatcggctgtatggtagattcttgaccttaaatttaacaacaacaaccaaaatcagattttttttgtgagtcttactgacctaagaaacattgtttaaattgtttaaatggatctgcttgcagttatttgtgtacctgtttgttggggtgtgcattcttgtgtatgtgtgtgtgtgtgtgtgtgtgtgtgtgtgtgtgtgtgagagagagagagagagagagaatctcagtctcccagatagaattttataggcttaatgatgttttaatgttgcttggcatcccattgctctggcctcttctggcatttaccaatgacccttaacaaacacatctacccatgtgaccaaagtccactgacacaagaggccaggattcatacttgcacattaatgaaaagtcacaactggaaagcacagaaagagctgaaagcagcctccggtggcttcattttgtagatgagtccgttttgtaattctgcagaaagggggggatatgaacttcgcactgcagtgtcttcttgctccatcctaggtctgtctatatctctatctggctatgatcctttctagggttgatgaataccctttactgagtcaactattgctttaaagaattttttttgtaggtttatgtactcattttagttagcatctacctctctgggaaaatgaaaggagggttgacttagggatgagtatagatgttgaaagacaactatcaaaccatgtggtttgaatttttaaaattgtaaaacattggtgtccaaacctcccaccccacttgtatgtaaaggacagtgagtgttgtataaatagtaaactataagaagcatgaattttcatctttattaatgatcttgaaataaggaagagaatgcttaatatgttaagtagagccaagaatgctactaagaagcattgtctttggaaaaattttgtataatgacttggggcataagttgtgatgaaaaggcaacttggtttttggttccagtcatacttaatgatcagaaagctctaagatgttttctttaaaaatagaattaagtttaattttttgcatggcttacagattgggtcccttgaaggttaaaccatgtgatggtataacctgtgagatcttctagattggcactgttcaatagggctttctgtgatgatggaaatgctcgaaaacctgtgccgtctggtacggtagccaccaggcacattgacttttaggcagttaaaatggggttactacaagggaagaactggatttcaaattttatttaattttaattagcttaaatttaaatagccctatgtgtctagtggctgccatattgaacgatgcagttctgggtgatagcgcttggggatccagcatcaaggtattaatggagtaacagtgaggctaaggtgagagtttgtgggctagtgacatgcagttggcaaaaggcaaaacattcctttctgggcttaaaaagtatgtgatctcaagtatgacagtaaaaattcattgttgccctttggaactgttgcttatagattttaggccaaggaatgatcagtgaagcttaaagaatgctttattaagccccttttctgggatcattagctgcatgttaacctattgtccaaaaatagtagttagacagtacctgtaaaacgtttgacttgcaagctatgcatgatctgtactgtgaaattgtgtctagggtcttgtggccaaaaagtaaatgttacaggaaaaaaaaagcctaatgaaatccctgttcacttccagtatcctatccaaacttcattgctgtattagtaaggtgcaaatataagagcaagcatgttttgcagtgttcagactggttttgtttgcccttgaagttggccagcttgtcgttgtatttggtgtgggcatatgtgggcatcatttttcagatgccaaactaaaatgtaggtagtatttttagaatgagatttgacattgttttagtgtctttcttttttaagcaaaaatttcagttatccctgaaagagttgaagatttgaagctttgcacaaaagcactttttttaacagtaaaaaatactgcccatgaaatttaaagacttgaagtttactaaagctacaataattactttttagctaaataaaaggaagcagaaaattcagtttgagatatatttcctataaagaccagattcttactgataatctggtatttattccagtctagattttgattttaagagttcccatccctttatttgaaaacttatgttgtttcaaaattggttagtctgcttttcattgttttccaaatggaatatatacaaaatacatttacttcattttagcagaaatgggttgattttttttttctagaactcatcaatgtgcaagactttccttcttagcttgcctttaaaaatcatttaatttttttttttttgccaagatactaatctttctttagccttaataggaagatagaagttcaaaagttatcggtgcaaaaggagtgatacacaaaagacttcaatttctatcttttctcagaaaagtgatgctgcccaccagtcagcattttgtttccacataagaagtgtcaggtagtcagtctgtcatccctgacttagatagagaagctgttccttgacatttccatcattctcagtaaattgtcacctacaaggtaattcttaccaaaacagaaactattgagaataataagatagtcgagataattcagtagctgttttgaaagtagtagtctatttaaaaagcaacgatgttcagttgctggattttgttcaacatgagacacttatttatttatttatttatttatgagatggagttttgctcttggtgcccaggccagagtgcaatggcatgatctcagctcactgcaacctccgcctcccaggttcaagctattctcctgcctcagcctcctgagtagctgggattataggcatgcgcctccatgcccagctaattttgtattttttaaagtagagacggggtttctccatgttggtcaggctggtctccaacttctgacttcaggcgatccacccgcctcggcctcccaaagtgctgggattacaggcatgggccactgcacccagccaacatgaaacacttctaaaagataagtggaaattcaagccattgatttttctgacacaactgacttactacacacacacacacacacacaccacgatttagctgtaattggagttaaaattcagtaaaaaactgttattagtcatgttttccaatttgtgagttatacaatattggattagatgctaatttcttaactgttgctatgggctgcatacattatgtcaaactaactacctttgggagtgtctatataaacacttgaaacttttcaaatatatgaagaggtaggttctactgtatacattttattggaaagccattaatcattgaagaacttaagcaggtggggcatttaatttcttccaaataccttattttttggatctgctcaagtggttagggcgagtgcaccattattcccgaatccctgcaatttggttcccatttttctgcacaaattttcttgctcagtcgagccaatgactttttttttttttttttttttcaggattcactgcctggggtatcccactatatatatctcacctatgatgtagtggtgcttgaaatactcatctcattagctcgattttattattctaatctaaggttttttatattattcatactatgatatttttagggacaatcagtaatatttggggcagagtactgagggacctcttgaagtctgcaacagcatgcattttctttgtttttgtgggagtgcttccctgtagctgtctttgttctagaacactgctccaaatttatttccatgggatgtagggctagtagcccatgtgaaagtcttctgtaatctccttggggtgtgagttattgggttattctaacaggagttttccaaagggatggcccatttttaattcaacatttgctttttgaaaatccagaagtagacagttggatataatagtggtggaagagcatgggctgtaagcagaaggaaatagagatgacaaatgcctcttaaaggggatctagttgatacctctgttaaatagtgggagaacacagtagctggtaccttacactgtgctttaggaaaatcctatgaggatttcatttacaaatcctcataggattttctgggttgagggacaatgcaactattaagtagagggagagggagagggaaagggagacatgaagcactgggtctatgtgaagggacaggcagatatacccaaagagggagaaaatacttaataaaggaagagtatagctgcaaaacaagacatataggagctgaaggccagatatggcagaaaccagctggagaaagaagcacaggacaactaggacaacttagtcaagcacaatctgtcattccagtacggactaccaagttcaattcaggatgcttcagttgaagacatgtggggtaatgtgctcagctcatgagggtccaaggagtccccattttccctatcaccctatcctatgctcgtggtttggattgttagcacactaggcaatttcagagtccgctctagagttggttgccacgtcagtgcagacagactctagaatcctcttaaccatggaatgcaaggcctgttcctgtggatctatcctgacttgagtatgtcagtactgttgggaaaatgagttcaagaatatttcagtttatatatcctggttgccgtcatatattttttcatttcaccacttgtttgtgtttgcctcactcaacagtcatgggtgtagaagctggtttcagcttggggctgttacaaactccctacataagccatgtagctgcaatccagggttcctcccaccctacggctttagcggtgggttctctggccctcttgataacaaatactccagtctaatggctatattaatgctgctcagaggctattaactcaaatccttgatgtgtttcatttacaattatgtggattatttattttaggagctttttttttttttttttttttttttaagggccaaatagccctacagataaatgagctgctgggctgtgtagaaaatattgtccaaatgttgccaaatattgacttcgtaaaggggatatcaagctgctgtttataaatctgaatgtcttaaaagcattcttgcttgctctctctgttatagatggtgtcttagccagtcctgagttttccaatgaacccaattttaatatatggtatttttgtatgccaaactggtgtcttgtcctttgtatatgtggtaatgttgattttatgactaccgtaaaaacacatttgctatgattaaagttcataaaatgatttcaaataga

SEQ ID NO: 250460 - protein, 655 aa, Artificial Sequence
  derived and/or modified sequence
MKGASEEKLASVSNLVTVFENSRTPEAAPRGQRLEDVHHRPECRPPESPGPREKTNVGEAVGSEPRTVSRRYLNSLKNKLSSEAWRKSCQPVTLSGSGTQEPEKKIVQELLETEQAYVARLHLLDQVFFQELLKTARSSKAFPEDVVRVIFSNISSIYQFHSQFFLPELQRRLDDWTANPRIGDVIQKLAPFLKMYSEYVKNFERAAELLATWTDKSPLFQEVLTRIQSSEASGSLTLQHHMLEPVQRIPRYELLLKEYIQKLPAQAPDQADAQKALDMIFSAAQHSNAAITEMERLQDLWEVYQRLGLEDDIVDPSNTLLREGPVLKISFRRNDPMERYLFLFNNMLLYCVPRVIQVGAQFQVRTRIDVAGMKVRELMDAEFPHSFLVSGKQRTLELQARSQEEMISWMQAFQAAIDQIEKRNETFKAAAQGPEGDIQEQELQSEELGLRAPQWVRDKMVTMCMRCQEPFNALTRRRHHCRACGYVVCARCSDYRAELKYDDNRPNRVCLHCYAFLTGNVLPEAKEDKRRGILEKGSSATPDQSLMCSFLQLIGDKWGKSGPRGWCVIPRDDPLVLYVYAAPQDMRAHTSIPLLGYQVTVGPQGDPRVFQLQQSGQLYTFKAETEELKGRWVKAMERAASGWSPSWPNDGDLSD

SEQ ID NO: 250461 - protein, 283 aa, Artificial Sequence
  derived and/or modified sequence
MKVRELMDAEFPHSFLVSGKQRTLELQARSQEEMISWMQAFQAAIDQIEKRNETFKAAAQGPEGDIQEQELQSEELGLRAPQWVRDKMVTMCMRCQEPFNALTRRRHHCRACGYVVCARCSDYRAELKYDDNRPNRVCLHCYAFLTGNVLPEAKEDKRRGILEKGSSATPDQSLMCSFLQLIGDKWGKSGPRGWCVIPRDDPLVLYVYAAPQDMRAHTSIPLLGYQVTVGPQGDPRVFQLQQSGQLYTFKAETEELKGRWVKAMERAASGWSPSWPNDGDLSD

SEQ ID NO: 250462 - DNA, 3046 bp, Artificial Sequence
  derived and/or modified sequence
ctttcttcactctgaagccaagagccgaccttctgagccctcaagaaagatcagaacagattcatgggtgatttagcctatctgtcccaggccagcgtggctgagtgtgctggctggaggcctctctctctgcttcgagggtagctgagatccaccccggaaaccggcaggatgaagggggcaagtgaggagaagctggcatctgtgtccaacctggtcactgtgtttgagaatagcaggaccccagaagcagcacccagaggccagaggctagaggacgtgcatcaccgccctgagtgcaggcctcccgagtccccaggaccacgggagaagacgaatgtcggggaggccgtggggtctgagcccaggacagtcagcaggaggtacctgaactccctgaagaacaagctgtccagcgaagcctggaggaaatcttgccagcctgtgaccctctcaggatcggggacgcaggagccagagaagaagatcgtccaggagctgctggagacagagcaggcctatgtggcgcgcctccacctgctagaccaggtgtttttccaggagctgctgaagacagcccgcagcagcaaggccttcccagaggatgtggtcagggtcatcttctccaacatctcctccatctatcagttccattctcagttcttcctcccagagctgcagcggcgcctggacgactggacagctaacccccgcatcggtgacgtgatccagaagctggcccccttcctgaagatgtacagtgagtatgtcaagaactttgagcgagcggctgagctgctggccacctggaccgacaagtctccactcttccaggaggttctcactcgcatccagagcagcgaggcttcgggcagcctgaccctgcagcaccacatgctggaaccagtgcagagaattccacgttacgagctgctgctcaaggagtacatccagaagctgccagcccaggccccagaccaggccgatgcccagaaagccctggacatgatcttctcagctgcccagcactccaatgcagccatcactgagatggagcggctgcaggacctgtgggaggtgtaccagcgcctgggcctcgaggacgacatagtagacccctctaacaccctgctccgtgagggcccggtcctcaagatctccttccgccgcaacgaccccatggagcgctaccttttcttgttcaacaacatgctgctctactgtgtgcccagggtgatccaggtgggcgcccagttccaggtgaggacccgcatcgatgtggccgggatgaaggtgcgggagctgatggatgctgagtttccccactccttcctggtgtccgggaagcagcgcaccctggagctgcaagcccggtcccaggaggaaatgatttcctggatgcaggccttccaagcagccattgaccaaatcgagaagcggaatgaaaccttcaaggctgcggcccaggggcctgagggagacatccaggagcaggagctgcagtctgaggagctgggcctccgggcaccgcagtgggtccgggacaagatggtgaccatgtgcatgcgctgccaggagcccttcaacgctctgacgcgccgtcgccaccactgccgggcctgcggctatgtggtgtgtgccaggtgctccgactaccgggccgaactgaaatacgacgacaacaggcccaaccgagtctgcctccactgctacgcattcctcactggaaatgtgctgcctgaggccaaggaggacaagaggcggggcatcctggagaaagggtcctcagccacgcctgaccagagcctgatgtgcagcttcctgcagctcatcggggacaagtggggcaagagcggcccccggggctggtgtgtgatccctcgggatgaccccctcgtgctctatgtctatgctgcccctcaggacatgagggctcacacctccatccccctgctgggctaccaggtgactgttgggccccagggggaccctcgggtcttccagctacagcagtcaggccagctctacaccttcaaggccgagacggaggagctgaagggccgctgggtgaaggccatggagcgggcggccagtggctggagccccagctggcccaacgatggggacctgtccgactgagccactgccagccgctctcctgcccacctctccccaccctgaacccagctcctgccacagactgaccctgtggcctcagtgacccactgccccaagtggtgctttcagagaattgattcagccatctgcgcccaggccacgtgtcccgatctgggattagaaaatatgggtccattcctttctagaaaggggacaaccaagtgtctcagtttgccttgcggggagggggctcctgggccatgggacttccagtgctaaaactgggaaagccccaggtaaccccggactggtggtcaccatagtatggtttttcatttgtatctcctggggagcttttaaagagtactggtgaaaaacacatagtaaattaattttaaaaatgtaaaaaacaatgcctgtactgaagtaccaccaccgatttaaatgggctgagttgggggaggcatggggtctttttttttttttttttgagacagagtcttactctgtttcccaggctggagtgcacaaacatggctcactacagcctcgctctcccgggctccagtgatcctcccgcctcagcctcccaagtagctgggattataggtgtgtgccactgtgccaagctaatttttttattttttgtagagatgggatttcaccatgttactcaggctggtctcaaactcccagcctcaagcgatgctcccacctccacctcccaaagtgctgggattacaggcgtgagccaccatacctggcgcatgcatattttttaagagtacccactggagtctaatatatagcctgggttacctgggatgaagaataaagagagcaaactaccacaaccaatggttgagcccctgtcaagtgccagtcatgatagtagtaataataataataaacatctattggaccaggc

SEQ ID NO: 250463 - DNA, 2280 bp, Artificial Sequence
  derived and/or modified sequence
actctgaagccaagagccgaccttctgagccctcaagaaagatcagaacagattcatgggtgatttagcctatctgtcccaggccagcgtggctgagtgtgctggctggaggcctctctctctgcttcgagggtagctgagatccaccccggaaaccggcaggatgaagggggcaagtgaggagaagctggcatctgtgtccaacctggtcactgtgtttgagaatagcaggaccccagaagcagcacccagaggccagaggctagaggacgtgcatcaccgccctgagtgcaggcctcccgagtccccaggaccacgggagaagacgaatgtcggggaggccgtggggtctgagcccaggacagtcagcaggaggtacctgaactccctgaagaacaagctgtccagcgaagcctggaggaaatcttgccagcctgtgaccctctcaggatcggggacgcaggacagctaacccccgcatcggtgacgtgatccagaagctggcccccttcctgaagatgtacagtgagtatgtcaagaactttgagcgagcggctgagctgctggccacctggaccgacaagtctccactcttccaggaggttctcactcgcatccagagcagcgaggcttcgggcagcctgaccctgcagcaccacatgctggaaccagtgcagagaattccacgttacgagctgctgctcaaggagtacatccagaagctgccagcccaggccccagaccaggccgatgcccagaaagccctggacatgatcttctcagctgcccagcactccaatgcagccatcactgagatggagcggctgcaggacctgtgggaggtgtaccagcgcctgggcctcgaggacgacatagtagacccctctaacaccctgctccgtgagggcccggtcctcaagatctccttccgccgcaacgaccccatggagcgctaccttttcttgggtgatccaggtgggcgcccagttccaggtgaggacccgcatcgatgtggccgggatgaaggtgcgggagctgatggatgctgagtttccccactccttcctggtgtccgggaagcagcgcaccctggagctgcaagcccggtcccaggaggaaatgatttcctggatgcaggccttccaagcagccattgaccaaatcgagaagcggaatgaaaccttcaaggctgcggcccaggggcctgagggagacatccaggagcaggagctgcagtctgaggagctgggcctccgggcaccgcagtgggtccgggacaagatggtgaccatgtgcatgcgctgccaggagcccttcaacgctctgacgcgccgtcgccaccactgccgggcctgcggctatgtggtgtgtgccaggtgctccgactaccgggccgaactgaaatacgacgacaacaggcccaaccgagtctgcctccactgctacgcattcctcactggaaatgtgctgcctgaggccaaggaggacaagaggcggggcatcctggagaaagggtcctcagccacgcctgaccagagcctgatgtgcagcttcctgcagctcatcggggacaagtggggcaagagcggcccccggggctggtgtgtgatccctcgggatgaccccctcgtgctctatgtctatgctgcccctcaggacatgagggctcacacctccatccccctgctgggctaccaggtgactgttgggccccagggggaccctcgggtcttccagctacagcagtcaggccagctctacaccttcaaggccgagacggaggagctgaagggccgctgggtgaaggccatggagcgggcggccagtggctggagccccagctggcccaacgatggggacctgtccgactgagccactgccagccgctctcctgcccacctctccccaccctgaacccagctcctgccacagactgaccctgtggcctcagtgacccactgccccaagtggtgctttcagagaattgattcagccatctgcgcccaggccacgtgtcccgatctgggattagaaaatatgggtccattcctttctagaaaggggacaaccaagtgtctcagtttgccttgcggggagggggctcctgggccatgggacttccagtgctaaaactgggaaagccccaggtaaccccggactggtggtcaccatagtatggtttttcatttgtatctcccaagtagctgggattataggtgtgtgccactgtgccaagctaatttttttattttttgtagagatgggatttcaccatgttac

SEQ ID NO: 250464 - DNA, 1968 bp, Artificial Sequence
  derived and/or modified sequence
atgaagggcgccagcgaggaaaagctggcctctgtgagtaaccttgtgacagttttcgagaattcacggacaccagaggccgccccccggggacagagactcgaagacgtgcatcaccggcccgagtgcaggccacccgaatcacctggcccaagagagaagactaatgttggtgaagctgtgggctccgagcccaggactgtctcacggcgttacctcaattccctgaagaacaagctctcttcggaagcatggcgcaagtcgtgtcaacctgtaacactctcagggtcaggcacccaggaacccgagaagaagatcgttcaggagttgctggagaccgaacaggcctacgtagcccggcttcacttactggatcaggtctttttccaagaattgctgaagaccgcccgctctagcaaggcctttccagaagacgtagtacgcgtgattttttctaacatttcttcaatctatcagtttcattcacagtttttcctacccgagcttcagagacgtctggacgattggacggccaacccaaggatcggggacgttattcaaaaactggctccctttttgaaaatgtattccgagtacgtgaagaattttgagagggctgccgagctgcttgccacgtggaccgacaagtcaccccttttccaggaagtcttgacacgaatccagagttcagaggccagtgggagtctgactctccaacaccacatgctggaaccagtgcaaaggattccgcgttatgaacttcttctgaaggagtacattcagaagctgccagcacaagcccctgatcaagccgatgcacagaaagccctcgatatgattttttccgccgcccagcacagtaatgccgcaattaccgaaatggagcgcctacaggacttgtgggaggtttaccaacggctgggcctggaggatgatatcgtggatccatcaaacaccctgttgagagaaggccctgtgctgaagatcagttttagacgaaacgaccccatggaacgatacctgtttctgtttaacaatatgctgctttactgtgtcccgcgcgtgatccaggttggcgctcagtttcaagtgcgaacacgcatcgatgtcgccggcatgaaggtgcgggaattgatggacgctgagttcccacattcttttcttgtgtctggtaaacagcgcacacttgagctccaggcacggtcccaggaggagatgattagttggatgcaagcgttccaagcagccattgatcagatcgaaaagcgcaacgaaacgttcaaggctgcagcccagggtccggagggcgacattcaggaacaggagctgcagagcgaggagctggggcttcgggcgcctcagtgggtgcgcgataagatggtcacaatgtgcatgagatgccaggagccgttcaatgcccttactcggcggcgccaccactgccgcgcatgtggttacgtggtctgcgcgagatgcagcgactatcgggccgaactcaaatatgatgacaacagacccaaccgtgtgtgcttgcattgctatgcgtttctaacaggcaatgtgctgcctgaagccaaggaggacaaacgtcgcggcattctggagaaagggtcctctgccacaccagatcagagcctaatgtgttccttcctccagcttattggagacaagtgggggaaaagtggaccccggggctggtgcgttatccccagggatgatcctttggtcctgtacgtgtacgccgccccgcaggacatgagggctcacacgtccatccccttgctgggctatcaggtgactgtgggccctcaaggcgacccccgagtattccagcttcagcaatcaggacagctgtacaccttcaaggccgagactgaggaactaaaaggaagatgggtgaaggccatggaacgggcggcatcaggatggtcaccttcatggcctaacgacggcgacctgagtgactag

SEQ ID NO: 250465 - DNA, 1968 bp, Artificial Sequence
  derived and/or modified sequence
atgaagggggccagcgaggagaagctggcctctgtgagcaacctggtgacagtgtttgagaacagcaggaccccagaggccgccccccggggccagaggctggaggatgtgcaccacaggcctgagtgcaggcctcctgagagccctggcccccgggagaagaccaacgtgggggaggccgtgggcagcgagcccaggacagtgagccgccgctacctgaacagcctgaagaacaagctgagcagcgaggcctggaggaagagctgccagcctgtgaccctgagcggcagcggcacccaggagcctgagaagaagatcgtgcaggagctgctggagacagagcaggcctacgtggcccggctgcacctgctggaccaggtgttcttccaggagctgctgaagacagcccggagcagcaaggccttcccagaagatgtggtgcgggtcatcttcagcaacatcagcagcatctaccagttccacagccagttcttcctgcctgagctgcagaggcggctggatgactggacagccaaccccagaattggagatgtgatccagaagctggcccccttcctgaagatgtacagtgaatatgtgaagaactttgaaagagctgctgagctgctggccacctggacagacaagagccccctcttccaggaggtgctgacccgcatccagagcagcgaggccagcggcagcctgaccctgcagcaccacatgctggagcctgtgcagaggatccccaggtatgagctgctgctgaaggagtacatccagaagctgcctgcccaggccccagaccaggctgatgcccagaaggccctggacatgatcttctctgctgcccagcacagcaatgctgccatcacagagatggagcggctgcaggacctgtgggaggtgtaccagaggctgggcctggaggatgacatcgtggaccccagcaacaccctgctgcgggagggccctgtgctgaagatctccttcagaagaaatgaccccatggagcgctacctgttcctgttcaacaacatgctgctgtactgtgtgcccagggtcatccaggtgggcgcccagttccaggtgaggaccagaattgatgtggccggcatgaaggtgcgggagctgatggatgctgagttcccccacagcttcctggtgtctgggaagcagaggaccctggagctgcaggcccggagccaggaggagatgatctcctggatgcaggccttccaggccgccatcgaccagatcgagaagagaaatgagaccttcaaggccgccgcccagggccctgagggggacatccaggagcaggagctgcagagcgaggagctgggcctgcgggccccccagtgggtgcgggacaagatggtgaccatgtgcatgcgctgccaggagcccttcaatgccctgaccaggagaagacaccactgccgggcctgtggctacgtggtgtgtgcccgctgcagcgactacagagctgagctgaagtatgatgacaaccggcccaacagagtgtgcctgcactgctacgccttcctgactggaaatgtgctgcctgaggccaaggaggacaagaggcggggcatcctggagaagggcagcagcgccaccccagaccagagcctgatgtgcagcttcctgcagctgattggagacaagtggggcaagagcggcccccggggctggtgtgtgatccccagagatgaccccctggtgctgtatgtgtatgctgccccccaggacatgagggcccacaccagcatccccctgctgggctaccaggtgacagtgggcccccagggcgaccccagggtcttccagctgcagcagagcggccagctgtacaccttcaaggccgagacagaggagctgaagggccgctgggtgaaggccatggagagagctgccagcggctggagccccagctggcccaatgatggagacctgagtgactag

SEQ ID NO: 250466 - DNA, 1968 bp, Artificial Sequence
  derived and/or modified sequence
atgaagggcgccagcgaggagaagctggccagcgtgagcaacctggtcactgtgtttgagaatagtcggaccccagaagctgcccctcgggggcagcgcctggaggacgtgcaccatagaccggaatgccgccccccagagagcccaggcccgcgggaaaaaactaatgtgggcgaggcagttgggtccgagccaagaactgtcagtagacgatatctgaactcattgaagaacaagttgtcctccgaggcctggcgcaagagctgccagccagtcaccctgagcggaagcggcactcaggaacccgaaaaaaagatcgtgcaagagctcctggaaaccgagcaggcctatgtcgcccgactccatctgttggatcaggtttttttccaggaacttctgaaaacagccagaagcagcaaggccttcccggaagatgtggtgagagtgatcttctccaatataagttcgatctatcagtttcacagccagtttttcctgcccgagctgcaacggagactggacgactggactgccaatccaagaattggcgacgtgatacaaaaactggctccgtttctgaagatgtattctgaatatgtgaagaactttgaacgtgctgccgagctacttgccacatggaccgataagtctccgctgttccaggaggttttaactagaattcagtcctccgaggcgagtggctcacttacactccaacatcacatgctggagcctgtgcaacggattcccagatacgaactgcttttaaaagagtatatccagaaacttcctgcccaggcccccgatcaggcagatgcacagaaggctctcgacatgattttttctgcggcacaacacagcaatgcagcgattacagaaatggagagactgcaggacttgtgggaagtgtaccagcggctggggctcgaagacgacatcgtagaccctagcaacacactgctgcgggagggacccgtcctgaaaatctctttccggcgaaatgaccccatggagaggtatctgtttttatttaataacatgcttctgtattgcgtgcctagagttatccaagttggagctcagtttcaggttcggaccaggatcgacgtggccggaatgaaggttagggaacttatggatgcagaattcccccactcgttcctcgtgagtggcaagcagcgaacacttgagctgcaagcccgcagtcaagaggaaatgatatcgtggatgcaagcatttcaggctgcgatagaccagatcgagaaacgcaacgaaacattcaaagccgctgcccagggtccagaaggcgacatccaagagcaggagctgcagtccgaggagttgggactgagagccccacagtgggttagagacaagatggttacgatgtgtatgaggtgtcaagaaccttttaacgctctcactcgccgaagacaccactgcagagcatgcggctacgtggtgtgcgcccggtgctctgactaccgcgccgagctgaagtatgatgataatagaccgaatcgcgtttgtctccactgctacgcctttctcacaggaaatgtcctgccggaggcaaaggaggacaaaagaagagggatcttggaaaaaggcagctccgccaccccagaccagagtctcatgtgcagcttccttcaactgattggggataaatggggtaaaagtgggcctcgggggtggtgcgtaattccacgcgacgatccactcgtactctacgtctacgcagcccctcaagacatgagggctcacacttccataccactattagggtatcaagtaaccgtcggccctcagggggatccgagggtgttccagctacagcaatctggacagctgtatacctttaaggccgaaacagaggagttgaagggcagatgggtgaaggccatggaacgtgccgctagtgggtggtcgccctcctggccgaacgacggcgacctgtctgattag

SEQ ID NO: 250467 - DNA, 1968 bp, Artificial Sequence
  derived and/or modified sequence
atgaagggggcttctgaggagaaactcgcctcagtttctaacttggtcactgtcttcgagaattctaggaccccggaagccgctccaagaggtcaaagactggaagacgtccaccatcgaccagagtgtagacctccggagagcccaggccctcgggaaaagactaatgtgggagaagctgttgggtccgagccgaggaccgtgagcaggaggtatctgaattcattaaagaataagctgtcctccgaggcctggcgcaaatcctgccaacctgtcaccctctctggcagcggaacccaggagcccgagaaaaaaatagtacaggagctattggagactgagcaagcatacgtggccagattacaccttctggatcaggtgttttttcaggagctgctgaagactgccagatcatccaaggccttccccgaagatgtcgtccgggttatcttctctaacattagtagcatttatcaatttcacagtcagttctttctgcccgagctccaaaggagattagacgattggacagccaacccgagaattggtgacgtaatccaaaagctggccccattcctgaaaatgtacagtgagtacgtaaagaatttcgagagagcagctgagctgttggcaacctggacagacaagtcgccccttttccaggaagtgctcacaagaatacagtcatcagaagcatccggcagcctcactcttcagcaccacatgcttgaacccgtgcaacggatccctcgctacgagctgcttcttaaagaatacattcagaaactaccggctcaggcacctgaccaggccgatgcacagaaggcccttgatatgatatttagcgcagctcagcattccaatgcggcaattacagagatggagaggctgcaggatctatgggaggtgtatcagcgattaggcctggaggacgatatagtggatccgtctaatactttgctgagagagggaccagtgctgaagattagcttccgccgtaacgaccccatggagcgttatctattcctgtttaacaacatgttgctgtactgcgtgcctcgcgtgatacaggtgggagcccagttccaggtgcggactaggatcgatgtggccggtatgaaggtaagagaactcatggacgcagagttcccccactcatttcttgtaagcgggaagcaaagaactctggagctacaggcacgctcacaagaagagatgatttcatggatgcaagctttccaggccgctatcgatcaaatcgagaagcgcaatgagacattcaaagcagcagctcagggcccagagggcgatatccaagaacaggagctacagagcgaggagctgggcctcagggcacctcagtgggtgcgcgacaagatggtcacaatgtgtatgcggtgtcaagaaccattcaatgccctgacgcgccgtcggcaccactgccgggcatgcggttatgttgtctgcgcacggtgctccgactaccgggctgaactgaagtacgatgacaaccgcccaaacagggtctgcctgcattgttatgcctttttgaccgggaacgtgctcccagaggcaaaagaagacaaacgaagaggcatcctagaaaaggggtccagtgctactcctgaccaatcactcatgtgcagctttcttcagctgatcggggacaaatgggggaaatccggtcctcgcggatggtgcgtgatccccagggacgatcccctggtcttgtatgtttatgcagctccccaggacatgagagcacatacctctatccctctccttggatatcaggtcaccgtcgggccacagggcgaccctcgagtattccaattacagcagagtggacaactgtatactttcaaggccgagaccgaagaactcaagggtcgttgggtgaaagccatggagagggccgcttccggatggtcaccaagttggcccaatgacggtgacctgagcgactag

SEQ ID NO: 250468 - DNA, 1968 bp, Artificial Sequence
  derived and/or modified sequence
atgaagggcgccagcgaggagaagctggccagcgtgagcaacctggtgaccgtgttcgagaacagcagaacccccgaggccgcccccagaggccagagactggaggacgtgcaccacagacccgagtgcagaccccccgagagccccggccccagagagaagaccaacgtgggcgaggccgtgggcagcgagcccagaaccgtgagcagaagatacctgaacagcctgaagaacaagctgagcagcgaggcctggagaaagagctgccagcccgtgaccctgagcggcagcggcacccaggagcccgagaagaagatcgtgcaggagctgctggagaccgagcaggcctacgtggccagactgcacctgctggaccaggtgttcttccaggagctgctgaagaccgccagaagcagcaaggccttccccgaggacgtggtgagagtgatcttcagcaacatcagcagcatctaccagttccacagccagttcttcctgcccgagctgcagagaagactggacgactggaccgccaaccccagaatcggcgacgtgatccagaagctggcccccttcctgaagatgtacagcgagtacgtgaagaacttcgagagagccgccgagctgctggccacctggaccgacaagagccccctgttccaggaggtgctgaccagaatccagagcagcgaggccagcggcagcctgaccctgcagcaccacatgctggagcccgtgcagagaatccccagatacgagctgctgctgaaggagtacatccagaagctgcccgcccaggcccccgaccaggccgacgcccagaaggccctggacatgatcttcagcgccgcccagcacagcaacgccgccatcaccgagatggagagactgcaggacctgtgggaggtgtaccagagactgggcctggaggacgacatcgtggaccccagcaacaccctgctgagagagggccccgtgctgaagatcagcttcagaagaaacgaccccatggagagatacctgttcctgttcaacaacatgctgctgtactgcgtgcccagagtgatccaggtgggcgcccagttccaggtgagaaccagaatcgacgtggccggcatgaaggtgagagagctgatggacgccgagttcccccacagcttcctggtgagcggcaagcagagaaccctggagctgcaggccagaagccaggaggagatgatcagctggatgcaggccttccaggccgccatcgaccagatcgagaagagaaacgagaccttcaaggccgccgcccagggccccgagggcgacatccaggagcaggagctgcagagcgaggagctgggcctgagagccccccagtgggtgagagacaagatggtgaccatgtgcatgagatgccaggagcccttcaacgccctgaccagaagaagacaccactgcagagcctgcggctacgtggtgtgcgccagatgcagcgactacagagccgagctgaagtacgacgacaacagacccaacagagtgtgcctgcactgctacgccttcctgaccggcaacgtgctgcccgaggccaaggaggacaagagaagaggcatcctggagaagggcagcagcgccacccccgaccagagcctgatgtgcagcttcctgcagctgatcggcgacaagtggggcaagagcggccccagaggctggtgcgtgatccccagagacgaccccctggtgctgtacgtgtacgccgccccccaggacatgagagcccacaccagcatccccctgctgggctaccaggtgaccgtgggcccccagggcgaccccagagtgttccagctgcagcagagcggccagctgtacaccttcaaggccgagaccgaggagctgaagggcagatgggtgaaggccatggagagagccgccagcggctggagccccagctggcccaacgacggcgacctgagcgactag

SEQ ID NO: 250469 - protein, 928 aa, Artificial Sequence
  derived and/or modified sequence
MAKVPELEDTFLQAQPAPQLSPGIQEDCCVQLLGKGLLVYPEETVYLAAEGQPGGEQGGGEKGEDPELPGAVKSEMHLNNGNFSSEEEDADNHDSKTKAADQYLSQKKTITQIVKDKKKQTQLTLQWLEENYIVCEGVCLPRCILYAHYLDFCRKEKLEPACAATFGKTIRQKFPLLTTRRLGTRGHSKYHYYGIGIKESSAYYHSVYSGKGLTRFSGSKLKNEGGFTRKYSLSSKTGTLLPEFPSAQHLVYQGCISKDKVDTLIMMYKTHCQCILDNAINGNFEEIQHFLLHFWQGMPDHLLPLLENPVIIDIFCVCDSILYKVLTDVLIPATMQEMPESLLADIRNFAKNWEQWVVSSLENLPEALTDKKIPIVRRFVSSLKRQTSFLHLAQIARPALFDQHVVNSMVSDIERVDLNSIGSQALLTISGSTDTESGIYTEHDSITVFQELKDLLKKNATVEAFIEWLDTVVEQRVIKTSKQNGRSLKKRAQDFLLKWSFFGARVMHNLTLNNASSFGSFHLIRMLLDEYILLAMETQFNNDKEQELQNLLDKYMKNSDASKAAFTASPSSCFLANRNKGSMVSSDAVKNESHVETTYLPLPSSQPGGLGPALHQFPAGNTDNMPLTGQMELSQIAGHLMTPPISPAMASRGSVINQGPMAGRPPSVGPVLSAPSHCSTYPEPIYPTLPQANHDFYSTSSNYQTVFRAQPHSTSGLYPHHTEHGRCMAWTEQQLSRDFFSGSCAGSPYNSRPPSSYGPSLQAQDSHNMQFLNTGSFNFLSNTGAASCQGATLPPNSPNGYYGSNINYPESHRLGSMVNQHVSVISSIRSLPPYSDIHDPLNILDDSGRKQTSSFYTDTSSPVACRTPVLASSLQTPIPSSSSQCMYGTSNQYPAQETLDSHGTSSREMVSSLPPINTVFMGTAAGGT

SEQ ID NO: 250470 - DNA, 2787 bp, Artificial Sequence
  derived and/or modified sequence
atggccaaggtgcctgagctggaagatactttcctgcaggctcagcctgctccacagctttcaccagggatccaggaagattgctgtgtccaacttctgggtaagggattgctcgtataccctgaggaaacggtctatctggccgccgagggccagccaggcggtgagcaaggagggggtgagaagggagaggatccagaattgccgggagccgtgaaatcagagatgcatctgaacaacggtaatttttcttcggaggaggaggatgctgacaatcacgactccaagactaaagcagcagatcaatacttaagtcagaaaaagacaatcactcagatcgtgaaagacaagaagaagcaaactcagctcaccttacagtggctcgaggagaattatatcgtgtgcgagggcgtctgtctcccccggtgtatactgtacgcccactacctggatttttgcaggaaagaaaagctcgagcccgcatgcgcggccacttttggtaaaacaatccggcagaagtttccgttattaacaacccggcggctgggaacccgcgggcacagcaaataccactactacggcatcggaatcaaagaaagcagtgcctactaccattccgtctatagcggcaagggtctcacacggttctcgggttctaaattaaagaacgagggggggtttaccagaaagtactccttatcctcaaagactggcacgctccttcctgagttcccaagcgctcagcacctggtgtaccaggggtgtatttcaaaagacaaggtcgacaccctcattatgatgtataagactcactgtcagtgcatcctcgataatgccattaacggaaactttgaggagatccaacacttcctgctccatttctggcagggcatgcctgaccacctcttgcccctgttggagaaccccgtgattattgacatattttgtgtgtgtgactctatcctttacaaggtgctgaccgacgttctgattcctgccactatgcaagaaatgcctgagagcttgcttgccgatattcggaactttgccaagaactgggagcagtgggtggtcagttcgctcgagaatctgcccgaggcacttaccgacaagaagattccaatcgtgaggcgatttgtgtcttctctgaaacgccaaacttctttccttcacctcgcccagattgcccggccagcactgttcgaccagcacgtggtgaattctatggtttccgatattgagagggttgacctgaactctataggttctcaggcactgttaaccatttcagggagcactgacacagagtcgggcatctacacagagcatgactctatcaccgtcttccaagagctgaaagacctgttgaaaaagaatgcaaccgttgaggccttcatcgaatggctcgacaccgtggtagaacaacgcgttataaagactagtaagcagaacggcaggagtttaaagaaaagagctcaggactttctcttgaaatggtccttttttggggcgagggttatgcacaacctcacacttaataacgcctcctcgttcgggtctttccatctcatcagaatgctgttggatgaatacatcctgctcgcaatggagacacagtttaacaacgacaaagagcaggaactccagaacctcctggataaatacatgaagaacagcgatgctagcaaagctgctttcactgccagccctagctcatgttttctggccaaccgcaacaagggatctatggtgtcatcggatgcagttaagaatgagtcccacgtggagaccacctacctgcccctcccatcttctcagcccggtgggttagggccagcactacatcagttccctgcgggcaacactgacaacatgccgctgactgggcagatggagctgtctcagatcgccggtcacttaatgaccccacctatttcccccgctatggcctcacgcggcagcgtcattaaccaggggccaatggcagggaggcccccttccgtgggcccagtactgtcagcgccatctcattgtagtacctaccctgagccaatctaccccaccctgcctcaagctaatcacgacttctacagcaccagctcaaactatcagactgtgtttcgggctcaacctcactctacaagcggactgtatccccatcatactgaacatgggaggtgcatggcttggacagagcagcagctgagccgagactttttcagtggaagctgtgccggatccccatacaatagtaggccccccagtagctacggtccatcactccaggcccaggacagtcacaacatgcagttcttgaatacagggtcttttaattttttgtctaacacgggggctgcttcatgccagggagccaccctcccaccgaattcccctaacggttattatggcagcaacataaattatcctgagtcacataggctggggagcatggtcaaccagcacgtgagtgtgatatcctccattagaagcctaccaccatatagcgacattcatgaccccttgaacatcctcgatgacagcggcagaaagcagactagctcattctatactgatactagctctcccgtggcctgccggacgcccgtcctggctagctctctgcaaacaccaatcccgtcctccagtagccagtgcatgtatggcaccagcaatcagtacccagcccaggaaaccctcgactctcatgggacgtcctcacgagagatggtctcatcactgcctcctattaacaccgtgtttatgggaaccgctgccggaggcacctag

SEQ ID NO: 250471 - DNA, 2787 bp, Artificial Sequence
  derived and/or modified sequence
atggccaaggtgcctgagctggaggacaccttcctgcaggcccagcctgccccccagctgagccctggcatccaggaggactgctgcgtgcagctgctgggcaagggcctgctggtgtacccagaggagaccgtgtacctggccgctgagggccagcctggaggagagcagggcggcggggagaagggggaggaccctgagctgcctggagctgtgaagtctgagatgcacctgaacaacggcaacttcagcagcgaggaggaggatgctgacaaccacgacagcaagaccaaggctgctgaccagtacctgagccagaagaagaccatcacccagatcgtgaaggacaagaagaagcagacccagctgaccctgcagtggctggaggagaactacatcgtgtgtgaaggagtgtgcctgccccgctgcatcctgtatgcccactacctggacttctgcaggaaggagaagctggagcccgcctgtgccgccaccttcggcaagaccatccggcagaagttccccctgctgaccacccggcggctgggcacccggggccacagcaagtaccactactatggaattggcatcaaggagagcagcgcctactaccacagcgtgtacagcggcaagggcctgacccgcttcagcggcagcaagctgaagaatgaaggaggcttcaccaggaagtacagcctgagcagcaagacaggcaccctgctgcctgagttccccagcgcccagcacctggtgtaccagggctgcatcagcaaggacaaggtggacaccctcatcatgatgtacaagacccactgccagtgcatcctggacaatgccatcaatggaaactttgaggagatccagcacttcctgctgcacttctggcagggcatgccagaccacctgctgcccctgctggagaaccctgtgatcatcgacatcttctgtgtgtgtgacagcatcctgtacaaggtgctgacagatgtgctgatcccagccaccatgcaggagatgcctgagagcctgctggccgacatccggaactttgccaagaactgggagcagtgggtggtgagcagcctggagaacctgcctgaggccctgacagacaagaagatccccatcgtgagaagatttgtgagcagcctgaagaggcagaccagcttcctgcacctggcccagatcgcccggcctgccctgtttgaccagcacgtggtgaacagcatggtgtctgacatcgagcgggtggacctgaacagcatcggcagccaggccctgctgaccatcagcggcagcacagacacagaaagtggcatctacacagaacatgacagcatcaccgtcttccaggagctgaaggacctgctgaagaagaatgccaccgtggaggccttcatcgagtggctggacacagtggtggagcagagggtcatcaagaccagcaagcagaatggccgcagcctgaagaagagggcccaggacttcctgctgaagtggagcttcttcggggcccgggtgatgcacaacctgaccctgaacaatgccagcagctttggcagcttccacctgatccgcatgctgctggatgagtacatcctgctggccatggagacccagttcaacaatgacaaggagcaggagctgcagaacctgctggacaagtacatgaagaacagtgatgccagcaaggccgccttcaccgccagccccagcagctgcttcctggccaacagaaacaagggctccatggtgtccagtgatgctgtgaagaatgaaagccacgtggagaccacctacctgcccctgcccagcagccagcccggcggcctgggccctgccctgcaccagtttcctgctggcaacacagacaacatgcccctgaccggccagatggagctgagccagattgctggccacctgatgaccccacccatcagccctgccatggccagccggggcagcgtcatcaaccagggccccatggccggccggcccccatctgtgggccctgtgctgagcgcccccagccactgcagcacctacccagagcccatctaccccaccctgccccaggccaaccacgacttctacagcaccagcagcaactaccagacagtgttccgggcccagccccacagcaccagcggcctgtacccccaccacacagagcacggccgctgcatggcctggacagagcagcagctgagccgggacttcttcagcggcagctgtgccggcagcccctacaacagcaggcctcccagcagctatggccccagcctgcaggcccaggacagccacaacatgcagttcctgaacacaggcagcttcaacttcctgagcaacacaggagctgccagctgccagggcgccaccctgccccccaacagccccaacggctactacggcagcaacatcaactacccagagagccaccggctgggctccatggtgaaccagcacgtgtctgtcatcagcagcatccgcagcctgcccccctacagcgacatccatgaccccctgaacatcctggatgattctggcaggaagcagaccagcagcttctacacagacaccagcagccctgtggcctgcaggacccctgtgctggccagcagcctgcagacccccatccccagcagcagcagccagtgcatgtatggcaccagcaaccagtacccagcccaggagaccctggacagccacggcaccagcagccgggagatggtgagcagcctgccccccatcaacacagtgttcatgggcacagctgctgggggcacctag

SEQ ID NO: 250472 - DNA, 2787 bp, Artificial Sequence
  derived and/or modified sequence
atggccaaggtgcccgagctggaggacaccttcctgcaggcccagcctgcaccacagctcagtcctgggatacaggaagactgctgtgttcagctgctgggcaaaggtttactcgtctaccctgaggagacagtgtacctcgccgcggaggggcagcccggcggcgagcagggcggaggagagaagggagaagacccagagctacccggggcagtcaaaagtgaaatgcacctgaataacggcaacttttcgtccgaagaagaggacgctgataatcatgacagtaagactaaggccgctgatcagtacctctcgcagaaaaagacaataacgcaaatcgtgaaagacaagaagaaacagacccagctgacactacagtggttggaggagaactacatagtgtgtgaaggcgtttgtttgccacgttgcatcctgtacgctcattacctcgatttctgcaggaaggagaaacttgagcctgcatgcgcagccacctttggaaagacaattagacagaagtttccgctgttgactacgcgacggctcgggacaaggggacactctaaataccattactacgggattggcattaaagagagcagcgcatactatcactctgtgtatagcggtaagggacttactaggttttctgggagcaaacttaagaacgaaggcggctttactcggaagtatagcctgagcagtaagacaggcacccttctgccagagtttccctcagctcagcatctggtgtaccagggctgcatctccaaagacaaagtggacacccttattatgatgtataaaacccactgccagtgcattctagataacgctatcaatggtaattttgaggaaattcaacactttttactgcatttttggcagggcatgcctgatcatctcctgcctctgctggaaaaccctgtgatcattgatattttctgtgtgtgtgattcaatcctttacaaagtccttacggatgtgctaatcccagctaccatgcaagagatgcccgagtcactgctggctgatatacggaacttcgcaaaaaattgggagcaatgggtcgtgagctctcttgaaaacctcccggaagccttgactgataagaagattcccatcgtgaggcggttcgtgagttctttgaagaggcaaacaagctttttacatctagctcagatcgcccggcccgccctattcgatcagcatgtcgtgaacagcatggtctctgatatagagagggttgacctgaactccattggctctcaggctctcttaacgatatcaggtagtacagacaccgagtcagggatctatacagagcacgacagcataaccgtctttcaggagcttaaggacctccttaaaaagaacgctacggttgaggcctttatcgagtggcttgacacagtggtcgagcagcgcgtgattaagacatccaagcagaacggtaggtcgctaaaaaagcgcgcccaggatttcctgctgaaatggagcttctttggggcccgagtaatgcacaacctgactttgaacaacgcaagttcgttcggttccttccaccttattagaatgctacttgacgagtacatccttctagcaatggaaacccaatttaataatgacaaagagcaggagctgcagaacttgttagataaatacatgaaaaattccgatgctagtaaggcagcctttacggccagcccctcctcttgttttctggccaatcgaaacaagggctcaatggtcagtagcgacgcggtgaaaaatgagagccacgttgaaaccacgtacctgccacttccatcttctcagccgggcggactcggacctgctctccaccagttccctgccggcaacaccgacaatatgcccctcaccggacagatggagctttctcagatcgctggacatttaatgacacctccaatttctccagcgatggcatctagaggctctgtcatcaatcagggtccaatggcgggcaggccgccatcagtgggccctgtcctttcagcaccgtcccattgcagcacctaccccgagcccatttaccccaccctgccacaggcgaatcacgacttttatagcaccagctctaattaccagaccgtgttcagagcacagccccacagcaccagtggtctgtacccccatcacaccgagcacggtcggtgcatggcttggactgagcagcagctgtcaagggactttttctcgggaagctgtgcgggttcgccatacaatagcaggccccctagtagttacggcccttcactgcaagcccaggattctcacaacatgcagttcctgaataccggctccttcaacttcttatctaatactggcgccgcctcttgtcagggggctacactgccgcccaacagtcccaacggatactacgggtccaacataaattatcccgaaagccacaggctgggctccatggttaatcagcacgtgtcggttatttccagcatccggtcactccccccatacagtgatattcatgacccattgaacattctcgacgactcaggacggaagcagacctcatcattctacaccgatacttcgtctccagtggcatgccgcactccagtcctcgcgtcctccctgcagactccaattccttcaagtagctcccagtgcatgtacggcacctcaaatcaatatcctgcgcaagagacactcgactcacacggaacctcctccagggagatggtgagctcactgcccccaattaacacggtctttatgggcacggccgcaggagggacgtag

SEQ ID NO: 250473 - DNA, 2787 bp, Artificial Sequence
  derived and/or modified sequence
atggccaaagtacctgagctggaggacacattcttacaagcccaacctgcccctcagctctcccctggcattcaggaggactgttgtgttcagctccttggcaagggattgctggtataccctgaggaaacagtgtacctggccgcagaaggacagcccggaggtgagcagggcggaggggaaaagggcgaagaccctgagctcccaggagccgtcaaatccgagatgcatctgaacaacggcaacttctcgtcggaggaagaagatgccgacaatcatgactcaaagaccaaagcggctgatcagtacctgtcacagaagaaaactataacccagatcgtgaaggacaaaaaaaaacagactcagctgacgcttcagtggttggaagagaactacattgtttgcgaaggcgtgtgtctccctcggtgcattctgtacgcccactacctggacttctgcaggaaagagaaactggagcccgcatgtgccgcaacgtttgggaagaccatccgccaaaagtttcccctattgacaaccaggagactgggtacccgtggacacagcaagtatcactattacgggatcgggatcaaggaatccagcgcatactaccactcagtctacagcgggaaaggcctgactcggttctccggctctaagctcaagaacgagggcggtttcacccgaaaatattctctgtcttcaaagacaggcaccctcctccctgagtttcccagcgcccagcacttggtgtaccaaggttgcatttccaaagataaagtggacacactgataatgatgtacaagacacactgtcagtgtatcctggacaacgccatcaacggtaacttcgaggagatccagcacttcctcttacacttttggcaggggatgccagatcaccttctgcctttactagagaacccagtgataattgacattttttgcgtttgcgattctatcctgtataaagtgctcaccgacgtactgatacccgctacaatgcaggaaatgccagagtctttactcgcagatatccgcaacttcgctaaaaattgggaacaatgggtcgtgagcagcctggaaaacctgcctgaagctctgacagacaaaaagatccctattgtgaggagattcgtctcaagcctcaagcgacagacctcattcttacaccttgcccagatcgcacgtccagccctgtttgatcagcacgtggtaaactctatggtcagcgatatcgagcgggttgatcttaacagtataggatcacaggcactgctgactatatctgggtctacagacaccgagagcgggatctataccgagcacgattccataaccgtgttccaggagctgaaggacctcctcaaaaagaacgcaaccgttgaagcttttattgagtggttggacacagttgttgaacaacgtgttatcaaaacctcaaaacagaacggccgttccctgaaaaaaagggcccaggatttcctgcttaaatggagttttttcggtgccagggtcatgcacaatctgactctcaataatgcgtcctcgtttggaagcttccacttgatccgcatgctgcttgacgagtacatactgctggccatggaaacacaatttaataacgacaaagagcaggagctgcagaatttgctggacaagtacatgaagaattcggacgccagcaaggccgctttcaccgcgtctccgagctcatgtttcctcgctaaccgtaataagggctcaatggtatcctcggatgcggttaagaatgaaagccatgtggaaaccacttacctgcctctgccatcttcccagcctggcggtctcggcccagcacttcaccagttcccggcaggaaatacggacaatatgccacttaccggacagatggagctcagtcaaatcgctgggcacttgatgacaccaccaattagccctgccatggccagtcggggaagtgtgattaaccagggccctatggccggaaggcctccatctgtgggacccgtgctctccgccccatcccactgttcaacctatcctgagcctatttatcccaccttgccacaggccaatcacgacttttattcgacttctagtaactatcagacagtgttccgcgcacagccgcattctacatccggtttgtatcctcaccacactgagcatggtaggtgtatggcatggacagagcagcagttgtcaagagactttttcagcggcagttgtgcaggaagtccatataatagtcgcccaccgtccagctacggaccctcactgcaggctcaggatagccataatatgcagttcctaaacaccggctcttttaactttttgagcaataccggggcagcatcgtgccagggagcaactttgcctcccaacagtccgaacggctactacggttccaacatcaactaccctgaaagtcacagattggggagcatggtgaatcagcatgtctcagtgatcagctcaatcaggtccctcccaccatattccgatatccacgatcctctgaacattttggatgatagcgggagaaagcagacgtcatcattctacaccgatacctcatcccctgttgcgtgccgcacccccgtccttgctagcagtcttcagacaccaatcccatcctcgtcaagccagtgtatgtatgggacttctaaccaataccctgcccaagaaaccctagatagccacggaaccagttcaagagagatggtgagtagtttacccccaattaacactgtgttcatgggtaccgctgccggaggcacatag

SEQ ID NO: 250474 - DNA, 3460 bp, Artificial Sequence
  derived and/or modified sequence
tccggcggccaggaggatggccaaggtcccggagctggaagacaccttcctgcaggcgcagcctgcgccccaactgtccccggggatccaggaagactgctgtgtgcagctcctgggcaagggcttgctagtctatccggaagaaacagtgtacctggcggccgaagggcagcccgggggcgagcagggcggcggggagaaaggcgaagacccggagctgccgggggcagtgaaatcagaaatgcacttaaacaatggtaacttttcctctgaagaagaggacgccgacaaccacgacagcaaaaccaaagcagcggatcaatacctgtctcagaagaaaaccatcacgcagattgtgaaggataaaaagaagcagacacagctcacgctgcagtggcttgaagagaattacattgtatgtgaaggagtttgcttaccacggtgcattctttatgcacactacttagatttctgtaggaaagagaaattagagccagcctgtgcggccacctttggaaagacaattcgccagaagtttcccctcctaacaacaaggcggcttggaacaagaggccattcaaagtatcattactatgggattggcatcaaagagagcagtgcatattaccactccgtttattctggaaagggcttgacaaggttttctggaagcaagctaaagaatgagggtggcttcactcgtaaatattcgcttagctcaaaaactggaacacttcttccagaattccccagcgctcaacaccttgtataccaaggatgcatttctaaggacaaggttgatacgctcataatgatgtacaaaactcactgccagtgtatcctggacaatgcaattaatggaaactttgaagagatccagcattttttattacacttttggcaaggaatgcctgaccatctccttcccctgctcgaaaatcctgttatcattgatattttctgtgtttgtgactcaattctttataaggttcttacagatgtactcattcctgcaacaatgcaagaaatgcctgaaagcttattagcagacataagaaattttgctaaaaattgggaacagtgggttgtttcatccttggaaaacttgccagaagctctaactgacaagaaaatacctattgtgcgaagatttgtatcttctctgaaacgacaaacatctttcttacatcttgcccagattgccagaccagctctctttgaccagcatgtcgttaattctatggtgtctgatattgaaagggttgatttgaacagcattggctctcaagcccttcttaccatttcaggcagcacagacactgaatctggtatctacactgaacatgactctatcactgtgttccaagaactgaaggatctccttaagaagaatgccactgtggaggcttttattgaatggttggatactgtggtagaacagagagttattaagaccagcaaacaaaatggaaggtcattaaagaagagagctcaagactttctgttaaagtggagtttttttggtgctcgagtaatgcataatctcaccttgaacaatgcatccagttttggttcttttcatttgattcgaatgcttctcgatgaatacattctcctggccatggagacccagtttaataatgacaaagagcaggagttacagaatttattggacaagtatatgaagaattcagatgcgagtaaagctgctttcactgcttctccgagttcatgctttctggccaaccgtaataaagggagcatggtttccagcgacgctgtgaagaatgaaagccacgtggagacaacctatctccctctgccatccagtcaacctggaggcctaggccctgctctgcaccagttccctgctgggaacacagacaacatgccgctcacaggtcaaatggagctttcacagattgctggtcatctgatgacaccacccatttctccagccatggcaagccgaggaagtgtcattaaccaaggaccaatggcagggaggcccccaagtgtgggcccagtactgtcagctccatcacactgctccacatacccagagcccatttatcccactctccctcaagccaatcatgacttttatagcaccagctctaactaccagactgtgtttagggcacagccccactccacatcaggactctatcctcatcacaccgagcatggtcgatgcatggcttggactgaacagcagctttcaagagacttcttcagtggcagctgtgcggggtctccatataactcccggccaccgtctagctatggcccatccctgcaagcccaggattcacacaatatgcagtttttaaatacaggaagcttcaatttcttgagcaacacaggagctgccagctgccaaggagcaacactgcctcctaattcaccaaatggatactatggaagcaacataaactacccagagtctcacaggctcggatcaatggtgaatcagcacgtttctgtcatcagcagcattcgttcactgcccccctacagtgacatccacgatccacttaacattttagatgacagtggtagaaaacagaccagctcgttttacacagacacatcatctccagttgcatgtcgaactccagtcctagcttccagtttgcaaaccccaattccttcttcctcatcccaatgtatgtatggaacttccaaccagtatccagctcaagaaaccctggactcccatggaacaagcagtagagaaatggtgtcctctttaccacctatcaacactgtgttcatgggaacagcagctggaggcacttaaaccaccaatgtgggagggggtgctaaaactttaaaaaaaatctctactgtgcaaatatcattattcactcagacttccataagagtaaataaaaatgaatatgcagtggctgacattgttttaaagtcactggtactatggacaactccatagtgaatggagatacttgcagagcttgtcatgcacactaagagtttaaaatgtgagctcattattaatcatagtttcaaaattatcaaataaaaccagtgaagatctgaagatgcaaacatttcaactatgaagatttacatttcactttctaatttattaaacatctgtgtgcctttttatctttggtttcttttaaaaagtatatttaatgcctttacaatacctttaatttattaggatctcagaatcattgtttactatcccttatttgacaaaaagtcaaatgtgtatgttctacctccaacggaaatgtttacaaggtcaagacttaattcaattcagacaagaccaaagttgcttgacttcaattcctgtgcattagtgtgatgatttctgtcacatagcagcattccgattctatgtaactgaatggagatgataagtgctttcccctctttatttaaaaaagattaaaaggaataaaagaaataatgtatggaaata

SEQ ID NO: 250475 - DNA, 2787 bp, Artificial Sequence
  derived and/or modified sequence
atggccaaggtgcccgagctggaggacaccttcctgcaggcccagcccgccccccagctgagccccggcatccaggaggactgctgcgtgcagctgctgggcaagggcctgctggtgtaccccgaggagaccgtgtacctggccgccgagggccagcccggcggcgagcagggcggcggcgagaagggcgaggaccccgagctgcccggcgccgtgaagagcgagatgcacctgaacaacggcaacttcagcagcgaggaggaggacgccgacaaccacgacagcaagaccaaggccgccgaccagtacctgagccagaagaagaccatcacccagatcgtgaaggacaagaagaagcagacccagctgaccctgcagtggctggaggagaactacatcgtgtgcgagggcgtgtgcctgcccagatgcatcctgtacgcccactacctggacttctgcagaaaggagaagctggagcccgcctgcgccgccaccttcggcaagaccatcagacagaagttccccctgctgaccaccagaagactgggcaccagaggccacagcaagtaccactactacggcatcggcatcaaggagagcagcgcctactaccacagcgtgtacagcggcaagggcctgaccagattcagcggcagcaagctgaagaacgagggcggcttcaccagaaagtacagcctgagcagcaagaccggcaccctgctgcccgagttccccagcgcccagcacctggtgtaccagggctgcatcagcaaggacaaggtggacaccctgatcatgatgtacaagacccactgccagtgcatcctggacaacgccatcaacggcaacttcgaggagatccagcacttcctgctgcacttctggcagggcatgcccgaccacctgctgcccctgctggagaaccccgtgatcatcgacatcttctgcgtgtgcgacagcatcctgtacaaggtgctgaccgacgtgctgatccccgccaccatgcaggagatgcccgagagcctgctggccgacatcagaaacttcgccaagaactgggagcagtgggtggtgagcagcctggagaacctgcccgaggccctgaccgacaagaagatccccatcgtgagaagattcgtgagcagcctgaagagacagaccagcttcctgcacctggcccagatcgccagacccgccctgttcgaccagcacgtggtgaacagcatggtgagcgacatcgagagagtggacctgaacagcatcggcagccaggccctgctgaccatcagcggcagcaccgacaccgagagcggcatctacaccgagcacgacagcatcaccgtgttccaggagctgaaggacctgctgaagaagaacgccaccgtggaggccttcatcgagtggctggacaccgtggtggagcagagagtgatcaagaccagcaagcagaacggcagaagcctgaagaagagagcccaggacttcctgctgaagtggagcttcttcggcgccagagtgatgcacaacctgaccctgaacaacgccagcagcttcggcagcttccacctgatcagaatgctgctggacgagtacatcctgctggccatggagacccagttcaacaacgacaaggagcaggagctgcagaacctgctggacaagtacatgaagaacagcgacgccagcaaggccgccttcaccgccagccccagcagctgcttcctggccaacagaaacaagggcagcatggtgagcagcgacgccgtgaagaacgagagccacgtggagaccacctacctgcccctgcccagcagccagcccggcggcctgggccccgccctgcaccagttccccgccggcaacaccgacaacatgcccctgaccggccagatggagctgagccagatcgccggccacctgatgaccccccccatcagccccgccatggccagcagaggcagcgtgatcaaccagggccccatggccggcagaccccccagcgtgggccccgtgctgagcgcccccagccactgcagcacctaccccgagcccatctaccccaccctgccccaggccaaccacgacttctacagcaccagcagcaactaccagaccgtgttcagagcccagccccacagcaccagcggcctgtacccccaccacaccgagcacggcagatgcatggcctggaccgagcagcagctgagcagagacttcttcagcggcagctgcgccggcagcccctacaacagcagaccccccagcagctacggccccagcctgcaggcccaggacagccacaacatgcagttcctgaacaccggcagcttcaacttcctgagcaacaccggcgccgccagctgccagggcgccaccctgccccccaacagccccaacggctactacggcagcaacatcaactaccccgagagccacagactgggcagcatggtgaaccagcacgtgagcgtgatcagcagcatcagaagcctgcccccctacagcgacatccacgaccccctgaacatcctggacgacagcggcagaaagcagaccagcagcttctacaccgacaccagcagccccgtggcctgcagaacccccgtgctggccagcagcctgcagacccccatccccagcagcagcagccagtgcatgtacggcaccagcaaccagtaccccgcccaggagaccctggacagccacggcaccagcagcagagagatggtgagcagcctgccccccatcaacaccgtgttcatgggcaccgccgccggcggcacctag

SEQ ID NO: 250476 - protein, 1446 aa, Artificial Sequence
  derived and/or modified sequence
MLRTSGLALLALVSAVGPSQASGFTEKGLSLLGYQLCSHRVTHTVQKVEAVQTSYTSYVSCGGWIPWRRCPKMVYRTQYLVVEVPESRNVTDCCEGYEQLGLYCVLPLNQSGQFTSRPGACPAEGPEPSTSPCSLDIDCPGLEKCCPWSGGRYCMAPAPQAPERDPVGSWYNVTILVKMDFKELQQVDPRLLNHMRLLHSLVTSALQPMASTVHHLHSAPGNASTTVSRLLLGLPRPLPVADVSTLLGDIAKRVYEVISVQVQDVNECFYEELNACSGRELCANLEGSYWCVCHQEAPATSPRKLNLEWEDCPPVSDYVVLNVTSDSFQVSWRLNSTQNHTFHVRVYRGMELLRSARTQSQALAVAGLEAGVLYRVKTSYQGCGADVSTTLTIKTNAQVFEVTIKIVNHNLTEKLLNRSSVEYQDFSRQLLHEVESSFPPVVSDLYRSGKLRMQIVSLQAGSVVVRLKLTVQDPGFPMGISTLAPILQPLLASTVFQIDRQGTRVQDWDECVDSAEHDCSPAAWCINLEGSYTCQCRTTRDATPSRAGRACEGDLVSPMGGGLSAATGVTVPGLGTGTAALGLENFTLSPSPGYPQGTPAAGQAWTPEPSPRRGGSNVVGYDRNNTGKGVEQEVPSTAPGLGMDQGSPSQVNPSQGSPSQGSLRQESTSQASPSQRSTSQGSPSQVNPSQRSTSHANSSQGSPSQGSPSQESPSQGSTSQASPSHRNTIGVIGTTSSPKATGSTHSFPPGATDGPLALPGQLQGNSIMEPPSWPSPTEDPTGHFLWHATRSTRETLLNPTWLRNEDSGPSGSVDLPLTSTLTALKTPACVPVSIGRIMVSNVTSTGFHLAWEADLAMDSTFQLTLTSMWSPAVVLETWNTSVTLSGLEPGVLHLVEIMAKACGKEGARAHLKVRTAARKLIGKVRIKNVRYSESFRNASSQEYRDFLELFFRMVRGSLPATMCQHMDAGGVRMEVVSVTNGSIVVEFHLLIIADVDVQEVSAAFLTAFQTVPLLEVIRGDTFIQDYDECERKEDDCVPGTSCRNTLGSFTCSCEGGAPDFPVEYSERPCEGDSPGNETWATSPERPLTTAGTKAAFVQGTSPTPQGLPQRLNLTGAVRVLCEIEKVVVAIQKRFLQQESIPESSLYLSHPSCNVSHSNGTHVLLEAGWSECGTLMQSNMTNTVVRTTLRNDLSQEGIIHHLKILSPIYCAFQNDLLTSSGFTLEWGVYTIIEDLHGAGNFVTEMQLFIGDSPIPQNYSVSASDDVRIEVGLYRQKSNLKVVLTECWATPSSNARDPITFSFINNSCPVPNTYTNVIENGNSNKAQFKLRIFSFINDSIVYLHCKLRVCMESPGATCKINCNNFRLLQNSETSATHQMSWGPLIRSEGEPPHAEAGLGAGYVVLIVVAIFVLVAGTATLLIVRYQRMNGRYNFKIQSNNFSYQVFYE

SEQ ID NO: 250477 - DNA, 92 bp, Artificial Sequence
  derived and/or modified sequence
acagttaacaaaaaccgaacaatctaattacgaaatgaacaaaagatatgaacagacatttcacccgagagtatacaggggccaggcatggt

SEQ ID NO: 250478 - DNA, 4341 bp, Artificial Sequence
  derived and/or modified sequence
atgctgagaaccagcggcctggccctgctggccctggtgagcgccgtgggccccagccaggccagcggcttcaccgagaagggcctgagcctgctgggctaccagctgtgcagccacagagtgacccacaccgtgcagaaggtggaggccgtgcagaccagctacaccagctacgtgagctgcggcggctggatcccctggagaagatgccccaagatggtgtacagaacccagtacctggtggtggaggtgcccgagagcagaaacgtgaccgactgctgcgagggctacgagcagctgggcctgtactgcgtgctgcccctgaaccagagcggccagttcaccagcagacccggcgcctgccccgccgagggccccgagcccagcaccagcccctgcagcctggacatcgactgccccggcctggagaagtgctgcccctggagcggcggcagatactgcatggcccccgccccccaggcccccgagagagaccccgtgggcagctggtacaacgtgaccatcctggtgaagatggacttcaaggagctgcagcaggtggaccccagactgctgaaccacatgagactgctgcacagcctggtgaccagcgccctgcagcccatggccagcaccgtgcaccacctgcacagcgcccccggcaacgccagcaccaccgtgagcagactgctgctgggcctgcccagacccctgcccgtggccgacgtgagcaccctgctgggcgacatcgccaagagagtgtacgaggtgatcagcgtgcaggtgcaggacgtgaacgagtgcttctacgaggagctgaacgcctgcagcggcagagagctgtgcgccaacctggagggcagctactggtgcgtgtgccaccaggaggcccccgccaccagccccagaaagctgaacctggagtgggaggactgcccccccgtgagcgactacgtggtgctgaacgtgaccagcgacagcttccaggtgagctggagactgaacagcacccagaaccacaccttccacgtgagagtgtacagaggcatggagctgctgagaagcgccagaacccagagccaggccctggccgtggccggcctggaggccggcgtgctgtacagagtgaagaccagctaccagggctgcggcgccgacgtgagcaccaccctgaccatcaagaccaacgcccaggtgttcgaggtgaccatcaagatcgtgaaccacaacctgaccgagaagctgctgaacagaagcagcgtggagtaccaggacttcagcagacagctgctgcacgaggtggagagcagcttcccccccgtggtgagcgacctgtacagaagcggcaagctgagaatgcagatcgtgagcctgcaggccggcagcgtggtggtgagactgaagctgaccgtgcaggaccccggcttccccatgggcatcagcaccctggcccccatcctgcagcccctgctggccagcaccgtgttccagatcgacagacagggcaccagagtgcaggactgggacgagtgcgtggacagcgccgagcacgactgcagccccgccgcctggtgcatcaacctggagggcagctacacctgccagtgcagaaccaccagagacgccacccccagcagagccggcagagcctgcgagggcgacctggtgagccccatgggcggcggcctgagcgccgccaccggcgtgaccgtgcccggcctgggcaccggcaccgccgccctgggcctggagaacttcaccctgagccccagccccggctacccccagggcacccccgccgccggccaggcctggacccccgagcccagccccagaagaggcggcagcaacgtggtgggctacgacagaaacaacaccggcaagggcgtggagcaggaggtgcccagcaccgcccccggcctgggcatggaccagggcagccccagccaggtgaaccccagccagggcagccccagccagggcagcctgagacaggagagcaccagccaggccagccccagccagagaagcaccagccagggcagccccagccaggtgaaccccagccagagaagcaccagccacgccaacagcagccagggcagccccagccagggcagccccagccaggagagccccagccagggcagcaccagccaggccagccccagccacagaaacaccatcggcgtgatcggcaccaccagcagccccaaggccaccggcagcacccacagcttcccccccggcgccaccgacggccccctggccctgcccggccagctgcagggcaacagcatcatggagccccccagctggcccagccccaccgaggaccccaccggccacttcctgtggcacgccaccagaagcaccagagagaccctgctgaaccccacctggctgagaaacgaggacagcggccccagcggcagcgtggacctgcccctgaccagcaccctgaccgccctgaagacccccgcctgcgtgcccgtgagcatcggcagaatcatggtgagcaacgtgaccagcaccggcttccacctggcctgggaggccgacctggccatggacagcaccttccagctgaccctgaccagcatgtggagccccgccgtggtgctggagacctggaacaccagcgtgaccctgagcggcctggagcccggcgtgctgcacctggtggagatcatggccaaggcctgcggcaaggagggcgccagagcccacctgaaggtgagaaccgccgccagaaagctgatcggcaaggtgagaatcaagaacgtgagatacagcgagagcttcagaaacgccagcagccaggagtacagagacttcctggagctgttcttcagaatggtgagaggcagcctgcccgccaccatgtgccagcacatggacgccggcggcgtgagaatggaggtggtgagcgtgaccaacggcagcatcgtggtggagttccacctgctgatcatcgccgacgtggacgtgcaggaggtgagcgccgccttcctgaccgccttccagaccgtgcccctgctggaggtgatcagaggcgacaccttcatccaggactacgacgagtgcgagagaaaggaggacgactgcgtgcccggcaccagctgcagaaacaccctgggcagcttcacctgcagctgcgagggcggcgcccccgacttccccgtggagtacagcgagagaccctgcgagggcgacagccccggcaacgagacctgggccaccagccccgagagacccctgaccaccgccggcaccaaggccgccttcgtgcagggcaccagccccaccccccagggcctgccccagagactgaacctgaccggcgccgtgagagtgctgtgcgagatcgagaaggtggtggtggccatccagaagagattcctgcagcaggagagcatccccgagagcagcctgtacctgagccaccccagctgcaacgtgagccacagcaacggcacccacgtgctgctggaggccggctggagcgagtgcggcaccctgatgcagagcaacatgaccaacaccgtggtgagaaccaccctgagaaacgacctgagccaggagggcatcatccaccacctgaagatcctgagccccatctactgcgccttccagaacgacctgctgaccagcagcggcttcaccctggagtggggcgtgtacaccatcatcgaggacctgcacggcgccggcaacttcgtgaccgagatgcagctgttcatcggcgacagccccatcccccagaactacagcgtgagcgccagcgacgacgtgagaatcgaggtgggcctgtacagacagaagagcaacctgaaggtggtgctgaccgagtgctgggccacccccagcagcaacgccagagaccccatcaccttcagcttcatcaacaacagctgccccgtgcccaacacctacaccaacgtgatcgagaacggcaacagcaacaaggcccagttcaagctgagaatcttcagcttcatcaacgacagcatcgtgtacctgcactgcaagctgagagtgtgcatggagagccccggcgccacctgcaagatcaactgcaacaacttcagactgctgcagaacagcgagaccagcgccacccaccagatgagctggggccccctgatcagaagcgagggcgagcccccccacgccgaggccggcctgggcgccggctacgtggtgctgatcgtggtggccatcttcgtgctggtggccggcaccgccaccctgctgatcgtgagataccagagaatgaacggcagatacaacttcaagatccagagcaacaacttcagctaccaggtgttctacgagtag

SEQ ID NO: 250479 - DNA, 4341 bp, Artificial Sequence
  derived and/or modified sequence
atgcttcgtactagcgggcttgccctgttagccctagtttctgccgtcggaccctcgcaggctagcggctttactgagaaaggcctatcgctgctagggtaccagctgtgttcccatcgtgtcactcatacagtgcaaaaggtggaggccgtacagacgtcatatactagctacgtgtcctgcggcgggtggatcccctggcgccggtgcccgaagatggtttaccgaacacagtatctcgtggtcgaagtgcccgagagtaggaacgtgacagactgttgcgagggatacgagcagctcggtctgtattgcgtactgccccttaaccagtcgggtcagtttaccagcagacccggagcctgcccagctgaagggcccgagccatcgacctcaccctgcagcctggatatagactgccccggcctcgaaaaatgctgcccttggagcggcgggcggtactgcatggcacccgccccccaggcgccagagagagaccctgtgggatcttggtacaacgtgactatcttggtcaaaatggattttaaggaactgcagcaggtggacccacggctgctgaaccacatgcgtctgttgcacagcctggtgaccagcgcactccagcctatggccagcacagtgcaccacctgcattccgccccaggcaatgcatctaccaccgtcagcaggcttttacttggcctacccagacctctaccagtggccgacgtcagtactcttcttggcgatatcgcgaaacgcgtctatgaagttatatccgtccaagtccaggatgtcaatgaatgtttctatgaggaactgaatgcttgcagtggccgagaactgtgcgctaatcttgaagggtcatattggtgtgtgtgtcaccaggaggcccctgcaacatctccacgcaagctgaatctggaatgggaagattgccctccagttagcgattatgtcgtactgaacgtcacctccgatagcttccaggttagctggcgactcaattccacccagaaccacacctttcacgtgcgcgtctaccgcggaatggaattgctgaggtcagctaggacccaatctcaggccttagcagttgctgggctggaggctggcgtcctctatcgagtgaaaacttcttaccaggggtgtggtgctgacgtttccactactttgacaataaaaaccaatgcacaagtgttcgaagtgactattaagattgttaaccataacctgaccgaaaagctcctgaacagaagtagcgttgagtatcaggatttcagccgccagctcctccatgaggtcgagtcttcatttccgcctgtggtgtccgacctctataggtccggtaagttacgcatgcagatcgtatcactgcaggcaggtagtgtggtggtgcgactcaaactgacagtgcaggacccgggatttcccatggggattagcacattggcacccattctgcagcctctgctggcctccacagtgttccagattgacagacagggaacccgggtccaggattgggacgagtgcgtcgatagcgcagagcacgattgctcacccgccgcctggtgcataaacctggaaggcagttacacatgccaatgccgaaccacccgggatgcgacaccatctcgtgctggaagagcatgcgaaggagatctggtgtccccaatggggggaggcctgtctgccgccactggggtcaccgttcccggcctcggaacaggaactgctgctttaggactggagaattttacccttagtccttcgccgggatacccacaaggcacccctgcggccgggcaagcatggacccctgagccttccccaaggcgcggcggctccaatgtggtgggctacgaccgtaacaacacaggtaagggagtggaacaagaggtgccttctacagctcctggcctcggaatggatcaggggtcacctagtcaggttaacccatcccaagggagcccctcacaagggagcctcagacaagagagcacttcacaggcgtcacccagtcagcggagcacaagtcagggctctccatcacaggtgaatccatcacaacgatccacaagtcacgccaactcctcacaggggtctccctcacaggggtctccgtcccaggagtccccaagccaagggtccacaagtcaggctagtccctcgcaccgtaatactatcggggttatcggcactacgtcctcaccaaaggcgaccggaagcactcatagtttcccacccggggctactgatggacccctggctctcccaggccaactgcagggcaattcaatcatggaaccaccatcttggcccagtccaacagaagaccccacaggccacttcctctggcacgctacccggtccaccagagagactctgctgaaccctacatggttacgaaacgaggattctggcccaagtgggtccgtggacttaccccttacttccaccctcacagcgctaaagacccccgcatgtgtgcctgtaagtattggtagaataatggtgagcaatgtcacctcgactggatttcatctcgcttgggaggctgacctggccatggactccacgttccaactgaccctgaccagtatgtggtcgccagccgtggtgctggagacctggaacacatctgtgacgctgtcagggctggagcctggagtgctgcacctcgtggagatcatggctaaggcatgcggcaaggaaggagcccgagcccacctgaaagtgagaactgctgcaaggaagttgatcggtaaagtgcggattaagaacgtgcgttatagtgaatcattccgaaacgcctcttcccaggaatacagagatttcctggaactcttcttcagaatggtaagaggatctctccccgctacaatgtgccagcacatggacgctgggggagttcggatggaagttgtgtccgttaccaacgggtctatcgtcgtcgagttccatttgttgatcattgccgacgtggatgtgcaggaggtgtctgccgctttcttgacggcattccagacagttccgctgctggaggttatccgtggagatacatttattcaagactacgacgagtgcgaaagaaaggaggacgactgcgtgcctggaacatcctgcaggaacacactgggttcctttacatgttcctgcgaaggcggagcacctgattttcccgtcgagtactccgaacgcccctgcgaaggggatagccctgggaatgagacatgggcaactagtccagaaagaccactcactaccgccggtacaaaggcagcttttgtgcagggcacctctccgaccccacaggggctacctcagcggctgaatctcaccggggctgtccgggtcctgtgcgaaattgaaaaagtggttgtggccatccagaagagatttctgcagcaggagagtatccccgagtcgtcactgtacctgtcccatccctcatgcaacgtgtcgcactccaatggaacccatgtgctcctcgaagcagggtggtctgaatgtggaacactcatgcagtccaacatgacgaacaccgtcgtccgaaccacgctgagaaacgacctgtcccaggaggggattatccaccaccttaagatcctgtcacccatctattgtgctttccaaaatgacctcctcacaagtagcggcttcacgctcgagtggggcgtgtatacgatcattgaagatttgcacggagctggaaattttgtgaccgagatgcaattgttcatcggcgattcaccgataccacagaattacagcgtgagtgcttcagacgatgtccgcattgaagtggggctgtacaggcagaaaagtaacctgaaggtggtgctgacggagtgctgggctaccccttcaagtaatgctcgagatccaataactttcagctttatcaacaatagctgtcccgttcctaatacctacacaaacgtgattgaaaacggcaactcaaataaggcccagttcaagttacgaatcttctcctttattaatgactctattgtttacctgcactgcaagctaagagtttgcatggaatcacccggggcaacctgcaagataaattgtaataacttcaggttgctacagaattccgagacctccgcaacccaccagatgtcctggggtcccttgatcagatccgagggcgagcccccgcatgcggaggccggcctgggggcgggttacgtggtcttaatcgtcgtcgcgatctttgtccttgtggcgggaacggccacattgcttatagtccggtatcaacgcatgaacggccgctataattttaaaattcaaagcaacaacttctcctaccaagttttctacgagtag

SEQ ID NO: 250480 - DNA, 4341 bp, Artificial Sequence
  derived and/or modified sequence
atgctgcggaccagcggcctggccctgctggccctggtgtctgctgtgggccccagccaggccagcggcttcacagagaagggcctgagcctgctgggctaccagctgtgcagccaccgggtgacccacacagtgcagaaggtggaggccgtgcagaccagctacaccagctatgtgtcctgtggcggctggatcccctggaggcgctgccccaagatggtgtaccgcacccagtacctggtggtggaggtgcctgagagcagaaatgtgacagactgctgtgagggctatgagcagctgggcctgtactgtgtgctgcccctgaaccagagcggccagttcaccagcaggcctggggcctgcccagctgagggccctgagcccagcaccagcccctgcagcctggacatcgactgccccggcctggagaagtgctgcccctggagcggcggccgctactgcatggccccagccccccaggcccctgagcgggaccctgtgggctcctggtacaacgtgaccatcctggtgaagatggacttcaaggagctgcagcaggtggacccccggctgctgaaccacatgaggctgctgcacagcctggtgaccagcgccctgcagcccatggccagcacagtgcaccacctgcacagcgcccctggaaatgccagcaccaccgtgtcccggctgctgctgggcctgccccggcccctgcctgtggctgatgtgtccaccctgctgggggacatcgccaagagggtgtatgaagtcatctctgtgcaggtgcaggatgtgaatgaatgcttctatgaggagctgaatgcctgcagcggccgggagctgtgtgccaacctggagggcagctactggtgtgtgtgccaccaggaggccccagccaccagccccaggaagctgaacctggagtgggaggactgcccccctgtgtctgactatgtggtgctgaatgtgaccagtgacagcttccaggtgtcctggaggctgaacagcacccagaaccacaccttccacgtgcgggtgtaccggggcatggagctgctgcggagcgcccggacccagagccaggccctggccgtggccggcctggaggccggcgtgctgtacagagtgaagaccagctaccagggctgtggggctgatgtgtccaccaccctgaccatcaagaccaatgcccaggtgtttgaggtgaccatcaagatcgtgaaccacaacctgacagagaagctgctgaacagaagctctgtggagtaccaggacttcagccggcagctgctgcacgaggtggagagcagcttcccccctgtggtgtctgacctgtaccgcagcggcaagctgaggatgcagatcgtgtccctgcaggccggctctgtggtggtgcggctgaagctgactgtgcaggaccccggcttccccatgggcatcagcaccctggcccccatcctgcagcccctgctggccagcaccgtcttccagattgaccggcagggcaccagggtgcaggactgggatgaatgtgtggacagcgctgagcatgactgcagccctgctgcctggtgcatcaacctggagggcagctacacctgccagtgcaggaccaccagagatgccacccccagcagagctggccgggcctgtgagggggacctggtgagccccatgggcggcggcctgtctgctgccactggagtgacagtgcccggcctgggcaccggcacagctgccctgggcctggagaacttcaccctgagccccagccctggctacccccagggcaccccagctgctggccaggcctggaccccagagcccagcccccggcggggcggcagcaatgtggtgggctatgacaggaacaacacaggcaagggcgtggagcaggaggtgcccagcacagcccctggcctgggcatggaccagggcagccccagccaggtgaaccccagccagggcagccccagccagggcagcctgcggcaggagagcaccagccaggccagccccagccagaggagcaccagccagggcagccccagccaggtgaaccccagccagaggagcaccagccacgccaacagcagccagggcagccccagccagggcagccccagccaggagagccccagccagggcagcaccagccaggccagccccagccacaggaacaccatcggggtcatcggcaccaccagcagccccaaggccaccggcagcacccacagcttccccccaggggccacagatggccccctggccctgcccggccagctgcagggcaacagcatcatggagccccccagctggcccagccccacagaggaccccaccggccacttcctgtggcacgccaccaggagcacccgggagaccctgctgaaccccacctggctgagaaatgaagattctggccccagcggctctgtggacctgcccctgaccagcaccctgacagccctgaagaccccagcctgtgtgcctgtgtccatcggccgcatcatggtgtccaatgtgaccagcacaggcttccacctggcctgggaggccgacctggccatggacagcaccttccagctgaccctgacctccatgtggagccctgctgtggtgctggagacctggaacacctctgtgaccctgagcggcctggagcccggggtgctgcacctggtggagatcatggccaaggcctgtgggaaggagggcgcccgggcccacctgaaggtgaggacagctgccaggaagctgattggcaaggtgcgcatcaagaatgtgcgctacagcgagagcttcagaaatgccagcagccaggagtacagagacttcctggagctgttcttcaggatggtgcggggcagcctgcctgccaccatgtgccagcacatggatgctgggggcgtgaggatggaggtggtgtctgtgaccaacggcagcatcgtggtggagttccacctgctgatcatcgcagatgtggatgtgcaggaggtgtctgctgccttcctgacagccttccagacagtgcccctgctggaggtgatccggggggacaccttcatccaggactatgatgaatgtgagaggaaagaagatgactgtgtgcccggcaccagctgcaggaacaccctgggcagcttcacctgcagctgtgagggcggggccccagacttccctgtggagtacagcgagcggccctgtgagggggacagccctggaaatgagacctgggccaccagccctgagcggcccctgaccacagctggcaccaaggccgcctttgtgcagggcaccagccccaccccccagggcctgccccagaggctgaacctgaccggggctgtgcgggtgctgtgtgaaattgagaaggtggtggtggccatccagaagcgcttcctgcagcaggagagcatccctgagagcagcctgtacctgagccaccccagctgcaatgtgagccacagcaatggcacccacgtgctgctggaggccggctggagcgaatgtggcaccctgatgcagagcaacatgaccaacacagtggtgaggaccaccctgagaaatgacctgagccaggagggcatcatccaccacctgaagatcctgagccccatctactgtgccttccagaatgacctgctgaccagcagcggcttcaccctggagtggggcgtgtacaccatcatcgaggacctgcatggagctggcaactttgtgacagagatgcagctgttcatcggggacagccccatcccccagaactacagcgtgtctgccagtgatgatgtgagaattgaggtgggcctgtaccggcagaagagcaacctgaaggtggtgctgacagagtgctgggccacccccagcagcaatgcccgggaccccatcaccttctccttcatcaacaacagctgccctgtgcccaacacctacaccaacgtgattgaaaatggaaacagcaacaaggcccagttcaagctgcgcatcttctccttcatcaatgacagcatcgtgtacctgcactgcaagctgcgggtgtgcatggagagccctggggccacctgcaagatcaactgcaacaacttccggctgctgcagaacagcgagaccagcgccacccaccagatgtcctggggccccctcatccgctctgagggggagccccctcatgctgaggccggcctgggcgccggctacgtggtgctgattgtggtggccatctttgtgctggtggccggcacagccaccctgctgattgtgcgctaccagaggatgaatggccgctacaacttcaagatccagagcaacaacttctcctaccaggtgttctatgaatag

SEQ ID NO: 250481 - DNA, 4341 bp, Artificial Sequence
  derived and/or modified sequence
atgctgcggaccagcggcctggccctgctggccctggtgagcgccgttgggccgtcccaggcttccgggttcacagaaaaggggctttccctgctcgggtaccagctttgtagccacagagtgacgcacaccgtccagaaggtcgaggcagtgcaaacatcttatacgtcatacgtctcatgcggcgggtggattccatggcgtaggtgccctaaaatggtttatcgtacacaatacctggtggtggaggtgcccgagtcacgcaacgttaccgactgctgtgaagggtatgaacagctcgggctgtattgtgtcctgcccctgaaccaaagcggccagttcaccagcagaccaggcgcctgcccggccgagggtccagagccgagcacgtccccctgtagcctggatatcgattgcccaggactggaaaaatgttgcccatggtctggtggcagatattgcatggcgcctgcacctcaggcacctgagcgtgaccccgtgggcagttggtacaacgttaccatactagttaagatggatttcaaagaattgcagcaagttgaccctcggctcctgaaccacatgcggttattacactccctcgtgacatcggctctgcagccaatggcaagcacggtgcatcatttgcatagtgcccctggaaatgctagcacaacagtgagtagactactcctgggactcccgaggccccttcctgtagctgatgtatcaacccttctgggagatatcgctaaacgggtttacgaagttatctctgtccaggtgcaggacgtcaacgagtgtttttatgaggagctgaacgcttgttctggacgggagctgtgcgccaatctggagggcagttactggtgtgtctgtcaccaggaggctcctgcaacctccccccgtaagcttaacttagagtgggaggattgtcctcccgttagcgactacgtagtgctcaatgtcacaagtgacagctttcaggtctcttggagattgaacagcacacagaaccatacattccatgttagggtatatagaggtatggaactgctgcgctccgccagaacccagagtcaggcccttgctgttgccggactggaggcaggggtattgtacagggtgaaaacgtcataccagggttgcggggccgatgtttcaacaaccttgactatcaagactaatgcacaggtgttcgaagttacgatcaagattgtgaaccataatttaacagaaaagttactcaatcgctccagcgttgagtaccaggacttttctaggcagctgcttcacgaggtagagtcaagtttccccccagtggtatcagatctgtaccgcagcggaaagctgcgtatgcaaattgttagcctgcaagccggcagcgtggtggtgagacttaaattgacggtgcaagaccctgggtttccaatgggaatttctacactagccccgattttacagcctctgctcgcttccacagtgtttcagatagatcgccagggtacacgcgtgcaggattgggatgaatgcgttgactccgccgaacacgattgcagcccggcagcttggtgcatcaaccttgagggcagctacacatgccagtgtaggaccacacgcgacgcaaccccttcgagggcagggcgcgcctgtgaaggagatttggtgtctcccatgggtggaggtctgtccgcagccaccggggtgactgtccccggcctgggcaccggcactgccgccctgggcctcgaaaatttcactctcagcccttctcccggctacccacagggaactcctgcggccggtcaggcctggacccctgagccttccccgcgtcgaggaggctccaatgtggtaggatatgaccggaataataccggtaagggggtggagcaggaagtccccagtaccgctccagggctcggtatggatcagggatcccctagccaagtgaatccaagccagggaagtccatcacagggttccttgcgtcaggagagcacttctcaggcctcaccttctcaaagaagtacaagccaaggatccccatcgcaagtcaaccctagtcaacgtagtactagccacgcaaactcctctcaggggtcccccagccagggtagcccgagccaggaatctccatcgcaaggatccacaagccaggcctcaccatcacacagaaataccatcggcgtcattggaacaaccagcagccccaaagcgaccggatctacacactccttccctcccggggccaccgacgggccactggctctgcctggccagctgcaagggaattctataatggagcccccgagttggcccagcccaaccgaggaccctaccggccactttctctggcacgctacccgatctacccgcgagactctcctgaatccgacctggctccgaaatgaggacagcggcccatccggatcagtagatttgcccctgacctctacgttgacagctctgaaaactcctgcctgtgtgcctgtctccattggtcgcatcatggtgtccaacgtcacttcaacagggtttcacctggcatgggaagcggacctcgccatggacagcacatttcagttgacccttactagcatgtggtctcccgctgtagtgttggaaacctggaatacgtccgtcactctcagtggactcgagcccggcgtgcttcatctggtggagataatggccaaggcatgcggcaaggagggagcgagggcacatctgaaagttagaactgctgcgcgtaaattgattggcaaggtgagaattaaaaacgtgcgatactccgagagcttccgcaacgcttctagccaggagtatcgggactttctcgagttgtttttccggatggtcaggggctcactgcccgccacaatgtgccaacacatggatgcggggggtgtgcggatggaggttgtttcagtcaccaacggctcaatagtcgtcgaatttcaccttctaatcattgcagacgtagatgtccaggaggttagcgcggccttcctgaccgcctttcagactgtgccccttttagaggttattcgcggagacacctttatccaagactatgatgaatgcgagcgaaaagaagatgattgcgtgccaggaacaagctgtcgcaatactctcggaagttttacatgttcttgcgaaggcggggcacctgacttccctgtggaatactccgagcggccttgcgagggcgactcacccgggaacgagacttgggccacctcccccgagcggcccctgactaccgccggcacaaaggctgccttcgttcagggcaccagcccaacccctcagggcctgccacaacggctaaatctgacaggcgctgtgcgggtactctgcgagatcgagaaggttgttgtagccattcagaagcgcttcctgcagcaggagtcaattcccgaaagctctctgtatctttcccatccatcctgcaacgtgtctcattctaacgggactcacgttctattggaggccgggtggagcgagtgcgggacactcatgcagagtaacatgaccaacacggtggtgcgtacaaccctccggaatgatctatcccaggaaggcataatacaccacctgaagatcctgtcaccgatatattgcgcattccagaatgatttgctcacaagcagcgggttcactttggagtggggcgtgtatacgataattgaagatctgcacggcgctggaaactttgtcactgagatgcaactgttcatcggcgattccccaattccacagaactattccgtgagcgctagcgatgatgtcaggatcgaggtagggctctatagacagaagagtaatctgaaggtcgttctgactgaatgctgggccacaccttcctccaacgcccgcgatcccattaccttctctttcatcaacaactcatgcccagtacccaacacttataccaacgttatagaaaacggcaatagcaataaggcccagttcaagctgaggatcttcagtttcataaatgacagcattgtgtatttacactgcaagttgcgggtctgcatggagtccccaggtgccacttgtaaaattaactgcaacaatttccgtctcctgcagaatagcgagacatctgcgacacaccagatgtcctggggtcctctcattcggagtgagggcgagcccccgcacgccgaggcaggcttaggcgctggttatgtggttttgattgtcgttgcaatatttgtacttgtcgccggcacagccacccttctgattgtccgctaccagcgcatgaatggtaggtataattttaaaattcagtcgaacaacttcagctaccaggtattttatgaatag

SEQ ID NO: 250482 - DNA, 4341 bp, Artificial Sequence
  derived and/or modified sequence
atgctccggaccagcggcctggcactgctcgcgttagtgagcgccgtcggcccttcccaggcatctggcttcacggagaaaggcctgagtcttctggggtatcagttatgctcacaccgagtaacccatacagtccaaaaggttgaggcagtgcagacctcatacacctcatatgtatcttgcggagggtggataccttggaggcggtgtcccaagatggtgtataggacccaatacctggtggtagaggttccagaatcgcggaatgtgacagattgttgtgagggatatgaacagctcggactctattgcgtcctgcccctcaatcagagtggccagttcacatcaagacctggcgcttgccccgcagaggggccagagccgagcacaagcccatgctcgctagatatcgactgccctggtctcgagaagtgctgtccgtggtctggaggaaggtattgcatggcacctgcccctcaggcccctgagcgcgatccagtcgggagctggtataacgttacgattctggtaaagatggacttcaaagagctacaacaagtagacccaagattattgaaccatatgcgtttgctccactctctagtgacctccgcactgcagccaatggcctcaacagtgcatcatttacactctgctcccggtaacgctagtacaaccgtgtcccgcttattacttggcctgcctcgccctctgcccgtggctgacgtcagcactctgcttggggatatcgccaagagagtgtacgaagtgatcagcgtccaggtgcaggatgtaaatgagtgcttttacgaggagcttaacgcctgtagtggcagagaactatgcgctaacctagaaggcagctactggtgtgtctgccatcaggaagcccctgctacttctccacgcaagctgaacctggaatgggaggattgcccacctgtctctgattacgtcgtgttaaacgttactagcgactcttttcaggtcagctggaggctcaatagcacacagaaccacacttttcatgttagagtatatagaggcatggagcttcttcggtctgctcgaacccaaagtcaggcactggcagtggcaggattagaggctggtgtcctttaccgggtcaaaacctcttatcagggatgcggagctgatgtttctacaaccctgaccattaaaaccaatgcccaggtcttcgaggtaactatcaaaatcgttaatcacaatctgaccgagaagctactgaacaggtcctcagttgaataccaggacttcagccgacagctcctgcacgaggtcgagtcctctttcccacccgtggtctctgacctgtatcgcagcggaaaacttcgaatgcagattgtgtcactgcaagccggatcagtggtggtgcgattgaaactgaccgtccaggaccctgggttcccaatgggtatcagcacgcttgcgccaattctgcagcccctcctcgcaagcactgtgtttcaaatcgaccggcaggggactcgggtccaagattgggacgagtgcgtcgactctgctgagcatgattgtagtccggcagcatggtgcattaatctcgaagggtcttacacctgtcagtgtagaacaacacgggacgccactccaagcagagctgggagagcatgcgaaggcgatcttgtatcaccaatgggaggcggtctgtctgccgcaacaggcgtcacagtacctgggctcggcacagggactgcagcattgggcctggagaacttcacgttgtctccaagccctggttatccccaggggacgccggcagccggtcaggcgtggacacccgaaccttcaccacgcagggggggtagtaacgtggtaggttacgatcgcaataacactggaaaaggagtcgagcaggaggtcccatctactgctcccggattgggtatggaccagggatccccatcacaagttaatccctctcagggatcgccttcacaaggatctctaagacaggaatccacgtcccaggctagcccatcccagaggagcaccagtcagggatcgcccagccaagtgaatccgtctcagcgctctacttctcacgcaaactcttcgcagggatccccaagccaaggatcaccatctcaggaaagcccatctcagggcagcacgtcacaggccagcccctctcatcgcaatacgattggcgtgatagggacgactagcagccctaaagcgactgggtcaacacatagcttccctccaggcgctaccgacggccctctggcattacccggacagctacagggcaactctataatggagcctccatcatggccgagccctacagaagatccaaccggtcacttcctctggcacgccacacgttctacgagagagacccttctaaaccctacttggttgcgaaacgaagacagtggacccagcgggagcgtggacctgccgcttaccagcacgctcacagctctgaagacacctgcgtgtgtcccagtgtctattgggagaattatggtgtcaaatgtgacaagcacaggatttcacctagcatgggaggctgatctcgctatggatagtacatttcagctgacactgaccagcatgtggagccccgctgtagtcctcgagacctggaatacttctgtgaccctgtcaggtctggaaccgggtgtgctacacctcgtggagatcatggctaaagcatgtggcaaagagggcgcaagggcccacttgaaagtgagaactgccgcaaggaagctgatcggcaaggttaggatcaagaacgtccgctactccgaatcgttcagaaatgccagctcacaggaatatcgcgatttcctggagctgtttttcagaatggtgcgaggcagcttgccagcgaccatgtgccaacacatggatgccggaggtgtgcgtatggaagtagtttccgtaaccaacggctctatagttgtggagtttcatttactgatcatcgccgacgtggatgtccaggaagtctccgctgcgtttctgactgcatttcagaccgtcccattattggaggtcatcaggggcgacacgttcatccaggactacgatgaatgtgagcgcaaagaggacgactgcgttcctggcacttcatgtagaaacaccctcgggagctttacctgctcctgcgagggcggtgcaccggacttccccgtcgagtactcagagcggccttgtgaaggggactcgccgggaaatgagacatgggcgacatctcctgaacgcccactcacgaccgctggaacaaaggccgcatttgtgcaaggtaccagccctactccgcagggcctgcctcagcggcttaacctaacgggagcagtgagggttctatgcgagatcgaaaaggtggtcgtcgcgatacagaaaagatttttgcagcaggagtccataccagaatcttcactgtacctgagtcatccttcatgcaatgtgtcacattcaaacggtacccacgtgctcttggaggctggctggtcagagtgtggaacacttatgcagtcaaatatgacgaatacagtagtgaggacaacccttcggaatgacctgagccaggagggcataatccaccatctcaaaatcttaagccccatttattgcgcattccagaacgacctgctaacatctagtgggtttaccctcgagtggggggtgtatactattattgaggacttgcatggagccggaaactttgtgactgagatgcagctcttcattggagattcgcccattcctcagaactactcagtgagcgcctccgatgacgtcagaatagaagttggactataccggcagaaaagcaacctcaaggtggtgctgaccgaatgttgggccaccccatcgtctaacgccagggatcccatcacgttcagcttcataaataattcctgtcccgtgcccaatacctacaccaacgtcattgagaacggaaactccaataaggcacagttcaagctaaggattttctccttcattaacgatagtatcgtctacctacattgcaagctgcgcgtgtgtatggagagtcctggggctacctgtaaaatcaattgtaataactttaggctcttgcaaaacagcgaaacctctgcaactcatcaaatgtcctggggtcctcttatcaggtccgagggggagccaccccacgctgaagccggtcttggagccggatacgtcgtgctcatcgtggtagccatatttgtgcttgtggcaggcactgcgacactgctgatcgtgaggtaccagagaatgaatggtaggtataacttcaaaatccaatcaaataatttctcgtaccaggtgttctacgaatag

SEQ ID NO: 250483 - DNA, 5442 bp, Artificial Sequence
  derived and/or modified sequence
cgctggtttcctctggaggctgcgagggagaaaccgtcccctgcctctcccaggctctggggtgagcccttcctggcatcccgggctcattgtagatggatcactccaatctccatggcttctcagggcttccctccatgcacctcaaatctctctctccttccttttgtaaggatgccagtcattggatttaggttcaccttaaatccaggatgatctcatctaaattacatctgcaaaaagaccctttttccaaaaaaaggcctctccctgttgggctaccagctatgcagccaccgtgtgacccacactgtacagaaggtggaggccgtgcagacgtcctacacgtcctatgtgtcctgcggcggctggatcccctggaggcggtgccctaagatggtttaccggacacagtacctggtagtggaggtccccgagtccaggaacgtgactgactgctgtgagggctatgaacagctcggcctctactgtgtcttgcccctgaatcagtccgggcagttcacgtcaagacctggggcctgccccgcagaggggcctgaaccatccacctccccctgcagcttggacatcgactgtcctggacttgagaagtgctgcccctggtcaggggggcgctactgcatggcccctgcaccccaagctccagagagggaccctgtgggctcctggtacaacgtcaccatactggtgaaaatggacttcaaggaactccagcaagtggaccccaggctcctgaaccacatgcgccttctgcattccttggtcaccagcgccctgcaaccaatggcctccaccgtccaccacctgcactcagcccctgggaacgcctccaccacagtgtcgcggctgctactgggcctgccacggccactgcctgtggctgacgtctccaccctgctgggtgacattgcgaagcgtgtctatgaagtgatcagcgtccaggtgcaagatgtcaatgagtgtttctatgaggagctcaatgcctgctctggaagggaactgtgcgcaaacctggagggctcgtactggtgcgtctgtcaccaggaagctccagccacgtctccacggaagctgaacctggagtgggaagattgtcctccagtcagtgactacgtggtcctcaacgtcaccagtgacagttttcaagtatcctggcgtttaaattctacacagaaccacactttccatgtccgggtttaccggggtatggagttgctcaggagcgccaggacacagagccaggcactggcagtggctgggctggaggctggagtgctgtacagggtgaagaccagctaccaggggtgcggggccgacgtctccaccacgctgaccatcaaaaccaatgcccaggtatttgaagtcacaataaagattgtaaaccacaacctgacggagaagttactcaaccgcagcagtgtggagtaccaggacttttctagacaactgcttcacgaggtcgagagctccttcccaccagtggtgtctgacttgtaccgaagtgggaagctgagaatgcagatcgtgtctctccaggcgggaagtgtggtcgtgaggctcaagctcaccgtgcaggaccccgggtttcccatgggcatctccacgctggcccccatactccagcccctgttggcaagcacagtgttccagattgaccggcaggggacacgcgtgcaagactgggacgagtgtgtggacagcgcggaacacgactgctcaccggctgcctggtgcatcaacctggagggctcctacacctgccagtgccgtaccaccagggacgccaccccctcccgcgcaggccgggcctgtgagggtgacctggtgagccccatgggcggtggactgtctgcggcaacaggggtaacggtcccaggtcttggcacgggaacagcagccctcggcctagagaacttcaccttgtcacccagtcctgggtaccctcagggcaccccggcagcaggccaggcctggaccccagagccctcacccagaagagggggcagcaatgtggtcgggtatgacaggaacaacacaggaaaaggcgtggagcaggaggtgcccagcactgccccgggtctggggatggaccaggggagccccagccaggtgaaccccagccaggggagccccagccaggggagcctcagacaggagagtaccagccaggcgagccccagccagaggagcaccagccaggggagccccagccaggtgaaccccagccagcggagcaccagccacgcgaactccagccaggggagccccagccaggggagccccagccaggagagccccagccaggggagcaccagccaggcgagccccagccataggaacactatcggggtgataggcaccacctcctccccgaaggctactgggtcaacccacagcttccctcctggggccacagatggcccactggccctccctggacagctacagggaaactccatcatggagccaccctcctggccttcccctactgaggaccccaccggccacttcctgtggcatgccacccgttccacccgggaaacacttctgaatcccacgtggctgcgaaatgaggacagtggaccctccggttctgtagacctgccattgacctccaccctcacagctctgaagacccccgcctgtgttcctgtctccattgggaggatcatggtctccaatgtgaccagcaccggcttccacctggcatgggaggcggatcttgctatggactccaccttccagctcactctgacttccatgtggagccctgctgtggtcctagagacctggaacacgagtgtgacactgtcggggctggagcctggggtcttgcacctggttgagatcatggccaaagcatgtgggaaagaaggtgccagagctcatctgaaagtgaggacagcagcccggaagctcattggaaaggtcagaatcaaaaatgtcaggtactcagaatcctttcgcaacgcaagcagccaggagtatcgagatttcctagaactattcttcaggatggtgcggggctccctgccagccaccatgtgtcagcacatggacgctggtggggtcaggatggaagtcgtcagcgtcaccaacggcagcatcgtggtggagtttcacttgctgataatcgcagatgtggatgtccaggaggtgtcagctgcatttctcaccgccttccagaccgtgcctctgctggaggtgatcagaggcgacaccttcatacaggattacgatgagtgtgaaaggaaggaggacgactgtgtgccggggacatcctgtcgaaacaccctcgggtctttcacttgtagctgcgagggaggagcccccgacttccctgtggaatattctgagagaccctgtgaaggtgactctcctggcaatgaaacctgggccaccagcccagagaggcctctcaccacagcagggaccaaggctgcctttgtgcaaggcaccagccccaccccccaaggcctgccccagcggctgaacctgaccggagcagtcagggtgctctgtgagatcgagaaggtggttgtcgccatccagaagcgcttcctgcagcaggaatccatccccgagtcctcgttgtacctcagccacccctcctgcaacgtgagccacagcaatggcacacacgtgctcctggaggccggctggagcgagtgtgggaccctcatgcagagcaacatgacgaacaccgtggtgaggaccacgctgaggaacgacctgtcccaggagggcatcatccaccacctgaagatcctgagccccatctactgcgccttccagaatgacctgctgacatcctccggcttcaccctggagtggggggtttacaccatcatcgaggacctccacggcgctgggaattttgttaccgaaatgcagttgtttatcggagactctcccatacctcagaattatagcgtgtctgccagtgacgatgtcaggatcgaagtggggctctacaggcagaaaagcaacctcaaggtggtcctgacggagtgctgggcaaccccgtctagcaacgcccgggaccccatcaccttcagcttcattaacaacagctgccctgtgcccaacacatacaccaacgtgattgagaacggcaactccaataaggcccagttcaagctgaggatcttttcctttatcaacgactccatcgtctacctgcactgcaaactccgcgtctgcatggaatcccccggagccacgtgcaaaatcaattgcaataactttcggttgctgcaaaatagtgaaacctctgccacacaccagatgtcctggggacccctcatccggtctgaaggtgagcctcctcatgcagaagcaggcctgggtgccggttatgtggtccttattgtggtggccatcttcgtgctggtggcgggaacagccacccttctgatcgtgcgctaccagagaatgaatgggagatacaactttaaaatccagtccaacaacttcagctaccaggtgttctacgaataggaggcgcaggctgacaggaaggtcgccgtgagtcaagctgcctccagaacctcagagcttccctggtgggctcccccgggatccccagtgtctctctgcacctccacccatccctcggttcttaactcttcaagccttaacggaggtctgctctgacgggtgggctctgccagagcccgggtgagcccagaaaggaagacagcagccaccgtctgtcccgaagaggcaggccgtcctgtaggtcctagaggagccacagcccaggggcagatgaaggggctgcggaagacgggggcagtcctgggggtgctgcggctacaccaccacccgcgcggcccccgcagcctagacctcccaggcctgtgaccctccacaccagccctcagaaccctcctgggcttgccctcccttggcgtccgtcaccctttggcaaatatagaatatttcacattctcagagagacccgaccgcgctcttgatgctctttcgaaaataggtcagtcttagaaatacactgctaatgttatttttagtggatgtttatgctgtttgacttttctcctgtgtaccaaggtattgcttttatttacacgacagcgactcaaaaggcactcgattaatgtgacaaccttttcaataagcagaaataacgtaggtacacatcactctttacatttttctaagcattttcacagccgtttcttcatataatccgaccacagtgggaggtgtgatttacccattacacaatgagaaaccagaggagccgatgagttacttaattgaggtcacagaatgaattagcaagaaaatggttctaaaatctaagtattttagtctagaattttctccattacatcatcctaagagataatgctctgtacttcatttgaaataaactggaattgtattagatagctc

SEQ ID NO: 250484 - DNA, 5262 bp, Artificial Sequence
  derived and/or modified sequence
atgctcaggacctcggggctggcactgctggctctggtcagtgctgtgggcccaagccaggccagcggcttcacagaaaaaggcctctccctgttgggctaccagctatgcagccaccgtgtgacccacactgtacagaaggtggaggccgtgcagacgtcctacacgtcctatgtgtcctgcggcggctggatcccctggaggcggtgccctaagatggtttaccggacacagtacctggtagtggaggtccccgagtccaggaacgtgactgactgctgtgagggctatgaacagctcggcctctactgtgtcttgcccctgaatcagtccgggcagttcacgtcaagacctggggcctgccccgcagaggggcctgaaccatccacctccccctgcagcttggacatcgactgtcctggacttgagaagtgctgcccctggtcaggggggcgctactgcatggcccctgcaccccaagctccagagagggaccctgtgggctcctggtacaacgtcaccatactggtgaaaatggacttcaaggaactccagcaagtggaccccaggctcctgaaccacatgcgccttctgcattccttggtcaccagcgccctgcaaccaatggcctccaccgtccaccacctgcactcagcccctgggaacgcctccaccacagtgtcgcggctgctactgggcctgccacggccactgcctgtggctgacgtctccaccctgctgggtgacattgcgaagcgtgtctatgaagtgatcagcgtccaggtgcaagatgtcaatgagtgtttctatgaggagctcaatgcctgctctggaagggaactgtgcgcaaacctggagggctcgtactggtgcgtctgtcaccaggaagctccagccacgtctccacggaagctgaacctggagtgggaagattgtcctccagtcagtgactacgtggtcctcaacgtcaccagtgacagttttcaagtatcctggcgtttaaattctacacagaaccacactttccatgtccgggtttaccggggtatggagttgctcaggagcgccaggacacagagccaggcactggcagtggctgggctggaggctggagtgctgtacagggtgaagaccagctaccaggggtgcggggccgacgtctccaccacgctgaccatcaaaaccaatgcccaggtatttgaagtcacaataaagattgtaaaccacaacctgacggagaagttactcaaccgcagcagtgtggagtaccaggacttttctagacaactgcttcacgaggtcgagagctccttcccaccagtggtgtctgacttgtaccgaagtgggaagctgagaatgcagatcgtgtctctccaggcgggaagtgtggtcgtgaggctcaagctcaccgtgcaggaccccgggtttcccatgggcatctccacgctggcccccatactccagcccctgttggcaagcacagtgttccagattgaccggcaggggacacgcgtgcaagactgggacgagtgtgtggacagcgcggaacacgactgctcaccggctgcctggtgcatcaacctggagggctcctacacctgccagtgccgtaccaccagggacgccaccccctcccgcgcaggccgggcctgtgagggtgacctggtgagccccatgggcggtggactgtctgcggcaacaggggtaacggtcccaggtcttggcacgggaacagcagccctcggcctagagaacttcaccttgtcacccagtcctgggtaccctcagggcaccccggcagcaggccaggcctggaccccagagccctcacccagaagagggggcagcaatgtggtcgggtatgacaggaacaacacaggaaaaggcgtggagcaggaggtgcccagcactgccccgggtctggggatggaccaggggagccccagccaggtgaaccccagccaggggagccccagccaggggagcctcagacaggagagtaccagccaggcgagccccagccagaggagcaccagccaggggagccccagccaggtgaaccccagccagcggagcaccagccacgcgaactccagccaggggagccccagccaggggagccccagccaggagagccccagccaggggagcaccagccaggcgagccccagccataggaacactatcggggtgataggcaccacctcctccccgaaggctactgggtcaacccacagcttccctcctggggccacagatggcccactggccctccctggacagctacagggaaactccatcatggagccaccctcctggccttcccctactgaggaccccaccggccacttcctgtggcatgccacccgttccacccgggaaacacttctgaatcccacgtggctgcgaaatgaggacagtggaccctccggttctgtagacctgccattgacctccaccctcacagctctgaagacccccgcctgtgttcctgtctccattgggaggatcatggtctccaatgtgaccagcaccggcttccacctggcatgggaggcggatcttgctatggactccaccttccagctcactctgacttccatgtggagccctgctgtggtcctagagacctggaacacgagtgtgacactgtcggggctggagcctggggtcttgcacctggttgagatcatggccaaagcatgtgggaaagaaggtgccagagctcatctgaaagtgaggacagcagcccggaagctcattggaaaggtcagaatcaaaaatgtcaggtactcagaatcctttcgcaacgcaagcagccaggagtatcgagatttcctagaactattcttcaggatggtgcggggctccctgccagccaccatgtgtcagcacatggacgctggtggggtcaggatggaagtcgtcagcgtcaccaacggcagcatcgtggtggagtttcacttgctgataatcgcagatgtggatgtccaggaggtgtcagctgcatttctcaccgccttccagaccgtgcctctgctggaggtgatcagaggcgacaccttcatacaggattacgatgagtgtgaaaggaaggaggacgactgtgtgccggggacatcctgtcgaaacaccctcgggtctttcacttgtagctgcgagggaggagcccccgacttccctgtggaatattctgagagaccctgtgaaggtgactctcctggcaatgaaacctgggccaccagcccagagaggcctctcaccacagcagggaccaaggctgcctttgtgcaaggcaccagccccaccccccaaggcctgccccagcggctgaacctgaccggagcagtcagggtgctctgtgagatcgagaaggtggttgtcgccatccagaagcgcttcctgcagcaggaatccatccccgagtcctcgttgtacctcagccacccctcctgcaacgtgagccacagcaatggcacacacgtgctcctggaggccggctggagcgagtgtgggaccctcatgcagagcaacatgacgaacaccgtggtgaggaccacgctgaggaacgacctgtcccaggagggcatcatccaccacctgaagatcctgagccccatctactgcgccttccagaatgacctgctgacatcctccggcttcaccctggagtggggggtttacaccatcatcgaggacctccacggcgctgggaattttgttaccgaaatgcagttgtttatcggagactctcccatacctcagaattatagcgtgtctgccagtgacgatgtcaggatcgaagtggggctctacaggcagaaaagcaacctcaaggtggtcctgacggagtgctgggcaaccccgtctagcaacgcccgggaccccatcaccttcagcttcattaacaacagctgccctgtgcccaacacatacaccaacgtgattgagaacggcaactccaataaggcccagttcaagctgaggatcttttcctttatcaacgactccatcgtctacctgcactgcaaactccgcgtctgcatggaatcccccggagccacgtgcaaaatcaattgcaataactttcggttgctgcaaaatagtgaaacctctgccacacaccagatgtcctggggacccctcatccggtctgaaggtgagcctcctcatgcagaagcaggcctgggtgccggttatgtggtccttattgtggtggccatcttcgtgctggtggcgggaacagccacccttctgatcgtgcgctaccagagaatgaatgggagatacaactttaaaatccagtccaacaacttcagctaccaggtgttctacgaataggaggcgcaggctgacaggaaggtcgccgtgagtcaagctgcctccagaacctcagagcttccctggtgggctcccccgggatccccagtgtctctctgcacctccacccatccctcggttcttaactcttcaagccttaacggaggtctgctctgacgggtgggctctgccagagcccgggtgagcccagaaaggaagacagcagccaccgtctgtcccgaagaggcaggccgtcctgtaggtcctagaggagccacagcccaggggcagatgaaggggctgcggaagacgggggcagtcctgggggtgctgcggctacaccaccacccgcgcggcccccgcagcctagacctcccaggcctgtgaccctccacaccagccctcagaaccctcctgggcttgccctcccttggcgtccgtcaccctttggcaaatatagaatatttcacattctcagagagacccgaccgcgctcttgatgctctttcgaaaataggtcagtcttagaaatacactgctaatgttatttttagtggatgtttatgctgtttgacttttctcctgtgtaccaaggtattgcttttatttacacgacagcgactcaaaaggcactcgattaatgtgacaaccttttcaataagcagaaataacgtaggtacacatcactctttacatttttctaagcattttcacagccgtttcttcatataatccgaccacagtgggaggtgtgatttacccattacacaatgagaaaccagaggagccgatgagttacttaattgaggtcacagaatgaattagcaagaaaatggttctaaaatctaagtattttagtctagaattttctccattacatcatcctaagagataatgctctgtacttcatttgaaataaactggaattgtattagatagctc

SEQ ID NO: 250485 - protein, 486 aa, Artificial Sequence
  derived and/or modified sequence
MRSGAERRGSSAAASPGSPPPGRARPAGSDAPSALPPPAAGQPRARDSGDVRSQPRPLFQWSKWKKRMGSSMSAATARRPVFDDKEDVNFDHFQILRAIGKGSFGKVCIVQKRDTEKMYAMKYMNKQQCIERDEVRNVFRELEILQEIEHVFLVNLWYSFQDEEDMFMVVDLLLGGDLRYHLQQNVQFSEDTVRLYICEMALALDYLRGQHIIHRDVKPDNILLDERGHAHLTDFNIATIIKDGERATALAGTKPYMAPEIFHSFVNGGTGYSFEVDWWSVGVMAYELLRGWRPYDIHSSNAVESLVQLFSTVSVQYVPTWSKEMVALLRKLLTVNPEHRLSSLQDVQAAPALAGVLWDHLSEKRVEPGFVPNKGRLHCDPTFELEEMILESRPLHKKKKRLAKNKSRDNSRDSSQSENDYLQDCLDAIQQDFVIFNREKLKRSQDLPREPLPAPESRDAAEPVEDEAERSALPMCGPICPSAGSG

SEQ ID NO: 250486 - protein, 369 aa, Artificial Sequence
  derived and/or modified sequence
MYAMKYMNKQQCIERDEVRNVFRELEILQEIEHVFLVNLWYSFQDEEDMFMVVDLLLGGDLRYHLQQNVQFSEDTVRLYICEMALALDYLRGQHIIHRDVKPDNILLDERGHAHLTDFNIATIIKDGERATALAGTKPYMAPEIFHSFVNGGTGYSFEVDWWSVGVMAYELLRGWRPYDIHSSNAVESLVQLFSTVSVQYVPTWSKEMVALLRKLLTVNPEHRLSSLQDVQAAPALAGVLWDHLSEKRVEPGFVPNKGRLHCDPTFELEEMILESRPLHKKKKRLAKNKSRDNSRDSSQSENDYLQDCLDAIQQDFVIFNREKLKRSQDLPREPLPAPESRDAAEPVEDEAERSALPMCGPICPSAGSG

SEQ ID NO: 250487 - DNA, 1461 bp, Artificial Sequence
  derived and/or modified sequence
atgagaagcggcgccgagagaagaggcagcagcgccgccgccagccccggcagccccccccccggcagagccagacccgccggcagcgacgcccccagcgccctgcccccccccgccgccggccagcccagagccagagacagcggcgacgtgagaagccagcccagacccctgttccagtggagcaagtggaagaagagaatgggcagcagcatgagcgccgccaccgccagaagacccgtgttcgacgacaaggaggacgtgaacttcgaccacttccagatcctgagagccatcggcaagggcagcttcggcaaggtgtgcatcgtgcagaagagagacaccgagaagatgtacgccatgaagtacatgaacaagcagcagtgcatcgagagagacgaggtgagaaacgtgttcagagagctggagatcctgcaggagatcgagcacgtgttcctggtgaacctgtggtacagcttccaggacgaggaggacatgttcatggtggtggacctgctgctgggcggcgacctgagataccacctgcagcagaacgtgcagttcagcgaggacaccgtgagactgtacatctgcgagatggccctggccctggactacctgagaggccagcacatcatccacagagacgtgaagcccgacaacatcctgctggacgagagaggccacgcccacctgaccgacttcaacatcgccaccatcatcaaggacggcgagagagccaccgccctggccggcaccaagccctacatggcccccgagatcttccacagcttcgtgaacggcggcaccggctacagcttcgaggtggactggtggagcgtgggcgtgatggcctacgagctgctgagaggctggagaccctacgacatccacagcagcaacgccgtggagagcctggtgcagctgttcagcaccgtgagcgtgcagtacgtgcccacctggagcaaggagatggtggccctgctgagaaagctgctgaccgtgaaccccgagcacagactgagcagcctgcaggacgtgcaggccgcccccgccctggccggcgtgctgtgggaccacctgagcgagaagagagtggagcccggcttcgtgcccaacaagggcagactgcactgcgaccccaccttcgagctggaggagatgatcctggagagcagacccctgcacaagaagaagaagagactggccaagaacaagagcagagacaacagcagagacagcagccagagcgagaacgactacctgcaggactgcctggacgccatccagcaggacttcgtgatcttcaacagagagaagctgaagagaagccaggacctgcccagagagcccctgcccgcccccgagagcagagacgccgccgagcccgtggaggacgaggccgagagaagcgccctgcccatgtgcggccccatctgccccagcgccggcagcggctag

SEQ ID NO: 250488 - DNA, 1461 bp, Artificial Sequence
  derived and/or modified sequence
atgcgtagcggcgctgagcggcgtggcagctcagcagctgcgtctcctgggagccccccgcccggacgggcaaggcccgccggctctgacgctcccagcgccctgccgccccctgccgcaggtcaaccacgggcccgcgattcgggagacgtgaggagtcagccacgaccactgttccagtggtcaaaatggaagaagagaatgggcagcagtatgagcgctgcaaccgcaagaagacccgtttttgatgataaagaagacgtgaactttgatcactttcagatcctcagggcgattggcaaaggcagcttcggcaaggtttgtattgtgcagaagcgcgatacagaaaagatgtatgccatgaagtatatgaacaaacagcaatgtatcgaaagggacgaggttagaaatgtgtttcgggagctggaaattctgcaggagatcgagcacgtgtttcttgttaatctctggtactcatttcaggatgaagaagatatgtttatggttgtggacctgctgctgggcggcgatctgcggtaccacctgcaacagaacgtgcagttcagcgaggatacggtcagattgtacatatgtgagatggctctggccctggattatcttagggggcagcacattattcaccgggacgtgaagccggataacattctccttgatgaacgagggcacgcgcaccttacagactttaatatagctactattataaaagatggcgaacgggctactgcccttgccgggactaagccatatatggcccctgaaatttttcattcttttgtgaatggcggaacgggatactccttcgaagtagactggtggtctgtgggcgtcatggcatacgaactcctgcgagggtggcggccttacgatatccactccagcaacgccgtggagtccctggtgcagttgttctccactgtgtccgttcagtacgtaccaacctggtcaaaggagatggttgcactactgaggaagctgctcacagtcaatcccgagcatcggctgagctctctgcaggacgtacaagctgcaccggcactcgctggcgtgctctgggaccacctgagcgagaaacgggttgagcctgggttcgtgccaaacaagggccgcctgcactgcgatccaacatttgagctggaggagatgattctcgaaagccggcccctgcataagaaaaagaagcggttggcaaaaaataaaagcagggataactcccgtgatagcagccagtccgagaacgactacctacaggactgcctggatgctattcaacaggattttgtcatatttaatagggagaaattgaagaggtcgcaagatttaccaagggaacccctgccagccccagagtctagggacgctgcagaacctgtcgaggacgaggctgagagaagcgcactgcctatgtgtggacccatctgccccagtgcgggcagtggctag

SEQ ID NO: 250489 - DNA, 1461 bp, Artificial Sequence
  derived and/or modified sequence
atgaggtctggagctgagcggcggggcagcagcgctgctgccagccctggcagccccccacctggccgggcccggcctgctggcagtgatgcccccagcgccctgcccccacctgctgctggccagccccgggcccgggacagcggagatgtgcgcagccagccccggcccctcttccagtggagcaagtggaagaagaggatgggcagctccatgtctgctgccacagcccggcggcctgtgtttgatgacaaggaggatgtgaactttgaccacttccagatcctgcgggccatcggcaagggcagctttgggaaggtgtgcatcgtgcagaagagggacacagagaagatgtatgccatgaagtacatgaacaagcagcagtgcatcgagagagatgaggtgagaaatgtgttccgggagctggagatcctgcaggagattgagcacgtgttcctggtgaacctgtggtacagcttccaggatgaggaggacatgttcatggtggtggacctgctgctgggcggggacctgcgctaccacctgcagcagaatgtgcagttcagcgaggacacagtgcggctgtacatctgtgagatggccctggccctggactacctgcggggccagcacatcatccacagagatgtgaagccagacaacatcctgctggatgagcggggccacgcccacctgacagacttcaacatcgccaccatcatcaaggatggagagcgggccacagccctggccggcaccaagccctacatggcccctgagatcttccacagctttgtgaatggaggcaccggctacagctttgaggtggactggtggagcgtgggcgtgatggcctatgagctgctgcggggctggaggccctatgacatccacagcagcaatgctgtggagagcctggtgcagctgttcagcacagtgtctgtgcagtatgtgcccacctggagcaaggagatggtggccctgctgaggaagctgctgactgtgaaccctgagcaccggctgagcagcctgcaggatgtgcaggccgccccagccctggccggcgtgctgtgggaccacctgtctgagaagagggtggagcccggctttgtgcccaacaagggccgcctgcactgtgaccccacctttgagctggaggagatgatcctggagagccggcccctgcacaagaagaagaagaggctggccaagaacaagagccgggacaacagccgggacagcagccagagtgaaaatgactacctgcaggactgcctggatgccatccagcaggactttgtgatcttcaaccgggagaagctgaagaggagccaggacctgccccgggagcccctgcctgcccctgagagcagagatgctgctgagcctgtggaggatgaggccgagaggtctgccctgcccatgtgtggccccatctgccccagcgctggcagcggctag

SEQ ID NO: 250490 - DNA, 1461 bp, Artificial Sequence
  derived and/or modified sequence
atgcggagcggcgccgagcggcggggcagcagcgccgccgccagccctgggagtcccccacccggacgcgcaaggccagctggttccgacgcgccttctgcactacccccgcccgctgctggacagcctagagcacgggactcgggagacgttcggagccagccgcggcccctcttccagtggtctaagtggaaaaagaggatgggtagttccatgtccgctgctactgcgcggcggccagtgttcgacgataaagaggatgtcaacttcgaccattttcagatcctgagagccataggaaaggggtcctttggtaaggtctgtattgtccaaaaaagagacaccgaaaaaatgtacgccatgaagtacatgaacaagcaacaatgtatcgagagggacgaggtccggaatgtgttccgcgagttggagattttacaggaaatcgaacacgtcttcttggtgaacctgtggtactccttccaagatgaggaggacatgttcatggtcgttgatctgctgctggggggtgatttgcggtaccacctccaacaaaacgttcaatttagtgaagatactgtgcgcttgtacatttgtgagatggcactcgctttggactacctacggggtcaacacataatacatcgagacgtgaaacccgacaacatcttgctcgatgaaagagggcacgctcatctgactgacttcaatattgcaacaatcatcaaggatggagagagagccacagctttagcgggcacgaagccgtatatggctccagaaattttccattcatttgtcaacggaggtaccggatatagctttgaagtcgactggtggtctgtgggcgtgatggcatacgagttactgcggggatggcgaccctacgacatacacagctcaaacgccgtggaatctctggtgcagctattcagtaccgtctccgtgcagtacgtacccacctggtccaaggaaatggtggccctgctaagaaagctcctgactgtcaatccagaacatagactgtcctccctgcaggatgttcaagctgcacccgcattagccggggtgctgtgggaccacctgagcgagaaacgcgtcgagccaggtttcgtcccaaataaaggaaggttacactgcgatccaacattcgaactcgaggagatgattttggaatcgagacctctgcataagaagaaaaaacggctggcaaaaaacaaaagccgagataactccagagacagcagccagtctgaaaacgattaccttcaagattgtctggatgcaattcagcaggattttgttatattcaatcgagagaaactgaaacgctctcaggaccttcccagggaacccctgcctgcgcctgagagccgggatgcagccgaacccgtagaggacgaagctgaacgatccgcgctacccatgtgtggcccaatctgcccgagtgccggtagtggctag

SEQ ID NO: 250491 - DNA, 1461 bp, Artificial Sequence
  derived and/or modified sequence
atgcgtagcggagcagaaaggcggggaagttctgcggcagccagccccggaagccccccacccggacgcgcaagacctgctggttccgacgccccaagcgcgctgcctccgcctgcagccggtcagcctcgcgcacgagactctggagatgtgcggtcgcagcctaggcccctctttcagtggagtaaatggaagaagagaatgggcagctcgatgtccgctgccacagctagaagacccgtgttcgacgacaaggaagatgtcaatttcgatcattttcagatcctgcgggcaatcggcaaaggctcctttggaaaagtatgcattgtgcaaaaacgtgatacagagaaaatgtacgcgatgaaatatatgaataaacagcagtgcatcgagagggacgaagttcgaaatgtgtttcgggagctggagatcctgcaagagatcgaacacgtttttctagtcaacttgtggtactcatttcaagatgaggaagatatgtttatggtggtagacttgctgctcgggggagacctgcgttaccatttacagcaaaacgttcagttttcggaggatactgttaggctgtacatctgcgaaatggctctggcattagactatctgcggggtcagcatatcattcatcgtgatgtcaagcccgataacattcttctggacgagcgaggccatgctcacttgactgattttaatatcgccacaatcatcaaggacggagaacgagccaccgccttagctggaaccaagccctatatggctcctgaaatctttcattcctttgtgaatggaggtactggctattcattcgaggtcgattggtggagcgtgggagtgatggcttacgagctcttacggggatggagaccctacgacatccactcctccaatgctgtcgaaagtctggtgcagctgttcagcacggtgtcagtgcagtatgtacctacctggtcaaaagagatggtcgctttacttagaaagttgctgaccgtgaatccagagcatcgcctctctagtcttcaagatgtccaggcagccccagctctggccggagtactttgggaccatttatccgaaaagagagtggagcccggattcgtgcccaacaaagggaggttgcattgtgaccccaccttcgagttagaagagatgattctagagtccagaccgctccataagaagaagaagcggttggctaagaacaagagccgtgacaactccagagactcgtcccagtccgaaaacgattacttgcaggattgtctggacgctatccagcaggactttgtgatcttcaaccgtgaaaaactgaaacggtcacaggacctcccgagggagcctctgccagccccagagtcacgggacgccgcagagcccgtagaggatgaggcggaacgcagcgcgctcccaatgtgtggtcctatctgtcccagtgccggatccggatag

SEQ ID NO: 250492 - DNA, 2086 bp, Artificial Sequence
  derived and/or modified sequence
acggcgggcgctgccggccccgagcgctcccgctaccactgccgctcccggccctgccggccggccatgccccgagttccggctgccgcgcgcacccagacccggcgatgaggagtggcgccgagcgcaggggcagcagcgccgcggcgtccccgggctcgccgccccccggccgcgcgcgccccgccggctccgacgcgccctcggccctgccgccgcccgctgctggccagccccgggcccgggactcgggcgatgtccgctcgcagccgcgccccctgtttcagtggagcaagtggaagaagaggatgggctcgtccatgtcggcggccaccgcgcggaggccggtgtttgacgacaaggaggacgtgaacttcgaccacttccagatccttcgggccattgggaagggcagctttggcaaggtgtgcattgtgcagaagcgggacacggagaagatgtacgccatgaagtacatgaacaagcagcagtgcatcgagcgcgacgaggtccgcaacgtcttccgggagctggagatcctgcaggagatcgagcacgtcttcctggtgaacctctggtactccttccaggacgaggaggacatgttcatggtcgtggacctgctactgggcggggacctgcgctaccacctgcagcagaacgtgcagttctccgaggacacggtgaggctgtacatctgcgagatggcactggctctggactacctgcgcggccagcacatcatccacagagatgtcaagcctgacaacattctcctggatgagagaggacatgcacacctgaccgacttcaacattgccaccatcatcaaggacggggagcgggcgacggcattagcaggcaccaagccgtacatggctccggagatcttccactcttttgtcaacggcgggaccggctactccttcgaggtggactggtggtcggtgggggtgatggcctatgagctgctgcgaggatggaggccctatgacatccactccagcaacgccgtggagtccctggtgcagctgttcagcaccgtgagcgtccagtatgtccccacgtggtccaaggagatggtggccttgctgcggaagctcctcactgtgaaccccgagcaccggctctccagcctccaggacgtgcaggcagccccggcgctggccggcgtgctgtgggaccacctgagcgagaagagggtggagccgggcttcgtgcccaacaaaggccgtctgcactgcgaccccacctttgagctggaggagatgatcctggagtccaggcccctgcacaagaagaagaagcgtctggccaagaacaagtcccgggacaacagcagggacagctcccagtccgagaatgactatcttcaagactgcctcgatgccatccagcaagacttcgtgatttttaacagagaaaagctgaagaggagccaggacctcccgagggagcctctccccgcccctgagtccagggatgctgcggagcctgtggaggacgaggcggaacgctccgccctgcccatgtgcggccccatttgcccctcggccgggagcggctaggccgggacgcccgtggtcctcaccccttgagctgctttggagactcggctgccagagggagggccatgggccgaggcctggcattcacgttcccacccagcctggctggcggtgcccacagtgccccggacacatttcacacctcaggctcgtggtggtgcaggggacaagaggctgtgggtgcaggggacacctgtggagggcatttcccgtgggcccccgagacccgcctagatggaggaagcgctgctgggcgccctcttaccgctcacggggagctggggccatggatgggacaggagtctttgtccctgctcagcccggaggctgtgcacggccctcgtcacaaggtgacccttgcagcacaggccgcgggtgccccaggctcggctcaggtcttggaggtcaagggcatgggttggggtagtgggtggggaggtgaatgttttctagagattcaaactgctccagcaatttctgtagttttcacctctgagaattacaatgtgagaaccgct

SEQ ID NO: 250493 - protein, 322 aa, Artificial Sequence
  derived and/or modified sequence
MGFDVLLDQVGGMGRFQICLIAFFCITNILLFPNIVLENFTAFTPSHRCWVPLLDNDTVSDNDTGTLSKDDLLRISIPLDSNLRPQKCQRFIHPQWQLLHLNGTFPNTNEPDTEPCVDGWVYDRSSFLSTIVTEWDLVCESQSLKSMVQSLFMAGSLLGGLIYGHLSDRVGRKIICKLCFLQLAISNTCAAFAPTFLVYCILRFLAGFSTMTILGNTFILSLEWTLPRSRSMTIMVLLCSYSVGQMLLGGLAFAIQDWHILQLTVSTPIIVLFLSSWYEQSPHSLPVSEAMVDIERKILTPGICSVSGLVLSHDVHSTYCVT

SEQ ID NO: 250494 - DNA, 969 bp, Artificial Sequence
  derived and/or modified sequence
atggggttcgatgtgctcctggatcaggttggggggatggggcgctttcagatctgcttaattgccttcttctgcattacgaatattctattgtttcctaatattgttctggaaaactttactgctttcacgccctcacatcgctgctgggtgcctctgcttgacaacgatactgttagcgacaacgatacgggaacacttagcaaagatgaccttctcagaatcagcattccactggactccaacctccgccctcagaagtgtcagcgcttcattcaccctcagtggcagttactccacctgaatggaacctttccaaacactaacgagcctgatacagaaccatgtgtcgacgggtgggtgtatgaccgctcgtctttcctctctacgattgtcacagagtgggacctggtctgtgaaagccagtcacttaagagcatggtgcagtccttattcatggctggatctctccttggcggtttgatttacggccatctgagcgacagagtgggacgcaaaattatatgcaagctgtgtttcctgcaacttgctatcagcaacacctgcgcggccttcgcccccacttttttggtgtactgcatactgaggtttttggccgggtttagcacaatgacaattctgggtaataccttcattttgtccctggaatggacgcttccccgaagccgcagcatgactatcatggtgctgctttgttcatattcagtaggccagatgctgctgggtggcctggcattcgctatacaggactggcacatcttgcagttaactgtgtccacgccaataatcgtcctttttctctccagctggtatgagcaatcccctcactccttgccagtttccgaggcaatggtggacattgaacgtaaaatcctgacccccggcatctgctcagtctctggccttgttttgagccacgatgtacacagcacctactgtgtgacctag

SEQ ID NO: 250495 - DNA, 969 bp, Artificial Sequence
  derived and/or modified sequence
atgggctttgatgtgctgctggaccaggtgggcggcatgggccgcttccagatctgcctgattgccttcttctgcatcaccaacatcctgctcttccccaacatcgtgctggagaacttcaccgccttcacccccagccaccgctgctgggtgcccctgctggacaatgacacagtgtctgacaatgacaccggcaccctgagcaaggatgacctgctgcgcatcagcatccccctggacagcaacctgcggccccagaagtgccagcgcttcatccacccccagtggcagctgctgcacctgaatggcaccttccccaacaccaatgaaccagacacagagccctgtgtggatggctgggtgtatgacaggagcagcttcctgagcaccatcgtgacagagtgggacctggtgtgtgagagccagagcctgaagtccatggtgcagagcctcttcatggccggcagcctgctgggcggcctcatctacggccacctgagtgacagagtgggcaggaagatcatctgcaagctgtgcttcctgcagctggccatcagcaacacctgtgccgcctttgcccccaccttcctggtgtactgcatcctgcgcttcctggccggcttcagcaccatgaccatcctgggcaacaccttcatcctgagcctggagtggaccctgcccaggagccgctccatgaccatcatggtgctgctgtgcagctacagcgtgggccagatgctgctgggcggcctggcctttgccatccaggactggcacatcctgcagctgactgtgtccacccccatcatcgtgctcttcctgagctcctggtatgagcagagcccccacagcctgcctgtgtctgaggccatggtggacatcgagaggaagatcctgaccccaggcatctgcagcgtgtctggcctggtgctgagccatgatgtgcacagcacctactgtgtgacctag

SEQ ID NO: 250496 - DNA, 969 bp, Artificial Sequence
  derived and/or modified sequence
atgggcttcgacgtgctgctggaccaggtgggcggcatgggccggtttcaaatttgcctgatcgccttcttttgtattacgaacatcctcctgtttccaaacattgtgctggagaactttacagcgtttaccccctcacaccgctgttgggttcctttactggataacgataccgtgagcgataatgataccgggactctgagtaaggacgacctactgcggatctcaatccccctggactcaaacctccgaccccagaaatgtcaacggttcatccacccacagtggcagttgttgcacctgaacggcactttccccaatacgaatgagcctgatacggagccatgcgtggatgggtgggtctatgacagaagctcctttttgagcactattgtcaccgagtgggatctcgtgtgtgagtctcagtctctcaagtcaatggtacagtcactgtttatggcgggcagtctcttgggtggtttgatatacggccatctgtctgatcgcgtcgggcgcaagataatctgcaaactatgtttccttcagttggcaatcagtaacacatgtgccgcgttcgcgcctactttcttggtatattgcatcctgcggttcttggcaggttttagcaccatgaccattctcggcaacacttttatcctcagcctcgagtggaccttgcccagatctaggagtatgacgattatggtgctcctgtgttcttatagcgtgggccagatgctcctcggcggattagcctttgcgattcaggattggcacatcctgcaacttaccgtttcgacaccaatcatcgtcctcttcctgtcatcctggtacgagcagtccccccattcgcttcctgtcagtgaagctatggtagacattgagcgtaagatcctgacgcctggaatctgttccgtgagcggactggttctgagccatgatgtccattcgacttactgcgtgacctag

SEQ ID NO: 250497 - DNA, 969 bp, Artificial Sequence
  derived and/or modified sequence
atgggctttgacgtgttgctcgaccaagtggggggaatgggtaggttccagatttgtctgattgctttcttttgtattaccaatattttgctgtttccaaatatagttctagaaaatttcaccgcttttacaccaagtcaccggtgttgggtccccttgctcgataatgataccgtctccgataacgacacaggcaccttatcaaaggatgatctcctgaggatctcaatccctttggatagtaacctgaggcctcagaagtgccagagattcatacaccctcagtggcagctactccatctgaatggcacatttccaaacaccaatgagcccgacactgagccctgtgtcgacggctgggtgtacgatcgaagtagctttttgagcactatcgtgacagagtgggacctggtgtgtgaatctcagtcgctcaaatctatggtgcaaagcctgttcatggccggaagccttctgggaggcctcatctacggtcatctgtccgacagggtcggcagaaaaattatatgtaaactgtgcttcctacagctggccatctccaacacttgcgcggctttcgctccgacattcctggtttactgtatcttgcggtttcttgcagggttctccacaatgactatcctgggcaatacatttatcctatctcttgagtggaccctccctagaagtaggagtatgaccattatggtcctcttatgcagctactcggtagggcagatgctgctaggcggactggcttttgccatccaggactggcatatcttgcagttgacagtgtctactcccattatcgtgcttttcctcagttcttggtacgaacagtcgccacactccctcccggtctcagaagccatggtggacatcgagcgtaagattctgacccctggcatttgctccgtgtccgggctcgtgctgtcacatgatgtccactctacgtattgtgtgacatag

SEQ ID NO: 250498 - DNA, 1663 bp, Artificial Sequence
  derived and/or modified sequence
gcaattcactttggattttctaatatcccatttctaagaagaatggcagactattgaacaggtgtattttaggtcacgtggggactgcatccacctgaaaatccaccgttgacttatcaggaaactcagagatcaggatctttcacagagtagtcttttaagaagattcagttgtcaacagctagcagtctctttgccaaataattatatctgtgacttctgaaactatttggctgcctaaagttaaaggacttggggaaagtccttccactgctcttctgcagtagtgtcacaccactcagtgcagggcccaccaagaagaaagcagtgtcaggatccacatggcactatggtaactttgtgaaaggggacattttctccctctgaacttctcttcataaagtcattgtgcttcctcttggggatcacctgttcagtctcaatgggctttgatgtgctcctggatcaagtgggtggcatggggagattccagatttgtctgatagctttcttttgcatcaccaacatcctactgttccctaatattgtgttggagaacttcactgcattcacccctagtcatcgctgctgggtccccctcctggacaatgacactgtgtctgacaatgataccgggaccctcagcaaggatgacctcctgagaatctccatcccactggactcaaacctgaggccacagaagtgtcagcgctttatccatccccagtggcagctccttcacctgaacgggaccttccccaacacaaatgagccagacacggagccctgtgtggatggctgggtgtacgacagaagctctttcctctccaccatcgtgactgagtgggacctggtatgtgaatctcagtcactaaaatcaatggttcaatccctatttatggctgggtcacttctgggaggtctaatatatggccatctttcagacagggttggacggaagatcatatgcaaattgtgtttcctccagctggccatctctaacacctgtgcggccttcgctcccaccttccttgtttactgcatactgcgcttcttggcagggttctccaccatgactattttgggaaacacttttattctcagcttagagtggacattgccccggtcacgatctatgacaataatggtgctattatgttcctacagtgttgggcagatgctcctaggagggctggcttttgccattcaggactggcacatattgcaactgactgtgtctacacccataattgtcctcttcttgtcctcttggtatgaacaatctccacattctttgcctgtaagcgaggctatggtagacatagaaaggaaaattctgacacctgggatctgttcggtctctggcctagtcctgagccatgatgtccatagtacctattgtgtcacctgagaagcaaacaatggaataggatgacactatatgtggggaggctggcactttgcattcattattttagacatggaattatcatgaaattatttttcttaatagaaaaaatacccacttatttttgaagcaaatgtattatttatctaacttttggaatattatgtgatggagataatttgggggcttttgtcattgtaactgagattgaatataaggaaaacacaataaatttatctacataactatttaaaa

SEQ ID NO: 250499 - DNA, 969 bp, Artificial Sequence
  derived and/or modified sequence
atgggcttcgacgtgctgctggaccaggtgggcggcatgggcagattccagatctgcctgatcgccttcttctgcatcaccaacatcctgctgttccccaacatcgtgctggagaacttcaccgccttcacccccagccacagatgctgggtgcccctgctggacaacgacaccgtgagcgacaacgacaccggcaccctgagcaaggacgacctgctgagaatcagcatccccctggacagcaacctgagaccccagaagtgccagagattcatccacccccagtggcagctgctgcacctgaacggcaccttccccaacaccaacgagcccgacaccgagccctgcgtggacggctgggtgtacgacagaagcagcttcctgagcaccatcgtgaccgagtgggacctggtgtgcgagagccagagcctgaagagcatggtgcagagcctgttcatggccggcagcctgctgggcggcctgatctacggccacctgagcgacagagtgggcagaaagatcatctgcaagctgtgcttcctgcagctggccatcagcaacacctgcgccgccttcgcccccaccttcctggtgtactgcatcctgagattcctggccggcttcagcaccatgaccatcctgggcaacaccttcatcctgagcctggagtggaccctgcccagaagcagaagcatgaccatcatggtgctgctgtgcagctacagcgtgggccagatgctgctgggcggcctggccttcgccatccaggactggcacatcctgcagctgaccgtgagcacccccatcatcgtgctgttcctgagcagctggtacgagcagagcccccacagcctgcccgtgagcgaggccatggtggacatcgagagaaagatcctgacccccggcatctgcagcgtgagcggcctggtgctgagccacgacgtgcacagcacctactgcgtgacctag

SEQ ID NO: 250500 - DNA, 1794 bp, Artificial Sequence
  derived and/or modified sequence
atggtgcccgaggagagaagagtgggcctgagcagcgacgagaccagcagcgacagcctgaagagctggcacagcatctgcgtgctggacagcaaggagcagcccctggcctgccagcagaagcagagacagttcgtgaagcccgtgaccgagagcgagcagcccaccgtgctggagctgctgctggccgagctgagaaccctgttcagcgccgtgctgcaggacagcagccccgccgcctggagatacctgcacgccgtgctgggcctgctgcccccctacagagagctgctggtgggccacctggacctgctgcccttcctggagcagctgtactgctgggccccctgggtgcagacccacctgcacctggacctgctgggcgccatcgtgcaggccttcccccccgacagcagcctgctggacagcgccagccacgccgactgctgcccccagaagagaagactgcaccacagacccccctgccccgcctgccccttcgtgcaggcccagtggagcagacagcaggtgaaggaggagctggccacctggctgagacccctgaccctgcccgagctgcagagatgcctgggcatcgtgggcgcccaggtggccctggaggaggccgtgtggctggacggcctgagcctgctgcccctggccctggccgccgacatccccgtgagatacgagagcagcgacaccgacaacgccgaggtggagcccgtgggcagaaaggagaccagaagccagctggactacgaggtgcccagagagaaggccttccagaagagcagcaccggcttcagccccgagaccagcttcctggacagccaggtgatgaccgccctgaagatggagagatacctgaagaagatccacttcctgtacctgaacgtggcccccagcagatacttcagaccctacagcctgatggtggtgccccccgacaaggtgaaccccgagcactacatcttcagccccttcggcatcctgcacgtgcaccccgtggagggcagcgagaccatgaccctgggcacctggcaccaccactgcgtgctgtggcagcagctgcagttcatccccttcttcaagtactgcctgctgagaaagagcttcacctgctggaagaagaacgtgagactgcagggcctgcacagactgcagaagttcctggagaaccacctgctgctggccgtgccccacttcggcgccggcctgctgcacatcagcagactgctgcaggagctgcacagcgtgagctggctgccccaggagctggacagatgctacgagctgctggacctgcagaccgccctggccgaggagaagcacaaggccctgagactgctgcacagatgcctgaacctgtgcaccagcatcctgagactggtgcacgaggacacctaccacatgcagcagtgcctgcaggagagagtgcagaactgcgacagaatcagaaccggccagggcagcatctacctgcagagagtgcagcacaagcagctggagcagaagctgaagcaggccgaggcctggtggctgcagctgggcaagttcgccagactggtggactacatgatctgccagagcctgatcagcgtgctggaggagcagatcaccagcttcgtggccaacatcctgcaggcccccagacagaagcccttcctgagcagccagctggtgttcgacgaccacggccagctgagccacgtgccctgcgtggagaacatgatccagaccctgaccggcggcctgcagagcgtgaagaccagcgccctgcaggtgttctag

SEQ ID NO: 250501 - DNA, 1794 bp, Artificial Sequence
  derived and/or modified sequence
atggtccccgaagaaagacgcgtgggactcagtagcgatgaaacatcatcagactcactgaagtcttggcacagtatttgtgttctggatagtaaagaacaacccctggcctgccagcagaagcagcgccagtttgtgaaacctgtgacagaaagcgaacaacccaccgtgcttgaactgctgctggctgagttgaggacgttatttagcgccgtcctgcaggactcgtccccagctgcctggagatatctgcatgccgtcttagggctgctgcccccttatcgcgaacttttggttggtcaccttgatcttctcccgttcctcgagcagttatactgctgggccccatgggtacagacacatttgcacctggacttgctgggcgctatcgtgcaggccttcccacctgatagttcacttctcgattctgcctcccatgcagattgctgtccacaaaagcggcgtcttcaccatagacccccgtgtcctgcatgtccatttgttcaggcgcaatggtcaaggcagcaggtaaaagaagagctggcaacctggctgaggcctctgacattgccagagttgcagagatgcttgggtatagtgggcgctcaggttgcactcgaagaggccgtgtggctcgacggactctctctgctgcccctggccttagctgctgacatccccgtgcgctacgagtcgagcgatacagacaacgccgaagttgagcctgtcggaaggaaagaaacgagaagccagctcgattacgaagtcccccgagaaaaggctttccaaaagtcctccactggctttagcccagaaacaagctttctggatagccaggttatgacggccctcaagatggagaggtatctgaaaaagattcactttctctatctgaacgtggctccttccaggtactttaggccttatagtttgatggtggtacctcctgataaggtaaatccagagcattatatattttcaccctttgggatactccatgtgcatcccgtggaggggtcagagaccatgaccctaggcacctggcatcaccactgtgtcctgtggcagcagttgcaatttattcccttcttcaagtactgtttgcttcggaaaagctttacatgttggaaaaagaatgttagactgcagggacttcatcgtcttcagaagttcctggaaaaccacttgctccttgccgtgcctcacttcggagctggtttgttacacattagtaggctactgcaggaactgcatagtgtgagctggctgcctcaagaactcgacagatgttacgaactgctggatttgcaaaccgcccttgccgaagaaaaacacaaggctctaagacttctccaccggtgtcttaacctgtgtacctccatcctgcgtctggtgcatgaagacacctaccacatgcagcagtgtttacaagagagggttcagaactgcgaccggatcaggaccggccagggatctatttaccttcagcgagtgcagcacaagcagctggagcaaaagctgaagcaagcagaggcctggtggctacagcttggaaagtttgcccggctagttgactatatgatttgtcagtctctcatctccgttttagaggaacagatcaccagctttgtggcaaacattctgcaagcccccagacagaagccgttcctgagctcccagctggtgtttgacgaccacggtcagttgtcccatgtcccttgtgtcgagaacatgattcagaccctgaccggtgggcttcaaagtgtcaaaaccagcgccctgcaggtattttag

SEQ ID NO: 250502 - DNA, 1794 bp, Artificial Sequence
  derived and/or modified sequence
atggtgcctgaggagcggcgggtgggcctgagcagtgatgagaccagcagtgacagcctgaagtcctggcacagcatctgtgtgctggacagcaaggagcagcccctggcctgccagcagaagcagaggcagtttgtgaagcctgtgacagagagcgagcagcccaccgtgctggagctgctgctggccgagctgcggaccctcttctctgctgtgctgcaggacagcagccctgctgcctggagatacctgcatgctgtgctgggcctgctgcccccctaccgggagctgctggtgggccacctggacctgctgcccttcctggagcagctgtactgctgggccccctgggtgcagacccacctgcacctggacctgctgggcgccatcgtgcaggccttccccccagacagcagcctgctggacagcgccagccatgctgactgctgcccccagaagaggcggctgcaccaccggcccccctgcccagcctgcccctttgtgcaggcccagtggagccggcagcaggtgaaggaggagctggccacctggctgcggcccctgaccctgcctgagctgcagcgctgcctgggcatcgtgggcgcccaggtggccctggaggaggccgtgtggctggatggcctgagcctgctgcccctggccctggccgctgacatccctgtgcgctatgagagcagtgacacagacaatgctgaggtggagcctgtgggcaggaaggagaccaggagccagctggactatgaggtgccccgggagaaggccttccagaagagcagcacaggcttcagccctgagaccagcttcctggacagccaggtgatgacagccctgaagatggagcgctacctgaagaagatccacttcctgtacctgaatgtggcccccagccgctacttccggccctacagcctgatggtggtgcccccagacaaggtgaaccctgagcactacatcttcagccccttcggcatcctgcacgtgcaccctgtggagggcagcgagaccatgaccctgggcacctggcaccaccactgtgtgctgtggcagcagctgcagttcatccccttcttcaagtactgcctgctgaggaagagcttcacctgctggaagaagaatgtgcggctgcagggcctgcaccggctgcagaagttcctggagaaccacctgctgctggccgtgccccactttggagctggcctgctgcacatcagccggctgctgcaggagctgcacagcgtgtcctggctgccccaggagctggaccgctgctatgagctgctggacctgcagacagccctggccgaggagaagcacaaggccctgcggctgctgcaccgctgcctgaacctgtgcaccagcatcctgcggctggtgcatgaggacacctaccacatgcagcagtgcctgcaggagcgggtgcagaactgtgaccgcatcagaacaggccagggcagcatctacctgcagagggtgcagcacaagcagctggagcagaagctgaagcaggccgaggcctggtggctgcagctgggcaagtttgcccggctggtggactacatgatctgccagagcctcatctctgtgctggaggagcagatcaccagctttgtggccaacatcctgcaggccccccggcagaagcccttcctgagcagccagctggtgtttgatgaccacggccagctgagccacgtgccctgtgtggagaacatgatccagaccctgactggaggcctgcagagcgtgaagaccagcgccctgcaggtgttctag

SEQ ID NO: 250503 - DNA, 1794 bp, Artificial Sequence
  derived and/or modified sequence
atggtgcccgaggagcggcgggtgggcctgagcagcgacgagacctcgagtgactcgctgaagtcctggcactctatttgcgtgcttgatagtaaagagcagcctctcgcttgtcaacagaagcaacgccagttcgttaaacctgtgacagaaagcgagcaaccaaccgttctcgagttgctcctggcagagctgagaacacttttctccgcagtgcttcaggactccagtccggctgcttggcgatacctgcacgcggtgctggggttgctgccaccctatagagagctattagtgggccacctagacctgttgccttttctagagcagctttattgctgggcaccgtgggttcagactcatctccaccttgacttgctgggagccatagtgcaagcttttccgcctgatagcagtctgctggacagcgctagtcacgcagactgctgtccccagaagcgacgactgcatcacagacccccctgccccgcttgcccctttgtgcaagcccagtggtccagacagcaggtaaaagaggagctggccacatggttacggcccctgactctgcccgaactgcagcgttgcttgggcatagtgggagctcaagtggctctggaggaggccgtgtggttagacggactctctcttctgccacttgccttagctgccgacattcctgtgagatacgagagtagtgacacggacaacgcagaggtcgagcccgtcggccgcaaggagacaaggagccagctagattatgaggtccctagagagaaggcttttcagaaatctagcacagggttctccccggagacctcttttttagatagccaggtgatgaccgctcttaaaatggaaaggtatctcaaaaagatccacttcctgtacttgaatgtggccccttctagatattttcggccgtacagccttatggtagtgcctcctgacaaggtcaatcccgagcactatattttttctcccttcgggatcttgcacgtgcaccctgtggaaggctctgaaactatgactctcggaacctggcatcaccactgcgtgttgtggcagcagcttcagtttataccgttctttaaatactgcctgctgaggaaatcattcacatgctggaaaaagaacgtgcgactgcaagggctccaccgtcttcagaaatttttagagaatcaccttctgctcgctgtcccccattttggtgccggactcctgcacatttcgcgcctcctgcaggaattacacagcgtctcatggctgccccaagagctggataggtgctacgagctgttggaccttcaaaccgccctggccgaggaaaagcacaaggcactgcggctgcttcaccggtgtctcaatctctgcacttcgatacttcgcctggtgcatgaggacacatatcacatgcagcagtgtctgcaggagagggtccagaactgtgatcggatccgcactggccaggggtctatctatctgcaaagagtgcagcacaagcaattagagcagaagctgaaacaagccgaagcttggtggcttcagctcggcaagttcgctcgcctggttgattacatgatctgccagtcgctgatcagcgttctcgaagagcaaattacaagctttgtggccaatattctgcaggcaccccgtcaaaaacctttcctgtctagccagctagtttttgatgatcacggccagcttagccatgttccctgcgtggagaacatgatacagacacttactgggggcctgcaatctgtgaaaacgtctgctcttcaagtcttctag

SEQ ID NO: 250504 - DNA, 1794 bp, Artificial Sequence
  derived and/or modified sequence
atggttcctgaggagcgcagggtcgggctaagttccgatgagacttcgtccgatagtctgaagagttggcatagcatttgtgtgttggactccaaggaacagccacttgcttgccaacaaaagcaacgacagttcgtgaaacccgtgacagagtccgaacaacccacagtactcgagcttctgcttgccgaactccgcactctgttctccgccgtcctccaggactcttcacctgctgcctggcggtacctccacgctgtcctgggtctactaccaccttaccgggaactgctcgtgggtcacttagacctactccccttcttggagcagctctactgttgggccccatgggttcagacgcatctccacctggacctgttgggggcaattgtgcaggcattcccaccagactctagcctcctggattccgcttcccatgccgattgctgccctcaaaagcggcgactgcaccaccggcctccttgccctgcatgcccttttgtgcaggcccagtggtcaaggcagcaggtcaaagaggaactcgcaacatggctccggcctcttaccttaccggagcttcagagatgtttgggaatagtcggtgcacaggtcgccttggaagaagccgtgtggttggatggcctttctctgctaccgctggccctggccgctgacatcccagtgcgatatgaatctagtgacactgacaacgccgaagtggaacctgtgggcaggaaagaaactcggagccagctcgattacgaagtgcccagggagaaagctttccagaagtccagcacagggttcagtccggaaacttccttccttgatagccaggtcatgaccgccctcaaaatggagaggtacctgaaaaagatccacttcctttatcttaacgtggcccctagccgatactttagaccctactctctgatggtcgtccccccagacaaagtcaatccggagcactatatctttagccccttcggaattctgcatgtgcatcccgtggagggctctgagactatgacactggggacttggcaccaccactgtgttttatggcagcagttacagttcattccgttcttcaaatattgtttgctgaggaagtcatttacgtgctggaagaaaaacgtcaggttgcaaggactgcatcgactccagaaatttctggagaaccatctgctgctggcagtgccacacttcggggctggcttattacacatcagcaggctgctgcaggagttgcactccgtgtcctggctcccgcaggagcttgaccgctgttacgaattactcgatctgcagacagctcttgccgaagaaaaacataaggccctgaggctgctccaccggtgcctgaacttgtgcacaagtattctgcggttagtgcacgaggatacctatcatatgcagcagtgcttgcaagaacgggtccaaaactgcgaccgaatcaggaccggtcagggcagtatttacctccagcgagtccagcacaagcagttagagcagaagcttaaacaggcagaggcatggtggctgcagctgggtaaattcgcgcgtttagtcgattacatgatatgccagtctctgatttcggttttggaagaacagatcacatccttcgttgcaaatatacttcaggcacctcggcagaagccctttctttcaagtcaattagtcttcgatgaccatggtcaactttctcatgtgccctgtgttgaaaacatgatacagactcttactggtgggctccagagcgttaaaaccagcgcactgcaggtgttctag

SEQ ID NO: 250505 - DNA, 7035 bp, Artificial Sequence
  derived and/or modified sequence
atgatcccctggagcatcttcctgctgcacgtgctgctgttcagcctgcaggagtacatctgcgccagcagcatcctgatgggcaccagcaagaacggcttcaacgagaacagacagaagagagccctgctggccgcccagttcgaggccaccagccccagatacttcttccacgacgccatcaactggggcgagagcaagatcaagggcagctgcccctacgagtgcctgaacggcgccttctgcagcaagaccggcacctgcgactgccagatcttccaggccctgggcaccagatgccagatcatccccaacatgggcaacggcagagacggcatctgcaagacctggggccagtaccacttcgagaccttcgacggcatctactactacttccccggcaactgcagctacatcttcgccaaggactgcggcgacctggagcccagatacaccgtgtgggtgcacaacagccccaagtgcctgggcagcgtgtacagctgctacagaagcatcagcctgttcttcagcaaccaggaggagatcagaatctacggccacgagatcaagaagaacggcatcagcctgaccctgccccagaccatcggccagatcttcatcgagaagctggccgactacatcctggtgaagaccaccttcggcttcagcctggcctgggacggcatcagcggcatctacctgaagctgagcgaggaccacaagggcaagagctgcggcctgtgcggcaactacaacgacatccagagcgacgacttcatcatcctgcaggaggactacaccgaggacatcgccatgttcgccaacagctggagcgtgcagacccccgacgacaccaagtgcgtgctgacccccagcgacttccccaacccctgcagcagcggcatgcccgccttcgaggccatcttcttcaagtgccagatcctgctgcagttccccttcctgagctgccacgagtacatcgacccctacctgtacatcgccagctgcgtgaacgacctgtgcaagaccgacgacgacgagacctactgcagagccgccaccgagtacgccagagcctgcagccacgccggctaccccatccaggactggagagacgacttccccgcctgcaccgacaagtgcgacgacagcttcgtgcacagagactgcatcagctgctgcccccccacctgcaccttcgagaagcagtgcctgggcagcaacctgcactgcctggacggctgctactgccccgacggcctggtgatggacaacggcacctgcatcagcctggagaactgcccctgcggcttccacggcctggcctacagcgtgggcagcaagatcgagcaggagtgcaccgagtgcgtgtgcgtgggcggcgtgtggaactgcaccgagcaggactgccccgtgcagtgcagcgtggtgggcgacagccacttcaccaccttcgacggcagacactacagcttcatcggcatgtgccagtacatcctggtgaagggcaccggcaaggacaagttcaccatcaccctgcagaaggccccctgcgagcagaacctgggcctggtgtgcctgcagagcatcaccctgatcctggaggacgacttcaacaagcaggtgaccctgggcagaggcggccagatcctgaccagccccaaccagggcttcaacctgaacggcatcgtggagatccagaccctgagcagcctgttcatcctgctgaagaccaccttcggcctgaagatcctgttcgccatcgacggcgagagaatctacatccagctgaccagcgcctggaagagaagaaccctgggcctgtgcggcaccttcaacggcaacatcagagacgacttcctgagccccagcggcatgatcgagggcaccccccagctgcacgccaacgcctggagagtgagcagcacctgcttcgcccccgtgcacgtgcccgtggtggacccctgcaacatcaaccagcagaacatcggctacgccgcccactgcgacgtgatccaccaggagctgttcgccccctgccacatctacatcagccccggcctgtactaccagctgtgcagacacgacgcctgcaagtgcggcagcagctgcctgtgcaacgccctggcccactacgcctacctgtgcggccagcacggcgtgcccatcgacttcagaacccagatcagcttctgcgccgtggtgtgccagaagggcatgctgtaccaccactgcagcagcttctgcctgcacagctgcatcagcctgagcagccccgagcagtgcagcgacgactgcgccgagggctgcaactgccccgagggcaagttctacgaggacaccctgaacttctgcgtgcccatcttccactgcagatgccactacagaggcagcgtgtaccagcccggcgagctgatccccacccccagcggcctgtgccagtgcagcaacggcaccgtgaagtgcgacgagctggccacccccagcgccgtgcacatctgccccgagggcaaggagtacttcgactgcagattccccgaccccgagctgcccgccggcggcgtgaactgcgagaccacctgcgccaacctggccatgaacttcacctgcacccccagcagcccctgcatcagcggctgcgtgtgcgcccccggcatggccgagcacagaggcaagtgctacgtgcccgagagctgcccctgcatctggaaggactgggagtacctgagcggcgaggtgatcgccaccccctgctacacctgcgtgtgcagaagaggcatgttcaactgcacctactacccctgccccgccgtgtgcaccatctacggcgacagacactactacagcttcgacggcctggagtacgactacatcagcgactgccaggtgttcctgatcaagagcgccgacgacagcgacatcagcgtgatcgcccagaacaagaagtgcttcgacaacgacatcgtgtgcagcaagagcgtgctgatcagcgtgggcgacaccgagatctacctgaacgacaccccctacaagcagaagcagagcggcttcttcctggagaacaagagcacctaccagctgtggaaggccggctactacatcgtggtgtacttccccgagaaggacatcaccatcctgtgggacagaaagaccaccatccacatcaaggtgggcccccagtggaagaacaagctgagcggcctgtgcggcaacttcgacaagtgcaccagcaacgacatgaccaccagcaacaacctggaggtgagaaacgccagagtgttcggcgacagctgggccctgggccagtgcgagagccccgacgagaccatcaagccctgcgaggcccaccagaacaagttcccctacgccaagaaggagtgcagcatcctgtacagcgacatcttcgccagctgcagaaacgtgatcgacgtgaccagcttcgccaagaactgccacgaggacacctgcaactgcaacctgggcggcgactgcgagtgcctgtgcaccagcatcgccgcctacgcctacaagtgctgccaggagggcatcagcatccactggagaagcagcaccgtgtgcagcctggactgcgagtactacaacgagggcctgggcgagggcccctacatgctggccagctacggccagagcggcctggtgctgggcgccaacatgaccagcagaagcgtgttctgcctgcccagaagcagcgtgcacaccagcctgttcttctacttcatgatcacccccggcctgttcaaggagaaggtgagcagcctggccctggtgagcctggagagcgccgagagacccaactacttcctgtacgtgcacgacaacgacaccctgagcctggagctgtgggaggccaacagcgccttccacagaagagccaccttcttccaccaccagggcctgtggatccccggctacagcgccttcgagctgtacagcaagaagggcttcttcatcatcttcaccgacagcagcgtgaaggccagcaagtacgacgacagcgaggagttcaagcacagcagcagcttcagcatcgaggagatccaggccgccgtgccctacagaaagatgtgcgagtggagatacgagccctgcgccaccccctgcttcaagacctgcagcgaccccgaggccctggcctgcaagttcctgccccccgtggagggctgcctgccctactgccccaagaacatgatcctggacgaggtgaccctgaagtgcgtgtaccccagagactgcatccccgtgatccccaccgagcccaccctgatgccccccgccaagcccaccgtgcccatgttcaccgtgtgggagatgatcacccccagcgacatcaccgtgttcgacatgctgacccccaccaccggcctggagtgcgagccccagaagttcgaccccgtgtacgactgcagccagtacatctgcctgaacatggagtggcagctgtacaactggagcctgaactgccccaaggacgtggagatgcccgactgcggcttcagaggcagacccgtgcaggtgaacagcgacatctgctgccccgagtgggagtgcccctgcagatgcagcatgctgagcgagctgagcatcatcaccttcgacggcaacaacgccgccctgtacagcatggccagctacatcctggtgagaatccccggcgagatcatcgtggcccacatcgagaagtgcagcatgaaccagaacggcaacagcctgaagaagctggcccccagcggcagaatcagcggcctgtgcttcaagaagctgaacgtgaccacccccatccacaagatcatcgtgaacagactggccagaaaggtggaggtggacagcatcgtggtgcccctgcccttcagcagccaggagctgagcatcgaggacagcggcagcatgtacgtgatcaccacccccgccggcctgatcatcaagtggagccacctgaccggcatcatcgacatccacttcggcttcagattcaacctgagcagctacaccgagggcctgtgcggcatctgcaacgaggaccccgacgacgacctgagaatgcagaacggcaccatcatcaccaacatggaggacatcggcctgttcatcgagagctgggagatcgagaagagcttcgaggtgaccatgagaagacccgtgagaaactgcaccgagcacgactgcagccagtgcatcgacctgctgaacagaagaatcttcatcccctgccacgacaaggtgagccccgaggacttctgcgagaagatgtggatcaactacacctacttctggaactacgagtgcgacgccctgagcgcctacgtggccctgtgcaacaagttcgacatctgcatccagtggagaacccccgactactgcagcctgagctgccccgagggcaaggagtaccagccctgcgtgagaccctgcgaggccagaacctgcctgaaccagtggttctacggccacaccagctgcctgaacctgagagaggactgcgtgtgcaaggtgggcaccatcctgcacagaccccacagcgcccagtgcatccccgagaaggagtgcgcctgcaccgacagcgaggaccagcccagaaccgccggcgagatctggaacggcggcatcgacgagtgcaccctgtacaagtgcctggagaacggcagcatcatccccatcgagcccgactgcgacgaggagcccacccccgtgtgcgagagagaggccgaggtggtgatgggcatcatcgacaagtggacctgctgcagcaaggaggtgtgcggctgcgacaccaccctgtgcgagaccagcatccccacctgcaccaacagccagaagctgatcgtgggccacagccccctgagctgctgcccccagtacaagtgcgagtgcgaccccctgaagtgccccagcatcagcacccccgagtgcagagaggaccagttcatgatccaggtgagacaggaggagccctgctgcttcagccccttctgcgtgtgcgagagctgcaccaagcccgtgcccctgtgccacgacggcgagttcctgaccgtggacctgaacagcacccacttctgctgcccccagtactactgcgtgtgcgagcccaacctgtgccccatgcccctgctgaactgcgccgaggacatgaacctggtgaaggagaacgtgagcggccagtgctgccccacctggcactgcgagtgcaactgcgagaacctgatcatgcccacctgcgaggtgggcgagttcaccgccatcgaccacaacttccagagcgactgcggctgcatccagtacctgtgcgagaaggacgacgtgtgcgtgttccaggaggtgagcgtgctgaaccccggccagagcatgatcaagtacctggaggaggacttctgctacgccatcgagtgcctggaggagaaggacaaccacaccggcttccacaccctgaacttcaccctggtgaactgcagcaagaagtgcgacgtgcaccaggtgtacacccccagccccagcgactacggctgctgcggcacctgcaagaacgtgagctgcaagttccacatggagaacggcaccagcgtggtgtacgccgtgggcagcacctggcactacaactgcaccacctacgagtgcgtgaagaccgacgagggcgccatcatcctgaactacaccatggtgtgcccccccttcaacgagaccgagtgcaagatgaacgagggcatcgtgaagctgtacaacgagggctgctgcaagatctgcaagagagaggagagaatctgccagaaggtgatcatcaagagcgtgatcagaaagcaggactgcatgagccagagccccatcaacgtggccagctgcgacggcaagtgccccagcgccaccatctacaacatcaacatcgagagccacctgagattctgcaagtgctgcagagagaacggcgtgagaaacctgagcgtgcccctgtactgcagcggcaacggcaccgagatcatgtacaccctgcaggagcccatcgactgcacctgccagtggaactag

SEQ ID NO: 250506 - DNA, 7035 bp, Artificial Sequence
  derived and/or modified sequence
atgattccttggtctattttcttactgcatgttctcctcttctccctgcaggagtacatttgcgcctccagcatactgatgggaacctcaaagaacgggttcaacgagaatagacagaaacgcgcactcctggcggcacagttcgaagccacatcccccagatacttcttccacgatgcaatcaattggggggaatcgaagattaaaggtagttgcccttacgagtgcctgaatggggcattttgcagcaagaccgggacatgtgattgtcaaatctttcaggcgctcggcacacgctgtcagataattcccaacatgggtaatggccgggacggcatctgtaagacctggggacagtaccattttgagacctttgatggcatctactactactttcctgggaactgtagttacatctttgctaaggattgcggggacctggaacccaggtatactgtgtgggtacacaactcgccaaagtgtcttggaagcgtgtactcatgttaccgctcgatcagcttgttctttagcaatcaggaagagatccgcatttacgggcatgagattaaaaagaacgggatcagcttgacgcttccccaaactattggtcagatatttattgagaagcttgcagactatattctggtcaagactacttttggcttctccctggcatgggatgggatctcgggaatatacctcaagctgtcagaggaccacaaaggcaagtcctgtgggctttgtggcaactataatgacattcagtccgatgacttcattatactgcaggaagattatactgaagatattgctatgttcgctaatagctggtctgtgcagaccccagatgatactaagtgcgtacttacacctagcgatttcccaaatccctgctccagcggcatgcccgcctttgaggcaatctttttcaagtgccagatactcctgcagtttccattcctgagctgtcacgagtatattgatccctatttgtatatcgcttcttgtgtgaatgatctctgtaaaaccgacgacgatgaaacttattgtcgcgcggccacggagtatgctcgggcgtgctctcacgctggttatccaatccaagattggagggatgacttccctgcctgtacagataaatgcgacgacagtttcgtgcacagggactgtattagttgctgtccaccaacctgtaccttcgagaagcagtgtctcggaagtaacctgcactgtctggacggatgttattgccccgacggcctcgtgatggataacggcacttgtatttccttggagaattgcccttgcggctttcatggactcgcgtatagcgttggatccaagattgaacaggagtgcacagagtgcgtctgcgtgggaggcgtgtggaactgtaccgaacaggactgccctgtccagtgctcggtagtcggagattctcattttacaacttttgacggcaggcattactcattcatcggaatgtgccagtatatcctggtaaagggaaccggaaaagacaagttcactattacactccagaaggcaccgtgcgagcagaaccttgggctggtatgcttgcagagtattacactcatccttgaggacgacttcaataagcaagtgacacttggacgcggcgggcagattctgacatctcccaatcagggttttaatttgaatggaatcgtggaaatccagaccctctcctccctatttatactcttgaaaacaactttcgggttaaagattctgttcgccatcgatggtgaacggatctacatccaattgacaagcgcatggaagagaaggacactcgggctctgtgggacttttaacgggaacatccgagacgatttcctgtctcctagcgggatgattgaaggcaccccccagttacacgccaatgcctggcgggtgagctcgacttgctttgcgccagtgcatgtccccgtggtcgatccatgtaacattaatcagcagaatatcggatatgccgcgcactgcgatgtcatccatcaagagctcttcgctccctgtcatatctacatcagccccgggctttactatcaattgtgtaggcacgatgcttgcaaatgcggctcctcttgtctgtgtaacgccctggcacactacgcctatctttgcggtcagcatggagtgcccatcgatttcagaactcaaatttctttctgtgccgtggtgtgtcagaaaggtatgctatatcatcattgctcaagtttctgtctgcattcttgcatcagcctgtcatctcctgaacagtgcagtgatgattgtgctgaaggctgtaactgtccggagggtaaattctacgaggacaccctcaacttttgcgttcccatttttcactgtagatgccactataggggctctgtttatcaacccggggagcttattcccactccatccgggctttgccagtgctcaaacggcactgttaagtgtgacgaactggcgacccccagcgctgtgcacatctgtcctgaagggaaggaatatttcgactgccgctttcctgatccggagctccccgccggtggtgtaaactgcgagactacgtgtgcaaacctcgcaatgaactttacatgcactccatcgtccccatgtataagtggctgcgtatgcgcccccgggatggcggaacacaggggcaaatgctacgtgcctgaatcgtgcccatgcatctggaaggattgggaatatctctccggcgaagtgattgccacaccatgctatacttgcgtctgccgccggggcatgttcaattgtacttactatccttgcccggctgtttgcacaatctacggagatagacactactatagctttgacggccttgagtatgactatataagcgattgccaggtgtttctgataaagtcggctgatgacagtgacatttccgtgatcgcccaaaataaaaagtgttttgataacgacatcgtttgttctaagagtgtattgatttctgtgggggatactgaaatttacctaaatgacacgccatacaagcagaagcagtccgggttcttcctggagaacaagtccacctaccagctttggaaggccggatattacatcgtggtgtacttcccggaaaaagacatcaccatcctgtgggacaggaagactaccatacatatcaaagtgggtccccagtggaagaacaagttgagtggtttgtgcggcaacttcgacaaatgcacatccaacgatatgaccacttcaaataacctagaggtgcggaatgctcgcgtgtttggggacagctgggcgttagggcaatgcgaatcgccagacgagactatcaagccatgcgaagcccatcagaataaattcccttatgccaagaaggagtgttcgatcctgtactccgatatttttgcaagctgtcgcaacgtaatcgacgtgacttcctttgccaagaattgtcacgaagatacatgtaactgtaacctcggaggggattgcgaatgtctctgtaccagcatcgccgcatacgcttacaaatgttgtcaagagggcatttcaattcactggcgctcgtccactgtgtgtagtttggactgcgagtattacaatgaggggctcggagagggcccatacatgctagcttcatacggtcagtccggcctggtgctcggtgccaacatgacatcccggtccgttttttgtttgcccaggagttccgtccataccagtctctttttttatttcatgataacaccaggactgttcaaggagaaggtatccagcctcgcactagttagccttgagtctgcggaacgacctaattactttctctacgtgcatgacaatgacaccctgtccttggaactttgggaggcaaatagcgcgtttcacaggcgagcgactttctttcatcaccagggactttggattcccggctattcggccttcgagctctatagcaaaaaggggttttttattatcttcactgactcatcagtgaaggcttctaagtatgacgactccgaggagtttaaacactcctccagcttttccatagaggagatacaggcagccgttccctaccgcaagatgtgtgaatggagatacgaaccctgcgcaaccccttgttttaaaacctgcagcgaccctgaggccctggcctgtaaatttctgcctcctgtggaaggctgcctgccctactgccccaaaaatatgattctggatgaggtcacgctgaaatgcgtgtatccacgggactgcatcccggtgatccctacggagccaactctcatgcccccagctaagccgacagtccctatgttcaccgtgtgggaaatgataaccccgtccgacataaccgtgttcgatatgctgacacctaccactggacttgagtgcgagccgcagaaattcgaccccgtgtacgactgctcccagtacatttgtctgaatatggagtggcagctctacaactggtctctgaattgtcctaaggatgttgaaatgcccgactgtgggttccgaggaagacccgttcaggtgaactctgatatctgctgtcccgaatgggaatgcccctgccgctgctcgatgctgagcgagctgtctatcattacttttgatgggaacaacgcagccctgtattctatggcaagctatatccttgtccgcatacctggagagattattgtggctcatatcgagaagtgctccatgaatcagaacggcaattcactgaaaaagctggccccgtccggtaggataagcggactgtgtttcaaaaagctcaacgtgaccacacccatacataagatcatcgtaaacagactggcgcggaaggtggaggtggattcaattgttgtacctcttccatttagctcccaggaactgtccatcgaggatagtggctcaatgtacgtaataaccacacccgcgggactcatcatcaaatggagccacctgaccggaattattgacatccacttcggtttcagattcaacctcagctcatacacagaggggttatgcggaatctgcaacgaggaccctgacgatgatctaagaatgcagaacggaacgattattactaacatggaagacatcggtctgttcatcgagtcctgggaaattgaaaagtccttcgaagtcaccatgcggaggccggtacgtaattgcaccgaacacgactgtagccagtgcatcgacctcctgaacagaaggatcttcattccctgtcacgacaaggtgtcccccgaggatttttgtgagaagatgtggattaattacacctatttctggaattatgagtgcgatgccttatcagcctacgtggctttgtgtaacaaatttgatatatgcatacagtggcgcactcctgactactgcagtctcagctgcccagaggggaaggagtaccagccctgcgtccggccatgtgaggcaagaacctgccttaatcaatggttttatggacataccagctgcttaaatcttcgagaagattgcgtgtgtaaagtggggactatcttgcatcggcctcacagtgctcaatgtattcccgaaaaggagtgcgcatgcacggatagcgaggaccagcctaggactgccggcgagatttggaatggagggattgacgaatgtactctctataaatgtctcgagaacggttccattatcccaatcgaaccggactgcgacgaggagcctactcccgtatgcgagcgcgaggccgaagtggtgatgggcatcatcgacaagtggacgtgttgttccaaagaagtgtgtgggtgtgacaccaccttgtgcgaaacatctatcccgacgtgcaccaatagtcagaagcttattgtggggcactcaccgctgtcatgttgcccacaatacaagtgtgagtgcgaccccttgaaatgcccaagcatcagcacacctgagtgcagggaggatcagttcatgattcaagtacgccaggaggaaccatgttgtttctctcctttttgcgtgtgcgagagctgcacaaaacctgtcccgctgtgccacgacggcgagtttctcactgttgacctcaatagtacccatttctgctgtccacagtattattgcgtctgcgagcccaacttgtgccccatgcccctgctcaattgtgccgaagacatgaacctggttaaggaaaatgtgagcgggcagtgctgccctacatggcactgtgagtgtaactgcgaaaacctcatcatgccgacctgcgaagttggggagtttacggcaattgaccacaacttccagtcggactgtggttgtatacagtacctgtgcgagaaggatgacgtgtgcgtcttccaggaggtcagtgtgctcaaccccggtcaatcaatgattaaatacttggaggaggatttttgttatgctatagagtgcctagaagaaaaggacaaccatacggggttccacacgttgaatttcactctggttaattgtagtaagaagtgtgatgtccatcaggtatatacacccagtcccagtgactatggttgttgtggaacctgtaagaatgtctcatgcaaatttcacatggaaaatggaacgtccgttgtatacgcagtgggcagtacctggcactacaactgcactacctacgagtgcgtcaagactgatgagggcgccattattctcaattacaccatggtatgtcctcctttcaatgagacagagtgtaaaatgaatgagggaatcgtcaaactctacaatgaaggttgctgcaaaatctgcaagagagaagaacgcatatgccaaaaggtcatcatcaaaagcgtgatccgcaagcaggactgcatgtctcaatcccccattaatgtcgccagttgcgatggaaagtgtccatcagcaacgatttataatatcaacatcgagagccacctgagattttgcaaatgctgcagggagaatggagtgaggaacctttcagtacctctctactgctcaggcaatgggaccgagattatgtacacactccaagagcctatcgactgtacgtgccagtggaactag

SEQ ID NO: 250507 - DNA, 7035 bp, Artificial Sequence
  derived and/or modified sequence
atgatcccctggagcatcttcctgctgcacgtgctgctcttcagcctgcaggagtacatctgtgccagcagcatcctgatgggcaccagcaagaatggcttcaatgaaaatcggcagaagagggccctgctggccgcccagtttgaggccaccagcccccgctacttcttccatgatgccatcaactggggcgagagcaagatcaagggcagctgcccctatgaatgtctgaatggagccttctgcagcaagacaggcacctgtgactgccagatcttccaggccctgggcacccgctgccagatcatccccaacatgggaaatggaagagatggcatctgcaagacctggggccagtaccactttgagacctttgatggcatctactactacttccctggcaactgcagctacatctttgccaaggactgtggggacctggagccccgctacacagtgtgggtgcacaacagccccaagtgcctgggctctgtgtacagctgctaccgcagcatcagcctcttcttcagcaaccaggaggagatccgcatctacggccacgagatcaagaagaatggcatcagcctgaccctgccccagaccatcggccagatcttcatcgagaagctggccgactacatcctggtgaagaccaccttcggcttcagcctggcctgggatggcatcagcggcatctacctgaagctgtctgaggaccacaagggcaagagctgtggcctgtgtggcaactacaatgacatccagagtgatgacttcatcatcctgcaggaggactacacagaggacatcgccatgtttgccaacagctggagcgtgcagaccccagatgacaccaagtgtgtgctgacccccagcgacttccccaacccctgcagcagcggcatgcctgcctttgaggccatcttcttcaagtgccagatcctgctgcagttccccttcctgagctgccacgagtacatcgacccctacctgtacatcgccagctgtgtgaatgacctgtgcaagacagatgatgatgagacctactgccgggccgccacagaatatgcccgggcctgcagccatgctggctaccccatccaggactggagagatgacttccctgcctgcacagacaagtgtgatgacagctttgtgcaccgggactgcatcagctgctgcccccccacctgcacctttgagaagcagtgcctgggcagcaacctgcactgcctggatggctgctactgcccagatggcctggtgatggacaatggcacctgcatcagcctggagaactgcccctgtggcttccacggcctggcctacagcgtgggcagcaagattgagcaggagtgcacagaatgtgtgtgtgtgggcggcgtgtggaactgcacagagcaggactgccctgtgcagtgcagcgtggtgggggacagccacttcaccacctttgatggccgccactacagcttcatcggcatgtgccagtacatcctggtgaagggcaccgggaaggacaagttcaccatcaccctgcagaaggccccctgtgagcagaacctgggcctggtgtgcctgcagagcatcaccctcatcctggaggatgacttcaacaagcaggtgaccctgggccggggcggccagatcctgaccagccccaaccagggcttcaacctgaatggaattgtggagatccagaccctgagcagcctcttcatcctgctgaagaccaccttcggcctgaagatcctgtttgccattgatggagagcgcatctacatccagctgaccagcgcctggaagaggaggaccctgggcctgtgtggcaccttcaatggaaacatcagagatgacttcctgagccccagcggcatgattgagggcaccccccagctgcacgccaatgcctggagggtgagcagcacctgctttgcccctgtgcacgtgcctgtggtggacccctgcaacatcaaccagcagaacatcggctacgccgcccactgtgatgtgatccaccaggagctgtttgccccctgccacatctacatcagccctggcctgtactaccagctgtgcagacatgatgcctgcaagtgtggcagcagctgcctgtgcaatgccctggcccactacgcctacctgtgtggccagcacggcgtgcccatcgacttccgcacccagatctccttctgtgctgtggtgtgccagaagggcatgctgtaccaccactgcagcagcttctgcctgcacagctgcatcagcctgagcagccctgagcagtgcagtgatgactgtgccgagggctgcaactgcccagagggcaagttctatgaggacaccctgaacttctgtgtgcccatcttccactgccgctgccactaccggggctctgtgtaccagcccggggagctgatccccacccccagcggcctgtgccagtgcagcaatggaacagtgaagtgtgatgagctggccaccccatctgctgtgcacatctgcccagagggcaaggagtactttgactgccgcttcccagaccctgagctgcctgctgggggcgtgaactgtgagaccacctgtgccaacctggccatgaacttcacctgcacccccagcagcccctgcatcagcggctgtgtgtgtgcccctggcatggccgagcaccggggcaagtgctacgtgcctgagagctgcccctgcatctggaaggactgggagtacctgagcggggaggtgattgccaccccctgctacacctgtgtgtgccggcggggcatgttcaactgcacctactacccctgcccagctgtgtgcaccatctacggggacagacactactacagctttgatggcctggagtatgactacatcagtgactgccaggtgttcctgatcaagtctgcagatgacagcgacatctctgtgattgcccagaacaagaagtgctttgacaatgacatcgtgtgcagcaagtctgtgctgatctctgtgggggacacagagatctacctgaatgacaccccctacaagcagaagcagagcggcttcttcctggagaacaagagcacctaccagctgtggaaggccggctactacatcgtggtgtacttccctgagaaggacatcaccatcctgtgggacaggaagaccaccatccacatcaaggtgggcccccagtggaagaacaagctgagcggcctgtgtggcaactttgacaagtgcaccagcaatgacatgaccaccagcaacaacctggaggtgagaaatgcccgggtgtttggagacagctgggccctgggccagtgtgagagcccagatgagaccatcaagccctgtgaggcccaccagaacaagttcccctatgccaagaaggagtgcagcatcctgtacagcgacatctttgccagctgcagaaatgtgattgatgtgaccagctttgccaagaactgccacgaggacacctgcaactgcaacctgggcggggactgtgaatgtctgtgcaccagcattgctgcctatgcctacaagtgctgccaggagggcatcagcatccactggaggagcagcacagtgtgcagcctggactgtgagtactacaatgaaggcctgggggagggcccctacatgctggccagctatggccagagcggcctggtgctgggcgccaacatgaccagccgctctgtgttctgcctgcccaggagctctgtgcacaccagcctcttcttctacttcatgatcaccccaggcctcttcaaggagaaggtgagcagcctggccctggtgtccctggagagcgctgagcggcccaactacttcctgtatgtgcatgacaatgacaccctgagcctggagctgtgggaggccaacagcgccttccaccggcgggccaccttcttccaccaccagggcctgtggatccctggctacagcgcctttgagctgtacagcaagaagggcttcttcatcatcttcacagacagctctgtgaaggccagcaaatatgatgattctgaggagttcaagcacagcagcagcttcagcattgaggagatccaggccgctgtgccctacaggaagatgtgtgagtggaggtatgagccctgtgccaccccctgcttcaagacctgcagcgaccctgaggccctggcctgcaagttcctgccccctgtggagggctgcctgccctactgccccaagaacatgatcctggatgaggtgaccctgaagtgtgtgtacccccgggactgcatccctgtgatccccacagagcccaccctgatgcccccagccaagcccaccgtgcccatgttcaccgtgtgggagatgatcacccccagcgacatcaccgtgtttgacatgctgacccccaccaccggcctggagtgtgagccccagaagtttgatcctgtgtatgactgcagccagtacatctgcctgaacatggagtggcagctgtacaactggagcctgaactgccccaaggatgtggagatgccagactgtggcttccggggccggcctgtgcaggtgaacagcgacatctgctgcccagagtgggagtgcccctgccgctgcagcatgctgtctgagctgagcatcatcacctttgatggcaacaatgctgccctgtacagcatggccagctacatcctggtgcgcatccctggagagatcatcgtggcccacattgaaaaatgttccatgaaccagaatggaaacagcctgaagaagctggcccccagcggccgcatcagcggcctgtgcttcaagaagctgaatgtgaccacccccatccacaagatcatcgtgaaccggctggccaggaaggtggaggtggacagcatcgtggtgcccctgcccttcagcagccaggagctgagcattgaagattctggctccatgtatgtgatcaccaccccagctggcctcatcatcaagtggagccacctgaccggcatcatcgacatccacttcggcttccgcttcaacctgagcagctacacagagggcctgtgtggcatctgcaatgaagatcctgatgatgacctgaggatgcagaatggcaccatcatcaccaacatggaggacatcggcctcttcattgaatcctgggagattgagaagagctttgaggtgaccatgagaagacctgtgaggaactgcacagaacatgactgcagccagtgcatcgacctgctgaacagacgcatcttcatcccctgccacgacaaggtgtccccagaggacttctgtgagaagatgtggatcaactacacctacttctggaactatgaatgtgatgccctgagcgcctacgtggccctgtgcaacaagtttgacatctgcatccagtggaggaccccagactactgcagcctgagctgcccagagggcaaggagtaccagccctgtgtgcggccctgtgaggcccggacctgcctgaaccagtggttctacggccacaccagctgcctgaacctgcgggaggactgtgtgtgcaaggtgggcaccatcctgcaccggccccacagcgcccagtgcatccctgagaaggaatgtgcctgcacagacagcgaggaccagcccaggacagctggggagatctggaatggaggcattgatgaatgtaccctgtacaagtgcctggagaatggcagcatcatccccatcgagccagactgtgatgaggagcccacccctgtgtgtgagcgggaggccgaggtggtgatgggcatcatcgacaagtggacctgctgcagcaaggaggtgtgtggctgtgacaccaccctgtgtgagaccagcatccccacctgcaccaacagccagaagctgattgtgggccacagccccctgagctgctgcccccagtacaagtgtgaatgtgaccccctgaagtgccccagcatcagcaccccagaatgtcgggaggaccagttcatgatccaggtgcggcaggaggagccctgctgcttcagccccttctgtgtgtgtgagagctgcaccaagcctgtgcccctgtgccatgatggagagttcctgactgtggacctgaacagcacccacttctgctgcccccagtactactgtgtgtgtgagcccaacctgtgccccatgcccctgctgaactgtgccgaggacatgaacctggtgaaggaaaatgtgtctggccagtgctgccccacctggcactgtgagtgcaactgtgaaaatctcatcatgcccacctgtgaggtgggggagttcaccgccatcgaccacaacttccagagcgactgtggctgcatccagtacctgtgtgagaaggatgatgtgtgtgtgttccaggaggtgtctgtgctgaaccctggccagagcatgatcaagtacctggaggaggacttctgctacgccatcgagtgcctggaggagaaggacaaccacacaggcttccacaccctgaacttcaccctggtgaactgcagcaagaagtgtgatgtgcaccaggtgtacacccccagccccagcgactatggctgctgcggcacctgcaagaatgtgtcctgcaagttccacatggagaatggcacctctgtggtgtatgctgtgggcagcacctggcactacaactgcaccacctatgaatgtgtgaagacagatgagggcgccatcatcctgaactacaccatggtgtgcccccccttcaatgaaacagagtgcaagatgaatgaaggcatcgtgaagctgtacaatgaaggctgctgcaagatctgcaagcgggaggagcgcatctgccagaaggtgatcatcaagagcgtcatcaggaagcaggactgcatgagccagagccccatcaacgtggccagctgtgatggaaaatgtcccagcgccaccatctacaacatcaacatcgagagccacctgcgcttctgcaagtgctgccgggagaatggagtgaggaacctgtctgtgcccctgtactgcagcggaaatggaacagagatcatgtacaccctgcaggagcccatcgactgcacctgccagtggaactag

SEQ ID NO: 250508 - DNA, 7035 bp, Artificial Sequence
  derived and/or modified sequence
atgatcccctggagcatcttcctgctgcacgtgctgctgttcagcctgcaagaatacatatgtgccagtagcatactgatggggacaagcaagaacggctttaatgagaatcggcagaagcgggctttgctggctgcccaatttgaggcaacgtccccccggtactttttccatgacgccatcaactggggcgaatccaaaatcaagggatcatgcccctatgaatgcctgaacggcgcgttttgcagtaagaccggcacctgtgactgccagatcttccaagcactcgggaccagatgccagatcatcccaaacatggggaacggtcgggacggcatctgtaaaacctgggggcagtatcactttgagacctttgacggaatctattattacttccccggcaactgcagttatatatttgctaaggactgtggcgatctggaacctcgttacacagtctgggtccataattctcccaaatgtttaggctccgtgtacagctgctacagatctatctccctcttcttctctaaccaagaagaaataagaatttacggacatgagattaagaaaaacgggatatcgctcactctgcctcagaccatagggcaaatattcatcgagaagctcgcggactacatccttgtcaagactacattcggcttttctttggcctgggatggcatctccggcatctacttgaagttgagcgaagaccataaggggaagtcttgtggactgtgcgggaattacaacgacatccagtccgatgactttatcatcctgcaggaggattatactgaggacatcgcaatgttcgcaaacagttggtcagtgcaaactccggatgacactaagtgcgtattaaccccatccgattttcccaatccttgtagtagcggaatgcctgcattcgaggcaatcttcttcaaatgccagatcctgctccagtttccgtttctttcctgtcatgagtatatcgatccatacttgtatatcgcgtcctgtgttaatgatttatgtaaaacagacgatgacgagacttattgtagagccgccaccgagtatgcccgtgcatgtagccacgccgggtacccaatacaagattggagagatgacttcccggcttgtaccgataagtgtgacgactcctttgtccatcgggattgtatatcttgctgccctccaacatgcacatttgagaagcagtgcctcggctcaaatcttcattgcctagacgggtgctactgtcctgacggtttggttatggacaacggcacctgcatatctctggagaattgcccctgcggcttccatggcctggcctattccgtcgggagtaagattgagcaggaatgcacagagtgcgtttgcgtcggcggcgtatggaactgcacagaacaggactgccctgtgcaatgcagcgtcgtgggagatagtcacttcactacttttgatggcagacattactccttcatcggaatgtgccagtatattctggtgaagggcacaggcaaggataaattcaccatcaccctacagaaggcgccttgcgagcagaatctaggcctggtctgtctgcagtcaattacactcatcctggaagatgatttcaacaagcaagtgaccctcggtagaggaggacagattctaacctcgccaaaccagggtttcaacctgaatgggatagttgagattcagaccctgtccagcttgttcattctccttaagacaacatttggacttaaaatcttgtttgccatcgacggtgaaaggatttatatacagctaacctctgcctggaaaaggcggaccctcggcttgtgcgggacctttaatggtaacatacgggacgattttttatccccgagtgggatgatagaggggacaccccagcttcatgccaacgcatggagggtgagctctacttgctttgcccctgtgcatgttcctgtcgtcgacccttgtaacatcaatcaacaaaacatcggttatgcagctcattgcgatgtgatccaccaagagctgtttgcgccttgccatatttacataagcccaggcctgtattaccaactgtgtcgacacgacgcctgcaagtgcgggagcagctgtttatgcaacgccttagcacactatgcctatttgtgcggacaacacggagtgcccatcgacttcagaacacagatctctttttgtgccgtggtttgccagaaaggaatgttgtatcatcattgttcttctttctgcctgcactcctgcatcagcctatcaagtccggaacagtgtagtgacgattgtgctgaaggatgtaactgccccgaaggtaagttttacgaggataccttaaacttttgcgtgcctattttccattgtagatgtcactacagaggttcagtgtaccagccgggtgagctgatccctactccaagcgggctatgccaatgttctaatgggactgtaaagtgtgatgagctggcaactccaagtgccgtgcacatctgccctgagggcaaagagtacttcgactgcagattcccggatccagagctcccggctggaggagtgaattgtgagaccacttgcgcgaatttagcgatgaatttcacctgcactccttcctcaccttgtatcagcggctgtgtgtgcgcacccggaatggctgagcatcgagggaaatgctatgtccctgaatcttgtccctgtatctggaaagactgggagtatctgagtggcgaagtgatcgctaccccctgctatacctgcgtttgcaggcgcggtatgtttaattgtacatattacccatgtcctgcagtatgtaccatatatggggacaggcactattactcgttcgacggcctggaatacgattacattagtgattgccaggtctttctcatcaagagtgctgatgactccgatatttctgtgatcgctcagaacaaaaagtgcttcgataatgacattgtctgcagtaagtctgtactgatctcggtgggcgacactgagatctacttgaatgacacaccatataaacagaagcagagcgggttttttctggagaacaagtctacctaccagttgtggaaggctggctactatatagtagtctactttccagagaaagatatcacgatattgtgggatcgcaagaccaccatccacattaaggtaggtccccaatggaaaaataagttgagcgggctttgtgggaacttcgacaagtgcaccagcaacgatatgacaaccagcaataatctagaagtcagaaacgccagagtctttggcgattcctgggccctgggacagtgcgagagccccgacgagaccatcaaaccttgcgaagcgcaccagaacaagtttccatacgctaagaaagagtgcagtattctttactctgacatattcgcttcgtgcaggaacgttattgacgtgaccagctttgccaagaactgtcatgaggacacttgtaactgcaacttagggggagattgtgagtgtctctgcacctccatagcggcctacgcatataaatgctgccaagagggcatctccatccactggaggagctccacagtctgtagtttggactgcgaatactacaatgaaggccttggagagggtccctacatgctggcttcatatggccaatcaggacttgtgctcggagctaatatgacatcccggtccgtgttctgtttgccaagatcctccgttcatacttccctgttcttttatttcatgattacacctggtcttttcaaggaaaaggtcagcagtctggccctcgtttctttggagagcgctgagaggcctaactatttcctctatgtccatgacaacgacacattgagtttggagctgtgggaggcaaactcagccttccatcgcagagccacgttctttcaccaccagggtttgtggattcctggctattccgcctttgaactgtacagcaagaaagggttttttatcatattcaccgattcctccgtaaaggcctctaagtatgacgatagcgaggaattcaagcattcttcatcattcagcattgaagagattcaggcagcggtgccataccgcaagatgtgtgagtggagatacgagccctgtgccacaccgtgcttcaagacttgttcagaccctgaagccttagcctgtaagttccttcctcctgtagagggctgcctgccctattgccccaaaaatatgattctggatgaggtgaccctaaagtgcgtttaccctcgcgattgcatccctgttattccaacagaacctaccctgatgcccccagcaaaaccaacagtgccgatgtttactgtatgggagatgattacaccgtctgacatcacagtatttgacatgctaacgccaacgactgggctggaatgcgagccccagaaattcgaccctgtatatgattgcagccagtatatttgtctaaatatggagtggcaactgtacaattggagcctcaactgccccaaagatgttgaaatgccggactgcggattcagaggccgccctgttcaggtcaattccgatatctgttgtccagagtgggagtgtccctgccgctgcagtatgctgtcagagctctccattatcacttttgacggtaataacgcggccctctactcaatggcatcatacatacttgtaaggatccccggggagatcattgttgcccatatcgaaaagtgctccatgaaccagaacggcaacagtttgaagaagttagctcctagtggcaggatctctggattgtgctttaagaaactgaacgtgaccacccccatccataagataattgtgaatcgtctcgcccgcaaagtggaggtcgactccattgtggtgcccctgccattttcttctcaagagctgtcaatcgaagatagcggttcaatgtatgtaatcacaacacctgctgggctgatcatcaaatggtcccacttaactggtatcatagatatccactttggatttaggtttaatctcagcagttacacagagggactgtgcggcatctgcaacgaggatcccgatgatgacctccgcatgcagaatggaaccatcatcaccaatatggaagacattggcctttttattgaaagctgggagatcgagaaatcttttgaggtgacgatgagaagacccgtccgcaattgcaccgaacatgattgttcacagtgcatcgacctactgaaccggagaatctttatcccttgtcatgacaaggtgtcaccagaggacttctgtgaaaagatgtggataaattacacctacttctggaattacgaatgcgacgccctttctgcttatgtcgccctgtgcaacaagttcgatatctgtatccaatggagaactcctgattattgttcattgagttgccccgaaggtaaggaatatcagccctgtgtccggccctgcgaggctcgaacgtgcttaaaccagtggttctacggccatacatcctgtctgaacctccgcgaggattgtgtttgcaaagtgggtaccattctgcatcggcctcacagcgcgcaatgcatcccagaaaaggaatgcgcctgcaccgactcagaagaccagcccagaacggcgggcgaaatctggaacggtgggatcgatgaatgcacgctgtacaagtgcctggagaacggcagtatcattcccattgaaccagattgcgacgaagaaccgaccccggtgtgcgaacgcgaggccgaagtcgtaatgggaataatcgacaaatggacctgctgcagtaaggaggtgtgtgggtgcgatacaacgctgtgtgagacaagcatccccacttgcactaattcacagaaactaatcgttgggcatagcccattaagttgttgcccacagtacaaatgtgagtgtgacccactaaagtgcccttccatttcaacacctgagtgtcgtgaagatcagttcatgattcaagtgcgccaggaagaaccctgctgtttttcgcctttttgcgtgtgcgagagttgtacgaagcccgtaccactgtgtcacgatggcgaattcctgactgtggacctaaatagcacgcacttttgctgtcctcagtactactgtgtttgcgaacctaatttatgccccatgccactgttgaattgcgctgaggacatgaacttggtgaaggaaaacgtcagcggacaatgttgtcccacctggcattgcgagtgtaactgcgaaaacctgattatgcccacatgtgaagttggcgagttcaccgcaattgatcacaactttcaatctgattgtggatgcattcagtatttgtgcgaaaaagacgatgtgtgcgtgttccaggaggtcagtgtgctgaaccccggccagtccatgattaaatatctagaggaagacttttgttacgcaatagagtgtctggaggaaaaggataaccacactggattccacaccctgaattttaccctcgtcaactgcagtaagaaatgtgatgttcaccaagtgtacactccgagcccctccgattacggctgctgtggcacttgcaagaatgtgtcttgcaagttccacatggagaatggaacatcagtagtgtacgccgtcgggagcacctggcattacaactgtactacatatgaatgtgtgaaaacagatgaaggggccataattctaaactatactatggtctgcccgccttttaatgaaacggagtgtaaaatgaacgagggaatcgttaaactgtacaacgaggggtgctgtaaaatctgcaaaagggaggagaggatctgtcaaaaagtaataatcaaatccgtgattagaaagcaagattgtatgtcccagagccctattaacgttgcctcctgcgacggcaagtgtccttcagcaaccatttacaatataaacattgagtcacacctgcgattctgtaagtgttgccgtgaaaacggcgtgcgaaatctctccgttccactctactgcagcggcaatggtacagagattatgtacactctacaggagccgatcgattgtacatgccagtggaattag

SEQ ID NO: 250509 - DNA, 7034 bp, Artificial Sequence
  derived and/or modified sequence
atgatcccttggagcatcttcctgctgcacgtgctgctgttctcacttcaagagtatatctgtgccagtagcattctcatggggacttcaaagaacggattcaacgagaacagacagaagcgcgctttgctcgccgcacagtttgaggctactagcccgcgatatttcttccatgacgctattaactggggagaaagcaaaatcaaaggaagttgcccctatgaatgtctgaacggtgccttctgttctaaaacagggacttgcgactgccagatcttccaagctttaggaacaaggtgccagatcattccgaatatgggtaatggtcgtgacggtatctgcaaaacctgggggcagtatcacttcgagactttcgatggcatttattattactttccagggaactgttcctacatttttgccaaggactgcggagatctcgagccaagatacaccgtgtgggtgcacaactcccccaaatgtttggggtctgtgtattcttgctaccggtccatcagtctcttcttcagcaaccaggaggaaataagaatctacggtcacgaaatcaagaagaatggaatctctctgaccttgcctcagactatcggacagatttttatcgaaaagctggcagattacatactggttaaaacaacctttggtttctcactcgcgtgggacggcattagtgggatctatctgaaactctctgaagaccacaagggcaaatcctgcggactctgcggcaactataacgacattcagtcggacgactttattattctccaggaagactacacagaggacatcgccatgttcgccaattcatggagcgttcagactcctgatgacacaaaatgcgtgttgactccgtctgatttccctaacccatgtagctcaggcatgcctgcttttgaggccatcttctttaaatgtcagatcctgttgcaattcccgttcctcagctgtcatgagtacatcgacccatacttgtacatcgcatcctgtgttaatgacttgtgcaagactgacgacgacgagacctattgtcgagcagcaactgaatacgctagggcttgttctcacgctggataccctatccaggattggcgcgatgactttccggcatgtacggacaagtgcgatgacagttttgtacacagagattgcattagttgttgtcccccaacttgcacttttgagaaacaatgtctcggaagtaacctgcactgtttggatggctgctactgcccggatggactggttatggataatggcacctgtatctctctggagaactgtccctgcgggtttcatggactagcatattccgtcggttctaagattgaacaggaatgtaccgaatgcgtttgtgtaggaggcgtgtggaattgtacggaacaggattgtcctgtgcagtgcagtgtggtaggagattcccacttcaccaccttcgacgggagacactactcctttatcggcatgtgccagtacatcttggtgaagggaactggcaaggataagttcacaatcaccctgcagaaggccccttgcgagcaaaatctgggcttggtctgcttgcaatcgatcaccttgattctggaagatgattttaataagcaggttacgctcggccgaggagggcaaattttgacatctccgaaccagggattcaacctgaacgggatcgtggaaatacagacactgagttctttgttcatcctcttgaagactaccttcgggcttaagatcctgttcgctattgacggtgagcgaatctatatacaactgacatctgcttggaaacgcaggacactgggcttgtgcggtacttttaatgggaacatccgggacgactttctgtcaccctctggaatgatcgaggggaccccccagctccacgcaaacgcttggcgcgtgagttctacctgtttcgcaccagtgcacgtccctgttgtggacccatgcaatataaatcagcagaacatcggatatgccgctcactgtgatgtgattcatcaggaactgtttgccccttgtcacatatatatcagccctgggctgtactaccagctgtgtcggcacgacgcgtgcaagtgtgggagtagttgcctctgcaacgcactcgctcactatgcttacctgtgcgggcagcatggtgtgccgattgatttcaggacgcagatctcattctgtgccgttgtatgccaaaaaggaatgctttatcatcactgttcgagcttttgcctccattcttgtatatcccttagctcccctgagcagtgtagcgatgattgcgcggagggttgcaattgtccagagggcaagttttatgaagacacgctgaacttctgcgtccccatttttcactgcaggtgccattatcggggatccgtctaccaaccgggagaattgatccctacaccaagcggtctctgccagtgttcgaatggaacggtgaaatgcgacgagctcgccaccccaagcgctgtccacatctgccccgaagggaaggaatattttgattgtcggtttccagaccctgagttgccagctggcggtgtaaattgtgaaaccacgtgcgccaatctcgccatgaattttacctgcacgccaagcagcccttgcatctccggctgcgtctgtgctcctgggatggccgagcaccgagggaaatgctacgtaccggagtcatgcccttgcatctggaaagactgggagtacctctcaggcgaagttatcgccacgccttgctacacttgcgtctgcaggcgcggtatgtttaactgcacctactacccatgcccagctgtttgtacgatatatggcgataggcactattattctttcgatggtcttgagtacgattacatatctgactgtcaggtctttttaattaagtcagccgacgacagcgacatctccgtaattgctcaaaacaagaaatgtttcgacaacgatatcgtgtgctcaaagtccgtgctcatctctgtgggggataccgaaatttacctgaatgacactccatataagcagaaacagtctggtttcttcctggagaataagtccacctaccagctttggaaggctgggtattatatcgtagtttattttccggagaaagacatcactatcctttgggatcggaaaaccacaattcatatcaaagttggacctcagtggaaaaataaactaagcggactgtgtgggaactttgacaagtgcacgtctaatgatatgactaccagcaacaatctggaggtaaggaacgccagggttttcggtgattcttgggccttaggccagtgtgagtctcccgatgaaacaatcaagccttgcgaagcccaccagaacaagttcccctatgctaaaaaggagtgctcaattctgtactctgacatcttcgccagctgcagaaacgtgattgacgtgacatcatttgccaagaactgccacgaagatacttgcaattgcaatctgggtggggattgcgagtgcctatgcacttcaatcgcagcctatgcctacaaatgctgccaggaaggaatttcaattcactggcggagctccaccgtgtgttcccttgattgcgaatactataacgagggactgggggaaggaccctacatgttagcctcatacgggcaaagcgggttagtgctgggagccaatatgacaagccgctccgtgttttgcctgccacggtctagcgtccacactagcttattcttctacttcatgatcaccccaggactgtttaaggagaaggtaagttccctggccctggtatccctggagagcgcagaaagaccgaactattttctgtatgttcatgataatgacacactttcgctggaactgtgggaggccaattcagccttccatagaagggcgactttttttcatcatcaggggttatggataccgggttactccgcatttgaactgtattctaaaaagggtttctttattatctttacggattcaagcgtgaaggcatctaaatacgacgattctgaagaattcaagcactcgtcttctttcagcatcgaggaaatccaggctgctgtgccataccggaagatgtgcgaatggagatacgaaccttgtgccactccttgtttcaaaacatgcagcgatccagaggccctcgcttgcaaatttctccctcccgtcgagggatgcctcccctactgtcctaagaacatgatactcgatgaagtgacccttaaatgcgtatatcctcgtgactgtattcctgtgattcctaccgagccgaccttgatgcctcccgcaaaacctacagtgccaatgttcaccgtttgggagatgattactccctcggatattactgtgtttgacatgctcaccccaacaaccgggttggagtgtgaaccccaaaaattcgatcccgtatacgactgtagtcagtatatatgtttgaatatggaatggcaactgtataattggagcctgaactgcccgaaggacgtggaaatgcccgactgtggattcagaggacggcctgtgcaagtgaactctgatatatgctgtccagaatgggagtgtccttgtagatgtagcatgttgtccgaactctcaattataacattcgatggcaataacgctgcgctatattctatggcatcctacatactcgtgcgtatacccggagagatcattgtcgctcacattgagaagtgctccatgaatcagaatggcaacagtctgaaaaaattggcccctagcggcagaataagtggtttgtgcttcaagaagctgaacgtgacaacgccaatacacaagatcatcgtgaaccgattagcgagaaaagtcgaagtggactcaatcgtagttcccctaccgttttcttcccaggagctcagcattgaagattcggggagcatgtacgtgattaccacccctgcaggactcataatcaaatggtctcacctgaccgggatcatcgacatacactttggcttccgcttcaatctctcctcttataccgaggggctgtgtggtatctgcaacgaagaccctgatgatgatctgcgaatgcagaacggcactattataacaaatatggaagacattggactcttcattgaaagttgggagatagaaaagagcttcgaagtgacaatgcgacgccctgtcagaaactgcactgaacatgactgtagtcagtgcatcgaccttctgaaccgcagaattttcataccctgtcacgataaggtcagccctgaggacttctgcgagaagatgtggataaactacacgtacttctggaactatgaatgcgatgccctgagcgcctacgtggccctgtgtaataaattcgatatctgtattcagtggaggacgccagattattgtagcctatcgtgccctgaaggcaaagagtaccagccttgtgtgaggccctgtgaggctagaacctgcctcaatcagtggttttatgggcacacctcgtgtttaaatctgcgcgaggattgcgtgtgcaaggtcggcacaatactgcaccgtcctcattctgcgcagtgtatccctgagaaggagtgtgcatgcaccgactctgaggaccagcctcgaaccgccggtgagatttggaacggcggaatcgatgaatgcaccctatataaatgtctggaaaacggttcaattatcccgatcgagcccgattgcgacgaggaacccaccccggtgtgtgaacgggaggctgaagtggtcatgggaattatagataagtggacatgttgttcaaaagaggtttgtgggtgcgacaccacactgtgcgagacctcaatccctacctgtacaaactcgcaaaagctgattgtggggcattctccattgtcctgctgcccacaatataaatgcgaatgcgatccactcaagtgtccatccatttccacaccagagtgccgggaagaccaattcatgatccaggttcggcaggaggaaccttgctgcttttcacccttttgtgtgtgcgagagctgtactaagcccgtaccactgtgccacgatggagaatttttaaccgttgatcttaattcaacccacttctgttgtccgcagtattactgcgtatgtgagccaaacctgtgtccaatgccactcctgaactgcgccgaggacatgaaccttgtgaaggaaaacgtctccggacagtgttgccccacgtggcactgcgagtgtaattgtgagaaccttatcatgccgacctgtgaagttggagaattcaccgctattgatcacaactttcagtctgactgtggttgcattcagtacctgtgtgaaaaggacgacgtctgcgtcttccaggaggtgtctgtgctgaaccccggtcaaagtatgattaagtacctagaagaggatttctgttatgccatcgagtgtctggaggaaaaagacaatcacactgggttccacaccttgaattttacactggtgaactgtagcaagaagtgcgacgtgcatcaggtctacactccatctccaagcgattacgggtgttgcggtacctgtaagaacgttagctgtaagtttcatatggagaatggaacatcggtggtgtacgccgtggggagtacctggcattacaattgtacaacttatgagtgcgtcaaaaccgacgagggagcgattatcctgaactatacgatggtctgccctccttttaacgagacagaatgtaagatgaatgagggcatcgtgaaactctacaatgaaggctgctgtaagatctgtaaaagagaagagcgcatttgccaaaaggtaataatcaaatcggtgataagaaagcaggactgtatgagccagagccctataaacgttgcaagttgtgatggcaaatgtccctcggctaccatctacaatattaacatcgagtcacacttgaggttttgcaaatgctgtcgcgagaatggcgtcaggaatcttagcgttcctctttactgcagcgggaacggaacggaaatcatgtatacactgcaggaacctatagactgtacgtgccagtggaacta

SEQ ID NO: 250510 - protein, 998 aa, Artificial Sequence [sequence omitted]

SEQ ID NO: 250511 - DNA, 2997 bp, Artificial Sequence
  derived and/or modified sequence
atggggtccccaagagctgcacggcccccccttctcctgcgaccggtcaagctattaaggaggaggttcagactccttctggccttagccgtggtgtctgtgggactctggacactatacctggaactggtggcaagcgcacaggtcggtggaaatccgctgaatcggcggtacggctcctggcgggaacttgctaaggctttggcttcacggaacataccagccgtggacccgcacctacagttttatcatccccagcggctgtctctagaggatcacgatattgatcaaggggtctcttccaatagtagttaccttaagtggaacaaacccgtcccctggctcagcgaattccggggtcgtgctaacttgcacgtatttgaggattggtgtggctccagtatacaacagttacgtcgcaatttacacttcccactctatccacatataagaaccactctgcgcaaactggccgtgagtcccaaatggacaaattatgggctgaggatcttcgggtatctgcatccattcacagacgggaagatccaattcgctatcgccgctgatgacaatgctgagttttggctgagtcttgacgatcaagtgtctggcttacagctcctggcaagcgtgggcaaaactggtaaagagtggacagctccgggggagttcgggaaattccggtcccaaatcagtaaacccgtgagtctaagcgcaagccacagatactatttcgaggtgttgcataaacaaaacgaggaaggaaccgatcatgtggaagttgcctggagaaggaacgacccgggcgccaagtttacaattattgactccctgtctctgagcttattcacgaatgagacctttctgcagatggacgaagtgggtcatatcccacaaacagcagctagccatgtcgattcatccaacgctctcccaagggacgagcagccaccagccgatatgctcaggcccgacccacgcgataccctctaccgcgtacctctcattcctaagtcccatctgagacatgtgttgcccgactgtccatacaaaccaagttacttggtggacggcctgcccttgcaaaggtaccaggggctgcgttttgtccacttatcttttgtgtaccccaatgattacactcgcttgagccacatggaaacccacaacaaatgcttctaccaagagaacgcctactaccaagatagattttcgttccaggaatatatcaagatagatcaacctgaaaaacagggactagagcagcccggtttcgaggagaacctcctggaagagtctcagtacggggaggtggctgaagagacgcctgcctctaacaatcagaatgcacgaatgttggagggacggcagacacctgcatcaaccctggagcaggatgccacagactaccgactgcgtagcctgcgaaaactgctcgcccagccccgtgagggactgctcgctcccttttcaaagagaaactcgactgccagtttcccaggacgcacttcacacattcctgtccagcagccagaaaaaagaaaacagaaaccttcccctgaaccttcacaagattccccccactcagacaagtggccacccggccaccctgtgaagaaccttccccagatgcggggaccaagacccagacccgccggtgactcccctaggaagacccaatggctaaatcaggtcgagagctatatcgcagaacagagacgcggggacaggatgaggccgcaggcgcccggccgcgggtggcacggcgaagaagaggtggtggcggccgccgggcaggaaggccaagtggagggagaggaggagggcgaagaggaggaagaagaggaggatatgtcagaggtcttcgaatatgtgccagtgtttgatcctgttgttaattgggaccaaacattcagcgctaggaatctcgatttccaggccctgcgcaccgattggatcgacctctcatgcaacacctccggtaacctgctgcttcctgaacaggaggctctagaggtgactcgcgtgtttctcaagaagctcaatcagcggagtcgtggacgttatcaattgcagcggattgtgaacgttgagaaacgacaagatcagcttcgaggagggcggtacctactcgagctggagttattggagcaggggcagcgtgtcgtcaggctctccgagtatgtgagcgcaaggggctggcagggcattgaccccgctgggggtgaagaagtcgaagcgagaaatcttcaggggcttgtgtgggatccccataaccgacgacggcaggttctgaatacgagggcccaggaaccaaagttatgctggcctcagggctttagctggagtcatcgggccgtggtgcatttcgtcgtgcctgtgaagaatcaggcccgctgggtgcagcagttcataaaagacatggaaaaccttttccaggtgaccggcgacccgcattttaacatcgtcattactgattattcttccgaagacatggacgtggagatggcactgaagagatccaagctgcgcagctaccaatatgttaaactgagtggaaatttcgaaaggtctgctggactccaggcaggaattgacctggtaaaggatcctcactccatcatattcctttgcgacctgcacatccacttccctgctggggtgatagatgcgattagaaaacattgtgtagaagggaagatggcctttgctccaatggtgatgcgtctgcactgtggtgccacaccccagtggcccgaagggtattgggaagtgaacggctttgggttattaggtatttacaaatcagatctggatagaataggcggaatgaacaccaaggagttccgcgacagatgggggggcgaagattgggagcttttagatcgcatactccaggctggcctggacgtggagaggttaagcttacggaacttcttccaccacttccacagtaagcgcgggatgtggagtagaagacagatgaaaactctctag

SEQ ID NO: 250512 - DNA, 2997 bp, Artificial Sequence
  derived and/or modified sequence
atgggcagcccccgggccgcccggccccccctgctgctgcggcctgtgaagctgctgcggcggcgcttccggctgctgctggccctggccgtggtgtctgtgggcctgtggaccctgtacctggagctggtggccagcgcccaggtgggcggcaaccccctgaacagaagatatggctcctggagggagctggccaaggccctggccagcaggaacatcccagctgtggacccccacctgcagttctaccacccccagaggctgagcctggaggaccatgacatcgaccagggcgtgagcagcaacagcagctacctgaagtggaacaagcctgtgccctggctgtctgagttccggggccgggccaacctgcacgtgtttgaggactggtgtggcagcagcatccagcagctgcggaggaacctgcacttccccctgtacccccacatccgcaccaccctgaggaagctggccgtgagccccaagtggaccaactacggcctgcgcatcttcggctacctgcaccccttcacagatggcaagatccagtttgccatcgccgcagatgacaatgctgagttctggctgagcctggatgaccaggtgtctggcctgcagctgctggcctctgtgggcaagacaggcaaggagtggacagcccctggagaatttgggaagttccgcagccagatcagcaagcctgtgtccctgagcgccagccaccgctactactttgaggtgctgcacaagcagaatgaggagggcacagaccacgtggaggtggcctggaggagaaatgaccccggggccaagttcaccatcatcgacagcctgagcctgagcctcttcaccaatgagaccttcctgcagatggatgaggtgggccacatcccccagacagctgccagccacgtggacagcagcaatgccctgcccagagatgagcagcccccagctgacatgctgcggccagacccccgggacaccctgtacagagtgcccctcatccccaagagccacctgcggcacgtgctgcctgactgcccctacaagcccagctacctggtggatggcctgcccctgcagcgctaccagggcctgcgctttgtgcacctgagctttgtgtacccaaatgactacacccggctgagccacatggagacccacaacaagtgcttctaccaggagaatgcctactaccaggaccgcttctccttccaggagtacatcaagattgaccagcctgagaagcagggcctggagcagcccggctttgaggagaacctgctggaggagagccagtatggagaggtggccgaggagaccccagccagcaacaaccagaatgccaggatgctggagggccggcagaccccagccagcaccctggagcaggatgccacagactaccgcctgcggagcctgaggaagctgctggcccagccccgggagggcctgctggcccccttcagcaagaggaacagcacagccagcttccctggccgcaccagccacatccctgtgcagcagcctgagaagaggaagcagaagcccagccctgagcccagccaggacagcccccacagcgacaagtggcccccaggccaccctgtgaagaacctgccccagatgaggggcccccggcccaggcctgctggggacagccccaggaagacccagtggctgaaccaggtggagagctacatcgccgagcagaggagaggagacaggatgaggccccaggcccctggccggggctggcacggggaggaggaggtggtggccgctgctggccaggagggccaggtggagggggaggaggagggggaggaggaggaggaggaggaggacatgtctgaggtgtttgaatatgtgcctgtgtttgatcctgtggtgaactgggaccagaccttcagcgccaggaacctggacttccaggccctgaggacagactggattgacctgagctgcaacaccagcggcaacctgctgctgcctgagcaggaggccctggaggtgaccagggtcttcctgaagaagctgaaccagaggagccggggccgctaccagctgcagagaattgtgaatgtggagaagaggcaggaccagctgcggggcggccgctacctgctggagctggagctgctggagcagggccagagggtggtgcggctgtctgaatatgtgtctgcccggggctggcagggcattgatcctgctggaggagaggaggtggaggccaggaacctgcagggcctggtgtgggacccccacaacagaagacggcaggtgctgaacacccgggcccaggagcccaagctgtgctggccccagggcttctcctggagccacagagctgtggtgcactttgtggtgcctgtgaagaaccaggcccgctgggtgcagcagttcatcaaggacatggagaacctcttccaggtgactggagacccccacttcaacatcgtcatcacagactacagcagcgaggacatggatgtggagatggccctgaagaggagcaagctgcggagctaccagtatgtgaagctgagcggcaactttgagaggtctgctggcctgcaggccggcatcgacctggtgaaggacccccacagcatcatcttcctgtgtgacctgcacatccacttccctgctggggtgattgatgccatcaggaagcactgtgtggagggcaagatggcctttgcccccatggtgatgaggctgcactgtggggccaccccccagtggccagagggctactgggaggtgaatggcttcggcctgctgggcatctacaagagtgacctggacagaattggaggcatgaacaccaaggagttccgggaccgctggggcggggaggactgggagctgctggaccgcatcctgcaggccggcctggatgtggagcggctgagcctgaggaacttcttccaccacttccacagcaagaggggcatgtggagccggcggcagatgaagaccctgtag

SEQ ID NO: 250513 - DNA, 2997 bp, Artificial Sequence
  derived and/or modified sequence
atgggcagcccccgggccgcccggccccccctgctgctgcggcccgtcaagctactccgacgaagatttcgtctcctgttggccctggctgttgtctcagtgggcctgtggacgctgtacctagaactggttgccagcgcacaggtggggggtaaccccctgaaccgacgctacgggagctggagggaactggccaaggccttggcttctcgcaacatcccagccgtggacccacatctgcagttttaccatccccaaagactttccctagaggaccatgacatcgatcaaggagtgtcttctaattcaagctacctgaagtggaacaagccggttccttggctgagcgagtttcgaggcagggccaatctgcacgtgtttgaagattggtgcggatcgagtattcagcaattaagacggaatttgcactttcccttgtatcctcatatcaggaccaccctccgcaaactggccgtgagccctaagtggaccaactacgggcttcggatcttcggttacctccacccatttacggatggtaagatccaatttgcaatcgccgctgatgacaacgccgaattttggctttccctggacgatcaggtatctgggctccagctgcttgcctctgtgggcaagaccgggaaggagtggacagcccctggggagtttggcaaatttagaagccagatttctaaaccagtaagtttgtccgcctctcacaggtattatttcgaggtattgcacaagcagaacgaagaaggcactgaccacgtagaggtggcgtggagacggaatgatccaggtgcgaagtttacgatcatagactccctgagtctgtcgttgtttactaatgagacatttcttcaaatggacgaggtggggcacataccccagacagctgccagccacgttgatagcagtaacgctctgccaagggacgaacagcctcccgccgatatgctcaggccagacccccgcgataccctctaccgcgtccccctcatacctaagagccacttaaggcatgtcctgccggactgtccttacaagccctcttatctggtagacgggttgccgctgcagcgctaccaggggttaaggtttgtacaccttagctttgtgtacccaaacgattataccagattgtcccacatggaaacccacaataaatgtttttaccaagaaaacgcttactaccaggatcgcttctcctttcaagaatatatcaagattgaccaacctgaaaagcagggcctcgagcaacctggctttgaagaaaaccttttagaggagtcccaatacggggaggtggccgaagagaccccggcttctaacaaccagaacgcgagaatgctggagggcagacagacccccgcgtctaccctggagcaggatgccacggactatagattaaggagtctgaggaaactcctggctcagcctagggagggattactggccccatttagtaagcgtaatagcaccgccagtttcccggggcgcaccagccacataccggtgcaacagccggagaagcgaaaacagaaacctagcccggagccttctcaggatagcccccactcagataagtggccaccgggacacccagtgaaaaatctgccacagatgcgggggccgcggccaaggcccgccggggattctcctaggaaaacccagtggctgaaccaagtggaatcatatatagcagaacagcggagaggagatcgtatgcggccccaggctcccggtcgaggttggcacggagaggaagaggttgttgcagcggcaggacaagagggccaggtcgagggcgaagaggagggggaggaggaggaggaagaggaggacatgtctgaggtctttgagtacgttcccgtgtttgatccggtcgttaactgggatcagacatttagcgcccgcaacctcgactttcaggccttgcgtactgactggatagacctgagttgcaatacatcagggaatctgttgctgccagaacaggaggctctcgaggtcactcgtgtgttcctgaagaagctcaaccagcgctccagagggcggtatcaactgcagagaatcgtgaacgtcgagaaaaggcaggaccaactgcgggggggcagatacctgctcgagcttgaattactggagcaaggccagagagttgtaaggttgtcggagtacgttagcgccagaggatggcagggcattgacccagcaggaggagaagaggtcgaggcgcgaaatcttcagggcctcgtctgggaccctcacaatcgacggcgacaggtgctcaatacaagagcgcaagagccgaagctctgctggcctcagggcttctcctggtctcaccgagcagttgtgcactttgtcgtgccggtcaagaatcaggcgcgctgggttcagcagttcattaaagacatggagaatctgttccaggtaactggagatccccacttcaacattgttattactgactactctagcgaggatatggatgtcgaaatggccctgaagcgttccaagctgaggtcctaccaatatgtgaagcttagtggcaacttcgagaggagcgcaggcctccaagcaggtatcgatctggtcaaagatccccatagcattatttttctctgcgatctgcatattcactttcctgctggcgtgatagacgccatccggaagcactgcgtggaggggaaaatggcctttgcccccatggtcatgcggctccactgtggagcaaccccgcaatggcccgaaggctactgggaagtcaacggctttggtctcctggggatatacaaatcggacctcgaccggattggcggaatgaatacaaaagaattccgcgatcggtgggggggggaggattgggaactgcttgatagaattctgcaggccggactcgatgtggagcgattgagcctacgcaacttcttccaccattttcactctaagcgggggatgtggtctagacgccagatgaagaccttatag

SEQ ID NO: 250514 - DNA, 2997 bp, Artificial Sequence
  derived and/or modified sequence
atgggcagtcctcgggcagcccgtccgccactactgctgcgcccagttaagttgctgaggaggagattcagattactgctggctctggctgtggtaagcgttgggttgtggacactatacctcgagctcgtcgccagcgcacaggtcggaggtaatcccctaaaccgcagatacgggtcctggagagagcttgccaaagccctggcaagtcgcaatattcccgcagtggatccacacctacagttctaccaccctcaacgcctaagcctcgaggaccatgacattgaccagggtgtgagttcaaactcctcatatctaaagtggaacaaacctgtgccatggctgtctgagttccgaggcagggccaacttacacgtgttcgaagactggtgcgggagttccattcagcagctacgcaggaatctccacttccccctgtaccctcatattcgaactaccctgaggaaacttgccgtctctccaaagtggacaaattatggactccggatttttggatacttgcatccattcactgacggcaaaatccagtttgcaatcgcggcagacgacaatgcggaattttggctgtccctggatgatcaggtctcagggctgcagttgctcgctagcgtaggaaaaacaggaaaggagtggaccgccccaggtgaatttggcaaattcagatctcagataagcaaaccggtgtccctgagcgcctcgcaccggtactatttcgaagttctccataagcagaacgaggaaggcacagatcacgtcgaagtggcctggagacgaaatgaccctggagcgaaattcacgataatcgatagcctcagcctgtcgctgttcactaatgaaaccttcctgcagatggatgaagttggccatatcccccagaccgctgcttcacacgttgacagctctaacgcattgcccagagacgagcagcctccagcagacatgctgaggccagaccccagggatactctctatcgagtccctctgatccccaaaagtcatctgagacacgtcttacccgactgcccttataaaccttcttacttagtagacggtctccccctgcagcgataccaggggctcaggttcgtccatctgtctttcgtgtacccaaatgattacacccgattgtcccacatggagacacataataagtgcttttatcaggaaaacgcgtactatcaagacagattttcattccaagagtatattaaaatcgatcagcctgagaaacaagggctggaacagccaggcttcgaagaaaatctcctggaagagagccaatatggtgaagtggccgaagagaccccagcttctaacaaccagaatgctaggatgctcgagggcaggcagacacccgcaagtacactcgagcaagacgcaacggattatcgcttaagaagccttaggaagcttctggcccagccaagagagggactcctcgcacccttttctaagcgtaatagcacagcttcattccctggtcgcaccagtcatattcccgtgcagcagcccgagaaacgtaagcaaaagccgtctcctgagcccagccaagactcccctcattctgacaaatggcctccaggacacccagtgaaaaacctgccccaaatgcgtggcccaaggcctaggccagccggagattcaccacgaaagactcaatggctaaaccaggtcgaaagctatatagccgagcaacgtaggggcgataggatgagaccgcaggcacctggcagggggtggcatggggaggaagaagttgtcgcagctgcgggacaggagggccaggtggagggagaagaggagggagaggaagaggaggaagaagaagatatgagcgaggtgttcgaatacgtcccagtgttcgatcccgtggttaactgggaccaaactttctcagcacgcaatctggattttcaggctctccgaaccgactggattgacctgagctgtaacacttcgggaaacctactgttgcctgagcaggaagccctggaagtaacccgggtcttcctcaaaaagctcaaccagaggagcagaggcaggtaccaacttcaacggattgtgaacgtagaaaagcggcaggaccagctgcgtgggggtcgctacctactcgaattagagctgttggagcaaggccagcgcgttgttcggctaagtgagtatgtgtcggcaagaggatggcaaggcatcgatcccgcaggcggagaggaagttgaagccaggaatctgcaaggccttgtgtgggatccccataatcggaggcgccaagttttgaatacaagggctcaagaacctaaactgtgctggccacaggggttcagctggtcgcacagagccgtggttcacttcgtggtcccggtcaagaatcaagcgaggtgggtgcagcagttcataaaagatatggagaatttattccaagtgaccggggacccccattttaacatcgtgatcaccgattactccagcgaagatatggatgtggaaatggcactgaagcgatccaagctgagatcttatcagtatgtgaagctgagtgggaatttcgaaagatcagcagggctccaggcaggaatcgatctcgtgaaggaccctcattccataattttcttgtgcgacctgcatatacacttccctgcaggcgtcatcgacgccattaggaaacactgtgtggagggtaaaatggcatttgcaccaatggttatgaggcttcactgtggcgctaccccccagtggccggagggctattgggaagtgaatggcttcggattattaggcatttataagagtgacttggaccgaattgggggaatgaatacgaaagagtttagggacagatggggcggagaagattgggagctgctcgaccgcattctacaggcagggttggacgtggagcggctttctctgaggaactttttccatcacttccactcaaagcggggaatgtggagcaggcgccagatgaagacactttag

SEQ ID NO: 250515 - DNA, 5068 bp, Artificial Sequence
  derived and/or modified sequence
tcggcgcagcgccatggggagcccccgggccgcgcggcccccgctgctcctgcgcccggtgaagctgctgcggaggcgcttccggctgctgctggcgctcgccgtggtgtctgtggggctctggactctgtatctggaactggtggcgtcggcccaggtcggcgggaaccccctgaaccggaggtacggcagctggagagaactggccaaggctctggccagcaggaacattccagctgtggatccacacctccagttctaccatccccagaggctgagcctcgaggaccacgacattgaccaaggggtgagcagtaacagcagctacttgaagtggaacaagcctgtcccctggctctcagagttccggggccgtgccaacctgcatgtgtttgaagactggtgtggcagctctatccagcagctcaggaggaacctgcatttcccactgtacccccatattcgcacaaccctgaggaagcttgctgtgtcccccaaatggaccaactatggcctccgcatctttggctacctgcacccctttactgatgggaaaatccagtttgccattgctgcagatgacaacgcggagttctggctgagcctcgatgaccaggtctcaggcctccagctgctggccagtgtgggcaagactggaaaggagtggaccgccccgggagagtttgggaaatttcggagccaaatttccaagccggtgagcctgtcagcctcccacaggtactacttcgaggtgctgcacaagcagaatgaggagggcaccgaccacgtggaagttgcatggcgacggaacgaccctggagccaagttcaccatcattgactccctctccctgtccctcttcacaaatgagacgttcctacagatggatgaggtgggccacatcccacagacagcagccagccacgtggactcctccaacgctcttcccagggatgagcagccgcccgctgacatgcttcggcctgacccccgggacaccctctatcgagtgcctctgatccccaagtcgcatctccgccacgtcctgcctgactgtccctacaaacccagctatctggtggatgggcttcctctgcagcgctaccagggactccggtttgttcatctgtcttttgtttaccccaatgactatacccgcctgagccacatggagacccacaataaatgtttctaccaggaaaacgcctactaccaagaccggttcagctttcaggagtacatcaagattgaccagcctgagaagcaggggctggagcagccaggttttgaggaaaaccttctagaagagtcccagtatggggaagtggcagaggagacccctgcctccaacaaccagaatgccaggatgcttgagggaagacagacacctgcctccaccctggagcaagatgccactgactaccgcctccgaagcctgcggaaactcctggctcagccccgggagggcctgctggcccccttctccaagcggaactccacagcgtccttcccagggaggaccagccacattccagtgcagcagccagagaagaggaagcaaaaacccagccctgagcccagccaagattcacctcattccgacaagtggcctcctgggcaccctgtgaagaacctgcctcagatgagggggcccaggcccaggcccgctggtgacagccccaggaagactcagtggctgaaccaggtggagtcgtacatcgcagagcagagacggggtgacaggatgcggcctcaggcccctggaaggggctggcatggggaggaggaagtggtggcggccgcaggccaggaaggacaagtggagggagaggaagagggggaagaagaggaggaggaagaggatatgagtgaggtgttcgagtacgtacctgtgtttgacccggtagtaaactgggaccagaccttcagtgcccggaatctcgacttccaagccctgaggactgactggatcgatctgagctgtaacacatctggcaacctgctgcttccagagcaggaagctctggaggtcacgcgagtcttcttgaagaagctcaaccagaggagccgggggaggtaccagctacagcgcattgtgaacgtggaaaagcgtcaggaccagctacgtgggggtcgctacctcctggagcttgaactgttggaacaaggccagcgcgtggtgcggctctcggagtatgtgtctgcacgaggctggcagggcatcgatccagctggtggggaggaggtcgaggcccggaacctgcaaggcctggtctgggacccacacaaccgtaggagacaggtcctgaatacccgggcccaagagcccaagctgtgctggcctcagggtttctcctggagtcaccgagccgtggtccacttcgtcgtgcctgtgaagaaccaggcacgctgggtacagcaattcatcaaagacatggaaaacctgttccaggtcaccggtgacccacacttcaacatcgtcatcactgactatagcagtgaggacatggatgttgagatggcactgaagaggtccaagctgcggagctaccagtacgtgaagctaagtggaaactttgaacgctcagctggacttcaggctggcatagacctcgtgaaggacccgcacagcatcatcttcctctgtgacctccacatccacttcccagctggagtcatcgatgccattcggaagcactgtgtggagggaaagatggcctttgcccccatggtgatgaggctgcattgtggggccaccccccagtggcctgagggctactgggaggtgaatgggttcgggctgcttggcatctacaagtctgacctggacaggattgggggcatgaacaccaaggagttccgagaccgctggggcggggaagactgggagctgctggacaggatactccaagcgggcctggacgtggagcgtctctccctcaggaatttcttccatcatttccattccaagcgaggcatgtggagccgtcgccagatgaagacgctgtagccggagggtgtccgcggggcccagcactccccgctctggactagcagtggctccccagggccctgctactgttcagggatggggagtggggtgacggctggaccccaagaggcctcgaagctgacggcccactccacctggagctgtcccctcacagaggcaggttccggggctcctgtctctgcctcctgggccttcagaagggaggactttgagagagaggccaggagggaccacttgctcagtcgagaacgggaagagctcctgagaaggacgggtcaggaaggagagatctgactgagcgacaccatcctcatccatgaaggtgcacgcccacatcccccaagcgctcctcacgccaagcgctgaccaccagaccctcttctagtggacatattttattggggggcggggattttaaaaacagaaaaccgaaactgctgtccagagcgggggtgaggttgtgcactgagggactgtccccacgtgcaggcctcccgcccactcctatgtcccttgggcgttgtccctggccgcgggactggtcccacgtggggcaggtctctgctccaccccaggctcgtgccttccagagacacacatctcccagtagccaccaaacagctggccactgattagggcattaacttcctccggatggctcacgtcagaccagaagcacagaacgggctgtttctggtgcttgggcattgggaggtggggagctggcgggcagggggcttgccactccctggcactggacattgaggcctgcagaacaggcagggtgatgaaggcaggggagagaagccctttcccttaccggcgtgcctgtgggtaaggcctcccgagaggacatggagaagaggtaaagaggatgtggacatatctgtcaatttccttaggcaagaagcgggtgggggctggacagaaagggacgaaaagggaagtggaagctgtgagcctcacagtccagctccactgcagacctgcccttctgcagggagagccctggccacccggccttgagtggaagaagaggaaagggtgtacgggggcaaaaccctggacagggagcaggataagaagggggcgggatgagaggtttggggaggtgaggacattgccctgagatatcccctggaggcagggagaggagtgggggcaggaggaactgaagaggggggcagtttcagggaaaatagcccttagcctttttagtcgatgccaccctttctgtcacctggagaccttgtacttctcttgcactaataaccccggtgcttttgtggctgggggtttttctgttgctgctgctgcctccaccactgctgtgaattcacccatggtgcattggacactggatcttgaactccagagtctgtttagggaggtgagcacagggctgggggaggtgcggcggggcccagaagaccaggccactgagcccgcgctccaggctgtgacggtccaaaccacggcactggagctgcagggtctgcctagtgggctctgcattccccgagagcacgagtttggcacatgggagaatggagcccgtggagaaccttctggggggtcggggagaatccctgcctccctttaaggaatcatgaaggacagagacttttgagattgtggcttaggaaggccatacctgctccctgggctgtggctttttctggtccctgctgaggccgactggcccctggagaaggatggtggggcataggctagggctgcagttggccagtggggctgccagtttctttctgggaccactctcgtcctcgggcattgcactggaaggctggaaccagcccaaactgcccacctgcttcacttccaatgactaggagccagcccagcctcctgccctgcccacacccctgcgccctgggccagtgccttgcgtttgatgttacctccacaccatctgccttaagaggaagggccgggcaaggcccctactccctagagaaatgtcttgggtaggagagggtgtgggatggtgggaggggaagcattaaatacagcaacttcttagaaaaaaaaaaa

SEQ ID NO: 250516 - DNA, 2997 bp, Artificial Sequence
  derived and/or modified sequence
atgggcagccccagagccgccagaccccccctgctgctgagacccgtgaagctgctgagaagaagattcagactgctgctggccctggccgtggtgagcgtgggcctgtggaccctgtacctggagctggtggccagcgcccaggtgggcggcaaccccctgaacagaagatacggcagctggagagagctggccaaggccctggccagcagaaacatccccgccgtggacccccacctgcagttctaccacccccagagactgagcctggaggaccacgacatcgaccagggcgtgagcagcaacagcagctacctgaagtggaacaagcccgtgccctggctgagcgagttcagaggcagagccaacctgcacgtgttcgaggactggtgcggcagcagcatccagcagctgagaagaaacctgcacttccccctgtacccccacatcagaaccaccctgagaaagctggccgtgagccccaagtggaccaactacggcctgagaatcttcggctacctgcaccccttcaccgacggcaagatccagttcgccatcgccgccgacgacaacgccgagttctggctgagcctggacgaccaggtgagcggcctgcagctgctggccagcgtgggcaagaccggcaaggagtggaccgcccccggcgagttcggcaagttcagaagccagatcagcaagcccgtgagcctgagcgccagccacagatactacttcgaggtgctgcacaagcagaacgaggagggcaccgaccacgtggaggtggcctggagaagaaacgaccccggcgccaagttcaccatcatcgacagcctgagcctgagcctgttcaccaacgagaccttcctgcagatggacgaggtgggccacatcccccagaccgccgccagccacgtggacagcagcaacgccctgcccagagacgagcagccccccgccgacatgctgagacccgaccccagagacaccctgtacagagtgcccctgatccccaagagccacctgagacacgtgctgcccgactgcccctacaagcccagctacctggtggacggcctgcccctgcagagataccagggcctgagattcgtgcacctgagcttcgtgtaccccaacgactacaccagactgagccacatggagacccacaacaagtgcttctaccaggagaacgcctactaccaggacagattcagcttccaggagtacatcaagatcgaccagcccgagaagcagggcctggagcagcccggcttcgaggagaacctgctggaggagagccagtacggcgaggtggccgaggagacccccgccagcaacaaccagaacgccagaatgctggagggcagacagacccccgccagcaccctggagcaggacgccaccgactacagactgagaagcctgagaaagctgctggcccagcccagagagggcctgctggcccccttcagcaagagaaacagcaccgccagcttccccggcagaaccagccacatccccgtgcagcagcccgagaagagaaagcagaagcccagccccgagcccagccaggacagcccccacagcgacaagtggccccccggccaccccgtgaagaacctgccccagatgagaggccccagacccagacccgccggcgacagccccagaaagacccagtggctgaaccaggtggagagctacatcgccgagcagagaagaggcgacagaatgagaccccaggcccccggcagaggctggcacggcgaggaggaggtggtggccgccgccggccaggagggccaggtggagggcgaggaggagggcgaggaggaggaggaggaggaggacatgagcgaggtgttcgagtacgtgcccgtgttcgaccccgtggtgaactgggaccagaccttcagcgccagaaacctggacttccaggccctgagaaccgactggatcgacctgagctgcaacaccagcggcaacctgctgctgcccgagcaggaggccctggaggtgaccagagtgttcctgaagaagctgaaccagagaagcagaggcagataccagctgcagagaatcgtgaacgtggagaagagacaggaccagctgagaggcggcagatacctgctggagctggagctgctggagcagggccagagagtggtgagactgagcgagtacgtgagcgccagaggctggcagggcatcgaccccgccggcggcgaggaggtggaggccagaaacctgcagggcctggtgtgggacccccacaacagaagaagacaggtgctgaacaccagagcccaggagcccaagctgtgctggccccagggcttcagctggagccacagagccgtggtgcacttcgtggtgcccgtgaagaaccaggccagatgggtgcagcagttcatcaaggacatggagaacctgttccaggtgaccggcgacccccacttcaacatcgtgatcaccgactacagcagcgaggacatggacgtggagatggccctgaagagaagcaagctgagaagctaccagtacgtgaagctgagcggcaacttcgagagaagcgccggcctgcaggccggcatcgacctggtgaaggacccccacagcatcatcttcctgtgcgacctgcacatccacttccccgccggcgtgatcgacgccatcagaaagcactgcgtggagggcaagatggccttcgcccccatggtgatgagactgcactgcggcgccaccccccagtggcccgagggctactgggaggtgaacggcttcggcctgctgggcatctacaagagcgacctggacagaatcggcggcatgaacaccaaggagttcagagacagatggggcggcgaggactgggagctgctggacagaatcctgcaggccggcctggacgtggagagactgagcctgagaaacttcttccaccacttccacagcaagagaggcatgtggagcagaagacagatgaagaccctgtag

SEQ ID NO: 250517 - protein, 950 aa, Artificial Sequence [sequence omitted]

SEQ ID NO: 250518 - protein, 921 aa, Artificial Sequence
  derived and/or modified sequence
MIDLSISNLEGLRTKCATSNDLTQKEIRTLESKLVKYFSRQLSCKKKVALQERNAELDGFPQLRHWFRIVDVRKEVLEEISPGQLSLEDLLEMTDEQVCETVEKYGANREECARLNASLSCLRNVHMSGGNLSKQDWTIQWPTTETGKENNPVCPPEPTPWIRTHLSQSPRVPSKCVQHYCHTSPTPGAPVYTHVDRLTVDAYPGLCPPPPLESGHRSLPPSPRQRHAVRTPPRTPNIVTTVTPPGTPPMRKKNKLKPPGTPPPSSRKLIHLIPGFTALHRSKSHEFQLGHRVDEAHTPKAKKKSKPLNLKIHSSVGSCENIPSQQRSPLLSERSLRSFFVGHAPFLPSTPPVHTEANFSANTLSVPRWSPQIPRRDLGNSIKHRFSTKYWMSQTCTVCGKGMLFGLKCKNCKLKCHNKCTKEAPPCHLLIIHRGDPARLVRTESVPCDINNPLRKPPRYSDLHISQTLPKTNKINKDHIPVPYQPDSSSNPSSTTSSTPSSPAPPLPPSATPPSPLHPSPQCTRQQKNFNLPASHYYKYKQQFIFPDVVPVPETPTRAPQVILHPVTSNPILEGNPLLQIEVEPTSENEEVHDEAEESEDDFEEMNLSLLSARSFPRKASQTSIFLQEWDIPFEQLEIGELIGKGRFGQVYHGRWHGEVAIRLIDIERDNEDQLKAFKREVMAYRQTRHENVVLFMGACMSPPHLAIITSLCKGRTLYSVVRDAKIVLDVNKTRQIAQEIVKGMGYLHAKGILHKDLKSKNVFYDNGKVVITDFGLFSISGVLQAGRREDKLRIQNGWLCHLAPEIIRQLSPDTEEDKLPFSKHSDVFALGTIWYELHAREWPFKTQPAEAIIWQMGTGMKPNLSQIGMGKEISDILLFCWAFEQEERPTFTKLMDMLEKLPKRNRRLSHPGHFWKSAEL

SEQ ID NO: 250519 - DNA, 2766 bp, Artificial Sequence
  derived and/or modified sequence
atgatagacctatccatttctaacctagagggcctccgcacgaaatgtgcgacaagcaacgatttgacccagaaagagattcgaaccctggaaagcaagctggttaaatacttctcgcggcagctgtcatgcaagaaaaaggtggccctacaagagcgtaacgccgaacttgacggcttcccccagttaaggcattggttccgcatcgtggacgtgagaaaagaggtgttggaagagatatcccctggtcagctgtccctggaagatctcctggagatgacagacgagcaggtatgtgaaaccgtcgagaaatatggcgcgaatcgggaggagtgcgctaggctcaacgcatcactgtcttgcctaaggaatgttcatatgtcggggggcaacctatcaaaacaggactggaccatccagtggcctacaaccgagacgggcaaggagaacaatcccgtctgtccacctgaacccacaccctggattcgaactcatttatcccagtcaccaagagtaccctccaagtgtgtgcagcactattgccacactagccccactcccggagctcctgtctacacacatgtcgatagattgacagtcgacgcgtatcccggtctgtgccctccccccccactggaatctggacaccggtcgctgcctccatccccccgtcagcgccacgcagtcagaactcccccgcggacaccaaacatagtgactaccgtgaccccccctggcactcccccaatgcgcaagaaaaataagctcaagcctcccggcactcctccaccatcttcccgcaaattgatacacttaattccaggtttcaccgccctccaccggtctaagagccatgagttccagctggggcatcgtgtcgatgaggcccacactccgaaggcgaagaagaagtccaagccattgaatctgaagattcatagcagcgtaggatcgtgcgaaaacatcccctctcagcaacgctcacccctcctctccgagcggagtctgagaagctttttcgtggggcacgccccttttctcccttcaactcctccagtccataccgaagctaacttctcggcgaacacgctctccgtcccccgttggagcccccaaattccaagacgagaccttggaaacagcatcaaacacagattctctacgaagtattggatgtcccaaacttgtaccgtgtgcggcaagggcatgttatttggacttaagtgtaagaactgtaagttgaagtgccataataaatgcacaaaggaagctccaccatgccacctcctcataattcaccgaggtgatcccgctagattggttagaacagaaagcgtcccttgtgacataaacaaccctctacggaaacctcctagatattctgatctgcacattagtcagacgctacctaaaaccaataaaattaataaggaccatattcccgtgccatatcaaccagactccagttccaacccttcctccaccacatcctctaccccaagtagccctgcacctccgctacctccctctgccacccccccatcacccctgcatccatctcctcagtgcacgcgccaacagaagaacttcaacctccctgccagtcactattacaaatataaacagcagttcatattcccagacgtcgtgcccgtgccagaaacccctacgcgggctccacaggtcatcctccatcctgtgacatcaaaccccatcctcgaggggaatccgctcttgcagatagaagtggaacctacttcagagaatgaggaagtccatgatgaggcggaggaaagtgaggacgactttgaggagatgaacctgtcactgctgagcgcccggagttttcctcgcaaggcttcccaaacatcaatatttctgcaggagtgggatatcccatttgaacagctagagattggagaactcatcggcaaaggtcggttcggccaagtgtatcacggacgatggcacggcgaagtggcaattcggctaatagatattgagcgcgataatgaagaccagctcaaggcctttaaaagggaggtcatggcttatagacagaccaggcatgagaatgtcgtgctctttatgggggcctgtatgtcgcccccccacttagcaattataaccagcctctgtaagggccgcacactgtatagtgtcgtgagagatgcaaagatagtgctggatgtgaacaagactcggcagatcgcccaagaaattgtcaaaggcatgggttacctgcatgctaagggtatcctccataaagacttgaagagtaaaaatgtgttctatgataatggtaaggtggttattaccgactttgggctctttagcatatctggagtgctgcaggcggggaggcgggaggacaaattgagaatacagaatggatggttatgtcacctggcaccggagatcatacgccaactttcacccgacacggaggaagataagctcccattctccaaacactctgacgtgttcgcactgggcaccatatggtacgagctacacgcaagggagtggcccttcaaaacccagcccgccgaagcaataatatggcaaatgggcactggcatgaagcccaatctaagtcagatcggcatgggcaaggaaatttccgacatactccttttttgttgggcgttcgagcaagaggagagacctaccttcacaaagttaatggatatgctagaaaaacttccaaaacgaaaccgtagattgagccatccggggcacttctggaagtctgcagaactgtag

SEQ ID NO: 250520 - DNA, 2766 bp, Artificial Sequence
  derived and/or modified sequence
atgattgacctgagcatcagcaacctggagggcctgcggaccaagtgtgccaccagcaatgacctgacccagaaggagatccgcaccctggagagcaagctggtgaagtacttcagccggcagctgagctgcaagaagaaggtggccctgcaggagagaaatgctgagctggatggcttcccccagctgcggcactggttcagaattgtggatgtgaggaaggaggtgctggaggagatcagccctggccagctgagcctggaggacctgctggagatgacagatgagcaggtgtgtgaaacagtggagaagtatggagccaaccgggaggagtgtgcccggctgaatgccagcctgagctgcctgagaaatgtgcacatgtctgggggcaacctgagcaagcaggactggaccatccagtggcccaccacagagaccgggaaggagaacaaccctgtgtgccccccagagcccaccccctggatccgcacccacctgagccagagcccccgggtgcccagcaaatgtgtgcagcactactgccacaccagccccacccctggggcccctgtgtacacccacgtggaccggctgactgtggatgcctacccaggcctgtgccccccaccacccctggagagcggccacaggagcctgccccccagcccccggcagagacatgctgtgaggaccccacccaggacccccaacatcgtgaccaccgtgaccccacctggcaccccacccatgaggaagaagaacaagctgaagcccccaggcaccccaccacccagcagcaggaagctgatccacctgatccctggcttcaccgccctgcacaggagcaagagccatgagttccagctgggccaccgggtggatgaggcccacacccccaaggccaagaagaagagcaagcccctgaacctgaagatccacagctctgtgggcagctgtgagaacatccccagccagcagaggagccccctgctgtctgagaggagcctgcggagcttctttgtgggccacgcccccttcctgcccagcaccccacctgtgcacacagaggccaacttcagcgccaacaccctgtctgtgccccgctggagcccccagatcccccggcgggacctgggcaacagcatcaagcaccgcttcagcaccaagtactggatgagccagacctgcaccgtgtgtgggaagggcatgctgtttggcctgaagtgcaagaactgcaagctgaagtgccacaacaagtgcaccaaggaggccccaccctgccacctgctgatcatccacagaggagaccctgcccggctggtgaggacagaatctgtgccctgtgacatcaacaaccccctgaggaagcccccacgctacagcgacctgcacatcagccagaccctgcccaagaccaacaagatcaacaaggaccacatccctgtgccctaccagcctgacagcagcagcaaccccagcagcaccaccagcagcacccccagcagccctgccccacccctgccccccagcgccaccccacccagccccctgcaccccagcccccagtgcacccggcagcagaagaacttcaacctgcctgccagccactactacaagtacaagcagcagttcatcttcccagatgtggtgcctgtgcctgagacccccacccgggccccccaggtgatcctgcaccctgtgaccagcaaccccatcctggagggcaaccccctgctgcagatcgaggtggagcccaccagtgaaaatgaggaggtgcatgatgaggccgaggagagtgaagatgactttgaggagatgaacctgagcctgctgagcgcccgctccttccccaggaaggccagccagaccagcatcttcctgcaggagtgggacatcccctttgagcagctggagattggagagctgattggcaagggccgcttcggccaggtgtaccacggccgctggcatggagaggtggccatccggctgattgatattgagcgggacaatgaagaccagctgaaggccttcaagcgggaggtgatggcctaccggcagaccaggcatgaaaatgtggtgctcttcatgggcgcctgcatgagccccccccacctggccatcatcaccagcctgtgcaagggccgcaccctgtacagcgtggtgagagatgccaagatcgtgctggatgtgaacaagacccggcagatcgcccaggagatcgtgaagggcatgggctacctgcacgccaagggcatcctgcacaaggacctgaagagcaagaatgtgttctatgacaatggcaaggtggtgatcacagactttggcctcttcagcatctctggagtgctgcaggccggccggcgggaggacaagctgcgcatccagaatggctggctgtgccacctggcccctgagatcatccggcagctgagcccagacacagaggaggacaagctgcccttcagcaagcacagtgatgtgtttgccctgggcaccatctggtatgagctgcacgcccgggagtggcccttcaagacccagcctgctgaggccatcatctggcagatgggcaccggcatgaagcccaacctgagccagatcggcatgggcaaggagatcagtgacatcctgctcttctgctgggcctttgagcaggaggagcggcccaccttcaccaagctgatggacatgctggagaagctgcccaagaggaacagaaggctgagccaccctggccacttctggaagtctgctgagctgtag

SEQ ID NO: 250521 - DNA, 2766 bp, Artificial Sequence
  derived and/or modified sequence
atgatcgacctgagcatcagcaacctggagggcctgcggaccaagtgtgctacctcgaatgatctcacccagaaagagattcggacccttgaatctaagctcgtgaaatacttctcccgacaactcagctgtaaaaagaaggtggctttacaggagagaaacgcagagcttgacggtttcccccagttacggcattggttcagaattgtagacgtccgtaaagaggtcttggaggaaatttcccccggccaactgagcctagaagatttgttggagatgaccgatgagcaggtatgcgaaaccgtggagaagtacggagccaatcgggaagagtgcgcccgtctgaacgcctccctgtcctgtcttcggaatgtgcatatgtccggcggaaatctttcaaagcaagattggaccatacagtggcccactaccgaaactggaaaagaaaacaacccagtttgcccacctgaaccaacaccgtggattagaacccatttgtcgcaaagcccaagggtgccttccaagtgtgtacagcactattgtcacacctcccccacccctggggctcccgtgtacactcatgttgatcgattgactgttgatgcgtatcccggcttgtgcccacctcccccactggagagtggccaccgcagcttgccccccagtccacggcaaagacacgctgtccgtacacctcctagaacgcctaacattgtaacaacggtcacccccccaggaaccccccctatgcggaaaaaaaacaagctgaagcctcctgggaccccccctccatctagcagaaagttaatacacctgatccctggattcacggccctgcatcgaagcaaaagccacgagtttcagctgggtcaccgcgttgacgaggctcacaccccgaaagccaaaaagaaaagtaaacccttaaaccttaagattcatagcagtgtggggagctgcgaaaatatcccatcacagcagcgtagcccactcttgagtgagcggagcctccgaagcttctttgttggccatgccccctttctgccctccacgcccccagtacataccgaagctaatttctctgcgaataccctctcagtccctcgttggtcacctcaaatccctcgtcgcgatctgggaaattctattaagcaccggttctccaccaagtactggatgtcgcagacgtgcaccgtgtgcggcaaaggaatgctgtttggcctgaagtgcaaaaattgcaaattgaagtgccacaataaatgtacgaaagaggcaccaccctgccatttgctgatcatacatcggggagatcccgctaggctcgtccgcaccgagtctgtgccctgcgatattaacaacccactgaggaaacccccacggtacagcgacctgcacatttctcagactttgcccaagacaaacaaaatcaacaaggatcacattccagttccatatcagccagattcaagttcaaacccaagctctaccaccagctctaccccatcatctcctgccccccccctgccccccagtgccaccccccccagtccactacacccgtcaccacagtgcacaagacaacagaagaacttcaatctccctgcttctcattattataagtacaagcaacagtttatctttccggatgtggtgccggtgcctgagaccccaacccgcgcgccccaagtgatcctgcaccccgttaccagtaaccccatattggagggcaacccgctgttacagattgaagtagagccaacgtccgaaaatgaggaggtccacgatgaggctgaagagtcggaggacgacttcgaagaaatgaatctgtctctgctttctgcacgctcgtttcccagaaaggcttcccagacaagcattttcctgcaagaatgggatattccctttgaacagttagaaataggggaactcattggaaaggggcggttcggtcaagtgtatcatggccggtggcatggtgaggtggcaatccggcttattgacatcgaaagagataacgaagaccaactcaaggcatttaagcgcgaggtaatggcctaccgccagacacggcacgagaatgtggtcttgttcatgggggcgtgcatgtcccctcctcatctagctataatcaccagcctctgcaaggggagaaccctttactccgttgtgagagatgccaaaattgttctggatgtgaataaaacacggcagatcgcacaagagattgttaagggaatgggctatctccacgccaaaggcatcctccataaagacttgaaaagtaaaaacgtgttctatgacaatgggaaagttgtgatcactgacttcggcctgttttctatcagtggtgtgctccaagctggtagaagagaagataagctgcggattcagaatggatggctctgccatctcgcccccgagatcatcaggcagttgagtcctgatacagaggaggataaactgcctttctccaagcattctgatgtgtttgcactcggcactatctggtatgaactacatgctcgggagtggccattcaaaacacaacctgctgaagccattatctggcagatgggcaccggaatgaagccaaatctgtcccagattggaatggggaaagagattagcgacatcctccttttctgttgggccttcgaacaggaagagcggcccacattcaccaaactgatggacatgctcgagaaacttccgaaaagaaaccgtagattgtcccatcccgggcacttttggaagtccgctgagctgtag

SEQ ID NO: 250522 - DNA, 2766 bp, Artificial Sequence
  derived and/or modified sequence
atgatcgacctgtcaataagtaatctcgagggactcaggacaaagtgcgccaccagtaatgatcttacacagaaggagattcggaccctggagtctaaactggttaaatacttctcccgccagctaagttgcaagaaaaaagtggctctccaggagaggaacgccgaactggatgggttcccgcagttgcggcattggttccggatcgtggatgtgcgcaaagaggttctggaggagatttccccaggtcaactgagtcttgaagatctgctggaaatgacagacgagcaagtatgcgagacagttgaaaaatacggcgctaacagggaggagtgcgctcgactaaacgccagtctctcgtgccttagaaacgttcacatgagtggcggaaacctatcaaaacaagattggactatccagtggcccactacagagaccggtaaggaaaataaccccgtctgtcctcctgagcctactccgtggatcagaacacatcttagtcaatctcctcgcgtgcctagcaaatgtgtccagcactactgccacacttctcctactccaggcgctcctgtgtacactcacgtggatagactgacagttgacgcgtatcccggactttgtccccctcctcctctggagtcgggacatcgatcccttccccctagcccgaggcaacggcacgctgtaaggactccaccaagaacgcccaacattgtgacgactgttaccccacctggtacgccccctatgagaaagaaaaataagctgaagccacctggcactccgcctccaagctccaggaaactgatccacttgatacctggtttcacagccctgcaccgttctaaatcccatgaattccaactgggccaccgcgtagacgaagcccacacacccaaggccaagaaaaagtctaaacctttgaacttgaaaatccactccagtgtgggatcttgtgaaaacatcccctcacagcagcgcagcccccttctctccgagcgcagtcttcgctccttcttcgtcggccacgctcctttcttgccatctacacctccagtccatactgaagctaatttctccgccaacaccctgtccgtcccccgatggtccccccagattcccaggcgcgacctgggtaacagcatcaagcaccggttttccaccaagtactggatgtctcagacctgtaccgtatgtggaaagggcatgctgttcggattaaaatgtaagaactgcaagcttaagtgtcacaacaagtgtacaaaagaggcccctccatgccacctgctgattatacacagaggggaccccgcaaggttggtgcgcactgagtctgtgccctgtgatattaataatcctttgaggaaacctccaaggtactccgacttgcacatttcccaaaccttgcccaagacaaacaagatcaataaagatcatatacccgtgccctatcaaccagattcctcatccaatccatccagtacgacaagctccactcctagcagccccgcaccacccctccctccatctgctaccccacctagtccactccatccatccccacagtgtaccagacagcaaaagaattttaaccttcccgcaagccactactacaagtacaagcaacagtttatctttcctgatgtggtgcctgtccctgagaccccaacacgtgctccacaggtgatattgcaccctgtgaccagtaaccccatcctcgagggcaacccactcctccagatcgaggtcgagcctacctccgagaatgaggaggtgcatgatgaggcagaggagagtgaagacgactttgaggaaatgaacctgagcctgttaagcgccagaagctttccacgcaaggcttcccagacaagcatctttcttcaggagtgggatatcccatttgagcaactcgaaatcggcgagttgatcggcaaaggcagatttgggcaggtgtaccatggcagatggcacggcgaggttgctattcggttgatcgacatagagcgcgacaacgaagaccagctgaaggccttcaagagggaagtgatggcatataggcagacacgacatgagaacgtggtgctctttatgggcgcttgcatgtcaccccctcacttggccatcatcacaagcctgtgtaaagggcgtacactctactccgtggtgagggacgctaaaattgtgctggatgtgaataagacccggcaaattgcacaggaaatcgtgaagggaatgggctacctccacgcaaaaggcattctgcacaaggatctgaagagtaagaacgtcttctacgataacggcaaagtcgttattactgactttggactgttctctatcagtggggtattgcaagctggcagaagagaagataaactgcgaattcagaacggttggctgtgtcatctcgcacccgagataatccgacagctgagccctgacactgaagaggataagctgccgttttcaaagcactcagacgtgttcgcccttggaacaatttggtacgagctgcacgcccgagaatggcccttcaagacacaaccagccgaggctataatttggcagatgggcaccgggatgaagccaaacctttcccagatagggatgggcaaggagatctccgatatcctgctgttctgctgggccttcgagcaggaggagcgccctacgtttactaagctcatggacatgctcgaaaagcttccaaagcggaaccgacgcttatcacaccctgggcacttctggaaatccgccgaattgtag

SEQ ID NO: 250523 - DNA, 2766 bp, Artificial Sequence
  derived and/or modified sequence
atgatcgacctgagcatcagcaacctggagggcctgagaaccaagtgcgccaccagcaacgacctgacccagaaggagatcagaaccctggagagcaagctggtgaagtacttcagcagacagctgagctgcaagaagaaggtggccctgcaggagagaaacgccgagctggacggcttcccccagctgagacactggttcagaatcgtggacgtgagaaaggaggtgctggaggagatcagccccggccagctgagcctggaggacctgctggagatgaccgacgagcaggtgtgcgagaccgtggagaagtacggcgccaacagagaggagtgcgccagactgaacgccagcctgagctgcctgagaaacgtgcacatgagcggcggcaacctgagcaagcaggactggaccatccagtggcccaccaccgagaccggcaaggagaacaaccccgtgtgcccccccgagcccaccccctggatcagaacccacctgagccagagccccagagtgcccagcaagtgcgtgcagcactactgccacaccagccccacccccggcgcccccgtgtacacccacgtggacagactgaccgtggacgcctaccccggcctgtgcccccccccccccctggagagcggccacagaagcctgccccccagccccagacagagacacgccgtgagaaccccccccagaacccccaacatcgtgaccaccgtgaccccccccggcaccccccccatgagaaagaagaacaagctgaagccccccggcacccccccccccagcagcagaaagctgatccacctgatccccggcttcaccgccctgcacagaagcaagagccacgagttccagctgggccacagagtggacgaggcccacacccccaaggccaagaagaagagcaagcccctgaacctgaagatccacagcagcgtgggcagctgcgagaacatccccagccagcagagaagccccctgctgagcgagagaagcctgagaagcttcttcgtgggccacgcccccttcctgcccagcaccccccccgtgcacaccgaggccaacttcagcgccaacaccctgagcgtgcccagatggagcccccagatccccagaagagacctgggcaacagcatcaagcacagattcagcaccaagtactggatgagccagacctgcaccgtgtgcggcaagggcatgctgttcggcctgaagtgcaagaactgcaagctgaagtgccacaacaagtgcaccaaggaggcccccccctgccacctgctgatcatccacagaggcgaccccgccagactggtgagaaccgagagcgtgccctgcgacatcaacaaccccctgagaaagccccccagatacagcgacctgcacatcagccagaccctgcccaagaccaacaagatcaacaaggaccacatccccgtgccctaccagcccgacagcagcagcaaccccagcagcaccaccagcagcacccccagcagccccgccccccccctgccccccagcgccaccccccccagccccctgcaccccagcccccagtgcaccagacagcagaagaacttcaacctgcccgccagccactactacaagtacaagcagcagttcatcttccccgacgtggtgcccgtgcccgagacccccaccagagccccccaggtgatcctgcaccccgtgaccagcaaccccatcctggagggcaaccccctgctgcagatcgaggtggagcccaccagcgagaacgaggaggtgcacgacgaggccgaggagagcgaggacgacttcgaggagatgaacctgagcctgctgagcgccagaagcttccccagaaaggccagccagaccagcatcttcctgcaggagtgggacatccccttcgagcagctggagatcggcgagctgatcggcaagggcagattcggccaggtgtaccacggcagatggcacggcgaggtggccatcagactgatcgacatcgagagagacaacgaggaccagctgaaggccttcaagagagaggtgatggcctacagacagaccagacacgagaacgtggtgctgttcatgggcgcctgcatgagccccccccacctggccatcatcaccagcctgtgcaagggcagaaccctgtacagcgtggtgagagacgccaagatcgtgctggacgtgaacaagaccagacagatcgcccaggagatcgtgaagggcatgggctacctgcacgccaagggcatcctgcacaaggacctgaagagcaagaacgtgttctacgacaacggcaaggtggtgatcaccgacttcggcctgttcagcatcagcggcgtgctgcaggccggcagaagagaggacaagctgagaatccagaacggctggctgtgccacctggcccccgagatcatcagacagctgagccccgacaccgaggaggacaagctgcccttcagcaagcacagcgacgtgttcgccctgggcaccatctggtacgagctgcacgccagagagtggcccttcaagacccagcccgccgaggccatcatctggcagatgggcaccggcatgaagcccaacctgagccagatcggcatgggcaaggagatcagcgacatcctgctgttctgctgggccttcgagcaggaggagagacccaccttcaccaagctgatggacatgctggagaagctgcccaagagaaacagaagactgagccaccccggccacttctggaagagcgccgagctgtag

SEQ ID NO: 250524 - protein, 280 aa, Artificial Sequence
  derived and/or modified sequence
MTTALGSQLSSSQTVIPGSSGTISHTTVAPGSSVTGTTTGASDDQVTGSKTGTTGVALSTTVAPGSSSTEATTSTGVHRTTVVGQKTGATTRGSAKQGTRSTIEATTSFRGTGTTGSGMNTGTTGVVSGNTISPSSFNTEATSGTSERPNPGSEIGTTGIVSGTTVAPGSSNTEATTSLGNGGTTEAGSKIVTTGITTGTTIVPGSFNTKATTSTDVGVATGVGMATGITNIISGRSQPTGSKTGYTVTGSGTTALPGGFRTDSPSFPLFLICSYRGHNF

SEQ ID NO: 250525 - DNA, 788 bp, Artificial Sequence
  derived and/or modified sequence
ctgtagtacacatccttgatggcaccaagtagcaaacgtgctgtggagactagatctcactctcaaatctgtcctgggatgcaagtgcctctacgaatgtggtgcagaagctacaaatgtggtgcagaagacagcttcaaagaggaaaggaatataggtgccaagagcctgcaatccttcccaaacagccctttgttctgtgctcaagtcaacccactgggactttactacagataatgataagagaaatggcttgtgagattgctcatgatcctgagactccagcaggatgtcttatcaacagcagcagtgcaagcagccctgccagccacctcctgtgtgccccacgccaaagtgcccagagccatgtccacccccgaagtgccctgagccctgcccatcaccaaagtgtccacagccctgcccacctcagcagtgccagcagaaatatcctcctgtgacaccttccccaccctgccagccaaagtgtccacccaagagcaagtaacagcttcaggattcatcaggagcatgagaggataaggataattggctcacctcgttccacagctccacttgcatcttctcaccaaagccttccatggatgcacagggagcttctttctccttaacctgtggcctgcctgtgatgatctgtgacagcaaaagattccctttctgaggctgccatactgccactgtccaggtggagctaagaaaaggaagtcctcagctgtgccagctcccagagcttcggaagaaagagcagcagctctctccctgggaac

SEQ ID NO: 250526 - DNA, 159 bp, Artificial Sequence
  derived and/or modified sequence
atgaagctgtgcgttacagtcctctctttattggtgctggtcgccgcattttgttcactggcacttagtgccccatccaataagcccctcgaggcctctaagtccgcgttaacaccagtatcacctggatcgaggtcaacctgtatgacctggaattag

SEQ ID NO: 250527 - DNA, 108 bp, Artificial Sequence
  derived and/or modified sequence
agtccgaacaaactattattcgacccaagagtcggcggacgcgtatcccatgtgttctttctgtttcctccattcgtgctcctgcccggtccacctggcctcccctag

SEQ ID NO: 250528 - DNA, 105 bp, Artificial Sequence
  derived and/or modified sequence
tcacccaataaattactatttgaccccagagtgggtggaagggtgagccatgtgttttttttattcccaccctttgtgcttctcccgggccctcccgggctcccc

SEQ ID NO: 250529 - DNA, 843 bp, Artificial Sequence
  derived and/or modified sequence
atgaccaccgccttgggtagtcagctcagctcgagccaaacagtgattccaggaagcagcggcacgatttcacatacaaccgtggcccctggcagtagcgtgacaggcactaccaccggagcttcagatgatcaggttactggcagtaaaaccggaaccactggagtggccttatctactactgtggcaccgggaagttcttcaacagaggcgaccacaagcacaggcgtccaccggaccactgttgtggggcagaaaactggggccacaacccgcgggtcggccaaacaaggcactcggagtactatagaagctactacgagttttagaggaacaggaactaccgggagcgggatgaacacgggtaccacgggggtagtttctgggaatactattagcccctctagcttcaataccgaagctacaagcgggacgtcggagcgccctaaccctggcagtgaaattggaacaaccgggattgtctcagggaccaccgttgcccctggcagctctaacacagaagctaccacgtccctggggaatggcggaactactgaggccgggtcaaagattgtgaccacaggcattacaaccggaaccactatcgtgccagggagctttaacacaaaagccaccactagcacagacgtgggggtggctaccggcgtggggatggccacagggattacaaacatcatttcagggagaagccagccaaccgggtccaagacaggctatactgtcactggatcaggcacaactgcgctgcctgggggcttccgcaccgattccccctcgttccccctgttcctgatctgtagctatcggggccacaacttttag

SEQ ID NO: 250530 - DNA, 843 bp, Artificial Sequence
  derived and/or modified sequence
atgaccacagccctgggcagccagctgagcagcagccagaccgtcatccctggcagcagcggcaccatcagccacaccaccgtggcccctggcagctctgtgacaggcaccaccactggagccagtgatgaccaggtgacaggcagcaagacaggcaccaccggggtggccctgagcaccaccgtggcccctggcagcagcagcacagaggccaccaccagcactggagtgcacaggaccaccgtggtgggccagaagacaggagccaccacccggggcagcgccaagcagggcaccaggagcaccatcgaggccaccaccagcttccggggcaccggcaccactggaagtggcatgaacacaggcaccaccggggtggtgtctggcaacaccatcagccccagcagcttcaacacagaggccaccagcggcaccagcgagcggcccaaccctggcagcgagatcggcaccaccggcatcgtgtctggcaccaccgtggcccctggcagcagcaacacagaggccaccaccagcctgggcaatggaggcaccacagaagctggcagcaagatcgtgaccaccggcatcaccaccggcaccaccatcgtgcccggcagcttcaacaccaaggccaccaccagcacagatgtgggcgtggccactggagtgggcatggccaccggcatcaccaacatcatcagcggccgcagccagcccaccggcagcaagacaggctacacagtgactggaagtggcaccacagccctgcccggcggcttcagaacagacagccccagcttccccctcttcctgatctgcagctaccggggccacaacttctag

SEQ ID NO: 250531 - DNA, 2446 bp, Artificial Sequence
  derived and/or modified sequence
aggcacctctggggtggcacctggcacaacagttgcccctggaagtttcagcacagcagctacaacttctcctggagcaagtggagtgactggcactggacccactgcagagaccacaactttcctaggaggaagtagcaccactggagcagaaataaaatcaggagccaccactggagcaccaggaagtaagacaggcacagctaaagtgctctctggtacgacagttgcctctgggagctccaactcagaggctacaactttctctggaatcactgaagcagtaacagtcccaagtaaaaatggatctatgaccactgcactggggagccaactctccagcagtcaaacagtgattccaggttccagtggcaccatctctcacacaactgttgcacctggaagttctgttacaggaaccaccactggtgcatcagatgatcaagtcactggaagtaaaacaggcactactggtgtggccttgagcacaactgttgcacctggaagttccagtacagaagccacaacttccacaggagtccatagaaccactgtagtgggacagaagacaggagctaccactagagggtcagcaaagcaaggaactagaagcacaatagaagctacgacgtcctttagaggcactgggaccacaggaagtggaatgaatacaggtactactggagtggtctctggcaacaccatctcacctagcagtttcaacacagaagctaccagtggcacatctgagaggccaaaccctggaagtgaaataggcaccactggcatagtctctggcacaacagttgcacctggaagttccaacacagaagccacaacttctttgggcaatggtggaaccactgaggctggaagtaaaatagttaccactgggataactactggcacgaccattgtacctgggagtttcaacacaaaggctaccacttctacagacgttggagttgccactggagttggaatggcaactgggatcaccaacataatttcagggagaagccaacctactggaagtaaaacaggctacactgtaacaggctctggaacaacagccttacctggaggtttcagaacagattctccatcttttccacttttcttgatttgctcttacagaggccacaacttttaaaggtgatgttggaaccactgaagcagaaatttcatcaggcaataccccaggatcaacgggagtcaccagcagccaagaaggaaccactgtggtatcaagtggaatcactggaatcccagaaacttccatctcaggtccttccaaggaagcatctgacaaaaccactgctcctggacctcctaccacagtcactgcttccacaggagtcaaagaaacttctgaaactggagtgcaaacaggctccaccttggttacagctggagtgccaacaagaccacaagtatcccagccagaaaccactgtcgtggcaaccagagaagtagaaaccgaaaataaaacagaatgtctagcctcacttccaccagctccaggtttgtcacggtccattgggagaagagaaatctcctggagacatatggactgccaattgccacagaggtacctgtactgatgcaaagactatagactgtaaacctgaggagtgcccttctccacccacatgcaaaaccggcgagaagcttgtgaagttccaatctaatgacacctgctgtgaaatcggatactgtgaaccaagaacatgtttatttaacaatactgactatgagattggtgcttcattcgatgaccccagcaacccctgtgtctcctactcctgcaaagacacgggctttgctgcagtagtccaggactgcccaaagcaaacctggtgtgcagaagcaagtcatcttaactaatgaacgccgagattcagttctcatattaaacaaaccctggccgggcgcggtggctcaggcctgtaatcccagcactgtgggaggccgaggcgggcggatcacctgaggtcagaggaagacagaatctatgattcaaaaaaatgttgctatacatgtaagaataattgcagatcttcccttgtaaatgtgactgttatctacagtggttgcaagaaaagagttcagatggcaaaatgcacaggggaatgtgaaaagactgccaagtacaattatgatatcttactcttggaacattcatgcctttgctgccgagaagaaaactatgaactcagagacattgtacttgactgtcctgatggcagtacaatcccttaccaatacaagcatatcacgacctgctcttgtttagacatatgccaactatatacgaccttcatgtacagttaatgctgacatcaccttcccagttttaacaggcctggtatttattttataagtgaggaaaaataatcatttaaaaagtgagaataaactaaacaatgtgagaataactcaaaac

SEQ ID NO: 250532 - DNA, 843 bp, Artificial Sequence
  derived and/or modified sequence
atgaccaccgccctgggcagccagctgagcagcagccagaccgtgatccccggaagcagcggaactatctcgcacacaacagttgccccagggtcaagcgtcaccggaaccaccaccggagcaagcgacgatcaggtgacaggctccaagactgggaccactggagtcgccctctcaactaccgttgctcccggcagtagctccactgaagccacaaccagcaccggggtacatcgcacgactgtagtggggcaaaaaacgggagccactacaaggggcagcgcaaaacaaggcactaggtccaccatagaggctaccacatcttttcgcgggacgggcactaccggcagtggtatgaacactggcaccactggtgtcgtgtcgggtaacacaatttccccaagctctttcaacacggaagctacatccgggacatccgaacgccccaatccgggctcagagatcggaacaacaggcatcgtctctgggacaacagtggctccaggctcaagcaacacagaggccaccacatcactgggtaacggcggaacaactgaggcgggtagtaagatagtaactactggaattacgacggggactaccatcgtgcccggcagcttcaatacgaaagctaccacttccaccgacgtcggggtggcaacgggtgtcgggatggcaacaggcatcactaatatcatctcaggcagatcccagccgactggatccaagacaggatacactgtgactggatcgggaacaacggcgcttccaggtggctttcgaaccgacagtcccagctttccacttttcttgatttgcagttatcgggggcataatttttag

SEQ ID NO: 250533 - DNA, 843 bp, Artificial Sequence
  derived and/or modified sequence
atgacgactgctctgggcagccagctatccagctcccaaacagtgatccccggatcctctggaactatctcacatactactgtggccccaggcagctctgtgacaggtactacaaccggtgctagtgatgatcaggtcacaggttctaaaacggggaccactggagttgccctgagcaccacagttgcaccaggatccagtagtacagaagccacaactagcacaggtgtgcaccggaccactgtggtgggacaaaaaaccggagctaccacccgaggatcagctaagcaaggcaccaggtcgacgatcgaggctacaaccagtttcaggggaaccgggacaaccggctctggtatgaatactggaaccactggagtagtgagtgggaatactatatctccctccagctttaataccgaggccacatccggcacctccgaacggcctaatcccggaagcgaaattggtactaccggaattgtcagtggcactacggttgctcctggcagtagcaacaccgaagccacaacatcccttggaaacggcggaaccacggaggcaggctctaaaatcgttaccacaggcatcacgactggcaccactatcgttcctggttcttttaacacaaaagccactacttccaccgatgtaggcgtcgccactggcgtgggcatggcaacaggcatcaccaatatcatcagcggcaggtcccagcccactgggagcaagactgggtacaccgtgactggctccggcaccacggcccttcctggtgggttcagaaccgattcccccagtttcccattattcttgatctgttcttataggggtcacaatttttag

SEQ ID NO: 250534 - DNA, 843 bp, Artificial Sequence
  derived and/or modified sequence
atgaccaccgccctgggcagccagctgagcagcagccagaccgtgatccccggcagcagcggcaccatcagccacaccaccgtggcccccggcagcagcgtgaccggcaccaccaccggcgccagcgacgaccaggtgaccggcagcaagaccggcaccaccggcgtggccctgagcaccaccgtggcccccggcagcagcagcaccgaggccaccaccagcaccggcgtgcacagaaccaccgtggtgggccagaagaccggcgccaccaccagaggcagcgccaagcagggcaccagaagcaccatcgaggccaccaccagcttcagaggcaccggcaccaccggcagcggcatgaacaccggcaccaccggcgtggtgagcggcaacaccatcagccccagcagcttcaacaccgaggccaccagcggcaccagcgagagacccaaccccggcagcgagatcggcaccaccggcatcgtgagcggcaccaccgtggcccccggcagcagcaacaccgaggccaccaccagcctgggcaacggcggcaccaccgaggccggcagcaagatcgtgaccaccggcatcaccaccggcaccaccatcgtgcccggcagcttcaacaccaaggccaccaccagcaccgacgtgggcgtggccaccggcgtgggcatggccaccggcatcaccaacatcatcagcggcagaagccagcccaccggcagcaagaccggctacaccgtgaccggcagcggcaccaccgccctgcccggcggcttcagaaccgacagccccagcttccccctgttcctgatctgcagctacagaggccacaacttctag

SEQ ID NO: 250535 - protein, 1576 aa, Artificial Sequence
  derived and/or modified sequence
MAERGLEPSPAAVAALPPEVRAQLAELELELSEGDITQKGYEKKRSKLLSPYSPQTQETDSAVQKELRNQTPAPSAAQTSAPSKYHRTRSGGARDERYRSDIHTEAVQAALAKHKEQKMALPMPTKRRSTFVQSPADACTPPDTSSASEDEGSLRRQAALSAALQQSLQNAESWINRSIQGSSTSSSASSTLSHGEVKGTSGSLADVFANTRIENFSAPPDVTTTTSSSSSSSSIRPANIDLPPSGIVKGMHKGSNRSSLMDTADGVPVSSRVSTKIQQLLNTLKRPKRPPLKEFFVDDSEEIVEVPQPDPNQPKPEGRQMTPVKGEPLGVICNWPPALESALQRWGTTQAKCSCLTALDMTGKPVYTLTYGKLWSRSLKLAYTLLNKLGTKNEPVLKPGDRVALVYPNNDPVMFMVAFYGCLLAEVIPVPIEVPLTRKDAGGQQIGFLLGSCGIALALTSEVCLKGLPKTQNGEIVQFKGWPRLKWVVTDSKYLSKPPKDWQPHISPAGTEPAYIEYKTSKEGSVMGVTVSRLAMLSHCQALSQACNYSEGETIVNVLDFKKDAGLWHGMFANVMNKMHTISVPYSVMKTCPLSWVQRVHAHKAKVALVKCRDLHWAMMAHRDQRDVSLSSLRMLIVTDGANPWSVSSCDAFLSLFQSHGLKPEAICPCATSAEAMTVAIRRPGVPGAPLPGRAILSMNGLSYGVIRVNTEDKNSALTVQDVGHVMPGGMMCIVKPDGPPQLCKTDEIGEICVSSRTGGMMYFGLAGVTKNTFEVIPVNSAGSPVGDVPFIRSGLLGFVGPGSLVFVVGKMDGLLMVSGRRHNADDIVATGLAVESIKTVYRGRIAVFSVSVFYDERIVVVAEQRPDASEEDSFQWMSRVLQAIDSIHQVGVYCLALVPANTLPKTPLGGIHISQTKQLFLEGSLHPCNILMCPHTCVTNLPKPRQKQPGVGPASVMVGNLVAGKRIAQAAGRDLGQIEENDLVRKHQFLAEILQWRAQATPDHVLFMLLNAKGTTVCTASCLQLHKRAERIASVLGDKGHLNAGDNVVLLYPPGIELIAAFYGCLYAGCIPVTVRPPHAQNLTATLPTVRMIVDVSKAACILTSQTLMRLLRSREAAAAVDVKTWPTIIDTDDLPRKRLPQLYKPPTPEMLAYLDFSVSTTGMLTGVKMSHSAVNALCRAIKLQCELYSSRQIAICLDPYCGLGFALWCLCSVYSGHQSVLIPPMELENNLFLWLSTVNQYKIRDTFCSYSVMELCTKGLGNQVEVLKTRGINLSCVRTCVVVAEERPRVALQQSFSKLFKDIGLSPRAVSTTFGSRVNVAICLQGTSGPDPTTVYVDLKSLRHDRVRLVERGAPQSLLLSESGKILPGVKVVIVNPETKGPVGDSHLGEIWVNSPHTASGYYTIYDSETLQADHFNTRLSFGDAAQTLWARTGYLGFVRRTELTAATGERHDALYVVGALDETLELRGLRYHPIDIETSVSRIHRSIAECAVFTWTNLLVVVVELCGSEQEALDLVPLVTNVVLEEHYLIVGVVVVVDPGVIPINSRGEKQRMHLRDSFLADQLDPIYVAYNM

SEQ ID NO: 250536 - DNA, 4731 bp, Artificial Sequence
  derived and/or modified sequence
atggcagaacgcggtcttgaacccagccctgcagcagtggctgccctgccgccagaagtccgggcgcagctcgctgaattggagctcgaactctctgaaggagatatcacacaaaaaggatatgagaagaagaggtcaaaacttctgtctccctattctcctcagacacaggaaaccgactccgctgttcagaaggagctgcgcaaccagacacccgctccatcggcggcgcagacaagcgcccccagcaagtaccacaggacccggagcgggggggcgagagacgagcgataccgctcagatattcacacagaggctgtgcaagctgccctggccaaacacaaagagcagaagatggcactgcctatgccgactaagagaagaagtacatttgtccagtcgccagctgacgcatgcactcctccagacacatccagtgcctcagaagacgagggaagccttagacgccaggccgccctctccgccgctcttcagcagtcactgcagaacgccgaatcgtggattaacaggtccattcaggggagcagcacctcttcttccgcctctagcaccctgtctcacggcgaagtcaaaggtacctccggctccctggccgacgtcttcgccaacacacgcattgagaatttctcggcgcctcctgatgtgactaccacaacttccagctcgtcttcatcgtcttctatcagaccagcaaatatcgatctgcctccatcaggcattgtgaaaggcatgcataaaggatccaaccggtctagcctaatggacaccgccgacggagtgcctgtgagctcacgagtttccacaaagattcagcagttattaaatactttgaagcgcccgaagcgacccccgttaaaagagttcttcgtggatgattccgaggaaatcgttgaagtcccgcaaccagaccccaatcagcccaaacctgagggaagacaaatgactcctgtgaaaggcgagccacttggagttatttgtaactggccccccgccctggaatccgccctgcagcggtggggaacaacgcaggcaaaatgctcctgcttaaccgcactggatatgacgggcaaaccagtctataccctgacgtacggaaagctgtggtctcggtccctgaagttggcatatacgcttctaaataagctcggcacgaaaaatgaaccagtgctcaagcccggggatagagtggccctggtctatcccaacaacgatccagtgatgtttatggtggctttctacggatgcctgctggctgaggtgatccctgtccctatagaggtccccctgacacgaaaagacgccggcggccagcagataggatttctgctgggctcttgcggtatcgcactggctctgacatcagaagtttgtctgaaaggtctccctaaaactcaaaacggagaaatcgttcagtttaagggttggcccagactgaaatgggtggtaacagactcaaaatacctctccaaacctccgaaggattggcagcctcacatttctccggctgggacagagccagcctatattgagtataagacgtccaaagagggcagtgttatgggggtgactgtctcaaggctggccatgctgagccattgccaggctttgtcccaggcatgtaattatagtgagggcgagacaatcgtcaacgttctggattttaaaaaggacgccggcctgtggcatggcatgttcgccaacgtgatgaataaaatgcacaccatcagcgtcccctactcagtcatgaagacctgccctctttcttgggtacagcgcgtgcacgcacacaaagctaaagtggctctagtcaaatgccgcgacctgcactgggccatgatggctcaccgggatcaaagagacgtgtctcttagctctctgaggatgttgatagttaccgatggcgcgaacccttggtcagtgtcctcatgcgatgctttcttgtccctattccagtctcacggtttgaaacctgaagcaatctgtccttgcgccacgagtgccgaggcaatgaccgtcgccatccgacggcctggcgtcccaggggcgcctctacctgggcgggctatcctgagcatgaatggcttaagctacggggttatcagagtaaacaccgaagataagaactctgccctgacagtgcaggacgtcggacacgtgatgccgggcggaatgatgtgcatcgtgaagcccgacggaccgccacagctctgtaagacagatgaaataggggagatatgtgtgtccagcaggactggtggtatgatgtatttcggccttgcaggcgtgaccaagaacacgtttgaagtcatccctgtaaacagcgctggttcccccgttggggatgtcccctttatcagaagcggactgctgggttttgtcgggccaggctctcttgtgttcgtggtcggaaagatggatggtcttctgatggtatcagggagaaggcacaatgccgacgatatcgttgctaccgggctcgctgtggaatccatcaagacggtgtatcggggaagaattgccgtcttctcagtgtctgtcttctacgatgagagaattgttgtcgtggcagagcagcggcccgatgctagtgaagaagactctttccaatggatgagtcgggtcttgcaggctattgactcaattcaccaagttggagtctactgcctagctttggtgcctgcaaacactctgcccaaaacccctcttggagggatccacatttcccagaccaagcagttattcctggagggcagcctgcacccctgcaatatcctcatgtgcccccacacctgtgtcactaaccttccaaagcctagacaaaagcaacctggagtcggacctgccagtgttatggtcggcaacctggtggcaggcaaacgaatcgctcaggccgccggtcgcgaccttggacagatcgaggaaaatgatctggtcagaaagcaccagtttctggccgagattcttcagtggcgggcccaggctacacccgatcacgttctcttcatgctgcttaatgccaaagggactacagtgtgtaccgcatcttgcctccaattgcacaagagagctgagcggatcgcctcagtgttgggtgataagggtcacctgaacgccggcgataacgtggtgttgttgtacccaccaggtattgagctgatagctgccttctatggctgcctgtacgcagggtgcatccctgtcactgtccgacccccccacgcccaaaaccttaccgcaacactccccaccgtgcgcatgatagttgatgtgagcaaagctgcatgtattctcacctcacagaccctgatgaggttactgagatcacgagaggcggctgctgccgtcgacgtaaagacctggcctactataatcgacactgacgatctgcctcggaaaaggcttccccagctatataaacctccgactcctgagatgctggcctacttggatttcagcgtttcaacgaccggcatgctgaccggggtcaagatgtcacactccgctgtgaacgctttatgcagggccattaaactgcagtgtgaactctacagttctcggcagatcgcaatttgtctagacccttattgtgggctggggttcgccctatggtgtctttgctcggtatattctggacatcagagcgtactgataccccctatggagctcgagaacaaccttttcctgtggcttagtaccgtcaaccagtacaagatcagagatacgttttgttcttacagcgtcatggagctatgtacgaagggattgggaaatcaagtggaggtactgaagaccagaggtattaacctgtcatgcgtgcgcacctgtgttgttgtggcggaggaacgtccccgcgtagcactgcaacagtcattcagcaagctgttcaaggatataggcctgtcccctagggcagtttctactacttttggctccagagtaaatgttgccatatgtttgcagggcacgtctggacctgatccaacaaccgtctacgtcgatctgaagtccctgcggcatgatcgcgtcaggctggtagagcgtggcgccccccagtccctgctgctctccgaaagtggtaagattcttcctggagtgaaagtggtcatcgtaaatcccgaaaccaagggaccggtgggcgattcccatctgggggaaatctgggttaactcgccccacaccgcatctggctactacacaatttatgactccgaaacgctccaggccgaccatttcaatactaggttgtctttcggtgacgccgcccagacgctgtgggcccgaactgggtacctggggttcgtgcgtcgcaccgagctgaccgctgcgaccggagaacggcatgacgcactctacgtcgtgggtgctctggacgaaaccctcgagctgcggggcctacggtaccatccaatcgacatcgagaccagcgtaagccgcatccatagatcgatcgcagaatgtgctgtcttcacgtggacaaatttacttgtagtcgtggtcgaattgtgcggatcagaacaggaggcactggaccttgtgcctctggtaactaacgtggttctggaggaacattatctaattgtcggggtggtagtggtggtggatcccggagttatcccgatcaatagtaggggtgagaaacaaagaatgcatcttagagactcgttcctggctgaccagcttgatcccatctacgtggcatacaacatgtag

SEQ ID NO: 250537 - DNA, 4731 bp, Artificial Sequence
  derived and/or modified sequence
atggccgagcggggcctggagcccagccctgctgctgtggccgccctgcccccagaggtgcgggcccagctggccgagctggagctggagctgtctgagggggacatcacccagaagggctatgagaagaagaggagcaagctgctgagcccctacagcccccagacccaggagacagattctgctgtgcagaaggagctgaggaaccagaccccagcccccagcgctgcccagaccagcgcccccagcaagtaccacaggaccaggtctgggggcgccagagatgagcgctacagaagtgacatccacacagaggccgtgcaggccgccctggccaagcacaaggagcagaagatggccctgcccatgcccaccaagagaagaagcacctttgtgcagagccctgcagatgcctgcaccccaccagacaccagcagcgcctctgaagatgagggcagcctgcggcggcaggccgccctgtctgctgccctgcagcagagcctgcagaatgctgagagctggatcaacagaagcatccagggcagcagcaccagcagcagcgccagcagcaccctgagccacggggaggtgaagggcaccagcggcagcctggctgatgtgtttgccaacaccagaattgagaacttcagcgcccccccagatgtgaccaccaccaccagcagcagcagcagcagcagcagcatccggcctgccaacatcgacctgcccccatctggaattgtgaagggcatgcacaagggcagcaacagaagcagcctgatggacacagcagatggagtgcctgtgagcagccgggtgtccaccaagatccagcagctgctgaacaccctgaagaggcccaagaggcctcccctgaaggagttctttgtggatgacagcgaggagatcgtggaggtgccccagcctgaccccaaccagcccaagccagagggccggcagatgacccctgtgaagggggagcccctgggcgtcatctgcaactggcccccagccctggagagcgccctgcagcgctggggcaccacccaggccaagtgcagctgcctgacagccctggacatgaccgggaagcctgtgtacaccctgacctacggcaagctgtggagccgcagcctgaagctggcctacaccctgctgaacaagctgggcaccaagaatgaacctgtgctgaagccaggggacagagtggccctggtgtaccccaacaatgaccctgtgatgttcatggtggccttctacggctgcctgctggccgaggtgattcctgtgcccatcgaggtgcccctgaccaggaaggatgctgggggccagcagatcggcttcctgctgggcagctgtggcatcgccctggccctgaccagcgaggtgtgcctgaagggcctgcccaagacccagaatggagagatcgtgcagttcaagggctggccccggctgaagtgggtggtgacagacagcaagtacctgagcaagccacccaaggactggcagccccacatcagccctgctggaacagagcccgcctacatcgagtacaagaccagcaaggagggctctgtgatgggcgtgacagtgtcccggctggccatgctgagccactgccaggccctgagccaggcctgcaactacagcgagggggagaccatcgtgaatgtgctggacttcaagaaggatgctggcctgtggcacggcatgtttgccaacgtgatgaacaagatgcacaccatctctgtgccctacagcgtgatgaagacctgccccctgtcctgggtgcagagggtgcacgcccacaaggccaaggtggccctggtgaagtgccgggacctgcactgggccatgatggcccaccgggaccagagagatgtgtccctgagcagcctgaggatgctgattgtgacagatggagccaacccctggagcgtgagcagctgtgatgccttcctgagcctcttccagagccacggcctgaagccagaggccatctgcccctgtgccaccagcgctgaggccatgacagtggccatccggcggcctggggtgcctggggcccccctgcccggccgggccatcctgtccatgaatggcctgtcctatggagtcatccgggtgaacacagaggacaagaacagcgccctgactgtgcaggatgtgggccacgtgatgcctgggggcatgatgtgcatcgtgaagccagatggccccccccagctgtgcaagacagatgaaattggagagatctgtgtgagcagcaggactggaggcatgatgtacttcggcctggccggcgtgaccaagaacacctttgaggtgattcctgtgaacagcgctggcagccctgtgggagatgtgcccttcatccgcagcggcctgctgggctttgtgggccctggcagcctggtgtttgtggtgggcaagatggatggcctgctgatggtgtctggaagaagacacaatgctgatgacatcgtggccaccggcctggccgtggagagcatcaagacagtgtaccggggcagaattgctgtgttttctgtgtctgtgttctatgatgaaagaattgtggtggtggccgagcagaggccagatgccagcgaggaggacagcttccagtggatgagccgggtgctgcaggccatcgacagcatccaccaggtgggcgtgtactgcctggccctggtgcctgccaacaccctgcccaagacccccctgggcggcatccacatcagccagaccaagcagctgttcctggagggcagcctgcacccctgcaacatcctgatgtgcccccacacctgtgtgaccaacctgcccaagccccggcagaagcagcccggggtgggccctgcctctgtgatggtgggcaacctggtggccggcaagagaattgcccaggccgccggccgggacctgggccagattgaagaaaatgacctggtgaggaagcaccagttcctggccgagatcctgcagtggagggcccaggccaccccagaccacgtgctcttcatgctgctgaatgccaagggcaccaccgtgtgcacagccagctgcctgcagctgcacaagagagctgagagaattgcctctgtgctgggggacaagggccacctgaatgctggggacaacgtggtgctgctgtacccacctggcatcgagctgattgctgccttctacggctgcctgtatgccggctgcatccctgtgacagtgcggcccccccacgcccagaacctgacagccaccctgcccaccgtgaggatgattgtggatgtgtccaaggccgcctgcatcctgaccagccagaccctgatgaggctgctgcggagccgggaggccgctgctgctgtggatgtgaagacctggcccaccatcatcgacacagatgacctgcccaggaagaggctgccccagctgtacaagccacccaccccagagatgctggcctacctggacttctctgtgtccaccaccggcatgctgactggagtgaagatgagccacagcgctgtgaatgccctgtgccgggccatcaagctgcagtgtgagctgtacagcagccggcagatcgccatctgcctggacccctactgcggcctgggctttgccctgtggtgcctgtgcagcgtgtacagcggccaccagagcgtgctgatcccccccatggagctggagaacaacctcttcctgtggctgagcacagtgaaccagtacaagatccgggacaccttctgcagctacagcgtgatggagctgtgcaccaagggcctgggcaaccaggtggaggtgctgaagacccggggcatcaacctgagctgtgtgaggacctgtgtggtggtggccgaggagcggccccgggtggccctgcagcagagcttcagcaagctgttcaaggacatcggcctgagccccagggctgtgtccaccaccttcggcagccgggtgaatgtggccatctgcctgcagggcaccagcggccctgaccccaccaccgtgtatgtggacctgaagagcctgcggcatgacagagtgcggctggtggagcggggggccccccagagcctgctgctgtctgagagcggcaagatcctgcccggggtgaaggtggtgattgtgaaccctgagaccaagggccctgtgggggacagccacctgggggagatctgggtgaacagcccccacacagccagcggctactacaccatctatgacagcgagaccctgcaggccgaccacttcaacacccggctgagctttggagatgctgcccagaccctgtgggccaggacaggctacctgggctttgtgcggaggacagagctgacagctgccaccggggagagacatgatgccctgtatgtggtgggcgccctggatgagaccctggagctgcggggcctgcgctaccaccccattgatattgagacctctgtgagccgcatccacaggagcattgctgaatgtgctgtgttcacctggaccaacctgctggtggtggtggtggagctgtgtggcagcgagcaggaggccctggacctggtgcccctggtgaccaacgtggtgctggaggagcactacctgattgtgggcgtggtggtggtggtggaccccggggtcatccccatcaacagcagaggagagaagcagaggatgcacctgcgggacagcttcctggccgaccagctggaccccatctacgtggcctacaacatgtag

SEQ ID NO: 250538 - DNA, 4731 bp, Artificial Sequence
  derived and/or modified sequence
atggccgagcggggcctggagcccagccccgccgccgtggccgccctcccgcccgaggttcgggcgcagctcgccgagctcgagttggagctctccgagggggacatcacacagaagggctatgagaagaagcggagcaagctcctgagtccctactccccacagacccaagagacagacagcgcggttcagaaggaattacggaatcagacacctgcgccgtccgccgctcagacctctgcaccaagcaaataccacaggacccgaagcggcggcgctcgggacgagcgttaccgctctgatatacataccgaggcagtgcaagctgccctggccaagcataaggagcaaaagatggcactgcccatgcccactaagcggcgctccacattcgtgcagtccccagccgacgcctgcacaccccctgacacaagctcagctagcgaggacgaagggtctctgaggcgccaggctgccctaagcgccgcccttcaacagtccctgcagaatgcagaaagctggatcaacaggagcatccaggggtcatcaacctcatcctctgcgtccagcactctgtcccacggggaggtgaaaggtacatctggatcacttgccgacgtgtttgctaatactagaatcgaaaacttttcagctcctccagacgtgaccactacaacatcaagctcttccagttccagctccatccgtcctgccaatatcgatctgccaccttcaggaatcgttaaaggaatgcataagggtagtaaccgaagtagccttatggatactgccgacggcgtcccggttagtagtcgcgtgagcaccaagattcagcaattactcaatacattgaaacggcctaagagacctcccctgaaagagttctttgtggatgacagcgaagagattgtggaggtgccccagccagatcccaaccaacccaaaccagagggccgacagatgacaccagtgaaaggggagccactgggagttatatgtaactggcctcccgccttggagagtgccttgcagcgctgggggaccactcaggctaagtgctcttgtctgactgcgctggacatgaccgggaagccagtatacacgctgacttatggcaaactgtggtccaggtccttgaaactcgcttacaccttgctgaacaagctgggaacaaaaaatgagccagtcctgaagcctggggatcgcgtggcactcgtgtacccaaacaacgaccctgtcatgttcatggttgctttttatgggtgcctgctcgccgaagttatacctgtacctatagaagtcccccttaccagaaaagatgccggggggcagcaaataggtttccttttaggatcttgcggcattgcactggctcttacctcagaagtgtgtctaaagggtctgcccaaaacacagaatggtgagatcgttcagtttaaaggttggcccagactgaagtgggtggtaacagattcgaaatatctgtccaagccccccaaggactggcagccccacatcagccccgccgggaccgaacctgcatacattgagtataagacgtcaaaagaaggcagcgtgatgggggtcaccgtgtcaagacttgcgatgctttcacactgtcaggcccttagtcaagcctgtaattacagtgaaggggaaactattgtgaacgttctggactttaagaaggacgccggattgtggcacggcatgttcgctaacgtgatgaataagatgcacaccatctctgtcccatattcagtgatgaagacatgtccactcagctgggtccagcgagtgcacgctcataaagctaaggttgccttagtaaaatgccgagatcttcactgggctatgatggcgcatcgggaccagcgggatgtgagcctgtcgagtctgagaatgctcatcgtcacagacggcgctaacccatggtctgtcagcagctgtgatgctttcctcagcctgtttcagtctcacggtctgaagcctgaggctatttgcccatgcgccacatcagcagaggccatgacagtggctattcgacgacctggcgttcccggcgccccacttcccggccgcgccatactttccatgaacgggctgagctacggagtcattagagttaataccgaagacaaaaattctgcactaaccgtccaggatgtcgggcacgttatgcctggtggaatgatgtgtatcgtgaaacctgatggccccccgcagctctgtaaaactgacgagataggagaaatttgcgtgtcttcacgtaccggcgggatgatgtatttcggtcttgctggagtcactaaaaacacttttgaggttatacctgtgaacagtgccggcagccccgtgggagacgtgccgttcatcagaagcgggctgctaggattcgtgggccccggcagcttggtgtttgtggtcgggaagatggacgggttgctaatggtgagtggccggcgccataatgctgatgacattgtggctacaggtctcgccgtcgagtctatcaagactgtttatcgtggccgcattgccgtgttctcagtgtctgtcttctacgatgagcgtattgtcgtggtggcagagcagcgcccagacgcctccgaagaggattcgtttcagtggatgagtcgcgttcttcaggccattgattccattcaccaggtcggagtgtactgtctcgcactggtaccagcaaacaccctgcccaaaaccccactcggggggattcacatatcacagaccaagcagcttttcctggaaggatcattacatccttgcaacattctgatgtgtccgcacacctgcgtaaccaatctgcctaaacctaggcaaaagcagcctggagtcgggccagcatctgttatggtcggcaacctggtagcaggaaaacgcattgctcaggctgccggccgcgatctcggacagatcgaggagaatgatctcgtgcggaagcatcagttcctggccgagatcttgcaatggagagcgcaggccactccagaccacgtgcttttcatgctgctgaacgcaaaagggactactgtgtgcacggcaagctgccttcagctgcacaagagagccgagagaatcgcatcggtgcttggtgacaaggggcacctgaacgccggagacaacgttgtgctgctctatcctcctgggatcgagctaattgccgccttctatggctgtctgtatgccggctgtatcccagttaccgtaagacctcctcacgctcaaaacctgaccgcgactttgccgaccgtgaggatgattgtggatgtctcaaaagccgcctgcatattaacctcccagaccctgatgagattgcttaggtcaagggaggccgcagctgccgtagacgtgaaaacctggcctactataatcgatacagacgacctgcctaggaagcggctccctcagctgtacaagccccctaccccggaaatgctggcttatctggatttttccgtgtccactacgggaatgctgactggcgtcaaaatgtcgcattcagcagtgaacgcgctgtgtagggctattaagctccagtgtgagctgtattcttcccgacaaattgctatttgcttagacccttattgtggcctagggttcgctttgtggtgcctctgttctgtctatagtggacaccaaagcgttctcattcccccaatggagctagaaaacaatcttttcttatggctgagcaccgttaaccagtataagataagagataccttctgcagctattccgtaatggagttatgtactaagggactgggaaatcaggtggaggtgctcaagacgcgtggtattaacttgtcttgtgttaggacatgtgtggtagtggccgaggagaggccaagggtggcactgcaacagtctttctcaaagctttttaaagacattggtttatcacctagagccgtgagcacaacatttggaagtagagtgaatgtcgcaatctgtctgcaggggactagtggtccagatccaacaacggtatatgtcgacctgaagagcctgaggcacgacagagtaagacttgtggagcgcggtgctccacagagcctcctcctttccgagagcggaaagattctccccggcgtaaaggttgtcatcgtcaatccagaaactaaagggccagtcggcgacagccatctgggagaaatctgggttaatagccctcacaccgcaagcgggtactacactatctacgactctgagactctgcaggccgatcattttaacactagactgtcattcggggatgccgcacagaccctgtgggcgcgcactgggtacctggggtttgtgagaaggactgaactcaccgccgctacaggcgagcgacatgatgctctctatgtagtgggcgcattagatgagacgctggagttgagaggactgcggtaccatccaattgacatcgagacctcagtgtctcggatccatcgctcgatcgctgaatgtgctgtattcacctggaccaatctgctggtggtggtggttgaactgtgcggctccgaacaggaggctcttgatttggtgcctctggtcaccaatgtggtgctggaggagcactaccttattgtgggcgttgttgtcgtagttgatccaggtgtcattccgattaacagccgtggtgaaaaacagcggatgcatctccgggactccttcctggcagaccagctggatcctatttacgtggcttataacatgtag

SEQ ID NO: 250539 - DNA, 4730 bp, Artificial Sequence
  derived and/or modified sequence
atggcggaacgaggcctggagcctagccctgcagccgtcgctgcgcttccacctgaagtccgggcacaactggccgagcttgagctggagctaagtgagggcgacatcacacagaagggatacgagaaaaaacggtccaaattgctttccccttatagtccccagacacaggaaacagacagcgcagtgcagaaagaactaagaaaccagactcctgcgccttcagctgcccaaaccagtgcgccatctaaataccacagaacccgctctgggggagccagggatgagcgctatcgatcagacatccacacagaggccgtacaagctgctttggcgaaacacaaagaacagaaaatggcactgcccatgcccaccaaacgacggtctacgtttgttcagagtcccgctgacgcctgcactccgcctgacacttcctctgcctccgaagatgaaggctcactgcggcgtcaagccgcacttagtgcagcactgcagcagtcactgcagaatgctgaaagttggatcaatcgatctatacaggggtcgagtactagctctagcgcaagtagcacactttctcacggagaggtgaagggcacatccggcagcctagccgacgtcttcgcaaacacgcggatagaaaatttctccgctccaccagacgtgacaacaacgacctcctcttcgagttcatcgagctctatccgccctgccaacatcgatctccctcccagtggcatcgtaaagggaatgcacaaagggtccaaccgaagcagcctgatggatactgccgacggagtgcctgtatcttcccgggtatctactaagatccagcagctgctgaacaccttgaagaggccaaagaggccgcctctgaaggagttctttgtagatgactctgaggaaattgtggaggtcccgcaaccagacccaaatcaacctaagccagagggcaggcagatgacccccgtcaagggggagcccctgggggtgatatgcaactggcctcctgctctggaaagtgcattgcaaagatgggggacaacacaggccaagtgttcttgcctaaccgcgctcgacatgacggggaaacctgtgtacaccttaacttacgggaagttatggagtcgaagcctgaagctggcctacacactgcttaataagctgggcacgaaaaatgagcccgtcctcaaacctggagatagggtggccctggtttatccaaacaatgaccccgtgatgttcatggttgccttttacgggtgtctgcttgcagaagtgattcccgtgccaattgaagtgccattgacccgtaaggatgccggagggcagcagattgggttcctgttggggtcatgtggcatcgctctggccttgacctcagaggtatgcctgaaagggttgcccaagacccaaaacggggagattgtccagtttaagggctggcctcggctgaagtgggttgtgacagacagtaaatatctgagcaagccacctaaggattggcagcctcacatatccccagctggaaccgagcccgcatatatcgagtataagactagtaaggaggggtctgtcatgggtgtcactgtgtctcggctggccatgctgtcgcattgtcaggcgcttagccaagcatgcaactatagtgagggcgagaccatagttaacgttttggatttcaagaaagacgctgggctgtggcatggaatgttcgctaatgttatgaataagatgcacactatttctgttccatacagtgtgatgaaaacgtgtccactgagctgggtgcagagagtccatgctcataaggccaaagttgctcttgtaaaatgtagagaccttcattgggctatgatggcccatcgcgaccagagagacgtttccctgagcagccttagaatgcttattgtaacagacggagcaaacccttggtccgtgagtagctgtgatgcattcttaagcctgttccagtcccacggccttaaacccgaggcaatttgtccctgtgcaacaagcgcagaggccatgactgtcgccataaggaggcccggagttccgggagcacctctgccgggtagggccatccttagtatgaatgggctgtcctacggtgttattcgcgttaatacagaggacaaaaactccgccctgactgtgcaggacgtagggcatgtgatgcccggtggcatgatgtgcattgtcaagcctgacggtcctccgcaactctgcaaaacagacgaaatcggtgagatttgtgtgagtagtaggacaggcggtatgatgtactttggactcgctggagtgactaagaacaccttcgaggtgattccagtcaattctgctgggtctcccgtcggcgacgtcccgtttattaggtctgggctgctggggttcgtggggcctgggtccctggtcttcgtggtcggaaagatggatggtctgctaatggtgagcgggcgacggcacaacgccgacgacatcgtggcaacgggactggccgtggagtccatcaagaccgtgtaccggggtcggatagctgtgtttagtgtgtctgttttctacgatgaacgcatcgtggtggtggcggagcaacgccctgacgcaagcgaggaggacagtttccaatggatgagcagagtactccaggctatagacagtattcaccaggtgggcgtctactgtctggccttggtgcccgctaacaccctgccaaaaactccgctgggcggtattcacatctcccaaaccaaacaactatttctcgaaggatccctgcacccttgtaacattctgatgtgccctcatacgtgtgtcaccaatttgcctaagcctaggcagaagcagcctggcgtaggccctgcaagtgtgatggtaggaaaccttgtcgcgggaaagcgtattgcccaggcagctggtagagatctgggtcagattgaagaaaacgatctcgtcaggaagcaccagtttttagccgagatcctccagtggcgcgctcaggcaactcccgatcatgtgctctttatgctcctcaacgctaagggtaccacggtgtgtactgcgtcctgcctccagctgcacaagcgggcagagcgaattgcgtcggtcttaggagacaagggccatctgaacgccggagataacgtggttttactgtacccacccggaattgagctgatagccgcattctatgggtgcctgtacgctgggtgcatacccgtcacggtgcggcctccacatgcccagaatctcacagccactctgcctaccgtaaggatgatagtcgacgtgtctaaggcagcatgtatattaacctctcagactctgatgcggctcctgcgcagccgagaagccgctgcagccgtggatgttaagacgtggccgacaatcattgatactgacgatctccctaggaagaggctgcctcagttgtacaaacctcctacccctgaaatgttagcctacctggactttagtgtttccactactggaatgctcactggcgtgaagatgtctcactctgctgtgaatgccctgtgtagagcaattaagttacagtgcgaactgtatagttctcgtcagattgcaatttgtttggatccatactgtggccttgggtttgctctgtggtgtttgtgctctgtctattccggccatcagtcggtgctgatcccgccaatggagctggagaacaacctgtttttgtggctgagtacagtgaatcagtacaaaataagggataccttttgctcatactcagtcatggagctgtgtactaagggactcggcaatcaggttgaagtgctgaagacgagaggcataaacctttcttgtgttaggacgtgcgtagtcgtggccgaggagcggcctcgggtcgcactgcaacagagtttcagtaagctgtttaaggacattggactaagccccagagccgtcagtactactttcggctcgagggtaaacgtcgccatttgcttgcagggcacctcaggtccagatccaactactgtgtatgttgatctgaagagtctgcggcacgaccgagtgaggctcgtagagaggggtgcaccccagagtcttctgcttagcgagagcggcaaaatattacctggggtcaaagtagtcatcgttaatccagagaccaaagggcctgttggcgacagccacctgggcgaaatctgggtgaatagcccacacacagcatccggctactataccatctatgattccgaaaccttgcaggccgaccacttcaacacccgcctcagctttggcgacgcggctcaaactctgtgggccaggacaggctacctgggctttgtacgcaggacagaactgacagccgctacaggggaacggcacgacgcattgtatgtggtcggggctctggacgagaccctggagctgcgtgggctgcgttatcaccctatcgacatcgaaacctcagtcagcaggattcacagaagcattgccgagtgcgccgtattcacttggaccaatttactggtggttgtggtcgagctctgcggttcagagcaggaagccctggacttggtccccctagtaactaacgtcgtccttgaggagcattatctcatcgtcggagtagtagttgtggtggaccctggcgtgattccaatcaactctcgtggcgagaaacagaggatgcatcttcgcgatagttttctggccgaccagctggaccctatctatgttgcctataacatgta

SEQ ID NO: 250540 - DNA, 4731 bp, Artificial Sequence
  derived and/or modified sequence
atggccgagagaggcctggagcccagccccgccgccgtggccgccctgccccccgaggtgagagcccagctggccgagctggagctggagctgagcgagggcgacatcacccagaagggctacgagaagaagagaagcaagctgctgagcccctacagcccccagacccaggagaccgacagcgccgtgcagaaggagctgagaaaccagacccccgcccccagcgccgcccagaccagcgcccccagcaagtaccacagaaccagaagcggcggcgccagagacgagagatacagaagcgacatccacaccgaggccgtgcaggccgccctggccaagcacaaggagcagaagatggccctgcccatgcccaccaagagaagaagcaccttcgtgcagagccccgccgacgcctgcaccccccccgacaccagcagcgccagcgaggacgagggcagcctgagaagacaggccgccctgagcgccgccctgcagcagagcctgcagaacgccgagagctggatcaacagaagcatccagggcagcagcaccagcagcagcgccagcagcaccctgagccacggcgaggtgaagggcaccagcggcagcctggccgacgtgttcgccaacaccagaatcgagaacttcagcgccccccccgacgtgaccaccaccaccagcagcagcagcagcagcagcagcatcagacccgccaacatcgacctgccccccagcggcatcgtgaagggcatgcacaagggcagcaacagaagcagcctgatggacaccgccgacggcgtgcccgtgagcagcagagtgagcaccaagatccagcagctgctgaacaccctgaagagacccaagagaccccccctgaaggagttcttcgtggacgacagcgaggagatcgtggaggtgccccagcccgaccccaaccagcccaagcccgagggcagacagatgacccccgtgaagggcgagcccctgggcgtgatctgcaactggccccccgccctggagagcgccctgcagagatggggcaccacccaggccaagtgcagctgcctgaccgccctggacatgaccggcaagcccgtgtacaccctgacctacggcaagctgtggagcagaagcctgaagctggcctacaccctgctgaacaagctgggcaccaagaacgagcccgtgctgaagcccggcgacagagtggccctggtgtaccccaacaacgaccccgtgatgttcatggtggccttctacggctgcctgctggccgaggtgatccccgtgcccatcgaggtgcccctgaccagaaaggacgccggcggccagcagatcggcttcctgctgggcagctgcggcatcgccctggccctgaccagcgaggtgtgcctgaagggcctgcccaagacccagaacggcgagatcgtgcagttcaagggctggcccagactgaagtgggtggtgaccgacagcaagtacctgagcaagccccccaaggactggcagccccacatcagccccgccggcaccgagcccgcctacatcgagtacaagaccagcaaggagggcagcgtgatgggcgtgaccgtgagcagactggccatgctgagccactgccaggccctgagccaggcctgcaactacagcgagggcgagaccatcgtgaacgtgctggacttcaagaaggacgccggcctgtggcacggcatgttcgccaacgtgatgaacaagatgcacaccatcagcgtgccctacagcgtgatgaagacctgccccctgagctgggtgcagagagtgcacgcccacaaggccaaggtggccctggtgaagtgcagagacctgcactgggccatgatggcccacagagaccagagagacgtgagcctgagcagcctgagaatgctgatcgtgaccgacggcgccaacccctggagcgtgagcagctgcgacgccttcctgagcctgttccagagccacggcctgaagcccgaggccatctgcccctgcgccaccagcgccgaggccatgaccgtggccatcagaagacccggcgtgcccggcgcccccctgcccggcagagccatcctgagcatgaacggcctgagctacggcgtgatcagagtgaacaccgaggacaagaacagcgccctgaccgtgcaggacgtgggccacgtgatgcccggcggcatgatgtgcatcgtgaagcccgacggccccccccagctgtgcaagaccgacgagatcggcgagatctgcgtgagcagcagaaccggcggcatgatgtacttcggcctggccggcgtgaccaagaacaccttcgaggtgatccccgtgaacagcgccggcagccccgtgggcgacgtgcccttcatcagaagcggcctgctgggcttcgtgggccccggcagcctggtgttcgtggtgggcaagatggacggcctgctgatggtgagcggcagaagacacaacgccgacgacatcgtggccaccggcctggccgtggagagcatcaagaccgtgtacagaggcagaatcgccgtgttcagcgtgagcgtgttctacgacgagagaatcgtggtggtggccgagcagagacccgacgccagcgaggaggacagcttccagtggatgagcagagtgctgcaggccatcgacagcatccaccaggtgggcgtgtactgcctggccctggtgcccgccaacaccctgcccaagacccccctgggcggcatccacatcagccagaccaagcagctgttcctggagggcagcctgcacccctgcaacatcctgatgtgcccccacacctgcgtgaccaacctgcccaagcccagacagaagcagcccggcgtgggccccgccagcgtgatggtgggcaacctggtggccggcaagagaatcgcccaggccgccggcagagacctgggccagatcgaggagaacgacctggtgagaaagcaccagttcctggccgagatcctgcagtggagagcccaggccacccccgaccacgtgctgttcatgctgctgaacgccaagggcaccaccgtgtgcaccgccagctgcctgcagctgcacaagagagccgagagaatcgccagcgtgctgggcgacaagggccacctgaacgccggcgacaacgtggtgctgctgtacccccccggcatcgagctgatcgccgccttctacggctgcctgtacgccggctgcatccccgtgaccgtgagacccccccacgcccagaacctgaccgccaccctgcccaccgtgagaatgatcgtggacgtgagcaaggccgcctgcatcctgaccagccagaccctgatgagactgctgagaagcagagaggccgccgccgccgtggacgtgaagacctggcccaccatcatcgacaccgacgacctgcccagaaagagactgccccagctgtacaagccccccacccccgagatgctggcctacctggacttcagcgtgagcaccaccggcatgctgaccggcgtgaagatgagccacagcgccgtgaacgccctgtgcagagccatcaagctgcagtgcgagctgtacagcagcagacagatcgccatctgcctggacccctactgcggcctgggcttcgccctgtggtgcctgtgcagcgtgtacagcggccaccagagcgtgctgatcccccccatggagctggagaacaacctgttcctgtggctgagcaccgtgaaccagtacaagatcagagacaccttctgcagctacagcgtgatggagctgtgcaccaagggcctgggcaaccaggtggaggtgctgaagaccagaggcatcaacctgagctgcgtgagaacctgcgtggtggtggccgaggagagacccagagtggccctgcagcagagcttcagcaagctgttcaaggacatcggcctgagccccagagccgtgagcaccaccttcggcagcagagtgaacgtggccatctgcctgcagggcaccagcggccccgaccccaccaccgtgtacgtggacctgaagagcctgagacacgacagagtgagactggtggagagaggcgccccccagagcctgctgctgagcgagagcggcaagatcctgcccggcgtgaaggtggtgatcgtgaaccccgagaccaagggccccgtgggcgacagccacctgggcgagatctgggtgaacagcccccacaccgccagcggctactacaccatctacgacagcgagaccctgcaggccgaccacttcaacaccagactgagcttcggcgacgccgcccagaccctgtgggccagaaccggctacctgggcttcgtgagaagaaccgagctgaccgccgccaccggcgagagacacgacgccctgtacgtggtgggcgccctggacgagaccctggagctgagaggcctgagataccaccccatcgacatcgagaccagcgtgagcagaatccacagaagcatcgccgagtgcgccgtgttcacctggaccaacctgctggtggtggtggtggagctgtgcggcagcgagcaggaggccctggacctggtgcccctggtgaccaacgtggtgctggaggagcactacctgatcgtgggcgtggtggtggtggtggaccccggcgtgatccccatcaacagcagaggcgagaagcagagaatgcacctgagagacagcttcctggccgaccagctggaccccatctacgtggcctacaacatgtag

SEQ ID NO: 250541 - DNA, 8593 bp, Artificial Sequence
  derived and/or modified sequence
tcttgtcttccggagtgtggctggcggagctgggatggcggaacgaggcctggagccgtcgccggccgcggtggcggcgctgccgcctgaagtgcgggcgcagctggcggagctggagctggagctctcggagggggacatcacccagaagggctatgaaaagaaaaggtccaaactcctatctccttacagcccgcagacacaagaaactgattcagcagtacagaaagaacttagaaaccagacacctgctccatctgcagctcaaacttctgctccctctaagtaccaccgaactcgatctgggggagccagggatgaacgatatcgatcagatatccacacagaagcagttcaggctgcactggcaaagcataaagaacagaagatggctttgcccatgccaaccaaaaggcgatccacatttgttcagtctcctgcagatgcctgcacacctcctgacacatcttcggcctctgaggatgagggctctctgagacgccaagctgcgctctctgctgccttgcaacagagcttacagaatgctgagtcctggatcaaccgttcaattcagggatcgtccacttcttcatccgcatcttctacgctgtcccacggagaggtcaaaggaaccagtgggtctctagctgatgtatttgccaatactcgaatagagaatttctctgctcctcctgatgtcactacaactacctcttcctcctcatcatcttcctcaattcgcccagcaaacattgacctgcccccctcggggatagttaaaggcatgcacaaaggatccaacaggtccagccttatggatacagctgatggtgttcctgtcagtagcagagtatctacaaaaatccagcagcttctgaacactctgaaacgacccaaaaggcctcccttaaaggaattttttgtggatgactctgaagaaattgtggaagtacctcagccagaccccaaccagcccaagccggagggacggcagatgacccctgtgaaaggagagcctttaggagtcatctgtaactggcctcctgctcttgaatctgccctgcagcgctggggtaccactcaagcaaaatgctcctgtctgactgcactggacatgacagggaaaccagtttacactcttacatatggaaagttgtggagcagaagtttaaagttggcctacacacttcttaataaactggggaccaaaaatgaacctgtgttaaaacctggagacagggtagccctggtttaccccaacaatgatccagtcatgtttatggtggctttctatggatgcctcctggcagaagtgattccagtgcctatagaggtacctcttaccagaaaggatgctggaggtcagcagattggcttcttgctaggaagctgtggtattgccttagctcttaccagtgaagtttgtctaaaaggactgccaaaaacccagaatggagaaattgtacagtttaaaggttggccccggctcaaatgggttgtaacagattccaagtacctttcaaagccaccgaaagactggcagccacacatctcacctgctgggacagaaccggcatacattgagtataaaacaagcaaagaagggagtgtaatgggagttacagtatcccggcttgcaatgttgtctcactgccaagctctgtcgcaggcctgcaattattctgaaggggaaacaatagtaaatgtcttagactttaagaaggatgctgggctgtggcacggcatgtttgcgaatgtaatgaataagatgcacacaatcagcgtaccctactctgttatgaaaacctgtcctctctcttgggtccaaagagtacatgctcacaaagccaaggtagctttagtaaaatgtcgggacttgcactgggctatgatggcacatcgggaccaaagagacgtgagcttgagttccctccgaatgttaattgtgactgatggagctaacccctggtccgtgtcatcctgtgatgccttcctgagtctgttccaaagtcatggactgaagcctgaggccatctgtccgtgcgccacgtctgctgaagccatgactgtagcaatccgcaggcctggagttccaggagcccctttgccaggaagagccattctctcaatgaatggattgagctatggggtaatacgggtcaatactgaagataaaaattcagcactgacggtccaggatgtagggcatgtaatgcctggtgggatgatgtgcattgtgaaaccagatggacctccccagctctgcaaaacagatgaaattggagaaatctgtgttagctccagaactggaggcatgatgtactttgggcttgctggtgtgacaaaaaatacatttgaggtaattccagtgaattctgcaggctctcctgttggggatgtgccattcatccgatcaggattgctggggtttgtagggccgggtagtttggtgttcgtggttgggaaaatggatggcttactgatggttagtggtcgaagacataatgctgatgacattgttgctactggattggctgtagaatcaataaagactgtttatagaggaagaattgctgtgttttctgtgtctgtattttatgatgagcgcattgtggtggttgcggaacaaagacctgatgcttctgaggaagatagtttccagtggatgagccgcgtgctgcaggcgatcgatagcattcatcaagtgggggtttattgtcttgctctggtgccagccaatacattgccaaaaactccactaggaggaatccatatatctcagacgaaacaactctttctggagggatcactgcatccttgcaacatcctcatgtgcccccatacatgtgtgacaaacttgccaaagccccggcaaaaacaaccaggtgtaggccctgcttccgtgatggttgggaatctggttgctggaaaacgtatagcacaagctgctggaagggatctgggacaaatagaagagaatgatttggtgaggaagcaccagtttctggcagagatcctacagtggcgagcccaggcgactcctgaccatgtactcttcatgctgttaaatgccaagggaaccactgtatgcacagccagctgccttcagcttcataagcgagcagagaggattgcatctgttcttggtgataagggacatctaaatgcaggagataatgtggtgttgctctatccacctggcattgagttaatcgccgccttctatggctgcctgtatgcgggctgtatacctgtgaccgtcagacctccacatgctcagaacctcacggccacgctgcccactgtccgaatgattgttgatgtcagcaaagcagcctgtattctcaccagtcagaccctaatgaggctactgaggtcccgagaggcagcagcagctgtggatgtgaaaacctggccaaccatcattgacacagatgatttacccaggaaaaggttacctcagctgtataaaccgcccactcctgagatgttggcatatcttgattttagtgtctccacaactggcatgcttacaggagtgaagatgtcccactctgcagtgaacgctctgtgtcgagccatcaagctccagtgtgagttgtactcttctcggcagatcgccatctgccttgacccttactgtggacttggcttcgcgctctggtgtctctgcagtgtctattcaggccaccagtctgtcttaattcctcctatggagttagagaacaaccttttcctctggctctccacagtcaaccagtacaaaataagggacactttctgctcctattcagtgatggagctctgcaccaaaggtcttgggaaccaagtggaagtgctaaagaccagagggatcaacctctcctgcgtccggacctgtgtggtggtggcggaggagaggccccgcgttgcactccagcagtccttctctaagctcttcaaagacatcgggctgtccccgcgggctgtcagcaccacttttggatcaagagtcaatgtagcaatatgtttacagggaacctcagggcctgatccgactactgtgtatgtggatctgaaatcactaagacatgacagggttcgtctcgtggaacgtggcgcccctcagagtttgcttctctcagagtctggaaagattttacctggagtgaaagtggttattgttaatcctgagaccaaagggccggttggagactctcaccttggagagatttgggtgaacagtccccatacagccagcggctactacaccatctatgatagcgagactcttcaagctgatcatttcaacactcgcctcagctttggagatgcagctcagacactctgggctcggacaggataccttggttttgtccgccggaccgagctcacagcggccactggagagcgtcatgatgcattgtatgtggtgggagcgctggatgaaacactggagctgagaggattacgataccacccaattgatattgagacctcggtgtcccggatccacagaagcattgctgaatgtgccgtgttcacatggaccaacttgcttgtggtggttgtggaactgtgcggctctgaacaggaagccctagatctggtcccattagtgaccaacgtggtcctggaagagcattacctcatcgttggcgtcgtggttgtggtggacccaggtgtcatcccgatcaactccagaggagagaagcagaggatgcacctccgtgatagcttcctagctgaccagttagaccccatctacgtggcttataacatgtaaccagccttgtggggactgcagtgggccattctgaagaatcacaaagacagaagacctctggctaagagcaggcttcaaacgatgtgaaataagctgagatggctacatgatattcttcatctcatcctgtgggattctgcaatcataaaacacaggaaaggggaattctgtgatggcaaatgaaaaaaatgttaacatttggtagacatgtgctttgacatagcgtgagcagcacattactaaagcaattacatgcatgttgcatttttttcatctgttgtacatagttgtatttttatctaatgccattttagaattttctaagggaatttaatgaattcacatgaaaggggtagtctgagtgacacagttccccactccgtactgtattttgccattctgccgtagctagatgttctgtggggtttgttaacatggaactactcagctttctttcagtcaacccataagcaaatcagataacccactgactatgagaattactttatatagataattcttgactgtaaaacattttgaccagtgttttacaacatgtacataagaatacacataattcaactagagatttgaagaattggcttgtatagttataacaaccacagtagaaacatttctactttgagagaatttcaatattctcttaatgttgtgtaattgattaggtaactaaaaagcgcaaattgttggcaggttttgctgcacattgttctatgtctttgttggctggtgtattttataaactaaagctgcctatgtttctttttaaagctcgcattcccagaatcagcttaggcttctatgaattcagcctgtttctaaaagctgaaaatctcagtttaaaaatcaaaatgttaacacaaagctaagattcatcagagcccaccctattctaaggaaccacaataacttactctggccccagtgttaaaacgatctttcagatttagagtgactatgtaagaatttaggatttcctcttttccaggcacattgtaaactgtgtctacagtttatccatataacttctcttctgaaaactgaggagtgtcctctgttcttccagttcacgagggcagggggtttaaaacaagaatgataggccaggaaggcagtggggatccaccatcacatggaactgtaaggccatataactacacaaaactgaccaatctgggttgccaaagcagccaggcttatgctgaaaccggggaagtctgacatatgcaggaaactcttttgaaataactttggtgcccaggccaagtagaatgagatgagactgagtttggcctctggctcggtttcctttctttggtctgatacttcatgtatttgaatatagttaaatcgtattatttttttcttaacagaaatatttttaaaaatgaaaaagtactcaaaagtgagaagagttaacttgtcaaagcagaatggttctctttgacccactctggtctattgtgtaaatatttatttagactattttaataatacatattatttaccccactgtaacatcatgtaaactaagtatgtttttaaacaatttttaagacttgtaattaccctgaaaataaggtttataatgcaaagaccagctcctttgcggtggcagtgctctagggctgccattacacggtcttgtgatgtgactaaaagccactttgtgactcccttcatgtaatcctcttttcctccccactcctccacagagggcagagctcaggacatttgccagttccagatctctttttcagcattttcatggaattaatttacacgtaatgagggaagtcctaggatggatagaaaaaaagcacttacattggggcacacaggaaatcccagtgtctagcaatggtttggtttgcagagaacacagcctgatacttaattttcttaaaactatttttaatgatccactaaacaaagcaggggatcctgaagctgatataaataagtctagctctataatccccaagttctaaaagttatggttagatgctattctgtgggttgctttgataattcttactaacacagattagggtataggcatctagagatgcactgtccactgtaaatactataatgagagccacatctgtaatttaaatgtttctagtaaccacatttttttaaaagtaaaaagaaacccatggtattgatttaaatatattttatttaacccaatagctcaaaaacactatcatttcaacataggatcaatataaaaattattaatgagttattttactttttttcatattaggcctttgaaattcagtgtgtattaaacacatctcaattcaaaccatcaccatatttcaagtctttgtagccaaatgtgactagtggctaccatattagacagtgcagatctatactcattccttcaaatacattactctgttaatctcaaagtgtggccaactcccatttacttagaggctgattatctagttttgtagttcctcaggcctctaatttattttttgctttctgctttattgatcttttgcatgtcccccaaagccagaatctgctcatggaggaaggaaggctaagaactgtccttgaggaacttcatcagtaactctggtaaagcatcctgtggagggagaggagagcccagtcatttgcttagatggtgtttgtgggatcacctgcagatttaaagcctactctgccacagactcgagtaagaaaatgttctcttgatgacacagtgctcctactctatccacattaagtagcacttttgtggtagaactgattcttaaggcaggcctgaaaggccattactaatagaaacacagcctttccaatcctctggaacatattctgtctgggtttttaatgtctgtggaaaaaaactaaacaagtctctgtctcagttaagagaaatctattggtctgaaggtttctgaacctctttctggttctcagcagaagtaactgaagtagatcaggaaggggctgcctcaggaaaattcctagatcctaggaattcagtgagaccctgggaaggaccagcatgctaatcagtgtcagtgaatccacagtctttacttcctgcctcataaagggccaggtctccccagtaccaagtcctttcctcatgaagttgtgttgcctcaggctgtttagggaccattgcctgtcttggtcacatgagtctgtctccttactttagtccctgggcaatccttgcttaatgcttttgttgactcaacaagggcccgaggccttaggttttctattaaggtctctgccccaggcatggtgctctatatcttggccaaataaattactttccttgaatatccaggaatcttttagtctaaagcaatgaggagttatcacctcatcctcaaactccaacaagatctatgccttagtgttgtttttgttgtctgctttgatgtaaaagcaagagtatttggagcaagaagctgcaatgcgccaaatacacaataggccttttctttatcattcatacgacatttctggtttaggtgtatgtagttgggccatgttacttgtccagaggaagagactaaagatataagaataattttttagtcctaaatgctgttttgtttactttctgtcaagatatttacccgtgtcaaattcaaactacagtactgtgtaattatgtataaagtttttttatttatttgaagttagactagatatacgtttttaaatttaacatctggctggacagtgttctattaactcattgaatgtgtttcctttgtcttgtgttaataaatattgatgcctgattctgtttaa

SEQ ID NO: 250542 - protein, 272 aa, Artificial Sequence
  derived and/or modified sequence
MSSQELVTLNVGGKIFTTRFSTIKQFPASRLARMLDGRDQEFKMVGGQIFVDRDGDLFSFILDFLRTHQLLLPTEFSDYLRLQREALFYELRSLVDLLNPYLLQPRPALVEVHFLSRNTQAFFRVFGSCSKTIEMLTGRITVFTEQPSAPTWNGNFFPPQMTLLPLPPQRPSYHDLVFQCGSDSTTDNQTGVRYVSIKPDNRKLANGTNVLGLLIDTLLKEGFHLVSTRTVSSEDKTECYSFERIKSPEVLITNETPKPETIIIPEQSQIKK

SEQ ID NO: 250543 - DNA, 819 bp, Artificial Sequence
  derived and/or modified sequence
atgagcagccaggagctggtgaccctgaacgtgggcggcaagatcttcaccaccagattcagcaccatcaagcagttccccgccagcagactggccagaatgctggacggcagagaccaggagttcaagatggtgggcggccagatcttcgtggacagagacggcgacctgttcagcttcatcctggacttcctgagaacccaccagctgctgctgcccaccgagttcagcgactacctgagactgcagagagaggccctgttctacgagctgagaagcctggtggacctgctgaacccctacctgctgcagcccagacccgccctggtggaggtgcacttcctgagcagaaacacccaggccttcttcagagtgttcggcagctgcagcaagaccatcgagatgctgaccggcagaatcaccgtgttcaccgagcagcccagcgcccccacctggaacggcaacttcttccccccccagatgaccctgctgcccctgcccccccagagacccagctaccacgacctggtgttccagtgcggcagcgacagcaccaccgacaaccagaccggcgtgagatacgtgagcatcaagcccgacaacagaaagctggccaacggcaccaacgtgctgggcctgctgatcgacaccctgctgaaggagggcttccacctggtgagcaccagaaccgtgagcagcgaggacaagaccgagtgctacagcttcgagagaatcaagagccccgaggtgctgatcaccaacgagacccccaagcccgagaccatcatcatccccgagcagagccagatcaagaagtag

SEQ ID NO: 250544 - DNA, 819 bp, Artificial Sequence
  derived and/or modified sequence
atgtcatctcaagaactcgtcactttgaacgtgggtggaaagattttcacaacacgattttccacaattaagcagttccctgcttctagactggcacgcatgctggatggtcgcgatcaggagtttaagatggtgggtgggcagatctttgttgacagagatggagatctgttctcatttatattggatttcctccgcacccatcagctgctgctccccactgaattcagcgactacctgcgactgcagcgcgaagctctattctatgagcttcgcagtctggtggacctgctcaacccatatttgttgcagcctagacctgcgctcgttgaagtgcactttctatcccgtaacacccaagccttctttagggttttcggctcgtgctctaaaaccatcgagatgttgaccgggcgtataaccgtcttcaccgagcaacccagtgccccgacctggaacggcaacttctttcccccgcaaatgacactgctccctctaccgccccaaagaccatcctaccacgacttggtctttcagtgcggcagcgattcaaccactgacaaccagacaggggtgagatatgttagcataaaacctgacaaccgaaagctggctaatggtacaaacgtcctgggactgctcatcgataccctgctgaaagaagggtttcacctcgtgagcactcgcacagtgtcaagcgaagacaagactgaatgttattcatttgagaggataaagagcccagaagttttaataaccaacgagactcccaagcctgagacaattatcattcccgagcagagccaaataaagaaatag

SEQ ID NO: 250545 - DNA, 819 bp, Artificial Sequence
  derived and/or modified sequence
atgagcagccaggagctggtgaccctgaatgtgggcggcaagatcttcaccacccgcttcagcaccatcaagcagtttcctgccagccggctggccaggatgctggatggccgggaccaggagttcaagatggtgggcggccagatctttgtggacagagatggagacctcttctccttcatcctggacttcctgcggacccaccagctgctgctgcccacagagttcagtgactacctgcggctgcagcgggaggccctcttctatgagctgcggagcctggtggacctgctgaacccctacctgctgcagcccaggcctgccctggtggaggtgcacttcctgagcaggaacacccaggccttcttccgggtgtttggcagctgcagcaagaccatcgagatgctgaccggccgcatcaccgtcttcacagagcagcccagcgcccccacctggaatggaaacttcttccccccccagatgaccctgctgcccctgcccccccagaggcccagctaccatgacctggtgttccagtgtggcagtgacagcaccacagacaaccagacaggagtgcgctacgtgtccatcaagccagacaacaggaagctggccaacggcaccaacgtgctgggcctgctgattgacaccctgctgaaggagggcttccacctggtgtccaccaggacagtgtcctctgaggacaagacagagtgctacagctttgagcgcatcaagagccctgaggtgctgatcaccaatgagacccccaagccagagaccatcatcatccctgagcagagccagatcaagaagtag

SEQ ID NO: 250546 - DNA, 819 bp, Artificial Sequence
  derived and/or modified sequence
atgagcagccaggagctggtgaccctgaacgtgggcggcaagatctttacgacacggttcagcacaatcaagcagtttcctgccagccgattggctcgcatgctagacggaagagatcaagagttcaaaatggtgggggggcagatatttgttgatcgcgatggagatctcttcagctttattttggacttcctgcggacccaccagttgctattacctaccgaattttccgactatctgcgactgcagcgggaagcccttttctatgagcttaggagcctcgtagatttgctgaatccatatctactgcagccccgtcccgcgctggtcgaggtgcacttcctcagtcgcaacacacaagccttcttccgggtgtttgggtcctgctctaaaactatcgaaatgctgacaggcaggattactgtttttactgaacaaccttcagctcctacctggaacgggaacttctttcccccgcagatgaccctgctgccacttccaccccagaggcctagttatcatgacctggtgttccagtgtggcagtgatagcacaacagataaccagactggcgttcgttatgtatcgatcaagcccgataatagaaaactcgctaatgggaccaatgtgttaggattgctgattgatactctgctcaaggaggggtttcacttagtctccactagaacagtttcatcagaagataagacggagtgttacagtttcgaaagaatcaagtccccagaggttctgataactaatgagacccccaagccagaaacaatcatcattccagagcagagccagatcaagaagtag

SEQ ID NO: 250547 - DNA, 1527 bp, Artificial Sequence
  derived and/or modified sequence
agttcctcatctgttgctttttcattttgtatactgcaagttcccaggcaactcgaatttgcaaacacagccatggatacactatttaccttacagtagtttcctgggaatctaagtctggtttttgttattcttccctcccctccactgcataatcatgtataactagcaacatttatggttataggttgatttcctaagtgtggctgatggtagcctctagtttgaagtgagggaagaatgagtagtcaggaactggtcactttgaatgtgggagggaagatattcacgacaaggttttctacgataaagcagtttcctgcttctcgtttggcacgcatgttagatggcagagaccaagaattcaagatggttggtggccagatttttgtagacagagatggtgatttgtttagtttcatcttagattttttgagaactcaccagcttttattacccactgaattttcagactatcttaggcttcagagagaggctcttttctatgaacttcgttctctagttgatctcttaaacccatacctgctacagccaagacctgctcttgtggaggtacatttcctaagccggaacactcaagcttttttcagggtgtttggctcttgcagcaaaacaattgagatgctaacagggaggattacagtgtttacagaacaaccttcagcgccgacctggaatggtaactttttccctcctcagatgaccttacttccactgcctccacaaagaccttcttaccatgacctggttttccagtgtggttctgacagcactactgataaccaaactggagtcaggtatgtttctataaaacctgataaccgaaaattggccaacggaacaaatgtcctcggcttactgattgacactttattaaaggaaggctttcatttggtcagcactagaacagtatcttctgaagacaaaactgaatgctatagctttgaaaggataaaaagccctgaagtgctcatcacgaatgaaacaccaaaaccagagactatcatcataccagagcaatctcagataaagaaatgaagttgtctatcctcttttaaagagaaattgccatttttcttgtttcattacgtatttagggcatacatgttagccaaatctacactcagcctaactcttggcttcatctgctgccatgccgtctctgggcaaccaggccccaactgtgcttaagccataatgcctgctgctctctagacaactccatgtacttggtgctttggtatatgttctaccttcaatacatctttccctttctcttcttcatgaatgcttatgagccgagattgcgccactgcacactagcttgggtgacagaggaagactgtctcaaaaaaaaaaaaattgatcaaactgatggataccctaagtaccctgacttgatcattacaccttctatgcatgcaacaaaatgccacgtgtaccccataaatatgtagaaatattatatgtaaataaatagttgggccttccgtattttcccactta

SEQ ID NO: 250548 - DNA, 819 bp, Artificial Sequence
  derived and/or modified sequence
atgtcgtctcaggagttggtgactctgaacgtcggtggaaagatctttactaccagattttctacaatcaagcagttcccggcttcaaggctggctcgaatgttagacggaagggaccaggaatttaaaatggttggcggtcagattttcgtggatcgagatggggatctcttttcatttatcttggatttccttaggactcatcagctgctactgcccactgaattcagtgattacttgagactccaaagagaagctctgttctatgagctgcggtctcttgtagatcttctgaacccctatcttttacagccccgtcccgcactcgtggaagttcattttctctcgcgcaatactcaggccttctttagggtgtttggctcctgctccaaaaccatcgagatgctgactggaagaataactgtgtttaccgagcagccaagtgcaccaacctggaatggaaatttcttcccaccccagatgaccctgttgccactccccccacagagacccagttatcacgacctcgtatttcaatgcggtagcgactctacaaccgacaatcagacaggggtccggtatgtctctataaagccagacaatcgaaagctcgcaaacggaactaatgtactgggactgttgatagatactctcctgaaagagggtttccatttagtcagcactcggactgtgtccagtgaggacaaaaccgagtgctacagcttcgagaggatcaagagcccagaggtcctaatcactaacgagacaccaaaaccggaaactattatcatccctgagcagtcacagatcaaaaagtag

SEQ ID NO: 250549 - protein, 236 aa, Artificial Sequence
  derived and/or modified sequence
MEVGLPAITLFLTSASSPVVATTMDQEPVGGVERGEAVAASGAAAAAAFGESAGQMSNERGFENVELGVIGKKKKVPRRVIHFVSGETMEEYSTDEDEVDGLEKKDVLPTVDPTKLTWGPYLWFYMLRAATSTLSVCDFLGEKIASVLGISTPKYQYAIDEYYRMKKEEEEEEEENRMSEEAEKQYQQNKLQTDSIVQTDQPETVISSSFVNVNFEMEGDSEVIMESKQNPVSVPP

SEQ ID NO: 250550 - protein, 213 aa, Artificial Sequence
  derived and/or modified sequence
MDQEPVGGVERGEAVAASGAAAAAAFGESAGQMSNERGFENVELGVIGKKKKVPRRVIHFVSGETMEEYSTDEDEVDGLEKKDVLPTVDPTKLTWGPYLWFYMLRAATSTLSVCDFLGEKIASVLGISTPKYQYAIDEYYRMKKEEEEEEEENRMSEEAEKQYQQNKLQTDSIVQTDQPETVISSSFVNVNFEMEGDSEVIMESKQNPVSVPP

SEQ ID NO: 250551 - protein, 76 aa, Artificial Sequence
  derived and/or modified sequence
MDQEPVGGVERGEAVAASGAAAAAAFGESAGQMSNERGFENVELGVIGKKKKVPRRVIHFVSGETMEEYSTDEDEV

SEQ ID NO: 250552 - DNA, 711 bp, Artificial Sequence
  derived and/or modified sequence
atggaggtgggcctgcccgccatcaccctgttcctgaccagcgccagcagccccgtggtggccaccaccatggaccaggagcccgtgggcggcgtggagagaggcgaggccgtggccgccagcggcgccgccgccgccgccgccttcggcgagagcgccggccagatgagcaacgagagaggcttcgagaacgtggagctgggcgtgatcggcaagaagaagaaggtgcccagaagagtgatccacttcgtgagcggcgagaccatggaggagtacagcaccgacgaggacgaggtggacggcctggagaagaaggacgtgctgcccaccgtggaccccaccaagctgacctggggcccctacctgtggttctacatgctgagagccgccaccagcaccctgagcgtgtgcgacttcctgggcgagaagatcgccagcgtgctgggcatcagcacccccaagtaccagtacgccatcgacgagtactacagaatgaagaaggaggaggaggaggaggaggaggagaacagaatgagcgaggaggccgagaagcagtaccagcagaacaagctgcagaccgacagcatcgtgcagaccgaccagcccgagaccgtgatcagcagcagcttcgtgaacgtgaacttcgagatggagggcgacagcgaggtgatcatggagagcaagcagaaccccgtgagcgtgcccccctag

SEQ ID NO: 250553 - DNA, 711 bp, Artificial Sequence
  derived and/or modified sequence
atggaggtgggacttccagctatcacattattcctgactagtgccagcagcccagtggttgcaaccactatggatcaagagccagtggggggagtcgaacgcggagaggccgtggccgctagtggcgctgccgctgcagcagccttcggggagtccgccggtcagatgtcaaatgaacgaggcttcgagaatgtcgaacttggtgtaataggcaaaaaaaagaaggttcctaggagagtcattcatttcgtatccggggaaacgatggaggagtactccaccgatgaagatgaagtggacggactcgagaaaaaagacgttctgcctactgtggaccccaccaaattgacatggggcccctatctgtggttttatatgctcagggccgcaacgtctactctgtccgtttgtgactttctaggcgaaaagatcgcgagcgtgctcggcatctccactcctaaatatcaatatgccatcgatgagtactatcgaatgaagaaagaggaggaagaggaagaagaggaaaatcgaatgagcgaggaggccgagaagcagtatcaacaaaataagctccagaccgatagcatcgtacagactgatcagcctgagaccgtaatcagttccagtttcgtcaatgtaaacttcgagatggagggtgattctgaggtgattatggagtccaagcagaacccagtgtcagtgcctccttag

SEQ ID NO: 250554 - DNA, 2927 bp, Artificial Sequence
  derived and/or modified sequence
gcgggtgagtcccacttcccgacagcctggctcggccagcgactgggcggggagaccaaggatggaagtgggcttaccggccattaccctctttctcaccagcgccagcagccctgtggtggcgacgacgatggaccaggagccagtgggcggtgtggaacgaggagaagccgtcgcagcctcgggagctgcggccgccgcggcattcggggaatctgcagggcagatgagtaacgaaagaggctttgaaaatgtagaactgggagtcataggaaaaaagaagaaagtcccaaggagagtcatccactttgttagtggtgaaacaatggaagaatatagcacagatgaagacgaagttgatggcctggagaagaaagatgttttgcctactgttgatccgacaaaacttacctggggtccctacttatggttttacatgcttcgggctgctacatcaactctctcagtgtgtgacttccttggagagaagattgcatctgttttgggtatcagcaccccaaagtaccaatatgccattgatgaatattatcggatgaagaaggaggaagaagaagaagaagaagaaaacaggatgtctgaagaagcagaaaaacaatatcaacagaataaattgcagactgattccattgttcagacagatcaaccagagacagtgatatccagctcatttgtgaatgtcaattttgaaatggagggagacagtgaagtaattatggaaagcaagcaaaatccagtctctgtcccaccataaaatgaaatgactatcaagcttcaaactcttaagttttttttttttaatacaaaaactttcacattctttattcagtgggacttaatacaattatttatattttaaattattaaagtatctggaaagggaaaatgttttcttcatttttaggatctatctagcaaaagccagatctgaaattcagatatttgtactgtttttactgtgtatagaaattagtgctttggttttaaaatgatcttttaaaaaagttaaggacatcctagagccttaatagttaagaagagttaaattatcaagcctatttgtgcatttgctttttttgaaaaaggtaagttgctgattaagtctaattggaattgataattccatagtcttagattaaaatgaggatattttctcctagattttctcatgttatgccatgcatttatatatctaaccattaatttcacactaaggatgcttcaccatataataaaaggagcaagatggaagcactttgaattttctttcattgagaataactgttttatgtaagaatctgtatttataacaccagatattaagataggcttccattttttaatgcaagccacttacttaatcttgtattctttttcaggactcaaataactagctttgaacataatattaaaacactacttatagaatagatttattaatgttaatacctagtgaatatccatgtggcatcctggttatgttatcggttcagcgttaatcctatagaaaagtggtttggaggggattgggggatagtgggacaggtatagatttaatccatcaggagcaattagatattgtataaggtgcaatgatagcctaatgaaattacccgtcattcatcatttagaagtagcaacagtgaagactggacagtttacttgaatctggttggccactcctctacctacttggttatttgtaaaccttacaaatgtatatattgtgaagctaattttgaaaatattcctaaatatggccaggtacggtgctcacacctgtaatcccagcactttgggaggctgaagtgggcagattacttgaggtcaggagtttgagaccagcctggccaacgtagtgaaaccccgtctctacaaaaatacaaaaattagccaggcgtggtggtgcacgtctgtaatcccagctgctcgggaggctgaggcaggagaatcacttgaaccagggaggtggaggttgcagtgagccaagattgcaccactgcactccagcctgggcgacagagtgagactccatcttggggggaaaaaagtatatatatatacacacacacagacacacacacacacacatatatctctaaatgtgtgtatagaaccttttatcagtataacattgatttataattaaatgtgggtgaggaagaatgtgtggagtgtttcagaaattttgatcttaaaagccttttcagaaactcaaagctttcagaaattaatagttatattaatagccttctaaacagcattaagttttcaattttaatatatctatataaaatatagtgtcaaagaaagtaacatcaatatagtgggtctgtaatggaaatctgtcaatgaacatgaactgagttcttcaactacaggttgaaggataattaaacttttcattaggagtgttcagctacatggattcatggaatggtggttcatagtaagtgatggtaatctttttattcatgggtgtaaaccctttataacttagtgcttaaaatattaatcttttgattatataatgtcccatgaattatagtttaccaatagttctaaaacatgctaacctgaccttttccttctaatttgtttttaacttcattcgagatagtacctctcactcacagatatttatttggttatcaagtgaagataggtgtgtctaaaagtgatcttctgaatcctgtctccctagaggtactagtatctagagtttacccagaaaattttatgattgtaacaaaaggaagtagtgacttatgaaggttttgtttcttgaattttacttttgctacttgtccaatagtggctagtttatgtttatcaatatagttattcactgtgccttaagtttatactttgtttatgcaaactataaaatttcccataaatgtattcaa

SEQ ID NO: 250555 - DNA, 858 bp, Artificial Sequence
  derived and/or modified sequence
aggcgcggcgcgaggcgggcgctgggcggcgccagcagccctgtggtggcgacgacgatggaccaggagccagtgggcggtgtggaacgaggagaagccgtcgcagcctcgggagctgcggccgccgcggcattcggggaatctgcagggcagatgagtaacgaaagaggctttgaaaatgtagaactgggagtcataggaaaaaagaagaaagtcccaaggagagtcatccactttgttagtggtgaaacaatggaagaatatagcacagatgaagacgaagttgatggcctggagaagaaagatgttttgcctactgttgatccgacaaaacttacctggggtccctacttatggttttacatgcttcgggctgctacatcaactctctcagtgtgtgacttccttggagagaagattgcatctgttttgggtatcagcaccccaaagtaccaatatgccattgatgaatattatcggatgaagaaggaggaagaagaagaagaagaagaaaacaggatgtctgaagaagcagaaaaacaatatcaacagaataaattgcagactgattccattgttcagacagatcaaccagagacagtgatatccagctcatttgtgaatgtcaattttgaaatggagggagacagtgaagtaattatggaaagcaagcaaaatccagtctctgtcccaccataaaatgaaatgactatcaagcttcaaactcttaagttttttttttttaatacaaaaactttcacattctttattcagtgggacttaatacaattatttatattttaaattattaaagtatctggaaagggaaaatgttttcttcatttttaggatctatct

SEQ ID NO: 250556 - DNA, 3254 bp, Artificial Sequence
  derived and/or modified sequence
aagaaaattgtaatttgatatttaattgccactttggaaaataaaatcatgcatttataaatatcccacaaagttttagtaataaagattgttgattgccctgcttgccagtaagaaggaagagattttgaatacatataatgcagaactgtgttgtttatgaatgccaattcatgaagtcttaacaattggttctttatttttgttttcaatttatggccgagtttggttttgctgttttggactgtctcaactccctgctgatgccaccatacagagtcagatcagcaaccacatcccatcactagcctttgaagtacaacgacacagctgtcttcattttacaagtgcaaaaaccgaggtcctgcggggtgactgccccagacgccgctggtgacgggctgcgccgaggtcgagacgccaggcttcagcgccagcagccctgtggtggcgacgacgatggaccaggagccagtgggcggtgtggaacgaggagaagccgtcgcagcctcgggagctgcggccgccgcggcattcggggaatctgcagggcagatgagtaacgaaagaggctttgaaaatgtagaactgggagtcataggaaaaaagaagaaagtcccaaggagagtcatccactttgttagtggtgaaacaatggaagaatatagcacagatgaagacgaagttgatggcctggagaagaaagatgttttgcctactgttgatccgacaaaacttacctggggtccctacttatggttttacatgcttcgggctgctacatcaactctctcagtgtgtgacttccttggagagaagattgcatctgttttgggtatcagcaccccaaagtaccaatatgccattgatgaatattatcggatgaagaaggaggaagaagaagaagaagaagaaaacaggatgtctgaagaagcagaaaaacaatatcaacagaataaattgcagactgattccattgttcagacagatcaaccagagacagtgatatccagctcatttgtgaatgtcaattttgaaatggagggagacagtgaagtaattatggaaagcaagcaaaatccagtctctgtcccaccataaaatgaaatgactatcaagcttcaaactcttaagttttttttttttaatacaaaaactttcacattctttattcagtgggacttaatacaattatttatattttaaattattaaagtatctggaaagggaaaatgttttcttcatttttaggatctatctagcaaaagccagatctgaaattcagatatttgtactgtttttactgtgtatagaaattagtgctttggttttaaaatgatcttttaaaaaagttaaggacatcctagagccttaatagttaagaagagttaaattatcaagcctatttgtgcatttgctttttttgaaaaaggtaagttgctgattaagtctaattggaattgataattccatagtcttagattaaaatgaggatattttctcctagattttctcatgttatgccatgcatttatatatctaaccattaatttcacactaaggatgcttcaccatataataaaaggagcaagatggaagcactttgaattttctttcattgagaataactgttttatgtaagaatctgtatttataacaccagatattaagataggcttccattttttaatgcaagccacttacttaatcttgtattctttttcaggactcaaataactagctttgaacataatattaaaacactacttatagaatagatttattaatgttaatacctagtgaatatccatgtggcatcctggttatgttatcggttcagcgttaatcctatagaaaagtggtttggaggggattgggggatagtgggacaggtatagatttaatccatcaggagcaattagatattgtataaggtgcaatgatagcctaatgaaattacccgtcattcatcatttagaagtagcaacagtgaagactggacagtttacttgaatctggttggccactcctctacctacttggttatttgtaaaccttacaaatgtatatattgtgaagctaattttgaaaatattcctaaatatggccaggtacggtgctcacacctgtaatcccagcactttgggaggctgaagtgggcagattacttgaggtcaggagtttgagaccagcctggccaacgtagtgaaaccccgtctctacaaaaatacaaaaattagccaggcgtggtggtgcacgtctgtaatcccagctgctcgggaggctgaggcaggagaatcacttgaaccagggaggtggaggttgcagtgagccaagattgcaccactgcactccagcctgggcgacagagtgagactccatcttggggggaaaaaagtatatatatatacacacacacagacacacacacacacacatatatctctaaatgtgtgtatagaaccttttatcagtataacattgatttataattaaatgtgggtgaggaagaatgtgtggagtgtttcagaaattttgatcttaaaagccttttcagaaactcaaagctttcagaaattaatagttatattaatagccttctaaacagcattaagttttcaattttaatatatctatataaaatatagtgtcaaagaaagtaacatcaatatagtgggtctgtaatggaaatctgtcaatgaacatgaactgagttcttcaactacaggttgaaggataattaaacttttcattaggagtgttcagctacatggattcatggaatggtggttcatagtaagtgatggtaatctttttattcatgggtgtaaaccctttataacttagtgcttaaaatattaatcttttgattatataatgtcccatgaattatagtttaccaatagttctaaaacatgctaacctgaccttttccttctaatttgtttttaacttcattcgagatagtacctctcactcacagatatttatttggttatcaagtgaagataggtgtgtctaaaagtgatcttctgaatcctgtctccctagaggtactagtatctagagtttacccagaaaattttatgattgtaacaaaaggaagtagtgacttatgaaggttttgtttcttgaattttacttttgctacttgtccaatagtggctagtttatgtttatcaatatagttattcactgtgccttaagtttatactttgtttatgcaaactataaaatttcccataaatgtattc

SEQ ID NO: 250557 - DNA, 476 bp, Artificial Sequence
  derived and/or modified sequence
aatttatggccgagtttggttttgctgttttggactgtctcaactccctgctgatgccaccatacagagtcagatcagcaaccacatcccatcactagcctttgaagtacaacgacacagctgtcttcattttacaagtgcaaaaaccgaggtcctgcggggtgactgccccagacgccgctggtgacgggctgcgccgaggtcgagacgccaggcttcagcgccagcagccctgtggtggcgacgacgatggaccaggagccagtgggcggtgtggaacgaggagaagccgtcgcagcctcgggagctgcggccgccgcggcattcggggaatctgcagggcagatgagtaacgaaagaggctttgaaaatgtagaactgggagtcataggaaaaaagaagaaagtcccaaggagagtcatccactttgttagtggtgaaacaatggaagaatatagcacagatgaagacgaagt

SEQ ID NO: 250558 - DNA, 711 bp, Artificial Sequence
  derived and/or modified sequence
atggaggtgggcctgcctgccatcaccctcttcctgaccagcgccagcagccctgtggtggccaccaccatggaccaggagcctgtgggcggcgtggagcggggggaggccgtggccgccagcggggctgctgctgctgctgcctttggagagagcgctggccagatgagcaatgaaagaggatttgaaaatgtggagctgggcgtcatcggcaagaagaagaaggtgccccggcgggtcatccactttgtgtctggagagaccatggaggagtacagcacagatgaagatgaggtggatggcctggagaagaaggatgtgctgcccaccgtggaccccaccaagctgacctggggcccctacctgtggttctacatgctgcgggccgccaccagcaccctgtctgtgtgtgacttcctgggggagaagatcgcctctgtgctgggcatcagcacccccaagtaccagtatgccattgatgagtactacaggatgaagaaggaggaggaggaggaggaggaggagaacaggatgtctgaggaggccgagaagcagtaccagcagaacaagctgcagacagacagcatcgtgcagacagaccagcctgagaccgtcatcagcagcagctttgtgaatgtgaactttgagatggagggggacagcgaggtgatcatggagagcaagcagaaccctgtgtctgtgcccccatag

SEQ ID NO: 250559 - DNA, 711 bp, Artificial Sequence
  derived and/or modified sequence
atggaggtgggcctgcccgccatcaccctgttcctgaccagcgcctccagcccagtggtggccacaactatggaccaggagcccgtggggggagttgaacgcggagaggccgttgctgcaagtggagccgccgctgccgccgcttttggagaatccgccgggcagatgtctaacgaaaggggttttgaaaacgtcgagctgggagtgatcggaaaaaagaagaaggtcccaagaagggtcatccattttgtttcaggtgagacaatggaagaatacagcactgatgaggatgaagtggatggcttggaaaaaaaagatgtcctccctacagttgacccaactaagctgacctgggggccctacctctggttctacatgctgagggctgcaacatccaccttatcagtatgtgatttcctcggcgagaaaatcgcatccgtattgggaatcagcacccccaaataccaatatgctattgatgagtactatcgtatgaagaaagaagaggaggaggaggaggaagagaaccggatgtccgaggaagccgagaagcagtaccagcagaacaagctgcagaccgacagtatcgtacagacagaccagcctgaaactgtgatctcatcatcgttcgtgaatgtgaacttcgagatggagggggactcggaagtgattatggagtccaaacagaatcccgtgtctgtacctccctag

SEQ ID NO: 250560 - DNA, 711 bp, Artificial Sequence
  derived and/or modified sequence
atggaggtgggtctcccagcaatcactctatttttaacatccgccagctcgccagtagttgccacaaccatggatcaagagccagtgggaggagtggagcgcggtgaggctgtcgccgcttccggagcggcagccgcagccgcatttggcgagagcgccggacagatgtcaaacgagcgcggttttgagaacgtcgaattaggcgtgatcggcaagaagaagaaggtcccacgcagggtgatccactttgtatctggagagacaatggaagagtacagcacagatgaagatgaggttgacggcctcgaaaaaaaagatgtgctgcctactgtcgatccaactaagctgacctggggaccttatctttggttttatatgcttcgagctgctacctcaaccctgtcagtgtgtgattttctgggcgagaagattgcttcggtgctgggcatatcgaccccaaaatatcagtacgcaatagatgaatattaccggatgaagaaggaggaggaagaggaggaggaggaaaatcggatgtcggaagaggctgagaaacagtatcagcagaacaaactccaaaccgattccattgtccagacagaccaaccagaaacggtgattagttctagctttgttaacgtgaattttgaaatggagggcgattccgaagtgataatggaatcaaagcagaacccagtgtcagtccccccatag

SEQ ID NO: 250561 - protein, 807 aa, Artificial Sequence
  derived and/or modified sequence
KKKRKISLLPKPPKHDAPLTIEFPNLDKTSAEWLKVNGLKAKKLSLYQVLAPNAFSPVEEFVPILQKTVSSTIHEKAMIQFEWHDGTVKNIHVDPPFLYKYQQQLSRAMRMYERRIEWLSLASRRIWGTVCEKRVVVLLDISATNSMYIIHIQHSLRLLLEEQLSNKDCFNLIAFGSTIESWRPEMVPVSHNNLQSAWRWALNLRCRGSRNVLSALRKAVEVDFKDKDKHQSQGIYLFTGGIPDQDMPTLSAYMAEACGGCDLQLNVCLFYVGEPKMDTTPPARYASHTDTAAAYKEVTRAAGGRFHWFGDTGIYESDDINSIMSEMEKALNYSQKCAFLMASLKNHSGKVLGSSALPKEKPKTLQLRSQPKKLCPPRPTVPLGARMSIKDDPDREKSPPLKSLKWRPLSSRVGISPAAAQPTKEGMMELRRKTKSREAETSLLLFYTEKGNDVGSVYKKYPQGRGLRRTSSSIDLPRKDTVCSSQEWVAKYGLKKLKLEISRCMGPNCTHQKSGQRSASAKHCSIFPSVEIHGVVRHIQWTPREMEVYIRHLEKVLRRYVQRLQWLLSGSRRLFGTVLESKVCILLDTSGSMGPYLQQVKTELVLLIWEQLRKCCDSFNLLSFAESFQSWQDTLVETTDAACHEAMQWVTHLQAQGSTSILQALLKAFSFHDLEGLYLLTDGKPDTSCSLVLNEVQKLREKRDVKVHTISLNCSDRAAVEFLRKLASFTGGRYHCPVGEDTLSKIHSLLTKGFINEKDPTLPPFEGDDLRILAQEITKARSFLWQAQSFRSQLQKKNDAEPKVTLS

SEQ ID NO: 250562 - protein, 1184 aa, Artificial Sequence
  derived and/or modified sequence
MKKYRKISIGCFAMATQTSHVFHGQENMFLENHCIRRNTGRDSKKPLKQKNMNGLGQNSDNGLLVTHVNQTQDLLRLQGSETQSSDWEDSEDWLSAHSLKCQKLTLADLISQGTEVLEEGTNVVQKICFSTQIIRHFESKLSDTIEVYQERIQWLTENSKKAFGLIKGARVSILIDVSAISSGPQKEEFQKDLMSLIDEQLSHKEKLFVLSFGTNAGSLWPDPMEVSASTLQELKLWVKTLQPDGGSNLLQALKKIFTLKGLDSLVAIMRSCPDQPSEILSDYIQQSTMGRDLIIHFITYRCDDQMPPAVLKNLAEAVRGYYHCYSPKMEHYTSRDMDELLAEIQKAQSLLSHVQALQHSSPCEALTCTMEEISTEITNGPLISLLPKPPKHDAPLTIEFPNLDKTSAEWLKVNGLKAKKLSLYQVLAPNAFSPVEEFVPILQKTVSSTIHEKAMIQFEWHDGTVKNIHVDPPFLYKYQQQLSRAMRMYERRIEWLSLASRRIWGTVCEKRVVVLLDISATNSMYIIHIQHSLRLLLEEQLSNKDCFNLIAFGSTIESWRPEMVPVSHNNLQSAWRWALNLRCRGSRNVLSALRKAVEVDFKDKDKHQSQGIYLFTGGIPDQDMPTLSAYMAEACGGCDLQLNVCLFYVGEPKMDTTPPARYASHTDTAAAYKEVTRAAGGRFHWFGDTGIYESDDINSIMSEMEKALNYSQKCAFLMASLKNHSGKVLGSSALPKEKPKTLQLRSQPKKLCPPRPTVPLGARMSIKDDPDREKSPPLKSLKWRPLSSRVGISPAAAQPTKEGMMELRRKTKSREAETSLLLFYTEKGNDVGSVYKKYPQGRGLRRTSSSIDLPRKDTVCSSQEWVAKYGLKKLKLEISRCMGPNCTHQKSGQRSASAKHCSIFPSVEIHGVVRHIQWTPREMEVYIRHLEKVLRRYVQRLQWLLSGSRRLFGTVLESKVCILLDTSGSMGPYLQQVKTELVLLIWEQLRKCCDSFNLLSFAESFQSWQDTLVETTDAACHEAMQWVTHLQAQGSTSILQALLKAFSFHDLEGLYLLTDGKPDTSCSLVLNEVQKLREKRDVKVHTISLNCSDRAAVEFLRKLASFTGGRYHCPVGEDTLSKIHSLLTKGFINEKDPTLPPFEGDDLRILAQEITKARSFLWQAQSFRSQLQKKNDAEPKVTLS

SEQ ID NO: 250563 - DNA, 2424 bp, Artificial Sequence
  derived and/or modified sequence
aaaaagaaaaggaagatctcactgttgcctaagcctcctaaacacgacgctccactgactatcgaatttccaaacctggacaaaaccagcgccgagtggctgaaggtgaatggactcaaggctaaaaaactcagcctttatcaggtcctcgcccctaacgccttcagcccagtggaagaatttgtgcctattcttcaaaaaactgtatcttctactatccatgagaaagccatgattcagtttgagtggcatgatgggacagtgaagaatatccacgtagacccgccattcctatacaagtaccagcagcagcttagtagggccatgcggatgtacgaacgcaggattgagtggctctccctcgcaagtcgcaggatctgggggaccgtgtgtgagaagagagtggtagtgttactggatattagcgctacaaattctatgtatatcatccatatccagcacagcctccggctgcttctcgaggaacagctgtcaaataaggactgttttaacctcatcgccttcggaagtaccattgaatcatggcgacctgaaatggtgccagtctcccacaacaatctgcagtccgcctggcgctgggccctgaatctccggtgcagaggctctagaaacgtgctctctgccctgaggaaagctgttgaagtggacttcaaagataaggataaacatcagtcacaaggcatttacctgttcaccgggggaattccagatcaggacatgccaacactgtcagcctacatggccgaagcttgcggcggatgtgatctgcagctgaatgtctgtctgttctatgtcggtgagccaaaaatggatacaactcctccagccagatacgcaagccacactgatacagccgctgcctacaaggaggtcacacgagccgcaggaggccgttttcactggttcggggacacaggaatctacgagtccgacgacattaactctatcatgtccgagatggaaaaagccctgaattacagtcagaaatgtgccttcctgatggcgagcctcaaaaatcactctggtaaggtcctgggctccagtgctctgcccaaagaaaaacccaagacactgcagcttaggtctcagcctaaaaagctctgccctccgcgacccacagttcccctcggggcaaggatgtctatcaaggacgacccggatcgggaaaaatctccacccctgaagtcccttaagtggaggcccctgagctcgcgagtgggaatcagtcccgctgcggcacagccgactaaggaaggaatgatggagctccgcaggaagacaaaaagccgcgaagctgagacctccctgttgctgttctacactgagaagggcaacgatgtgggtagtgtctacaagaagtatcctcagggacggggtctcaggcgaacatcaagttctatagatctgccaagaaaggacaccgtttgcagttcacaggaatgggtagctaagtacggcttgaaaaaactgaagctggagattagtcggtgcatgggccctaattgtacacaccagaaaagtgggcagcggtctgcaagtgccaaacattgctccatttttcccagcgtggaaatccatggcgttgtccggcacatccagtggacgcctagggaaatggaagtttatatccggcacctagaaaaggtcctcagaagatacgtccagagactgcagtggcttctgagcggaagcagaaggttgtttggcaccgtactagaaagcaaagtgtgcattctgctcgatactagcggatccatgggcccttacctgcagcaggtgaaaacggaattagtacttctgatctgggaacagctgcgaaaatgctgcgattcttttaatttactgtccttcgctgagagcttccagagctggcaggatacgctggtggagacaacagatgcagcatgccacgaggcaatgcagtgggttacgcatttacaagcccagggctctacatctatcctccaagctctgctgaaggctttttcattccacgatctcgagggcctgtacctgttgacggatggcaagcctgacacctcatgctctctcgtgcttaatgaagttcagaagttgagagaaaaacgagacgtaaaagtgcacactatctccctgaactgttcagatcgcgcagccgtcgagtttctgagaaagctggcatctttcacgggtggccgttatcattgccctgtcggagaagatacactgtcgaagatccacagtctcctcactaagggttttattaacgaaaaggatcccacacttcctccttttgaaggtgatgaccttaggattctggcccaggagatcaccaaagccaggtcattcctgtggcaggcgcagtcgttcagaagtcagctgcagaagaagaacgacgctgagcctaaggtgacactcagttag

SEQ ID NO: 250564 - DNA, 3555 bp, Artificial Sequence
  derived and/or modified sequence
atgaaaaaatatcggaagatatcaattggctgctttgccatggccacccagacaagtcatgtgtttcatggccaggagaacatgtttctcgagaatcactgtattcggaggaacactggcagagacagtaaaaagccactgaagcagaagaatatgaatggattgggtcagaattccgataatggcctgctcgtgacacacgtcaaccagacacaggacctcctccggcttcagggctccgagacccaatcatccgactgggaggatagtgaggactggctttctgcccactccctcaagtgtcagaaacttactctggcagacctcatctctcaaggaaccgaggtgctggaggagggaaccaatgtggtgcaaaagatctgcttctcaacacagatcatacggcactttgaatccaagttgtcagacacaatcgaagtgtaccaggagcgcatacaatggttgactgaaaactctaaaaaggcattcgggcttattaagggagcgagagtctcaatcctgatagatgtgtcagccatctcctcaggaccacagaaggaggaatttcagaaggaccttatgagccttatagacgaacagttgagccacaaagaaaaactgttcgtgctgagctttggaacaaacgctggcagcctgtggcccgaccctatggaggtatccgcttcaaccctacaggagctgaaactttgggtgaaaacgctacagcccgatggaggatcaaacctgttgcaggcccttaagaagatttttaccctaaaggggctcgacagccttgtggcgattatgaggtcctgccctgaccagcctagcgagatcctgtctgattacatccagcagagtacgatgggtcgggacctgatcatccacttcattacttatagatgcgacgaccagatgccccctgctgtgttgaaaaacttggcggaggccgtgagaggctactaccattgctattctccaaagatggaacattacacctctcgcgatatggatgaacttctggccgagattcagaaagcacagtccctgctatcccacgtccaggctttacaacactcatctccgtgtgaggccctgacatgtacaatggaggaaattagcacagagatcactaacggtcctctcatcagcctgcttccgaaacccccaaagcatgacgcccctctgactatcgagttcccgaacctggacaaaacatccgccgaatggctgaaagtcaatggcttgaaggctaagaaactgtcgctgtaccaggtactggcccctaatgcgtttagccctgtggaagaattcgtgcccattttgcaaaaaaccgtgtcatcaaccattcacgaaaaggccatgatccagttcgaatggcatgacggaactgtgaagaacatccacgtggatccgccattcctgtataagtaccaacaacaactgtcacgggcaatgcgcatgtatgagaggcgcattgagtggctgagcttggcttcacggcgtatttggggcacagtctgtgagaagcgggtggtggttctccttgacatttcagctaccaattctatgtacatcatccatatccagcattcactgaggctgctcctggaggagcagttgtctaacaaggactgctttaatttgatcgcctttggcagcaccatcgaatcatggcggcctgagatggtcccggtgtcacacaataatctgcagtcagcatggcgctgggctctgaacttgcggtgcagagggtcgcgtaatgtgctgtcggcgctacggaaggctgtggaggtggatttcaaggataaggacaaacatcagtcccaaggaatttatcttttcacaggcggaatccctgaccaagacatgccaactttgtcagcttacatggcggaggcctgtggcggatgcgacctacagctcaacgtgtgccttttttacgtcggtgagcctaaaatggacactacaccgccagccaggtatgcctctcatacagatacagctgctgcttataaggaggtgacaagagccgcaggtggtcggtttcactggtttggagatactggaatctatgaatcggatgacattaacagcatcatgagtgaaatggagaaggccttgaactactctcagaaatgcgctttcctgatggcttcccttaagaatcacagcgggaaggtgctgggaagctccgccctacctaaagaaaaacctaagacactgcagctgagatcccagccaaagaagctgtgtccccctcggcctacagttccgctgggtgctagaatgtcaatcaaggacgaccccgaccgggaaaaaagcccacccttgaagtcactgaagtggcgcccattatcctctagggtcgggatctctcccgctgccgcacaaccaaccaaggaaggtatgatggagcttaggcgcaaaacaaaaagcagagaagcagagacgtctcttttgctgttttataccgagaaaggtaatgatgtgggatccgtgtacaaaaaatatcctcagggaagggggctacggagaacctcaagctctatagatttgcctcgcaaggatactgtgtgctcctcccaggaatgggtggccaagtatgggctgaaaaaacttaagcttgagatatcccgatgtatggggccaaattgcactcatcagaagagcggtcagcgctctgcctccgcaaaacactgttcgattttcccttccgtggagatacacggggtggtgagacacattcaatggaccccgcgagaaatggaagtctacattcgtcacttagaaaaggtgcttcggaggtatgttcagagactccagtggctgctgtctggcagccgccgactctttggaacagtgctggagtcaaaagtgtgcatcctcctggacaccagcggcagcatggggccatacctgcagcaggtaaagaccgagttagtgctcctcatctgggagcagctgcgcaaatgctgtgactccttcaaccttctgagctttgccgaatcattccaaagctggcaggacactctcgtcgagactaccgacgccgcatgccacgaagccatgcagtgggtgacccacttacaggcacaaggtagcacttcaatcttgcaggccctgttaaaggcattttcctttcacgacttagagggtctgtatctgctcacagatggtaagccggacactagttgtagccttgttcttaatgaagtccagaagttgagagaaaaaagagacgtcaaggtccacacaatctctcttaactgttctgaccgagccgcagtagagtttctgcggaagctcgcatctttcacagggggacggtaccactgtcctgtgggagaagacacgctctccaagatccatagtctgctgacgaaggggtttattaatgaaaaggatcccactttgcctcctttcgaaggagacgatttgaggattttggctcaggagattactaaagccaggagtttcttatggcaagcgcaaagcttccggagtcagctccagaagaagaatgacgctgagccaaaggttaccctaagctag

SEQ ID NO: 250565 - DNA, 2424 bp, Artificial Sequence
  derived and/or modified sequence
aaaaaaaagcggaaaatctccctgctacctaaaccacctaaacacgacgccccacttacaattgaattcccaaacctcgacaagacatcagccgagtggctcaaagtgaatggactgaaagcaaaaaaactgagtttataccaagttctcgcacccaatgcgttcagccctgtggaagaatttgtgcccattttgcagaaaaccgtcagttctaccattcacgagaaggcaatgatccagtttgagtggcatgatggcaccgttaaaaacatacatgttgatccacctttcctatataaatatcagcaacagctgtcccgagccatgcggatgtacgaacggagaatcgagtggctctcactggcgtccagacggatctggggaactgtctgcgaaaagcgcgtggtggttctgttggacatttcagctactaatagcatgtatatcattcacattcagcactctctacgactcctgcttgaggagcagctctcaaataaggactgtttcaatctcattgcctttggatctacaatcgaatcctggagacccgaaatggtaccagtatcccacaataatctacagagcgcttggagatgggctctgaaccttcgatgtagaggtagccggaatgtgctgagcgcacttcgaaaagcagtggaggtggattttaaagacaaggacaaacaccagtcccaagggatttacctctttacgggcgggattccagatcaggacatgccaaccctgagtgcgtacatggctgaggcttgtggtggatgtgacctgcagctaaatgtttgcttgttctatgtgggcgagccaaagatggatactacaccacccgctaggtacgcttctcacacagataccgccgccgcatacaaggaggtgacccgcgccgcgggcgggcggttccattggttcggcgatacaggcatctacgagtccgacgatatcaactcaattatgtctgagatggaaaaagctttgaactactctcagaagtgtgcatttctgatggcatcactgaagaatcattcaggtaaagtcctcggaagctcagctctccctaaagaaaagccaaagacactgcaactgcggtcgcaacctaagaagttgtgccctcctaggcccaccgtcccactgggggctaggatgtcaattaaagacgatccagaccgagagaagagcccacccctgaaatctttgaagtggcgacccctgagtagtcgggttggcatcagtccagccgcagcgcagccgacgaaggagggtatgatggagctcagacggaaaactaaatcccgcgaagctgaaacctctctcctcctgttttatactgaaaaaggtaacgacgtcggaagtgtatacaaaaaatatccccagggcaggggcttacggcggacaagctcctcgatcgacctccctcgtaaagacacggtgtgctcctcccaagagtgggtcgcgaaatacgggctaaagaagctgaaactagaaatctctcgctgcatgggccccaattgcacccatcagaagtctgggcagcgatcggcaagcgcaaagcattgttctattttcccctctgtagagattcacggtgtagtgcggcatattcagtggactccaagagaaatggaggtatatatccggcacctcgagaaggtactgaggaggtacgtacagcgtttgcagtggttgctgagcggcagccgaagattgttcgggaccgttctggaaagcaaggtgtgtattctgcttgatacatccggaagcatgggcccctatcttcaacaggtgaagacagagctcgttctgctgatctgggaacagctgaggaagtgctgcgattccttcaacctgttatcatttgctgaatccttccaatcctggcaggatactttggtcgagactaccgatgctgcttgtcacgaggccatgcaatgggtaacacacctgcaggctcagggaagcacatccattctgcaggctctgttaaaagctttctcttttcacgatctcgagggcttgtatctcctgaccgatgggaaaccagacacgagttgcagccttgtgcttaatgaggtacagaagctcagagagaagcgtgacgtcaaagttcacaccatctctcttaactgctccgatagagctgcggtagagttcctccggaagttggcttcattcacaggcggtcgctaccactgccctgtgggcgaagacactctgtccaagatccactccctgcttaccaaggggttcataaatgaaaaagacccaacactcccgccatttgaaggcgatgacctgaggatcttggcacaagagattaccaaggctcggtcctttctttggcaggcacagtcattcaggtcgcaactccaaaagaagaacgacgcggagccgaaggttaccctctcctag

SEQ ID NO: 250566 - DNA, 3555 bp, Artificial Sequence
  derived and/or modified sequence
atgaaaaagtatcggaaaatatctattgggtgcttcgctatggctacccagacctcccatgtgttccatgggcaggaaaatatgttcctggagaatcactgtatacgcagaaacaccgggagggacagcaaaaagcccctcaagcagaaaaatatgaacggtctgggacaaaatagtgataacggcctcctggtgacgcacgtgaatcagacacaggacttgcttaggttgcaaggtagtgaaacccagagctcggactgggaagacagtgaggactggctctcagctcactccctgaagtgtcaaaagctgactctggcagatctcatctcccaagggaccgaggttctcgaggagggcactaacgtggtccagaaaatttgcttttccacacagatcatcagacactttgaaagtaagcttagcgataccatagaggtgtaccaggagcgcatacagtggctgaccgaaaactctaaaaaagcattcggccttatcaaaggagcccgggtgtctattctgatcgatgtctccgcaatatctagcggccctcaaaaagaagaatttcagaaagaccttatgagtttaatcgatgagcagctcagtcacaaggaaaaactgttcgtgctgtcctttggtactaatgccggcagcctctggcccgaccccatggaggtgtctgcatctacactacaggagttgaaattgtgggtgaaaacattacagccagatgggggatcaaatctgctgcaggctctcaaaaaaatcttcactctcaagggcctcgatagcctagtggcaataatgcgtagttgcccagatcagccaagcgagattctgtcagattatatccaacaatccaccatgggccgagatcttatcattcatttcatcacatatcgctgtgatgatcaaatgccgccagccgttcttaaaaacctggccgaagccgtgcgaggatattatcactgctactctccaaaaatggaacattacacatcgcgggacatggatgagttactcgcggagatccagaaggcccaatccctgctttcgcacgtccaagcacttcagcattctagtccctgcgaggccctaacatgtacgatggaggaaatctcaacagaaatcactaatgggccactgatctcactcttgccgaaacctcctaagcatgacgccccccttactattgagttccccaatcttgataagacgagtgccgagtggcttaaggtaaacgggctgaaggctaaaaaactgtcgctgtatcaggtgctggcacccaatgccttctccccagttgaggagtttgtacctattctccaaaaaacagtgtcttctaccattcacgagaaggcgatgatccagttcgagtggcatgatggaacagtcaaaaatattcacgtggaccctccttttctgtataagtatcagcagcagttgtcacgagctatgaggatgtacgaaagacggatcgagtggctgagcctcgccagtcgccgaatttggggaacagtctgtgaaaagcgagtggttgtgcttcttgacatttcggccactaatagtatgtatatcatacacatacagcattccctcagactgctattggaggaacaactctcaaataaggactgttttaacctcattgctttcggatcgaccatcgagtcttggagaccagaaatggtcccggttagccacaataatctacagtcggcatggcggtgggctctcaatttaaggtgtcgaggcagtaggaatgtcttaagtgcactgcgcaaagcagtagaagtcgattttaaggacaaggataagcatcaaagccaaggcatttatttattcaccggaggaattcctgaccaggatatgcccaccctgagcgcatatatggctgaggcttgtggaggatgcgatcttcagttgaatgtgtgcctgttctacgtgggggaaccgaagatggataccaccccccccgctaggtatgcatcccacaccgataccgccgcagcgtacaaagaagttacaagggccgcgggtggaaggttccactggttcggcgacaccggcatttacgagtcggatgacatcaattccattatgtccgagatggagaaagcccttaactattcccagaaatgcgcatttctgatggctagtctcaagaatcactccggaaaggtgttgggcagctccgcactacctaaagagaagcccaaaactctccagttgcgttctcagcctaagaagctctgtcctcccagacccactgtgcccctgggcgcccggatgtctataaaagacgatccagatagagaaaaaagcccaccactgaagagcctcaaatggagacctctgtccagcagggtaggcatctcgccagctgccgctcagccgaccaaagagggcatgatggagttacgccggaagactaaatctcgagaggccgaaacctctcttttactattctatacagagaagggtaatgatgtagggagcgtgtacaagaagtacccccaagggagaggcctgcgtagaacgtcaagtagcattgatctgccccggaaggacacagtatgctcaagccaggagtgggtcgccaagtacggactcaagaaacttaagttggaaattagccgatgtatgggccctaactgcacccaccagaaatcggggcaaagatcagcctctgcgaagcattgtagcatcttcccttcagtcgagatccacggagtcgtgcggcacatccagtggacacctcgtgagatggaagtgtacattagacacttggaaaaagtgctgagacgatatgtccagcggctgcagtggctcctctccggcagccggaggctgtttggcaccgtcctggagagtaaagtctgcatcttgttagataccagcggttccatgggaccatatctgcaacaggtgaagacagagctcgtcttattgatctgggagcagctgcgaaaatgctgtgactcattcaatctgctctcttttgccgaatcgtttcagtcctggcaggacacgctcgtagagaccaccgatgctgcttgtcacgaggccatgcagtgggtaacccacctccaggctcagggatctacctccatattgcaggcactgctgaaggccttttcttttcatgacctagaaggactctacctactgaccgacggcaaaccagacaccagctgttccttagtcctgaacgaagtccagaaattgcgcgagaaacgggatgtgaaagtacacacaatctctctcaattgcagtgaccgcgccgcggtcgagtttttgcgcaagctggcatctttcaccggagggcggtaccactgcccagtgggcgaggatacactttcaaaaatccattccctactgaccaaggggttcatcaacgagaaagatccaacgctgcctccgtttgaaggcgacgaccttaggatccttgcacaggagatcaccaaagcacgctctttcctctggcaggcacagagtttccgatcccagctacagaagaaaaatgatgccgagcctaaggtcactctgagttag

SEQ ID NO: 250567 - DNA, 2424 bp, Artificial Sequence
  derived and/or modified sequence
aaaaaaaagcggaaaatctccctgctacctaaaccacctaaacacgacgccccacttacaattgaattcccaaacctcgacaagacatcagccgagtggctcaaagtgaatggactgaaagcaaaaaaactgagtttataccaagttctcgcacccaatgcgttcagccctgtggaagaatttgtgcccattttgcagaaaaccgtcagttctaccattcacgagaaggcaatgatccagtttgagtggcatgatggcaccgttaaaaacatacatgttgatccacctttcctatataaataccagcagcagctgtcacgggcaatgaggatgtacgagagaagaattgagtggctgtcccttgcttcaagaaggatctgggggaccgtgtgtgagaagagagtcgtggtcctgctggacatctccgcaacaaattctatgtatatcatccatatccagcatagtctaagactcctcctagaagaacagctgtcaaataaggattgcttcaaccttattgcttttggaagcacaatcgaatcatggcgccccgagatggtccctgtgagccacaataatctacagtccgcctggagatgggctctgaatctccgatgtcgaggcagtaggaatgttttgtccgcattgagaaaggctgtcgaagtagacttcaaagataaagacaagcatcagagccaaggaatttatctgttcaccggtggaatcccagaccaggatatgcccaccctcagcgcttatatggcagaagcctgtgggggatgtgatctccagctcaacgtctgcctgttttatgtgggggaaccgaagatggacaccaccccacccgcccgctacgcttcacacacagatactgcagccgcgtataaggaagtaacacgtgctgcgggaggtcggttccattggttcggtgacacgggcatttacgaatctgacgacatcaatagcattatgagcgagatggagaaggctctcaattatagccagaagtgtgctttcttgatggcttcgcttaagaaccacagtggcaaagtcctcgggtcctcagccctgcccaaggagaaacctaaaacgctgcaactgcgatctcagccaaagaagctctgccccccacgccccacagtccccctgggagcccgaatgtctattaaagatgacccggatagagagaaaagcccacccttgaagtccctaaagtggcgacctttatccagccgagtcggcatatctcccgcagccgcacagcctactaaggaaggcatgatggaactgcgccgaaaaactaaatccagagaagctgaaacgagtcttctgttgttttatacagagaaaggtaacgatgttggtagtgtgtacaagaaatacccacagggaagggggctaaggcgcacatccagctcaatagatctcccacgcaaggataccgtttgttcttcgcaggagtgggtcgctaaatatgggttaaagaagctcaaactagaaatatccaggtgtatgggaccaaattgtacccatcagaaatccgggcagaggtccgctagcgctaaacactgtagtatttttccttcagtggaaatccatggtgtggtgaggcatatccagtggactcctcgcgagatggaagtgtatatcaggcaccttgaaaaggtcttgcgccgttatgtacaacgtttgcagtggttattaagcggtagtaggaggctctttggaactgtcttagagtccaaggtgtgtatcctcctcgatacctcgggtagtatgggcccctatctgcagcaagtaaaaactgaattggtgctgctgatctgggaacagctgagaaagtgttgtgattcgttcaacctcctatctttcgctgagtccttccaaagttggcaggacacacttgtcgagacaacggatgccgcctgtcatgaggctatgcaatgggtgactcacctccaagcacagggctcgacgtccatcttgcaagccctgctgaaagccttctcttttcatgatctagaagggctctatttgttaacagatggtaaacccgacacatcatgctcgctggtgttgaacgaggtccaaaaattaagggagaaacgagacgtcaaagtgcataccataagtctcaattgtagtgatagggctgctgtcgagtttctgcgcaagctggcgtcatttactggaggacggtatcattgtcccgttggcgaagacacactaagcaagattcattctttattgacaaaaggtttcatcaatgagaaagaccccacactgcctccctttgagggcgatgatttacgaatcctggcccaggagataactaaggcacggagtttcttatggcaagcccagagctttcgatcccagttgcagaaaaagaatgatgcagaacccaaagtcactttatcatag

SEQ ID NO: 250568 - DNA, 3555 bp, Artificial Sequence
  derived and/or modified sequence
atgaaaaagtaccgcaagatctctatcggctgctttgccatggctacacaaacctcccatgtgtttcacggtcaagagaacatgttcttagaaaatcattgcatcagaaggaacacaggaagagacagcaagaaacccctgaaacaaaagaatatgaacggtctaggtcagaatagcgataatggcctactggttacccatgtgaaccaaacccaggatctgctacgcttgcagggctccgagacacaatccagtgattgggaggacagcgaagattggttaagtgcccacagcctcaaatgtcagaagctcacactcgctgatctaatctcccagggtacagaggtgctagaagagggcacgaatgtggtgcaaaaaatttgcttctctactcagatcataagacacttcgaatcaaagttgtcagataccatagaggtgtaccaggaacgaattcagtggctgactgaaaactcaaagaaggcatttgggttaattaagggggcaagagtaagcatcctcattgacgtctcagcaatttcttcagggccacagaaggaagaattccagaaggaccttatgagcctcatagatgaacagttgtctcataaggagaagctgtttgttttatccttcggcactaacgctggttcactttggcctgaccctatggaagtatctgcaagcactttacaggaactgaaactttgggtgaaaactttacagccggacggcggctccaacctgctccaggctctgaaaaaaatatttactttgaagggattagactctctggttgctattatgagaagttgtcctgatcagccaagtgaaatactgagcgactatattcaacagagtaccatggggagggacctcatcatccactttattacttataggtgtgacgatcagatgcctcccgccgtactgaagaacctagccgaagctgtgcgaggatattatcactgttattcacctaagatggaacactatacctcccgtgacatggatgagttgttagctgaaattcagaaagctcagtcactcctgtcccatgtgcaagccttacagcattcttcaccctgtgaagcactgacctgtaccatggaggagatatcaacggagattaccaacggacctttaatctcattacttccaaagcccccgaagcacgacgcccctttaacaattgagtttcccaatttagacaaaaccagcgccgagtggctgaaggtcaatggcttaaaggctaaaaagctttctctgtaccaggtgttggctcctaacgcattttcccctgtcgaagagtttgtgcctattctccagaagacagtatcttctactattcacgagaaagctatgattcagtttgagtggcacgatggaacagtgaaaaatatccacgtcgatccccccttcctgtataagtatcagcaacaattatctcgcgctatgaggatgtacgaaagaagaatcgagtggctctcacttgcttctcgcagaatctggggcacagtgtgcgaaaagcgagttgtagtccttctcgacattagcgccactaattcaatgtacataatccacatccaacattcactgcgcctgctgctcgaagaacaactctccaacaaagactgctttaatctgatcgcctttggatcaacgatcgaatcgtggcgcccagagatggtacccgtatcccataacaatctacaatctgcttggagatgggccctgaacctccgatgcaggggctctagaaatgtcttgtccgccttgagaaaagctgtcgaagttgatttcaaggataaggacaagcaccagtcacagggaatttacttattcacgggagggattcctgatcaagacatgcctaccctcagtgcctacatggcggaagcgtgtggaggttgtgacctacaactcaacgtctgccttttctatgtcggcgagcctaagatggacacaactccacccgctcgttacgcatctcacacagacacagcagcagcatataaagaggttaccagggcagcaggtgggcggttccactggttcggagataccggcatttacgagagtgatgatatcaactccattatgagtgaaatggagaaagcacttaattacagccagaaatgtgcttttcttatggcctccctcaaaaaccacagcggcaaggtcctcggaagcagcgcattacctaaggaaaagccgaagactctacaactgagaagccagcctaagaaactctgtcccccccgacccaccgtgcccctcggagcccgtatgtcgatcaaagatgaccccgatagagaaaaatcccccccgctgaagtctttaaagtggcgccccctgtcctcccgggttggaatcagccccgcagctgctcagcccaccaaggaagggatgatggagttgagacgaaagacaaaatccagagaagctgagaccagtctacttctgttttacacagaaaaggggaacgacgtgggctctgtgtacaaaaaatatccacaaggccgcggcttgagaaggacatctagttcgattgatttacctaggaaagatacagtctgctcctcacaggaatgggtcgctaagtatggactgaagaaactgaaactcgagatctcccggtgcatgggtccaaattgtacccatcagaagagtgggcagcggagtgcaagcgccaaacattgttctatcttccctagcgtggagattcacggcgtggtgcggcacattcaatggaccccccgcgagatggaagtgtacataaggcaccttgagaaagtcttaagaaggtacgtacaacggttgcagtggctcctgagcggttcgagacgcttgtttggtacagtattagaatcaaaagtctgcatactcttagacacttctggttctatgggtccgtacctccaacaagtgaaaacagaactggtactgctgatctgggaacaattaaggaaatgttgcgacagctttaacctgctgagctttgcagagagttttcagtcatggcaggataccctggtcgagaccaccgacgccgcttgccacgaggctatgcagtgggtcacccatctacaagcccaaggaagtacatccatccttcaggccttgttaaaagccttttcatttcacgacctggagggactatacctcctgaccgatggcaaacccgacacaagttgtagcttggttctcaatgaagtacaaaaactgagagagaagagggatgttaaagtgcacacaataagcctgaactgctcagaccgtgctgctgtggagttcttgagaaagctggcttccttcaccggaggacgataccactgccccgtgggcgaagataccctatctaaaattcactctctccttaccaaagggtttataaacgagaaagacccaaccttgccccccttcgagggcgatgacctgcgaatccttgcccaagagatcactaaggcccgaagctttctgtggcaagcccaaagctttagatcccagttgcagaaaaagaatgatgccgaacccaaagtgactctaagctag

SEQ ID NO: 250569 - DNA, 3360 bp, Artificial Sequence
  derived and/or modified sequence
aaaaagaaaaggaagataagcctcttgcctaaacccccaaagcatgacgctcctctcaccattgagtttccaaacttggacaagacttctgcagagtggcttaaggtcaatggtctgaaagccaagaaattaagtctatatcaggtcctggcacccaatgcattctctcctgtggaggaatttgtacctattctccagaaaacagtatcatcgaccatccatgagaaggcaatgatacaatttgaatggcacgacgggacagtgaagaacattcatgtggacccacccttcctctataagtaccagcaacagctcagcagagctatgcggatgtatgagaggcggattgagtggctctccctggccagcagaagaatctggggcacagtctgtgaaaaaagggtggttgtactgctcgatatctctgcgaccaattccatgtacattattcatatccagcactccctgcggctgctgctggaggagcagttatccaacaaggactgtttcaacctcatcgcgtttggaagcacaattgaaagctggaggcctgagatggttcccgtgagtcacaacaatttacaaagtgcctggcggtgggccctgaacctgcggtgtcggggcagcaggaacgttctcagcgccctgcggaaggctgtggaagtagacttcaaggacaaagacaaacaccaatcgcagggaatctacctcttcactgggggcatccccgaccaggacatgcctacactcagtgcctacatggctgaggcctgtggcggctgcgacctccagctgaacgtgtgtctcttctacgtgggcgagccaaagatggacaccacaccccctgcccgctatgccagtcacactgacacagccgccgcctacaaggaggtcacccgggctgcaggtggccgcttccactggtttggagacacaggcatttatgagagcgatgacatcaactccatcatgtctgagatggaaaaggctctcaactactcccaaaagtgtgccttcctcatggcctccctgaagaaccattcaggaaaagtactgggaagttcagccctcccgaaagaaaaaccaaagacacttcagctaagaagtcagcccaagaagctctgccctcccaggcccaccgtccccctgggggccagaatgagcattaaagatgaccctgacagagagaagagccccccgctgaaatctctgaaatggcgtccactcagtagcagagttggcatctcaccagctgcggcccagccaacgaaagaagggatgatggaactgaggaggaagaccaagtcaagggaagcagagacatctcttttactgttctacacagagaaagggaatgacgtgggctcagtgtacaagaagtaccctcaaggaaggggcttgagaaggactagctcttctattgacttacccagaaaggatacagtttgctcaagccaagagtgggtggcaaaatatgggctcaaaaaattgaagctggagatttccagatgcatgggtcccaactgcactcatcaaaagtcaggacagaggtcagcatccgccaaacactgcagcatcttccccagcgttgagatccatggagtggtgagacacatccagtggacgcccagggagatggaggtgtacatcaggcacttggagaaggtgttaaggcgctatgtccagaggctgcagtggctgctgtccgggagccgccgactgtttggcaccgttttggagagcaaagtatgcatattgctggacacgtcagggtccatgggcccctacctgcagcaggtgaagacagagctggttttgctgatttgggaacagctgcggaagtgctgtgacagttttaacctgctcagctttgcagagagctttcagtcatggcaggacacgctggtggagaccacagatgcagcgtgtcatgaggctatgcaatgggtgacccacctgcaagctcagggcagcacctccatcttgcaagcattgctgaaagctttcagtttccatgatctggaaggattgtacctcctgaccgacggaaagccagacacaagctgcagccttgtcctaaatgaagtccaaaaactcagggagaaaagagatgtgaaagtgcacaccatttccttgaactgctcagacagagcggcggttgagttcctgagaaagctggcttccttcaccggcggacgctatcactgccctgtgggtgaggacacactctccaaaattcacagcctgctgaccaaaggcttcatcaatgaaaaggatcccacattgccaccatttgaaggagatgatttaaggatcctggcccaggagatcaccaaggccagaagcttcctctggcaggcccaatccttcagatcccaactccagaagaaaaatgatgcagaaccaaaggtcactctttcctagagaagtgttctcagaaaagtcatcctgcaaaggaccactcactgagcaaatctcagccccgagggcaggatgggatgaaatgctgtgacctgcaggaaacatgattcctggtaccaggactctctggaagctgaggaaggaaagactttgtcttttgtgtgaggggccattcccgggtcttaatctaactctccagccctgtcccgcagcgcactctactctccagccactagattgtccctctctgggaagccctaaaccaaccccctgcctaaatggtggtgcttcttgcaaaccaaccccctgcctgaacggtgcttcttgccccctctgcctggagactcctgctcatccatcaaggcacagctcaaatgacatcagctccctgggacctatctagagcgaggggcctccagtctttctcttgcagcatcctgaccacgcagacctctcgcactcagcactctatgtcacgccaccttgctcgctgatctaactcttctccttgatggtgagctccttcgggatgagactggtgtcccaggatctgcaggtccccagaagctgccacataggagacacatggtgaacagtgagcaggcggctgagctgtgagagcctagctctggaaagcagctgatggggtggtctccaccctggttcataagaggctaatgcagagtcacagtcagcccatcctgggggaagaagaaacaagtgagcctcagcaccaccctccatccctgcccaaccaaactgaagtgaaggctgctcatctgggttcattttctaaaattaaaaacaattaattttattctactaataggatcaacatgactttaactgtttgaagtgatcattggcgtgtgtgtgtgtgcataaatttttagtgacataaaactttattaaaagactcataccataataaagaatttc

SEQ ID NO: 250570 - DNA, 2424 bp, Artificial Sequence
  derived and/or modified sequence
aagaagaagagaaagatcagcctgctgcccaagccccccaagcacgacgcccccctgaccatcgagttccccaacctggacaagaccagcgccgagtggctgaaggtgaacggcctgaaggccaagaagctgagcctgtaccaggtgctggcccccaacgccttcagccccgtggaggagttcgtgcccatcctgcagaagaccgtgagcagcaccatccacgagaaggccatgatccagttcgagtggcacgacggcaccgtgaagaacatccacgtggacccccccttcctgtacaagtaccagcagcagctgagcagagccatgagaatgtacgagagaagaatcgagtggctgagcctggccagcagaagaatctggggcaccgtgtgcgagaagagagtggtggtgctgctggacatcagcgccaccaacagcatgtacatcatccacatccagcacagcctgagactgctgctggaggagcagctgagcaacaaggactgcttcaacctgatcgccttcggcagcaccatcgagagctggagacccgagatggtgcccgtgagccacaacaacctgcagagcgcctggagatgggccctgaacctgagatgcagaggcagcagaaacgtgctgagcgccctgagaaaggccgtggaggtggacttcaaggacaaggacaagcaccagagccagggcatctacctgttcaccggcggcatccccgaccaggacatgcccaccctgagcgcctacatggccgaggcctgcggcggctgcgacctgcagctgaacgtgtgcctgttctacgtgggcgagcccaagatggacaccaccccccccgccagatacgccagccacaccgacaccgccgccgcctacaaggaggtgaccagagccgccggcggcagattccactggttcggcgacaccggcatctacgagagcgacgacatcaacagcatcatgagcgagatggagaaggccctgaactacagccagaagtgcgccttcctgatggccagcctgaagaaccacagcggcaaggtgctgggcagcagcgccctgcccaaggagaagcccaagaccctgcagctgagaagccagcccaagaagctgtgcccccccagacccaccgtgcccctgggcgccagaatgagcatcaaggacgaccccgacagagagaagagcccccccctgaagagcctgaagtggagacccctgagcagcagagtgggcatcagccccgccgccgcccagcccaccaaggagggcatgatggagctgagaagaaagaccaagagcagagaggccgagaccagcctgctgctgttctacaccgagaagggcaacgacgtgggcagcgtgtacaagaagtacccccagggcagaggcctgagaagaaccagcagcagcatcgacctgcccagaaaggacaccgtgtgcagcagccaggagtgggtggccaagtacggcctgaagaagctgaagctggagatcagcagatgcatgggccccaactgcacccaccagaagagcggccagagaagcgccagcgccaagcactgcagcatcttccccagcgtggagatccacggcgtggtgagacacatccagtggacccccagagagatggaggtgtacatcagacacctggagaaggtgctgagaagatacgtgcagagactgcagtggctgctgagcggcagcagaagactgttcggcaccgtgctggagagcaaggtgtgcatcctgctggacaccagcggcagcatgggcccctacctgcagcaggtgaagaccgagctggtgctgctgatctgggagcagctgagaaagtgctgcgacagcttcaacctgctgagcttcgccgagagcttccagagctggcaggacaccctggtggagaccaccgacgccgcctgccacgaggccatgcagtgggtgacccacctgcaggcccagggcagcaccagcatcctgcaggccctgctgaaggccttcagcttccacgacctggagggcctgtacctgctgaccgacggcaagcccgacaccagctgcagcctggtgctgaacgaggtgcagaagctgagagagaagagagacgtgaaggtgcacaccatcagcctgaactgcagcgacagagccgccgtggagttcctgagaaagctggccagcttcaccggcggcagataccactgccccgtgggcgaggacaccctgagcaagatccacagcctgctgaccaagggcttcatcaacgagaaggaccccaccctgccccccttcgagggcgacgacctgagaatcctggcccaggagatcaccaaggccagaagcttcctgtggcaggcccagagcttcagaagccagctgcagaagaagaacgacgccgagcccaaggtgaccctgagctag

SEQ ID NO: 250571 - DNA, 3555 bp, Artificial Sequence
  derived and/or modified sequence
atgaagaagtacagaaagatcagcatcggctgcttcgccatggccacccagaccagccacgtgttccacggccaggagaacatgttcctggagaaccactgcatcagaagaaacaccggcagagacagcaagaagcccctgaagcagaagaacatgaacggcctgggccagaacagcgacaacggcctgctggtgacccacgtgaaccagacccaggacctgctgagactgcagggcagcgagacccagagcagcgactgggaggacagcgaggactggctgagcgcccacagcctgaagtgccagaagctgaccctggccgacctgatcagccagggcaccgaggtgctggaggagggcaccaacgtggtgcagaagatctgcttcagcacccagatcatcagacacttcgagagcaagctgagcgacaccatcgaggtgtaccaggagagaatccagtggctgaccgagaacagcaagaaggccttcggcctgatcaagggcgccagagtgagcatcctgatcgacgtgagcgccatcagcagcggcccccagaaggaggagttccagaaggacctgatgagcctgatcgacgagcagctgagccacaaggagaagctgttcgtgctgagcttcggcaccaacgccggcagcctgtggcccgaccccatggaggtgagcgccagcaccctgcaggagctgaagctgtgggtgaagaccctgcagcccgacggcggcagcaacctgctgcaggccctgaagaagatcttcaccctgaagggcctggacagcctggtggccatcatgagaagctgccccgaccagcccagcgagatcctgagcgactacatccagcagagcaccatgggcagagacctgatcatccacttcatcacctacagatgcgacgaccagatgccccccgccgtgctgaagaacctggccgaggccgtgagaggctactaccactgctacagccccaagatggagcactacaccagcagagacatggacgagctgctggccgagatccagaaggcccagagcctgctgagccacgtgcaggccctgcagcacagcagcccctgcgaggccctgacctgcaccatggaggagatcagcaccgagatcaccaacggccccctgatcagcctgctgcccaagccccccaagcacgacgcccccctgaccatcgagttccccaacctggacaagaccagcgccgagtggctgaaggtgaacggcctgaaggccaagaagctgagcctgtaccaggtgctggcccccaacgccttcagccccgtggaggagttcgtgcccatcctgcagaagaccgtgagcagcaccatccacgagaaggccatgatccagttcgagtggcacgacggcaccgtgaagaacatccacgtggacccccccttcctgtacaagtaccagcagcagctgagcagagccatgagaatgtacgagagaagaatcgagtggctgagcctggccagcagaagaatctggggcaccgtgtgcgagaagagagtggtggtgctgctggacatcagcgccaccaacagcatgtacatcatccacatccagcacagcctgagactgctgctggaggagcagctgagcaacaaggactgcttcaacctgatcgccttcggcagcaccatcgagagctggagacccgagatggtgcccgtgagccacaacaacctgcagagcgcctggagatgggccctgaacctgagatgcagaggcagcagaaacgtgctgagcgccctgagaaaggccgtggaggtggacttcaaggacaaggacaagcaccagagccagggcatctacctgttcaccggcggcatccccgaccaggacatgcccaccctgagcgcctacatggccgaggcctgcggcggctgcgacctgcagctgaacgtgtgcctgttctacgtgggcgagcccaagatggacaccaccccccccgccagatacgccagccacaccgacaccgccgccgcctacaaggaggtgaccagagccgccggcggcagattccactggttcggcgacaccggcatctacgagagcgacgacatcaacagcatcatgagcgagatggagaaggccctgaactacagccagaagtgcgccttcctgatggccagcctgaagaaccacagcggcaaggtgctgggcagcagcgccctgcccaaggagaagcccaagaccctgcagctgagaagccagcccaagaagctgtgcccccccagacccaccgtgcccctgggcgccagaatgagcatcaaggacgaccccgacagagagaagagcccccccctgaagagcctgaagtggagacccctgagcagcagagtgggcatcagccccgccgccgcccagcccaccaaggagggcatgatggagctgagaagaaagaccaagagcagagaggccgagaccagcctgctgctgttctacaccgagaagggcaacgacgtgggcagcgtgtacaagaagtacccccagggcagaggcctgagaagaaccagcagcagcatcgacctgcccagaaaggacaccgtgtgcagcagccaggagtgggtggccaagtacggcctgaagaagctgaagctggagatcagcagatgcatgggccccaactgcacccaccagaagagcggccagagaagcgccagcgccaagcactgcagcatcttccccagcgtggagatccacggcgtggtgagacacatccagtggacccccagagagatggaggtgtacatcagacacctggagaaggtgctgagaagatacgtgcagagactgcagtggctgctgagcggcagcagaagactgttcggcaccgtgctggagagcaaggtgtgcatcctgctggacaccagcggcagcatgggcccctacctgcagcaggtgaagaccgagctggtgctgctgatctgggagcagctgagaaagtgctgcgacagcttcaacctgctgagcttcgccgagagcttccagagctggcaggacaccctggtggagaccaccgacgccgcctgccacgaggccatgcagtgggtgacccacctgcaggcccagggcagcaccagcatcctgcaggccctgctgaaggccttcagcttccacgacctggagggcctgtacctgctgaccgacggcaagcccgacaccagctgcagcctggtgctgaacgaggtgcagaagctgagagagaagagagacgtgaaggtgcacaccatcagcctgaactgcagcgacagagccgccgtggagttcctgagaaagctggccagcttcaccggcggcagataccactgccccgtgggcgaggacaccctgagcaagatccacagcctgctgaccaagggcttcatcaacgagaaggaccccaccctgccccccttcgagggcgacgacctgagaatcctggcccaggagatcaccaaggccagaagcttcctgtggcaggcccagagcttcagaagccagctgcagaagaagaacgacgccgagcccaaggtgaccctgagctag

SEQ ID NO: 250572 - DNA, 2424 bp, Artificial Sequence
  derived and/or modified sequence
aagaagaaacgcaaaatctccctcttaccaaagccacctaagcacgatgcccctctaacaattgagtttccaaacctagacaagacatccgccgagtggttaaaggtgaacgggctcaaagctaagaagctttccctctaccaggttctggccccaaacgctttcagccccgtcgaggaattcgtgcccatcctacagaaaacagtgagcagcacaattcatgagaaggccatgatccagttcgaatggcatgacggaaccgttaagaatatccacgtggacccaccctttctctacaagtatcagcaacagcttagtcgtgccatgcgaatgtacgaacggaggatcgagtggctaagcttggcttcaaggaggatctggggtacagtctgcgaaaagagggttgttgttcttctggatatctccgccacaaacagcatgtatatcatccatattcaacattctctccgcttgctgttggaagaacagctaagcaataaagactgcttcaatctaatcgccttcgggagcactattgagagctggaggccggagatggtacctgtcagccacaacaacctccagagtgcgtggcgctgggcactaaatctacggtgccgcggaagcagaaacgttctttccgcgctgcgaaaggccgtagaggtagacttcaaggacaaagacaaacatcagtctcagggcatctacctgtttaccggcggtatacccgaccaggatatgcccacactgtcagcctacatggccgaggcatgcggcgggtgtgacctccagctcaacgtgtgcctattctatgtgggcgagcccaaaatggacaccacacctcctgctaggtacgcctcacataccgacaccgccgcagcttacaaagaggttacacgggccgctggcggtagattccattggtttggcgacaccggcatctacgagagcgatgacattaactctataatgtccgagatggaaaaggcgctgaattactctcagaagtgcgccttcctcatggcatccctgaaaaaccactccggtaaggtgctgggctcaagcgccctgcccaaggagaaacctaagacactccagctgagaagccaacccaagaagctgtgtccaccccgacccaccgtgcctctgggggctagaatgagtattaaagacgaccccgatcgtgagaagagcccacccctgaagtcactgaagtggagaccactgtcttcgagagtcggcatctctcctgcagccgctcagccgaccaaggagggaatgatggagctccgccggaagacaaagtctcgcgaagccgagacaagcctgctgctattctatacagaaaagggtaatgacgtgggctcagtctacaagaagtacccccaaggccggggcttacggagaacaagttcgagtattgatctgcctcgcaaggacacggtgtgtagcagccaggaatgggtcgcaaaatacgggcttaagaagctgaagctcgagattagccgatgcatgggcccgaactgcacccaccagaaaagtggtcaacggagcgcctcagcaaaacattgtagcatcttccccagtgtcgagatccacggggttgtgaggcatatccaatggacaccacgcgaaatggaggtgtatatcaggcatctggaaaaagtcctccgtcggtacgtgcagcggctgcagtggttattgtctggaagcaggcggctcttcggcactgtgctcgaaagtaaagtatgcatattgttagacactagtgggagtatgggaccatacctccagcaggtgaagacggaactggtgctgttgatctgggagcaactgcgaaagtgttgcgattcttttaatctgctgagtttcgctgaatcttttcagtcatggcaggacactttggtggaaacaacagatgctgcctgtcacgaggctatgcaatgggtgactcatctccaggcccagggtagtaccagcatccttcaggcgttgctaaaagcatttagcttccacgatctcgaaggactgtatctgttgactgatggcaagcccgacacatcctgcagtctagtcttaaacgaggtgcagaaactgcgggagaaacgagatgttaaggtgcacaccatatctttgaactgttctgatcgcgccgccgtagaattcctccgcaagctggcctcattcacaggcggtcggtaccactgcccagttggcgaggacactttgtcaaaaatccacagcttgcttaccaaaggattcattaatgagaaggaccctacactgcccccattcgagggagacgacttgaggatcctcgcccaggaaatcacaaaggcacgttccttcctctggcaagcacagagctttaggtcccagctgcagaagaaaaatgatgctgaacctaaggtcacgctgtcttag

SEQ ID NO: 250573 - DNA, 3555 bp, Artificial Sequence
  derived and/or modified sequence
atgaaaaagtatagaaaaatttctatcgggtgctttgcaatggccactcagaccagccacgtatttcacggccaggaaaatatgttcctcgaaaaccactgtatccgcaggaacaccggtagagattctaagaaacctttgaagcaaaagaacatgaacggcctcggccaaaactctgataacggactgcttgtgactcacgtgaatcagacgcaggacttactgaggctccaaggctctgaaacccaaagttctgattgggaagactctgaagattggttgagcgcgcactcattaaagtgccagaagctcaccctcgccgacctcatttcccaaggtactgaagttcttgaagaggggaccaatgtggtccagaagatctgtttcagcacccagatcatcaggcatttcgaatccaagttgtctgatactatcgaggtctatcaggagcgtatccagtggctgacagagaatagcaaaaaggcctttggattaattaagggagccagagtgtcaattctcatcgacgttagcgctatttcaagtgggccacagaaggaggaattccagaaggatctgatgtcgcttatcgacgagcagctgtcccacaaggagaaactcttcgttctctccttcggaacaaatgcaggatctctctggcctgatcctatggaggtgtctgcaagtactctgcaagagctcaaactgtgggtcaaaaccttgcagcctgatggagggagtaaccttttgcaagcattgaaaaagatttttacactgaaagggttggacagtcttgtggccatcatgagaagttgccctgatcagccatctgagatcctctctgactacatccagcagtccaccatgggtagagatttaattatccacttcattacatatcggtgtgacgatcagatgccacctgcggtgctgaaaaatctcgccgaggctgtcagagggtattatcactgctactcccccaaaatggagcattatactagtcgagatatggacgagcttctcgcagaaatacagaaggcacaaagtctgctgtcgcatgtgcaggccttacagcattcctccccatgtgaagccctgacgtgtaccatggaggaaatcagcacggagattacaaatggacctctcattagcttgttaccgaagccgccaaagcacgatgcacctctgaccatcgagttccccaacctggacaaaaccagcgcggagtggttaaaagtaaacgggctgaaggctaagaagctttcgctctatcaggtgctcgctcctaatgctttctctcctgtcgaagagttcgtgccaattctccagaagactgtgtcaagcactatccatgaaaaagcgatgatccaattcgagtggcacgacgggacggtgaagaatattcacgttgaccccccatttctatataagtatcagcagcagctgtcccgtgcaatgaggatgtatgagcgtcgcatcgaatggctgagtctcgccagtagaagaatttgggggaccgtgtgcgagaaacgcgtggtcgtgctgctcgacatcagcgctaccaactccatgtacatcattcacatccaacatagcttgcggctcctgctggaggaacagttgtcaaataaagactgctttaatctgattgctttcggctccaccattgaaagttggcggccagagatggtccccgtgtcccacaataacctccagtccgcatggcgatgggctctaaacctgaggtgccgtggctctcggaacgttttgtctgctttacgaaaggccgtggaggtggacttcaaggataaggataaacaccagtcccaagggatttatctttttacaggaggcataccggatcaggatatgccgacgctcagtgcctacatggctgaagcatgcggcgggtgcgacttgcagctaaacgtttgtctgttttacgttggcgaacccaaaatggacactacccctccagcccgatacgctagccacacagacacagctgctgcctacaaagaagtgacgagggcagccggaggtcgatttcattggttcggcgatacaggcatctatgaaagcgatgatatcaattcaataatgtcggagatggaaaaagctctgaactactcgcagaagtgtgcattcctcatggcctccctcaagaatcattccgggaaggtactcggaagttctgctctccctaaagaaaagccaaagactctccagttgcgaagtcagcccaaaaaattgtgtcctcccaggccaaccgtcccacttggcgcacgaatgtcaatcaaagacgatcctgaccgcgaaaaaagtccgcccttaaagagcctgaagtggcgccctctgagttctagagtgggaatcagccccgccgcagcccagccgactaaggaggggatgatggaactacgtcgcaagaccaaaagccgcgaggcagagacaagtctactgttgttctataccgaaaagggtaacgacgtggggagcgtctacaaaaagtaccctcagggtcgcggtctcagacgtacctccagtagcatcgacctgccaagaaaagatacagtgtgtagctcacaggagtgggtggcgaagtatggcttgaaaaagcttaaactggagatctccagatgtatgggcccaaactgcacccatcagaagtccggccaacggtccgccagcgctaaacattgttccatcttcccctccgtagaaattcacggtgtagtgagacatatacaatggacccctcgcgagatggaagtgtatatacgccatctcgaaaaggtcctgcgacgctatgttcagcggctgcaatggctattgagcgggagcaggcggctatttggcaccgttttggagtctaaggtgtgtattctgttggacacctctggcagtatggggccttatctccagcaggtaaaaactgagctcgtcctgctgatctgggagcagctccgcaaatgctgtgactcattcaacctgttatcctttgctgaatcgttccaaagctggcaggacactcttgttgagaccaccgacgcagcctgccatgaggctatgcaatgggtgacccaccttcaggcacaagggagcacgtcgattctgcaggcattactgaaagctttctcttttcacgatctcgaaggtctatacttactgacggacggcaaacccgataccagctgcagcctggttcttaacgaagtgcagaagttacgcgagaaacgcgatgtgaaggtgcataccatatcactaaattgcagcgaccgcgctgctgtggagtttcttcgcaagctggccagcttcaccggaggaagataccactgtcccgtgggcgaggacaccctctccaagatccactccctcctgacaaagggattcattaatgaaaaggatcccacactacctccttttgaaggagatgacctcaggatactcgctcaggaaatcaccaaggctaggtcatttctttggcaggcacaaagtttcagatcacagttacagaaaaaaaacgacgctgaacctaaagtaacgttgtcttag

SEQ ID NO: 250574 - DNA, 2424 bp, Artificial Sequence
  derived and/or modified sequence
aagaagaagaggaagatcagcctgctgcccaagccacccaagcatgatgcccccctgaccatcgagttccccaacctggacaagaccagcgctgagtggctgaaggtgaatggcctgaaggccaagaagctgagcctgtaccaggtgctggccccaaatgccttcagccctgtggaggagtttgtgcccatcctgcagaagacagtgagcagcaccatccacgagaaggccatgatccagtttgagtggcatgatggcaccgtgaagaacatccacgtggacccccccttcctgtacaagtaccagcagcagctgagccgggccatgaggatgtatgaaagacgcatcgagtggctgagcctggccagccgccgcatctggggcaccgtgtgtgagaagagggtggtggtgctgctggacatcagcgccaccaacagcatgtacatcatccacatccagcacagcctgcggctgctgctggaggagcagctgagcaacaaggactgcttcaacctgattgccttcggcagcaccattgaatcctggaggcctgagatggtgcctgtgagccacaacaacctgcagagcgcctggcgctgggccctgaacctgcgctgccggggcagcagaaatgtgctgagcgccctgaggaaggctgtggaggtggacttcaaggacaaggacaagcaccagagccagggcatctacctgttcaccggcggcatcccagaccaggacatgcccaccctgagcgcctacatggccgaggcctgtggcggctgtgacctgcagctgaatgtgtgcctcttctacgtgggggagcccaagatggacaccaccccaccagcccgctatgccagccacacagacacagctgctgcctacaaggaggtgaccagggctgctgggggccgcttccactggtttggagacaccggcatctatgaaagtgatgacatcaacagcatcatgtctgagatggagaaggccctgaactacagccagaagtgtgccttcctgatggccagcctgaagaaccacagcggcaaggtgctgggcagcagcgccctgcccaaggagaagcccaagaccctgcagctgcggagccagcccaagaagctgtgccccccccggcccaccgtgcccctgggcgccaggatgagcatcaaggatgatcctgaccgggagaagagcccccccctgaagagcctgaagtggaggcccctgagcagccgggtgggcatcagccctgctgctgcccagcccaccaaggagggcatgatggagctgcggaggaagaccaagagccgggaggccgagaccagcctgctgctcttctacacagagaagggaaatgatgtgggctctgtgtacaagaagtacccccagggccggggcctgcggaggaccagcagcagcattgacctgcccaggaaggacacagtgtgcagcagccaggagtgggtggccaagtatggcctgaagaagctgaagctggagatcagccgctgcatgggccccaactgcacccaccagaagagcggccagaggtctgccagcgccaagcactgcagcatcttccccagcgtggagatccatggagtggtgcgccacatccagtggaccccccgggagatggaggtgtacatccgccacctggagaaggtgctgcggcgctacgtgcagaggctgcagtggctgctgagcggcagccggcggctgtttggaacagtgctggagagcaaggtgtgcatcctgctggacaccagcggctccatgggcccctacctgcagcaggtgaagacagagctggtgctgctgatctgggagcagctgaggaagtgctgtgacagcttcaacctgctgagctttgctgagagcttccagagctggcaggacaccctggtggagaccacagatgctgcctgccacgaggccatgcagtgggtgacccacctgcaggcccagggcagcaccagcatcctgcaggccctgctgaaggccttctccttccatgacctggagggcctgtacctgctgacagatggcaagccagacaccagctgcagcctggtgctgaatgaggtgcagaagctgcgggagaagagagatgtgaaggtgcacaccatcagcctgaactgcagcgacagagctgctgtggagttcctgaggaagctggccagcttcaccggcggccgctaccactgccctgtgggggaggacaccctgagcaagatccacagcctgctgaccaagggcttcatcaatgagaaggaccccaccctgcccccatttgaaggagatgacctgcgcatcctggcccaggagatcaccaaggcccggagcttcctgtggcaggcccagagcttccgcagccagctgcagaagaagaatgatgctgagcccaaggtgaccctgtcctag

SEQ ID NO: 250575 - DNA, 3555 bp, Artificial Sequence
  derived and/or modified sequence
atgaagaagtacaggaagatcagcatcggctgctttgccatggccacccagaccagccacgtgttccacggccaggagaacatgttcctggagaaccactgcatcagaagaaacacaggccgggacagcaagaagcccctgaagcagaagaacatgaatggcctgggccagaacagcgacaatggcctgctggtgacccacgtgaaccagacccaggacctgctgcggctgcagggcagcgagacccagagcagtgactgggaggacagcgaggactggctgagcgcccacagcctgaagtgccagaagctgaccctggccgacctgatcagccagggcacagaggtgctggaggagggcaccaacgtggtgcagaagatctgcttcagcacccagatcatccgccactttgagagcaagctgagtgacaccatcgaggtgtaccaggagcgcatccagtggctgacagagaacagcaagaaggccttcggcctcatcaagggggcccgggtgtccatcctgattgatgtgtctgccatcagcagcggcccccagaaggaggagttccagaaggacctgatgagcctgattgatgagcagctgagccacaaggagaagctgtttgtgctgagctttggcaccaatgccggcagcctgtggccagaccccatggaggtgtctgccagcaccctgcaggagctgaagctgtgggtgaagaccctgcagccagatggcggcagcaacctgctgcaggccctgaagaagatcttcaccctgaagggcctggacagcctggtggccatcatgaggagctgcccagaccagcccagcgagatcctgagtgactacatccagcagagcaccatgggccgggacctgatcatccacttcatcacctaccgctgtgatgaccagatgcctcctgctgtgctgaagaacctggccgaggccgtgcggggctactaccactgctacagccccaagatggagcactacaccagccgggacatggatgagctgctggccgagatccagaaggcccagagcctgctgagccacgtgcaggccctgcagcacagcagcccctgtgaggccctgacctgcaccatggaggagatcagcacagagatcaccaacggccccctcatcagcctgctgcccaagccacccaagcatgatgcccccctgaccatcgagttccccaacctggacaagaccagcgctgagtggctgaaggtgaatggcctgaaggccaagaagctgagcctgtaccaggtgctggccccaaatgccttcagccctgtggaggagtttgtgcccatcctgcagaagacagtgagcagcaccatccacgagaaggccatgatccagtttgagtggcatgatggcaccgtgaagaacatccacgtggacccccccttcctgtacaagtaccagcagcagctgagccgggccatgaggatgtatgaaagaagaattgagtggctgagcctggccagccgccgcatctggggcaccgtgtgtgagaagagggtggtggtgctgctggacatcagcgccaccaacagcatgtacatcatccacatccagcacagcctgcggctgctgctggaggagcagctgagcaacaaggactgcttcaacctgattgccttcggcagcaccatcgagagctggaggcctgagatggtgcctgtgagccacaacaacctgcagagcgcctggcgctgggccctgaacctgcgctgccggggcagcagaaatgtgctgagcgccctgaggaaggctgtggaggtggacttcaaggacaaggacaagcaccagagccagggcatctacctgttcaccggcggcatcccagaccaggacatgcccaccctgagcgcctacatggccgaggcctgtggcggctgtgacctgcagctgaatgtgtgcctcttctacgtgggggagcccaagatggacaccaccccaccagcccgctatgccagccacacagacacagctgctgcctacaaggaggtgaccagggctgctgggggccgcttccactggtttggagacaccggcatctatgaaagtgatgacatcaacagcatcatgtctgagatggagaaggccctgaactacagccagaagtgtgccttcctgatggccagcctgaagaaccacagcggcaaggtgctgggcagcagcgccctgcccaaggagaagcccaagaccctgcagctgcggagccagcccaagaagctgtgccccccccggcccaccgtgcccctgggcgccaggatgagcatcaaggatgatcctgaccgggagaagagcccccccctgaagagcctgaagtggaggcccctgagcagccgggtgggcatcagccctgctgctgcccagcccaccaaggagggcatgatggagctgcggaggaagaccaagagccgggaggccgagaccagcctgctgctcttctacacagagaagggaaatgatgtgggctctgtgtacaagaagtacccccagggccggggcctgcggaggaccagcagcagcattgacctgcccaggaaggacacagtgtgcagcagccaggagtgggtggccaagtatggcctgaagaagctgaagctggagatcagccgctgcatgggccccaactgcacccaccagaagagcggccagaggtctgccagcgccaagcactgcagcatcttccccagcgtggagatccacggcgtggtgcgccacatccagtggaccccccgggagatggaggtgtacatccgccacctggagaaggtgctgcggcgctacgtgcagaggctgcagtggctgctgagcggcagcagaagactctttggcaccgtgctggagagcaaggtgtgcatcctgctggacaccagcggctccatgggcccctacctgcagcaggtgaagacagagctggtgctgctgatctgggagcagctgaggaagtgctgtgacagcttcaacctgctgagctttgctgagagcttccagagctggcaggacaccctggtggagaccacagatgctgcctgccacgaggccatgcagtgggtgacccacctgcaggcccagggcagcaccagcatcctgcaggccctgctgaaggccttctccttccatgacctggagggcctgtacctgctgacagatggcaagccagacaccagctgcagcctggtgctgaatgaggtgcagaagctgcgggagaagagagatgtgaaggtgcacaccatcagcctgaactgcagcgacagagctgctgtggagttcctgaggaagctggccagcttcaccggcggccgctaccactgccctgtgggggaggacaccctgagcaagatccacagcctgctgaccaagggcttcatcaatgagaaggaccccaccctgcccccatttgaaggagatgacctgcgcatcctggcccaggagatcaccaaggcccgctccttcctgtggcaggcccagagcttccgcagccagctgcagaagaagaatgatgctgagcccaaggtgaccctgtcctag

SEQ ID NO: 250576 - DNA, 2424 bp, Artificial Sequence
  derived and/or modified sequence
aagaagaagcggaagatcagcctgctgcccaagccccccaagcacgatgccccactgaccattgagttcccaaatctcgacaagacaagtgccgaatggctcaaggtcaacggcctcaaggcaaaaaaattgtcactctatcaggtgctcgcaccaaacgccttctcaccagtggaagaatttgtccccatacttcaaaaaactgtgtcctccacaatacacgagaaagctatgatccaattcgaatggcatgacggcacagttaagaatatccatgtcgaccccccgttcctgtacaaatatcaacagcagctgagccgcgctatgcggatgtacgagaggcgcattgaatggctgtcacttgcttcacgcaggatttgggggactgtatgtgaaaagcgcgttgtggtgttgctcgacattagcgctaccaatagtatgtatatcatccatattcagcattccctgaggctcttgctggaggaacaactgagtaacaaagactgcttcaatctgatcgcttttggaagcacaatcgaatcctggagacctgaaatggtgcccgtttcccacaataatcttcagtctgcttggagatgggccctcaaccttagatgtcgaggatctagaaacgtgctgtctgccctgaggaaggctgtggaagtggattttaaagacaaggacaaacaccagtctcaggggatttacctgttcacgggggggatacctgaccaggacatgcccacgctgtccgcttacatggccgaagcatgcgggggatgtgatttgcagttaaatgtatgtctgttctacgtcggagagcccaagatggataccacccctcccgcccggtacgcgtctcacacagatactgccgcagcctataaggaggtgacaagagccgccggcggaaggtttcattggttcggcgatacaggtatatacgaaagcgacgacatcaattccatcatgtcagagatggagaaggctctgaactactcccagaagtgtgcgttcctcatggcatcattgaagaatcattctggcaaggtacttggttcgagtgccctcccaaaagagaagccaaagaccctgcagctgcgctctcaaccgaagaagctgtgtccacctcgacccaccgtcccactaggcgccaggatgtcaatcaaggatgatcccgatcgcgagaagagcccccctctgaagagcttgaagtggcggccattgagttcgagggtgggcatttctccggcagcggctcaaccaaccaaggaggggatgatggaactgcgtagaaaaactaaatcacgggaggccgagacctcgctactgctcttttacaccgaaaagggaaacgatgtggggagtgtgtataagaagtacccacagggtcgcggactccgacggacttcaagttcaatagacttgccccgtaaagacaccgtttgctctagtcaggaatgggtcgccaagtacggactgaagaagctgaagcttgaaatatctcgctgcatgggtcctaactgcacccatcaaaaatcaggccaaagatccgctagcgcaaagcattgttccatcttcccttctgtcgagatccacggagtggtgaggcacatccaatggaccccgcgggaaatggaggtatacattaggcacctggagaaagtgcttaggcggtacgtgcagcggctacaatggctgctgtctgggagcagaaggctcttcgggactgttttggagtcgaaggtttgcattctactagacacatccggaagcatgggaccttaccttcaacaggtgaagaccgaactggtgctactgatctgggaacagctccgcaagtgctgtgactcgtttaatctgctctcttttgcggaaagtttccagtcttggcaggataccctcgtggaaaccaccgacgccgcatgtcatgaagctatgcagtgggttacccacttacaggcgcaggggtccactagtatccttcaagctctattgaaggccttctccttccacgatctcgaaggtctttatctgcttaccgacggaaagccagataccagctgcagcctagttctgaacgaagtgcagaaactgcgagaaaaaagagacgtgaaagtgcatacaatttccctcaattgttcggaccgtgcggctgtcgagtttctgagaaaactcgcgagctttactggcggcagataccactgcccggtgggggaggatactctgagcaaaatccatagtctgttgactaagggatttataaacgagaaagaccctacactaccccccttcgagggcgatgaccttcggattttagcccaagagattactaaggctcgttcgtttttgtggcaagcccagtcctttcggagccagctacaaaaaaagaacgatgccgaacccaaggtgaccctgtcctag

SEQ ID NO: 250577 - DNA, 3555 bp, Artificial Sequence
  derived and/or modified sequence
atgaagaagtaccggaagatcagcatcggctgcttcgccatggccacacagacgagccatgtattccacggccaagagaatatgttccttgaaaaccactgtattcgccgtaacactggcagggactctaagaagccactgaaacagaagaatatgaatggcctcggccagaattcagataatggcttactggtgacccacgtgaaccagacccaggacctgctgcgattgcaagggtccgaaactcagagcagcgattgggaagattcagaggactggctctccgcacatagcctgaagtgccaaaagcttactctcgctgacctaatcagccagggtaccgaggtgctggaagagggaacaaatgtggtgcagaagatctgcttttcaacccagatcatccggcattttgagagcaaattatcagataccatcgaggtctatcaggagcggatacaatggctcaccgaaaatagcaaaaaagcctttggcctgatcaagggggcgcgggtgagtatcttaattgacgttagtgccattagctccggcccacagaaagaggaattccagaaggacttgatgtccctcatagacgagcagttgagtcacaaagagaagctatttgtcctaagtttcgggaccaatgcgggttcactttggcccgatccaatggaggtgtccgcctccaccctgcaggagctgaaactttgggtcaaaacattacagcctgatggcggcagcaacctgcttcaagcgcttaaaaagatattcactctgaagggactggattctttagttgccatcatgcgctcgtgtccagaccagccttcagagatcctcagtgactatatccaacagagcactatgggaagggaccttatcatccatttcattacctatcgatgcgacgatcagatgccgcctgctgtgctgaagaacctcgctgaggccgtaagaggatactaccattgctactctcctaaaatggagcattatacatccagagatatggacgagctgctggcagagattcagaaggcccaatcgctcttatcacacgtgcaggccctgcagcactcttcaccatgtgaagctctgacatgtaccatggaagagattagcacagagattactaacggacctttaatctcactgttgccaaagccacccaaacatgacgcgcctctgacgattgaattcccaaatctcgacaagaccagcgcggagtggctcaaagtaaacggtttgaaggccaaaaaactctctctgtatcaagtgctcgccccgaatgcattctctcccgtggaggagttcgtccccatcctccagaagacagtgtcttccaccattcacgagaaggccatgatccaatttgagtggcacgacggcaccgtcaagaatattcacgtggacccacctttcctgtataagtaccaacaacagctctctagagcgatgcgcatgtacgaacgacgaattgagtggctaagcctggctagtcgcagaatttggggcaccgtgtgcgagaagcgagttgtggtgctgctggacatctcagcaacaaacagtatgtacattattcatatccagcacagccttcgccttctcctggaagaacagctatcaaataaagactgctttaatctgattgccttcggctccacgatcgagagctggcgccccgaaatggtgcccgtgagccacaataacttgcaaagcgcctggcgctgggccttaaacttacggtgccgaggaagccggaacgttctcagcgcactccgcaaagctgtcgaagttgattttaaagataaagacaagcatcaatcccagggtatttaccttttcacggggggaatacctgaccaggacatgcccacactttcagcctatatggcagaagcttgtgggggttgtgatctacaactgaatgtgtgcctattttacgtcggcgaacccaaaatggatactactcctccagcccgatatgcctcacataccgataccgcagccgcttacaaggaagtgacccgggccgcgggcgggcgcttccactggttcggcgacaccgggatatatgaaagcgatgacattaacagtatcatgtctgagatggagaaagccctgaactactcccagaagtgtgcctttctcatggctagtctgaaaaaccatagtgggaaggttttaggtagctcagcattacctaaggagaaacctaaaacgctgcaacttaggagccaacccaaaaaactctgcccacctcggcctacagtgccactgggagctagaatgtccataaaggatgacccagaccgagaaaagtccccacctctgaagagcctgaaatggagacccttatcttcgcgcgtgggcatcagccccgctgcagcccagcctaccaaggaaggcatgatggagctgcgcaggaaaacaaaatctagggaggcggagacaagtctgctactcttttacacagagaaagggaatgatgtgggatccgtttacaaaaagtacccacaaggcaggggactccggagaacctcctcctccatcgacctgcccagaaaagataccgtatgctccagccaggagtgggtggcgaaatacgggcttaaaaagttgaaactggagatctcccgatgcatgggaccgaactgcactcaccaaaagtccggccaacggtctgcatctgcaaaacattgttcaatcttccccagcgtggagatacacggcgtcgtgagacacattcaatggacacccagagagatggaagtctacataagacatttagagaaagtcctacgacggtacgtgcagaggttgcagtggttactcagtggcagccgccgcctcttcgggacagtgttggagagtaaagtgtgtatcttactggacaccagtgggagtatggggccctacctacagcaggtgaagactgagttagtgctgctgatttgggagcagttgcggaagtgttgtgattcatttaaccttctgtcgtttgctgagtcttttcagagttggcaggatactcttgttgaaacgactgatgccgcctgccacgaggccatgcagtgggttacacatttacaggcccaggggagcacatcaattctccaggcactgcttaaggctttctcattccatgaccttgagggcctctacctgctcacagatggcaaaccagacacatcctgttcactggtgttaaatgaagttcagaagctgcgcgaaaagagagatgtgaaggttcacactataagcctcaattgctcagatagggccgctgtggagttcttaaggaaattagcctcttttactgggggaagataccattgccctgtcggtgaggatacactgagtaagattcactctctactgactaaaggattcatcaacgagaaagacccaactctaccccccttcgagggggacgatctgagaatcctcgctcaggaaatcacaaaggccagaagttttctgtggcaggctcaatcgttcaggtctcagctccagaaaaaaaatgacgcagaacccaaggtgacactttcttag

SEQ ID NO: 250578 - DNA, 4587 bp, Artificial Sequence
  derived and/or modified sequence
agttgcttggaggagcttggagaaaccagaagtgagatccaggagaagtaaggccctggagtgccaggagcccttctcccaaagatggagaaataaatgaagaaatacaggaaaataagcattgggtgttttgcaatggctacacaaactagtcatgtcttccatggtcaagaaaatatgtttctggaaaaccattgcattaggagaaacactggcagagattcaaagaagccactaaagcagaagaatatgaatggacttgggcaaaattcggacaatggattattggttacacatgttaaccagacacaggacttactgaggctgcaggggagtgagacccagtcttcagattgggaggactctgaagactggctttcggctcacagtttaaaatgtcagaaactcaccttggctgacctgataagccagggcacagaagtgctggaggagggcaccaatgtcgtgcagaaaatatgtttctccacccagatcatccgccattttgagtcaaagctttctgacactattgaagtctatcaagagagaattcagtggctcacagaaaacagcaagaaggcatttggcctcatcaaaggggccagagtcagcatcctcatagatgtgtcagccatcagcagtggccctcagaaagaagagttccaaaaggacctcatgagcctcatcgatgagcagctgagccacaaggagaagctgtttgtcctgtcctttggcaccaatgccgggtccctctggccagaccccatggaagtcagcgcctccaccctccaggaacttaagctctgggtaaagacgctgcagcctgatggaggcagcaacctgctacaagctctgaagaagatcttcactctcaagggactggattccctggtggccatcatgagaagctgcccagatcagccttctgaaatcctgtctgactacatccagcagtccaccatgggaagagacctcatcatccacttcatcacctacagatgcgatgatcagatgccccctgctgtcctgaagaaccttgcagaagctgttaggggctactaccactgctacagcccaaagatggagcactacaccagccgggacatggatgagctcctggcagaaattcagaaggcccagagcctcctcagccacgtgcaagccctgcagcacagcagcccctgtgaggcgctcacctgcaccatggaggagatttccacagagattacaaatgggccactcataagcctcttgcctaaacccccaaagcatgacgctcctctcaccattgagtttccaaacttggacaagacttctgcagagtggcttaaggtcaatggtctgaaagccaagaaattaagtctatatcaggtcctggcacccaatgcattctctcctgtggaggaatttgtacctattctccagaaaacagtatcatcgaccatccatgagaaggcaatgatacaatttgaatggcacgacgggacagtgaagaacattcatgtggacccacccttcctctataagtaccagcaacagctcagcagagctatgcggatgtatgagaggcggattgagtggctctccctggccagcagaagaatctggggcacagtctgtgaaaaaagggtggttgtactgctcgatatctctgcgaccaattccatgtacattattcatatccagcactccctgcggctgctgctggaggagcagttatccaacaaggactgtttcaacctcatcgcgtttggaagcacaattgaaagctggaggcctgagatggttcccgtgagtcacaacaatttacaaagtgcctggcggtgggccctgaacctgcggtgtcggggcagcaggaacgttctcagcgccctgcggaaggctgtggaagtagacttcaaggacaaagacaaacaccaatcgcagggaatctacctcttcactgggggcatccccgaccaggacatgcctacactcagtgcctacatggctgaggcctgtggcggctgcgacctccagctgaacgtgtgtctcttctacgtgggcgagccaaagatggacaccacaccccctgcccgctatgccagtcacactgacacagccgccgcctacaaggaggtcacccgggctgcaggtggccgcttccactggtttggagacacaggcatttatgagagcgatgacatcaactccatcatgtctgagatggaaaaggctctcaactactcccaaaagtgtgccttcctcatggcctccctgaagaaccattcaggaaaagtactgggaagttcagccctcccgaaagaaaaaccaaagacacttcagctaagaagtcagcccaagaagctctgccctcccaggcccaccgtccccctgggggccagaatgagcattaaagatgaccctgacagagagaagagccccccgctgaaatctctgaaatggcgtccactcagtagcagagttggcatctcaccagctgcggcccagccaacgaaagaagggatgatggaactgaggaggaagaccaagtcaagggaagcagagacatctcttttactgttctacacagagaaagggaatgacgtgggctcagtgtacaagaagtaccctcaaggaaggggcttgagaaggactagctcttctattgacttacccagaaaggatacagtttgctcaagccaagagtgggtggcaaaatatgggctcaaaaaattgaagctggagatttccagatgcatgggtcccaactgcactcatcaaaagtcaggacagaggtcagcatccgccaaacactgcagcatcttccccagcgttgagatccatggagtggtgagacacatccagtggacgcccagggagatggaggtgtacatcaggcacttggagaaggtgttaaggcgctatgtccagaggctgcagtggctgctgtccgggagccgccgactgtttggcaccgttttggagagcaaagtatgcatattgctggacacgtcagggtccatgggcccctacctgcagcaggtgaagacagagctggttttgctgatttgggaacagctgcggaagtgctgtgacagttttaacctgctcagctttgcagagagctttcagtcatggcaggacacgctggtggagaccacagatgcagcgtgtcatgaggctatgcaatgggtgacccacctgcaagctcagggcagcacctccatcttgcaagcattgctgaaagctttcagtttccatgatctggaaggattgtacctcctgaccgacggaaagccagacacaagctgcagccttgtcctaaatgaagtccaaaaactcagggagaaaagagatgtgaaagtgcacaccatttccttgaactgctcagacagagcggcggttgagttcctgagaaagctggcttccttcaccggcggacgctatcactgccctgtgggtgaggacacactctccaaaattcacagcctgctgaccaaaggcttcatcaatgaaaaggatcccacattgccaccatttgaaggagatgatttaaggatcctggcccaggagatcaccaaggccagaagcttcctctggcaggcccaatccttcagatcccaactccagaagaaaaatgatgcagaaccaaaggtcactctttcctagagaagtgttctcagaaaagtcatcctgcaaaggaccactcactgagcaaatctcagccccgagggcaggatgggatgaaatgctgtgacctgcaggaaacatgattcctggtaccaggactctctggaagctgaggaaggaaagactttgtcttttgtgtgaggggccattcccgggtcttaatctaactctccagccctgtcccgcagcgcactctactctccagccactagattgtccctctctgggaagccctaaaccaaccccctgcctaaatggtggtgcttcttgcaaaccaaccccctgcctgaacggtgcttcttgccccctctgcctggagactcctgctcatccatcaaggcacagctcaaatgacatcagctccctgggacctatctagagcgaggggcctccagtctttctcttgcagcatcctgaccacgcagacctctcgcactcagcactctatgtcacgccaccttgctcgctgatctaactcttctccttgatggtgagctccttcgggatgagactggtgtcccaggatctgcaggtccccagaagctgccacataggagacacatggtgaacagtgagcaggcggctgagctgtgagagcctagctctggaaagcagctgatggggtggtctccaccctggttcataagaggctaatgcagagtcacagtcagcccatcctgggggaagaagaaacaagtgagcctcagcaccaccctccatccctgcccaaccaaactgaagtgaaggctgctcatctgggttcattttctaaaattaaaaacaattaattttattctactaataggatcaacatgactttaactgtttgaagtgatcattggcgtgtgtgtgtgtgcataaatttttagtgacataaaactttattaaaagactcataccataataaagaatttc

SEQ ID NO: 250579 - RNA, 2424 nt, Artificial Sequence
  derived and/or modified sequence
aaaaaaaagcggaaaaucucccugcuaccuaaaccaccuaaacacgacgccccacuuacaauugaauucccaaaccucgacaagacaucagccgaguggcucaaagugaauggacugaaagcaaaaaaacugaguuuauaccaaguucucgcacccaaugcguucagcccuguggaagaauuugugcccauuuugcagaaaaccgucaguucuaccauucacgagaaggcaaugauccaguuugaguggcaugauggcaccguuaaaaacauacauguugauccaccuuuccuauauaaauaucagcaacagcugucccgagccaugcggauguacgaacggagaaucgaguggcucucacuggcguccagacggaucuggggaacugucugcgaaaagcgcguggugguucuguuggacauuucagcuacuaauagcauguauaucauucacauucagcacucucuacgacuccugcuugaggagcagcucucaaauaaggacuguuucaaucucauugccuuuggaucuacaaucgaauccuggagacccgaaaugguaccaguaucccacaauaaucuacagagcgcuuggagaugggcucugaaccuucgauguagagguagccggaaugugcugagcgcacuucgaaaagcaguggagguggauuuuaaagacaaggacaaacaccagucccaagggauuuaccucuuuacgggcgggauuccagaucaggacaugccaacccugagugcguacauggcugaggcuugugguggaugugaccugcagcuaaauguuugcuuguucuaugugggcgagccaaagauggauacuacaccacccgcuagguacgcuucucacacagauaccgccgccgcauacaaggaggugacccgcgccgcgggcgggcgguuccauugguucggcgauacaggcaucuacgaguccgacgauaucaacucaauuaugucugagauggaaaaagcuuugaacuacucucagaagugugcauuucugauggcaucacugaagaaucauucagguaaaguccucggaagcucagcucucccuaaagaaaagccaaagacacugcaacugcggucgcaaccuaagaaguugugcccuccuaggcccaccgucccacugggggcuaggaugucaauuaaagacgauccagaccgagagaagagcccaccccugaaaucuuugaaguggcgaccccugaguagucggguuggcaucaguccagccgcagcgcagccgacgaaggaggguaugauggagcucagacggaaaacuaaaucccgcgaagcugaaaccucucuccuccuguuuuauacugaaaaagguaacgacgucggaaguguauacaaaaaauauccccagggcaggggcuuacggcggacaagcuccucgaucgaccucccucguaaagacacggugugcuccucccaagagugggucgcgaaauacgggcuaaagaagcugaaacuagaaaucucucgcugcaugggccccaauugcacccaucagaagucugggcagcgaucggcaagcgcaaagcauuguucuauuuuccccucuguagagauucacgguguagugcggcauauucaguggacuccaagagaaauggagguauauauccggcaccucgagaagguacugaggagguacguacagcguuugcagugguugcugagcggcagccgaagauuguucgggaccguucuggaaagcaagguguguauucugcuugauacauccggaagcaugggccccuaucuucaacaggugaagacagagcucguucugcugaucugggaacagcugaggaagugcugcgauuccuucaaccuguuaucauuugcugaauccuuccaauccuggcaggauacuuuggucgagacuaccgaugcugcuugucacgaggccaugcaauggguaacacaccugcaggcucagggaagcacauccauucugcaggcucuguuaaaagcuuucucuuuucacgaucucgagggcuuguaucuccugaccgaugggaaaccagacacgaguugcagccuugugcuuaaugagguacagaagcucagagagaagcgugacgucaaaguucacaccaucucucuuaacugcuccgauagagcugcgguagaguuccuccggaaguuggcuucauucacaggcggucgcuaccacugcccugugggcgaagacacucuguccaagauccacucccugcuuaccaagggguucauaaaugaaaaagacccaacacucccgccauuugaaggcgaugaccugaggaucuuggcacaagagauuaccaaggcucgguccuuucuuuggcaggcacagucauucaggucgcaacuccaaaagaagaacgacgcggagccgaagguuacccucuccuag

SEQ ID NO: 250580 - RNA, 3555 nt, Artificial Sequence
  derived and/or modified sequence
augaaaaaguaucggaaaauaucuauugggugcuucgcuauggcuacccagaccucccauguguuccaugggcaggaaaauauguuccuggagaaucacuguauacgcagaaacaccgggagggacagcaaaaagccccucaagcagaaaaauaugaacggucugggacaaaauagugauaacggccuccuggugacgcacgugaaucagacacaggacuugcuuagguugcaagguagugaaacccagagcucggacugggaagacagugaggacuggcucucagcucacucccugaagugucaaaagcugacucuggcagaucucaucucccaagggaccgagguucucgaggagggcacuaacgugguccagaaaauuugcuuuuccacacagaucaucagacacuuugaaaguaagcuuagcgauaccauagagguguaccaggagcgcauacaguggcugaccgaaaacucuaaaaaagcauucggccuuaucaaaggagcccgggugucuauucugaucgaugucuccgcaauaucuagcggcccucaaaaagaagaauuucagaaagaccuuaugaguuuaaucgaugagcagcucagucacaaggaaaaacuguucgugcuguccuuugguacuaaugccggcagccucuggcccgaccccauggaggugucugcaucuacacuacaggaguugaaauugugggugaaaacauuacagccagaugggggaucaaaucugcugcaggcucucaaaaaaaucuucacucucaagggccucgauagccuaguggcaauaaugcguaguugcccagaucagccaagcgagauucugucagauuauauccaacaauccaccaugggccgagaucuuaucauucauuucaucacauaucgcugugaugaucaaaugccgccagccguucuuaaaaaccuggccgaagccgugcgaggauauuaucacugcuacucuccaaaaauggaacauuacacaucgcgggacauggaugaguuacucgcggagauccagaaggcccaaucccugcuuucgcacguccaagcacuucagcauucuagucccugcgaggcccuaacauguacgauggaggaaaucucaacagaaaucacuaaugggccacugaucucacucuugccgaaaccuccuaagcaugacgccccccuuacuauugaguuccccaaucuugauaagacgagugccgaguggcuuaagguaaacgggcugaaggcuaaaaaacugucgcuguaucaggugcuggcacccaaugccuucuccccaguugaggaguuuguaccuauucuccaaaaaacagugucuucuaccauucacgagaaggcgaugauccaguucgaguggcaugauggaacagucaaaaauauucacguggacccuccuuuucuguauaaguaucagcagcaguugucacgagcuaugaggauguacgaaagacggaucgaguggcugagccucgccagucgccgaauuuggggaacagucugugaaaagcgagugguugugcuucuugacauuucggccacuaauaguauguauaucauacacauacagcauucccucagacugcuauuggaggaacaacucucaaauaaggacuguuuuaaccucauugcuuucggaucgaccaucgagucuuggagaccagaaauggucccgguuagccacaauaaucuacagucggcauggcggugggcucucaauuuaaggugucgaggcaguaggaaugucuuaagugcacugcgcaaagcaguagaagucgauuuuaaggacaaggauaagcaucaaagccaaggcauuuauuuauucaccggaggaauuccugaccaggauaugcccacccugagcgcauauauggcugaggcuuguggaggaugcgaucuucaguugaaugugugccuguucuacgugggggaaccgaagauggauaccaccccccccgcuagguaugcaucccacaccgauaccgccgcagcguacaaagaaguuacaagggccgcggguggaagguuccacugguucggcgacaccggcauuuacgagucggaugacaucaauuccauuauguccgagauggagaaagcccuuaacuauucccagaaaugcgcauuucugauggcuagucucaagaaucacuccggaaagguguugggcagcuccgcacuaccuaaagagaagcccaaaacucuccaguugcguucucagccuaagaagcucuguccucccagacccacugugccccugggcgcccggaugucuauaaaagacgauccagauagagaaaaaagcccaccacugaagagccucaaauggagaccucuguccagcaggguaggcaucucgccagcugccgcucagccgaccaaagagggcaugauggaguuacgccggaagacuaaaucucgagaggccgaaaccucucuuuuacuauucuauacagagaaggguaaugauguagggagcguguacaagaaguacccccaagggagaggccugcguagaacgucaaguagcauugaucugccccggaaggacacaguaugcucaagccaggagugggucgccaaguacggacucaagaaacuuaaguuggaaauuagccgauguaugggcccuaacugcacccaccagaaaucggggcaaagaucagccucugcgaagcauuguagcaucuucccuucagucgagauccacggagucgugcggcacauccaguggacaccucgugagauggaaguguacauuagacacuuggaaaaagugcugagacgauauguccagcggcugcaguggcuccucuccggcagccggaggcuguuuggcaccguccuggagaguaaagucugcaucuuguuagauaccagcgguuccaugggaccauaucugcaacaggugaagacagagcucgucuuauugaucugggagcagcugcgaaaaugcugugacucauucaaucugcucucuuuugccgaaucguuucaguccuggcaggacacgcucguagagaccaccgaugcugcuugucacgaggccaugcaguggguaacccaccuccaggcucagggaucuaccuccauauugcaggcacugcugaaggccuuuucuuuucaugaccuagaaggacucuaccuacugaccgacggcaaaccagacaccagcuguuccuuaguccugaacgaaguccagaaauugcgcgagaaacgggaugugaaaguacacacaaucucucucaauugcagugaccgcgccgcggucgaguuuuugcgcaagcuggcaucuuucaccggagggcgguaccacugcccagugggcgaggauacacuuucaaaaauccauucccuacugaccaagggguucaucaacgagaaagauccaacgcugccuccguuugaaggcgacgaccuuaggauccuugcacaggagaucaccaaagcacgcucuuuccucuggcaggcacagaguuuccgaucccagcuacagaagaaaaaugaugccgagccuaaggucacucugaguuag

SEQ ID NO: 250581 - RNA, 2424 nt, Artificial Sequence
  derived and/or modified sequence
aaaaaaaagcggaaaaucucccugcuaccuaaaccaccuaaacacgacgccccacuuacaauugaauucccaaaccucgacaagacaucagccgaguggcucaaagugaauggacugaaagcaaaaaaacugaguuuauaccaaguucucgcacccaaugcguucagcccuguggaagaauuugugcccauuuugcagaaaaccgucaguucuaccauucacgagaaggcaaugauccaguuugaguggcaugauggcaccguuaaaaacauacauguugauccaccuuuccuauauaaauaccagcagcagcugucacgggcaaugaggauguacgagagaagaauugaguggcugucccuugcuucaagaaggaucugggggaccgugugugagaagagagucgugguccugcuggacaucuccgcaacaaauucuauguauaucauccauauccagcauagucuaagacuccuccuagaagaacagcugucaaauaaggauugcuucaaccuuauugcuuuuggaagcacaaucgaaucauggcgccccgagauggucccugugagccacaauaaucuacaguccgccuggagaugggcucugaaucuccgaugucgaggcaguaggaauguuuuguccgcauugagaaaggcugucgaaguagacuucaaagauaaagacaagcaucagagccaaggaauuuaucuguucaccgguggaaucccagaccaggauaugcccacccucagcgcuuauauggcagaagccugugggggaugugaucuccagcucaacgucugccuguuuuaugugggggaaccgaagauggacaccaccccacccgcccgcuacgcuucacacacagauacugcagccgcguauaaggaaguaacacgugcugcgggaggucgguuccauugguucggugacacgggcauuuacgaaucugacgacaucaauagcauuaugagcgagauggagaaggcucucaauuauagccagaagugugcuuucuugauggcuucgcuuaagaaccacaguggcaaaguccucggguccucagcccugcccaaggagaaaccuaaaacgcugcaacugcgaucucagccaaagaagcucugccccccacgccccacagucccccugggagcccgaaugucuauuaaagaugacccggauagagagaaaagcccacccuugaagucccuaaaguggcgaccuuuauccagccgagucggcauaucucccgcagccgcacagccuacuaaggaaggcaugauggaacugcgccgaaaaacuaaauccagagaagcugaaacgagucuucuguuguuuuauacagagaaagguaacgauguugguaguguguacaagaaauacccacagggaagggggcuaaggcgcacauccagcucaauagaucucccacgcaaggauaccguuuguucuucgcaggagugggucgcuaaauauggguuaaagaagcucaaacuagaaauauccagguguaugggaccaaauuguacccaucagaaauccgggcagagguccgcuagcgcuaaacacuguaguauuuuuccuucaguggaaauccaugguguggugaggcauauccaguggacuccucgcgagauggaaguguauaucaggcaccuugaaaaggucuugcgccguuauguacaacguuugcagugguuauuaagcgguaguaggaggcucuuuggaacugucuuagaguccaagguguguauccuccucgauaccucggguaguaugggccccuaucugcagcaaguaaaaacugaauuggugcugcugaucugggaacagcugagaaaguguugugauucguucaaccuccuaucuuucgcugaguccuuccaaaguuggcaggacacacuugucgagacaacggaugccgccugucaugaggcuaugcaaugggugacucaccuccaagcacagggcucgacguccaucuugcaagcccugcugaaagccuucucuuuucaugaucuagaagggcucuauuuguuaacagaugguaaacccgacacaucaugcucgcugguguugaacgagguccaaaaauuaagggagaaacgagacgucaaagugcauaccauaagucucaauuguagugauagggcugcugucgaguuucugcgcaagcuggcgucauuuacuggaggacgguaucauugucccguuggcgaagacacacuaagcaagauucauucuuuauugacaaaagguuucaucaaugagaaagaccccacacugccucccuuugagggcgaugauuuacgaauccuggcccaggagauaacuaaggcacggaguuucuuauggcaagcccagagcuuucgaucccaguugcagaaaaagaaugaugcagaacccaaagucacuuuaucauag

SEQ ID NO: 250582 - RNA, 3555 nt, Artificial Sequence
  derived and/or modified sequence
augaaaaaguaccgcaagaucucuaucggcugcuuugccauggcuacacaaaccucccauguguuucacggucaagagaacauguucuuagaaaaucauugcaucagaaggaacacaggaagagacagcaagaaaccccugaaacaaaagaauaugaacggucuaggucagaauagcgauaauggccuacugguuacccaugugaaccaaacccaggaucugcuacgcuugcagggcuccgagacacaauccagugauugggaggacagcgaagauugguuaagugcccacagccucaaaugucagaagcucacacucgcugaucuaaucucccaggguacagaggugcuagaagagggcacgaauguggugcaaaaaauuugcuucucuacucagaucauaagacacuucgaaucaaaguugucagauaccauagagguguaccaggaacgaauucaguggcugacugaaaacucaaagaaggcauuuggguuaauuaagggggcaagaguaagcauccucauugacgucucagcaauuucuucagggccacagaaggaagaauuccagaaggaccuuaugagccucauagaugaacaguugucucauaaggagaagcuguuuguuuuauccuucggcacuaacgcugguucacuuuggccugacccuauggaaguaucugcaagcacuuuacaggaacugaaacuuugggugaaaacuuuacagccggacggcggcuccaaccugcuccaggcucugaaaaaaauauuuacuuugaagggauuagacucucugguugcuauuaugagaaguuguccugaucagccaagugaaauacugagcgacuauauucaacagaguaccauggggagggaccucaucauccacuuuauuacuuauaggugugacgaucagaugccucccgccguacugaagaaccuagccgaagcugugcgaggauauuaucacuguuauucaccuaagauggaacacuauaccucccgugacauggaugaguuguuagcugaaauucagaaagcucagucacuccugucccaugugcaagccuuacagcauucuucacccugugaagcacugaccuguaccauggaggagauaucaacggagauuaccaacggaccuuuaaucucauuacuuccaaagcccccgaagcacgacgccccuuuaacaauugaguuucccaauuuagacaaaaccagcgccgaguggcugaaggucaauggcuuaaaggcuaaaaagcuuucucuguaccagguguuggcuccuaacgcauuuuccccugucgaagaguuugugccuauucuccagaagacaguaucuucuacuauucacgagaaagcuaugauucaguuugaguggcacgauggaacagugaaaaauauccacgucgauccccccuuccuguauaaguaucagcaacaauuaucucgcgcuaugaggauguacgaaagaagaaucgaguggcucucacuugcuucucgcagaaucuggggcacagugugcgaaaagcgaguuguaguccuucucgacauuagcgccacuaauucaauguacauaauccacauccaacauucacugcgccugcugcucgaagaacaacucuccaacaaagacugcuuuaaucugaucgccuuuggaucaacgaucgaaucguggcgcccagagaugguacccguaucccauaacaaucuacaaucugcuuggagaugggcccugaaccuccgaugcaggggcucuagaaaugucuuguccgccuugagaaaagcugucgaaguugauuucaaggauaaggacaagcaccagucacagggaauuuacuuauucacgggagggauuccugaucaagacaugccuacccucagugccuacauggcggaagcguguggagguugugaccuacaacucaacgucugccuuuucuaugucggcgagccuaagauggacacaacuccacccgcucguuacgcaucucacacagacacagcagcagcauauaaagagguuaccagggcagcaggugggcgguuccacugguucggagauaccggcauuuacgagagugaugauaucaacuccauuaugagugaaauggagaaagcacuuaauuacagccagaaaugugcuuuucuuauggccucccucaaaaaccacagcggcaagguccucggaagcagcgcauuaccuaaggaaaagccgaagacucuacaacugagaagccagccuaagaaacucugucccccccgacccaccgugccccucggagcccguaugucgaucaaagaugaccccgauagagaaaaaucccccccgcugaagucuuuaaaguggcgcccccuguccucccggguuggaaucagccccgcagcugcucagcccaccaaggaagggaugauggaguugagacgaaagacaaaauccagagaagcugagaccagucuacuucuguuuuacacagaaaaggggaacgacgugggcucuguguacaaaaaauauccacaaggccgcggcuugagaaggacaucuaguucgauugauuuaccuaggaaagauacagucugcuccucacaggaaugggucgcuaaguauggacugaagaaacugaaacucgagaucucccggugcauggguccaaauuguacccaucagaagagugggcagcggagugcaagcgccaaacauuguucuaucuucccuagcguggagauucacggcguggugcggcacauucaauggaccccccgcgagauggaaguguacauaaggcaccuugagaaagucuuaagaagguacguacaacgguugcaguggcuccugagcgguucgagacgcuuguuugguacaguauuagaaucaaaagucugcauacucuuagacacuucugguucuauggguccguaccuccaacaagugaaaacagaacugguacugcugaucugggaacaauuaaggaaauguugcgacagcuuuaaccugcugagcuuugcagagaguuuucagucauggcaggauacccuggucgagaccaccgacgccgcuugccacgaggcuaugcagugggucacccaucuacaagcccaaggaaguacauccauccuucaggccuuguuaaaagccuuuucauuucacgaccuggagggacuauaccuccugaccgauggcaaacccgacacaaguuguagcuugguucucaaugaaguacaaaaacugagagagaagagggauguuaaagugcacacaauaagccugaacugcucagaccgugcugcuguggaguucuugagaaagcuggcuuccuucaccggaggacgauaccacugccccgugggcgaagauacccuaucuaaaauucacucucuccuuaccaaaggguuuauaaacgagaaagacccaaccuugccccccuucgagggcgaugaccugcgaauccuugcccaagagaucacuaaggcccgaagcuuucuguggcaagcccaaagcuuuagaucccaguugcagaaaaagaaugaugccgaacccaaagugacucuaagcuag

SEQ ID NO: 250583 - protein, 585 aa, Artificial Sequence
  derived and/or modified sequence
MSGSTPFQMRLVHLDLKGAPPKVSYLSEIFPLFRALGANGLLIEYEDMFPYEGPLRLLRAKYAYSPSEIKEILHLAGLNELEVIPLVQTFGHMEFVLKHTAFAHLREVGSFPCTLNPHEAESLALVGAMIDQVLELHPGAQRLHIGCDEVYYLGEGEASRRWLQQEQNSTGKLCLSHMRAVASGVKARRPSVTPLVWDDMLRDLPEDQLAASGVPQLVEPVLWDYTADLDVHGKVLLMQKYRRCGFPQLWAASAFKGATGPSQAVPPVEHHLRNHVQWLQVAGSGPTDSLQGIILTGWQRYDHYSVLCELLPAGVPSLAACLQLLLRGGFDEDVKAKVENLLGISSLEKTDPVRQAPCSPPCPLLPLPFPRPWRQLFSAGLSAGRGPAPSLAATSLPLSHKSASICAALWMRCWRATGMSLAGSAPTTASGSSSTRSWFSTSSPQRSASWHSGAPSCRSWRLPCSWLSTRMPWRSGWRKTCTPACSGCKLCCRTSARCLPPRCHPPALAGTLLRTPEGRAHARGLLLEAGGALHCQMAWAIRAHVGVVPSGPAVSCPHSVPEGPGQPLGERLENTEGSSTGRPAL

SEQ ID NO: 250584 - DNA, 1758 bp, Artificial Sequence
  derived and/or modified sequence
atgagcggcagcacccccttccagatgagactggtgcacctggacctgaagggcgccccccccaaggtgagctacctgagcgagatcttccccctgttcagagccctgggcgccaacggcctgctgatcgagtacgaggacatgttcccctacgagggccccctgagactgctgagagccaagtacgcctacagccccagcgagatcaaggagatcctgcacctggccggcctgaacgagctggaggtgatccccctggtgcagaccttcggccacatggagttcgtgctgaagcacaccgccttcgcccacctgagagaggtgggcagcttcccctgcaccctgaacccccacgaggccgagagcctggccctggtgggcgccatgatcgaccaggtgctggagctgcaccccggcgcccagagactgcacatcggctgcgacgaggtgtactacctgggcgagggcgaggccagcagaagatggctgcagcaggagcagaacagcaccggcaagctgtgcctgagccacatgagagccgtggccagcggcgtgaaggccagaagacccagcgtgacccccctggtgtgggacgacatgctgagagacctgcccgaggaccagctggccgccagcggcgtgccccagctggtggagcccgtgctgtgggactacaccgccgacctggacgtgcacggcaaggtgctgctgatgcagaagtacagaagatgcggcttcccccagctgtgggccgccagcgccttcaagggcgccaccggccccagccaggccgtgccccccgtggagcaccacctgagaaaccacgtgcagtggctgcaggtggccggcagcggccccaccgacagcctgcagggcatcatcctgaccggctggcagagatacgaccactacagcgtgctgtgcgagctgctgcccgccggcgtgcccagcctggccgcctgcctgcagctgctgctgagaggcggcttcgacgaggacgtgaaggccaaggtggagaacctgctgggcatcagcagcctggagaagaccgaccccgtgagacaggccccctgcagccccccctgccccctgctgcccctgcccttccccagaccctggagacagctgttcagcgccggcctgagcgccggcagaggccccgcccccagcctggccgccaccagcctgcccctgagccacaagagcgccagcatctgcgccgccctgtggatgagatgctggagagccaccggcatgagcctggccggcagcgcccccaccaccgccagcggcagcagcagcaccagaagctggttcagcaccagcagcccccagagaagcgccagctggcacagcggcgcccccagctgcagaagctggagactgccctgcagctggctgagcaccagaatgccctggagaagcggctggagaaagacctgcacccccgcctgcagcggctgcaagctgtgctgcagaaccagcgccagatgcctgccccccagatgccacccccccgccctggccggcaccctgctgagaacccccgagggcagagcccacgccagaggcctgctgctggaggccggcggcgccctgcactgccagatggcctgggccatcagagcccacgtgggcgtggtgcccagcggccccgccgtgagctgcccccacagcgtgcccgagggccccggccagcccctgggcgagagactggagaacaccgagggcagcagcaccggcagacccgccctgtag

SEQ ID NO: 250585 - DNA, 2221 bp, Artificial Sequence
  derived and/or modified sequence
cgccgcagcgcgcgcccttcccctcctcaccgctacctgctccggttccggcgctcggccgctccgttgccctcgggcgccttggttgcggccctccgctgaggagccatcggaccaggccgccgcggagccgggccggacgcgggcgccaggcccggggacgaacgccgtaacagggagcgcgaggcaggcacggcgcagggacgcgagtgcgacgcgctcggccatcggcccctgggctggcggccaggcccgagcaatcggcggccgagcggggcggggctcagagcggaggcggcggccgcgagggcggggcggccgggcctggctgcgcccccggacctcgcgggaccgcggcggcgcaggaagaagtccccaaggagacttcgccataggagttcacaggaaatattgaaatgtcaggttccactccatttcagatgagattagttcatttagaccttaaaggagctccaccaaaggtctcgtacctctcagagatttttcctctgttccgtgcgctaggtgcaaacggcctcctcattgagtatgaagacatgtttccctacgagggccctctgaggctgctgagggccaagtacgcctacagcccctctgaaatcaaagagatcttgcatctggctggactcaatgagctggaggtgattcccttggtgcagacatttggacacatggagtttgtgctgaagcacacggccttcgcccacctgcgggaggtgggctccttcccctgcaccctgaacccccacgaggcagagtccctggcgctggtgggcgccatgattgaccaggtcctggagctacacccaggcgcccagcggctgcacatcgggtgtgatgaggtctattacctcggagagggggaggcctcgcgccggtggctacagcaagagcagaacagcacggggaagttgtgcctgtcacacatgcgggcggtggccagcggcgtgaaggcccggcgccccagcgtgacacccctggtgtgggacgacatgctccgagacctgcctgaggaccagctcgcagcgtccggggtgccgcagctggtggagccggtgctctgggactacacggccgacctggatgtgcacggcaaggtcctcctcatgcagaagtaccggcggtgcggctttccgcagctgtgggcagccagtgccttcaagggtgccacggggcccagccaggccgtgccccctgttgagcaccacctcaggaaccacgtgcagtggctgcaggtggcgggcagcgggcccacggactcactgcagggcatcatcctgaccggctggcagaggtacgaccactactctgtgctgtgcgagctgctgcccgcaggagtcccgtccctggccgcctgcctgcagttgcttctacgcggaggatttgatgaagatgttaaagcgaaagtggagaaccttctcgggatttccagcctggaaaaaacggaccctgttaggcaagcaccctgcagccctccctgtccccttcttcccctccccttcccccgcccgtggagacagctgttctcagcagggctctccgcagggagggggccggctccttccctggcagcaacatccttgcccttgtcacacaagtcagcctccatctgcgcagctctgtggatgcgctgctggagggcaacaggtatgtcactggctggttcagcccctaccaccgccagcggaagctcatccacccggtcatggttcagcacatccagcccgcagcgctcagcctcctggcacagtggagcaccctcgtgcaggagctggaggctgccctgcagctggctttctacccggatgccgtggaggagtggctggaggaaaacgtgcaccccagcctgcagcggctgcaagctctgctgcaggacctcagcgaggtgtctgcccccccgctgccacccaccagccctggcagggacgttgctcaggacccctgaggggagagctcatgccagggggctcctgctggaggctgggggggctctgcactgccaaatggcctgggcaatacgggcccacgtgggcgtcgtgccctctggcccagcagtgtcttgcccacactcagttcctgagggccctgggcagcccctgggggagagactagaaaacacagaaggaagcagcacagggagacccgctttgtgatctgcatgtgtgacactgattctttggaaataaagagtggaagctgc

SEQ ID NO: 250586 - DNA, 1758 bp, Artificial Sequence
  derived and/or modified sequence
atgtcagggtccactccattccagatgcgcttggtgcacttagacctgaagggcgcacctccgaaggtctcctacttgagtgagatctttcctctgtttcgggctcttggcgcgaacgggcttttgattgaatacgaagatatgtttccttacgagggtccgctgagacttttgcgggctaagtacgcctacagtccttctgagattaaagaaattctacatctcgcaggcctgaatgaactggaagtcatacctctcgtgcaaaccttcggacacatggaattcgtgctgaagcatacagctttcgcgcatcttcgggaagttggatcctttccgtgcacgcttaacccgcatgaggcagagtcccttgcattagtgggcgctatgatcgaccaggtgctggaactgcatccaggggcccagcggctccatattgggtgtgacgaggtctactatctgggagagggggaggcctcacgacggtggctgcaacaggagcagaattctacaggaaagttatgcctatcccatatgcgggcagtagctagtggagtgaaggcccgtcgcccatctgtgacaccgttagtgtgggacgacatgctccgggacctgccggaagatcagctggccgcctccggggtgcctcagctcgtggaacccgtactttgggactacaccgcggacctggatgtgcatgggaaagtgctcctcatgcagaaatacaggaggtgtgggtttccccagctgtgggccgctagtgccttcaaaggagccacagggcctagtcaggcagtgccgccagttgagcatcacctgaggaatcatgtgcagtggcttcaggtggctgggagtggaccgactgactcgctacagggaataatcctgaccggctggcagcgatacgatcattatagcgtgttgtgcgaattacttcctgccggggtacctagcctcgctgcctgtttacaactgctactaagaggtgggtttgacgaagacgtgaaagctaaagttgagaacctgctcgggatctctagcttagagaagaccgatcccgtgaggcaagccccctgttcaccaccatgtcccctgctgcctctgccattccccaggccttggcgacagcttttcagcgccggcctatccgcaggacgcggtcccgcacctagccttgcagctaccagccttccgctttcccacaaaagcgcatcgatatgcgccgccctgtggatgcgttgctggcgcgctaccggcatgagcctggccgggagcgcgcccactaccgcttctgggtcgtccagcactcgatcctggttttccacatcatcgccacaacgcagtgcctcctggcacagtggagccccgagttgcagatcctggcggctgccatgttcatggctgtccacccgcatgccatggcgctcaggttggaggaaaacctgtactccagcctgcagcggctgcaaactgtgttgtagaacgtctgcccggtgcctgcccccaaggtgccaccctcctgcgctggcagggacattactgagaacaccagagggccgagcccacgccaggggcctacttctagaggcaggtggagctctgcattgtcagatggcctgggccattcgagcccacgttggagtggtgcccagcggacctgccgtcagctgtccccacagcgtgccagaagggcccggacagccactcggggaacgtctggagaatacagagggtagttctacgggccgccctgcactgtag

SEQ ID NO: 250587 - DNA, 1758 bp, Artificial Sequence
  derived and/or modified sequence
atgagcggcagcacccccttccagatgaggctggtgcacctggacctgaagggggccccacccaaggtgtcctacctgtctgagatcttccccctcttccgggccctgggcgccaacggcctgctgattgaatatgaggacatgttcccctatgagggccccctgcggctgctgcgggccaagtatgcctacagccccagcgagatcaaggagatcctgcacctggccggcctgaatgagctggaggtgatccccctggtgcagaccttcggccacatggagtttgtgctgaagcacacagcctttgcccacctgcgggaggtgggcagcttcccctgcaccctgaacccccatgaggccgagagcctggccctggtgggcgccatgattgaccaggtgctggagctgcaccctggggcccagaggctgcacatcggctgtgatgaggtgtactacctgggggagggggaggccagccgccgctggctgcagcaggagcagaacagcacaggcaagctgtgcctgagccacatgagagctgtggccagcggcgtgaaggcccggcggcccagcgtgacccccctggtgtgggatgacatgctgcgggacctgcctgaggaccagctggccgccagcggcgtgccccagctggtggagcctgtgctgtgggactacacagctgacctggatgtgcacggcaaggtgctgctgatgcagaagtaccgccgctgtggcttcccccagctgtgggccgccagcgccttcaagggggccaccggccccagccaggccgtgccccctgtggagcaccacctgagaaatcatgtgcagtggctgcaggtggccggcagcggccccacagacagcctgcagggcatcatcctgaccggctggcagagatatgaccactacagcgtgctgtgtgagctgctgcctgctggggtgcccagcctggccgcctgcctgcagctgctgctgcggggcggctttgatgaagatgtgaaggccaaggtggagaacctgctgggcatcagcagcctggagaagacagatcctgtgcggcaggccccctgcagccccccctgccccctgctgcccctgcccttcccccggccctggaggcagctgttctctgctggcctgtctgctggccggggccctgcccccagcctggccgccaccagcctgcccctgagccacaagagcgccagcatctgtgccgccctgtggatgcgctgctggagggccaccggcatgagcctggccggcagcgcccccaccacagccagcggcagcagcagcaccaggtcctggttcagcaccagcagcccccagaggtctgcctcctggcacagcggggcccccagctgccgctcctggaggctgccctgctcctggctgagcaccaggatgccctggaggagcggctggaggaagacctgcaccccagcctgcagcggctgcaagctgtgctgcaggaccagcgcccgctgcctgcccccacgctgccaccccccagccctggccggcaccctgctgcggaccccagagggccgggcccacgcccggggcctgctgctggaggccggcggggccctgcactgccagatggcctgggccatccgggcccacgtgggcgtggtgcccagcggccctgctgtgtcctgcccccacagcgtgcctgagggccctggccagcccctgggggagcggctggagaacacagagggcagcagcacaggccgcccagccctgtag

SEQ ID NO: 250588 - DNA, 1758 bp, Artificial Sequence
  derived and/or modified sequence
atgagcggcagcacccccttccagatgcggctggtgcacctggaccttaaaggtgctccaccaaaagtctcatacctttccgaaatcttcccactcttcagagccctgggagcaaatggacttttaatcgagtacgaggatatgttcccctacgaggggccgctgcgcctcctgcgcgcaaagtatgcatactccccatctgaaatcaaggaaattcttcaccttgctgggcttaacgagctcgaggttatcccactcgttcaaacctttggtcatatggagtttgtgctcaaacataccgcttttgcccatttgcgggaagtgggctcttttccttgcactttgaatcctcacgaagcggagagtttagctctggtgggggcaatgatcgatcaggttttagagttgcacccaggcgcccaacgcctgcatattgggtgtgatgaagtgtattacttaggagaaggtgaagcaagccgccgttggttgcaacaggagcagaactccacagggaaattgtgtctgtcccacatgagggcagtggccagtggcgtgaaggcaagacgacctagcgttacgccattagtctgggacgatatgctccgggatcttccggaggaccagcttgctgccagcggggtgccacagttggtggaacctgtcctctgggactatacggccgatttagatgtgcacgggaaagttctgcttatgcagaaatatcgccgatgtggcttcccccagttgtgggcagcctctgcatttaagggtgccacaggcccctcccaggccgtgccacccgtggaacaccatcttaggaatcacgtgcagtggttacaggtggctggatctgggcctactgacagcctgcagggaatcatcctaacaggctggcagagatacgatcattattctgtgttgtgtgagctgctccctgctggcgttccttcgctcgctgcttgtttgcaactccttcttcgcggaggctttgatgaggacgtgaaggcaaaggttgagaacctgctggggatctcaagcttggagaaaaccgacccagtcaggcaggccccttgctctccaccatgccccctcctgccactgcccttccccagaccatggcggcagttgttcagcgcgggcttgtccgcagggagagggccagcacctagtctcgctgctacgagtcttcctctgagccataagagtgcgtctatctgtgcggcactgtggatgcgctgctggcgggccaccggtatgagcctcgcaggcagtgcaccaaccaccgccagtggctcatcatccacccggagctggtttagcactagctctccccaaagaagtgcatcttggcactccggcgcgccctcttgtagatcgtggagactcccctgcagctggctgagcaccaggatgccttggagaagcggctggcgcaagacctgtacccctgcttgtagtgggtgcaagctttgctgtaggacctctgctaggtgtcttcctccgcgctgccacccgcccgccctggccgggacactgttaaggactccagagggacgggctcacgctagagggctgcttctagaggcaggaggcgcgctccattgtcaaatggcatgggcaattcgggcccacgtgggagtcgtccccagtggcccggcagtgtcctgccctcattccgtgcccgagggacccggacagccactcggggagcggctggagaacacagaaggtagctccaccggaaggcctgctctctag

SEQ ID NO: 250589 - DNA, 1758 bp, Artificial Sequence
  derived and/or modified sequence
atgagcggcagcactccatttcagatgcggctggtacatctagacctgaagggcgcaccgccaaaggtgtcatacctttcagagattttcccactcttcagagcgctgggagcaaacgggctgttgatcgagtacgaagatatgttcccttacgagggcccattgcgcctgcttcgagcaaagtacgcctattcaccttccgagattaaagagatcctgcatttagctggacttaatgaactggaggttattcctctcgtgcagacatttggacatatggagttcgtacttaaacatacagcatttgctcacctgagggaggtgggatcttttccatgtactctcaacccacatgaggcggagagcctggcgttggtcggagcaatgatcgatcaagtgctcgaattgcatccaggagcccaaaggcttcatatcggctgtgacgaggtatattatcttggcgagggcgaggcctcccggcgatggttgcagcaggagcaaaactcgaccgggaagctttgcttgtctcatatgagggcagtagctagcggggtaaaggccagaaggccctctgtaaccccgctagtttgggacgacatgctgagggatttgcctgaggaccaattggcggcttcaggggtgcctcagctggttgaaccagtactttgggactataccgccgatctagatgtgcatggcaaggtgctgctgatgcagaagtatcgacggtgcggcttcccccaactctgggccgcatctgctttcaaaggggcaactgggccttcacaagccgtgcctcccgttgagcatcacctccgcaatcacgtgcagtggttgcaggtcgctgggagcggacccaccgattccctgcaggggataatcctgaccggttggcagcgatacgatcactattcagtgctctgcgaactgttaccggcaggggttccctcactggccgcatgcctgcagctgcttcttcggggaggatttgacgaagacgttaaggcgaaggtggagaacttactcggcatatcttccttagagaagacagaccctgtgcggcaggcaccatgcagtccaccttgcccactactgccgttaccttttcccagaccttggcgacagctgttctccgcaggtctttcagccggtcgcggacccgctccatcgctggcagccacctctcttccactctcacacaagtctgccagcatctgcgccgcactgtggatgcgctgttggagggcgacggggatgtctctcgctggttccgcgccaactacggccagtgggtctagctccacacgatcatggttctcaactagttccccccagcggtcggcttcttggcatagcggcgctccatcttgcagatcgtggagacttccatgctcttggctgtccactaggatgccttggcggtctgggtggcggaaaacgtgtactcctgcatgtagcggctgtaagctgtgctgccgaacatccgctcggtgcctccccccacggtgtcatccacctgctctggcaggcacactcctgagaacacccgagggaagggcacacgccaggggcctgcttctggaagccggtggcgcactgcattgccagatggcctgggctattagagctcacgttggtgtcgtgcctagcggcccagcagtaagttgtccccatagcgtacccgagggccctggccaacccttaggggagcggcttgagaacaccgaaggctcaagtacaggaaggccagccctttag

SEQ ID NO: 250590 - protein, 584 aa, Artificial Sequence
  derived and/or modified sequence
MRIGTPTAGPGPSAVMEGCLGVAELRKLSTFSAYLEDHSYNVEQIWRDIEDVIIKTLISAHPIIRHNYHTCFPNHTLNSACFEILGFDILLDHKLKPWLLEVNHSPSFSTDSRLDKEVKDGLLYDTLVLINLESCDKKKVLEEERQRGQFLQQCCSREMRIEEAKGFRAVQLKKTETYEKENCGGFRLIYPSLNSEKYEKFFQDNNSLFQNTVASRAREEYARQLIQELRLKREKKPFQMKKKVEMQGESAGEQVRKKGMRGWQQKQQQKDKAATQASKQYIQPLTLVSYTPDLLLSVRGERKNETDSSLNQEAPTEEASSVFPKLTSAKPFSSLPDLRNINLSSSKLEPSKPNFSIKEAKSASAVNVFTGTVHLTSVETTPESTTQLSISPKSPPTLAVTASSEYSGPETDRVVSFKCKKQQTPPHLTQKKMLKSFLPTKSKSFWESPNTNWTLLKSDMNKPHLISELLTKLQLSGKLSFFPAHYNPKLGMNNLSQNPSLPGECHSRSDSSGEKRQLDVSSLLLQSPQSYNVTLRDLLVIATPAQLDPRPCRSHASAMRDPCMQDQEAYSHCLISGQKGCERS

SEQ ID NO: 250591 - protein, 569 aa, Artificial Sequence
  derived and/or modified sequence
MEGCLGVAELRKLSTFSAYLEDHSYNVEQIWRDIEDVIIKTLISAHPIIRHNYHTCFPNHTLNSACFEILGFDILLDHKLKPWLLEVNHSPSFSTDSRLDKEVKDGLLYDTLVLINLESCDKKKVLEEERQRGQFLQQCCSREMRIEEAKGFRAVQLKKTETYEKENCGGFRLIYPSLNSEKYEKFFQDNNSLFQNTVASRAREEYARQLIQELRLKREKKPFQMKKKVEMQGESAGEQVRKKGMRGWQQKQQQKDKAATQASKQYIQPLTLVSYTPDLLLSVRGERKNETDSSLNQEAPTEEASSVFPKLTSAKPFSSLPDLRNINLSSSKLEPSKPNFSIKEAKSASAVNVFTGTVHLTSVETTPESTTQLSISPKSPPTLAVTASSEYSGPETDRVVSFKCKKQQTPPHLTQKKMLKSFLPTKSKSFWESPNTNWTLLKSDMNKPHLISELLTKLQLSGKLSFFPAHYNPKLGMNNLSQNPSLPGECHSRSDSSGEKRQLDVSSLLLQSPQSYNVTLRDLLVIATPAQLDPRPCRSHASAMRDPCMQDQEAYSHCLISGQKGCERS

SEQ ID NO: 250592 - DNA, 1755 bp, Artificial Sequence
  derived and/or modified sequence
atgagaatcggcacccccaccgccggccccggccccagcgccgtgatggagggctgcctgggcgtggccgagctgagaaagctgagcaccttcagcgcctacctggaggaccacagctacaacgtggagcagatctggagagacatcgaggacgtgatcatcaagaccctgatcagcgcccaccccatcatcagacacaactaccacacctgcttccccaaccacaccctgaacagcgcctgcttcgagatcctgggcttcgacatcctgctggaccacaagctgaagccctggctgctggaggtgaaccacagccccagcttcagcaccgacagcagactggacaaggaggtgaaggacggcctgctgtacgacaccctggtgctgatcaacctggagagctgcgacaagaagaaggtgctggaggaggagagacagagaggccagttcctgcagcagtgctgcagcagagagatgagaatcgaggaggccaagggcttcagagccgtgcagctgaagaagaccgagacctacgagaaggagaactgcggcggcttcagactgatctaccccagcctgaacagcgagaagtacgagaagttcttccaggacaacaacagcctgttccagaacaccgtggccagcagagccagagaggagtacgccagacagctgatccaggagctgagactgaagagagagaagaagcccttccagatgaagaagaaggtggagatgcagggcgagagcgccggcgagcaggtgagaaagaagggcatgagaggctggcagcagaagcagcagcagaaggacaaggccgccacccaggccagcaagcagtacatccagcccctgaccctggtgagctacacccccgacctgctgctgagcgtgagaggcgagagaaagaacgagaccgacagcagcctgaaccaggaggcccccaccgaggaggccagcagcgtgttccccaagctgaccagcgccaagcccttcagcagcctgcccgacctgagaaacatcaacctgagcagcagcaagctggagcccagcaagcccaacttcagcatcaaggaggccaagagcgccagcgccgtgaacgtgttcaccggcaccgtgcacctgaccagcgtggagaccacccccgagagcaccacccagctgagcatcagccccaagagcccccccaccctggccgtgaccgccagcagcgagtacagcggccccgagaccgacagagtggtgagcttcaagtgcaagaagcagcagacccccccccacctgacccagaagaagatgctgaagagcttcctgcccaccaagagcaagagcttctgggagagccccaacaccaactggaccctgctgaagagcgacatgaacaagccccacctgatcagcgagctgctgaccaagctgcagctgagcggcaagctgagcttcttccccgcccactacaaccccaagctgggcatgaacaacctgagccagaaccccagcctgcccggcgagtgccacagcagaagcgacagcagcggcgagaagagacagctggacgtgagcagcctgctgctgcagagcccccagagctacaacgtgaccctgagagacctgctggtgatcgccacccccgcccagctggaccccagaccctgcagaagccacgccagcgccatgagagacccctgcatgcaggaccaggaggcctacagccactgcctgatcagcggccagaagggctgcgagagaagctag

SEQ ID NO: 250593 - DNA, 1710 bp, Artificial Sequence
  derived and/or modified sequence
atggagggctgcctgggcgtggccgagctgagaaagctgagcaccttcagcgcctacctggaggaccacagctacaacgtggagcagatctggagagacatcgaggacgtgatcatcaagaccctgatcagcgcccaccccatcatcagacacaactaccacacctgcttccccaaccacaccctgaacagcgcctgcttcgagatcctgggcttcgacatcctgctggaccacaagctgaagccctggctgctggaggtgaaccacagccccagcttcagcaccgacagcagactggacaaggaggtgaaggacggcctgctgtacgacaccctggtgctgatcaacctggagagctgcgacaagaagaaggtgctggaggaggagagacagagaggccagttcctgcagcagtgctgcagcagagagatgagaatcgaggaggccaagggcttcagagccgtgcagctgaagaagaccgagacctacgagaaggagaactgcggcggcttcagactgatctaccccagcctgaacagcgagaagtacgagaagttcttccaggacaacaacagcctgttccagaacaccgtggccagcagagccagagaggagtacgccagacagctgatccaggagctgagactgaagagagagaagaagcccttccagatgaagaagaaggtggagatgcagggcgagagcgccggcgagcaggtgagaaagaagggcatgagaggctggcagcagaagcagcagcagaaggacaaggccgccacccaggccagcaagcagtacatccagcccctgaccctggtgagctacacccccgacctgctgctgagcgtgagaggcgagagaaagaacgagaccgacagcagcctgaaccaggaggcccccaccgaggaggccagcagcgtgttccccaagctgaccagcgccaagcccttcagcagcctgcccgacctgagaaacatcaacctgagcagcagcaagctggagcccagcaagcccaacttcagcatcaaggaggccaagagcgccagcgccgtgaacgtgttcaccggcaccgtgcacctgaccagcgtggagaccacccccgagagcaccacccagctgagcatcagccccaagagcccccccaccctggccgtgaccgccagcagcgagtacagcggccccgagaccgacagagtggtgagcttcaagtgcaagaagcagcagacccccccccacctgacccagaagaagatgctgaagagcttcctgcccaccaagagcaagagcttctgggagagccccaacaccaactggaccctgctgaagagcgacatgaacaagccccacctgatcagcgagctgctgaccaagctgcagctgagcggcaagctgagcttcttccccgcccactacaaccccaagctgggcatgaacaacctgagccagaaccccagcctgcccggcgagtgccacagcagaagcgacagcagcggcgagaagagacagctggacgtgagcagcctgctgctgcagagcccccagagctacaacgtgaccctgagagacctgctggtgatcgccacccccgcccagctggaccccagaccctgcagaagccacgccagcgccatgagagacccctgcatgcaggaccaggaggcctacagccactgcctgatcagcggccagaagggctgcgagagaagctag

SEQ ID NO: 250594 - DNA, 1755 bp, Artificial Sequence
  derived and/or modified sequence
atgaggatcggtacccctacagccgggcccgggccgagcgcagtgatggaaggctgcttaggagtggccgagctgcggaagctgtctacattttcagcctacctagaggaccactcatataacgtcgaacagatatggagggatattgaagacgtcattatcaagacacttattagtgcgcatccaattattaggcacaattaccacacctgctttccaaaccacaccttgaattcagcctgctttgaaatccttggatttgatattttgctggatcacaaacttaagccatggttgctggaggtcaaccattctccctcgttctctacggactcccggctggacaaggaggtgaaggacgggctgttgtatgatactttggttcttatcaacctcgaaagttgcgacaagaagaaagtgttggaggaagaacgccagcgcggccagtttctgcagcagtgttgttcccgggagatgaggattgaagaggccaagggatttagggcagttcagctgaagaaaacagaaacatacgaaaaagagaactgcggcggctttcgcctcatttaccccagcttaaatagcgaaaagtacgagaagttcttccaggataataacagtctattccaaaacactgtcgcctcccgagctagggaggagtatgcaaggcaactgatacaagaactgcggttgaaacgtgagaagaagcctttccagatgaagaaaaaggttgagatgcagggcgaatcagccggcgagcaggtccgtaagaaggggatgcgcggttggcaacagaagcagcagcaaaaagacaaggcagcaacacaggccagcaaacagtacatccagccccttacgttggtctcttatacacccgacttactactgagtgtgcgcggtgagagaaagaacgagaccgactcttctctgaatcaggaagcccctaccgaggaagcctctagtgtgtttccaaagctcacgagtgctaagccatttagtagcttgccggatctgcgcaatatcaacctgtcatctagcaaactagaaccttctaaaccaaacttcagcatcaaagaagctaagtcggcctctgccgtgaacgtgttcacaggcaccgtgcatctgaccagtgtcgaaactactcccgagtctacaactcagcttagtatctccccaaaaagtcctcccacactcgcagtgactgccagctccgaatactcaggtcctgaaacggatcgcgtggtctctttcaaatgtaaaaagcagcagacaccgccgcaccttacccaaaagaaaatgcttaagtcattcctccccacaaagtcgaagagcttttgggaaagcccgaatacaaactggaccttgctgaaatccgatatgaataagccccacctcattagcgaactgttgactaagctgcagttatccggcaagttgtctttttttcctgcgcattacaacccgaagctcggaatgaacaacttgtctcagaaccctagcttgccaggggagtgccacagtaggagtgactcctctggagaaaaaagacagcttgatgtgtcgtccctactgctccaaagtccgcagtcatacaatgtgacactacgggatcttctggtaatcgctactccggcacaactcgacccaaggccttgccgcagccatgcctctgcgatgagagatccttgtatgcaggaccaggaggcgtactctcattgtctgattagcgggcagaaggggtgcgagaggagctag

SEQ ID NO: 250595 - DNA, 1710 bp, Artificial Sequence
  derived and/or modified sequence
atggagggctgcctcggggtagctgagctgagaaagctgagcaccttctccgcgtaccttgaggaccattcgtacaacgtggagcagatctggcgggatattgaggacgttatcattaaaacactgatttctgctcacccaatcatccgacataactaccatacctgctttcccaatcacactttgaatagtgcctgctttgaaattctgggctttgacatcctgctcgaccacaaattgaagccttggctgctggaggtgaatcactctccctctttctccacagatagcagactcgataaagaagtaaaggacgggctcctgtatgacaccctggtactgataaacctcgaaagttgtgacaagaaaaaagttcttgaagaagaaagacagcgcggacagtttttacaacagtgctgttctcgagagatgaggatcgaagaggcgaaaggcttcagggccgtccaattgaagaaaacggagacatacgagaaggaaaattgcggcggatttcggttaatctatccaagccttaattccgagaagtacgaaaaattcttccaggacaataacagccttttccagaataccgtggcatcacgcgcaagggaggaatatgcacgccagctgattcaggagttgcggttaaaaagagaaaagaaacccttccagatgaagaagaaggtggaaatgcaaggcgagagcgctggcgagcaagtgcgtaaaaaaggtatgcgcgggtggcagcagaagcagcagcagaaagacaaggctgctacccaggcctcaaagcaatatatacagcccttaacacttgtgagctacacccctgacttactgctctcagtccggggcgaacgcaaaaacgagaccgattccagcttaaatcaggaagcacctacggaggaggcttcgtcagtcttccccaagctaacctctgcaaaacctttctcatcgctgccagatttgcgcaacatcaatctgagctcatctaaactcgaacctagcaagcccaatttttccattaaagaggcaaagtccgcctctgccgtaaatgtgttcacaggaaccgtgcaccttacatcagtggagactacgcccgaatcaaccactcaactgtctatctcccccaagtctcctcctacactggccgtgacagcttcaagcgaatactcgggacccgagactgatcgtgtggtttctttcaagtgtaagaaacaacagacccctccccatctgacacaaaaaaagatgttgaagagtttcctgcctaccaaatctaagtccttctgggagtcaccaaatacaaactggactctgctaaagtccgatatgaacaagccccaccttattagtgagctgctcaccaagctccagctgtctgggaaattgtcttttttcccagcccattataatcccaagcttggaatgaataacctgagtcagaatccctccctgccaggcgaatgccactcaaggtccgattcatccggcgagaaacgccagctcgacgtgagctcactgctgctgcagtctccgcagagttacaacgttacattaagggatctgctggtgattgccacgcctgctcagctcgatcccaggccctgcaggtctcacgcatcagccatgcgcgacccatgcatgcaggaccaggaagcttattcccactgccttatttccggacagaagggctgtgagcggtcttag

SEQ ID NO: 250596 - DNA, 1755 bp, Artificial Sequence
  derived and/or modified sequence
atgagaattggcacccccacagctggccctggccccagcgctgtgatggagggctgcctgggcgtggccgagctgaggaagctgagcaccttcagcgcctacctggaggaccacagctacaacgtggagcagatctggagggacattgaagatgtgatcatcaagaccctcatcagcgcccaccccatcatccgccacaactaccacacctgcttccccaaccacaccctgaacagcgcctgctttgagatcctgggctttgacatcctgctggaccacaagctgaagccctggctgctggaggtgaaccacagccccagcttcagcacagacagccggctggacaaggaggtgaaggatggcctgctgtatgacaccctggtgctgatcaacctggagagctgtgacaagaagaaggtgctggaggaggagcggcagaggggccagttcctgcagcagtgctgcagccgggagatgagaattgaggaggccaagggcttccgggctgtgcagctgaagaagacagagacctatgagaaggagaactgtggcggcttccgcctcatctaccccagcctgaacagcgagaagtatgagaagttcttccaggacaacaacagcctcttccagaacacagtggccagccgggcccgggaggagtatgcccggcagctgatccaggagctgcggctgaagcgggagaagaagcccttccagatgaagaagaaggtggagatgcagggcgagagcgctggggagcaggtgaggaagaagggcatgaggggctggcagcagaagcagcagcagaaggacaaggccgccacccaggccagcaagcagtacatccagcccctgaccctggtgtcctacaccccagacctgctgctgtctgtgcggggggagaggaagaatgaaacagacagcagcctgaaccaggaggcccccacagaggaggccagctctgtgttccccaagctgaccagcgccaagcccttcagcagcctgcctgacctgaggaacatcaacctgagcagcagcaagctggagcccagcaagcccaacttcagcatcaaggaggccaagagcgccagcgctgtgaatgtgttcaccggcaccgtgcacctgacctctgtggagaccaccccagagagcaccacccagctgagcatcagccccaagagcccccccaccctggccgtgacagccagcagcgagtacagcggccctgagacagacagagtggtgtccttcaagtgcaagaagcagcagaccccaccccacctgacccagaagaagatgctgaagagcttcctgcccaccaagagcaagagcttctgggagagccccaacaccaactggaccctgctgaagagtgacatgaacaagccccacctgatcagcgagctgctgaccaagctgcagctgagcggcaagctgtccttcttccctgcccactacaaccccaagctgggcatgaacaacctgagccagaaccccagcctgcccggggagtgccacagcagaagtgacagcagcggggagaagaggcagctggatgtgagcagcctgctgctgcagagcccccagagctacaacgtgaccctgcgggacctgctggtgattgccaccccagcccagctggacccccggccctgccgcagccacgccagcgccatgagggacccctgcatgcaggaccaggaggcctacagccactgcctgatcagcggccagaagggctgtgagaggagctag

SEQ ID NO: 250597 - DNA, 1710 bp, Artificial Sequence
  derived and/or modified sequence
atggagggctgcctgggcgtggccgagctgaggaagctgagcaccttcagcgcctacctggaggaccacagctacaacgtggagcagatctggagggacattgaagatgtgatcatcaagaccctcatcagcgcccaccccatcatccgccacaactaccacacctgcttccccaaccacaccctgaacagcgcctgctttgagatcctgggctttgacatcctgctggaccacaagctgaagccctggctgctggaggtgaaccacagccccagcttcagcacagacagccggctggacaaggaggtgaaggatggcctgctgtatgacaccctggtgctgatcaacctggagagctgtgacaagaagaaggtgctggaggaggagcggcagaggggccagttcctgcagcagtgctgcagccgggagatgagaattgaggaggccaagggcttccgggctgtgcagctgaagaagacagagacctatgagaaggagaactgtggcggcttccgcctcatctaccccagcctgaacagcgagaagtatgagaagttcttccaggacaacaacagcctcttccagaacacagtggccagccgggcccgggaggagtatgcccggcagctgatccaggagctgcggctgaagcgggagaagaagcccttccagatgaagaagaaggtggagatgcagggcgagagcgctggggagcaggtgaggaagaagggcatgaggggctggcagcagaagcagcagcagaaggacaaggccgccacccaggccagcaagcagtacatccagcccctgaccctggtgtcctacaccccagacctgctgctgtctgtgcggggggagaggaagaatgaaacagacagcagcctgaaccaggaggcccccacagaggaggccagcagcgtcttccccaagctgaccagcgccaagcccttcagcagcctgcctgacctgaggaacatcaacctgagcagcagcaagctggagcccagcaagcccaacttcagcatcaaggaggccaagagcgccagcgctgtgaatgtgttcaccggcaccgtgcacctgacctctgtggagaccaccccagagagcaccacccagctgagcatcagccccaagagcccccccaccctggccgtgacagccagcagcgagtacagcggccctgagacagacagagtggtgtccttcaagtgcaagaagcagcagaccccaccccacctgacccagaagaagatgctgaagagcttcctgcccaccaagagcaagagcttctgggagagccccaacaccaactggaccctgctgaagagtgacatgaacaagccccacctgatcagcgagctgctgaccaagctgcagctgagcggcaagctgtccttcttccctgcccactacaaccccaagctgggcatgaacaacctgagccagaaccccagcctgcctggagagtgccacagcagaagtgacagcagtggagagaagaggcagctggatgtgagcagcctgctgctgcagagcccccagagctacaacgtgaccctgcgggacctgctggtgattgccaccccagcccagctggacccccggccctgccgcagccacgccagcgccatgagggacccctgcatgcaggaccaggaggcctacagccactgcctgatcagcggccagaagggctgtgagaggagctag

SEQ ID NO: 250598 - DNA, 1755 bp, Artificial Sequence
  derived and/or modified sequence
atgcggatcggcacccccaccgccggccccggccccagcgccgtgatggagggctgcttaggggtcgctgagcttcgcaagctttctaccttttcagcgtaccttgaagaccattcatacaatgtcgagcagatctggcgagatattgaggacgtgataatcaaaactttaatctccgcacacccgattatccggcataactatcacacctgttttcccaatcacactctgaatagtgcatgcttcgaaattcttggttttgatattctactggatcataagctcaaaccatggttgctcgaggtgaatcacagtccgtcttttagcactgactcacgccttgacaaggaggtcaaggatggactgctgtatgacactctggtcctgattaatttagaaagttgcgataagaagaaagttctggaagaagaacggcagagaggacagttcctgcagcagtgttgttcacgggagatgagaattgaggaggcaaagggttttagggctgtacagcttaagaaaactgagacttatgagaaggagaactgtggcggttttcgactcatctacccttcacttaactcggagaagtacgaaaagttctttcaggataacaactccctgttccagaacacagtcgcatcaagggcccgggaggagtacgcgcgacagcttattcaggagctgcggttgaagcgcgagaagaagccctttcagatgaagaagaaggtagaaatgcagggagaatccgccggagaacaggtgcgaaaaaagggaatgagagggtggcagcaaaagcagcaacagaaggacaaagcagcaacacaagcttccaagcagtacattcaacccctgactctggtgtcatacacccctgatcttctcctctctgtgcgcggagagcggaagaatgagaccgactccagcctgaatcaggaggcccccactgaagaggctagttctgtctttcccaagctgacaagcgcgaagccattcagttccttgcccgacctgcgaaacatcaacttatcctccagcaagctggagcctagcaagcctaattttagcattaaagaggcaaagtccgccagtgccgtgaatgttttcacaggaactgttcatctgacttccgtggagacaacccccgaatctacaacccagctctcaatttcacccaagtcccctcccactctggctgtgactgcatcttcagaatacagcggtcctgagactgatcgcgtggtgtcctttaagtgcaaaaaacagcagacacctccacaccttacccagaagaaaatgctgaagagcttcttacccactaagagcaaaagtttctgggaaagtccaaacacaaattggacattgcttaaatcagatatgaataagccccatcttatctccgaactgctgaccaaactgcagctgagcggtaagctctcctttttcccggcccattacaatcccaaactaggcatgaataacttgagtcaaaatccaagtctacctggagaatgtcattctagaagtgatagctccggagagaagaggcaactggacgttagctccctcttactccagagtcctcaatcatataatgtcaccctgagagatctcctggtgatcgctacccctgcacaactcgacccgagaccttgccggagccacgcaagtgctatgcgtgacccatgcatgcaggaccaggaggcgtacagtcattgcctcatcagtggacagaagggttgtgagcgctcctag

SEQ ID NO: 250599 - DNA, 1710 bp, Artificial Sequence
  derived and/or modified sequence
atggagggctgcctgggcgtggccgagctgcggaagctgagcaccttcagcgcctatttagaagaccattcgtacaatgtcgagcagatatggcgtgacatcgaggatgtgatcatcaagacgcttatctccgcccaccccattatccggcacaattatcacacctgctttcccaatcatacactcaactctgcgtgttttgagatcctggggtttgatattctcttggatcacaagctgaaaccctggctgttggaggtcaaccattctcctagtttcagcacagacagccgattagataaggaggtgaaggatggactgctatatgacacgcttgtgctcattaatttggagtcctgcgataagaaaaaggtgctcgaagaggagagacaaagaggccagttcctgcaacagtgttgcagcagggaaatgaggatcgaggaggccaagggctttagggccgttcaactgaagaagactgagacgtatgagaaggagaactgcggcggattcagacttatctacccttcccttaactccgaaaaatatgaaaaattcttccaggataacaactcgctctttcagaacaccgtagctagtagagctcgggaggaatacgcacgacagctgatccaggagctgaggcttaagcgagagaagaaaccattccagatgaaaaaaaaagtggaaatgcagggtgaatcggccggtgaacaggtgcgaaaaaagggtatgaggggttggcaacagaaacagcaacagaaggacaaggccgcgacacaggcgtctaagcaatacatacaacctctgactctggtgagctataccccagacctgctactgagcgttagaggcgagcgaaaaaatgagacagattcttctcttaatcaggaggcacctaccgaagaggctagctcagtatttcctaaactaaccagtgccaagcccttctcttcgcttcccgacctgaggaacatcaatctaagctcatcaaagctcgagccttcaaaaccaaattttagtattaaggaagccaagagcgcatctgccgtcaatgtgtttacgggaaccgtccacctcaccagcgtggaaaccacaccagagtctacaacgcagttatccatctcacccaagtcacccccaactctggctgtgaccgcaagtagtgaatattccggtccagaaactgacagggtggtgagctttaagtgcaagaagcagcagactccgccccatctgacacagaagaaaatgctaaagagctttttgccaaccaagtctaaaagtttttgggagtccccaaacaccaactggactctactgaagtctgacatgaataagccccatctgatttcggagcttctgacaaagttgcagctctccgggaaactctctttttttcctgcccattacaaccccaagctggggatgaacaacctgtcccagaacccgtccctgcccggggaatgtcactctagaagtgactcctcaggcgagaaaagacagctagacgtgtcttcattgctactgcagagtccccaatcttataacgtgactctcagggatctgcttgtgatcgctacccccgctcagttagatccccggccatgtcgcagccacgcctctgctatgagggacccttgtatgcaggaccaagaagcctactctcactgtctcatctctgggcagaagggctgtgagcggtcatag

SEQ ID NO: 250600 - DNA, 1755 bp, Artificial Sequence
  derived and/or modified sequence
atgcgcattgggactcctaccgctggacccggtcccagcgcagtgatggaggggtgcctgggcgtggcagaacttagaaaactctctaccttttccgcttacctggaagatcactcctacaacgtggagcagatatggagggacattgaagatgtcataataaaaacgctcatctcagcccacccaatcattaggcataactaccacacttgcttccctaaccacaccctcaactccgcttgctttgaaatacttggatttgatatcctgttggatcacaaattgaagccctggttgttagaggtcaaccactctccgagtttctcaactgacagtaggcttgataaagaagtgaaagatggtttgctgtatgacactcttgttttaatcaatctcgaaagctgcgacaaaaagaaagtgctcgaagaggaacggcagcggggacaattcctgcaacagtgttgctcccgcgagatgcggattgaggaggcgaaggggtttcgggcagtccagctgaaaaaaacggagacatatgagaaggagaattgtgggggatttcggcttatctacccttccctgaattcagagaaatacgaaaaatttttccaggacaacaattccctgtttcagaacacagtggcctctagggcacgcgaggagtacgcaaggcagctgattcaggagctgcgccttaagcgggaaaagaaaccttttcagatgaaaaagaaagtggaaatgcagggcgagagcgcaggcgagcaagtgcgtaaaaaagggatgcggggatggcagcagaaacagcaacaaaaggacaaagccgctacccaagccagcaagcagtatatccaacctctgactttggtgtcctatactcccgatttgctactgtccgtgcgaggcgaacgaaagaacgaaaccgatagctctctgaaccaagaggctcctaccgaggaagcctctagcgtcttccccaagcttaccagtgccaagcctttctcgtccctgcccgatttgcgcaacattaacctgagtagcagcaagctggagccgtcgaaacctaattttagcataaaggaagctaagtctgcctcagccgtgaacgtcttcaccggcacagtgcatctaacctccgtggagactacccccgagtcaaccacacaactgagcatctcaccaaagtccccaccgactctcgctgttaccgcgtcatccgagtatagcggacccgaaaccgatcgcgttgtgtcattcaagtgcaaaaagcagcagactccgcctcatctgactcagaaaaagatgctcaaatctttcctccccaccaaatccaaatccttttgggaatctccaaacactaattggacactcctcaagtcagatatgaacaagcctcatctgataagcgagctgttaacaaagttacagctgtccgggaaactgtcattttttcccgctcactacaaccccaagttaggaatgaataacctgtcacaaaatccctccttgccaggagaatgtcattccagatccgactcttccggcgaaaagcgacagctggacgtttcttctttgctcttgcaatcaccccagagttacaacgttaccctgagagatctactcgtaattgcaaccccagctcagcttgatccaagaccatgccgatcgcacgcttcagcgatgagagacccatgcatgcaggatcaggaggcctactctcattgcctcatcagtggacaaaagggatgcgagcggagttag

SEQ ID NO: 250601 - DNA, 1710 bp, Artificial Sequence
  derived and/or modified sequence
atggaggggtgtcttggagttgcagagttacggaaacttagcaccttttcagcttacttggaggaccacagctacaacgtggagcagatttggcgagacattgaagatgtgattataaaaactctcatctccgctcatccgattatcagacacaactaccacacttgtttccccaatcacaccctgaactccgcttgttttgagatactcgggtttgacatcctgttagatcacaagctgaagccctggctacttgaggtgaaccactcgccatccttcagcacagattcaaggttggacaaagaagtgaaagacggccttctgtacgatactttagtcctgatcaatttggaatcgtgtgacaagaagaaggttttggaggaagaacgacagagaggacagtttctccagcagtgctgctcccgagagatgaggattgaggaagccaaaggctttcgagcggtccagcttaagaaaaccgaaacttacgagaaagagaattgtgggggttttaggctgatttatccatcccttaacagtgagaagtatgagaagtttttccaagacaataactcacttttccagaatacagtggccagtcgtgctagagaggagtatgccaggcagttgatccaggaattgcgtctgaaaagagagaagaagccattccaaatgaaaaagaaggtcgagatgcagggtgaaagtgccggagaacaggttcgaaagaaaggaatgcgtggctggcagcagaagcaacaacagaaagacaaagctgccactcaggcttctaagcaatatatccagccgctaactctggtcagctataccccagacctactattgtccgtgaggggtgagagaaagaatgaaactgacagctctctgaatcaggaagctccgacagaggaagcgtcctcagtattccctaaacttactagcgctaaaccattttcctcacttcccgatttgcggaacatcaacctgagtagttcaaaacttgagccatccaaaccaaactttagcatcaaagaggccaaatccgcgtccgccgtaaatgtgttcacaggaaccgtgcacctcacatcagtggagaccacccccgaatctacaacacagctatcaatttcccccaaaagtccaccaaccttggcggtgacagcgtctagcgagtactcgggtcccgaaacggacagggtagtgtcatttaaatgcaagaaacagcaaacaccaccccacttaacccaaaaaaagatgctgaagtctttcctaccaactaagagtaagtccttctgggagagccccaataccaattggaccctcttgaagtcagacatgaacaagccccatctgatctctgagctgctgaccaagctgcagctgagcgggaagctgagcttttttccagcacactataaccctaagctgggaatgaataatttgtcccagaacccaagcttgccaggcgagtgccatagtaggagcgacagcagtggagagaaaaggcagctggacgtatcgtctttgctgctccagtctccacaaagttacaatgttacactgcgtgatctattggtaattgccactccagcccaactggacccccgtccctgtcgaagtcacgcctccgccatgcgggacccttgtatgcaggaccaagaggcatactcacactgtctaatctcgggacaaaagggctgcgagagatcctag

SEQ ID NO: 250602 - DNA, 2542 bp, Artificial Sequence
  derived and/or modified sequence
agtctaagggcacagaatggaaaggttctcattttcctcctccaatgagaattggcaccccaacagcaggccctgggccctcggctgtgatggaggggtgtctcggggtagcagaactaaggaagctctccaccttcagtgcatacttggaggaccacagctacaacgtggagcagatatggagggatattgaggacgtcatcatcaagaccctcatctcggcccaccccatcatcaggcataactaccacacctgcttccccaaccacacactcaacagcgcctgctttgagatcctgggctttgacattttgttggaccacaaactcaaaccctggctgctggaggtcaaccactctccaagcttctccaccgactctcggttggataaagaggtgaaagatggtctgctgtatgacaccttagtcctgatcaacctggaaagctgtgacaagaagaaagtcttggaggaggagagacaacgggggcagttcctgcagcagtgttgttctcgggagatgaggattgaggaagccaagggtttccgggccgtgcagttaaagaaaactgaaacgtatgagaaggaaaactgtggagggttccgactgatttatcccagtctgaattcggagaagtatgagaagtttttccaggacaacaactccctcttccagaatactgttgcttccagggctcgggaggagtatgcccggcaactgatccaggagctgagactaaaacgggagaaaaagcccttccaaatgaagaagaaggtagagatgcagggggaatcggcaggcgagcaagtgagaaagaagggcatgaggggctggcaacagaaacaacagcagaaagacaaggccgccacccaagcctccaaacagtacatccagccattgacattagtatcctacacacctgacttgctcttgagtgtcagaggtgaaaggaaaaatgaaacagacagcagcctcaaccaggaggctcccacggaggaggccagctctgttttccccaagctgacgtctgcgaagcccttcagttctctacccgatctgaggaatatcaatctcagcagctcgaagttggagcccagtaaacccaacttcagcatcaaggaggccaagtctgcctctgcagtgaacgtattcactggcactgtgcacttaacctccgtagaaaccaccccagaatccaccacccaactctcaatctccccaaagtctccgccaaccctggctgtgaccgccagctctgagtacagtggcccagagacggacagggtggtatcctttaaatgcaagaagcagcagacccctccacacttaacccagaagaaaatgttaaaatcttttctgcccacaaaatccaagagcttctgggagagtccgaacacaaactggactttgctaaagagtgacatgaacaagccacatttgatatccgagctactcaccaagcttcaactgagtgggaagctctccttcttcccagctcactacaaccccaagctggggatgaataacctgtcacaaaacccctccctgcctggggagtgccactcccgcagtgacagctctggcgagaagaggcagctggatgtgtcctccctcctcttgcagagtcctcagagctataatgttactctgagggacctgctggtgattgccactccagcccaactggatccaaggccttgtagaagccacgcaagtgctatgagggacccatgtatgcaggatcaagaagcatacagccattgcctgatctctggccaaaaaggatgtgagaggagctagaatcagactggatctctgccacttttcccttcctacctcttaacttgcaggaaacaatgtgtctcttccgacagtgtctccagtgttcacagaatcaactgaagttttgtttgctcatctagatatactggtcttccattagttcctagtagcagcaatggggccaacagccctgcctctgttccctcccagttagcttacagtgctacaggaccatgatttctggggttggattggtgctgccccaggacacactccagttgccgtaccagtggcacttctctgggttcttcacatggcaccatcatccagaatactcccccagataaagcaacttcgggagtagtgtttcagagaaggactcatgatttccaggagtcaaaagccctcagtccaccaacagaactatgccagttggtcttcgtctccaagataaaagatgaggtcagggatgggcatggtgcataactctgagccctgagtgagagaactgaggcagctgcaacttcacaaggtcaaggcccgacctccgcccatccccaccagcccaaagacttgccacctcagtgcccgagcatcctctggtgacctccctcaccagcccaacttaatctcaccagtgaaaacagaggtgaggcgagagtacccagcctgaagatgcttcttctatcagcctgcagaaatgttacactttcccttcaggcatccattaataaaagaaattgccatgcttactgccagga

SEQ ID NO: 250603 - DNA, 2548 bp, Artificial Sequence
  derived and/or modified sequence
atttttccttagtctaagggcacagaatggaaaggttctcattttcctcctccaatgagaattggcaccccaacagcaggccctgggccctcggctgtgatggaggggtgtctcggggtagcagaactaaggaagctctccaccttcagtgcatacttggaggaccacagctacaacgtggagcagatatggagggatattgaggacgtcatcatcaagaccctcatctcggcccaccccatcatcaggcataactaccacacctgcttccccaaccacacactcaacagcgcctgctttgagatcctgggctttgacattttgttggaccacaaactcaaaccctggctgctggaggtcaaccactctccaagcttctccaccgactctcggttggataaagaggtgaaagatggtctgctgtatgacaccttagtcctgatcaacctggaaagctgtgacaagaagaaagtcttggaggaggagagacaacgggggcagttcctgcagcagtgttgttctcgggagatgaggattgaggaagccaagggtttccgggccgtgcagttaaagaaaactgaaacgtatgagaaggaaaactgtggagggttccgactgatttatcccagtctgaattcggagaagtatgagaagtttttccaggacaacaactccctcttccagaatactgttgcttccagggctcgggaggagtatgcccggcaactgatccaggagctgagactaaaacgggagaaaaagcccttccaaatgaagaagaaggtagagatgcagggggaatcggcaggcgagcaagtgagaaagaagggcatgaggggctggcaacagaaacaacagcagaaagacaaggccgccacccaagcctccaaacagtacatccagccattgacattagtatcctacacacctgacttgctcttgagtgtcagaggtgaaaggaaaaatgaaacagacagcagcctcaaccaggaggctcccacggaggaggccagctctgttttccccaagctgacgtctgcgaagcccttcagttctctacccgatctgaggaatatcaatctcagcagctcgaagttggagcccagtaaacccaacttcagcatcaaggaggccaagtctgcctctgcagtgaacgtattcactggcactgtgcacttaacctccgtagaaaccaccccagaatccaccacccaactctcaatctccccaaagtctccgccaaccctggctgtgaccgccagctctgagtacagtggcccagagacggacagggtggtatcctttaaatgcaagaagcagcagacccctccacacttaacccagaagaaaatgttaaaatcttttctgcccacaaaatccaagagcttctgggagagtccgaacacaaactggactttgctaaagagtgacatgaacaagccacatttgatatccgagctactcaccaagcttcaactgagtgggaagctctccttcttcccagctcactacaaccccaagctggggatgaataacctgtcacaaaacccctccctgcctggggagtgccactcccgcagtgacagctctggcgagaagaggcagctggatgtgtcctccctcctcttgcagagtcctcagagctataatgttactctgagggacctgctggtgattgccactccagcccaactggatccaaggccttgtagaagccacgcaagtgctatgagggacccatgtatgcaggatcaagaagcatacagccattgcctgatctctggccaaaaaggatgtgagaggagctagaatcagactggatctctgccacttttcccttcctacctcttaacttgcaggaaacaatgtgtctcttccgacagtgtctccagtgttcacagaatcaactgaagttttgtttgctcatctagatatactggtcttccattagttcctagtagcagcaatggggccaacagccctgcctctgttccctcccagttagcttacagtgctacaggaccatgatttctggggttggattggtgctgccccaggacacactccagttgccgtaccagtggcacttctctgggttcttcacatggcaccatcatccagaatactcccccagataaagcaacttcgggagtagtgtttcagagaaggactcatgatttccaggagtcaaaagccctcagtccaccaacagaactatgccagttggtcttcgtctccaagataaaagatgaggtcagggatgggcatggtgcataactctgagccctgagtgagagaactgaggcagctgcaacttcacaaggtcaaggcccgacctccgcccatccccaccagcccaaagacttgccacctcagtgcccgagcatcctctggtgacctccctcaccagcccaacttaatctcaccagtgaaaacagaggtgaggcgagagtacccagcctgaagatgcttcttctatcagcctgcagaaatgttacactttcccttcaggcatccattaataaaagaaattgccatgcttactgcc

SEQ ID NO: 250604 - protein, 282 aa, Artificial Sequence
  derived and/or modified sequence
MALEAAGGPPEETLSLWKREQARLKAHVVDRDTEAWQRDPAFSGLQRVGGVDVSFVKGDSVRACASLVVLSFPELEVVYEESRMVSLTAPYVSGFLAFREVPFLLELVQQLREKEPGLMPQVLLVDGNGVLHHRGFGVACHLGVLTDLPCVGVAKKLLQVDGLENNALHKEKIRLLQTRGDSFPLLGDSGTVLGMALRSHDRSTRPLYISVGHRMSLEAAVRLTCCCCRFRIPEPVRQADICSREHIRKSLGLPGPPTPRSPKAQRPVACPKGDSGESSALC

SEQ ID NO: 250605 - DNA, 849 bp, Artificial Sequence
  derived and/or modified sequence
atggccctggaggccgccggcggcccccccgaggagaccctgagcctgtggaagagagagcaggccagactgaaggcccacgtggtggacagagacaccgaggcctggcagagagaccccgccttcagcggcctgcagagagtgggcggcgtggacgtgagcttcgtgaagggcgacagcgtgagagcctgcgccagcctggtggtgctgagcttccccgagctggaggtggtgtacgaggagagcagaatggtgagcctgaccgccccctacgtgagcggcttcctggccttcagagaggtgcccttcctgctggagctggtgcagcagctgagagagaaggagcccggcctgatgccccaggtgctgctggtggacggcaacggcgtgctgcaccacagaggcttcggcgtggcctgccacctgggcgtgctgaccgacctgccctgcgtgggcgtggccaagaagctgctgcaggtggacggcctggagaacaacgccctgcacaaggagaagatcagactgctgcagaccagaggcgacagcttccccctgctgggcgacagcggcaccgtgctgggcatggccctgagaagccacgacagaagcaccagacccctgtacatcagcgtgggccacagaatgagcctggaggccgccgtgagactgacctgctgctgctgcagattcagaatccccgagcccgtgagacaggccgacatctgcagcagagagcacatcagaaagagcctgggcctgcccggcccccccacccccagaagccccaaggcccagagacccgtggcctgccccaagggcgacagcggcgagagcagcgccctgtgctag

SEQ ID NO: 250606 - DNA, 849 bp, Artificial Sequence
  derived and/or modified sequence
atggctctggaggcggcaggaggccctcccgaagagacgctctctctttggaagcgcgagcaggctaggttaaaagctcacgtggtggatcgcgacacggaggcatggcaacgggacccagcattttctggtttgcaacgcgtcggtggagtcgacgtgagttttgtgaagggcgactctgtgcgagcgtgtgcttccttggtagttctcagctttccagagcttgaagtcgtctatgaagaatcaaggatggttagtctaaccgcaccatacgtatctgggtttctggcattcagggaagtgccctttttgctggagctggtgcaacagctgcgcgaaaaggagcctggcttgatgcctcaggttctcttagtggatggaaacggcgtactccaccacaggggcttcggcgtggcctgtcatctgggggtgttgacagacctgccatgtgttggggtggccaagaagcttctgcaggtggatggtctggaaaataatgccctccacaaagagaaaattcgccttctgcagaccagaggcgatagttttcctcttctgggagatagtggtaccgtcttgggcatggctcttcgcagccacgatcgatccactaggccactgtacataagcgtgggccatagaatgtccttggaggccgctgtcagactgacctgttgctgctgcaggttccggataccagagcctgtaaggcaagctgatatatgcagtcgcgaacatattcgcaagagcctgggcctacctgggccccccacgccccgcagccctaaggcccagcgacctgtcgcttgtcccaaaggagactcaggggagagcagcgctctctgttag

SEQ ID NO: 250607 - DNA, 2815 bp, Artificial Sequence
  derived and/or modified sequence
gtgcggaaggggtgcccgggacgaagccatggccctggaggcggcgggagggccgccggaggaaacgctgtcactgtggaaacgggagcaagctcggctgaaggcccacgtcgtagaccgggacaccgaggcgtggcagcgagaccccgccttctcgggtctgcagagggtcgggggcgttgacgtgtccttcgtgaaaggggacagtgtccgcgcttgtgcttccctggtggtgctcagcttccctgagctcgaggtggtgtatgaggagagccgcatggtcagcctcacagccccctacgtgtcgggcttcctggccttccgagaggtgcccttcttgctggagctggtgcagcagctgcgggagaaggagccgggcctcatgccccaggtccttcttgtggatggaaacggggtactccaccaccgaggctttggggtggcctgccaccttggcgtccttacagacctgccgtgtgttggggtggccaagaaacttctgcaggtggatgggctggagaacaacgccctgcacaaggagaagatccgactcctgcagactcgaggagactcattccctctgctgggagactctgggactgtcctgggaatggccctgaggagccacgaccgcagcaccaggcccctctacatctccgtgggccacaggatgagcctggaggccgctgtgcgcctgacttgctgctgctgcaggttccggatcccagagcccgtgcgccaggctgacatctgctcccgagagcacatccgcaagtcgctgggactccccgggccacccacaccgaggagcccgaaggcgcagaggccagtggcatgccccaaaggagactccggagagtcctcagcactttgttgaacgtggtggtgagagcacacgtcctcgtctcattcctgatcgaacgcggtggtgagagcacacgtcctcgtctcgttcctgatcgaacgcggtggtgagagcacacatcctcgtctcgttcctgatcgaacgcggtggtgagagcacacgtcctcgtctcgttcctgatcgaacgtggtggtgagagcacacgtccttgtcttgttcctgatcttaagggaacgtttgcagtctttcaccactagatgtgatgtgagctgttagattttcaaggatgctcttcatccagctgaagacggtcccttctagtcctaatttgttaagtgtttttatccttaaagggtactggattttgtcaaatgcttttctggcctctattgaaaagatcctgtgttcttctgtgaatatgaggtgttacattgattgattttcatatgttgagccagtttccatttgtggaatacatctaactcggtcatggtgtataatccatttactctgctgctgaatgtgatttgcttgtattttggtgcggatttttacatctgtatttataagggatattggtctggtgtttttttatgatgtcttcctttggttttgatatcaggataatattagcctcatagattgggttaggaaatgttctctcctccgttttttttggaagagagagattggtgttaattcttgctagaacctttggtagaatttgccagtaagcctatctggtcttgggtctttgggaggattttgattcgattcaatctatgtatttgttatagatcgttcggattgtccatccttgagtcagttgctagcttgtgtgtttcttggagtttttccgtttcgtccatgttatctcatctgttggcataccgtcgttcacgggattttattgatgtgtgtgaggtctctgagaacgtccctgccttcactcctgcttttagtcactggcatcttcttttaacttgggccatctggccgtgcatggttttgggagagtcctccttgactctgcagatgctgagcagtgatctggctgggaaaggggaccaggagtgcagggcacctgctgaggactcacctaagcccaagagtcagagagtcggagctccaaccacatctgcctgcatgcctttcccaggctctccccaggcggacagccagcaccccctccccaaagaccgggcagttcctgaccagcaccccaccaagtcctcagtaaggcctgtctttgggggagcagggtttcaggaggacagtgggggtggtgtagaactcatggctggcggttccgggcctctcaggaagctttgccactgggcttggggttaagtgggtgtggggctccgaaccctaaatgggtgagagttgaaatgaaagcggcacctgtagtccgtttggggtgcaggtgtgtgccaggggtcttcagccccggctgatggccacatgaaccacatgaggagaggcagggcgtgtcagcagcaaacctaagtgtgtgctcatttctgtgggcccttactctgtgacactgcagctctccagagagacgctttgaaaacaaaacaggaaagaacacacggccccgcgtctgttgcctgagtcactgtattccttaaaaggtgaaggaccctggtccttggcttttcgtgcacatgagaaaatgttggccaaggttagcgattatgcttctgtaatctgtaaccagaagtgctcttatgcccaaaccttgatgtgattctgctgtaatgtaacttcggagccagctggatggatgtgactgtgcaggtcctgagccccggcccccgtaaccaagcagtgggccgagacactgagccgggcagtcaaacaggagctctctaaggctgctcccgggctgggacctgggtctaggattctcagtaagacctttgaataaaactaacttgaattctt

SEQ ID NO: 250608 - DNA, 849 bp, Artificial Sequence
  derived and/or modified sequence
atggccctggaggccgccggcggccccccagaggagaccctgagcctgtggaagcgggagcaggcccggctgaaggcccacgtggtggaccgggacacagaggcctggcagagggaccctgccttcagcggcctgcagagggtgggcggcgtggatgtgtcctttgtgaagggggacagcgtgcgggcctgtgccagcctggtggtgctgtccttccctgagctggaggtggtgtatgaggagagcaggatggtgtccctgacagccccctacgtgtctggcttcctggccttccgggaggtgcccttcctgctggagctggtgcagcagctgcgggagaaggagcccggcctgatgccccaggtgctgctggtggatggaaatggagtgctgcaccaccggggcttcggcgtggcctgccacctgggcgtgctgacagacctgccctgtgtgggcgtggccaagaagctgctgcaggtggatggcctggagaacaatgccctgcacaaggagaagatccggctgctgcagaccaggggggacagcttccccctgctgggggacagcggcaccgtgctgggcatggccctgcggagccatgacaggagcacccggcccctgtacatctctgtgggccacaggatgagcctggaggccgctgtgcggctgacctgctgctgctgccgcttccgcatccctgagcctgtgcggcaggccgacatctgcagccgggagcacatcaggaagagcctgggcctgcccggcccccccacccccaggagccccaaggcccagaggcctgtggcctgccccaagggggacagcggggagagcagcgccctgtgctag

SEQ ID NO: 250609 - DNA, 849 bp, Artificial Sequence
  derived and/or modified sequence
atggccctggaggccgccggcggcccccccgaggagaccctgagcttatggaaaagagagcaggcacggctgaaagcacacgtcgtggatcgggatacagaagcgtggcagagggatccggccttctctggcctgcaacgggtgggaggggtcgatgtcagctttgtgaagggggactctgtgcgggcatgtgcttccctcgttgtcctatcatttcctgaacttgaggtggtctatgaagaatccagaatggtgtccctgacagctccttatgtgtccgggttcttagcatttcgcgaggtccccttcctgctggagctggtgcagcagctacgggagaaggaaccggggctgatgcctcaagtgcttttagtcgacggaaatggagttctgcaccatcgcggctttggagtggcatgccacctaggcgtgttgactgacctgccctgtgtcggagtagcgaaaaagctcctacaggtcgacgggcttgagaacaatgctctacataaagagaaaatccggttacttcaaacgcggggagactcgttccctctactcggcgatagcggaaccgtcctggggatggccctgcggagccatgatcgcagcacgcggcccctgtatatctcggtggggcaccggatgtcactggaagctgcagtccggctgacttgttgctgctgcagattccgcatacctgagcccgtgagacaggctgatatttgctcccgggaacacataagaaagagtttgggtctgccgggcccacccacgcctcgcagccctaaggcccagcgcccagtggcgtgtcctaagggggatagcggtgaatctagtgcgttgtgctag

SEQ ID NO: 250610 - DNA, 849 bp, Artificial Sequence
  derived and/or modified sequence
atggctctggaagctgcgggagggccacccgaggagacgttgtcactgtggaaaagagaacaggctcgccttaaggctcatgtggtggacagagatactgaggcttggcagagagaccccgctttcagcggactccaacgcgtcggcggagtagatgtctcttttgttaaaggcgatagcgttagagcttgtgcttctctggtcgtgctgtccttccccgagctggaagtggtctacgaagagtctagaatggtctcattaacggcaccctatgtttcggggttcctggctttcagggaggtgcccttcctcctcgaactggtgcagcagctgagagaaaaagagccaggcttgatgccccaagtcctgcttgtggatggcaacggggtcctacaccatcggggattcggtgtggcgtgtcatttgggtgttctcacagatctcccatgcgttggagtggctaaaaaactgctgcaggtagatgggctggaaaacaacgccttgcacaaggagaagatccgactactccagacaaggggggattcctttcccctcctaggcgattccggtactgtgctcggcatggcattaaggtctcacgatcgatcaacccggccactgtacataagcgtaggacaccggatgagcctcgaggctgcagtcagactgacatgctgctgctgtaggttcaggattccagagcccgttagacaggcggacatctgtagtagagaacacatcagaaagtccctcggcttgccaggccctccgacgcccaggtcacccaaagctcagaggcctgtcgcatgcccaaaaggcgactcaggagagtcttccgctctatgctag

SEQ ID NO: 250611 - protein, 4457 aa, Artificial Sequence
  derived and/or modified sequence
MTMAPDVRLEYLEEVASIVLKFKPDKWSKLIGAEENVALFTEFFEKPDVQVLVLTLNAAGMIIPCLGFPQSLKSKGVYFIKTKSENINKDNYRARLLYGDISPTPVDQLIAVVEEVLSSLLNQSENMAGWPQVVSEDIVKQVHRLKNEMFVMSGKIKGKTLLPIPEHLGSLDGTLESMERIPSSLDNLLLHAIETTIIDWSHQIRDVLSKDSAQALLDGLHPLPQVEFEFWDTRLLNLKCIHEQLNRPKVNKIVEILEKAKSCYWPALQNVYTNVTEGLKEANDIVLYLKPLRILLEEMEQADFTMLPTFIAKVLDTICFIWATSEYYNTPARIIVILQEFCNQIIEMTRTFLSPEEVLKGLQGEIEEVLSGISLAVNVLKELYQTYDFCCVNMKLFFKDKEPVPWEFPSSLAFSRINSFFQRIQTIEELYKTAIEFLKLEKIELGGVRGNLLGSLVTRIYDEVFELVKVFADCKYDPLDPGDSNFDRDYADFEIKIQDLDRRLATIFCQGFDDCSCIKSSAKLLYMCGGLMERPLILAEVAPRYSVMLELFDAELDNAKILYDAQMAASEEGNIPLIHKNMPPVAGQLKWSLELQERLEVSMKHLKHVEHPVMSGAEAKLTYQKYDEMMELLRCHREKIYQQWVAGVDQDCHFNLGQPLILRDAASNLIHVNFSKALVAVLREVKYLNFQQQKEIPDSAESLFSENETFRKFVGNLELIVGWYNEIKTIVKAVEFLLIKSELEAIDVKLLSAETTLFWNGEGVFQYIQEVREILHNLQNRMQKAKQNIEGISQAMKDWSANPLFERKDNKKEALLDLDGRIANLNKRYAAVRDAGVKIQAMVAENAELFRADTLSLPWKDYVIYIDDMVLDEFDQFIRKSLSFLMDNMESIAPLFEIRMELDEDGLTFNPTLEVGSDRGFLALIEGLVNDIYNVARLIPRLAKDRMNYKMDLEDNTDLIEMREEVSSLVINAMKEAEEYQDSFERYSYLWTDNLQEFMKNFLIYGCAVTAEDLDTWTDDTIPKTPPTLAQFQEQIDSYEKLYEEVSKCENTKVFHGWLQCDCRPFKQALLSTIRRWGFMFKRHLSNHVTNSLADLEAFMKVARMGLTKPLKEGDYDGLVEVMGHLMKVKERQAATDNMFEPLKQTIELLKTYGEEMPEEIHLKLQELPEHWANTKKLAIQVKLTVAPLQANEVSILRRKCQQFELKQHEFRERFRREAPFSFSDPNPYKSLNKQQKSISAMEGIMEALSKSGGLFEVPVPDYKQLKACHREVRLLKELWDMVVVVNTSIEDWKTTKWKDINVEQMDIDCKKFAKDMRSLDKEMKTWDAFVGLDNTVKNVITSLRAVSELQNPAIRERHWQQLMQATQVKFKMSEETTLADLLQLNLHSYEDEVRNIVDKAVKESGMEKVLKALDSTWSMMEFQHEPHPRTGTMMLKSSEVLVETLEDNQVQLQNLMMSKYLAHFLKEVTSWQQKLSTADSVISIWFEVQRTWSHLESIFIGSEDIRTQLPGDSQRFDDINQEFKALMEDAVKTPNVVEATSKPGLYNKLEALKKSLAICEKALAEYLETKRLAFPRFYFVSSADLLDILSNGNDPVEVSRHLSKLFDSLCKLKFRLDASDKPLKVGLGMYSKEDEYMVFDQECDLSGQVEVWLNRVLDRMCSTLRHEIPEAVVTYEEKPREQWILDYPAQVALTCTQIWWTTEVGLAFARLEEGYENAIRDYNKKQISQLNVLITLLMGNLNAGDRMKIMTICTIDVHARDVVAKMIVVESSQAFTWQAQLRHRWDEEKRHCFANICDAQIQYSYEYLGNTPRLVITPLTDRCYITLTQSLHLIMGGAPAGPAGTGKTETTKDLGRALGTMVYVFNCSEQMDYKSCGNIYKGLAQTGAWGCFDEFNRISVEVLSVIAVQVKCVQDAIRAKKKAFNFLGEIIGLIPTVGIFITMNPGYAGRAELPENLKALFRPCAMVVPDFELICEIMLMAEGFLEARLLARKFITLYTLCKELLSKQDHYDWGLRAIKSVLVVAGSLKRGDPSRAEDQVLMRALRDFNIPKIVTDDLPVFMGLIGDLFPALDVPRKRDLNFEKIIKQSIVELKLQAEDSFVLKVVQLEELLQVRHSVFIVGNAGSGKSQVLKSLNKTYQNLKRKPVAVDLDPKAVTCDELFGIINPVTREWKDGLFSTIMRDLANITHDGPKWIILDGDIDPMWIESLNTVMDDNKVLTLASNERIPLNRTMRLVFEISHLRTATPATVSRAGILYINPADLGWNPVVSSWIERRKVQSEKANLMILFDKYLPTCLDKLRFGFKKITPVPEITVIQTILYLLECLLTEKTVPPDSPRELYELYFVFTCFWAFGGAMFQDQLVDYRVEFSKWWINEFKTIKFPSQGTIFDYYIDPDTKKFLPWTDKVPSFELDPDVPLQASLVHTTETIRIRYFMDLLMEKSWPVMLVGNAGTGKSVLMGDKLESLNTDNYLVQAVPFNFYTTSAMLQGVLEKPLEKKSGRNYGPPGTKKLVYFIDDMNMPEVDKYGTVAPHTLIRQHMDHRHWYDRHKLTLKDIHNCQYVACMNPTSGSFTIDSRLQRHFCVFAVSFPGQEALTTIYNTILTQHLAFRSVSMAIQRISSQLVAAALALHQKITATFLPTAIKFHYVFNLRDLSNIFQGLLFSTAEVLKTPLDLVRLWLHETERVYGDKMVDEKDQETLHRVTMASTKKFFDDLGDELLFAKPNIFCHFAQGIGDPKYVPVTDMAPLNKLLVDVLDSYNEVNAVMNLVLFEDAVAHICRINRILESPRGNALLVGVGGSGKQSLSRLAAYISGLDVFQITLKKGYGIPDLKIDLAAQYIKAAVKNVPSVFLMTDSQVAEEQFLVLINDLLASGEIPGLFMEDEVENIISSMRPQVKSLGMNDTRETCWKFFIEKVRRQLKVILCFSPVGSVLRVRARKFPAVVNCTAIDWFHEWPEDALVSVSARFLEETEGIPWEVKASISFFMSYVHTTVNEMSRVYLATERRYNYTTPKTFLEQIKLYQNLLAKKRTELVAKIERLENGLMKLQSTASQVDDLKAKLAIQEAELKQKNESADQLIQVVGIEAEKVSKEKAIADQEEVKVEVINKNVTEKQKACETDLAKAEPALLAAQEALDTLNKNNLTELKSFGSPPDAVVNVTAAVMILTAPGGKIPKDKSWKAAKIMMGKVDTFLDSLKKFDKEHIPEACLKAFKPYQGNPTFDPEFIRSKSTAAAGLCSWCINIVRFYEVYCDVAPKRQALEEANAELAEAQEKLSRIKNKIAELNANLSNLTSAFEKATAEKIKCQQEADATNRVILLANRLVGGLASENIRWAESVENFRSQGVTLCGDVLLISAFVSYVGYFTKKYRNELMEKFWIPYIHNLKVPIPITNGLDPLSLLTDDADVATWNNQGLPSDRMSTENATILGNTERWPLIVDAQLQGIKWIKNKYRSELKAIRLGQKSYLDVIEQAISEGDTLLIENIGETVDPVLDPLLGRNTIKKGKYIKIGDKEVEYHPKFRLILHTKYFNPHYKPEMQAQCTLINFLVTRDGLEDQLLAAVVAKERPDLEQLKANLTKSQNEFKIVLKELEDSLLARLSAASGNFLGDTALVENLETTKHTASEIEEKVVEAKITEVKINEARENYRPAAERASLLYFILNDLNKINPVYQFSLKAFNVVFEKAIQRTTPANEVKQRVINLTDEITYSVYMYTARGLFERDKLIFLAQVTFQVLSMKKELNPVELDFLLRFPFKAGVVSPVDFLQHQGWGGIKALSEMDEFKNLDSDIEGSAKRWKKLVESEAPEKEIFPKEWKNKTALQKLCMVRCLRPDRMTYAIKNFVEEKMGSKFVEGRSVEFSKSYEESSPSTSIFFILSPGVDPLKDVEALGKKLGFTIDNGKLHNVSLGQGQEVVAENALDVAAEKGHWVILQNIHLVARWLGTLDKKLEHYSTGSHEDYRVFISAEPAPSPETHIIPQGILENAIKITNEPPTGMHANLHKALDLFTQDTLEMCTKEMEFKCMLFALCYFHAVVAERRKFGAQGWNRSYPFNNGDLTISINVLYNYLEANPKVPWDDLRYLFGEIMYGGHITDDWDRRLCRTYLAEYIRTEMLEGDVLLAPGFQIPPNLDYKGYHEYIDENLPPESPYLYGLHPNAEIGFLTVTSEKLFRTVLEMQPKETDSGAGTGVSREEKVKAVLDDILEKIPETFNMAEIMAKAAEKTPYVVVAFQECERMNILTNEMRRSLKELNLGLKGELTITTDVEDLSTALFYDTVPDTWVARAYPSMMGLAAWYADLLLRIRELEAWTTDFALPTTVWLAGFFNPQSFLTAIMQSMARKNEWPLDKMCLSVEVTKKNREDMTAPPREGSYVYGLFMEGARWDTQTGVIAEARLKELTPAMPVIFIKAIPVDRMETKNIYECPVYKTRIRGPTYVWTFNLKTKEKAAKWILAAVALLLQV

SEQ ID NO: 250612 - protein, 4485 aa, Artificial Sequence
  derived and/or modified sequence
MTMAPDVRLEYLEEVASIVLKFKPDKWSKLIGAEENVALFTEFFEKPDVQVLVLTLNAAGMIIPCLGFPQSLKSKGVYFIKTKSENINKDNYRARLLYGDISPTPVDQLIAVVEEVLSSLLNQSENMAGWPQVVSEDIVKQVHRLKNEMFVMSGKIKGKTLLPIPEHLGSLDGTLESMERIPSSLDNLLLHAIETTIIDWSHQIRDVLSKDSAQALLDGLHPLPQVEFEFWDTRLLNLKCIHEQLNRPKVNKIVEILEKAKSCYWPALQNVYTNVTEGLKEANDIVLYLKPLRILLEEMEQADFTMLPTFIAKVLDTICFIWATSEYYNTPARIIVILQEFCNQIIEMTRTFLSPEEVLKGLQGEIEEVLSGISLAVNVLKELYQTYDFCCVNMKLFFKDKEPVPWEFPSSLAFSRINSFFQRIQTIEELYKTAIEFLKLEKIELGGVRGNLLGSLVTRIYDEVFELVKVFADCKYDPLDPGDSNFDRDYADFEIKIQDLDRRLATIFCQGFDDCSCIKSSAKLLYMCGGLMERPLILAEVAPRYSVMLELFDAELDNAKILYDAQMAASEEGNIPLIHKNMPPVAGQLKWSLELQERLEVSMKHLKHVEHPVMSGAEAKLTYQKYDEMMELLRCHREKIYQQWVAGVDQDCHFNLGQPLILRDAASNLIHVNFSKALVAVLREVKYLNFQQQKEIPDSAESLFSENETFRKFVGNLELIVGWYNEIKTIVKAVEFLLIKSELEAIDVKLLSAETTLFWNGEGVFQYIQEVREILHNLQNRMQKAKQNIEGISQAMKDWSANPLFERKDNKKEALLDLDGRIANLNKRYAAVRDAGVKIQAMVAENAELFRADTLSLPWKDYVIYIDDMVLDEFDQFIRKSLSFLMDNMVIDESIAPLFEIRMELDEDGLTFNPTLEVGSDRGFLALIEGLVNDIYNVARLIPRLAKDRMNYKMDLEDNTDLIEMREEVSSLVINAMKEAEEYQDSFERYSYLWTDNLQEFMKNFLIYGCAVTAEDLDTWTDDTIPKTPPTLAQFQEQIDSYEKLYEEVSKCENTKVFHGWLQCDCRPFKQALLSTIRRWGFMFKRHLSNHVTNSLADLEAFMKVARMGLTKPLKEGDYDGLVEVMGHLMKVKERQAATDNMFEPLKQTIELLKTYGEEMPEEIHLKLQELPEHWANTKKLAIQVKLTVAPLQANEVSILRRKCQQFELKQHEFRERFRREAPFSFSDPNPYKSLNKVFLLKGIMEALSKSGGLFEVPVPDYKQLKACHREVRLLKELWDMVVVVNTSIEDWKTTKWKDINVEQMDIDCKKFAKDMRSLDKEMKTWDAFVGLDNTVKNVITSLRAVSELQNPAIRERHWQQLMQATQVKFKMSEETTLADLLQLNLHSYEDEVRNIVDKAVKESGMEKVLKALDSTWSMMEFQHEPHPRTGTMMLKSSEVLVETLEDNQVQLQNLMMSKYLAHFLKEVTSWQQKLSTADSVISIWFEVQRTWSHLESIFIGSEDIRTQLPGDSQRFDDINQEFKALMEDAVKTPNVVEATSKPGLYNKLEALKKSLAICEKALAEYLETKRLAFPRFYFVSSADLLDILSNGNDPVEVSRHLSKLFDSLCKLKFRLDASDKPLKVGLGMYSKEDEYMVFDQECDLSGQVEVWLNRVLDRMCSTLRHEIPEAVVTYEEKPREQWILDYPAQIWWTTEVGLAFARLEEGYENAIRDYNKKQISQLNVLITLLMGNLNAGDRMKIMTICTIDVHARDVVAKMIVESSQAFTWQAQLRHRWDEEKRHCFANICDAQIQYSYEYLGNTPRLVITPLTDRCYITLTQSLHLIMGGAPAGPAGTGKTETTKDLGRALGTMVYVFNCSEQMDYKSCGNIYKGLAQTGAWGCFDEFNRISVEVLSVIAVQVKCVQDAIRAKKKAFNFLGEIIGLIPTVGIFITMNPGYAGRAELPENLKALFRPCAMVVPDFELICEIMLMAEGFLEARLLARKFITLYTLCKELLSKQDHYDWGLRAIKSVLVVAGSLKRGDPSRAEDQVLMRALRDFNIPKIVTDDLPVFMGLIGDLFPALDVPRKRDLNFEKIIKQSIVELKLQAEDSFVLKVVQLEELLQVRHSVFIVGNAGSGKSQVLKSLNKTYQNLKRKPVAVDLDPKAVTCDELFGIINPVTREWKDGLFSTIMRDLANITHDGPKWIILDGDIDPMWIESLNTVMDDNKVLTLASNERIPLNRTMRLVFEISHLRTATPATVSRAGILYINPADLGWNPVVSSWIERRKVQSEKANLMILFDKYLPTCLDKLRFGFKKITPVPEITVIQTILYLLECLLTEKTVPPDSPRELYELYFVFTCFWAFGGAMFQDQLVDYRVEFSKWWINEFKTIKFPSQGTIFDYYIDPDTKKFLPWTDKVPSFELDPDVPLQASLVHTTETIRIRYFMDLLMEKSWPVMLVGNAGTGKSVLMGDKLESLNTDNYLVQAVPFNFYTTSAMLQGVLEKPLEKKSGRNYGPPGTKKLVYFIDDMNMPEVDKYGTVAPHTLIRQHMDHRHWYDRHKLTLKDIHNCQYVACMNPTSGSFTIDSRLQRHFCVFAVSFPGQEALTTIYNTILTQHLAFRSVSMAIQRISSQLVAAALALHQKITATFLPTAIKFHYVFNLRDLSNIFQGLLFSTAEVLKTPLDLVRLWLHETERVYGDKMVDEKDQETLHRVTMASTKKFFDDLGDELLFAKPNIFCHFAQGIGDPKYVPVTDMAPLNKLLVDVLDSYNEVNAVMNLVLFEDAVAHICRINRILESPRGNALLVGVGGSGKQSLSRLAAYISGLDVFQITLKKGYGIPDLKIDLAAQYIKAAVKNVPSVFLMTDSQVAEEQFLVLINDLLASGEIPGLFMEDEVENIISSMRPQVKSLGMNDTRETCWKFFIEKVRRQLKVILCFSPVGSVLRVRARKFPAVVNCTAIDWFHEWPEDALVSVSARFLEETEGIPWEVKASISFFMSYVHTTVNEMSRVYLATERRYNYTTPKTFLEQIKLYQNLLAKKRTELVAKIERLENGLMKLQSTASQVDDLKAKLAIQEAELKQKNESADQLIQVVGIEAEKVSKEKAIADQEEVKVEVINKNVTEKQKACETDLAKAEPALLAAQEALDTLNKNNLTELKSFGSPPDAVVNVTAAVMILTAPGGKIPKDKSWKAAKIMMGKVDTFLDSLKKFDKEHIPEACLKAFKPYQGNPTFDPEFIRSKSTAAAGLCSWCINIVRFYEVYCDVAPKRQALEEANAELAEAQEKLSRIKNKIAELNANLSNLTSAFEKATAEKIKCQQEADATNRVILLANRLVGGLASENIRWAESVENFRSQGVTLCGDVLLISAFVSYVGYFTKKYRNELMEKFWIPYIHNLKVPIPITNGLDPLSLLTDDADVATWNNQGLPSDRMSTENATILGNTERWPLIVDAQLQGIKWIKNKYRSELKAIRLGQKSYLDVIEQAISEGDTLLIENIGETVDPVLDPLLGRNTIKKGKYIKIGDKEVEYHPKFRLILHTKYFNPHYKPEMQAQCTLINFLVTRDGLEDQLLAAVVAKERPDLEQLKANLTKSQNEFKIVLKELEDSLLARLSAASGNFLGDTALVENLETTKHTASEIEEKVVEAKITEVKINEARENYRPAAERASLLYFILNDLNKINPVYQFSLKAFNVVFEKAIQRTTPANEVKQRVINLTDEITYSVYMYTARGLFERDKLIFLAQVTFQVLSMKKELNPVELDFLLRFPFKAGVVSPVDFLQHQGWGGIKALSEMDEFKNLDSDIEGSAKRWKKLVESEAPEKEIFPKEWKNKTALQKLCMVRCLRPDRMTYAIKNFVEEKMGSKFVEGRSVEFSKSYEESSPSTSIFFILSPGVDPLKDVEALGKKLGFTIDNGKLHNVSLGQGQEVVAENALDVAAEKGHWVILQVRGGQHCRNIHLVARWLGTLDKKLEHYSTGSHEDYRVFISAEPAPSPETHIIPQGILENAIKITNEPPTGMHANLHKALDLFTQDTLEMCTKEMEFKCMLFALCYFHAVVAERRKFGAQGWNRSYPFNNGDLTISINVLYNYLEANPKVPWDDLRYLFGEIMYGGHITDDWDRRLCRTYLAEYIRTEMLEGDVLLAPGFQIPPNLDYKGYHEYIDENLPPESPYLYGLHPNAEIGFLTVTSEKLFRTVLEMQPKETDSGAGTGVSREEKAGSLKLLPSERKGEDLELRRGGCPGTGFQVKAVLDDILEKIPETFNMAEIMAKAAEKTPYVVVAFQECERMNILTNEMRRSLKELNLGLKGELTITTDVEDLSTALFYDTVPDTWVARAYPSMMGLAAWYADLLLRIRELEAWTTDFALPTTVWLAGFFNPQSFLTAIMQSMARKNEWPLDKMCLSVEVTKKNREDMTAPPREGSYVYGLFMEGARWDTQTGVIAEARLKELTPAMPVIFIKAIPVDRMETKNIYECPVYKTRIRGPTYVWTFNLKTKEKAAKWILAAVALLLQV

SEQ ID NO: 250613 - DNA, 13374 bp, Artificial Sequence
  derived and/or modified sequence
atgaccatggcccccgacgtgagactggagtacctggaggaggtggccagcatcgtgctgaagttcaagcccgacaagtggagcaagctgatcggcgccgaggagaacgtggccctgttcaccgagttcttcgagaagcccgacgtgcaggtgctggtgctgaccctgaacgccgccggcatgatcatcccctgcctgggcttcccccagagcctgaagagcaagggcgtgtacttcatcaagaccaagagcgagaacatcaacaaggacaactacagagccagactgctgtacggcgacatcagccccacccccgtggaccagctgatcgccgtggtggaggaggtgctgagcagcctgctgaaccagagcgagaacatggccggctggccccaggtggtgagcgaggacatcgtgaagcaggtgcacagactgaagaacgagatgttcgtgatgagcggcaagatcaagggcaagaccctgctgcccatccccgagcacctgggcagcctggacggcaccctggagagcatggagagaatccccagcagcctggacaacctgctgctgcacgccatcgagaccaccatcatcgactggagccaccagatcagagacgtgctgagcaaggacagcgcccaggccctgctggacggcctgcaccccctgccccaggtggagttcgagttctgggacaccagactgctgaacctgaagtgcatccacgagcagctgaacagacccaaggtgaacaagatcgtggagatcctggagaaggccaagagctgctactggcccgccctgcagaacgtgtacaccaacgtgaccgagggcctgaaggaggccaacgacatcgtgctgtacctgaagcccctgagaatcctgctggaggagatggagcaggccgacttcaccatgctgcccaccttcatcgccaaggtgctggacaccatctgcttcatctgggccaccagcgagtactacaacacccccgccagaatcatcgtgatcctgcaggagttctgcaaccagatcatcgagatgaccagaaccttcctgagccccgaggaggtgctgaagggcctgcagggcgagatcgaggaggtgctgagcggcatcagcctggccgtgaacgtgctgaaggagctgtaccagacctacgacttctgctgcgtgaacatgaagctgttcttcaaggacaaggagcccgtgccctgggagttccccagcagcctggccttcagcagaatcaacagcttcttccagagaatccagaccatcgaggagctgtacaagaccgccatcgagttcctgaagctggagaagatcgagctgggcggcgtgagaggcaacctgctgggcagcctggtgaccagaatctacgacgaggtgttcgagctggtgaaggtgttcgccgactgcaagtacgaccccctggaccccggcgacagcaacttcgacagagactacgccgacttcgagatcaagatccaggacctggacagaagactggccaccatcttctgccagggcttcgacgactgcagctgcatcaagagcagcgccaagctgctgtacatgtgcggcggcctgatggagagacccctgatcctggccgaggtggcccccagatacagcgtgatgctggagctgttcgacgccgagctggacaacgccaagatcctgtacgacgcccagatggccgccagcgaggagggcaacatccccctgatccacaagaacatgccccccgtggccggccagctgaagtggagcctggagctgcaggagagactggaggtgagcatgaagcacctgaagcacgtggagcaccccgtgatgagcggcgccgaggccaagctgacctaccagaagtacgacgagatgatggagctgctgagatgccacagagagaagatctaccagcagtgggtggccggcgtggaccaggactgccacttcaacctgggccagcccctgatcctgagagacgccgccagcaacctgatccacgtgaacttcagcaaggccctggtggccgtgctgagagaggtgaagtacctgaacttccagcagcagaaggagatccccgacagcgccgagagcctgttcagcgagaacgagaccttcagaaagttcgtgggcaacctggagctgatcgtgggctggtacaacgagatcaagaccatcgtgaaggccgtggagttcctgctgatcaagagcgagctggaggccatcgacgtgaagctgctgagcgccgagaccaccctgttctggaacggcgagggcgtgttccagtacatccaggaggtgagagagatcctgcacaacctgcagaacagaatgcagaaggccaagcagaacatcgagggcatcagccaggccatgaaggactggagcgccaaccccctgttcgagagaaaggacaacaagaaggaggccctgctggacctggacggcagaatcgccaacctgaacaagagatacgccgccgtgagagacgccggcgtgaagatccaggccatggtggccgagaacgccgagctgttcagagccgacaccctgagcctgccctggaaggactacgtgatctacatcgacgacatggtgctggacgagttcgaccagttcatcagaaagagcctgagcttcctgatggacaacatggagagcatcgcccccctgttcgagatcagaatggagctggacgaggacggcctgaccttcaaccccaccctggaggtgggcagcgacagaggcttcctggccctgatcgagggcctggtgaacgacatctacaacgtggccagactgatccccagactggccaaggacagaatgaactacaagatggacctggaggacaacaccgacctgatcgagatgagagaggaggtgagcagcctggtgatcaacgccatgaaggaggccgaggagtaccaggacagcttcgagagatacagctacctgtggaccgacaacctgcaggagttcatgaagaacttcctgatctacggctgcgccgtgaccgccgaggacctggacacctggaccgacgacaccatccccaagaccccccccaccctggcccagttccaggagcagatcgacagctacgagaagctgtacgaggaggtgagcaagtgcgagaacaccaaggtgttccacggctggctgcagtgcgactgcagacccttcaagcaggccctgctgagcaccatcagaagatggggcttcatgttcaagagacacctgagcaaccacgtgaccaacagcctggccgacctggaggccttcatgaaggtggccagaatgggcctgaccaagcccctgaaggagggcgactacgacggcctggtggaggtgatgggccacctgatgaaggtgaaggagagacaggccgccaccgacaacatgttcgagcccctgaagcagaccatcgagctgctgaagacctacggcgaggagatgcccgaggagatccacctgaagctgcaggagctgcccgagcactgggccaacaccaagaagctggccatccaggtgaagctgaccgtggcccccctgcaggccaacgaggtgagcatcctgagaagaaagtgccagcagttcgagctgaagcagcacgagttcagagagagattcagaagagaggcccccttcagcttcagcgaccccaacccctacaagagcctgaacaagcagcagaagagcatcagcgccatggagggcatcatggaggccctgagcaagagcggcggcctgttcgaggtgcccgtgcccgactacaagcagctgaaggcctgccacagagaggtgagactgctgaaggagctgtgggacatggtggtggtggtgaacaccagcatcgaggactggaagaccaccaagtggaaggacatcaacgtggagcagatggacatcgactgcaagaagttcgccaaggacatgagaagcctggacaaggagatgaagacctgggacgccttcgtgggcctggacaacaccgtgaagaacgtgatcaccagcctgagagccgtgagcgagctgcagaaccccgccatcagagagagacactggcagcagctgatgcaggccacccaggtgaagttcaagatgagcgaggagaccaccctggccgacctgctgcagctgaacctgcacagctacgaggacgaggtgagaaacatcgtggacaaggccgtgaaggagagcggcatggagaaggtgctgaaggccctggacagcacctggagcatgatggagttccagcacgagccccaccccagaaccggcaccatgatgctgaagagcagcgaggtgctggtggagaccctggaggacaaccaggtgcagctgcagaacctgatgatgagcaagtacctggcccacttcctgaaggaggtgaccagctggcagcagaagctgagcaccgccgacagcgtgatcagcatctggttcgaggtgcagagaacctggagccacctggagagcatcttcatcggcagcgaggacatcagaacccagctgcccggcgacagccagagattcgacgacatcaaccaggagttcaaggccctgatggaggacgccgtgaagacccccaacgtggtggaggccaccagcaagcccggcctgtacaacaagctggaggccctgaagaagagcctggccatctgcgagaaggccctggccgagtacctggagaccaagagactggccttccccagattctacttcgtgagcagcgccgacctgctggacatcctgagcaacggcaacgaccccgtggaggtgagcagacacctgagcaagctgttcgacagcctgtgcaagctgaagttcagactggacgccagcgacaagcccctgaaggtgggcctgggcatgtacagcaaggaggacgagtacatggtgttcgaccaggagtgcgacctgagcggccaggtggaggtgtggctgaacagagtgctggacagaatgtgcagcaccctgagacacgagatccccgaggccgtggtgacctacgaggagaagcccagagagcagtggatcctggactaccccgcccaggtggccctgacctgcacccagatctggtggaccaccgaggtgggcctggccttcgccagactggaggagggctacgagaacgccatcagagactacaacaagaagcagatcagccagctgaacgtgctgatcaccctgctgatgggcaacctgaacgccggcgacagaatgaagatcatgaccatctgcaccatcgacgtgcacgccagagacgtggtggccaagatgatcgtggtggagagcagccaggccttcacctggcaggcccagctgagacacagatgggacgaggagaagagacactgcttcgccaacatctgcgacgcccagatccagtacagctacgagtacctgggcaacacccccagactggtgatcacccccctgaccgacagatgctacatcaccctgacccagagcctgcacctgatcatgggcggcgcccccgccggccccgccggcaccggcaagaccgagaccaccaaggacctgggcagagccctgggcaccatggtgtacgtgttcaactgcagcgagcagatggactacaagagctgcggcaacatctacaagggcctggcccagaccggcgcctggggctgcttcgacgagttcaacagaatcagcgtggaggtgctgagcgtgatcgccgtgcaggtgaagtgcgtgcaggacgccatcagagccaagaagaaggccttcaacttcctgggcgagatcatcggcctgatccccaccgtgggcatcttcatcaccatgaaccccggctacgccggcagagccgagctgcccgagaacctgaaggccctgttcagaccctgcgccatggtggtgcccgacttcgagctgatctgcgagatcatgctgatggccgagggcttcctggaggccagactgctggccagaaagttcatcaccctgtacaccctgtgcaaggagctgctgagcaagcaggaccactacgactggggcctgagagccatcaagagcgtgctggtggtggccggcagcctgaagagaggcgaccccagcagagccgaggaccaggtgctgatgagagccctgagagacttcaacatccccaagatcgtgaccgacgacctgcccgtgttcatgggcctgatcggcgacctgttccccgccctggacgtgcccagaaagagagacctgaacttcgagaagatcatcaagcagagcatcgtggagctgaagctgcaggccgaggacagcttcgtgctgaaggtggtgcagctggaggagctgctgcaggtgagacacagcgtgttcatcgtgggcaacgccggcagcggcaagagccaggtgctgaagagcctgaacaagacctaccagaacctgaagagaaagcccgtggccgtggacctggaccccaaggccgtgacctgcgacgagctgttcggcatcatcaaccccgtgaccagagagtggaaggacggcctgttcagcaccatcatgagagacctggccaacatcacccacgacggccccaagtggatcatcctggacggcgacatcgaccccatgtggatcgagagcctgaacaccgtgatggacgacaacaaggtgctgaccctggccagcaacgagagaatccccctgaacagaaccatgagactggtgttcgagatcagccacctgagaaccgccacccccgccaccgtgagcagagccggcatcctgtacatcaaccccgccgacctgggctggaaccccgtggtgagcagctggatcgagagaagaaaggtgcagagcgagaaggccaacctgatgatcctgttcgacaagtacctgcccacctgcctggacaagctgagattcggcttcaagaagatcacccccgtgcccgagatcaccgtgatccagaccatcctgtacctgctggagtgcctgctgaccgagaagaccgtgccccccgacagccccagagagctgtacgagctgtacttcgtgttcacctgcttctgggccttcggcggcgccatgttccaggaccagctggtggactacagagtggagttcagcaagtggtggatcaacgagttcaagaccatcaagttccccagccagggcaccatcttcgactactacatcgaccccgacaccaagaagttcctgccctggaccgacaaggtgcccagcttcgagctggaccccgacgtgcccctgcaggccagcctggtgcacaccaccgagaccatcagaatcagatacttcatggacctgctgatggagaagagctggcccgtgatgctggtgggcaacgccggcaccggcaagagcgtgctgatgggcgacaagctggagagcctgaacaccgacaactacctggtgcaggccgtgcccttcaacttctacaccaccagcgccatgctgcagggcgtgctggagaagcccctggagaagaagagcggcagaaactacggcccccccggcaccaagaagctggtgtacttcatcgacgacatgaacatgcccgaggtggacaagtacggcaccgtggccccccacaccctgatcagacagcacatggaccacagacactggtacgacagacacaagctgaccctgaaggacatccacaactgccagtacgtggcctgcatgaaccccaccagcggcagcttcaccatcgacagcagactgcagagacacttctgcgtgttcgccgtgagcttccccggccaggaggccctgaccaccatctacaacaccatcctgacccagcacctggccttcagaagcgtgagcatggccatccagagaatcagcagccagctggtggccgccgccctggccctgcaccagaagatcaccgccaccttcctgcccaccgccatcaagttccactacgtgttcaacctgagagacctgagcaacatcttccagggcctgctgttcagcaccgccgaggtgctgaagacccccctggacctggtgagactgtggctgcacgagaccgagagagtgtacggcgacaagatggtggacgagaaggaccaggagaccctgcacagagtgaccatggccagcaccaagaagttcttcgacgacctgggcgacgagctgctgttcgccaagcccaacatcttctgccacttcgcccagggcatcggcgaccccaagtacgtgcccgtgaccgacatggcccccctgaacaagctgctggtggacgtgctggacagctacaacgaggtgaacgccgtgatgaacctggtgctgttcgaggacgccgtggcccacatctgcagaatcaacagaatcctggagagccccagaggcaacgccctgctggtgggcgtgggcggcagcggcaagcagagcctgagcagactggccgcctacatcagcggcctggacgtgttccagatcaccctgaagaagggctacggcatccccgacctgaagatcgacctggccgcccagtacatcaaggccgccgtgaagaacgtgcccagcgtgttcctgatgaccgacagccaggtggccgaggagcagttcctggtgctgatcaacgacctgctggccagcggcgagatccccggcctgttcatggaggacgaggtggagaacatcatcagcagcatgagaccccaggtgaagagcctgggcatgaacgacaccagagagacctgctggaagttcttcatcgagaaggtgagaagacagctgaaggtgatcctgtgcttcagccccgtgggcagcgtgctgagagtgagagccagaaagttccccgccgtggtgaactgcaccgccatcgactggttccacgagtggcccgaggacgccctggtgagcgtgagcgccagattcctggaggagaccgagggcatcccctgggaggtgaaggccagcatcagcttcttcatgagctacgtgcacaccaccgtgaacgagatgagcagagtgtacctggccaccgagagaagatacaactacaccacccccaagaccttcctggagcagatcaagctgtaccagaacctgctggccaagaagagaaccgagctggtggccaagatcgagagactggagaacggcctgatgaagctgcagagcaccgccagccaggtggacgacctgaaggccaagctggccatccaggaggccgagctgaagcagaagaacgagagcgccgaccagctgatccaggtggtgggcatcgaggccgagaaggtgagcaaggagaaggccatcgccgaccaggaggaggtgaaggtggaggtgatcaacaagaacgtgaccgagaagcagaaggcctgcgagaccgacctggccaaggccgagcccgccctgctggccgcccaggaggccctggacaccctgaacaagaacaacctgaccgagctgaagagcttcggcagcccccccgacgccgtggtgaacgtgaccgccgccgtgatgatcctgaccgcccccggcggcaagatccccaaggacaagagctggaaggccgccaagatcatgatgggcaaggtggacaccttcctggacagcctgaagaagttcgacaaggagcacatccccgaggcctgcctgaaggccttcaagccctaccagggcaaccccaccttcgaccccgagttcatcagaagcaagagcaccgccgccgccggcctgtgcagctggtgcatcaacatcgtgagattctacgaggtgtactgcgacgtggcccccaagagacaggccctggaggaggccaacgccgagctggccgaggcccaggagaagctgagcagaatcaagaacaagatcgccgagctgaacgccaacctgagcaacctgaccagcgccttcgagaaggccaccgccgagaagatcaagtgccagcaggaggccgacgccaccaacagagtgatcctgctggccaacagactggtgggcggcctggccagcgagaacatcagatgggccgagagcgtggagaacttcagaagccagggcgtgaccctgtgcggcgacgtgctgctgatcagcgccttcgtgagctacgtgggctacttcaccaagaagtacagaaacgagctgatggagaagttctggatcccctacatccacaacctgaaggtgcccatccccatcaccaacggcctggaccccctgagcctgctgaccgacgacgccgacgtggccacctggaacaaccagggcctgcccagcgacagaatgagcaccgagaacgccaccatcctgggcaacaccgagagatggcccctgatcgtggacgcccagctgcagggcatcaagtggatcaagaacaagtacagaagcgagctgaaggccatcagactgggccagaagagctacctggacgtgatcgagcaggccatcagcgagggcgacaccctgctgatcgagaacatcggcgagaccgtggaccccgtgctggaccccctgctgggcagaaacaccatcaagaagggcaagtacatcaagatcggcgacaaggaggtggagtaccaccccaagttcagactgatcctgcacaccaagtacttcaacccccactacaagcccgagatgcaggcccagtgcaccctgatcaacttcctggtgaccagagacggcctggaggaccagctgctggccgccgtggtggccaaggagagacccgacctggagcagctgaaggccaacctgaccaagagccagaacgagttcaagatcgtgctgaaggagctggaggacagcctgctggccagactgagcgccgccagcggcaacttcctgggcgacaccgccctggtggagaacctggagaccaccaagcacaccgccagcgagatcgaggagaaggtggtggaggccaagatcaccgaggtgaagatcaacgaggccagagagaactacagacccgccgccgagagagccagcctgctgtacttcatcctgaacgacctgaacaagatcaaccccgtgtaccagttcagcctgaaggccttcaacgtggtgttcgagaaggccatccagagaaccacccccgccaacgaggtgaagcagagagtgatcaacctgaccgacgagatcacctacagcgtgtacatgtacaccgccagaggcctgttcgagagagacaagctgatcttcctggcccaggtgaccttccaggtgctgagcatgaagaaggagctgaaccccgtggagctggacttcctgctgagattccccttcaaggccggcgtggtgagccccgtggacttcctgcagcaccagggctggggcggcatcaaggccctgagcgagatggacgagttcaagaacctggacagcgacatcgagggcagcgccaagagatggaagaagctggtggagagcgaggcccccgagaaggagatcttccccaaggagtggaagaacaagaccgccctgcagaagctgtgcatggtgagatgcctgagacccgacagaatgacctacgccatcaagaacttcgtggaggagaagatgggcagcaagttcgtggagggcagaagcgtggagttcagcaagagctacgaggagagcagccccagcaccagcatcttcttcatcctgagccccggcgtggaccccctgaaggacgtggaggccctgggcaagaagctgggcttcaccatcgacaacggcaagctgcacaacgtgagcctgggccagggccaggaggtggtggccgagaacgccctggacgtggccgccgagaagggccactgggtgatcctgcagaacatccacctggtggccagatggctgggcaccctggacaagaagctggagcactacagcaccggcagccacgaggactacagagtgttcatcagcgccgagcccgcccccagccccgagacccacatcatcccccagggcatcctggagaacgccatcaagatcaccaacgagccccccaccggcatgcacgccaacctgcacaaggccctggacctgttcacccaggacaccctggagatgtgcaccaaggagatggagttcaagtgcatgctgttcgccctgtgctacttccacgccgtggtggccgagagaagaaagttcggcgcccagggctggaacagaagctaccccttcaacaacggcgacctgaccatcagcatcaacgtgctgtacaactacctggaggccaaccccaaggtgccctgggacgacctgagatacctgttcggcgagatcatgtacggcggccacatcaccgacgactgggacagaagactgtgcagaacctacctggccgagtacatcagaaccgagatgctggagggcgacgtgctgctggcccccggcttccagatcccccccaacctggactacaagggctaccacgagtacatcgacgagaacctgccccccgagagcccctacctgtacggcctgcaccccaacgccgagatcggcttcctgaccgtgaccagcgagaagctgttcagaaccgtgctggagatgcagcccaaggagaccgacagcggcgccggcaccggcgtgagcagagaggagaaggtgaaggccgtgctggacgacatcctggagaagatccccgagaccttcaacatggccgagatcatggccaaggccgccgagaagaccccctacgtggtggtggccttccaggagtgcgagagaatgaacatcctgaccaacgagatgagaagaagcctgaaggagctgaacctgggcctgaagggcgagctgaccatcaccaccgacgtggaggacctgagcaccgccctgttctacgacaccgtgcccgacacctgggtggccagagcctaccccagcatgatgggcctggccgcctggtacgccgacctgctgctgagaatcagagagctggaggcctggaccaccgacttcgccctgcccaccaccgtgtggctggccggcttcttcaacccccagagcttcctgaccgccatcatgcagagcatggccagaaagaacgagtggcccctggacaagatgtgcctgagcgtggaggtgaccaagaagaacagagaggacatgaccgccccccccagagagggcagctacgtgtacggcctgttcatggagggcgccagatgggacacccagaccggcgtgatcgccgaggccagactgaaggagctgacccccgccatgcccgtgatcttcatcaaggccatccccgtggacagaatggagaccaagaacatctacgagtgccccgtgtacaagaccagaatcagaggccccacctacgtgtggaccttcaacctgaagaccaaggagaaggccgccaagtggatcctggccgccgtggccctgctgctgcaggtgtag

SEQ ID NO: 250614 - DNA, 13374 bp, Artificial Sequence
  derived and/or modified sequence
atgaccatggctccggatgtccggctcgagtacttggaagaagtggcctcaatcgttctaaaattcaaacctgacaaatggagtaaattaatcggcgctgaggagaacgtggccctgttcaccgagttttttgagaagcccgatgtccaggtgctggttttaactttgaacgctgcgggaatgataatcccgtgcttggggttcccacagtctctcaagtcaaagggcgtctattttatcaagaccaagagtgaaaacatcaataaagataactaccgagcccgtctcctctacggagacatatcacctactccagttgaccagctcatagccgtggtcgaggaggttctgagctctctcctgaatcaatcagaaaatatggctggatggccccaggtggtgagtgaagacattgttaaacaggtccaccgcctgaagaacgagatgtttgttatgagcgggaagattaaaggaaagacgcttttaccgattccagaacacctgggatctcttgacggtacactagagtctatggaacggatcccaagtagcctcgacaacttactgcttcatgctattgagaccacaatcatagattggtcgcaccagattcgcgacgtcctttcaaaggattccgcacaagcactcctcgatggcctgcaccccttacctcaggtcgaattcgaattttgggacactaggcttcttaatttgaagtgcatacacgagcagcttaatcggcccaaggtgaacaagatcgtggaaatcttggagaaggcaaaaagttgctactggccggcactccagaacgtgtatacgaacgtgacagagggattgaaagaggcaaacgatatcgtactatacttgaagcctctacgcatcctgttggaagaaatggaacaggccgatttcacaatgctgccaacttttattgctaaagtgcttgatactatctgctttatctgggccacgagcgagtattacaacacacctgccagaattatcgtgatcctgcaggagttctgcaaccagattattgagatgacccggacgtttctgtctccagaggaagtgttaaaagggctgcagggggagatcgaggaggtactcagcggtatttcgctcgccgtgaacgttctgaaggagctttaccagacctacgacttctgttgtgtgaatatgaaattattctttaaggataaggaaccagtgccatgggaattcccttcaagcctcgctttctcccggattaacagtttcttccagcggatccagacaattgaggagttgtataaaacggctattgaatttctcaagttggagaaaatagaactggggggagttcgcggtaacctgctgggctctctggttactaggatttatgatgaagtgtttgaactggtcaaggtctttgctgactgcaagtatgatccattagatccgggagattccaattttgaccgtgattacgccgattttgagatcaaaattcaagatctggatcgccgcctcgcaactattttttgtcagggtttcgatgattgttcatgtataaaatcctcagcgaaactcctttacatgtgcggaggtctcatggagcgcccactcattttagccgaagtggcccccagatactcagtaatgttagagctgttcgacgccgaactggataacgccaaaatactgtacgacgctcagatggcggcctctgaggagggcaacatccccttgatacacaagaacatgccccccgtggccggacagctgaagtggtccttggagctgcaggaaagactcgaggtgtccatgaaacacctgaagcatgtggaacaccctgtcatgtctggagcagaagcgaagctcacttaccagaagtacgatgagatgatggagctcctgaggtgtcacagggaaaaaatataccagcagtgggtggctggagtagatcaggactgccacttcaacctaggccagcctctgatcctgagggacgcagccagcaacctcatacatgtgaatttttcaaaggctctcgtggccgtgctccgggaagtcaagtacctcaatttccagcaacaaaaggagattcccgactcagccgagagccttttcagtgaaaatgagacgtttcggaagtttgttggcaatttggagctaattgtcgggtggtacaacgagattaagaccattgtgaaggcagtcgaatttctgttgataaagtccgaactggaggctattgatgtgaaactcttatcagccgaaacaaccctgttctggaatggtgaaggggtcttccagtatatccaggaagtgagggagatcctccataacctgcagaaccggatgcagaaagccaaacaaaacattgaggggattagtcaggcaatgaaggactggtccgccaaccccctattcgaacgtaaagataataagaaggaagccctgctggacttggacggtcgcattgctaacctgaataaacggtatgccgcggtgagggacgccggggtcaagatacaagcaatggtcgcggagaatgccgaattatttcgggccgacactctgtcgctgccttggaaggactacgtgatatatatagacgacatggtgctggatgaatttgaccagtttataagaaaatctttatcattcttaatggacaacatggagtctattgccccattattcgagatccggatggaactggatgaggacggtttgacctttaatccaacactggaggtcgggagcgaccggggcttcttggccttgattgagggcctagtcaacgacatttacaacgtcgcccgcctcattccaaggctcgctaaagatcggatgaattataaaatggacctggaagataacacagacctgatcgagatgcgagaggaggtctcctcactagttatcaacgcaatgaaagaggccgaggagtaccaggattcattcgagcgatactcctatctgtggacggacaaccttcaggagttcatgaagaactttctgatttacggctgcgctgttacagcagaggaccttgacacatggacagatgacactatacccaagactcccccaactcttgcccagttccaggagcagattgatagctacgagaaattgtacgaagaggtgagcaagtgcgagaataccaaagtttttcacggatggctgcagtgtgactgcagacccttcaaacaggccctcctgagcacaattcggagatggggctttatgttcaagcggcacctgagtaaccatgtgacaaacagcctggctgatcttgaagcctttatgaaggttgccagaatgggattgacaaagccactcaaagagggggactatgatgggctcgtggaggtcatggggcatctgatgaaggttaaagaaagacaggccgccacagacaacatgttcgaaccactcaagcaaaccattgagttgctcaagacatatggcgaggagatgccagaggagatccatctgaagttacaggaattaccggaacattgggcgaacacaaagaaactagccatccaagtcaagctcacagtagctccactgcaggctaacgaggtcagcattctccgaaggaaatgccagcagtttgagctgaagcagcacgaatttcgcgagagatttagacgggaggcgcccttctccttttcagacccgaacccatacaaaagcctgaacaaacagcagaaaagtatttcagccatggagggcatcatggaagcgttgtcaaaatctggcggcctattcgaagttcctgtgcccgactacaagcaactgaaggcctgtcacagggaagtgcggcttcttaaggaattgtgggatatggttgtggtggttaacacatccatcgaagattggaagaccaccaaatggaaggacataaatgttgagcagatggacattgattgcaaaaagttcgccaaggatatgcgatctttggacaaggagatgaagacatgggatgccttcgtgggtctcgacaacacggtgaaaaacgtcatcacgtccttgcgggcagtgagcgaactgcagaatcccgcaattcgagaacggcactggcagcagctgatgcaagcaacacaagtaaaattcaaaatgtctgaagaaactacactcgccgaccttctccagttgaatctgcacagctacgaagatgaggtcagaaatatcgttgataaggccgtgaaggaatccgggatggaaaaggtgctcaaggcattggatagcacctggtccatgatggaattccagcatgagcctcaccctcgaacagggaccatgatgctgaaatcatccgaggtgttggtcgagactctggaggataatcaagtacagctgcagaatctgatgatgtccaaatacttggcacatttcctgaaagaagtgacaagctggcagcagaagctcagtacggctgacagtgtgatctcgatctggtttgaggtgcaaaggacatggtcccatcttgaatctatttttatcggctctgaggatattcgtacccagctgcctggagattcgcaacgttttgatgacattaaccaagaattcaaagctctgatggaagacgccgttaaaactcctaatgtggtcgaggctacctcaaagcctgggctgtataataagctggaagctctgaaaaagtctctggcaatctgcgagaaggcgctggccgagtacttggaaacgaagaggctggccttccctagattttacttcgtgagcagcgccgaccttttggatattctctccaatggaaatgaccctgtcgaggtgtctagacacctctccaaattgttcgacagcctgtgtaagctgaagtttcgactagacgcttcagataaacctctgaaagtcggtcttgggatgtattcaaaggaagacgaatacatggtgttcgatcaagagtgcgatcttagcggtcaggtggaagtatggttaaatagggtacttgacagaatgtgcagtaccttaaggcacgaaattcccgaggccgttgtcacctacgaggagaagccaagggaacagtggattttggactaccccgcacaggtcgctctgacatgcacccagatttggtggaccaccgaggtgggtctggctttcgcacgtcttgaggagggctacgagaatgctattagagattataacaaaaaacagatcagtcagctgaatgtactgatcacacttctcatgggaaatcttaacgccggtgacaggatgaaaattatgacgatatgcaccatagatgttcatgcaagggacgtagtcgcgaaaatgatagttgtggagtcgtcccaggcctttacttggcaagctcagctgcgacatcgttgggacgaggagaaacgccactgtttcgctaacatctgtgacgctcaaatccagtactcatacgagtatctcggaaataccccacgccttgtaatcacccccttgaccgacagatgttatatcactctgacccagtccctgcaccttatcatgggcggggcacctgcagggcccgccggtaccggcaaaaccgagacaaccaaggatttgggcagggcactcggcactatggtttatgtgtttaattgcagtgagcagatggactacaaaagctgcggcaatatttacaaagggttggcccagaccggggcttggggatgtttcgatgaatttaacaggatcagtgttgaggtgctctctgttatagcggtgcaggtaaagtgcgtacaggacgctattcgtgcaaagaaaaaggcctttaatttcctcggtgagataatcgggctaatcccaaccgtcggaatattcataaccatgaacccaggatatgccgggagggctgagcttcccgagaatcttaaggcactttttaggccctgtgcgatggtagttccagacttcgaactgatttgcgagatcatgctcatggctgagggcttcttggaagccaggctgctggctcggaaatttatcactctgtacacgctttgcaaagaactgctgtctaaacaggaccactacgactggggcttgagagccatcaagagcgtgctggtggtggcaggcagcctgaaaaggggagaccctagcagagctgaggatcaagtgctcatgcgggcccttcgagactttaacattccgaagatcgtcaccgatgacttaccagtgtttatgggcttgatcggggacctgttccctgctctagacgtgccacggaagcgcgatctgaacttcgagaaaatcattaagcagtcaatcgtcgagctgaaactgcaggctgaggactcgttcgtgctgaaagtggttcagttggaggaactcttacaggtccgccactccgtgttcattgtggggaatgccggatccgggaagtcacaagtcctgaagtcgctgaacaaaacatatcaaaatcttaagagaaagcccgtggctgttgacctggaccctaaagccgtgacttgtgatgaactttttggcatcattaatcccgtcacgcgagaatggaaggacggtttattctcaacgatcatgcgggaccttgccaacatcacccatgatggcccaaaatggatcatcctagacggagacatcgatccaatgtggattgagagtctaaacactgtgatggatgataacaaagtgcttacgttggcgtctaacgagaggatccctctgaaccggacgatgcgcctggtctttgagatctcacatctcagaacagctacgcccgcaacggtcagtcgcgctggtatcctgtacataaatcccgccgacttgggctggaatcccgtggtgtccagctggattgaaagacgcaaagtacagtctgaaaaagcaaatctcatgattctcttcgataaataccttcccacatgtttggataagctgcgatttgggttcaagaaaataactccggtgccagaaataacagtaatccagacaattctgtacctactggaatgcctgcttaccgagaagactgtgccccctgactctccccgtgaattgtatgaactctactttgtatttacttgcttttgggctttcggaggcgcgatgtttcaggatcaattggtggactaccgagtggagttttccaaatggtggatcaatgaattcaaaaccatcaagttccctagtcaggggactatctttgactactacatagacccggacacgaaaaagtttctcccttggactgataaggtcccaagcttcgaactggaccctgacgtaccactgcaagcttctctggtgcatacgactgagaccattcgtattagatacttcatggacctgcttatggaaaaaagttggcctgttatgctggtggggaacgctggcaccggtaagtccgttctgatgggggacaaattggaaagtcttaataccgataactacctcgtacaggccgtcccattcaatttctatacaacctccgccatgctgcagggcgtactggaaaaaccgctggagaagaagtccgggcggaactacggcccaccaggcacgaaaaagctggtttacttcatcgatgacatgaacatgccagaggttgacaaatatggcacagtggccccgcatacacttatcagacagcacatggatcacaggcattggtatgatagacataaactgaccttaaaggacattcacaactgccaatatgtggcttgcatgaaccctacatcaggtagcttcaccatagactcccggttgcaacgtcacttttgcgtctttgctgtatccttccccggccaagaagcactgaccaccatatacaacactatcctcactcagcacctggcattcagatccgtcagcatggccatccagaggatttcttcgcagctggtggccgcagcactggccctgcaccagaaaattaccgcaaccttcctgcccactgccatcaaattccactacgttttcaatttaagagacctctccaacatcttccagggcctattattttcaacagcggaggtgttgaaaacacccctggatttagtgcggctgtggttgcacgagactgaaagagtgtacggtgacaaaatggtggatgagaaggaccaggagaccctgcacagagtgacaatggccagtactaaaaaattttttgatgatttaggggacgaactcctattcgcaaaacctaacattttttgccacttcgcacagggaataggtgaccccaagtatgtgccggtcactgatatggcccccctgaataaacttctcgtagacgttttagactcatacaacgaggttaatgccgtgatgaacctggtgctgtttgaggacgccgttgcccacatctgtaggatcaaccgcatattagagtctccccgcgggaacgccctacttgtaggggtgggaggctcaggaaaacaaagcctttctaggctggcagcatacatcagtggcctggacgtcttccagatcactttaaagaagggttacggaatccccgatctaaagatcgatctggctgcccagtacattaaagctgctgtcaaaaatgtcccctcggtgtttctcatgacggacagccaggtggcagaagaacagtttctggttctaattaatgatcttctagcaagcggcgaaatacccggccttttcatggaggacgaggtggagaacataatctctagtatgcgcccacaggtgaaaagcctgggcatgaacgatactagagaaacttgctggaagtttttcattgaaaaagtcaggagacagctcaaagtgatcctgtgcttttcacccgtgggatcagtcctgcgagttagagctcgaaaattccccgctgtcgtcaattgcaccgcaattgactggtttcacgaatggcccgaggacgctttggtatcagtgtccgctagattcctggaagaaaccgagggcattccatgggaggtgaaggcatctatttctttcttcatgagctatgttcatactacagtgaatgaaatgtcacgcgtgtatctggctactgaacgtcgctataattacaccacccctaaaacatttcttgaacagatcaaactgtaccagaacctcctggcgaagaaaaggaccgaactggtggcgaagatagagcgtttggagaatggcctgatgaagcttcagagtactgcaagccaggttgacgatcttaaggcaaagttggccattcaagaggccgagctcaagcaaaagaacgaatccgcagatcagttgatccaagtggttgggatagaagcagagaaggtgtccaaggaaaaggccatcgccgaccaggaagaggtgaaggtggaggttattaacaagaacgtgaccgagaagcagaaggcctgtgagaccgacctcgcaaaggccgaaccagccctgttggcagcccaggaagccttagataccttgaataagaataacctcaccgaactcaagtcatttggctcaccgccagatgcggtagtaaatgtgaccgctgctgtcatgattttaaccgcccccgggggaaagattcccaaagataaatcatggaaggccgctaagatcatgatgggtaaggtggacaccttcctggatagtctgaagaagttcgacaaggaacatattcccgaggcgtgtcttaaagcatttaaaccatatcagggaaatcctacatttgatcccgaattcatcaggtccaaaagcacagctgctgctgggctgtgttcatggtgtatcaatatcgtcaggttttacgaggtgtattgcgacgttgctcccaagcgccaggcgctggaggaagcaaatgcagagctcgcagaagcccaagagaaactaagtcgcattaagaacaaaatagccgagttgaacgcaaatctgtctaaccttacatcggcgtttgaaaaggccactgcagagaagatcaagtgccagcaagaagcggatgctacaaaccgcgtgatcctgttagcaaaccgcctcgtgggaggtctggccagcgagaacattcgatgggcagagtccgtcgaaaactttcggtcccagggcgttaccctttgcggcgacgtcctgctgatctccgcattcgtcagctatgtgggctatttcacaaagaagtaccgtaatgaacttatggagaagttctggatcccttacatacataacctgaaggtacctatcccaattacaaatggattagatcctctgtccctgttaactgacgatgccgatgttgccacgtggaataaccaggggctgcctagcgacagaatgagtactgagaatgctaccatcctggggaatacagaacgatggcccctcattgttgacgcgcagctccaggggattaagtggattaaaaacaagtataggtccgagttgaaagccattagactcgggcagaaatcataccttgatgtcatcgagcaagctatcagcgagggagatacactcctgatcgagaatattggcgagaccgtggatccggttctggaccccctgttgggtaggaatactataaagaaagggaagtacatcaagattggcgataaggaagttgagtaccacccaaagttccgactgatcctccataccaaatatttcaatccacactataagccagagatgcaggctcaatgcaccctgatcaactttctagtgactcgcgatggattggaagatcaactgcttgcggcggtggtcgcaaaggaaagacctgaccttgaacagttaaaagctaacctgacaaagtcgcagaatgaattcaaaatagtcctcaaagagctggaagattctctgctggccaggttgagcgctgccagcggaaacttccttggagataccgcattggttgaaaaccttgagacaacaaagcataccgccagtgagatcgaggagaaggtcgtggaggccaaaatcactgaggtgaaaatcaatgaagctagggagaattataggccagcggccgaacgagctagtctgctgtattttatcctaaatgacctcaacaagatcaaccccgtgtatcagttctccctgaaggctttcaacgtcgttttcgagaaagcaattcagagaaccactccagctaacgaggtgaaacagagagtcataaacctgactgatgaaatcacgtattcggtgtacatgtacaccgctagaggcctgttcgaacgggacaaactgatatttctcgcgcaggtcacatttcaagtgttaagtatgaaaaaggagctgaaccctgtcgaactggattttctccttaggtttccgtttaaggccggcgtcgtgtctcctgtggatttcctgcaacatcagggctgggggggaatcaaagcgcttagcgaaatggacgaattcaaaaacctggactctgacatcgaaggtagcgctaaaaggtggaaaaagcttgttgaaagcgaggctcccgaaaaggagatttttcccaaagaatggaagaacaaaactgctctgcaaaagctctgtatggttagatgcctgcggcccgataggatgacctacgccatcaagaacttcgtggaagaaaaaatggggagtaaatttgtagaaggcaggtctgtcgagttttcaaagtcatacgaagaatcctctccttcaacatccatcttttttatcctgtcacccggagtcgacccgctcaaggatgtggaggcactgggtaaaaagttgggtttcactatcgacaacggcaagctacacaacgtcagcttggggcaggggcaggaagtggtggcggagaatgctttggatgtcgctgcagagaagggccattgggtgatcctgcagaacattcatttagtggctaggtggctggggaccctcgacaaaaagctggagcactatagtactgggagtcacgaagattaccgcgtttttatctcagccgaaccagcaccctctccagagacgcacattatcccccaaggaattctagaaaacgctatcaaaataactaacgagccaccaacaggaatgcatgctaaccttcataaagccctagacctgttcactcaagacaccctggaaatgtgtaccaaggaaatggaattcaagtgcatgctcttcgcactgtgttactttcatgctgtggttgctgagaggcggaaatttggcgcccaaggttggaatcgatcgtatcctttcaacaacggagatctcacgatatcgataaatgtcctgtataattacctagaggccaatccaaaggtgccatgggacgatttacgctacctctttggggagataatgtacgggggccacatcacagacgattgggataggcggctctgtagaacctaccttgctgagtacataaggaccgagatgctagagggcgacgttctgctcgccccaggatttcagatccctccaaatctcgattacaaaggataccacgaatacatagatgaaaatctcccacctgagtctccttacctctatggcctgcaccctaacgctgagattggtttcttaacggtcacttctgagaagcttttcaggaccgttctggagatgcaaccgaaggagacagactccggggctggcactggcgtttcgagagaagaaaaagtaaaggctgtcttggacgatatcctggagaaaataccagagacgttcaatatggcggaaatcatggctaaagcagccgagaaaaccccttacgtggtcgtggcctttcaggagtgtgagagaatgaacatcttgaccaacgagatgcggcgtagcctcaaagagcttaaccttggactgaaaggggaactgaccattaccaccgatgtggaagaccttagcaccgccctgttctacgatactgtacctgatacctgggtggccagggcctacccatcgatgatgggcctggccgcctggtacgccgacctgttgttgagaattagggaactcgaagcctggactacggattttgcattgccaacaaccgtgtggctggcaggctttttcaacccccagagtttcctgacagccatcatgcaatccatggcaaggaagaatgaatggccattggacaaaatgtgcctcagcgtcgaggtaactaagaaaaatcgcgaggatatgacagccccaccccgggaaggttcctatgtgtacggactgtttatggagggcgctaggtgggatacccagacaggcgtgatcgctgaagcacgcctgaaagagctcacaccagctatgcctgtgatttttatcaaggccattcccgtggaccgcatggagaccaaaaatatttacgagtgtcccgtttataaaacccgtattagaggtcctacttatgtgtggacgttcaatttgaaaacgaaggaaaaggctgctaaatggattctagctgctgtcgcactcctactgcaggtttag

SEQ ID NO: 250615 - DNA, 13708 bp, Artificial Sequence
  derived and/or modified sequence
gtggcagttggagcccctcgagggaagggagccattttctttcctggtttgggaaagagttgctcatcagtttgcgggagaagctgtttgccttcagctgatacacagtgtaaggaaaggccaagatgacaatggccccggacgtcagactagagtatctggaggaagttgcctccatcgtcctgaagttcaagccggacaagtggagcaagctgataggcgccgaggagaacgtggccctgttcacagagttctttgaaaagcccgacgtccaggtgctggtgctgacgctcaatgcagccggcatgatcataccctgcctgggcttcccccagtccctcaagtccaaaggggtttacttcatcaagacaaagtccgagaacatcaacaaggacaactacagggcccggctcctttacggcgacatcagccccacacccgtggaccagctgatcgcggtggtggaggaggtcctctcttctctgttaaaccaaagtgagaacatggctggatggccccaggtggtctcggaagacatcgtgaagcaggtccacaggctgaagaatgaaatgtttgtgatgagtggcaagatcaaaggcaaaaccttgctgcctattccggagcacctgggcagcctggatggcacgctggagtccatggagaggatcccctcttcactggacaacttgctcctgcacgccattgaaaccaccatcatcgactggtcccaccagatccgggatgtgctgagcaaagactcagcccaggcgctgctggatgggctgcaccccctgccccaagtggagttcgagttctgggacactcggctgctgaacctcaagtgcatccatgaacagctaaacagacccaaagtgaacaagattgttgagatcctagagaaagccaaaagctgctactggccagccctgcaaaacgtttacaccaacgtcactgaagggctgaaggaagccaacgacatcgtgctctatttgaagcccctacggatcctgctggaggagatggaacaagccgacttcacgatgctccccaccttcattgccaaggtgctggacaccatctgcttcatctgggccacctctgagtactataacacacctgccaggatcatcgtcatcctgcaggagttctgcaaccaaatcatcgagatgacacgaaccttcctgagcccggaagaggtgctgaagggcctgcaaggtgaaatcgaggaagtcctgagtggcatctccctggctgtaaatgtgctgaaggagctctaccagacgtacgacttctgctgcgtgaacatgaagcttttctttaaggacaaagagcccgtgccttgggaattcccttcttctcttgccttttccaggataaattccttcttccagcgcatccagaccattgaggaactctataaaacagcaattgagtttctgaagctggagaaaatcgagcttgggggcgtgcgtgggaacctcctcgggagcctggtgacccgtatctatgatgaggtctttgagctggtgaaggtttttgccgactgcaaatatgatcccttggaccctggagactcgaattttgaccgtgattatgctgattttgagatcaaaatccaagacctggataggaggctggccacgatcttttgccaaggatttgatgactgcagctgtatcaagtcctccgcaaagctcctgtacatgtgtgggggcctcatggagcggcccctgattcttgccgaggtggcgcccaggtattcagtcatgctggagctgtttgacgctgagctagacaatgctaagatcttgtacgatgcccagatggcggcctccgaggaggggaacatccccctgatccacaaaaacatgcctcccgtggccgggcagctcaaatggagcctggagctgcaggagaggctagaggtgtccatgaaacacctgaagcacgtcgaacacccggtcatgtctggagcagaggccaagctgacctatcagaagtatgacgagatgatggagctgctgaggtgccaccgcgagaagatctaccagcagtgggtggcgggcgtggaccaggactgccactttaacctggggcagccgctgattctgcgggacgccgctagcaacctcatccacgtcaacttcagcaaagcgttggtggcagttctgagagaagtcaagtatttgaatttccagcaacagaaagagattccagacagtgcggagagtctgttctcagagaacgaaactttccggaagtttgtgggcaacctggagctcatcgttggctggtataatgagataaagactatagtgaaggcagtagaatttctactaataaagtcagaactggaagcaattgatgtcaagttattgagcgctgaaacgacattattctggaatggcgaaggtgtgtttcagtacattcaagaggtgcgagaaattctgcacaacttgcagaacaggatgcaaaaggcaaaacaaaatatagaaggaatttcccaggctatgaaggactggtcggccaacccgctgtttgaaagaaaggacaataagaaagaggccctgttagacttggatggaagaattgccaacctcaacaagcgctacgcagcagtcagggatgctggagtgaagatccaagccatggttgcagaaaacgcagaactattcagggcagacacactgagcctgccctggaaggattatgtcatctacattgacgacatggtcttagatgaatttgaccagttcattcgcaaatctctgagtttcctaatggacaacatggagagtatcgctcccctgtttgagatccgcatggagctggacgaggatgggctgaccttcaacccgaccctggaggtgggctcagatcgcggcttcctggcactgatcgagggcctggtcaacgacatctacaacgtagccaggctcatccctcggctggccaaggacaggatgaactacaagatggacctggaagataacacagacctcatagagatgagggaggaggtgtccagcctggtcatcaatgccatgaaggaggccgaggagtaccaggattcctttgagaggtactcctacctctggacggacaacctgcaggagtttatgaagaatttcctgatatatgggtgtgcagtcactgcggaggacttggacacctggacagatgacaccatccccaagacaccgcccaccctggctcagttccaggagcagatcgactcctacgagaagctgtatgaggaggtgtccaagtgcgagaacaccaaggtgttccacggctggctgcagtgcgactgccgccccttcaagcaggccctgctcagcacaatccggcgctggggcttcatgttcaagcggcacctgagcaaccacgtcaccaacagcctggctgacctggaagccttcatgaaagtcgccagaatgggcttgaccaagcccctcaaggagggggactatgatgggcttgtggaggtgatggggcacctgatgaaagtcaaggagaggcaagcagccaccgacaacatgtttgagcccctgaagcaaaccatcgagctgctcaagacctacggggaggagatgccagaggagatccacttgaagctgcaggagctgccggagcactgggcaaataccaagaaactggccattcaggtgaagctgaccgtggcaccactccaggccaacgaggtcagcatcctgcggcggaaatgccagcaattcgagctcaagcaacatgagttcagggagaggttcaggcgcgaggccccgttctccttcagcgaccccaacccctacaagtccctgaataagcaacaaaagagcatctccgccatggaaggcatcatggaggcgctgtccaagtccgggggcctgttcgaggtccccgtcccagactacaagcagctcaaggcctgccaccgggaggtccgcctactgaaggagctctgggacatggttgttgtggtaaataccagcatcgaggactggaagaccaccaagtggaaagatatcaacgttgagcagatggacatagattgtaagaagtttgccaaggacatgaggtctttggacaaggagatgaaaacctgggatgccttcgtggggctcgacaacaccgtgaaaaacgtgatcacgtccctgcgtgccgtgagcgagctgcagaaccctgccattcgggaacgccactggcagcagctcatgcaggccacccaggtgaaatttaaaatgtcagaagagacgaccctggcagatttactgcagctgaacctccacagttacgaggatgaggtccgcaacatcgtggacaaggccgtgaaggagtcgggcatggaaaaggtgctgaaagccctggacagtacctggagcatgatggaattccagcacgagccgcacccgcggacaggcaccatgatgctcaagtccagcgaggtgctggtggagacgctggaggacaaccaggtgcagctgcagaacctgatgatgtccaagtacctggcccacttcctgaaggaggtgacaagctggcagcagaagctgtccacggcggactccgtcatctccatctggtttgaggtccagcgaacctggagccacctggagagcatcttcatcggctccgaagacatccgcacccagctcccgggggactcccagcgctttgacgacatcaaccaggaattcaaggccttgatggaagatgcagtgaaaacacccaacgtggtggaagccaccagcaaacccggcctctacaataaactggaggccctgaagaagagcttggccatctgtgaaaaggctttggcagagtatttagagacgaaaagactggctttcccccggttctattttgtctcctcggctgacctcctggacattctctccaatggcaatgaccccgtggaggtgagccgccacctgtccaaactcttcgatagcctgtgtaaactgaagttccggctcgatgccagtgacaaacctctcaaggtgggcctgggaatgtacagcaaggaggacgagtacatggtttttgatcaggaatgcgacctctcggggcaggtggaagtgtggctgaatcgagtgctggaccgaatgtgctctaccctccggcacgaaatcccagaggccgtggtgacctacgaagagaagccgagggagcagtggatcctggactacccagcccaggtggccctgacttgcacccagatctggtggacgaccgaggtgggcctggcatttgccaggctggaggaaggctatgaaaacgctatcagagattataacaaaaagcagattagccagctgaacgtactcatcacgctgctcatggggaacctcaacgctggcgacaggatgaagatcatgaccatctgcaccatcgatgtgcacgcacgggacgtggtggccaaaatgatcgtggtggagagttctcaggccttcacctggcaggcccagctccggcatcgctgggacgaagagaagcgacactgctttgccaacatctgcgatgcccaaatccagtattcctatgagtatctgggcaacacgccgcggctggtcatcaccccactcactgacaggtgctatatcaccctgacccagtccctccatctcatcatgggtggagcccctgccggccccgctgggaccggcaagactgagacgaccaaggacctgggcagagccctgggcaccatggtctacgtcttcaactgctccgagcagatggactacaagtcctgtggaaatatctacaagggcctggcccagacgggagcctggggctgctttgacgagtttaatcgcatctcagtggaagtcttgtctgtgattgccgtgcaggtaaaatgtgtccaggatgcaattcgggccaagaaaaaagcattcaatttcctgggagagatcataggcctcattcccaccgtcggtatcttcatcaccatgaaccctgggtacgccggacgcgcggagctgcctgagaacctaaaagccttattcaggccctgtgccatggtcgtccccgacttcgaactgatatgtgagatcatgctcatggccgagggctttctggaagcccgccttctggccaggaagttcatcaccctgtacaccttgtgcaaggagctgctctcgaagcaggatcattacgactggggcctgagagccatcaagtctgtgctggtggtggccggctccctgaagaggggcgaccccagccgggcagaggaccaggtgctcatgcgggcgctgagagacttcaacatccccaagattgtgacagacgacctgcccgtattcatgggactgatcggggacctcttcccggctctggacgtgcctcggaaacgggacctgaattttgaaaagatcatcaagcagagcatcgtggagctcaagctgcaggcggaggacagcttcgtgctgaaggtggtgcagctggaggagctgctgcaggtccgccactccgtgttcatcgtcgggaatgcgggcagcggcaaatctcaggtcctcaaatccctcaacaagacctatcagaacctgaagaggaagccggtcgccgtggacctggaccccaaggccgtcacctgcgacgagctctttggcatcatcaacccagtgaccagggaatggaaagatggcctgttctccaccatcatgcgagacctggccaacatcacccatgacggccccaagtggatcatccttgacggagacatagaccccatgtggatcgagtctctcaacacagtcatggatgacaacaaggtcctcaccctggccagcaacgagcggatccccctgaaccgcaccatgaggctggtgttcgaaatcagccacctgaggacggccaccccagccaccgtttccagagccggcatcctctacatcaacccagccgacctgggatggaacccggtggtgagcagctggatcgagaggcgcaaggtgcagtcggagaaggccaacctgatgatcctctttgacaagtacctgcccacgtgcctggacaagttgcgctttgggttcaagaagatcacgccagtgccggagatcacggtgatccaaacgattctgtacctgctggagtgcctgctcacggagaagaccgtgccccccgactcccccagggagctgtacgagctgtacttcgtgttcacctgcttctgggccttcggtggcgccatgttccaggaccagcttgtggattatcgagtggagttcagtaaatggtggatcaacgaattcaagactatcaagttcccctcgcagggaacgatttttgactactacattgatcctgacacaaaaaagttcctgccctggacagataaagtgccctcctttgagctggatcccgatgtcccactgcaggcctctttggtccacaccacggaaaccatccgcatccgctacttcatggacctgctcatggagaagtcctggccggtgatgctggtggggaacgcggggacgggcaagtcggtgctgatgggggacaagctggaaagcctgaacacggacaactacctggtgcaggctgtgcccttcaacttctacacgacctcagccatgctgcagggggtgctggagaagccgctggagaagaaatcggggaggaactacgggccgccaggcactaagaagctcgtctacttcatcgacgacatgaacatgcccgaggtggacaagtatgggacggtggccccgcacaccctcatccggcagcacatggaccaccggcactggtatgacagacataagctgacgttaaaagatatccataattgtcagtacgtggcctgcatgaaccccacttccggatccttcaccatcgactccaggcttcagcgccatttctgcgtgtttgctgtgagcttccccggccaggaggccctcaccaccatctacaacacaatcctgacgcagcacctggccttccgctcggtctccatggctatccagaggataagcagccagctggtggccgcggccctggctttgcatcagaaaatcacggcaacatttcttcccacggccattaagtttcattatgtcttcaacctcagggacctctccaatattttccagggactcttattttccacagcagaagttctgaaaaccccactggacctcgtccgcctttggctacatgagactgaacgagtgtatggtgacaaaatggttgacgaaaaagaccaggaaacattgcatagagtcaccatggcctccaccaagaagttctttgatgatcttggtgatgaactcttatttgccaagccaaatatcttctgccactttgctcaagggattggcgatcccaaatatgttcctgtaaccgacatggctcctctgaacaagctcctcgtggacgtcctggacagctacaatgaagttaatgcagtcatgaatttggtgctgtttgaggacgccgtggctcacatctgcaggattaatcgcatcctggagtctccccgggggaatgccctgctggtgggggtgggcggcagtggcaaacagagcctctcccgcctggcagcgtacatcagcgggcttgacgtgtttcagatcaccctcaagaagggctacgggatccccgacctcaagattgacctcgctgctcagtacataaaggctgccgtgaagaacgttccctcggtgttcctgatgacagactcccaggtggccgaggagcagtttctggtgctgatcaatgacctgctggcctcaggagagatccctgggctgtttatggaggacgaggtggagaacatcatctcctccatgcgaccccaagtcaagtcccttggcatgaatgacactcgggaaacatgttggaagttcttcatcgaaaaagtgcgcagacagctcaaggtgatcctgtgtttctcccctgtgggctccgtgctgcgggtacgagccagaaagttcccagctgtggtcaactgcacggccatcgactggttccacgagtggccggaagatgcgctggtgtccgtcagcgcccgcttcctggaggagactgaggggattccgtgggaagtcaaggcctccatcagcttcttcatgtcctacgtgcacaccaccgtcaacgagatgtccagggtatacctggctactgagaggcgctacaactacaccacacccaaaacctttctggagcagatcaaactgtaccagaacctgctggccaagaagagaacggaacttgttgccaaaatcgagaggctggagaacggcctgatgaagctgcagagcacggcttcccaggtggatgatttgaaagccaagttggcgattcaggaggctgagctcaagcagaagaatgagagcgcagaccaactgatccaggtggtcggcatcgaggccgagaaggtcagcaaagagaaggccattgctgaccaggaagaagtcaaggtcgaggtcatcaataagaacgtcactgagaagcaaaaggcctgtgaaacagacctggccaaagcagaaccggccctgctggcagcccaggaggctctggacactctgaataagaacaacctgacagagctgaagtcctttgggtccccgccggatgctgtggtcaacgtcaccgccgccgtcatgattctgaccgcacctgggggcaagatccccaaggacaagagctggaaggcggccaagatcatgatgggcaaggtggacaccttcctagactccctgaagaagttcgacaaggagcacatccctgaggcctgcctgaaggccttcaagccctaccaaggcaacccgacgttcgaccccgagttcatccgctccaagtccacggccgccgccggcctgtgctcctggtgcatcaacatcgtccgcttctacgaggtctactgcgacgtggcgcccaagaggcaggcactggaggaggctaatgcagagctggcagaggcacaagagaagctgtcccggatcaaaaacaagattgccgaacttaacgccaacctgagcaacctaacctcagcgtttgaaaaagcaacagctgagaaaatcaagtgtcagcaagaggccgatgccacgaacagggtgatcttactggcgaacaggctggtcgggggattagcatcggaaaacatccgctgggctgagtctgtggagaacttcaggagccagggggtcacgctgtgtggggacgtcctgctcatctctgccttcgtgtcctacgtgggctacttcaccaagaaataccggaatgagctgatggagaaattctggatcccttacatacataacttaaaggtccccatcccgatcacgaatggcctggatcccttgagcctgctgacagatgacgcggacgtggccacctggaacaaccagggcctccccagcgaccgcatgtccaccgagaatgccaccatcctgggcaacaccgagcggtggccgctgatcgtggacgcccagctccaaggaatcaagtggatcaaaaacaaatacaggagtgaactgaaagccatccgcctgggacagaagagctacctggatgtcatcgagcaggccatctcggaaggggacaccttgctcattgagaacatcggcgaaaccgtggaccccgtgctggaccctctactgggcaggaacacgattaaaaagggaaagtacattaagatcggtgacaaggaggtggagtaccaccccaagttccgcctgatcctacacaccaagtacttcaacccacactacaagccagagatgcaggctcagtgcaccctcatcaacttcctggtcaccagggatggactcgaggaccaactcttggccgctgtggtggccaaagagcgcccagatctggaacagctgaaggcaaacctcaccaagtctcaaaacgaatttaagattgttctgaaagagctggaagattcgctcctggcccgtctgtcggctgcgtcggggaactttctgggagacacggccttggtggagaatctggagaccaccaagcacacagccagcgagatcgaggagaaggtggtggaggcaaaaatcacagaagttaaaatcaacgaagcgagagagaactaccgcccggctgcggagagggcatctctgctctacttcatactgaacgatctcaacaaaatcaaccccgtctaccagttctccctcaaggccttcaacgtggtgtttgagaaagccatccagaggaccacccctgccaacgaggtgaagcagcgggtgatcaacctgacggacgagatcacctactccgtctacatgtacacggcccggggactcttcgagagggacaaactcattttcctggcacaagttacgtttcaggtcctgtccatgaagaaggagctgaacccagtggagctggatttcctcctgcggttcccttttaaggccggagtggtctcaccagtggacttcctccagcatcaaggctggggcgggatcaaggccctctcggagatggatgagttcaaaaatctggacagtgacatcgaaggatctgccaagcgctggaaaaagctggtggagtcggaagcccccgagaaggagatcttccccaaggagtggaagaacaagacggccctgcagaagctgtgcatggtgcgctgcctgcggccagatcgcatgacctacgctatcaagaacttcgtggaggaaaagatgggcagcaagttcgtggaaggccggagtgttgagttttctaagtcctacgaggagagcagcccctccacgtcaatcttcttcatcctctccccgggggttgaccccttgaaagacgtggaagccctgggaaaaaaactagggtttaccatagacaatggaaaactccataatgtgtccctggggcagggacaagaggtggtggctgagaacgccctggacgtggctgcagagaaaggacactgggtcattctgcagaatatccacctggtggcccggtggctgggaacactggacaagaagctggagcactacagcacgggcagccatgaggactaccgggtgttcatcagcgcggagcctgcccccagccccgagacccacatcatcccccagggcattctggagaacgccatcaagatcaccaacgagccccccacgggcatgcacgccaacttgcacaaggccctggacctgttcacccaggacaccctggagatgtgcaccaaggagatggagttcaagtgcatgctcttcgccctgtgctacttccacgctgtggtggcagagaggcgcaagttcggcgcccagggctggaaccggtcgtaccccttcaacaacggggacctcaccatctccatcaacgtgctctacaactacctggaggccaaccccaaggtgccctgggacgatctccgctacctttttggtgaaatcatgtatggcggccacatcacagatgactgggaccgtcggctgtgcaggacctacctggctgaatacatccggacggagatgctggagggagacgtcctgctggcccccggctttcagatcccccccaacctggactacaagggttaccacgaatacatcgatgagaacctgccccctgagagtccctatctgtatggcctgcaccccaacgcagagattggctttctgacggtcacctcagagaagctgttccgcactgtcctggaaatgcagccaaaagagacggactcgggggcaggcacgggagtgtcccgcgaggagaaggtgaaggccgtgctggacgacatcctggagaagattccggagactttcaacatggctgagatcatggcaaaggcagcggaaaagaccccctacgtggtagtcgcctttcaagaatgtgaaagaatgaacatcctgaccaacgaaatgcgccgttcgctcaaggagctgaacctggggctgaagggagaactgaccatcacgaccgacgtggaagatctgtccacggctctcttctatgacaccgtgcctgatacgtgggtggcccgggcctacccctccatgatgggcctggcggcctggtacgcagacctgctgctccgcatcagggaactcgaggcctggacgacagactttgccctgcccaccaccgtgtggctggccggcttcttcaacccccagtcgttcctcacggccatcatgcagtccatggccaggaagaacgagtggcccctggacaagatgtgtctgtctgtcgaggtgaccaagaaaaaccgagaggacatgaccgctcctccgcgagagggctcctacgtgtacggactcttcatggaaggggctcgctgggacacccagactggagtcatcgctgaagcgcggctgaaagagctgaccccggccatgcctgtcatcttcatcaaggccattcctgtggaccgcatggagaccaagaacatctatgagtgtcccgtgtacaaaacacgcatccgcggccccacctatgtctggacctttaacttgaagaccaaagagaaggcagcgaagtggatcctggcagccgtggcgctgctcctacaggtttagctcgctcctgcctcacagcccacactccctggggctggaccacaactcagcccttcacctgtgcacctgtgacttattctttacaggaactggtggtggtttttcgttctcttaaataatcaggtgctttgtaaccaagcacatcggaaccagagggtggaggttggtgtggaagaggtggggcagattaaagccagtggagccactca

SEQ ID NO: 250616 - DNA, 13374 bp, Artificial Sequence
  derived and/or modified sequence
atgaccatggccccagatgtgcggctggagtacctggaggaggtggccagcatcgtgctgaagttcaagccagacaagtggagcaagctgattggagcagaagaaaatgtggccctcttcacagagttctttgagaagccagatgtgcaggtgctggtgctgaccctgaatgctgctggcatgatcatcccctgcctgggcttcccccagagcctgaagagcaaaggagtgtacttcatcaagaccaagtctgagaacatcaacaaggacaactaccgggcccggctgctgtatggagacatcagccccacccctgtggaccagctgattgctgtggtggaggaggtgctgagcagcctgctgaaccagagcgagaacatggccggctggccccaggtggtgtctgaggacatcgtgaagcaggtgcaccggctgaagaatgagatgtttgtgatgtctgggaagatcaagggcaagaccctgctgcccatccctgagcacctgggcagcctggatggcaccctggagagcatggagcgcatccccagcagcctggacaacctgctgctgcacgccatcgagaccaccatcatcgactggagccaccagatcagagatgtgctgagcaaggacagcgcccaggccctgctggatggcctgcaccccctgccccaggtggagtttgagttctgggacacccggctgctgaacctgaagtgcatccacgagcagctgaaccggcccaaggtgaacaagatcgtggagatcctggagaaggccaagagctgctactggccagccctgcagaatgtgtacaccaacgtgacagagggcctgaaggaggccaatgacatcgtgctgtacctgaagcccctgcgcatcctgctggaggagatggagcaggccgacttcaccatgctgcccaccttcatcgccaaggtgctggacaccatctgcttcatctgggccaccagcgagtactacaacaccccagcccgcatcatcgtcatcctgcaggagttctgcaaccagatcatcgagatgaccaggaccttcctgagccctgaggaggtgctgaagggcctgcagggcgagattgaggaggtgctgagcggcatcagcctggccgtgaatgtgctgaaggagctgtaccagacctatgacttctgctgcgtgaacatgaagctgttcttcaaggacaaggagcctgtgccctgggagttccccagcagcctggccttcagccgcatcaacagcttcttccagaggatccagaccatcgaggagctgtacaagacagccatcgagttcctgaagctggagaagattgagctgggcggcgtgcggggcaacctgctgggcagcctggtgacccgcatctatgatgaggtgtttgagctggtgaaggtgtttgctgactgcaagtatgaccccctggaccccggggacagcaactttgaccgggactatgctgactttgagatcaagatccaggacctggaccggcggctggccaccatcttctgccagggctttgatgactgcagctgcatcaagagcagcgccaagctgctgtacatgtgtggcggcctgatggagcggcccctcatcctggccgaggtggccccccgctacagcgtgatgctggagctgtttgatgctgagctggacaatgccaagatcctgtatgatgcccagatggccgccagcgaggagggcaacatccccctcatccacaagaacatgcctcctgtggccggccagctgaagtggagcctggagctgcaggagcggctggaggtgtccatgaagcacctgaagcacgtggagcaccctgtgatgtctggagctgaggccaagctgacctaccagaagtatgatgagatgatggagctgctgcgctgccaccgggagaagatctaccagcagtgggtggccggcgtggaccaggactgccacttcaacctgggccagcccctcatcctgagagatgctgccagcaacctgattcatgtgaacttcagcaaggccctggtggccgtgctgcgggaggtgaagtacctgaacttccagcagcagaaggagatcccagattctgctgagagcctcttctctgaaaatgagaccttcaggaagtttgtgggcaacctggagctgattgtgggctggtacaatgagatcaagaccatcgtgaaggctgtggagttcctgctgatcaagtctgagctggaggccattgatgtgaagctgctgtctgctgagaccaccctcttctggaatggagaaggagtcttccagtacatccaggaggtgcgggagatcctgcacaacctgcagaacaggatgcagaaggccaagcagaacatcgagggcatcagccaggccatgaaggactggagcgccaaccccctgtttgagaggaaggacaacaagaaggaggccctgctggacctggatggccgcatcgccaacctgaacaagagatatgctgctgtgagagatgctggggtgaagatccaggccatggtggctgaaaatgctgagctgttccgggctgacaccctgagcctgccctggaaggactatgtgatctacattgatgacatggtgctggatgaatttgaccagttcatcaggaagagcctgtccttcctgatggacaacatggagagcatcgcccccctgtttgagatccgcatggagctggatgaagatggcctgaccttcaaccccaccctggaggtgggcagtgaccggggcttcctggccctgattgagggcctggtgaatgacatctacaacgtggcccggctcatcccccggctggccaaggacaggatgaactacaagatggacctggaggacaacacagacctgattgagatgagggaggaggtgagcagcctggtgatcaatgccatgaaggaggccgaggagtaccaggacagctttgagcgctacagctacctgtggacagacaacctgcaggagttcatgaagaacttcctgatctacggctgtgctgtgacagctgaggacctggacacctggacagatgacaccatccccaagaccccacccaccctggcccagttccaggagcagattgacagctatgagaagctgtatgaggaggtgtccaaatgtgagaacaccaaggtgttccacggctggctgcagtgtgactgccggcccttcaagcaggccctgctgagcaccatccgccgctggggcttcatgttcaagaggcacctgagcaaccacgtgaccaacagcctggccgacctggaggccttcatgaaggtggccaggatgggcctgaccaagcccctgaaggagggggactatgatggcctggtggaggtgatgggccacctgatgaaggtgaaggagcggcaggccgccacagacaacatgtttgagcccctgaagcagaccatcgagctgctgaagacctatggagaggagatgcctgaggagatccacctgaagctgcaggagctgcctgagcactgggccaacaccaagaagctggccatccaggtgaagctgactgtggcccccctgcaggccaatgaggtgtccatcctgcggaggaagtgccagcagtttgagctgaagcagcacgagttccgggagcgcttccggcgggaggcccccttctccttcagtgaccccaacccctacaagagcctgaacaagcagcagaagagcatcagcgccatggagggcatcatggaggccctgagcaagagcggcggcctgtttgaggtgcctgtgcctgactacaagcagctgaaggcctgccaccgggaggtgcggctgctgaaggagctgtgggacatggtggtggtggtgaacaccagcattgaggactggaagaccaccaagtggaaggacatcaacgtggagcagatggacatcgactgcaagaagtttgccaaggacatgaggagcctggacaaggagatgaagacctgggatgcctttgtgggcctggacaacacagtgaagaatgtcatcaccagcctgcgggctgtgtctgagctgcagaacccagccatccgggagcggcactggcagcagctgatgcaggccacccaggtgaagttcaagatgtctgaggagaccaccctggccgacctgctgcagctgaacctgcacagctatgaagatgaggtgagaaatattgtggacaaggctgtgaaggagagcggcatggagaaggtgctgaaggccctggacagcacctggagcatgatggagttccagcacgagccccaccccaggacaggcaccatgatgctgaagagcagcgaggtgctggtggagaccctggaggacaaccaggtgcagctgcagaacctgatgatgagcaagtacctggcccacttcctgaaggaggtgacctcctggcagcagaagctgagcacagctgacagcgtcatcagcatctggtttgaggtgcagaggacctggagccacctggagagcatcttcatcggcagcgaggacatccgcacccagctgcccggggacagccagagatttgatgacatcaaccaggagttcaaggccctgatggaggatgctgtgaagacccccaacgtggtggaggccaccagcaagccaggcctgtacaacaagctggaggccctgaagaagagcctggccatctgtgagaaggccctggccgagtacctggagaccaagaggctggccttcccccgcttctactttgtgtcctctgctgacctgctggacatcctgagcaatggaaatgaccctgtggaggtgagccgccacctgagcaagctgtttgacagcctgtgcaagctgaagttccggctggatgccagtgacaagcccctgaaggtgggcctgggcatgtacagcaaggaggatgagtacatggtgtttgaccaggagtgtgacctgagcggccaggtggaggtgtggctgaacagagtgctggacaggatgtgcagcaccctgcggcatgagatccctgaggccgtggtgacctatgaggagaagccccgggagcagtggatcctggactacccagcccaggtggccctgacctgcacccagatctggtggaccacagaggtgggcctggcctttgcccggctggaggagggctatgaaaatgccatccgggactacaacaagaagcagatcagccagctgaatgtgctgatcaccctgctgatgggcaacctgaatgctggggacaggatgaagatcatgaccatctgcaccattgatgtgcacgccagagatgtggtggccaagatgattgtggtggagagcagccaggccttcacctggcaggcccagctgcggcaccgctgggatgaggagaagaggcactgctttgccaacatctgtgatgcccagatccagtacagctatgagtacctgggcaacaccccccggctggtgatcacccccctgacagaccgctgctacatcaccctgacccagagcctgcacctgatcatgggcggggccccagctggccctgctggcaccgggaagacagagaccaccaaggacctgggccgggccctgggcaccatggtgtatgtgttcaactgcagcgagcagatggactacaagagctgtggcaacatctacaagggcctggcccagacaggagcctggggctgctttgatgagttcaaccgcatctctgtggaggtgctgtctgtgattgctgtgcaggtgaagtgtgtgcaggatgccatccgggccaagaagaaggccttcaacttcctgggggagatcatcggcctcatccccaccgtgggcatcttcatcaccatgaaccctggctacgccggccgggcagagctgcctgagaacctgaaggccctcttccggccctgtgccatggtggtgcctgactttgagctgatctgtgagatcatgctgatggccgagggcttcctggaggcccggctgctggccaggaagttcatcaccctgtacaccctgtgcaaggagctgctgagcaagcaggaccactatgactggggcctgcgggccatcaagtctgtgctggtggtggccggcagcctgaagagaggagaccccagcagagctgaggaccaggtgctgatgagggccctgcgggacttcaacatccccaagatcgtgacagatgacctgcccgtcttcatgggcctcatcggggacctcttccctgccctggatgtgcccaggaagagggacctgaactttgagaagatcatcaagcagagcatcgtggagctgaagctgcaggctgaagattcttttgtgctgaaggtggtgcagctggaggagctgctgcaggtgcgccacagcgtcttcatcgtgggcaatgccggcagcggcaagagccaggtgctgaagagcctgaacaagacctaccagaacctgaagaggaagcctgtggccgtggacctggaccccaaggctgtgacctgtgatgagctgtttggcatcatcaaccctgtgacccgggagtggaaggatggcctcttcagcaccatcatgagggacctggccaacatcacccatgatggccccaagtggatcatcctggatggagacatcgaccccatgtggattgagagcctgaacacagtgatggatgacaacaaggtgctgaccctggccagcaatgaaagaatccccctgaacagaaccatgaggctggtgtttgagatcagccacctgaggacagccaccccagccaccgtgtcccgggccggcatcctgtacatcaacccagctgacctgggctggaaccctgtggtgtcctcctggattgaaagaaggaaggtgcagagcgagaaggccaacctgatgatcctgtttgacaagtacctgcccacctgcctggacaagctgcgcttcggcttcaagaagatcacccctgtgcctgagatcaccgtcatccagaccatcctgtacctgctggagtgcctgctgacagagaagacagtgcccccagacagcccccgggagctgtatgagctgtactttgtgttcacctgcttctgggccttcggcggggccatgttccaggaccagctggtggactacagagtggagttcagcaagtggtggatcaatgagttcaagaccatcaagttccccagccagggcaccatctttgactactacatcgaccctgacaccaagaagttcctgccctggacagacaaggtgcccagctttgagctggaccctgatgtgcccctgcaggccagcctggtgcacaccacagagaccatccgcatccgctacttcatggacctgctgatggagaagtcctggcctgtgatgctggtgggcaatgccggcaccgggaagtctgtgctgatgggagacaagctggagagcctgaacacagacaactacctggtgcaggccgtgcccttcaacttctacaccaccagcgccatgctgcagggcgtgctggagaagcccctggagaagaagagcggcaggaactacggccccccaggcaccaagaagctggtgtacttcattgatgacatgaacatgcctgaggtggacaagtatggaacagtggccccccacaccctcatccggcagcacatggaccaccgccactggtatgacagacacaagctgaccctgaaggacatccacaactgccagtatgtggcctgcatgaaccccaccagcggcagcttcaccatcgacagccggctgcagaggcacttctgtgtgtttgctgtgtccttccctggccaggaggccctgaccaccatctacaacaccatcctgacccagcacctggccttccgctctgtgtccatggccatccagaggatcagcagccagctggtggccgccgccctggccctgcaccagaagatcacagccaccttcctgcccacagccatcaagttccactacgtgttcaacctgcgggacctgagcaacatcttccagggcctgctcttcagcacagctgaggtgctgaagacccccctggacctggtgcggctgtggctgcatgaaacagagcgggtgtatggagacaagatggtggatgagaaggaccaggagaccctgcaccgggtgaccatggccagcaccaagaagttctttgatgacctgggagatgagctgctgtttgccaagcccaacatcttctgccactttgcccagggcatcggggaccccaagtatgtgcctgtgacagacatggcccccctgaacaagctgctggtggatgtgctggacagctacaatgaggtgaatgctgtgatgaacctggtgctgtttgaagatgctgtggcccacatctgccgcatcaaccgcatcctggagagccccagaggaaatgccctgctggtgggcgtgggcggcagcggcaagcagagcctgagccggctggccgcctacatcagcggcctggatgtgttccagatcaccctgaagaagggctacggcatcccagacctgaagattgacctggccgcccagtacatcaaggctgctgtgaagaatgtgcccagcgtcttcctgatgacagacagccaggtggccgaggagcagttcctggtgctgatcaatgacctgctggccagcggggagatccctggcctcttcatggaggatgaggtggagaacatcatcagctccatgaggccccaggtgaagagcctgggcatgaatgacacccgggagacctgctggaagttcttcatcgagaaggtgcggcggcagctgaaggtgatcctgtgcttcagccctgtgggctctgtgctgcgggtgcgggccaggaagtttcctgctgtggtgaactgcacagccatcgactggttccacgagtggccagaagatgccctggtgtctgtgtctgcccgcttcctggaggagacagagggcatcccctgggaggtgaaggccagcatctccttcttcatgtcctatgtgcacaccaccgtgaatgagatgagccgggtgtacctggccacagaaagacgctacaactacaccacccccaagaccttcctggagcagatcaagctgtaccagaacctgctggccaagaagaggacagagctggtggccaagattgagcggctggagaatggcctgatgaagctgcagagcacagccagccaggtggatgacctgaaggccaagctggccatccaggaggccgagctgaagcagaagaatgaatctgctgaccagctgatccaggtggtgggcatcgaggccgagaaggtgtccaaggagaaggccatcgctgaccaggaggaggtgaaggtggaggtgatcaacaagaatgtgacagagaagcagaaggcctgtgaaacagacctggccaaggccgagcccgccctgctggccgcccaggaggccctggacaccctgaacaagaacaacctgacagagctgaagagctttggcagccccccagatgctgtggtgaatgtgacagctgctgtgatgatcctgacagcccctgggggcaagatccccaaggacaagtcctggaaggccgccaagatcatgatgggcaaggtggacaccttcctggacagcctgaagaagtttgacaaggagcacatccctgaggcctgcctgaaggccttcaagccctaccagggcaaccccacctttgatcctgagttcatccgcagcaagagcacagctgctgctggcctgtgctcctggtgcatcaacatcgtgcgcttctatgaggtgtactgtgatgtggcccccaagaggcaggccctggaggaggccaatgctgagctggccgaggcccaggagaagctgagccgcatcaagaacaagattgctgagctgaatgccaacctgagcaacctgaccagcgcctttgagaaggccacagctgagaagatcaagtgccagcaggaggctgatgccaccaacagagtcatcctgctggccaaccggctggtgggcggcctggccagcgagaacatccgctgggccgagagcgtggagaacttccgcagccagggcgtgaccctgtgtggagatgtgctgctgatcagcgcctttgtgtcctatgtgggctacttcaccaagaagtacagaaatgagctgatggagaagttctggatcccctacatccacaacctgaaggtgcccatccccatcaccaacggcctggaccccctgagcctgctgacagatgatgctgatgtggccacctggaacaaccagggcctgcccagcgacaggatgagcacagaaaatgccaccatcctgggcaacacagagcgctggcccctcatcgtggatgcccagctgcagggcatcaagtggatcaagaacaagtacagaagtgagctgaaggccatccggctgggccagaagagctacctggatgtgattgagcaggccatcagcgagggggacaccctgctgattgagaacatcggggagaccgtggaccctgtgctggaccccctgctgggcaggaacaccatcaagaagggcaagtacatcaagattggagacaaggaggtggagtaccaccccaagttccgcctcatcctgcacaccaagtacttcaacccccactacaagccagagatgcaggcccagtgcaccctcatcaacttcctggtgaccagagatggcctggaggaccagctgctggccgctgtggtggccaaggagaggccagacctggagcagctgaaggccaacctgaccaagagccagaatgagttcaagatcgtgctgaaggagctggaggacagcctgctggcccggctgtctgctgccagcggcaacttcctgggggacacagccctggtggagaacctggagaccaccaagcacacagccagcgagattgaggagaaggtggtggaggccaagatcacagaggtgaagatcaatgaggcccgggagaactacagacctgctgctgagcgggccagcctgctgtacttcatcctgaatgacctgaacaagatcaaccctgtgtaccagttcagcctgaaggccttcaacgtggtgtttgagaaggccatccagaggaccaccccagccaatgaggtgaagcagagggtcatcaacctgacagatgagatcacctacagcgtgtacatgtacacagcccggggcctgtttgagcgggacaagctgatcttcctggcccaggtgaccttccaggtgctgtccatgaagaaggagctgaaccctgtggagctggacttcctgctgcgcttccccttcaaggccggcgtggtgtcccctgtggacttcctgcagcaccagggctggggcggcatcaaggccctgtctgagatggatgagttcaagaacctggacagcgacatcgagggcagcgccaagcgctggaagaagctggtggagagcgaggcccctgagaaggagatcttccccaaggagtggaagaacaagacagccctgcagaagctgtgcatggtgcgctgcctgcggccagacaggatgacctacgccatcaagaactttgtggaggagaagatgggcagcaagtttgtggagggccgctctgtggagttcagcaagagctatgaggagagcagccccagcaccagcatcttcttcatcctgagccctggggtggaccccctgaaggatgtggaggccctgggcaagaagctgggcttcaccatcgacaatggcaagctgcacaacgtgtccctgggccagggccaggaggtggtggccgagaatgccctggatgtggccgctgagaagggccactgggtgatcctgcagaacatccacctggtggcccgctggctgggcaccctggacaagaagctggagcactacagcacaggcagccatgaggactacagagtcttcatctctgctgagcccgcccccagccctgagacccacatcatcccccagggcatcctggagaatgccatcaagatcaccaatgaaccacccaccggcatgcacgccaacctgcacaaggccctggacctcttcacccaggacaccctggagatgtgcaccaaggagatggagttcaagtgcatgctgtttgccctgtgctacttccacgctgtggtggccgagaggaggaagtttggagcccagggctggaacagaagctaccccttcaacaatggagacctgaccatcagcatcaacgtgctgtacaactacctggaggccaaccccaaggtgccctgggatgacctgcgctacctgtttggagagatcatgtatggaggccacatcacagatgactgggaccggcggctgtgcaggacctacctggccgagtacatcagaacagagatgctggagggagatgtgctgctggcccctggcttccagatcccccccaacctggactacaagggctaccacgagtacattgatgagaacctgcccccagagagcccctacctgtatggcctgcaccccaatgctgagatcggcttcctgactgtgaccagcgagaagctgttcagaacagtgctggagatgcagcccaaggagacagacagcggggccggcaccggggtgtcccgggaggagaaggtgaaggctgtgctggatgacatcctggagaagatccctgagaccttcaacatggccgagatcatggccaaggctgctgagaagaccccctacgtggtggtggccttccaggagtgtgagaggatgaacatcctgaccaatgagatgagaagaagcctgaaggagctgaacctgggcctgaagggggagctgaccatcaccacagatgtggaggacctgagcacagccctcttctatgacacagtgcctgacacctgggtggcccgggcctaccccagcatgatgggcctggccgcctggtatgctgacctgctgctgcgcatccgggagctggaggcctggaccacagactttgccctgcccaccaccgtgtggctggccggcttcttcaacccccagagcttcctgacagccatcatgcagagcatggccaggaagaatgagtggcccctggacaagatgtgcctgtctgtggaggtgaccaagaagaaccgggaggacatgacagccccaccccgggagggcagctatgtgtatggcctcttcatggagggcgcccgctgggacacccagacaggagtgattgctgaggcccggctgaaggagctgaccccagccatgcctgtgatcttcatcaaggccatccctgtggacaggatggagaccaagaacatctatgagtgccctgtgtacaagacccgcatccggggccccacctacgtgtggaccttcaacctgaagaccaaggagaaggccgccaagtggatcctggccgctgtggccctgctgctgcaggtgtag

SEQ ID NO: 250617 - DNA, 13374 bp, Artificial Sequence
  derived and/or modified sequence
atgaccatggcccccgacgtgcggctggagtacctggaggaggtggcttccattgtgcttaaatttaaacccgacaaatggtccaagttaattggggcagaggagaacgtggcactcttcaccgaatttttcgagaaaccagacgtgcaggtcttggtgttgaccctgaatgctgccggtatgatcatcccatgtctcggattcccccagtcccttaaatctaagggcgtctacttcatcaagactaagtcagaaaacattaacaaggataattaccgggcccggttgctgtacggggacataagtcccacccctgtggatcagctgattgccgtggttgaagaggtactgtcatctctgctgaaccagtccgagaatatggctgggtggccacaggtagtgtcagaggatatcgtgaagcaggtgcaccgcctgaaaaatgagatgtttgtgatgagtggcaagatcaaggggaagacactgctcccgatccctgagcacctgggctctctcgatggcacactcgaatctatggaaaggatcccgtcctcattggacaacctgctcctccacgcgatcgagacaactattatagattggagccaccagatacgcgatgtcttgtctaaggactcagcccaggccctgctggatggcctccaccctctgccacaagtggaattcgagttttgggatactagacttctcaatctcaaatgcatacacgagcagctcaaccgccccaaagttaacaagatagtggaaatcctggaaaaggccaaatcttgctattggcctgcccttcaaaacgtctatacaaacgtcaccgagggcttgaaggaggccaacgatattgtgctgtacttaaaaccgctgcgtatacttctggaggagatggagcaggccgatttcacgatgctccctacatttatcgccaaggtgctggacacaatctgcttcatttgggcaacctcggagtactacaatactcctgcacgcattattgtcattctgcaggaattttgcaaccagattatagagatgactcgcacatttttaagtcctgaggaggtactgaagggactgcagggtgagatagaggaagtgttgagcggaatctctctggccgtcaacgttcttaaggaactgtaccagacatacgacttctgctgcgtaaatatgaagcttttcttcaaagataaggaacctgtgccctgggaattccccagctcattggccttctcaagaataaactccttcttccagagaatccaaacaattgaggagctatataagaccgccatagagttcctgaagttagagaaaatagaattggggggtgtcagagggaatctgctcggctccctcgtgacacgtatctacgatgaagtgttcgaactcgtcaaagtgttcgcagattgtaaatacgatcccctggatcctggcgatagcaactttgaccgggattatgcagactttgagatcaaaatccaggatctggacaggcgattagcaactatcttctgtcaagggtttgacgactgctcttgtattaaaagcagtgcgaagctactgtacatgtgcggggggctgatggagcggcctttgatcttagctgaggtggcacctcggtacagcgtcatgctcgagttgtttgatgcagagctggacaacgccaagatcctatacgacgcgcaaatggcggccagtgaggaaggcaatatccctctgatccacaagaacatgcctcccgtagcggggcagctgaagtggtcgttagagctgcaggagcgccttgaagtgagtatgaagcacctgaaacacgtggaacacccagtcatgagtggtgcagaagcgaagctgacgtatcaaaaatacgatgagatgatggagctcctgcgttgtcacagggagaagatctaccaacagtgggttgccggcgttgaccaggattgtcatttcaacctgggccaaccgctgatattgcgggacgctgccagcaacctcatccatgtcaacttttccaaggctctggtcgcggtactccgggaggtgaaatacctgaatttccagcagcagaaggagataccagactctgctgaatcactgttctcagagaatgaaacttttcgtaagttcgttggaaatctggagctgattgtcggttggtacaacgaaatcaaaactatcgtgaaagctgttgaatttttactcatcaagtccgagctcgaggcaattgacgtgaaactgctctcagccgagaccactctattctggaacggagaaggggtgtttcagtatatccaggaggtaagggaaattctccataatttgcagaaccgcatgcagaaggccaaacaaaatatcgagggcatatctcaggctatgaaagactggtctgcaaatcctctcttcgaaagaaaagacaacaaaaaggaggctctcttagacctcgatggcagaatagccaacttaaacaagaggtacgcagccgtacgggacgcaggcgtgaagattcaggccatggtcgccgaaaatgccgagctgttcagggcggatacactgtctctgccctggaaggactatgttatctacattgatgatatggtacttgatgaattcgatcaattcattcggaagagtctcagctttctcatggataatatggaatccatcgccccactgttcgagattcgcatggagttagatgaagacggcctgacctttaaccctactttggaagtgggaagcgataggggattccttgccctgattgaaggactggtaaacgacatctacaacgttgcgcgtttgatacctcgcctggccaaggatcggatgaactacaaaatggacctggaagacaacaccgatctgattgagatgagggaggaggtcagctccctagtcatcaatgccatgaaggaagccgaggagtaccaggactcttttgaaaggtattcttacctgtggaccgataatcttcaggaattcatgaagaacttcctgatctacgggtgcgccgtgactgctgaagatttagacacatggactgacgacaccattccaaagacacctcctacactcgcacagtttcaagaacagattgattcatacgaaaaactgtatgaagaggtatccaagtgcgaaaatacgaaggtctttcacgggtggctgcaatgtgattgcagaccttttaagcaggccttgctctcaaccatcaggcgatggggcttcatgttcaaaagacacctgagtaaccacgttactaattcccttgctgacctcgaggccttcatgaaagtggctagaatgggcctgacaaagcccttaaaagagggtgattacgacggcctggtggaagtaatgggacatctaatgaaggtcaaggagaggcaggccgctaccgacaatatgttcgagccgctaaaacaaacaatcgaactgctcaaaacttacggtgaggaaatgcctgaggaaattcacttgaaattgcaggagctgcctgagcactgggctaatactaaaaagctcgctatacaagttaaacttacggttgcccctttgcaagccaatgaagtctcaattttgcgacggaaatgtcaacagttcgaactcaagcagcatgagtttcgggagcggtttcggcgagaggcaccattcagtttcagtgaccccaacccatataagtcacttaataagcaacagaaaagcatatccgctatggaaggcatcatggaggccctgtctaaatccggtggtctgtttgaggtccccgtcccagactacaagcaattaaaagcgtgccaccgagaggtgcgcctcttgaaagaactgtgggatatggtggtcgtcgtgaatacgagtatcgaagactggaaaactacaaagtggaaggacatcaatgtcgaacagatggatattgattgtaagaagtttgccaaagacatgcgttctcttgacaaagaaatgaagacttgggacgccttcgtgggcctggacaatactgtgaagaacgtgatcacctcgctgagagccgtgagcgagctccaaaaccctgccattagagaacgccactggcagcagctgatgcaggcaacccaggtgaagtttaaaatgagtgaggagacgactctcgccgacctgttacagctaaatttgcattcctatgaggatgaggtgcgcaatattgtcgataaagcagtaaaggaatccggtatggagaaagtgcttaaggccctcgattctacgtggtcaatgatggaatttcagcacgagccacacccacgaacaggcacaatgatgctgaaaagcagcgaagtactggtagaaaccctcgaggacaaccaggtgcagcttcagaatttaatgatgtccaagtacctggcccatttcttgaaagaggtgacctcttggcagcagaaactctccactgcagacagcgtgatctcgatatggttcgaagtccagcgcacatggtctcacctggagagcatctttatcggatccgaagatattcgcacacagctgcccggggatagccagcggtttgatgacatcaaccaggaattcaaagccctaatggaagatgccgtcaagactccgaatgtcgttgaggccacgtccaagccagggctgtacaacaaactggaggcactaaagaaaagcttagcaatctgcgaaaaggctctcgcggagtatctggagaccaagcgcttggcctttcctcggttctacttcgtctccagcgctgacctgctagatattcttagcaatggtaacgatccagttgaggtttcccggcatctgtccaagctgttcgattcgttgtgtaagttgaaattccgcctggatgcttctgacaagcctctgaaagttggtctcgggatgtattcaaaggaagacgagtatatggtgttcgatcaggagtgtgacctgtcaggccaggtggaagtttggctgaatcgtgttctggaccggatgtgttctaccctgcggcacgagatccccgaggcagtagtgacctacgaggaaaaaccccgggaacagtggatcctggactaccccgcccaggtagcattgacgtgcacccagatttggtggaccactgaggtgggattagcctttgctcggctcgaggaaggatacgagaacgccattcgggactataataaaaaacaaatctctcagctcaacgtgctgatcaccctgctgatgggcaacttaaatgctggggatcgcatgaaaattatgacaatctgtacaattgacgttcacgcgcgagacgtcgtggctaaaatgatcgttgtggaatcaagtcaagcatttacgtggcaggcccagttaagacatagatgggacgaagaaaaacgacactgtttcgccaacatatgcgatgcccagattcaatactcctatgaatatctcggcaatactccaagactggtgatcacaccactgacagaccgctgctatatcaccctgacgcagagcctgcacctgattatggggggtgcacctgcgggaccggcaggaactggcaaaaccgaaactacgaaggacctggggcgcgccctgggcaccatggtgtacgtctttaactgttctgaacaaatggattataagtcctgtggtaatatctataaaggcctggcccaaaccggggcttggggatgttttgatgagttcaatagaatatctgtggaagtcctgagcgtcattgccgtgcaggtaaagtgtgtgcaggatgccatccgcgcaaagaagaaggctttcaacttcctcggagagattattgggcttattcccacagttggaatctttattacaatgaacccagggtacgctggcagggccgagcttcctgaaaacctcaaggccctatttaggccctgcgcaatggtggtgcccgattttgaactcatctgtgaaatcatgctcatggccgagggtttcctggaggcgcgtttgttagcaagaaaattcattactctgtacaccctctgcaaggagttactttcaaagcaggaccattatgattgggggttgcgggcaataaagtctgttctcgtcgtcgccggatccctaaaaagaggcgatcctagcagggccgaagatcaggtcctcatgagggccctgcgtgatttcaatatccctaagattgtgactgacgacctacctgtgttcatggggctgatcggagatctgttccctgcgctggatgtgcctaggaagcgagacctaaacttcgaaaagattatcaagcagtcgatcgtcgagctgaaactgcaagctgaggattcatttgttctaaaggttgtgcagcttgaggaattgctacaggtcaggcacagcgtgttcatcgtgggcaatgcaggctcaggtaagtctcaagtgcttaaaagcctgaacaaaacataccagaatctgaaaaggaagccggtggccgtcgatctggacccaaaagccgtgacctgtgatgaactctttggtattattaatcccgttacccgagaatggaaagacgggctcttttctacgatcatgcgtgacctagctaacatcacccatgatgggcccaagtggattatcctggacggagatatcgacccgatgtggattgagtctctaaacaccgttatggatgacaacaaggtgctcacattagcttctaacgagcgcattccactgaaccgcactatgagactggtgttcgagatctcccacctcagaaccgctactccagctacggtcagtcgcgccggaatcttatatatcaaccccgctgacctagggtggaaccccgtggtctccagctggattgagcgtagaaaagtccagtcagagaaagcaaacttaatgatactgtttgacaagtacttgcccacctgcctcgacaaactgagatttggctttaagaagatcacccctgtgcccgagatcactgttatacaaaccatattgtacctgttagagtgccttctgacagaaaaaacagtgcccccagactcgccacgtgagctgtacgagctatatttcgtctttacatgtttttgggcatttggaggggcaatgtttcaggaccaactcgtagattacagagtcgaattctcaaagtggtggatcaacgaatttaaaaccatcaagtttccaagtcaggggaccattttcgactactatatcgaccctgacacgaagaagttcctcccttggactgataaggtaccaagcttcgaactggaccctgatgtgcctctccaggcctcattagtccatacgacagagactataagaatacgttatttcatggatctgctgatggaaaagagctggccagtcatgctagtcggcaacgctggcaccggaaaatcagtcctgatgggagacaagcttgagagcctcaatactgataattatttagttcaggcagtgccttttaacttctatacaaccagcgccatgctacaaggtgtgctggagaagcccttggagaagaaaagcggccgcaattacggcccccccggaactaagaagctagtgtactttatcgatgatatgaacatgccagaggttgataagtacggcactgtggctccacacactctcatacgtcagcacatggatcacaggcactggtatgaccgacacaagctgactctgaaggacatccacaattgccagtacgttgcctgcatgaaccctaccagcggtagtttcaccatcgattcgcgactgcagcgccatttctgtgtcttcgccgtcagcttccctgggcaggaagctcttacaaccatatacaatactatcctgacacaacatttggcatttagatctgtgagcatggctatacagagaatttctagccagcttgtcgctgctgctctggctctgcaccagaagatcaccgcgacctttctgccaactgccataaagttccactacgtgttcaatctgcgggatctgagcaatatttttcaggggctcctattttctacagctgaagtcctgaagacacccctcgacttagtgcggctttggttacatgaaacagaacgcgtctatggcgataaaatggtcgatgagaaagaccaggaaactctccacagggtgaccatggccagcactaaaaagttctttgatgatttgggtgatgaactgctcttcgctaagcccaacatcttttgccactttgcacagggcattggtgaccccaaatacgtgcctgttacagatatggctcccctaaacaagctgcttgtggatgtgttggactcttacaacgaagtgaatgctgtgatgaatctcgtcctattcgaggatgctgtagcccacatatgtaggatcaatcgcatcctggaatccccgcgcggcaacgccctgctggtgggggtcggcggaagtggcaagcaaagcttaagccgcttggccgcatacatctctggtttagacgtgtttcagataaccctcaaaaagggctatggcataccagatttgaaaatcgatctcgcggcccagtatattaaagcagccgttaagaatgtgccctcagtgtttcttatgaccgactcccaggtagccgaagagcagtttctggtcctgatcaacgatttgttagcgagtggagaaatcccggggctattcatggaagatgaagtcgaaaacatcataagttccatgaggcctcaggtgaaaagccttggaatgaatgacacccgtgaaacgtgctggaagttctttatcgaaaaggtgcggagacagctcaaagtcatactgtgcttttccccagtggggagtgtgctgcgggtcagggctcggaagtttcccgcagtggtcaactgcactgcgatagattggttccacgagtggcccgaagatgccctggtgagcgtgtctgcccggttcttagaagaaactgagggaattccgtgggaggtgaaggcaagcatctcattctttatgtcatatgtgcacacgaccgttaatgagatgtctagggtctatctggccactgagaggagatataattacactacaccaaagacctttctggagcagatcaagctctatcagaatctgctcgcaaagaaaaggacggagctcgtcgctaagatagaacgtctagaaaatgggctgatgaaattgcaaagcacagcaagtcaggtggacgatctcaaggctaaactagcaattcaagaggccgaattaaagcagaaaaatgaatccgcggaccagcttattcaggtggtcgggatcgaagccgaaaaggtctcaaaggagaaggctatagcagaccaggaagaagtgaaagtcgaagtcatcaacaagaacgtgaccgagaaacagaaggcgtgtgagacagacctcgcgaaggctgagcctgctctcctcgctgcacaggaggcgttggacacactcaacaagaataaccttaccgaattgaaatcattcggctcccctcccgacgccgtcgtgaacgttactgcagcagtaatgattcttacggcacccggggggaagattcccaaagacaaatcctggaaggctgccaaaataatgatggggaaagtcgatacgtttttagactccctgaagaaattcgacaaagagcacattcctgaggcatgcctgaaagcttttaaaccttaccaggggaacccaacattcgatccggagtttatccgcagtaagtcgacagcagcagcgggactctgttcatggtgcattaatatcgttagattctatgaagtgtattgtgacgtcgcccccaaaagacaggctctcgaggaggccaacgctgagttagccgaagcccaggagaaactcagcagaattaagaacaagattgccgaattgaacgccaacctttccaacctgaccagcgcattcgaaaaggccacagctgaaaagatcaaatgtcagcaggaggctgatgccacgaatcgagtgattctgctcgccaacaggctcgtgggcggactggccagtgagaacatacgttgggccgaaagtgtggagaatttcagaagccagggcgtgaccctgtgtggggatgtgctgctgatttccgcattcgttagttacgtgggatactttactaaaaaatacagaaacgaactgatggagaaattttggatcccttatattcataacctgaaggttcccatcccgatcacaaacggcctcgaccccctaagccttttgacagatgatgccgacgtcgccacgtggaataatcaggggttgccctctgacagaatgtctaccgagaacgctaccattctcggcaatacagaacggtggcctctgattgtggatgctcagctgcaaggcatcaagtggatcaaaaacaagtatcggtccgagctgaaagccatccgcttgggacagaagagctacctggatgtgatcgaacaggcaatctccgaaggcgacactttgctcatagagaatattggggaaaccgttgaccctgtgctcgacccgctgctgggccgaaacacaatcaagaaaggaaaatatatcaaaatcggagacaaagaagtggagtatcacccgaagttcagactcattttacacactaaatattttaatccacactataagcccgaaatgcaggctcagtgcaccttgatcaactttttggtgacacgagacggcctcgaagaccagctgttagctgccgtcgtggctaaggagcgccctgatttggaacaacttaaggctaatttaactaaatcacaaaatgagtttaaaatcgtgctcaaagaattagaggacagcctgctcgcgaggctctcagctgcctctggaaacttcttgggagatacggcgctggtggaaaacctggaaactacgaaacacacagccagtgagatcgaggaaaaggtggtggaagctaaaattactgaagtgaaaataaatgaggctcgtgagaattatagaccagctgcagagcgcgcaagtttgttatacttcattttaaatgacctcaataaaataaatccggtgtaccagttcagcctgaaggcgtttaacgttgtcttcgaaaaagctattcagcgaacgacgccagccaatgaggttaaacaacgtgtgatcaatctgacagacgagattacttattctgtttacatgtataccgctcggggcctctttgagagagacaaacttatttttctcgcacaggtcacatttcaagtcttaagcatgaagaaagagctcaacccagttgagctggattttctgctgcggttcccatttaaagcaggggttgtgtctcctgtcgacttcttacagcatcagggctggggaggcataaaagcactgtctgagatggatgagttcaaaaacttggactcggatattgagggaagcgcaaaacggtggaagaagctggtggagagcgaggccccagagaaggaaatcttccctaaggaatggaaaaataagaccgctctgcagaagctctgtatggtgcgctgcctgcggcctgaccggatgacatacgcaattaaaaatttcgtcgaggaaaaaatgggctccaaattcgtggaaggaagatccgtggagttcagcaagtcctacgaggaaagctcccctagtacctcaatcttctttatactttcccctggcgtggatcctctcaaggatgtggaagctctggggaaaaagctggggttcacaattgacaacgggaagcttcataatgtttctttgggtcagggtcaggaagtcgtagcagaaaatgcccttgacgttgctgctgaaaagggccactgggtgattttgcaaaacattcacctggtcgctagatggctcggaacactggacaaaaaactggagcactattctaccgggtcacacgaagactatcgggtattcatctcggccgaaccagcgccatcccccgaaacccacatcataccgcagggaattctggaaaacgctattaagatcaccaacgagccaccaacaggcatgcacgcaaacctccataaggctctggatctcttcacacaggacacactggaaatgtgcaccaaggagatggaattcaaatgcatgctgttcgcactctgctatttccatgccgttgtggcagaacgccgtaagttcggtgcccagggttggaaccgcagttacccctttaataatggcgacctgaccatttccatcaacgtgctatacaactacctggaggccaatccaaaggtcccctgggatgatctgcgatacctttttggggagattatgtatgggggacacatcactgacgattgggacagaaggctctgccgtacatatctggccgaatacatccgcacggagatgctagagggggatgtgctgctggcacccggatttcagataccacccaacctggactacaaaggttaccacgaatacatcgatgaaaaccttcccccggagtcaccgtacttatacggcttacaccctaatgccgaaattggctttcttaccgtgacaagcgagaaacttttccgcaccgtgttagagatgcagccaaaagaaactgacagtggtgcagggactggggtgtcgcgagaggaaaaggtgaaagccgtgctggatgatatattagaaaaaatccccgagactttcaacatggctgagattatggcaaaagctgcggagaagaccccttatgtagtggttgcgttccaggagtgtgagcgcatgaacattcttacaaacgaaatgagacgcagcctcaaagagctgaatctgggactcaagggcgagcttaccataacaactgacgtagaggatctgtccactgccctgttttacgatacagtccctgacacgtgggtggcccgggcatatccaagtatgatggggcttgccgcctggtacgctgatcttctgctccgcataagggagctggaggcctggacgaccgactttgcattgccgacgactgtatggctcgctggcttcttcaacccacagtcctttctgactgcaataatgcagagcatggcacgtaagaacgagtggccactggataaaatgtgtctatcagtggaagtgacaaagaagaaccgcgaggacatgacggcgccaccccgcgaaggcagttacgtctacggccttttcatggagggagcacggtgggacacccagactggcgtcatcgccgaagcaagactaaaagagcttacacctgctatgccggtcatattcattaaagccatacccgtggacagaatggagaccaagaatatatatgagtgccctgtgtataaaaccagaattcgcgggccaacttatgtgtggaccttcaacctgaagaccaaggaaaaagctgctaaatggattctggcagccgtagcgctgcttctccaggtgtag

SEQ ID NO: 250618 - DNA, 13374 bp, Artificial Sequence
  derived and/or modified sequence
atgactatggccccagacgtgcggctggaatatctggaggaagtcgctagcattgttctgaagtttaagccagataaatggtccaagctgattggcgctgaagagaacgtggctctcttcactgagtttttcgagaaaccagacgttcaggtccttgtgttgactctcaacgccgcaggcatgatcatcccgtgcttgggatttccccagtctctgaagtccaaaggggtatactttatcaaaacaaaaagtgagaatatcaataaggacaactaccgagcgagactcctttacggcgatatctcccctactcccgtcgatcaattgattgcggtggtcgaggaggtcctatcgagcctcttaaaccagtcggaaaatatggctggatggccacaggtcgtgtccgaggacattgtgaagcaagttcatagattaaagaacgagatgtttgtcatgagcggaaagatcaaaggaaagactctgctgccaattccagagcacctaggttctctcgatgggacattagagtccatggagcgtattcccagctctttggataacctgctgctgcacgccatcgagacgaccatcatcgactggagccaccaaatacgcgacgttttgagtaaggactctgcacaggctttgctggatggactgcatcctctgcctcaagttgaatttgagttttgggatacacggcttctgaaccttaagtgcatccatgagcagctgaatagacccaaggtaaacaaaatcgtcgagattttggaaaaggcaaaaagctgttactggccagccctgcagaatgtctacacaaatgtcaccgaaggactgaaggaagctaacgacatagtgctgtacctcaagcctctaaggatcctgctcgaagaaatggagcaagcagattttactatgctcccgacgttcattgccaaagtgctggataccatctgtttcatctgggcaacgtctgagtattacaacacaccagctcgtattatcgtgattttgcaggagttttgcaaccagattatcgagatgacccggacttttctgtcccccgaggaagttctgaagggactccagggagagattgaggaggtgctatctggtatcagcttggcagtaaatgttctgaaggagctttaccagacatacgacttctgttgcgttaatatgaagctgttttttaaggataaagagcccgtgccttgggagtttccgtcttcactagcctttagtcgcatcaacagttttttccaacgaatccagaccatcgaggagctgtacaaaacggctatcgagtttctgaaacttgaaaaaatagaattagggggagtaagaggcaacttgttgggcagccttgtgacccgcatttatgatgaagtgttcgaactggtgaaagtgttcgcagactgtaagtacgacccgctagatcccggtgatagcaacttcgacagggattatgcggacttcgagattaaaatacaggatctcgacaggcgtctggccactatcttctgccagggatttgacgattgttcctgcatcaagtccagtgctaagttgctgtacatgtgtgggggacttatggagagacccctgattctggccgaagtggcccctaggtactctgtgatgctggaattatttgatgccgagcttgataacgcgaaaattctttatgacgcgcagatggccgcatccgaggaaggtaacatcccactgatccacaaaaatatgcctcccgtagccggtcaactgaaatggagcttggagttgcaagaacgactcgaggtatccatgaagcacctaaaacacgtcgaacacccagtaatgtcaggcgcagaggccaaactgacgtaccaaaaatatgatgagatgatggagctgctgcggtgccacagggagaaaatctatcaacagtgggtcgccggagtagatcaggactgccattttaacctgggacagcctttaatactcagagatgctgcttctaatttgatacacgtgaacttttctaaagcgcttgtggctgttctgcgagaggtgaaatatttaaattttcagcagcaaaaagaaatccccgactccgccgagtcactgttcagcgaaaatgaaacctttcgcaagtttgtgggcaacctcgaactgattgtcggctggtacaacgagattaaaactatagtgaaggctgtcgagttcctcctcattaaatctgagttggaagccattgatgttaagcttctgtctgccgagaccaccctattctggaacggtgaaggtgtgtttcagtatatccaggaggtgagagaaatcttgcataacttgcagaacagaatgcagaaagcgaaacaaaacatcgagggtataagtcaggcaatgaaggactggtcggcaaacccattgtttgagcgaaaggataataagaaggaggctctcttagacttggacggcagaatcgccaatctgaacaaacggtatgctgcggtgagagacgctggggtcaaaattcaagccatggtggcagagaacgcagagcttttcagagctgacacactttctcttccttggaaggattatgtcatatacatcgacgatatggtactcgacgagttcgatcagtttatccgcaaaagccttagcttcttaatggacaatatggaatctattgcccctctctttgagattagaatggagctcgacgaggacggcctaacattcaacccaaccctggaggtgggatctgaccggggtttccttgcactgattgaggggttggtgaacgatatttacaatgtggcaagacttatacccagattagcgaaggatcggatgaactataagatggatttagaggacaatacagatcttattgagatgcgggaggaggtgtcttctctcgtgatcaacgctatgaaggaagcggaggaataccaggactcgtttgagcgatactcttacctgtggaccgacaacctgcaggaattcatgaaaaattttttgatatatgggtgcgcagtgaccgcagaggatcttgatacctggactgacgacacgattccgaagaccccccctacactcgcccaattccaagagcagattgatagttacgaaaagctctatgaagaagtttccaagtgtgagaacacaaaagttttccatggctggctccagtgtgattgccggccattcaaacaggcacttctctcaactatccggcgatggggatttatgtttaagagacacctgtcgaatcacgtgacaaattctctggccgacctggaagccttcatgaaagtggcgagaatgggtcttacaaagcccctgaaagagggtgactacgacggtttggtagaggtcatggggcatcttatgaaagtcaaggaacggcaggccgctaccgacaatatgttcgagccactgaagcagacaatcgagctcctcaaaacgtacggggaagagatgccggaagagatacacctaaaattgcaggagctccctgaacactgggctaacacaaaaaagcttgctatacaggtcaagctgactgtcgcacctctgcaggctaatgaggtctcaatactacgccgtaagtgccagcagttcgagctgaaacagcacgagtttcgagaaaggttcaggcgtgaggcccctttttcattctccgatcccaacccctataaatctcttaataagcaacaaaaaagtatttctgcgatggaaggcataatggaggccctttccaagtccggaggcctgtttgaggtgcctgtgcccgactataaacagttaaaggcttgtcaccgggaggtcagactcttgaaggaactatgggatatggtggttgttgtcaacacctcaatcgaggactggaaaaccactaaatggaaggacatcaacgtcgagcagatggatatcgattgcaagaaatttgcaaaggatatgaggtctctggacaaggagatgaagacttgggacgcgtttgttggcctcgacaatacggtgaagaacgttatcacttcccttagagcagtgagtgaactccagaaccccgctataagagagcgacattggcagcagctgatgcaagccacccaggtaaaattcaaaatgtccgaggagacgaccctggccgatttgctacagctgaatctgcactcctatgaggatgaggtccgcaatattgtagacaaagctgtgaaagagagtggcatggaaaaggtgctgaaagccctggacagcacatggagcatgatggaattccagcacgaaccgcacccgcgaacaggaaccatgatgctgaagtccagcgaagtgttggttgaaaccctggaggataatcaggtgcagcttcagaatctgatgatgagcaaatatctggctcacttcctaaaggaggtaacatcctggcagcagaaactcagcaccgccgactcagttatctccatttggttcgaggttcagcggacctggtcccacctggagagcatttttatcggaagcgaagatattaggacccagctgccaggcgactctcagcgctttgatgatatcaaccaagagtttaaggcattgatggaagacgctgtgaagaccccgaatgtggtggaggctactagcaagcctgggctgtataacaagctcgaagctctcaagaagtctctggccatctgcgagaaggccctggcagagtatcttgagaccaagagactagcgtttccgaggttctatttcgtgtctagcgccgaccttctggatattttaagtaacggcaacgatcctgtcgaggtcagccggcacctttctaaacttttcgactccctctgtaagctgaaatttcgcctggacgctagcgacaaaccattaaaagtaggactcgggatgtactccaaagaggacgagtacatggtgtttgaccaggagtgcgatctgagtggccaagtggaagtttggctgaatagagtgctcgaccggatgtgcagcacactgagacacgagatacccgaggccgtggtgacctacgaggagaaacccagagagcagtggattctggattaccctgctcaggtggccctcacctgcacgcaaatctggtggaccactgaggtgggactggctttcgctaggctggaggagggctacgagaacgccattagggactacaacaagaagcagatcagtcagctgaacgttttaattaccctgctgatgggtaacctgaacgctggagaccgcatgaaaatcatgacaatctgcaccatcgatgtgcacgcccgagacgtagtggcgaagatgattgtcgtggagtcatcacaggcttttacgtggcaggctcagctccgacacagatgggatgaggaaaaacgacactgcttcgctaatatctgtgatgcacagatacaatattcctatgaataccttggaaatacccctcgtctggtaattacacccctgacggataggtgctacattaccctgacacaatctctccatctcatcatgggtggggcacccgctggtcctgccggtactggaaaaacggaaaccactaaagacctgggtagggctctggggacgatggtatacgtattcaactgctcggagcagatggactataagagctgtgggaatatctacaagggtctggcccagaccggcgcttggggatgcttcgacgagtttaaccgcatttctgttgaagtgctcagcgtcattgctgtccaagtgaagtgcgtccaggatgccattcgtgctaaaaagaaggctttcaacttcctgggtgaaataattggcctgatccccacagtgggaatcttcattaccatgaatccgggatacgccggaagagccgagctgccggagaaccttaaggcgctgtttagaccatgcgccatggtggtaccagatttcgagcttatttgcgagattatgttaatggccgaaggattcctggaagcccgtttgttggctagaaagtttatcacactgtatacgctctgcaaggaactcttaagcaagcaggatcactatgactgggggctgcgtgccatcaagagtgtgcttgtggttgccggaagcctgaagaggggcgatccttctagagcagaggaccaggtcctcatgcgggctttgagagattttaacattccaaaaatagtgaccgatgacttacctgtgttcatggggctaattggggatctgttccccgcactggacgtgccacgcaagcgggacctgaacttcgagaaaatcattaaacagtctatcgttgaactaaaactgcaggccgaggacagcttcgtgttaaaggtagtccagctagaggagctccttcaggttagacatagcgtgtttatagttggcaatgctggaagcgggaaaagccaagtgttgaagtcccttaataagacataccagaacctgaaaagaaagcctgtagccgtggatttggacccaaaagctgttacatgtgatgaactttttggcatcatcaatccagtgaccagagagtggaaggatggattgttctccaccatcatgagagacctggcaaatattacccacgacggtccaaaatggatcatcctcgatggcgacattgatcctatgtggatcgaaagcctcaacacagtgatggatgataacaaggtgttaactctcgcaagtaacgaacgcattccgttgaataggacaatgagactcgtctttgaaatcagtcatctgcgcacggctacgccggcaacagtaagccgggcaggcattttgtatataaatcctgccgatctgggttggaaccctgttgtgtcctcttggatcgagaggcggaaggtacaaagcgagaaggctaatctgatgattctctttgacaaatacttaccaacctgtctcgacaagctgagattcggttttaaaaagattacacctgtgcccgaaatcaccgtaattcagacaattctttacctgcttgaatgcctcttgacagaaaaaaccgttccacccgattctccgagggaactgtacgagctctacttcgtgtttacatgtttctgggcttttgggggtgccatgttccaggaccagctggtggactaccgtgtggagttcagcaagtggtggattaacgagttcaaaactataaaattcccgtcccagggaacaatatttgactattacatagatccagacaccaaaaagttcctgccgtggaccgataaggtgccgagctttgaactggaccctgacgtgccattgcaagcttcattggtacacactaccgaaactattaggatcagatacttcatggacctgctgatggagaagtcttggcccgtgatgcttgtcggaaatgcaggaactggtaagagcgtgctcatgggcgacaaattagagtccttgaacacggacaactacctcgtacaagccgttcccttcaacttttatacgactagtgccatgctgcaaggtgtgctggagaagccattggaaaaaaaaagtggtcggaactacgggccacccggtactaaaaagctggtatatttcatagatgatatgaacatgcccgaggtggacaaatatggtacagtcgctccccacaccctcattcgccaacatatggatcatcggcattggtacgatcgtcacaagctcacgctgaaggatattcataactgtcagtatgtggcttgtatgaatccaacctctggcagcttcaccattgacagccgcctccagcgacacttctgtgtgtttgccgtctcatttccaggacaggaggctttgaccacaatttacaatacgatactcacgcaacacctggcttttagaagcgtgtccatggctatccaacgcatctccagtcagctggttgctgcagcgctggctctacatcagaaaatcacagccactttcctccctaccgcaataaaattccactatgtgttcaatctgcgcgacttgagcaatatttttcagggcctgctgttcagcaccgcagaggtgcttaagacaccactggatctggtccgcctgtggctacacgagacagaacgcgtatatggagataaaatggtggacgagaaggatcaagaaacacttcacagggtcacgatggcgtccaccaagaaattcttcgacgacctgggtgatgaattacttttcgctaagcccaacattttctgccattttgcccagggtatcggcgatcccaagtatgtcccagtgactgacatggccccactgaataagctcctggttgatgttctggacagttacaatgaagtgaacgcagttatgaatctggtgcttttcgaggatgctgtggcacatatatgcaggattaaccggattctagagtctccacgaggtaatgccttgctggttggcgtgggaggctctggtaaacagtctctgagccggctggccgcttatatttccggtctggatgtctttcagattacgctgaagaaggggtatggcattccagaccttaaaatcgacctggccgcacagtacattaaagcggcagtgaagaatgtgccctcagtgtttctgatgacagatagccaggtggctgaagagcagtttttggttctcatcaatgacctccttgccagcggtgagatcccgggtctgtttatggaggacgaggttgaaaacatcatatcctccatgaggcctcaggtgaagtcccttggtatgaatgatacacgggagacatgttggaagtttttcatagaaaaggttagaaggcagttaaaggttatactgtgctttagtcctgtgggctcagtgctgcgcgtcagagccagaaaatttcctgctgttgtaaattgcacagccatcgattggttccacgaatggccagaggacgccttagtaagcgtttcagcaagatttctggaggaaacggagggcatcccctgggaggtaaaggcctctatttcgttctttatgtcctatgtgcacacaactgttaatgaaatgagcagggtgtacctggcaaccgagagacgctacaattacactaccccaaaaactttcctcgagcagatcaaactgtatcagaatctgctggcaaaaaagcgaacagagcttgtcgccaagattgagaggctggagaacggactgatgaagttgcagagcaccgcgagtcaggtcgacgacctgaaagctaaattagccatccaggaagccgaattgaaacaaaaaaacgagagtgcggatcagctcattcaggtggttggcatcgaggccgagaaagtctcaaaagaaaaagccatcgctgaccaggaggaggtaaaggttgaggtcatcaacaagaacgttactgagaagcaaaaggcttgcgagaccgacctggcaaaggctgagccagctctgctggctgcccaggaggccttagacacgctgaacaaaaataatttgacagaactgaaatccttcggatcacctcctgacgccgtggtaaacgtcaccgctgctgttatgatcctgacagcccctggcggaaaaattcctaaggacaagtcttggaaggccgctaagatcatgatgggtaaagttgacacattcctcgattcccttaagaagttcgacaaggagcacattccagaggcctgcctaaaggctttcaagccttatcaggggaacccaacttttgatcctgaatttatcaggtcaaaaagtaccgcagcagccggtctttgcagttggtgcatcaacatcgtacgattctatgaggtctattgtgacgtggctcccaagagacaggccctggaggaggccaatgccgaactcgcggaggcccaggagaaactgagtcgtattaaaaataagatcgcagagttgaatgccaatctgtcaaacttgacaagcgcttttgagaaggctacagcagaaaagatcaagtgccagcaggaagctgatgcgaccaacagggttatactactggctaatcggctcgttggaggattggcttccgagaatattcgatgggccgaatccgtcgagaacttcaggtcacaaggagtgacgctctgtggagatgtgcttcttatcagcgcttttgtctcttacgttggttacttcacaaagaagtatcggaacgaactcatggaaaagttttggatcccatacatccataacctcaaagtccctatcccaatcactaacggcctcgatcctttgagcctgttgaccgatgacgcggatgtggcgacttggaacaaccaagggcttcccagcgatagaatgtccacggaaaacgccacaattttgggtaacaccgaaaggtggccactcatcgtcgacgcccagttgcagggcataaagtggattaaaaataaatacagatctgaattaaaagcaattcgtttaggccagaagagctacttagacgtcatcgagcaggccatttctgagggagatacattactgattgagaatatcggggaaaccgtcgaccccgtgctggaccctctgttgggacgtaacaccattaagaagggcaaatacatcaagattggcgataaggaagtggagtatcacccgaagttccggctaatcctccatactaaatactttaacccacactacaagcccgagatgcaggcccagtgcacactgatcaattttctggtgacaagagacggccttgaggaccaacttcttgctgctgtggttgccaaggaaagaccagaccttgagcagctgaaggctaacctcaccaaaagccagaacgagtttaaaatcgtgctgaaagaactcgaggatagcctgctagccaggctgtcagccgcaagtggcaatttcctcggggatacagcacttgtagaaaacctcgaaaccaccaaacacacagcgtctgaaattgaagaaaaagttgtggaggctaagattactgaagtcaaaattaatgaggccagagaaaactatcgacccgcagctgagcgggcttctctgctgtacttcatcctgaacgatctcaacaaaatcaatcccgtataccagttctctttgaaggcatttaatgtcgttttcgagaaagctatacagcgcaccacaccagctaacgaagtgaagcagcgcgtgataaatttgaccgacgagatcacatacagtgtttatatgtatacagccagagggctcttcgagagagacaagctgatctttcttgcacaggttaccttccaggttctatccatgaaaaaagagctgaaccctgtggagcttgatttcctgttacggttcccatttaaggcgggtgtcgtgagcccggtcgacttcttgcagcaccaagggtggggcggaattaaggccctgagcgagatggacgaatttaagaatctggattcagatatcgagggaagcgccaagcgatggaagaaattggttgaatccgaagcccctgagaaagaaatttttcctaaggaatggaaaaacaaaaccgcgttacagaaattatgcatggtaaggtgcctcagaccggacagaatgacatatgccattaagaacttcgtggaggagaaaatgggtagcaaatttgtggaaggacggtcagttgaattcagtaaatcttacgaggaaagcagcccgtctacgagtatcttttttatactctccccaggggtggatcccttgaaggacgtggaggctttaggtaagaaactgggcttcacaatagataacggcaagctacataatgtgagcctaggacaaggtcaggaggtggtggccgaaaacgccttagacgtggccgcagaaaaaggtcattgggttattctgcagaatattcatttggtggccagatggttgggcactctggataaaaagctcgagcattattctaccggatcccacgaggactatcgggtgtttatttctgcagaaccagccccatccccagagacacatatcatcccacaaggaatactggagaatgccattaaaatcactaatgagccacccacaggaatgcacgccaacctgcacaaagcactggacctatttacacaggatacactggaaatgtgcaccaaggagatggagttcaagtgtatgctcttcgctctctgctactttcacgcagtggtggccgaaagacgcaagttcggggcacagggatggaatcggtcataccccttcaacaacggcgatctgacaataagcattaacgttttgtataattacctcgaagcaaaccccaaagtcccttgggatgacctccgatatctctttggggagattatgtatggtggacatatcacggacgattgggaccggagactgtgtcggacctatcttgccgagtacattagaaccgagatgctcgagggcgacgtactgctggcgccaggcttccagattccccctaatttggactacaaaggttaccatgaatacattgacgagaatcttcccccagaatccccgtatttgtacggcttgcatccaaacgctgaaataggattcctgaccgtcacctccgagaaactgtttcggacagtccttgagatgcagccaaaggagacggactctggagctggtacaggcgtatctcgcgaggagaaggtaaaagcagttctggatgacattctggagaaaattcctgaaactttcaatatggccgagattatggccaaagcagctgaaaagacaccatacgtggtggtggctttccaggaatgtgagcgtatgaacatcctgactaacgagatgagacgctctctcaaagaactcaacctgggtctcaagggagaactcaccatcacaaccgacgtggaagatctttcaacagccttattttacgatactgtgccggacacttgggtggcccgagcctaccctagcatgatggggctcgctgcatggtacgccgacttgctcctacgcattagagagctcgaggcatggaccactgacttcgcactgcccactactgtttggctggctggcttcttcaatccacagtcatttttgacggctataatgcagagcatggcacgtaaaaatgaatggcctctcgacaaaatgtgtctgtctgttgaagtcacaaagaagaatagggaggatatgacagcacctccccgagaaggtagttacgtctatggcctatttatggagggggctagatgggatactcagaccggtgtgattgcggaagcgagactgaaagagttaactccggcaatgccagtgatatttatcaaggcaattccggtggatcggatggaaactaaaaacatttacgagtgccccgtctacaaaaccagaataaggggtcccacctatgtttggaccttcaaccttaagaccaaggaaaaagccgctaaatggatcctggccgcagttgcgctcctactgcaggtgtag

SEQ ID NO: 250619 - protein, 210 aa, Artificial Sequence
  derived and/or modified sequence
MVADIKGNEQIEKYSWREACDTGSSRMDRKHGKYILNVEHSENQPPITHPNDQEAHSSICWCLPSNDITSDVSPNLTGVCVNPGILAHSRCLQSESCNTQVKEYCRNDWSMWKVFLACLLACVIMTAIGVLIICLVNNKGSANSSIVIQLSTNDGECVTVKPGTPSPACPPTMTTTSTVPASTATESTTSTATAATTSTEPITVAPTDHL

SEQ ID NO: 250620 - DNA, 2027 bp, Artificial Sequence
  derived and/or modified sequence
gtactgatgcatcatagttgacttccaccagtgttttaattgtttcatggttgcagatataaagggcaatgaacaaattgaaaaatattcttggagagaagcttgtgatactggcagctcaagaatggacagaaagcatggaaaatacatattgaacgttgagcactctgaaaaccagccgccaatcacacatccaaatgaccaagaggctcacagttccatatgctggtgtctaccttcaaatgatataaccagtgatgtctctcccaacttaactggggtctgcgtgaacccaggaatccttgcacattcaagatgtctacagtcagaatcctgtaacacacaggtaaaagaatattgccgcaatgactggtctatgtggaaagtcttcctggcttgtctcttagcctgtgtgataatgacagcaattggagtacttataatatgcttggtgaataacaaaggatcggccaattcctccattgttatccagctatccacaaatgatggagagtgtgtgactgtcaaacctggaacaccctctcctgcttgtccacctacaatgaccaccacttcaactgtacctgcaagtacagccactgaatctacaacttcaacagctacagctgccaccacttccacagaacctataactgttgcacctaccgatcatttataatttgaacagccatagccatcacttcaactgaaacttcaacctctaccacttcaactcagtttgcaactataatagctactcctatcacttcaagtggaatcatggctgcagtcactttaacagactctataaccgttacaacttcaacaaaatcaagtcctacttcaacttaaacttacttgacaactcaaataatcaccacttcgaccatctctttgactgaatcaacaactacattcccttcaactgaatctgcaaccacttccacttaacctataactactgtaacttctacttagcctacagtaacaatgctcatcactcttttccaacaatgtataatctccacctattcatctgaggactaagctctgatttttcatcttgcccaaattcctttctaaggggtatggggagtcatgccctacaaaccataaattctcatcagatgggttttatttaaccctgtatattgtgacttactttctaatctgactctggcataacaagggaaaaaaatcaaaatgttttaccccaaaatatatttccttgccataccttgaaattgtcctgcaaagtctcttgtggagaaactccacattctgtagagaatatcctttcccctttgttttccttcctttctttccagatccaggagataatcaactaagagccaggcacccttttaggtctaataagaaacactttacaacctgctctctctctgaagtctgctttctgagagattcctctgcacaataaaacttgatctccacaatcctttatcttaacctgaacattcctttccatggatctcaggtcttcagataaactaaaccaattgtcaaccagaacatgtttaaatttacctatagcctggaagccccaactttgagttgtcctgcctttctgaaccaagccaatgtatttcttaaatgtatttgattgatgtctcatgtctccctaaaaatatataaaaccaaactgtaccttagccactttggacacatgttctcaggacctcctgagggctatgtcatgagccatggtcactcatatttggctcagaattaatctcttaaaatattttacagagtttgactctttttgtcaacacatccgaacctgcaactacaaatgccaccattaccacttaaaacttgatagaactagcatcagtcatcaaaataacctgttctatattaagttaacttttagttatcaccagtaatactagcctacaactactcgccacactggctcttccccaaaattgaaattgtacaatatgtgagtctaattcttgctaacataacattattgcctacattaaaagcttctgcaaagc

SEQ ID NO: 250621 - DNA, 633 bp, Artificial Sequence
  derived and/or modified sequence
atggtggccgacatcaagggcaacgagcagatcgagaagtacagctggagagaggcctgcgacaccggcagcagcagaatggacagaaagcacggcaagtacatcctgaacgtggagcacagcgagaaccagccccccatcacccaccccaacgaccaggaggcccacagcagcatctgctggtgcctgcccagcaacgacatcaccagcgacgtgagccccaacctgaccggcgtgtgcgtgaaccccggcatcctggcccacagcagatgcctgcagagcgagagctgcaacacccaggtgaaggagtactgcagaaacgactggagcatgtggaaggtgttcctggcctgcctgctggcctgcgtgatcatgaccgccatcggcgtgctgatcatctgcctggtgaacaacaagggcagcgccaacagcagcatcgtgatccagctgagcaccaacgacggcgagtgcgtgaccgtgaagcccggcacccccagccccgcctgcccccccaccatgaccaccaccagcaccgtgcccgccagcaccgccaccgagagcaccaccagcaccgccaccgccgccaccaccagcaccgagcccatcaccgtggcccccaccgaccacctgtag

SEQ ID NO: 250622 - DNA, 633 bp, Artificial Sequence
  derived and/or modified sequence
atggtggctgacatcaagggaaatgaacaaatcgaaaagtactcctggagggaagcctgcgataccgggagctcccgaatggaccggaaacacggaaaatacatcctcaatgtggagcacagcgagaaccagccgcctataacacatccaaatgatcaggaggcgcatagctcaatttgttggtgtcttccttcaaatgacatcacttcggacgtctcccccaatctgaccggggtgtgtgttaatcctggcatcctcgcgcattctaggtgcttgcaatcagaatcttgcaatacccaggttaaggaatattgcagaaacgattggtccatgtggaaagttttcttggcctgcctcctggcatgtgtcattatgaccgccatcggtgtgctaatcatttgcttggtgaacaacaaaggttcagcgaactcgtctatagtgatccagctgtccacaaacgacggcgagtgcgtgaccgtgaaacccggcacgcccagtcccgcatgcccccccaccatgaccaccacaagtacggttcctgcaagcacagccacagagagtactaccagtaccgccacggctgccacaacctcgactgaacccatcactgtggcacccacagaccacctgtag

SEQ ID NO: 250623 - DNA, 633 bp, Artificial Sequence
  derived and/or modified sequence
atggtggccgacatcaagggaaatgagcagatcgagaagtacagctggagggaggcctgtgacaccggcagcagcaggatggacaggaagcacggcaagtacatcctgaatgtggagcacagcgagaaccagccccccatcacccaccccaatgaccaggaggcccacagcagcatctgctggtgcctgcccagcaatgacatcaccagtgatgtgagccccaacctgactggagtgtgtgtgaaccctggcatcctggcccacagccgctgcctgcagagcgagagctgcaacacccaggtgaaggagtactgcagaaatgactggagcatgtggaaggtgttcctggcctgcctgctggcctgcgtcatcatgacagccatcggcgtgctgatcatctgcctggtgaacaacaagggcagcgccaacagcagcatcgtcatccagctgagcaccaatgatggagaatgtgtgacagtgaagccaggcacccccagccctgcctgcccccccaccatgaccaccaccagcacagtgcctgccagcacagccacagagagcaccaccagcacagccacagctgccaccaccagcacagagcccatcaccgtggcccccacagaccacctgtag

SEQ ID NO: 250624 - DNA, 633 bp, Artificial Sequence
  derived and/or modified sequence
atggtggccgacatcaagggcaacgagcagatcgagaagtacagctggagggaagcctgtgacaccggatcttctcgcatggacagaaaacacggcaagtacatcttgaacgttgagcatagcgaaaaccagccccctattactcacccaaatgatcaggaagcccatagttctatttgctggtgcttgccatccaacgacataacatcggatgtttcacccaatcttacaggggtttgcgtgaaccctggcatcctggcgcactcccgatgtctgcagtctgagagttgcaacacacaggttaaggaatactgcaggaacgactggtctatgtggaaggtgttcctggcttgtcttctggcatgtgtcatcatgacagccatcggagtgctgattatctgcctcgtgaataacaaggggagcgccaatagctccattgtgattcagttatcaactaacgacggagaatgcgtgacagttaagccggggacccccagtccagcgtgtccccccaccatgacaacgacctccacagtgcctgcttccaccgcaaccgaatctaccacatctacggcgaccgctgcgactacatccactgagcccatcactgtggccccaactgaccacctttag

SEQ ID NO: 250625 - DNA, 633 bp, Artificial Sequence
  derived and/or modified sequence
atggtcgccgacatcaagggcaatgaacagattgagaaatattcctggagagaagcctgtgacactgggtctagtcgtatggaccgcaagcacggaaagtatattcttaacgtggaacatagtgaaaaccagccacccatcactcaccctaatgaccaagaagcccacagtagtatctgttggtgtctcccaagtaatgacattacaagtgacgtgtcacctaatctcaccggggtgtgtgtaaaccctggcattctggcccattcgaggtgtctgcaaagtgagtcgtgcaacacgcaggttaaggaatattgcaggaacgattggtccatgtggaaagtgttcctggcgtgtcttctggcgtgcgtgattatgacagccatcggagttctgatcatttgccttgtcaacaataagggctcagcaaactcgtcaatcgtgatccaactgtccaccaatgacggcgaatgtgtcacggttaagcctggtacaccctctcccgcatgtcctccgaccatgaccaccaccagtactgttcccgcttcaacagccactgagtctacaacatccaccgccaccgccgctacaacttctaccgagcccattacggtggcaccgacagaccatctgtag

SEQ ID NO: 250626 - protein, 2226 aa, Artificial Sequence
  derived and/or modified sequence
MVLAGLIRKLGHQLAEIRERALKSILCKIEHNLICYADLIQERQLFLHLLEWFNFPSVPMKEEVLNLLSRLVKYPPAVQHLVDVGAVEFLSKLRSNVEPNLQAEIDGILDGLFLLPSEVPALSSASYQTNQTELSKNPEILTGYFPQDKSNFQQMEVPPRPVVNQTVKCLKFSTFPWLPLTTTDRHVLSSNESSLRSSNHTLIWNTCELLKDVIMQDFPAEIFLQRPKIVQSLLSLLKLAFGDGKHRLALQSVSCLQQLCMYLRNRLNFHRDPGFFSNKHDTVSQNSSLSYCHEARGTHHSQNPSPGSSSPRPSVVGRTGQRPRGDGQDWDAASSSGSSSHAHVNSRISVHSPLDMGHIDLPELETEDTLELQFQQLSLPQFCVSILESAVPLLRTGSRQVIIRVLELLTEDMTLIGEAISTDIWDDSSLFGIDMKEKLLLVLGALGETMCYHKSSISLEQPEVMLVHHRMAFISISLFAVRLLQTLLPVEKASEFLSEPMSTALFLLSLDMPISLEYPNIHEAVVAYLEQLNSENYSIYKRTAEAVYSIECTCNFLSDIGKEGEKNLLELVELADQALRSFSYHQHFPLIKEIISICSKIWKSAQASPLLQGESQKVLLHMLSHPLPRVKAETYHCCLEITKECLGVHNVTKPVSSLCNGIHFLLHPKVLYEISVFGIQEPESEVNTAAKAILLYLLQGRLMMTALTWNKFIESLCPVIPILQGYADTEDPLGNCILLLSKASSDTEEMLPCTTRLKSMLRLLLVKKPSVRSLALKLLAFHLTSEEGADTKRPLIDARVLSRVTDLFIGKKPIELRLDDRRELVIKLETVEKVYEIFTSDDVDLVLRKSAAEQLAVIMQDIKMHAVVKKLCLIDKIIEYLNECVSQDGKVVECLVQPCLTLLRKVLCGDPVMRVSLSQQSSLLTVLFRVSLIFHEDCSVVTEVGALFCLLLFDEVSRMDMWSVNPSNKPSLPSVFSLPVSVFRRYHLPVHVIGHHAVSPYSIVLPLSADCLALKPVSDMLRIAWNLSWYHGSDNLLKQMNSETKTQEILDALKLSTEDILTLKITHMASGLQDCLHSIVQAATHREVRAAVTRMSFYLLNDRLSLKGCPGPCGVTLKSLAWHTALNRFLQVLPACTEDEKLLIDIIHFLNKLIKEQRKNSSLELLNWILELLLRHSANPLLDLLVLTESQAREETDDIRTAVRQQLQKELIALFDTLLLNFMEVTDRKCSELLYVFQTQLALKLLQCLKVTDAPHFYGLPSLERTLRGMANLTAFPGWSSHSPLTKPLDICVKYLSGLLEVITSFYVERGGNAMSFMGKGVTKSTILCLLHLSHEMMAQAGSLEWMSLWFLPLGSHSEEHIPTQQGLAWLIPLWVDRDPEVRFTSLGLGSALTTLETGCVALANSCQNISGGLWGTVVNILLDQSECSMVRREAAFILQNLLVIPMPTEIIKDYTWQGPCVHDEDSGLSLIGKPALQALLYHCHFYEHLNQMVKHCYLGRCMFDLNFSAFDRNSESNDLNGLDDSFKFWRAPSRTSQDRDPSSLSTSETTVAPSLGSTEFQPLVQSTTLLPEASHDQFVAQGHQESTSPRPPHDSSLSAPLPKLCVFVTPSLLSAMCSLLDNLLTIAPRDTAKAFRQAHLIELLCSIADATLIQTCVQELRALLPSSPPAEHTQAQVSFLLEYLSSLSRLLQSCLLVEPDLVIQDELVKPLITNIIGILTICTKDVLDKELISAFYHTWTHLFNLLAMLLRKAGAITLPFVTVALAKHWTAAIDMFCTCAGLSATCPALYTASLQFLSVLLTEEAKGHLQAKSKTHLCCSPTVASLLDDSQENQKSLEQLSDVILQCYEGKSSKDILKRVAANALMSLLAVSRRAQKHALKANLIDNCMEQMKHINAQLNLDSLRPGKAALKKKEDGVIKELSIAMQLLRNCLYQNEECKEAALEAHLVPVLHSLWPWILMDDSLMQISLQLLCVYTANFPNGCSSLCWSSCGQHPVQATHRGAVSNSLMLCILKLASQMPLENTTVQQMVFMLLSNLALSHDCKGVIQKSNFLQNFLSLALPKGGNKHLSNLTILWLKLLLNISSGEDGQQMILRLDGCLDLLTEMSKYKHKSSPLLPLLIFHNVCFSPANKPKILANEKVITVLAACLESENQNAQRIGAAALWALIYNYQKAKTALKSPSVKRRVDEAYSLAKKTFPNSEANPLNAYYLKCLENLVQLLNSS

SEQ ID NO: 250627 - protein, 1593 aa, Artificial Sequence
  derived and/or modified sequence
MVLAGLIRKLGHQLAEIRERALKSILCKIEHNLICYADLIQERQLFLHLLEWFNFPSVPMKEEVLNLLSRLVKYPPAVQHLVDVGAVEFLSKLRSNVEPNLQAEIDGILDGLFLLPSEVPALSSASYQTNQTELSKNPEILTGYFPQDKSNFQQMEVPPRPVVNQTVKCLKFSTFPWLPLTTTDRHVLSSNESSLRSSNHTLIWNTCELLKDVIMQDFPAEIFLQRPKIVQSLLSLLKLAFGDGKHRLALQSVSCLQQLCMYLRNRLNFHRDPGFFSNKHDTVSQNSSLSYCHEARGTHHSQNPSPGSSSPRPSVVGRTGQRPRGDGQDWDAASSSGSSSHAHVNSRISVHSPLDMGHIDLPELETEDTLELQFQQLSLPQFCVSILESAVPLLRTGSRQVIIRVLELLTEDMTLIGEAISTDIWDDSSLFGIDMKEKLLLVLGALGETMCYHKSSISLEQPEVMLVHHRMAFISISLFAVRLLQTLLPVEKASEFLSEPMSTALFLLSLDMPISLEYPNIHEAVVAYLEQLNSENYSIYKRTAEAVYSIECTCNFLSDIGKEGEKNLLELVELADQALRSFSYHQHFPLIKEIISICSKIWKSAQASPLLQGESQKVLLHMLSHPLPRVKAETYHCCLEITKECLGVHNVTKPVSSLCNGIHFLLHPKVLYEISVFGIQEPESEVNTAAKAILLYLLQGRLMMTALTWNKFIESLCPVIPILQGYADTEDPLGNCILLLSKASSDTEEMLPCTTRLKSMLRLLLVKKPSVRSLALKLLAFHLTSEEGADTKRPLIDARVLSRVTDLFIGKKPIELRLDDRRELVIKLETVEKVYEIFTSDDVDLVLRKSAAEQLAVIMQDIKMHAVVKKLCLIDKIIEYLNECVSQDGKVVECLVQPCLTLLRKVLCGDPVMRVSLSQQSSLLTVLFRVSLIFHEDCSVVTEVGALFCLLLFDEVSRMDMWSVNPSNKPSLPSVFSLPVSVFRRYHLPVHVIGHHAVSPYSIVLPLSADCLALKPVSDMLRIAWNLSWYHGSDNLLKQMNSETKTQEILDALKLSTEDILTLKITHMASGLQDCLHSIVQAATHREVRAAVTRMSFYLLNDRLSLKGCPGPCGVTLKSLAWHTALNRFLQVLPACTEDEKLLIDIIHFLNKLIKEQRKNSSLELLNWILELLLRHSANPLLDLLVLTESQAREETDDIRTAVRQQLQKELIALFDTLLLNFMEVTDRKCSELLYVFQTQLALKLLQCLKVTDAPHFYGLPSLERTLRGMANLTAFPGWSSHSPLTKPLDICVKYLSGLLEVITSFYVERGGNAMSFMGKGVTKSTILCLLHLSHEMMAQAGSLEWMSLWFLPLGSHSEEHIPTQQGLAWLIPLWVDRDPEVRFTSLGLGSALTTLETGCVALANSCQNISGGLWGTVVNILLDQSECSMVRREAAFILQNLLVIPMPTEIIKDYTWQGPCVHDEDSGLSLIGKPALQALLYHCHFYEHLNQMVKHCYLGRCMFDLNFSAFDRNSESNDLNGLDDSFKFWRAPSRTSQDRDPSSLSTSETTVAPSLGSTEFQPLVQSTTLLPEASHDQFVAQGNRHFGTNIQF

SEQ ID NO: 250628 - protein, 879 aa, Artificial Sequence
  derived and/or modified sequence
MVLAGLIRKLGHQLAEIRERALKSILCKIEHNLICYADLIQERQLFLHLLEWFNFPSVPMKEEVLNLLSRLVKYPPAVQHLVDVGAVEFLSKLRSNVEPNLQAEIDGILDGLFLLPSEVPALSSASYQTNQTELSKNPEILTGYFPQDKSNFQQMEVPPRPVVNQTVKCLKFSTFPWLPLTTTDRHVLSSNESSLRSSNHTLIWNTCELLKDVIMQDFPAEIFLQRPKIVQSLLSLLKLAFGDGKHRLALQSVSCLQQLCMYLRNRLNFHRDPGFFSNKHDTVSQNSSLSYCHEARGTHHSQNPSPGSSSPRPSVVGRTGQRPRGDGQDWDAASSSGSSSHAHVNSRISVHSPLDMGHIDLPELETEDTLELQFQQLSLPQFCVSILESAVPLLRTGSRQVIIRVLELLTEDMTLIGEAISTDIWDDSSLFGIDMKEKLLLVLGALGETMCYHKSSISLEQPEVMLVHHRMAFISISLFAVRLLQTLLPVEKASEFLSEPMSTALFLLSLDMPISLEYPNIHEAVVAYLEQLNSENYSIYKRTAEAVYSIECTCNFLSDIGKEGEKNLLELVELADQALRSFSYHQHFPLIKEIISICSKIWKSAQASPLLQGESQKVLLHMLSHPLPRVKAETYHCCLEITKECLGVHNVTKPVSSLCNGIHFLLHPKVLYEISVFGIQEPESEVNTAAKAILLYLLQGRLMMTALTWNKFIESLCPVIPILQGYADTEDPLGNCILLLSKASSDTEEMLPCTTRLKSMLRLLLVKKPSVRSLALKLLAFHLTSEEGADTKRPLIDARVLSRVTDLFIGKKPIELRLDDRRELVIKLETVEKVYEIFTSDDVDLVLRKSAAEQLAVIMQGCRMFGTTMPHTLEEGFMW

SEQ ID NO: 250629 - DNA, 6681 bp, Artificial Sequence
  derived and/or modified sequence
atggtgctggccggcctgatcagaaagctgggccaccagctggccgagatcagagagagagccctgaagagcatcctgtgcaagatcgagcacaacctgatctgctacgccgacctgatccaggagagacagctgttcctgcacctgctggagtggttcaacttccccagcgtgcccatgaaggaggaggtgctgaacctgctgagcagactggtgaagtacccccccgccgtgcagcacctggtggacgtgggcgccgtggagttcctgagcaagctgagaagcaacgtggagcccaacctgcaggccgagatcgacggcatcctggacggcctgttcctgctgcccagcgaggtgcccgccctgagcagcgccagctaccagaccaaccagaccgagctgagcaagaaccccgagatcctgaccggctacttcccccaggacaagagcaacttccagcagatggaggtgccccccagacccgtggtgaaccagaccgtgaagtgcctgaagttcagcaccttcccctggctgcccctgaccaccaccgacagacacgtgctgagcagcaacgagagcagcctgagaagcagcaaccacaccctgatctggaacacctgcgagctgctgaaggacgtgatcatgcaggacttccccgccgagatcttcctgcagagacccaagatcgtgcagagcctgctgagcctgctgaagctggccttcggcgacggcaagcacagactggccctgcagagcgtgagctgcctgcagcagctgtgcatgtacctgagaaacagactgaacttccacagagaccccggcttcttcagcaacaagcacgacaccgtgagccagaacagcagcctgagctactgccacgaggccagaggcacccaccacagccagaaccccagccccggcagcagcagccccagacccagcgtggtgggcagaaccggccagagacccagaggcgacggccaggactgggacgccgccagcagcagcggcagcagcagccacgcccacgtgaacagcagaatcagcgtgcacagccccctggacatgggccacatcgacctgcccgagctggagaccgaggacaccctggagctgcagttccagcagctgagcctgccccagttctgcgtgagcatcctggagagcgccgtgcccctgctgagaaccggcagcagacaggtgatcatcagagtgctggagctgctgaccgaggacatgaccctgatcggcgaggccatcagcaccgacatctgggacgacagcagcctgttcggcatcgacatgaaggagaagctgctgctggtgctgggcgccctgggcgagaccatgtgctaccacaagagcagcatcagcctggagcagcccgaggtgatgctggtgcaccacagaatggccttcatcagcatcagcctgttcgccgtgagactgctgcagaccctgctgcccgtggagaaggccagcgagttcctgagcgagcccatgagcaccgccctgttcctgctgagcctggacatgcccatcagcctggagtaccccaacatccacgaggccgtggtggcctacctggagcagctgaacagcgagaactacagcatctacaagagaaccgccgaggccgtgtacagcatcgagtgcacctgcaacttcctgagcgacatcggcaaggagggcgagaagaacctgctggagctggtggagctggccgaccaggccctgagaagcttcagctaccaccagcacttccccctgatcaaggagatcatcagcatctgcagcaagatctggaagagcgcccaggccagccccctgctgcagggcgagagccagaaggtgctgctgcacatgctgagccaccccctgcccagagtgaaggccgagacctaccactgctgcctggagatcaccaaggagtgcctgggcgtgcacaacgtgaccaagcccgtgagcagcctgtgcaacggcatccacttcctgctgcaccccaaggtgctgtacgagatcagcgtgttcggcatccaggagcccgagagcgaggtgaacaccgccgccaaggccatcctgctgtacctgctgcagggcagactgatgatgaccgccctgacctggaacaagttcatcgagagcctgtgccccgtgatccccatcctgcagggctacgccgacaccgaggaccccctgggcaactgcatcctgctgctgagcaaggccagcagcgacaccgaggagatgctgccctgcaccaccagactgaagagcatgctgagactgctgctggtgaagaagcccagcgtgagaagcctggccctgaagctgctggccttccacctgaccagcgaggagggcgccgacaccaagagacccctgatcgacgccagagtgctgagcagagtgaccgacctgttcatcggcaagaagcccatcgagctgagactggacgacagaagagagctggtgatcaagctggagaccgtggagaaggtgtacgagatcttcaccagcgacgacgtggacctggtgctgagaaagagcgccgccgagcagctggccgtgatcatgcaggacatcaagatgcacgccgtggtgaagaagctgtgcctgatcgacaagatcatcgagtacctgaacgagtgcgtgagccaggacggcaaggtggtggagtgcctggtgcagccctgcctgaccctgctgagaaaggtgctgtgcggcgaccccgtgatgagagtgagcctgagccagcagagcagcctgctgaccgtgctgttcagagtgagcctgatcttccacgaggactgcagcgtggtgaccgaggtgggcgccctgttctgcctgctgctgttcgacgaggtgagcagaatggacatgtggagcgtgaaccccagcaacaagcccagcctgcccagcgtgttcagcctgcccgtgagcgtgttcagaagataccacctgcccgtgcacgtgatcggccaccacgccgtgagcccctacagcatcgtgctgcccctgagcgccgactgcctggccctgaagcccgtgagcgacatgctgagaatcgcctggaacctgagctggtaccacggcagcgacaacctgctgaagcagatgaacagcgagaccaagacccaggagatcctggacgccctgaagctgagcaccgaggacatcctgaccctgaagatcacccacatggccagcggcctgcaggactgcctgcacagcatcgtgcaggccgccacccacagagaggtgagagccgccgtgaccagaatgagcttctacctgctgaacgacagactgagcctgaagggctgccccggcccctgcggcgtgaccctgaagagcctggcctggcacaccgccctgaacagattcctgcaggtgctgcccgcctgcaccgaggacgagaagctgctgatcgacatcatccacttcctgaacaagctgatcaaggagcagagaaagaacagcagcctggagctgctgaactggatcctggagctgctgctgagacacagcgccaaccccctgctggacctgctggtgctgaccgagagccaggccagagaggagaccgacgacatcagaaccgccgtgagacagcagctgcagaaggagctgatcgccctgttcgacaccctgctgctgaacttcatggaggtgaccgacagaaagtgcagcgagctgctgtacgtgttccagacccagctggccctgaagctgctgcagtgcctgaaggtgaccgacgccccccacttctacggcctgcccagcctggagagaaccctgagaggcatggccaacctgaccgccttccccggctggagcagccacagccccctgaccaagcccctggacatctgcgtgaagtacctgagcggcctgctggaggtgatcaccagcttctacgtggagagaggcggcaacgccatgagcttcatgggcaagggcgtgaccaagagcaccatcctgtgcctgctgcacctgagccacgagatgatggcccaggccggcagcctggagtggatgagcctgtggttcctgcccctgggcagccacagcgaggagcacatccccacccagcagggcctggcctggctgatccccctgtgggtggacagagaccccgaggtgagattcaccagcctgggcctgggcagcgccctgaccaccctggagaccggctgcgtggccctggccaacagctgccagaacatcagcggcggcctgtggggcaccgtggtgaacatcctgctggaccagagcgagtgcagcatggtgagaagagaggccgccttcatcctgcagaacctgctggtgatccccatgcccaccgagatcatcaaggactacacctggcagggcccctgcgtgcacgacgaggacagcggcctgagcctgatcggcaagcccgccctgcaggccctgctgtaccactgccacttctacgagcacctgaaccagatggtgaagcactgctacctgggcagatgcatgttcgacctgaacttcagcgccttcgacagaaacagcgagagcaacgacctgaacggcctggacgacagcttcaagttctggagagcccccagcagaaccagccaggacagagaccccagcagcctgagcaccagcgagaccaccgtggcccccagcctgggcagcaccgagttccagcccctggtgcagagcaccaccctgctgcccgaggccagccacgaccagttcgtggcccagggccaccaggagagcaccagccccagacccccccacgacagcagcctgagcgcccccctgcccaagctgtgcgtgttcgtgacccccagcctgctgagcgccatgtgcagcctgctggacaacctgctgaccatcgcccccagagacaccgccaaggccttcagacaggcccacctgatcgagctgctgtgcagcatcgccgacgccaccctgatccagacctgcgtgcaggagctgagagccctgctgcccagcagcccccccgccgagcacacccaggcccaggtgagcttcctgctggagtacctgagcagcctgagcagactgctgcagagctgcctgctggtggagcccgacctggtgatccaggacgagctggtgaagcccctgatcaccaacatcatcggcatcctgaccatctgcaccaaggacgtgctggacaaggagctgatcagcgccttctaccacacctggacccacctgttcaacctgctggccatgctgctgagaaaggccggcgccatcaccctgcccttcgtgaccgtggccctggccaagcactggaccgccgccatcgacatgttctgcacctgcgccggcctgagcgccacctgccccgccctgtacaccgccagcctgcagttcctgagcgtgctgctgaccgaggaggccaagggccacctgcaggccaagagcaagacccacctgtgctgcagccccaccgtggccagcctgctggacgacagccaggagaaccagaagagcctggagcagctgagcgacgtgatcctgcagtgctacgagggcaagagcagcaaggacatcctgaagagagtggccgccaacgccctgatgagcctgctggccgtgagcagaagagcccagaagcacgccctgaaggccaacctgatcgacaactgcatggagcagatgaagcacatcaacgcccagctgaacctggacagcctgagacccggcaaggccgccctgaagaagaaggaggacggcgtgatcaaggagctgagcatcgccatgcagctgctgagaaactgcctgtaccagaacgaggagtgcaaggaggccgccctggaggcccacctggtgcccgtgctgcacagcctgtggccctggatcctgatggacgacagcctgatgcagatcagcctgcagctgctgtgcgtgtacaccgccaacttccccaacggctgcagcagcctgtgctggagcagctgcggccagcaccccgtgcaggccacccacagaggcgccgtgagcaacagcctgatgctgtgcatcctgaagctggccagccagatgcccctggagaacaccaccgtgcagcagatggtgttcatgctgctgagcaacctggccctgagccacgactgcaagggcgtgatccagaagagcaacttcctgcagaacttcctgagcctggccctgcccaagggcggcaacaagcacctgagcaacctgaccatcctgtggctgaagctgctgctgaacatcagcagcggcgaggacggccagcagatgatcctgagactggacggctgcctggacctgctgaccgagatgagcaagtacaagcacaagagcagccccctgctgcccctgctgatcttccacaacgtgtgcttcagccccgccaacaagcccaagatcctggccaacgagaaggtgatcaccgtgctggccgcctgcctggagagcgagaaccagaacgcccagagaatcggcgccgccgccctgtgggccctgatctacaactaccagaaggccaagaccgccctgaagagccccagcgtgaagagaagagtggacgaggcctacagcctggccaagaagaccttccccaacagcgaggccaaccccctgaacgcctactacctgaagtgcctggagaacctggtgcagctgctgaacagcagctag

SEQ ID NO: 250630 - DNA, 4782 bp, Artificial Sequence
  derived and/or modified sequence
atggtgctggccggcctgatcagaaagctgggccaccagctggccgagatcagagagagagccctgaagagcatcctgtgcaagatcgagcacaacctgatctgctacgccgacctgatccaggagagacagctgttcctgcacctgctggagtggttcaacttccccagcgtgcccatgaaggaggaggtgctgaacctgctgagcagactggtgaagtacccccccgccgtgcagcacctggtggacgtgggcgccgtggagttcctgagcaagctgagaagcaacgtggagcccaacctgcaggccgagatcgacggcatcctggacggcctgttcctgctgcccagcgaggtgcccgccctgagcagcgccagctaccagaccaaccagaccgagctgagcaagaaccccgagatcctgaccggctacttcccccaggacaagagcaacttccagcagatggaggtgccccccagacccgtggtgaaccagaccgtgaagtgcctgaagttcagcaccttcccctggctgcccctgaccaccaccgacagacacgtgctgagcagcaacgagagcagcctgagaagcagcaaccacaccctgatctggaacacctgcgagctgctgaaggacgtgatcatgcaggacttccccgccgagatcttcctgcagagacccaagatcgtgcagagcctgctgagcctgctgaagctggccttcggcgacggcaagcacagactggccctgcagagcgtgagctgcctgcagcagctgtgcatgtacctgagaaacagactgaacttccacagagaccccggcttcttcagcaacaagcacgacaccgtgagccagaacagcagcctgagctactgccacgaggccagaggcacccaccacagccagaaccccagccccggcagcagcagccccagacccagcgtggtgggcagaaccggccagagacccagaggcgacggccaggactgggacgccgccagcagcagcggcagcagcagccacgcccacgtgaacagcagaatcagcgtgcacagccccctggacatgggccacatcgacctgcccgagctggagaccgaggacaccctggagctgcagttccagcagctgagcctgccccagttctgcgtgagcatcctggagagcgccgtgcccctgctgagaaccggcagcagacaggtgatcatcagagtgctggagctgctgaccgaggacatgaccctgatcggcgaggccatcagcaccgacatctgggacgacagcagcctgttcggcatcgacatgaaggagaagctgctgctggtgctgggcgccctgggcgagaccatgtgctaccacaagagcagcatcagcctggagcagcccgaggtgatgctggtgcaccacagaatggccttcatcagcatcagcctgttcgccgtgagactgctgcagaccctgctgcccgtggagaaggccagcgagttcctgagcgagcccatgagcaccgccctgttcctgctgagcctggacatgcccatcagcctggagtaccccaacatccacgaggccgtggtggcctacctggagcagctgaacagcgagaactacagcatctacaagagaaccgccgaggccgtgtacagcatcgagtgcacctgcaacttcctgagcgacatcggcaaggagggcgagaagaacctgctggagctggtggagctggccgaccaggccctgagaagcttcagctaccaccagcacttccccctgatcaaggagatcatcagcatctgcagcaagatctggaagagcgcccaggccagccccctgctgcagggcgagagccagaaggtgctgctgcacatgctgagccaccccctgcccagagtgaaggccgagacctaccactgctgcctggagatcaccaaggagtgcctgggcgtgcacaacgtgaccaagcccgtgagcagcctgtgcaacggcatccacttcctgctgcaccccaaggtgctgtacgagatcagcgtgttcggcatccaggagcccgagagcgaggtgaacaccgccgccaaggccatcctgctgtacctgctgcagggcagactgatgatgaccgccctgacctggaacaagttcatcgagagcctgtgccccgtgatccccatcctgcagggctacgccgacaccgaggaccccctgggcaactgcatcctgctgctgagcaaggccagcagcgacaccgaggagatgctgccctgcaccaccagactgaagagcatgctgagactgctgctggtgaagaagcccagcgtgagaagcctggccctgaagctgctggccttccacctgaccagcgaggagggcgccgacaccaagagacccctgatcgacgccagagtgctgagcagagtgaccgacctgttcatcggcaagaagcccatcgagctgagactggacgacagaagagagctggtgatcaagctggagaccgtggagaaggtgtacgagatcttcaccagcgacgacgtggacctggtgctgagaaagagcgccgccgagcagctggccgtgatcatgcaggacatcaagatgcacgccgtggtgaagaagctgtgcctgatcgacaagatcatcgagtacctgaacgagtgcgtgagccaggacggcaaggtggtggagtgcctggtgcagccctgcctgaccctgctgagaaaggtgctgtgcggcgaccccgtgatgagagtgagcctgagccagcagagcagcctgctgaccgtgctgttcagagtgagcctgatcttccacgaggactgcagcgtggtgaccgaggtgggcgccctgttctgcctgctgctgttcgacgaggtgagcagaatggacatgtggagcgtgaaccccagcaacaagcccagcctgcccagcgtgttcagcctgcccgtgagcgtgttcagaagataccacctgcccgtgcacgtgatcggccaccacgccgtgagcccctacagcatcgtgctgcccctgagcgccgactgcctggccctgaagcccgtgagcgacatgctgagaatcgcctggaacctgagctggtaccacggcagcgacaacctgctgaagcagatgaacagcgagaccaagacccaggagatcctggacgccctgaagctgagcaccgaggacatcctgaccctgaagatcacccacatggccagcggcctgcaggactgcctgcacagcatcgtgcaggccgccacccacagagaggtgagagccgccgtgaccagaatgagcttctacctgctgaacgacagactgagcctgaagggctgccccggcccctgcggcgtgaccctgaagagcctggcctggcacaccgccctgaacagattcctgcaggtgctgcccgcctgcaccgaggacgagaagctgctgatcgacatcatccacttcctgaacaagctgatcaaggagcagagaaagaacagcagcctggagctgctgaactggatcctggagctgctgctgagacacagcgccaaccccctgctggacctgctggtgctgaccgagagccaggccagagaggagaccgacgacatcagaaccgccgtgagacagcagctgcagaaggagctgatcgccctgttcgacaccctgctgctgaacttcatggaggtgaccgacagaaagtgcagcgagctgctgtacgtgttccagacccagctggccctgaagctgctgcagtgcctgaaggtgaccgacgccccccacttctacggcctgcccagcctggagagaaccctgagaggcatggccaacctgaccgccttccccggctggagcagccacagccccctgaccaagcccctggacatctgcgtgaagtacctgagcggcctgctggaggtgatcaccagcttctacgtggagagaggcggcaacgccatgagcttcatgggcaagggcgtgaccaagagcaccatcctgtgcctgctgcacctgagccacgagatgatggcccaggccggcagcctggagtggatgagcctgtggttcctgcccctgggcagccacagcgaggagcacatccccacccagcagggcctggcctggctgatccccctgtgggtggacagagaccccgaggtgagattcaccagcctgggcctgggcagcgccctgaccaccctggagaccggctgcgtggccctggccaacagctgccagaacatcagcggcggcctgtggggcaccgtggtgaacatcctgctggaccagagcgagtgcagcatggtgagaagagaggccgccttcatcctgcagaacctgctggtgatccccatgcccaccgagatcatcaaggactacacctggcagggcccctgcgtgcacgacgaggacagcggcctgagcctgatcggcaagcccgccctgcaggccctgctgtaccactgccacttctacgagcacctgaaccagatggtgaagcactgctacctgggcagatgcatgttcgacctgaacttcagcgccttcgacagaaacagcgagagcaacgacctgaacggcctggacgacagcttcaagttctggagagcccccagcagaaccagccaggacagagaccccagcagcctgagcaccagcgagaccaccgtggcccccagcctgggcagcaccgagttccagcccctggtgcagagcaccaccctgctgcccgaggccagccacgaccagttcgtggcccagggcaacagacacttcggcaccaacatccagttctag

SEQ ID NO: 250631 - DNA, 2640 bp, Artificial Sequence
  derived and/or modified sequence
atggtgctggccggcctgatcagaaagctgggccaccagctggccgagatcagagagagagccctgaagagcatcctgtgcaagatcgagcacaacctgatctgctacgccgacctgatccaggagagacagctgttcctgcacctgctggagtggttcaacttccccagcgtgcccatgaaggaggaggtgctgaacctgctgagcagactggtgaagtacccccccgccgtgcagcacctggtggacgtgggcgccgtggagttcctgagcaagctgagaagcaacgtggagcccaacctgcaggccgagatcgacggcatcctggacggcctgttcctgctgcccagcgaggtgcccgccctgagcagcgccagctaccagaccaaccagaccgagctgagcaagaaccccgagatcctgaccggctacttcccccaggacaagagcaacttccagcagatggaggtgccccccagacccgtggtgaaccagaccgtgaagtgcctgaagttcagcaccttcccctggctgcccctgaccaccaccgacagacacgtgctgagcagcaacgagagcagcctgagaagcagcaaccacaccctgatctggaacacctgcgagctgctgaaggacgtgatcatgcaggacttccccgccgagatcttcctgcagagacccaagatcgtgcagagcctgctgagcctgctgaagctggccttcggcgacggcaagcacagactggccctgcagagcgtgagctgcctgcagcagctgtgcatgtacctgagaaacagactgaacttccacagagaccccggcttcttcagcaacaagcacgacaccgtgagccagaacagcagcctgagctactgccacgaggccagaggcacccaccacagccagaaccccagccccggcagcagcagccccagacccagcgtggtgggcagaaccggccagagacccagaggcgacggccaggactgggacgccgccagcagcagcggcagcagcagccacgcccacgtgaacagcagaatcagcgtgcacagccccctggacatgggccacatcgacctgcccgagctggagaccgaggacaccctggagctgcagttccagcagctgagcctgccccagttctgcgtgagcatcctggagagcgccgtgcccctgctgagaaccggcagcagacaggtgatcatcagagtgctggagctgctgaccgaggacatgaccctgatcggcgaggccatcagcaccgacatctgggacgacagcagcctgttcggcatcgacatgaaggagaagctgctgctggtgctgggcgccctgggcgagaccatgtgctaccacaagagcagcatcagcctggagcagcccgaggtgatgctggtgcaccacagaatggccttcatcagcatcagcctgttcgccgtgagactgctgcagaccctgctgcccgtggagaaggccagcgagttcctgagcgagcccatgagcaccgccctgttcctgctgagcctggacatgcccatcagcctggagtaccccaacatccacgaggccgtggtggcctacctggagcagctgaacagcgagaactacagcatctacaagagaaccgccgaggccgtgtacagcatcgagtgcacctgcaacttcctgagcgacatcggcaaggagggcgagaagaacctgctggagctggtggagctggccgaccaggccctgagaagcttcagctaccaccagcacttccccctgatcaaggagatcatcagcatctgcagcaagatctggaagagcgcccaggccagccccctgctgcagggcgagagccagaaggtgctgctgcacatgctgagccaccccctgcccagagtgaaggccgagacctaccactgctgcctggagatcaccaaggagtgcctgggcgtgcacaacgtgaccaagcccgtgagcagcctgtgcaacggcatccacttcctgctgcaccccaaggtgctgtacgagatcagcgtgttcggcatccaggagcccgagagcgaggtgaacaccgccgccaaggccatcctgctgtacctgctgcagggcagactgatgatgaccgccctgacctggaacaagttcatcgagagcctgtgccccgtgatccccatcctgcagggctacgccgacaccgaggaccccctgggcaactgcatcctgctgctgagcaaggccagcagcgacaccgaggagatgctgccctgcaccaccagactgaagagcatgctgagactgctgctggtgaagaagcccagcgtgagaagcctggccctgaagctgctggccttccacctgaccagcgaggagggcgccgacaccaagagacccctgatcgacgccagagtgctgagcagagtgaccgacctgttcatcggcaagaagcccatcgagctgagactggacgacagaagagagctggtgatcaagctggagaccgtggagaaggtgtacgagatcttcaccagcgacgacgtggacctggtgctgagaaagagcgccgccgagcagctggccgtgatcatgcagggctgcagaatgttcggcaccaccatgccccacaccctggaggagggcttcatgtggtag

SEQ ID NO: 250632 - DNA, 6681 bp, Artificial Sequence
  derived and/or modified sequence
atggtcctcgcgggcctgattcgtaagctggggcaccagttggccgagatccgggaacgagccctcaaatctattctctgtaagatcgagcataatctaatctgttacgctgatctgattcaggaacggcagcttttccttcacctgctcgagtggttcaatttcccttcggtgcctatgaaggaggaggtgttgaacttgttgtcgcgcctggtgaagtaccccccagccgtccaacacttggtcgatgtgggggccgtggagttcttatcaaagctgcgttcaaatgtagaacccaacctgcaggcggagattgacgggatccttgatgggctgttccttctgccatctgaggtgcccgcactgtctagcgcgtcctaccagacaaaccagaccgaactctcgaagaacccagagatcctgaccggttacttcccccaggataaatccaacttccaacagatggaggtgccccctcgcccagtggtgaatcagaccgttaagtgcttgaaattttcaacttttccctggctgcccctgacaactactgatcgccacgtcctttcatcaaatgagtcttctctcagatctagtaaccacaccctgatctggaatacatgtgagctcctgaaagatgtgatcatgcaggactttccggcagaaatcttcctccagcgccctaaaatagtccagagcctactttccctgctgaagctcgctttcggtgacggtaaacataggcttgccctccagagtgtatcctgcctgcaacagctgtgtatgtacttgagaaatagactgaactttcatcgggatcctggctttttcagcaacaagcacgatactgtcagccagaattccagcttatcttactgtcatgaggctaggggaacccatcactctcagaacccttcaccaggaagcagctccccgcgcccctcagtcgtgggccggacaggccagaggccgagaggggacggtcaagattgggatgccgcaagcagcagcgggagttccagccacgctcatgtcaatagtcgaataagcgtgcacagcccactggatatgggtcacattgacctgccagagctcgaaacagaggacaccctggagttgcaatttcaacagctatctctgccccaattctgtgttagcatcctcgagagtgctgttccactgctgcggaccggaagccgacaggtcatcatcagggtcttggagctgctgaccgaggacatgacccttatcggagaggccatcagcaccgatatttgggacgatagctccctgtttggtatagatatgaaggaaaagcttcttctggtcctgggggcactcggagaaaccatgtgttatcacaagtcttcaatttcactcgaacaacccgaggtgatgctggtccatcaccggatggcatttatatcaatctccctatttgccgtgcgcttactgcagacccttctgccagtcgaaaaagcctcggaattcttgtctgagccaatgagcacagcattatttttactcagcctggacatgccaatctcactcgaatacccaaatatccacgaagcagtagtcgcctatctggagcagcttaactccgagaattactcaatctacaaacgaaccgccgaggctgtctactccatagagtgcacatgcaattttctgtcagatatcgggaaggagggcgaaaaaaatcttctggaactcgtggagttggcagaccaggcattgcggagctttagctatcaccagcatttccccttaatcaaggaaatcatttctatatgctcaaaaatttggaaatccgctcaggctagcccccttcttcaaggagagagccaaaaagtcctattgcacatgctctctcaccccctgccccgcgtgaaggccgaaacgtatcactgttgcttggaaataactaaagaatgtctgggagtacacaatgtgactaaaccggtatcctcattgtgcaacggcattcattttctgcttcatcccaaggtgctctacgagataagcgtgtttggtatccaggagcccgaaagtgaagtcaataccgctgcaaaggctatcctgctgtatttgctccaaggccggttgatgatgaccgcactgacctggaacaagttcattgaatccctttgtccagtcatcccgattctccaaggctacgctgataccgaggatccactgggtaattgtatcctgttgctctctaaagcctcatcagacacagaagagatgcttccctgcaccacacgtcttaagagtatgctgagacttttgctggttaaaaagccctcagtgagatcgttagcactaaagctgcttgcgttccacttaaccagcgaagagggagccgatacaaagaggccgctgatagatgcccgtgtgctgagtagagtgaccgacctgtttatcggcaagaaacctattgagcttaggcttgatgaccgacgcgagctcgtgattaaactggagacagtcgaaaaggtgtatgaaatctttacttcggacgacgttgatctcgtgttgagaaagtctgccgcagaacagctcgctgtgatcatgcaagatattaagatgcacgccgttgtgaagaaactgtgcctcattgataagatcatcgagtatctcaacgaatgcgtatctcaggatggcaaagtggttgagtgtcttgtgcagccgtgtctgactctcctgcggaaagtgctatgcggtgacccggtgatgagagtatcactgagtcagcaaagctccctgctgacagttcttttccgtgtctcactcatttttcatgaagattgcagtgtggttacagaagtcggcgcgctgttttgcctcttgctcttcgatgaagtttcaagaatggacatgtggtctgtgaaccccagcaataaaccctccctgccttccgtgttctccctgcccgtgtctgtcttccggagataccatttgcctgtgcacgtgatcggacaccacgcggtgagcccatatagtatcgttctgcccctgtcagccgattgcctggctttgaagccggtcagcgatatgctgagaatcgcttggaacctgagctggtatcatggatccgacaaccttctgaaacagatgaattcggaaactaaaacccaggagattttggatgctctcaagttaagcactgaggatatactaacactgaaaatcactcacatggcttctggcctgcaggactgtctgcacagtatagttcaagcagccacccacagagaggtgcgagctgcggttacgaggatgtccttctatcttctcaacgataggctcagcctcaagggatgtccaggaccatgcggagttaccctgaaatcattagcatggcatactgctctaaatagattcttacaggtcctccccgcttgcacagaggatgagaagctgctcatagacataattcactttctcaacaagctaatcaaggaacagaggaagaactctagccttgaattgctgaattggattcttgagctccttctgcgccattccgcgaaccctctgctggacctgctggtcctgacggagtcccaggctagagaagagaccgacgacatcaggactgctgtgagacaacagctccaaaaggagctgatcgcattgtttgatacactgttgttgaacttcatggaagttacggacagaaaatgctctgagttgctgtacgttttccaaactcagctcgccctgaagctgcttcagtgtctcaaggtgaccgatgctccacatttctatggactgccgtccttagagcgcacactaagaggcatggccaatcttacagcatttcccggctggtcgagtcactcccctctgacaaaaccgctggacatttgcgtgaagtacctttccgggttgctagaggtgatcacatcattttatgtggagcggggggggaacgctatgtccttcatgggaaagggagtgaccaaatccaccatcttgtgtctgctacatcttagccacgaaatgatggctcaggctggttcgctggaatggatgtctctgtggttcctgcccctgggttctcacagtgaggagcacatcccgacccagcaggggctcgcctggttgatccctctctgggtcgatagggacccagaagtaaggtttacctcactgggtctggggtcggccctgaccaccctcgagaccggctgtgtcgccctggcaaatagttgtcagaatatcagtggcggcctctggggcactgtagtgaatatcctactcgaccagtcagagtgttccatggtgcgtagggaggcagccttcattctgcagaacctgctcgtgattccaatgccaactgagatcattaaggactacacgtggcagggcccgtgcgtgcatgatgaggacagcggactttctctaatcggcaagccagccctccaggcactgctgtaccactgtcatttctatgaacacctgaatcagatggttaaacattgttatcttggcagatgtatgttcgacttaaactttagcgcgttcgataggaacagcgaaagcaacgatctgaacggcctcgacgattccttcaaattctggcgggccccctccagaacgtcacaggatcgggacccatcgagcctgtctacaagtgagactaccgtcgctccttcacttgggagcacagagtttcagcctttagtccagagtaccacattactaccggaagccagccacgatcagttcgtggcccaagggcaccaagaaagtacctcgcctcggcctccgcatgattcatctcttagtgcccccctacccaagctgtgcgtttttgtgacaccatcccttctgtccgccatgtgttctctccttgacaatttacttacaatcgctccacgtgacacggctaaagcctttcgccaggctcaccttattgagctgctctgttccattgcggacgcaactctgattcagacatgtgtgcaagaattgagggcactgctgccctcctctcctcccgccgaacacacgcaggctcaggtgtcttttctgcttgaatacctctcctcgctgagtcggctgctgcagtcatgcctcctagttgagcccgatctggttatccaggacgagctagtgaagccactgatcaccaacattatcggaatcctgacaatatgcaccaaggatgttttagacaaagaattgatcagcgctttttaccatacctggactcatctgtttaacctgctggcaatgttactccgaaaagccggcgccattacattgcccttcgtgactgtggctctcgcaaagcattggaccgctgctatcgatatgttttgcacttgcgcagggttgagtgcaacgtgccctgcgctgtatactgcctctcttcagtttctctcggttctgctgaccgaagaagccaaggggcatctgcaggcaaagtccaagactcacctatgctgtagtcccactgtggccagcctgttagacgactcccaagaaaaccagaagagtctcgagcagctgtctgatgtgattctgcaatgctatgagggcaagtcgagcaaggacattctgaaacgggtggctgccaacgcactgatgtctctgctggccgtgtcaagacgagcacagaaacacgcacttaaggctaacttgattgataactgcatggagcagatgaagcacatcaatgctcagctgaacctagatagcctaaggcccggcaaggccgccctgaagaagaaagaggatggggtgattaaggagctgtctatcgccatgcaactcctccgcaactgcctctatcagaacgaagagtgcaaggaggctgcactggaagcccatctggtgcctgtgctccacagtctttggccatggatccttatggatgacagtctcatgcagatttctctgcagctgttatgcgtgtacactgccaactttccaaatgggtgtagttcactgtgctggagtagttgtggccagcatcccgtccaggccacccaccggggcgcagtatcaaactctctgatgctctgcattctgaagctcgcctcacagatgcccctcgagaacaccacagtccaacagatggtctttatgctgctgagcaatctcgccctgagtcacgactgcaaaggagtgatccagaaaagtaacttcttgcagaattttttgtccttggccctgcccaaagggggcaataaacatcttagcaatctgactattctctggttgaagctgttgttgaatatttccagtggtgaggacggacagcagatgatcctgcgtttggacgggtgtctcgacttgctgaccgagatgagcaagtacaagcacaaatcctcccccctcctgcctctcctaatcttccataacgtgtgcttctcacccgcgaacaaaccgaaaattctggccaatgaaaaagtaataactgtgctggccgcttgtctggagtctgaaaatcagaacgcccagcggattggcgcagccgccctttgggctctgatttataattatcaaaaggcaaagacagccctgaagtcaccaagcgtgaagagacgggtggacgaagcctatagcttggcaaagaagaccttccccaactctgaagcgaatcccctaaacgcctactatctgaaatgtctagaaaatctggtgcagctgcttaacagctcttag

SEQ ID NO: 250633 - DNA, 4782 bp, Artificial Sequence
  derived and/or modified sequence
atggtcctcgctggtctgattcgcaagctgggccaccagctggccgagattcgggaacgagcgctgaaatccatcctgtgtaagatagagcacaatctcatctgttacgccgatctcatccaggaacgacagctctttcttcaccttctggaatggtttaacttcccatccgtaccgatgaaagaagaagttctcaacctcctttccagactcgtcaagtatcctcccgctgtgcaacacctcgttgacgtgggggccgttgagtttcttagcaaactacgatccaatgtagaacccaacctgcaggccgaaatcgacggtatcctggacggcttgtttctactgcccagcgaggttcccgcactgtcatcagcatcatatcagactaatcagacagaactatctaaaaaccccgaaattttgaccgggtacttccctcaggataagtcaaacttccagcagatggaggttcccccgcgcccagtggtgaatcaaaccgtgaagtgtttaaaattctcaacttttccctggctaccattgaccactaccgatcgtcatgtcttatcatccaacgagagcagtctaaggtcatccaaccacaccttgatctggaacacctgcgagctgctgaaagacgtgattatgcaagacttcccagccgaaatctttcttcagcgtcccaagatcgttcagtctctgctgtcgttactgaagttagctttcggggatggaaagcaccgtctggcgttgcaatccgtcagttgtctccagcagttgtgcatgtaccttagaaacaggctgaactttcaccgtgaccctgggtttttttccaacaaacatgatacagtgagccagaactcttccctctcctattgtcatgaggcaagaggcacccatcactctcaaaatccttccccgggcagctcaagtccccgtccttccgttgttggcagaaccggccaacggcccaggggcgacgggcaagattgggatgctgcatcaagttccggctcatcctctcacgctcacgtgaactcccgaataagtgttcattcgccacttgatatgggacatatcgatttgccagagctagagactgaggacactctggagctgcagtttcagcagctatcattgccacagttctgtgtaagcattctcgaaagtgctgtgccacttctgcggaccggttctaggcaggtcatcattcgtgtcctggaattgttaaccgaagatatgactctgatcggagaggccattagtaccgacatatgggacgactcaagtctgttcggtattgacatgaaggaaaagttactcctcgtgttgggggcgttaggagagacaatgtgctaccataagagtagtatctctcttgagcagcccgaggtgatgctcgttcaccatagaatggcctttatttctatctctttattcgcagtgcgcctactgcagaccctgttgcccgtggagaaagcttcagagttcctgtcagagcctatgtcaacggccttgtttttattgtccttagacatgccgatttcactggagtaccccaacattcacgaggctgtcgttgcctatctcgaacaactgaattcagagaattacagcatatacaaacgcacagctgaggccgtgtacagcattgaatgtacgtgtaacttcctgtctgacattggaaaggaaggggaaaaaaacttgttggagctggtggagctcgccgaccaagcactgcgcagcttttcctatcaccagcacttccccctcattaaagagataatatccatttgttcaaagatctggaagtccgcacaggcctcaccactgttacaaggagagtcacagaaagtcctgcttcacatgctttcgcaccccttgcctcgcgtgaaggccgaaacataccattgttgcttggagattactaaggagtgtctgggcgtccacaacgtgaccaaaccagtctcaagtctttgcaatggaattcactttctgctccaccccaaggtactgtacgaaatcagcgtgttcggaatccaggaaccagagtccgaggtgaatactgcagcaaaggccatcctgctgtacctcctgcaaggaagacttatgatgaccgcactgacgtggaataagtttattgagagtctttgtcccgtcataccaattcttcaagggtacgcagatacagaagacccactcggaaattgcatcttgctgctgagcaaagctagtagtgatactgaggaaatgctcccctgcacaacgagacttaagagtatgttgaggctccttctggtcaagaagccatcagttcgcagcctggcactgaaactcttggccttccacctaacaagcgaggagggtgcagataccaaacgtcctctcattgacgcccgggtgttgagtcgggtgactgacctatttattggaaagaagcctatcgagctcagattggacgatcggagagaactggtgataaagctggaaactgttgaaaaggtttatgagatcttcacctccgatgacgtggatctggtgctgcgaaagtctgcggcggagcaactggccgtgattatgcaggacatcaagatgcacgctgtagtgaaaaagctgtgcttaatcgataaaattattgaatatctgaatgaatgcgtgagtcaggacggaaaggtggtagagtgcttggtgcagccttgcctgaccttgctgagaaaggttctctgcggggatccggtcatgagagtctcgctcagtcaacaaagtagcctcctcactgtgcttttcagggtgagcctgatcttccacgaagactgctcagtcgtaacagaggtaggggccctgttttgcctgttgctgttcgatgaagtgtccagaatggacatgtggtctgtgaacccctcaaacaaaccatccctcccaagcgtgttttcacttccagtaagcgtgttcagacggtaccacctgcccgttcatgtgatcggccaccatgcagtctccccttatagcattgtgctgcctttgtctgccgattgtttagcgttaaagcccgttagcgacatgctcagaatagcttggaatctatcatggtatcacgggtcagataacctgctgaagcagatgaactcagagaccaaaacccaggagatcttggatgcgctaaaactgagtaccgaggacattctgaccctgaagatcactcatatggccagcggtttgcaggattgtctgcattccatcgtgcaggcagccacacacagggaggtgcgagccgccgttactcggatgtctttctacctactgaatgatcgcctgagcttgaaaggatgtccagggccgtgcggcgtgaccctcaagtcactagcgtggcacacagctctgaatcgcttcctccaggtgctgcccgcttgtactgaagatgagaagctcttgatcgatattattcactttctgaacaagttgatcaaggaacagagaaaaaacagctcgctggagttactgaattggatactggaactactgctgcggcattctgccaatccgttgctggacctgctggtactgaccgaatcccaagcccgagaagagactgacgacatccgaactgcagtgagacagcagctgcagaaggaactcatagcactgttcgacactctgctgcttaatttcatggaggtaaccgatcgaaagtgctccgaactactctacgtgtttcagactcagttggcactgaaactgctgcagtgcctgaaggtgacagatgcaccacatttttacggcctcccaagcctggagagaactttgcgcggaatggcaaatctgactgcattccctggatggagttcccattcaccgcttactaaacccctggacatctgtgtgaagtatctgagcggacttttggaggtgataacctctttttacgtggaacgcggaggtaacgcaatgtcttttatggggaaaggcgtaaccaagtccacaatattatgcctcctccacctttcacatgagatgatggcccaggccgggtccttagaatggatgtcattgtggttcctgcctctgggcagccattctgaagaacacatccctactcagcaaggcctagcctggctgattcctctgtgggtcgatagggatcctgaggtgagattcacatccttggggctaggctccgccttgacaactctggaaacagggtgcgtagccctggccaacagctgtcagaacattagcggtgggctatggggtaccgtggtgaacattcttcttgaccagagcgagtgctccatggtgcgccgtgaagccgccttcatcctgcagaatctcctggtcataccaatgcccacagagataattaaggactacacttggcaggggccatgcgtccacgatgaggactctgggctatcactaatcggcaaacccgcacttcaggctctgttgtaccattgccacttttatgaacacctcaaccagatggtcaagcactgttacttggggagatgcatgttcgatcttaatttttctgccttcgatcggaactccgagagcaatgacctcaatggcctcgacgacagcttcaagttctggcgcgctccttcgcggacgtcacaggatagagatccctcctccttgtctacttccgaaactacagttgccccgtcactggggtcaacggaattccagccactcgtccaatcgaccaccctgctacccgaggcatcccacgatcagtttgtcgcccaggggaaccggcatttcggaactaacatccagttttag

SEQ ID NO: 250634 - DNA, 2640 bp, Artificial Sequence
  derived and/or modified sequence
atggttttggccggcttgatacgcaaactgggccatcaactcgccgagatccgggaacgagcacttaaatctattctgtgtaagatcgagcataacctcatctgctacgctgatctcatccaagagaggcagctctttctgcacttgctggagtggttcaatttcccctccgtgcccatgaaagaggaggtgctaaacctactcagtcgactcgtcaaatacccaccagccgtgcagcatctagtggatgtaggagcggtagagttcctgagtaagttgcggtcgaacgtcgaacccaatctgcaggccgaaatagacggaattcttgatggtctgtttctcctcccaagtgaggttccagctctcagtagtgcatcatatcagactaaccagacagagctgtcaaagaaccccgagatactcacgggctacttcccacaggataagtccaacttccagcagatggaagtcccacccaggccagtggtcaaccagacggttaagtgcctgaagtttagtacctttccatggctaccgctcacaacaacagaccggcatgtactatcctctaatgagtcctctctgcggagctccaaccacactctgatctggaacacctgcgaactacttaaggacgtcatcatgcaagattttccagcagagatatttctccagcgacctaaaatagtccagagcctgttgagtcttctgaagctagccttcggggatggcaagcataggctggctctccagtccgtctcttgtttgcagcaactttgtatgtacctgcggaatcggctcaactttcatcgtgatcctggcttcttcagtaacaaacatgacaccgtgagccaaaacagcagtctgagctactgtcacgaagcccgcggaacacaccactcccagaaccccagccccggttcatcctcgccaaggcctagcgttgttggacggaccggccagcgcccaaggggagatggacaggattgggatgccgcctcttcaagcggcagttcttcccacgctcacgttaactctcgcataagcgttcactcacccctcgacatggggcacattgatctgcccgagctagagactgaggacaccctagagcttcagtttcaacagctaagcctcccacagttttgcgtgtctatccttgaatccgctgttccactgctccgaaccggtagtcggcaagtcatcattcgcgtgcttgagctgctcacagaggatatgactctgatcggagaggccatcagcaccgatatatgggatgactcttctcttttcggcattgacatgaaggaaaagctgcttctagtgcttggagccttgggggaaacaatgtgttatcacaaaagctccatctccctggagcaaccagaggtgatgctggtacaccatcggatggcgttcatctccatatcactgttcgccgtgcgactactccaaacattgctgcccgtcgaaaaagcctcagagtttttgagtgaaccaatgtcaactgccctttttctgcttagtctggacatgcccattagccttgaatatcccaacattcacgaggcagtggtggcttacctggagcagttgaacagcgaaaattatagtatctataaacgcactgccgaggcagtgtatagcattgaatgcacatgtaacttcctctccgacatcggcaaagaaggagagaagaatctgcttgagctggttgagctggccgaccaagcccttagaagttttagctatcaccagcactttccactcattaaagagataatttctatttgttctaaaatttggaagagcgcacaggccagcccactgctgcaaggggagagccaaaaggttctgttacatatgcttagtcatccccttcctagggtgaaagcagagacctaccactgctgcctagagatcaccaaggagtgtctgggagtgcataacgttacaaagccagtaagctccctctgtaacgggattcacttcctacttcacccaaaagtgctgtacgagatctctgtatttggcatacaagaaccagagtctgaggttaacaccgccgctaaagccattttgctctatctactgcaaggacgactcatgatgacagctttaacgtggaacaagtttatcgaatcactttgcccggtaataccaatcctacaaggttacgcagacacagaggatccactgggtaattgtatcctcctgttgagtaaggcctcatccgacacagaagagatgttgccatgcactaccaggctgaagagcatgcttagactcttattggtaaagaaaccatccgtgagatcgctcgctctcaaactactggcatttcacttgaccagcgaggagggcgccgacacgaagcgccctctgatcgatgctcgagtcctttctagggtgaccgatctctttatagggaagaagcccatagagctccggttggacgataggcgagagctcgtaattaaactggaaaccgttgaaaaggtatacgaaatctttacatctgatgatgttgacctggttctgcgcaaaagtgccgccgaacagttggccgtgataatgcagggatgcaggatgttcggcaccaccatgccacacaccctggaggaaggcttcatgtggtag

SEQ ID NO: 250635 - DNA, 6681 bp, Artificial Sequence
  derived and/or modified sequence
atggtgctggccggcctcatcaggaagctgggccaccagctggccgagatccgggagcgggccctgaagagcatcctgtgcaagattgagcacaacctgatctgctatgctgacctgatccaggagcggcagctgttcctgcacctgctggagtggttcaacttccccagcgtgcccatgaaggaggaggtgctgaacctgctgagccggctggtgaagtacccacctgctgtgcagcacctggtggatgtgggcgctgtggagttcctgagcaagctgcggagcaatgtggagcccaacctgcaggccgagattgatggcatcctggatggcctcttcctgctgcccagcgaggtgcctgccctgagcagcgccagctaccagaccaaccagacagagctgagcaagaaccctgagatcctgaccggctacttcccccaggacaagagcaacttccagcagatggaggtgccccccaggcctgtggtgaaccagacagtgaagtgcctgaagttcagcaccttcccctggctgcccctgaccaccacagacagacatgtgctgagcagcaatgaaagcagcctgcggagcagcaaccacaccctcatctggaacacctgtgagctgctgaaggatgtgatcatgcaggacttccctgctgagatcttcctgcagaggcccaagatcgtgcagagcctgctgagcctgctgaagctggcctttggagatggcaagcaccggctggccctgcagagcgtgtcctgcctgcagcagctgtgcatgtacctgaggaaccggctgaacttccaccgggaccccggcttcttcagcaacaagcatgacacagtgtcccagaacagcagcctgagctactgccacgaggcccggggcacccaccacagccagaaccccagccctggcagcagcagcccccggcccagcgtggtgggccgcacaggccagaggcccagaggagatggccaggactgggatgctgccagcagcagcggcagcagcagccacgcccacgtgaacagccgcatctctgtgcacagccccctggacatgggccacatcgacctgcctgagctggagacagaggacaccctggagctgcagttccagcagctgagcctgccccagttctgtgtgtccatcctggagagcgctgtgcccctgctgaggacaggcagccggcaggtgatcatccgggtgctggagctgctgacagaggacatgaccctcatcggggaggccatcagcacagacatctgggatgacagcagcctgtttggaattgacatgaaggagaagctgctgctggtgctgggcgccctgggggagaccatgtgctaccacaagagcagcatcagcctggagcagcctgaggtgatgctggtgcaccacaggatggccttcatcagcatcagcctgtttgctgtgcggctgctgcagaccctgctgcctgtggagaaggccagcgagttcctgtctgagcccatgagcacagccctcttcctgctgagcctggacatgcccatcagcctggagtaccccaacatccacgaggccgtggtggcctacctggagcagctgaacagcgagaactacagcatctacaagaggacagctgaggccgtgtacagcattgaatgtacctgcaacttcctgagtgacatcggcaaggagggggagaagaacctgctggagctggtggagctggccgaccaggccctgcgctccttctcctaccaccagcacttccccctcatcaaggagatcatcagcatctgcagcaagatctggaagagcgcccaggccagccccctgctgcagggcgagagccagaaggtgctgctgcacatgctgagccaccccctgccccgggtgaaggccgagacctaccactgctgcctggagatcaccaaggagtgcctgggcgtgcacaacgtgaccaagcctgtgagcagcctgtgcaatggcatccacttcctgctgcaccccaaggtgctgtatgagatctctgtgtttggcatccaggagcctgagagcgaggtgaacacagctgccaaggccatcctgctgtacctgctgcagggccgcctgatgatgacagccctgacctggaacaagttcatcgagagcctgtgccctgtgatccccatcctgcagggctatgctgacacagaggaccccctgggcaactgcatcctgctgctgagcaaggccagcagtgacacagaggagatgctgccctgcaccacccggctgaagtccatgctgcggctgctgctggtgaagaagcccagcgtgcgcagcctggccctgaagctgctggccttccacctgaccagcgaggagggcgctgacaccaagaggcccctgattgatgcccgggtgctgagccgggtgacagacctcttcatcggcaagaagcccatcgagctgcggctggatgacagaagagagctggtgatcaagctggagaccgtggagaaggtgtatgagatcttcaccagtgatgatgtggacctggtgctgaggaagtctgctgctgagcagctggccgtcatcatgcaggacatcaagatgcatgctgtggtgaagaagctgtgcctgattgacaagatcatcgagtacctgaatgaatgtgtgtcccaggacggcaaggtggtggagtgcctggtgcagccctgcctgaccctgctgaggaaggtgctgtgtggggaccctgtgatgagggtgtccctgagccagcagagcagcctgctgactgtgctcttccgggtgtccctcatcttccacgaggactgcagcgtggtgacagaggtgggcgccctcttctgcctgctgctgtttgatgaggtgtccaggatggacatgtggagcgtgaaccccagcaacaagcccagcctgcccagcgtcttcagcctgcctgtgtctgtgttccgccgctaccacctgcctgtgcacgtgattggccaccacgctgtgagcccctacagcatcgtgctgcccctgtctgctgactgcctggccctgaagcctgtgtctgacatgctgagaattgcctggaacctgtcctggtaccacggcagtgacaacctgctgaagcagatgaacagcgagaccaagacccaggagatcctggatgccctgaagctgagcacagaggacatcctgaccctgaagatcacccacatggccagcggcctgcaggactgcctgcacagcatcgtgcaggccgccacccaccgggaggtgcgggctgctgtgaccaggatgtccttctacctgctgaatgaccggctgagcctgaagggctgccccggcccctgtggggtgaccctgaagagcctggcctggcacacagccctgaaccgcttcctgcaggtgctgcctgcctgcacagaagatgagaagctgctgattgacatcatccacttcctgaacaagctgatcaaggagcagaggaagaacagcagcctggagctgctgaactggatcctggagctgctgctgcggcacagcgccaaccccctgctggacctgctggtgctgacagagagccaggcccgggaggagacagatgacatcagaacagctgtgcggcagcagctgcagaaggagctgattgccctgtttgacaccctgctgctgaacttcatggaggtgacagacagaaaatgttctgagctgctgtatgtgttccagacccagctggccctgaagctgctgcagtgcctgaaggtgacagatgccccccacttctacggcctgcccagcctggagaggaccctgcggggcatggccaacctgacagccttccctggctggagcagccacagccccctgaccaagcccctggacatctgtgtgaagtacctgagcggcctgctggaggtgatcaccagcttctacgtggagcggggcggcaatgccatgtccttcatgggcaagggcgtgaccaagagcaccatcctgtgcctgctgcacctgagccatgagatgatggcccaggccggcagcctggagtggatgagcctgtggttcctgcccctgggcagccacagcgaggagcacatccccacccagcagggcctggcctggctgatccccctgtgggtggaccgggaccctgaggtgcgcttcaccagcctgggcctgggcagcgccctgaccaccctggagaccggctgtgtggccctggccaacagctgccagaacatcagcggcggcctgtggggcaccgtggtgaacatcctgctggaccagagtgaatgttccatggtgcggcgggaggccgccttcatcctgcagaacctgctggtgatccccatgcccacagagatcatcaaggactacacctggcagggcccctgtgtgcatgatgaagattctggcctgagcctcatcggcaagccagccctgcaggccctgctgtaccactgccacttctatgagcacctgaaccagatggtgaagcactgctacctgggccgctgcatgtttgacctgaacttcagcgcctttgacagaaattctgagagcaatgacctgaatggcctggatgacagcttcaagttctggagggcccccagcaggaccagccaggaccgggaccccagcagcctgagcaccagcgagaccaccgtggcccccagcctgggcagcacagagttccagcccctggtgcagagcaccaccctgctgcctgaggccagccatgaccagtttgtggcccagggccaccaggagagcaccagcccccggccccctcatgacagcagcctgagcgcccccctgcccaagctgtgtgtgtttgtgacccccagcctgctgagcgccatgtgcagcctgctggacaacctgctgaccatcgccccccgggacacagccaaggccttccggcaggcccacctgattgagctgctgtgcagcattgctgatgccaccctcatccagacctgtgtgcaggagctgcgggccctgctgcccagcagccccccagctgagcacacccaggcccaggtgtccttcctgctggagtacctgagcagcctgagccggctgctgcagagctgcctgctggtggagccagacctggtgatccaggatgagctggtgaagcccctcatcaccaacatcatcggcatcctgaccatctgcaccaaggatgtgctggacaaggagctgatcagcgccttctaccacacctggacccacctgttcaacctgctggccatgctgctgaggaaggccggggccatcaccctgccctttgtgacagtggccctggccaagcactggacagctgccatcgacatgttctgcacctgtgccggcctgagcgccacctgcccagccctgtacacagccagcctgcagttcctgtctgtgctgctgacagaggaggccaagggccacctgcaggccaagagcaagacccacctgtgctgcagccccaccgtggccagcctgctggatgacagccaggagaaccagaagagcctggagcagctgagtgatgtgatcctgcagtgctatgagggcaagagcagcaaggacatcctgaagagggtggccgccaatgccctgatgagcctgctggccgtgtcccggcgggcccagaagcacgccctgaaggccaacctgattgacaactgcatggagcagatgaagcacatcaatgcccagctgaacctggacagcctgcggcctgggaaggccgccctgaagaagaaggaggatggagtcatcaaggagctgagcatcgccatgcagctgctgaggaactgcctgtaccagaatgaggagtgcaaggaggccgccctggaggcccacctggtgcctgtgctgcacagcctgtggccctggatcctgatggatgacagcctgatgcagatcagcctgcagctgctgtgtgtgtacacagccaacttccccaacggctgcagcagcctgtgctggagcagctgtggccagcaccctgtgcaggccacccacagaggagctgtgagcaacagcctgatgctgtgcatcctgaagctggccagccagatgcccctggagaacaccaccgtgcagcagatggtgttcatgctgctgagcaacctggccctgagccatgactgcaagggcgtcatccagaagagcaacttcctgcagaacttcctgagcctggccctgcccaagggcggcaacaagcacctgagcaacctgaccatcctgtggctgaagctgctgctgaacatcagcagtggagaagatggccagcagatgatcctgcggctggatggctgcctggacctgctgacagagatgagcaagtacaagcacaagagcagccccctgctgcccctgctgatcttccacaacgtgtgcttctccccagccaacaagcccaagatcctggccaatgagaaggtgatcaccgtgctggccgcctgcctggagagcgagaaccagaatgcccagagaattggagctgctgccctgtgggccctgatctacaactaccagaaggccaagacagccctgaagagccccagcgtgaagagaagagtggatgaggcctacagcctggccaagaagaccttccccaacagcgaggccaaccccctgaatgcctactacctgaagtgcctggagaacctggtgcagctgctgaacagcagctag

SEQ ID NO: 250636 - DNA, 4782 bp, Artificial Sequence
  derived and/or modified sequence
atggtgctggccggcctcatcaggaagctgggccaccagctggccgagatccgggagcgggccctgaagagcatcctgtgcaagattgagcacaacctgatctgctatgctgacctgatccaggagcggcagctgttcctgcacctgctggagtggttcaacttccccagcgtgcccatgaaggaggaggtgctgaacctgctgagccggctggtgaagtacccacctgctgtgcagcacctggtggatgtgggcgctgtggagttcctgagcaagctgcggagcaatgtggagcccaacctgcaggccgagattgatggcatcctggatggcctcttcctgctgcccagcgaggtgcctgccctgagcagcgccagctaccagaccaaccagacagagctgagcaagaaccctgagatcctgaccggctacttcccccaggacaagagcaacttccagcagatggaggtgccccccaggcctgtggtgaaccagacagtgaagtgcctgaagttcagcaccttcccctggctgcccctgaccaccacagacagacatgtgctgagcagcaatgaaagcagcctgcggagcagcaaccacaccctcatctggaacacctgtgagctgctgaaggatgtgatcatgcaggacttccctgctgagatcttcctgcagaggcccaagatcgtgcagagcctgctgagcctgctgaagctggcctttggagatggcaagcaccggctggccctgcagagcgtgtcctgcctgcagcagctgtgcatgtacctgaggaaccggctgaacttccaccgggaccccggcttcttcagcaacaagcatgacacagtgtcccagaacagcagcctgagctactgccacgaggcccggggcacccaccacagccagaaccccagccctggcagcagcagcccccggcccagcgtggtgggccgcacaggccagaggcccagaggagatggccaggactgggatgctgccagcagcagcggcagcagcagccacgcccacgtgaacagccgcatctctgtgcacagccccctggacatgggccacatcgacctgcctgagctggagacagaggacaccctggagctgcagttccagcagctgagcctgccccagttctgtgtgtccatcctggagagcgctgtgcccctgctgaggacaggcagccggcaggtgatcatccgggtgctggagctgctgacagaggacatgaccctcatcggggaggccatcagcacagacatctgggatgacagcagcctgtttggaattgacatgaaggagaagctgctgctggtgctgggcgccctgggggagaccatgtgctaccacaagagcagcatcagcctggagcagcctgaggtgatgctggtgcaccacaggatggccttcatcagcatcagcctgtttgctgtgcggctgctgcagaccctgctgcctgtggagaaggccagcgagttcctgtctgagcccatgagcacagccctcttcctgctgagcctggacatgcccatcagcctggagtaccccaacatccacgaggccgtggtggcctacctggagcagctgaacagcgagaactacagcatctacaagaggacagctgaggccgtgtacagcattgaatgtacctgcaacttcctgagtgacatcggcaaggagggggagaagaacctgctggagctggtggagctggccgaccaggccctgcgctccttctcctaccaccagcacttccccctcatcaaggagatcatcagcatctgcagcaagatctggaagagcgcccaggccagccccctgctgcagggcgagagccagaaggtgctgctgcacatgctgagccaccccctgccccgggtgaaggccgagacctaccactgctgcctggagatcaccaaggagtgcctgggcgtgcacaacgtgaccaagcctgtgagcagcctgtgcaatggcatccacttcctgctgcaccccaaggtgctgtatgagatctctgtgtttggcatccaggagcctgagagcgaggtgaacacagctgccaaggccatcctgctgtacctgctgcagggccgcctgatgatgacagccctgacctggaacaagttcatcgagagcctgtgccctgtgatccccatcctgcagggctatgctgacacagaggaccccctgggcaactgcatcctgctgctgagcaaggccagcagtgacacagaggagatgctgccctgcaccacccggctgaagtccatgctgcggctgctgctggtgaagaagcccagcgtgcgcagcctggccctgaagctgctggccttccacctgaccagcgaggagggcgctgacaccaagaggcccctgattgatgcccgggtgctgagccgggtgacagacctcttcatcggcaagaagcccatcgagctgcggctggatgacagaagagagctggtgatcaagctggagaccgtggagaaggtgtatgagatcttcaccagtgatgatgtggacctggtgctgaggaagtctgctgctgagcagctggccgtcatcatgcaggacatcaagatgcatgctgtggtgaagaagctgtgcctgattgacaagatcatcgagtacctgaatgaatgtgtgtcccaggacggcaaggtggtggagtgcctggtgcagccctgcctgaccctgctgaggaaggtgctgtgtggggaccctgtgatgagggtgtccctgagccagcagagcagcctgctgactgtgctcttccgggtgtccctcatcttccacgaggactgcagcgtggtgacagaggtgggcgccctcttctgcctgctgctgtttgatgaggtgtccaggatggacatgtggagcgtgaaccccagcaacaagcccagcctgcccagcgtcttcagcctgcctgtgtctgtgttccgccgctaccacctgcctgtgcacgtgattggccaccacgctgtgagcccctacagcatcgtgctgcccctgtctgctgactgcctggccctgaagcctgtgtctgacatgctgagaattgcctggaacctgtcctggtaccacggcagtgacaacctgctgaagcagatgaacagcgagaccaagacccaggagatcctggatgccctgaagctgagcacagaggacatcctgaccctgaagatcacccacatggccagcggcctgcaggactgcctgcacagcatcgtgcaggccgccacccaccgggaggtgcgggctgctgtgaccaggatgtccttctacctgctgaatgaccggctgagcctgaagggctgccccggcccctgtggggtgaccctgaagagcctggcctggcacacagccctgaaccgcttcctgcaggtgctgcctgcctgcacagaagatgagaagctgctgattgacatcatccacttcctgaacaagctgatcaaggagcagaggaagaacagcagcctggagctgctgaactggatcctggagctgctgctgcggcacagcgccaaccccctgctggacctgctggtgctgacagagagccaggcccgggaggagacagatgacatcagaacagctgtgcggcagcagctgcagaaggagctgattgccctgtttgacaccctgctgctgaacttcatggaggtgacagacagaaaatgttctgagctgctgtatgtgttccagacccagctggccctgaagctgctgcagtgcctgaaggtgacagatgccccccacttctacggcctgcccagcctggagaggaccctgcggggcatggccaacctgacagccttccctggctggagcagccacagccccctgaccaagcccctggacatctgtgtgaagtacctgagcggcctgctggaggtgatcaccagcttctacgtggagcggggcggcaatgccatgtccttcatgggcaagggcgtgaccaagagcaccatcctgtgcctgctgcacctgagccatgagatgatggcccaggccggcagcctggagtggatgagcctgtggttcctgcccctgggcagccacagcgaggagcacatccccacccagcagggcctggcctggctgatccccctgtgggtggaccgggaccctgaggtgcgcttcaccagcctgggcctgggcagcgccctgaccaccctggagaccggctgtgtggccctggccaacagctgccagaacatcagcggcggcctgtggggcaccgtggtgaacatcctgctggaccagagtgaatgttccatggtgcggcgggaggccgccttcatcctgcagaacctgctggtgatccccatgcccacagagatcatcaaggactacacctggcagggcccctgtgtgcatgatgaagattctggcctgagcctcatcggcaagccagccctgcaggccctgctgtaccactgccacttctatgagcacctgaaccagatggtgaagcactgctacctgggccgctgcatgtttgacctgaacttcagcgcctttgacagaaattctgagagcaatgacctgaatggcctggatgacagcttcaagttctggagggcccccagcaggaccagccaggaccgggaccccagcagcctgagcaccagcgagaccaccgtggcccccagcctgggcagcacagagttccagcccctggtgcagagcaccaccctgctgcctgaggccagccatgaccagtttgtggcccagggcaacagacacttcggcaccaacatccagttctag

SEQ ID NO: 250637 - DNA, 2640 bp, Artificial Sequence
  derived and/or modified sequence
atggtgctggccggcctcatcaggaagctgggccaccagctggccgagatccgggagcgggccctgaagagcatcctgtgcaagattgagcacaacctgatctgctatgctgacctgatccaggagcggcagctgttcctgcacctgctggagtggttcaacttccccagcgtgcccatgaaggaggaggtgctgaacctgctgagccggctggtgaagtacccacctgctgtgcagcacctggtggatgtgggcgctgtggagttcctgagcaagctgcggagcaatgtggagcccaacctgcaggccgagattgatggcatcctggatggcctcttcctgctgcccagcgaggtgcctgccctgagcagcgccagctaccagaccaaccagacagagctgagcaagaaccctgagatcctgaccggctacttcccccaggacaagagcaacttccagcagatggaggtgccccccaggcctgtggtgaaccagacagtgaagtgcctgaagttcagcaccttcccctggctgcccctgaccaccacagacagacatgtgctgagcagcaatgaaagcagcctgcggagcagcaaccacaccctcatctggaacacctgtgagctgctgaaggatgtgatcatgcaggacttccctgctgagatcttcctgcagaggcccaagatcgtgcagagcctgctgagcctgctgaagctggcctttggagatggcaagcaccggctggccctgcagagcgtgtcctgcctgcagcagctgtgcatgtacctgaggaaccggctgaacttccaccgggaccccggcttcttcagcaacaagcatgacacagtgtcccagaacagcagcctgagctactgccacgaggcccggggcacccaccacagccagaaccccagccctggcagcagcagcccccggcccagcgtggtgggccgcacaggccagaggcccagaggagatggccaggactgggatgctgccagcagcagcggcagcagcagccacgcccacgtgaacagccgcatctctgtgcacagccccctggacatgggccacatcgacctgcctgagctggagacagaggacaccctggagctgcagttccagcagctgagcctgccccagttctgtgtgtccatcctggagagcgctgtgcccctgctgaggacaggcagccggcaggtgatcatccgggtgctggagctgctgacagaggacatgaccctcatcggggaggccatcagcacagacatctgggatgacagcagcctgtttggaattgacatgaaggagaagctgctgctggtgctgggcgccctgggggagaccatgtgctaccacaagagcagcatcagcctggagcagcctgaggtgatgctggtgcaccacaggatggccttcatcagcatcagcctgtttgctgtgcggctgctgcagaccctgctgcctgtggagaaggccagcgagttcctgtctgagcccatgagcacagccctcttcctgctgagcctggacatgcccatcagcctggagtaccccaacatccacgaggccgtggtggcctacctggagcagctgaacagcgagaactacagcatctacaagaggacagctgaggccgtgtacagcattgaatgtacctgcaacttcctgagtgacatcggcaaggagggggagaagaacctgctggagctggtggagctggccgaccaggccctgcgctccttctcctaccaccagcacttccccctcatcaaggagatcatcagcatctgcagcaagatctggaagagcgcccaggccagccccctgctgcagggcgagagccagaaggtgctgctgcacatgctgagccaccccctgccccgggtgaaggccgagacctaccactgctgcctggagatcaccaaggagtgcctgggcgtgcacaacgtgaccaagcctgtgagcagcctgtgcaatggcatccacttcctgctgcaccccaaggtgctgtatgagatctctgtgtttggcatccaggagcctgagagcgaggtgaacacagctgccaaggccatcctgctgtacctgctgcagggccgcctgatgatgacagccctgacctggaacaagttcatcgagagcctgtgccctgtgatccccatcctgcagggctatgctgacacagaggaccccctgggcaactgcatcctgctgctgagcaaggccagcagtgacacagaggagatgctgccctgcaccacccggctgaagtccatgctgcggctgctgctggtgaagaagcccagcgtgcgcagcctggccctgaagctgctggccttccacctgaccagcgaggagggcgctgacaccaagaggcccctgattgatgcccgggtgctgagccgggtgacagacctcttcatcggcaagaagcccatcgagctgcggctggatgacagaagagagctggtgatcaagctggagaccgtggagaaggtgtatgagatcttcaccagtgatgatgtggacctggtgctgaggaagtctgctgctgagcagctggccgtcatcatgcagggctgcaggatgtttggcaccaccatgccccacaccctggaggagggcttcatgtggtag

SEQ ID NO: 250638 - DNA, 6681 bp, Artificial Sequence
  derived and/or modified sequence
atggtgctggccggcctgatccggaagctgggccaccagctggccgaaataagggagcgcgctctcaaaagcattttgtgtaagatcgagcacaatctgatatgttacgcagacctgatccaggagcgtcagctgtttctgcacctgctggagtggtttaattttccctccgttccaatgaaggaggaggtgctgaaccttctgtctcggcttgttaagtatcccccagcagtccagcacttggttgatgtgggcgcagtcgagtttcttagcaagctgaggagcaacgttgaaccaaacctccaggccgaaatcgatgggatcctggacggactgtttttgctgccctctgaggtgcccgccctgtcctccgcgtcttaccaaactaaccagaccgaactttccaagaatcccgagattctaacaggctattttccccaggacaagagtaactttcaacagatggaggtcccaccacggcccgtcgtgaaccaaacagtaaaatgcctgaaattcagcacgtttccgtggctgcctctcacgactactgatcggcacgttctttctagcaacgaatcctccctgagatcaagcaatcataccttaatatggaacacctgcgaacttctcaaagacgttataatgcaggatttccctgccgaaatattcctccagagacctaaaatcgtgcagagcctcctatctttgctgaagctcgcgtttggggatgggaaacaccggctcgctctgcaaagcgtgagttgcctgcagcagctctgcatgtatctgaggaacagactgaattttcaccgggatccaggttttttctctaataagcatgatactgtaagccaaaacagtagtctgtcctattgccacgaggcccgagggacacaccactcccagaatccttcgccaggctcaagcagccctaggccttcagtcgttggcaggaccggacagcggcccagaggcgacggccaggattgggacgccgcttcctcgtcagggtcctcctcacacgctcatgtcaattcacgcataagcgtgcatagccccttggatatgggtcacattgatttacctgagctcgaaaccgaggacactttggagctgcaattccagcaactatctttaccacagttttgcgtgtcaattctagaaagcgccgttcctctcttgagaacagggtccaggcaagtgatcattcgcgtattggagctgcttaccgaagacatgaccctcattggtgaggctatctctacggacatctgggatgactctagcctgttcggaatagacatgaaggagaagctcctgttagtactaggagctctcggcgagaccatgtgttatcacaagtcctcaataagcctggagcagccggaggtcatgctggtgcaccacaggatggccttcatttccattagcctgttcgctgtaagacttctccagacacttctcccagtggagaaggcttcagagttcctgtccgagcctatgtcaaccgcccttttcctgctctcccttgacatgcctataagtttagagtaccctaacatccacgaagcagtggtggcctaccttgagcagctgaacagtgaaaattacagcatttacaagcgaactgcagaagccgtgtacagtatcgaatgcacctgcaacttcctctcagatattggtaaggagggagagaaaaacctgcttgagctagtagaacttgctgaccaggcgcttcggtcattctcctatcatcagcactttccccttatcaaagagataatcagtatttgcagtaaaatttggaagtccgcacaagctagtcctttgctgcagggcgagtctcaaaaggtgctgctccacatgctgtcacatcctctgccacgagtgaaagcagaaacctatcactgttgcctggagatcacgaaagagtgtttaggagtgcataatgtgaccaagccagtgagcagtctctgtaacggaattcatttccttctccatccaaaggtactttacgaaattagcgtgtttggtattcaggagccagagtcagaggtgaacactgccgccaaggccatcctactctacctgctgcagggtaggctgatgatgacagcactgacatggaacaagttcatagagtccctgtgccccgtgattccgatcctgcaggggtatgctgataccgaggaccccttaggaaattgcatcctattgctctctaaggcctcatccgataccgaagaaatgttgccctgcacgacgcgactgaaatcaatgttgcggctgctactggtcaaaaaaccatccgtgaggagtctcgctctgaaactgctagcatttcacctaacaagtgaggagggcgctgataccaagcggccactgatcgacgctcgggtgcttagtagggttactgatctgttcatcggtaagaaacccattgaattgcggctggacgaccggagagagcttgtcatcaagctggaaactgttgagaaggtttacgaaatttttacctctgacgacgtcgatttagtcctaagaaaatcggccgcagaacagctcgccgtgatcatgcaggacattaagatgcatgccgtggtgaaaaaattgtgcttaatcgacaaaatcattgagtacttaaacgagtgcgtgtcacaggacgggaaggttgtcgagtgcctggtccagccctgcctcaccctcctgcgcaaagtgttatgcggcgatcctgtaatgagagtgagcctgagtcaacagtcatccctgctcaccgttctcttccgcgtgtccctgatattccacgaggactgctctgtagtaacggaggttggagccctcttctgtttgctgttgttcgacgaggtaagtcgcatggatatgtggtctgtgaatccctcaaacaaaccttctctgccatctgtcttttccctgcctgtctcggttttcagaagatatcacctcccagttcatgtgattggccatcacgcggtcagcccatactccattgtgttgcccctctccgcagattgcctggccctcaagcccgtgtccgacatgctccggatcgcctggaacctgagctggtaccacggctcagataatctgctaaagcagatgaatagtgagacaaaaacacaagagattctggacgccctcaaattgagcacagaagatattcttactctgaagatcacacacatggcaagcggcctccaggattgtctccattccatcgttcaggctgccacccacagggaggtgagggcggccgtcaccagaatgtccttctatttactgaatgatagattatctctgaaggggtgcccggggccttgtggagtaacgttgaaatctctcgcttggcacaccgctctgaaccgatttctccaagtgctgcccgcatgcactgaagatgagaaattattgattgacattattcactttctgaacaaactgattaaggaacaaaggaagaattcctccctcgagttactgaattggattctggagctgcttctgagacattctgcaaaccccctgctcgatctcctggtcctcacggaaagtcaagcccgggaagaaactgatgacatacgcacagcagtaaggcagcagctccaaaaagaattaatcgcactctttgacaccctcttgcttaacttcatggaggtgacagacagaaagtgtagcgagctgctgtacgtcttccagacccagcttgcgctaaaattattacaatgcctgaaggttacagacgcccctcatttttatgggctccctagcctcgaaaggacactgcggggtatggcaaatctgaccgcctttcctgggtggtcaagtcactccccattgacgaaacctctcgatatatgcgtgaaatacctttccggactactggaagtaataacctctttctacgtggagagaggtggaaacgcaatgtcattcatgggcaaaggcgtgaccaaatcaacaatcctgtgtctgctccatctgtcccacgaaatgatggcacaagcggggagtctggagtggatgtctttgtggtttctgccactgggttctcactccgaggagcacattcctacccagcagggtctggcttggttgattcctctctgggtcgatcgagaccccgaggtgcggttcacaagccttggattaggcagtgccctcactacattagagactggatgcgtggccctcgccaatagctgtcagaatatatctggtggcctgtggggaacagtggtgaacatcttactggaccagagcgagtgctctatggtcaggcgagaggctgcttttatcctgcagaatctgctcgtaatccccatgcccactgaaatcatcaaagattacacctggcagggaccttgcgttcacgatgaggactctggactcagtctcataggcaaaccggccttacaggccctgctgtatcactgccacttctatgagcatctgaaccagatggtcaaacattgttacctgggaagatgcatgttcgatctgaacttttcagcattcgatagaaacagcgaatcaaatgacctgaacggcttggatgactccttcaaattctggagagccccttctcggaccagtcaggatagagacccttcatccctgtctacttctgagacaacggtcgcaccaagcttgggtagcactgaattccaacctctcgtgcaaagcacaacgttgctaccagaggccagtcacgatcagttcgtggcccaggggcaccaagagtctaccagcccccgccccccccatgatagcagtttgtcagctcctctccctaaactgtgtgtatttgtgactccgagcctcctttctgccatgtgctcccttcttgacaacctgctgacgatcgccccccgtgataccgctaaagccttccgacaggcccacctgattgagctgttatgtagcatcgctgacgcaaccctgattcagacttgtgtgcaggaacttcgggccctgctcccctcatctcccccggctgaacatactcaggcccaggtctcatttctgctcgagtatttgtccagcctgtcgcgcttgctgcaaagttgcctgctagtagagcccgatctcgtgatccaagacgaattggtcaagcccctgatcaccaatatcatcggaatcttgaccatttgtacaaaggacgtccttgataaggagctgatttctgctttctatcatacttggacacacttattcaacctcctcgcgatgttactgcgtaaagctggtgccattaccctgccatttgttaccgtggccctcgctaagcactggacggccgcgattgatatgttctgtacttgtgcaggactcagcgctacatgccctgcactgtataccgcttcactgcagtttctgagtgtgctgctcaccgaagaggcaaagggccacctgcaggctaaatccaaaacccacctttgctgctcacccacggttgccagtctgctggacgactctcaagagaaccaaaagtctctggaacaattatccgatgtcattctgcagtgctacgaagggaagagttcaaaggatatcctgaaacgcgtggctgcaaacgcactgatgtctctgctggccgtctcaagaagagcacaaaagcacgccctgaaagctaaccttatcgataactgtatggagcagatgaagcacatcaatgcacaactaaacctggactctttgcgacccggaaaggctgccctcaagaagaaagaagacggagtcatcaaagaactgtcaatagccatgcaactgctccgtaattgtttatatcagaatgaagaatgcaaagaggccgctctggaggcccatctggtgcctgtgcttcactcattgtggccgtggattctcatggacgacagcctgatgcaaatttctttgcagttgctctgtgtgtacaccgctaactttcctaacggctgtagctctctctgctggagctcctgcggtcagcaccctgtgcaagctacccatcggggcgccgttagtaacagccttatgttatgcatcttgaagctggcctctcagatgcccctggaaaataccactgtccagcagatggtttttatgttgctatcgaacctggccctctcccatgattgcaagggagtcattcagaaatctaactttctgcaaaatttcctctccctggccttgcccaaagggggcaataagcacctgtccaatttgacaatcctgtggctaaagttactgcttaacatcagctctggcgaggatggtcagcagatgatcctgcgattggatggctgcttagacctactgactgaaatgtccaaatacaagcacaagtcgagtccactcctccccctgttgatcttccacaatgtatgtttctcacctgccaataaaccaaaaatcctcgcgaatgaaaaagtaataaccgttctcgccgcatgtctggagtcagaaaaccagaatgctcagaggatcggggccgcggccctctgggctctgatttacaattatcagaaagccaaaacagctcttaaatcccccagcgtgaagcgacgcgtggatgaggcctacagcctggccaagaaaacgtttccaaattcagaagccaatccactgaatgcctactacttaaagtgcctggaaaatctggtgcagctgctcaattcttcttag

SEQ ID NO: 250639 - DNA, 4782 bp, Artificial Sequence
  derived and/or modified sequence
atggtgctggccggcctgatccggaagctgggccaccagctggccgaaatacgcgagagggctctcaagagcattttatgcaagatcgagcataacctgatttgctacgccgacttgattcaggaaagacagctgttcctgcacctcctcgaatggtttaactttccatctgtgcccatgaaagaggaagtgctaaatttattgagtaggctcgtaaagtacccccctgctgtgcagcatctggttgatgttggcgctgtggagtttttaagcaagctcagatccaacgttgagccgaatctgcaggcagagatcgacggcattctggatggtttgtttctcttaccaagcgaagtgcctgccctctcttctgcctcatatcagacaaaccagacagaactgtccaaaaatcccgaaatcctaacaggatattttccacaggataagtcgaacttccagcagatggaggttccacctcgtcctgttgtgaatcagacagtgaagtgcttgaagttttctacattcccctggctccctctgaccacgaccgatcgtcatgttctctctagcaatgaaagttccctgagaagctccaaccacaccctgatctggaacacctgcgaattgcttaaggacgtgatcatgcaggacttcccagccgagatcttcctgcagcgtcctaagattgtccagagcctactgtccctcttgaagctggccttcggcgacggaaagcatcggctggcccttcagtctgtatcttgcctgcagcagctgtgtatgtacctgcgaaatcggctaaactttcaccgggatccaggcttcttttccaacaaacatgacacagtaagccaaaacagctcgctgagctactgtcacgaggcgcgcggcacccaccactctcagaatcctagccccggttcctcctccccccgccctagtgtggtaggacggaccggccagaggccacggggcgacggccaggactgggacgcggcgtctagctctggaagtagcagccatgcccacgtgaactcccggatcagtgtccactcccccctggatatgggccatattgaccttccagaactggaaactgaggataccctggagctgcagtttcaacagctgtctctgccgcagttctgtgtgagcatcctagagtcagcagtgccacttctgagaaccgggtcaagacaggtcattatccgtgtcttggagctgctcaccgaggatatgacactcatcggtgaggctatttctaccgacatctgggacgattcaagcctctttgggatagacatgaaggagaaattgctcctggtgcttggggccctcggtgagacaatgtgctaccacaagagttctatttcccttgaacagcctgaggtgatgctcgtgcatcaccgcatggccttcatctctatctcactgtttgccgtccgactgctgcagaccttattgccagtggagaaagccagcgaattcctgagcgaaccaatgagcaccgcactgttcctgttgtctctcgatatgcccataagcttagagtaccccaacatccatgaagctgtggtcgcttatctcgagcagctgaattctgaaaactactccatctacaaaagaacagctgaagcagtgtactccatcgaatgtacatgcaacttcctgagtgacattgggaaggaaggcgagaagaacctgctcgagctggtcgaacttgcagatcaggcattgcgctccttcagttatcatcaacatttcccccttattaaggagatcatatctatctgctccaagatctggaagtctgctcaggcttctccattgctgcagggagaatcccaaaaggttctgctgcacatgctgagtcatcctctgcccagggtgaaagcagagacataccattgctgcctcgagatcactaaagagtgtctaggagtacataatgtgactaaacctgtttccagtctgtgcaatggaatacatttcctgctgcacccaaaggtactgtatgaaatttccgtcttcggcatccaggaacctgagtctgaggtgaacactgcggctaaggctatactgctatacctgcttcagggtcgactgatgatgacagcactgacctggaataagttcattgagagtttgtgccccgttattcccattctccagggctacgccgacactgaggaccctctgggaaattgtattctgttactgtccaaagcaagttccgacaccgaagagatgctcccctgcacgactcgcctgaaatccatgctgaggctgctgctcgtcaaaaagccgtcagtcaggtctctcgcgctgaagttgttagcctttcatcttacatctgaggaaggagctgacaccaagaggccattaatcgacgcccgggttctgagccgggtgacagacttgtttatcggcaagaaaccaatcgagctccgcctagacgacaggagagagctggtcattaagctggagaccgtggagaaggtgtacgaaatctttacatcagatgacgtggatttagtgttgcgtaagagcgctgcggagcagctcgcagttatcatgcaggacattaaaatgcatgctgtcgtcaaaaagctgtgcctcatcgataagattatcgaatatttgaacgagtgcgtaagtcaagatggtaaggtagtggagtgcctcgttcagccatgcttgacattactgagaaaagtcttgtgcggtgatcctgtcatgagagtgagtctcagtcagcagtcttcgctgctgacagtcctgttcagggtgtctttgatctttcacgaggactgttccgtcgttacagaggtgggtgctctgttttgcctgctgctgttcgatgaggttagcaggatggacatgtggtccgtcaacccatccaataaaccttcactgccctcagtgttttcactgcccgtctctgtcttccgcagatatcatctaccggtgcacgtaattggccatcatgcagtgtcaccatactcaattgtgctgccactgtcagctgactgtctggctcttaaacctgtgagcgatatgctgaggatcgcgtggaatttgtcttggtaccatggcagtgataacctgctaaagcaaatgaacagcgagacgaagacccaggaaatcctcgatgcactgaaactgagcacagaagacatcctgaccctgaaaataactcatatggcttctggattgcaagattgccttcactcaatagtgcaggccgcaacacaccgagaagttcgcgcagctgtcacacgcatgtcgttttacctgttaaacgacagactgagcctgaaagggtgccccgggccatgtggtgtaacgcttaagtctctcgcctggcatacggcactgaaccggtttctgcaggttctgccagcttgcacggaggatgagaagttgcttattgatataattcactttctcaataaactaatcaaggagcagaggaagaactcaagccttgaactgctgaattggatcttggagttgctgctgcggcattctgcaaacccactgcttgacctactggttctgaccgaatctcaggccagggaggagactgatgatatccgtacggccgtgcgtcagcaactgcagaaagaattgattgctctttttgacacactgctactcaatttcatggaagtcacagatcgcaagtgctccgagctcctttatgtgtttcagacacaattggccctgaaactacttcaatgtctgaaggtcactgacgcgccccatttctacgggctgccatctctggagaggaccctgcgagggatggccaacctgacagctttccctggttggtcctcccacagtccgttgaccaaacccctagatatatgtgtaaaatatctgtccggtcttttggaggtcattacttccttctatgtggaaaggggagggaatgcaatgtcctttatgggaaaaggtgtcacaaagtcaaccatcctctgtctcctccatctgtcacatgaaatgatggcccaggctggcagtctggagtggatgtcgctgtggtttcttcccttgggcagccattctgaagaacacatacccacacagcagggcttagcatggttaatccctttgtgggtggatcgagaccctgaggtgcgattcaccagcctggggctgggcagcgccctcacaactctggagactggctgcgtggctctcgctaacagctgccagaatatcagcggcggactgtggggtactgtggtgaacattttgctcgaccagtctgagtgcagcatggtgagaagggaagccgccttcatccttcagaacctccttgtcattcccatgcctacagagattattaaggactacacatggcagggaccttgtgttcacgacgaagactccggtctcagtctaatcggcaagcccgcactgcaggctctcctttatcattgtcacttttacgaacacctcaatcagatggtgaagcattgttatctaggacgctgtatgttcgaccttaatttctcagcctttgacaggaattctgaaagcaatgatctgaatgggttggacgactcatttaaattctggagggcacccagcaggacctcccaggatcgcgacccaagcagcctgagcaccagcgaaacaaccgttgccccttccttggggagtactgagtttcagccgctggtccagagcaccacactactgccggaggcatctcacgatcagtttgtggctcaaggaaacagacattttggcactaatattcagttttag

SEQ ID NO: 250640 - DNA, 2640 bp, Artificial Sequence
  derived and/or modified sequence
atggtgctggccggcctgatccggaagctgggccaccagctggccgagatccgggagagggccctcaaatctatcttatgtaagattgaacataacctgatttgctatgccgacctgattcaggaacgtcagctctttttacacctgcttgaatggtttaacttccccagtgtaccgatgaaggaggaggtcttgaacttgctgagccgattggtgaagtatcctcccgcggtacagcacctagtggatgtgggagcagtcgagttcctgtcgaaactgcggagtaatgtcgagcccaacctgcaagcagaaatcgatggcattctcgacgggctgttcctgctccctagtgaggtgccagccctcagttctgcaagctaccagactaaccagaccgaactctcaaagaatcctgaaatcctgacaggttacttcccgcaggacaaatccaatttccagcaaatggaagtaccaccccgcccagtcgtcaaccaaacggtgaaatgcctcaagtttagcacattcccttggctgcctctgaccaccacagataggcatgtcttatcctctaatgagagctcactcaggtcttctaatcacacactgatctggaacacatgcgaactgcttaaagacgtgattatgcaggactttcctgccgagatcttccttcagagacctaaaatcgtacagtccttgcttagtctgctcaagctcgcctttggcgacggtaaacaccggctcgctttacagtctgtgtcatgtctgcagcaactgtgtatgtacttgcgaaatagattaaattttcaccgcgaccctggctttttctcaaacaagcatgacactgtcagccagaactcatcattaagctactgtcatgaagctaggggtacccatcacagtcagaatccatctcccgggtcctcaagcccacgcccttccgtggttggacgcaccggtcagcgccctaggggagacgggcaggattgggacgcggcttcatccagtggctcttccagccacgcccacgtgaacagccggatcagcgttcacagcccactggatatgggccacattgacctgccagagttggagactgaggacacgctggaactgcaatttcagcagctgtcccttcctcaattctgtgtgtctattctggaaagcgctgtgccgctgctgcgtacgggcagccggcaggtgatcatcagggtcctggagctgctgacggaggatatgaccctgattggtgaggctatctcaactgacatatgggacgactcctcactctttggtatcgacatgaaggagaagctcctgcttgtgctaggcgccctgggcgagacaatgtgctatcataagtcctccatcagtctagaacagccagaagtcatgctggtgcaccaccgcatggcatttataagcatctctctgtttgcagtgaggctactccagactttactgccagtcgagaaggcaagtgaattcttgtccgagccgatgtctacggccctattcctgctgtctctggacatgcctatttcgcttgagtaccccaacatccacgaagctgtggttgcctatctggaacagctgaacagcgaaaactattcaatatataagaggaccgcggaagctgtgtattctatcgagtgcacgtgcaattttctgtcggacattggcaaagagggagagaaaaatttactggaattagtagaactggccgaccaagcccttcgcagcttttcctaccatcagcacttccctttaataaaggaaatcatatccatttgctcaaagatttggaaaagcgctcaggccagccccctcctccagggggagtcccaaaaggttctcctccacatgctcagccatccactccctcgagtgaaagctgagacataccactgctgcctggagatcaccaaagaatgcctgggtgtccacaacgtcactaaaccagtgtcttcattatgtaacgggatacactttcttctccatcctaaagtgctctacgagatcagcgtctttggtatccaggagccagagtccgaggtcaacacggctgcaaaggccatccttctgtatctattgcagggaaggttgatgatgacagccctgacttggaacaagttcattgagagcctctgccccgtgattcctatccttcaggggtacgccgacaccgaggaccctcttggcaactgcatactgctcctgagcaaggcatcaagcgataccgaagaaatgctgccatgtaccacaagattaaagagcatgttgaggttactactggtaaagaagccaagcgttcggagccttgccttgaaattactggccttccacctgacaagcgaggaaggagctgacacaaaacgccccttgatcgacgcccgggtgctctcacgggtgacagatttgtttattggcaagaaacctattgagctcagactcgacgaccgccgggagctcgtcatcaaactggagaccgtggagaaggtgtacgagatttttacttcagatgacgtggatctggtgctgcgtaagagtgcagctgaacaactggccgtgatcatgcaggggtgcagaatgttcgggacaactatgccgcacacgcttgaggagggcttcatgtggtag

SEQ ID NO: 250641 - DNA, 6680 bp, Artificial Sequence
  derived and/or modified sequence
atggttcttgcaggtctaatcaggaagctcggacatcagctcgcagagatcagagaacgtgctcttaagtctattctctgtaaaatagagcataaccttatatgttacgccgacttgattcaggagcgccagttgttcctccacttgctggagtggttcaatttccctagcgtgccaatgaaggaagaggtacttaacctgctttctaggctggtcaagtatccaccggctgtgcagcatttggttgacgttggagctgtggaatttctctccaagttgagatcgaacgtggagcccaatttgcaggctgaaattgatggcatactggacgggttatttctgcttccttccgaggtccccgctctgtcctctgcctcttaccagaccaaccaaacagaactcagcaaaaatccagagatcttgacaggatacttcccccaggacaagtccaatttccagcagatggaagtgcccccacgaccggttgtaaaccagacggtgaagtgcctcaagttttccactttcccgtggctccccctgaccaccaccgaccgtcacgttctctctagcaatgagtctagcctgcgctcctccaatcatacattaatatggaacacttgcgagttactgaaagatgttatcatgcaagactttcccgctgaaatattccttcaacgaccaaagatcgttcaaagtttattgagtctcttgaagctggcatttggcgatggaaagcacaggctggcactgcagagtgtgagctgcttgcagcagctgtgcatgtatctgcgcaatagactgaacttccaccgagatccgggtttcttttctaataaacacgacaccgtgagccagaacagctcactgagttactgccacgaagctagaggcactcaccactcccagaatccgtctccaggcagctcgagtcctcggccatccgtggtgggacggacaggtcagcgacctcgcggagacggacaggactgggatgcagcatcatcaagtgggtccagttcccacgcacacgtcaactcaaggatcagcgtgcattcacccctggatatggggcacatcgatttacctgaactagaaacagaggacaccctggagctgcagtttcaacagttgagtctaccacagttttgcgttagcattctcgagagcgccgtgcctctgctgcgaaccggcagtcgccaggtgataattagagtcctggagttgctgactgaagatatgacactgatcggcgaggcaatttccaccgatatctgggatgatagctctctatttggaatagacatgaaggaaaagctcctcctggtcctaggcgctttgggcgaaactatgtgctatcacaagagcagcatcagtttggaacagcctgaagtgatgctggtgcaccatcgaatggccttcataagtattagtctatttgctgttcggcttctgcagacactgctccctgtcgaaaaagccagcgagtttcttagtgaacctatgtcaacggccctctttctgttatccctggacatgccgatctcactagagtatccaaatattcacgaagcggtcgtggcctacctggagcagttgaattcagagaactatagcatatacaagagaacagccgaagctgtctattctatcgagtgcacctgcaatttcctcagtgacattggaaaggagggggaaaagaatctactcgagctggtagagctcgccgaccaagccctgcgcagcttctcctatcatcagcactttcctcttatcaaggagattatcagcatctgctccaagatctggaaatccgctcaggcctccccactgctgcaaggtgagagccaaaaagttctgctacacatgctgtcacaccctctacccagggtcaaggccgagacttaccactgttgcctcgagatcactaaggaatgcctcggagtccacaacgtcacaaaaccagtaagcagcctttgcaatggaattcactttctcctgcacccaaaggtgctctatgagatttcagtgtttgggatacaggaaccagaatcggaggtaaatactgcagcaaaggccattcttctctatttgctgcaagggaggctgatgatgacagccctgacctggaataagttcattgagtccctgtgcccagtaatcccaatccttcaggggtacgcagacactgaagatcccctcgggaactgcatactgcttttgtccaaggcaagctcagatacagaagagatgctgccgtgcacgactcggctgaaaagcatgttgagactgctgctggtgaaaaagccttctgtgaggtcactggcccttaagctacttgcgttccacctaacctccgaagaaggtgctgacaccaaacggcctttaattgacgcgagagtattgagtcgcgtgacagatcttttcattggaaaaaaaccgatagagctgcgactcgacgatcggagagaactcgtcattaagctagagacggttgaaaaagtgtacgaaatatttaccagcgacgacgtcgaccttgtcctacgcaaaagtgctgctgaacagctagcggtgattatgcaggacatcaagatgcatgcagtggtgaaaaagctatgcctgattgataagattattgagtatcttaacgaatgtgtgtctcaagatggcaaggttgtcgaatgcctggtgcagccttgcttgacactcctcagaaaggtgctctgcggtgaccctgtgatgagagtctcactgtcccagcagagctccctattaactgtgcttttccgcgtgtcactgatttttcacgaggactgcagtgtagttactgaggtcggagctctgttctgcctgctcttgttcgatgaggtgtcgcgtatggatatgtggagcgtgaaccccagcaacaagcccagtctgccctccgtatttagtctgccggtctcagtctttcggcgttatcatttaccagtgcacgtgatcgggcatcatgccgttagtccgtacagcattgtgctccctctatcagcagattgtcttgccctcaagcccgtgagtgatatgcttcggatcgcctggaatttatcctggtaccacgggagcgataatttgctgaagcagatgaactccgagaccaaaactcaggaaatcctggacgcactcaagttatctactgaggatattctgactctgaaaattactcatatggcgtcaggacttcaggattgcttgcattctattgttcaagctgctacgcacagagaagtcagggccgcagtcacaaggatgagcttctatctgttgaacgaccgcctgagcctgaaggggtgccccggtccctgcggcgtgaccctcaaatctttggcctggcatactgctttgaaccgatttctgcaggtgcttccagcctgcaccgaggacgaaaagctgcttattgatattattcactttctcaataaattgataaaggaacagcggaaaaactcatccttagagctgctgaactggatcttagagctgctgttacggcacagtgcaaatccgctgttggatctcctggttttaaccgagagtcaggctagggaggagaccgacgatatcaggaccgcggtccgccagcaactgcaaaaagagctgatcgcacttttcgataccctcctcctgaacttcatggaagtcacagatcggaagtgtagtgagctcttatacgtttttcagactcaactggccctgaagctcctgcagtgcctaaaagtcacggatgccccacacttctatggacttcccagcctcgagaggacactgcgcggaatggcgaatctcaccgccttcccaggatggagcagccacagccctctcaccaaacctttagatatttgcgttaaatatctgtctggactgctggaggtgattacgagtttctacgtggaacgcggaggcaatgcaatgagttttatggggaagggagtaaccaagtccaccattctgtgtctgttgcacctatcccacgagatgatggcacaggccggatctctggagtggatgtctctgtggtttctgccactagggtcgcacagcgaggaacacatccccacacagcagggcctggcctggctcatcccactttgggttgaccgcgatcccgaagtgcggtttacctcccttggcttggggtccgcccttactacgctggagaccggatgcgtggcacttgcaaacagctgtcagaacatttcagggggactgtgggggacagtggtgaacatccttttggatcagagcgagtgcagcatggttcgcagggaggcagccttcatactccagaatcttctggtgatcccaatgcccacagaaattattaaggattacacatggcagggcccttgtgtccacgacgaagattccggattgtccctaattggcaaaccagcccttcaggccctcctctaccactgtcatttttatgagcacctgaaccagatggtcaaacattgttatctcggaaggtgcatgttcgatcttaacttttctgccttcgacagaaattcagaatcaaatgaccttaatggcctcgacgatagctttaaattttggcgagctccatctcgcaccagccaagaccgcgatccaagctcactgagcacaagtgagacaactgtagcaccctccttagggtccacggagttccagccccttgtgcagtctaccactctgctaccagaggccagtcatgatcagttcgtcgcccagggccaccaggagtccacctcccctaggcctccgcacgattcgtctttatccgccccacttcccaagttatgtgtctttgttacaccctccctcttgagtgccatgtgttctctcctggataatttgctcaccatcgcaccacgcgatactgccaaagccttccgccaggcacatctcattgaactactctgttctattgcggatgcaaccctgatacagacctgcgtccaggaactgagggcactccttccaagctcccctcctgccgagcatacccaagcacaggttagcttcctcctcgagtacctgagtagccttagtcggctcctgcagagctgcttgctggtggaacccgacctcgtcattcaggacgaactggttaagccactcatcactaacattattggcatcttaaccatctgtacaaaagacgtcctggataaggaactgatcagcgccttctaccacacatggacccatctttttaatctcttagccatgctactgagaaaagctggggcaattaccctaccattcgtgaccgtcgctctggctaagcactggaccgcagcgatcgatatgttctgcacctgcgctggactcagcgctacgtgtccagccctctatacggccagcctgcaatttctatctgtgctgctgactgaggaagccaagggacacctgcaagccaaatccaagacccatctttgttgttctccaaccgtggcttctctgttggacgattcacaagagaatcagaagtctctcgagcagctgagcgatgtcatattgcagtgttatgagggtaaatctagtaaggatatacttaaaagagtggccgctaatgctctgatgtctctgctcgcagtgagtcgaagagctcagaaacatgcgcttaaagcgaacctgattgataattgtatggagcagatgaaacacatcaacgcccagctgaatctggactcactccgtcccggtaaggctgctctgaagaaaaaggaagacggtgtgatcaaggagctgtcaatcgccatgcagctgctcagaaattgcctctatcagaacgaagaatgtaaagaggccgcactggaggcccatctcgtccccgtgctgcatagcctatggccctggattctgatggacgacagtctaatgcagatttccctgcagctgctgtgcgtgtatactgcaaacttcccaaatggatgttcgagtctctgctggagttcttgcggtcagcacccagtccaggcaactcatcgtggagctgtgtcaaactccttgatgctgtgcatcctgaagctggccagtcagatgcccttagagaataccaccgtccagcagatggtgtttatgcttctctctaacctcgctctgtctcacgactgcaagggtgtgatccaaaagagcaatttcctgcagaacttcctgtcactcgccttgcccaaggggggaaataaacatctgagcaatctgacaatcctgtggttgaaactcctgctcaacatcagttctggcgaagacggacaacagatgattttgagacttgatggctgccttgatcttctgacagaaatgagcaagtacaaacacaagtcaagtccactgctgcctctgctgattttccataacgtctgcttctcacctgctaacaagccgaaaattttagccaacgagaaggtgattaccgtgctggctgcctgtttggaaagtgagaaccagaatgctcagcgcattggtgcggcagcgctctgggccctgatctacaattatcagaaggctaagactgcactgaagtctccttccgtgaagcggagggtagacgaagcttattccctcgcaaagaagaccttcccaaactcagaggcaaatcccctcaatgcgtattatttgaaatgtctagaaaacttggtgcagctcctgaactcctctta

SEQ ID NO: 250642 - DNA, 4782 bp, Artificial Sequence
  derived and/or modified sequence
atggtgctcgcaggactgatcaggaaactaggtcaccagttggccgaaattagagaaagggcccttaagtccatcctttgtaagatcgagcacaacctgatttgttatgctgatttaatacaggaacgtcagctgtttttgcacctgctggaatggtttaactttccgagcgttccaatgaaggaggaagtgctgaatctgctgagtaggctggtgaagtaccctcctgccgtgcagcatttggtggacgtaggggctgtcgagtttctgagtaagctgaggagcaacgtggaaccgaatctgcaggctgaaatcgacggaatcttagatggtctgttccttcttccttcggaggtgcccgcactgtcgtccgcctcataccaaaccaaccagactgaactttccaagaaccccgaaattcttacaggctatttcccgcaagacaaatctaactttcagcaaatggaagtaccaccacgaccggtagtcaatcaaaccgtaaaatgtctcaagttttccacctttccatggctgcccctaacaacaactgaccgtcacgtcctgagcagcaatgaatcatctctgagatcttcgaatcatactttaatctggaacacttgtgagttgctgaaggacgtcataatgcaggatttcccagctgaaatcttcctccaacgacccaagattgtacagagcttactctctctgctgaagctggcattcggcgacggaaaacatcgtttagccctgcagtctgtcagctgtctacagcagctgtgcatgtacctgagaaacagacttaatttccatagggaccccggattcttttcgaataaacacgacacagtcagtcagaactcctctctctcctactgccatgaagctcgaggcacccaccatagccaaaatccgagccctggatcaagctcacccaggccgtcagtggtagggaggaccggccagcgtccaaggggtgacggccaggattgggacgcagcctcatcatctggaagctcttctcacgcacacgtgaactcccgtattagcgttcactcacctttagatatgggacacattgatttgccagaacttgagacggaggatactctcgaactacagttccagcagctgtcactgcctcagttttgtgttagtattctcgagagcgctgtgccccttctgagaaccggctcccggcaggtgattattagagttctagagcttctcactgaggacatgacgctgattggtgaagcaatcagcaccgacatttgggatgattctagcttattcgggatagatatgaaggaaaaattgctgctggtcttaggcgcactcggggaaactatgtgttaccacaaatcttccattagtctagaacaacccgaggttatgttggtccaccaccgaatggcgtttatttcaataagcctgtttgccgtcagacttctccagactttattacctgtggagaaagcaagcgagtttctgagcgagcccatgtccaccgccctttttcttctgtcactcgacatgcctataagcttggagtatcccaacatccatgaagcggtagtcgcttacctcgagcaactcaatagcgaaaattattctatatataaacgcactgccgaggccgtctactctatcgagtgtacctgcaacttcctgtcagacattggaaaggaaggagagaaaaatttactggaattagtggaacttgctgaccaggcccttcgcagcttctcataccaccagcacttcccactgattaaggaaataatctctatctgctcaaagatctggaaaagcgctcaggcttcccccctgctccagggtgagtcacagaaggtgctgttgcacatgctctctcacccacttcccagagtaaaagccgagacttatcactgttgcttggagatcactaaagagtgtctgggcgtgcacaatgtgactaaaccggtatcaagtttgtgcaacggcattcactttcttctgcacccgaaagtcctctatgaaattagtgtgtttggcatccaggaacctgagtccgaagtgaacactgcagctaaagctattctactgtacttgcttcagggaaggctgatgatgactgcacttacctggaacaagtttatagagagtctatgcccagttatcccaatcctgcaaggatacgccgacaccgaagatcccctgggaaactgtatccttttgctgagtaaggccagctcagacacggaagagatgctgccttgtactactcggctgaagtccatgttaagacttctactggtgaagaaacctagtgtacggagtctggccctgaaactgctggcttttcacctgacgagtgaggaaggtgcggacactaagcgccctttgatcgacgccagagtgctgtcacgagtgaccgatttgtttatcggaaagaagccgattgaactcagattggacgaccgaagggagctggtgataaaactggaaaccgtcgaaaaagtgtatgagattttcaccagcgacgacgtggatcttgtactgaggaaatctgcagcagagcagcttgccgtcattatgcaggacatcaagatgcatgcagtggtcaaaaaactgtgtctgatcgacaagatcattgaatatctgaacgagtgcgtaagtcaagatggaaaggtcgtggagtgtctggtgcagccctgtcttacactgttgcgcaaagtgctgtgcggggatcccgtcatgcgagtaagcctgtcccagcaaagctccttacttaccgtgctttttcgcgtcagcctgatattccatgaggactgttccgttgttactgaggtgggcgctttgttttgtcttctgctgttcgacgaggtgagcaggatggacatgtggagtgtcaacccctcaaataaacccagtcttccctcggttttctcactgcctgttagcgttttcaggaggtaccacttgcccgtgcatgtgatcggccaccacgctgtgtccccctactcgatcgttctgcccctgtctgctgactgcctcgcacttaaacctgtttctgacatgttaagaattgcttggaacctcagctggtatcacggatctgacaacttgctgaaacagatgaactctgagactaaaacccaagaaatacttgacgccctgaagctatcaactgaagacattctcacactcaaaattactcacatggcctctgggctgcaggactgtctacatagcatcgttcaggcggctacccaccgcgaagttcgcgctgccgtgacacgaatgtccttttaccttctaaacgatcggctctctctaaaaggatgtcctggcccttgcggggtcaccctgaagagcctggcctggcatactgcactcaacagatttctgcaggtgcttcctgcctgtacagaggatgagaaactactgatcgacattattcatttccttaacaagctgatcaaggaacaaagaaagaatagctcccttgaactgctgaattggatcttagagcttttgttgagacatagcgcgaatcccctactagatttactggtcctgacggagagccaggctagagaggaaacagacgacatcaggactgctgtgcgccagcaattgcaaaaagaacttatcgctctgtttgatacgctgctcctcaactttatggaagttacagaccgaaaatgttccgaacttctttacgtgtttcagactcaattggcattgaagcttctccaatgcctgaaggtgacggacgcccctcatttctatggcttgccctctctggagcggaccctaaggggtatggcaaatcttactgcattcccaggctggtccagtcatagtccgctcactaagccgcttgatatatgcgtcaaatatttgagcggcctgctggaagtcattacgtccttttacgttgagcgcggaggaaatgccatgagtttcatggggaagggtgtgacaaaatccaccattctgtgtctgttgcatctgtcccacgaaatgatggcccaggcgggatcactggaatggatgtctttgtggtttcttcccttaggcagccactcagaggagcacatccccacccagcaagggctggcttggttgattcctctgtgggtggacagagatcccgaggtgcgtttcacctctctcggactgggctccgccctcaccacactggagaccggctgtgtcgcactggccaatagctgtcagaatatttctgggggactctggggcacagtggtcaatatccttttggaccagtctgaatgctcaatggttcgccgtgaagccgctttcatcctccagaatcttctggtcatccctatgcccactgaaattataaaggactacacatggcagggcccatgcgtgcacgacgaagattccgggttatcactgataggtaaacccgcattacaagcactcctgtaccactgccacttttacgagcacctgaatcagatggtgaagcattgttacctgggacgctgcatgtttgacctgaactttagtgcatttgaccggaatagcgagagcaacgatctcaacggactggacgactcgttcaaattctggagggccccaagcaggactagccaagaccgcgacccatcctccctgtccacttcagagaccactgtcgcaccgagtctaggctctactgagtttcaaccattagtgcagagcaccactcttctcccagaagcctcccatgatcaattcgtggctcagggcaaccgacactttggaacaaatatccagttttag

SEQ ID NO: 250643 - DNA, 2640 bp, Artificial Sequence
  derived and/or modified sequence
atggtgctggctggtctcatcagaaagttaggtcatcagctggctgaaattcgggagagagcccttaagtctattctgtgtaaaatcgaacacaacctcatctgctacgccgatttaattcaggaacgacaacttttcctacatctcctggagtggtttaacttcccttctgttccaatgaaagaggaggtgctcaatctccttagtagactggtcaagtatccacctgctgtgcagcatcttgtcgatgtgggcgctgttgaatttctaagcaaattgaggtctaacgtagagccgaatctgcaggccgaaatagacggcattctcgacggtctcttcctcctgccatcagaagtgcccgcactgagttctgcctcctaccaaacaaaccagactgagctgagcaagaatcccgagatactcacaggatacttcccccaagataagtctaacttccaacagatggaggttcccccacgtcccgtggtgaaccagactgtgaaatgtctcaagttcagcacatttccttggctgccgctgaccaccactgacagacatgtgctgtcaagcaatgagtctagtctgaggtcctccaatcacacgcttatatggaatacctgcgaactgctaaaggatgtaattatgcaggattttcctgctgaaatttttctccagaggcccaagattgtccagtctctgttgtcgctactgaagcttgcttttggggacgggaaacatagacttgctctccaatcggtgtcttgcctgcagcagctgtgcatgtacctcagaaaccgactcaactttcatcgggatccaggctttttcagtaacaagcacgataccgtctcacagaactcaagcttgtcctattgtcatgaagccagaggtacgcatcattcccagaatccttcacctgggtcctccagccctcgtccatctgtcgtcggccgaacaggccagcggcctcgaggagacggccaagactgggacgcagcgtctagctctggcagttctagtcacgctcacgtgaatagtcggatctccgtccattcacccttagatatgggtcacattgatctgcccgaactcgagactgaggacacgctggaactgcaattccagcaactgtccctcccacaattctgcgtgtctatcctggaatccgcggtacctctcctccgcacagggtcgcggcaggtgatcattcgagtcctggagctcctcacagaggacatgaccctaatcggggaagctattagcaccgatatttgggatgatagtagtctgttcgggattgacatgaaagaaaaactgctactggtgttaggagctctgggagagacgatgtgttatcataaatcctctattagcttagaacagcctgaggtcatgctcgtgcatcataggatggctttcatctctatctctttgttcgccgtgaggttactccagaccctactgccagttgagaaagctagtgaatttctgagcgaacctatgtcgaccgcacttttcctactaagtctcgatatgcccatctccctggagtatcctaatattcacgaggctgtggtggcctatctggagcagctgaactcggagaactactccatctataaacggactgccgaagctgtatactccatcgaatgtacttgtaacttcctatccgatattggcaaagagggcgagaagaatctgctggagctggttgagctggccgatcaagcgctgcgatccttcagttatcatcagcattttcctctgatcaaagagatcatctctatctgctctaagatctggaagagtgcgcaggccagcccactcctgcagggagaatcccagaaggtgttactgcatatgctgagtcatccgctgccccgagtgaaagcagaaacctatcactgctgtctggagatcaccaaggagtgtttgggcgttcacaacgtgaccaaaccagttagtagcctctgcaacggtatccattttttgctgcaccccaaggtgctctacgagatctctgtgtttggcattcaagagcctgagagcgaggtgaacacagccgctaaagctatattgttataccttctgcaaggcagactaatgatgacagcgttgacgtggaacaaatttattgagagcctatgtcccgtgattccaatcctgcaaggatatgctgataccgaggatcccctggggaactgtatcctcctgctctccaaggcctccagcgatacagaggaaatgctcccctgtaccacccgcctaaaaagtatgttaagactcctgttggttaagaagccttcagtgcgttccctggctttgaaactgcttgccttccacctcacctccgaagagggtgccgacactaaaagacccctcattgatgccagagtgctgagtagagtgactgacttgttcatcggcaaaaagcccatcgagctcagattggatgaccgtcgagagctcgtgatcaagctcgaaaccgtagaaaaagtgtatgagatcttcacgtctgacgatgtagatcttgtgttaagaaaatcagctgccgaacagctcgctgtcattatgcagggctgtagaatgttcggcaccacaatgccgcatacactcgaggagggctttatgtggtag

SEQ ID NO: 250644 - DNA, 7091 bp, Artificial Sequence
  derived and/or modified sequence
attaattgtggctggacgcagtggcgcggcagtttaattctccggcggctgcagattgacgggacgagatggtcctggcagggctcatcaggaaactcggtcatcagctggccgagatcagggagcgcgctctcaagagtattctctgcaagattgagcacaacttaatctgctacgctgatctcattcaggagaggcaactttttcttcatttgctggaatggttcaatttcccgtccgttccgatgaaggaagaggttctgaacctgttaagcagattggttaagtatcccccagcagtccaacatttggttgacgttggtgcagtagagttcttatctaagcttcggtctaatgtggagccaaatctgcaggctgaaattgatggcattctggatggactttttcttcttccttcggaagttcctgcactatcttctgcctcataccaaaccaatcaaactgaattgtcaaaaaaccctgaaatcttaacaggatattttccccaagacaaaagtaatttccagcagatggaagtgccgccacgaccagtggtaaatcagactgtgaagtgcttgaagttttctacatttccttggctacccctgaccaccacagacagacatgtcctctcctctaatgaaagctctttaagaagtagtaaccacactttaatctggaacacctgtgaactattgaaggatgttatcatgcaagattttcctgctgagattttccttcaaaggccaaaaattgttcagagccttttatctctgttgaaactggcctttggagatggaaagcatcgcctggcattacagtcggtgtcctgcctgcagcagctgtgcatgtatttaagaaacagacttaactttcaccgagatccaggttttttctccaataaacacgacacagtttcccaaaattcttctttgtcttattgtcatgaagcaagaggtactcatcattcccagaatccttccccaggaagcagcagccctcggccttctgtggttgggcgcacaggccagcgacccagaggagatggccaggactgggatgcagcgtcctctagtggaagtagtagtcatgctcatgtaaactccaggatatccgttcattcacctttggatatgggacacatagatctgccagagctggaaactgaagacacattggaactacaattccagcagctcagtcttccccagttttgtgtctccattctggaatcagctgttcctctcttaagaacaggtagcagacaagtgataataagagttctggaattgcttacagaggatatgacacttattggtgaagcaatttcaacagatatctgggatgacagcagcctttttggtatagatatgaaggagaaactactcctggtgttgggagcccttggagaaaccatgtgctaccataaaagtagtatcagtttggagcagccagaggtgatgcttgtgcaccacagaatggcctttatcagcatttccctgtttgcagttcgactgctacaaacgcttctccctgttgaaaaggcaagcgagtttttatcagagcctatgtcaacagcattatttctcctttctttggacatgcctatttctttggaatatccaaatattcatgaagctgttgtggcctatttggaacagctgaattctgaaaactacagtatttataaacgaactgcagaggccgtttattcaattgaatgcacctgtaacttcctgtctgatattgggaaagagggagagaagaatctcttagaattagtggagctggcagaccaagccttgcgtagcttttcctatcatcagcatttcccgctaataaaggaaatcatcagcatttgttcaaagatctggaaatctgctcaggccagtccattactacaaggagaaagtcagaaggtgcttctccatatgttgtctcacccattgccacgagtgaaagctgaaacttaccactgctgtctggaaatcacgaaggaatgtttaggtgtccataatgtcactaaacccgtgtcttcactttgcaatggaattcattttctacttcatccaaaagttctgtatgaaatctctgtatttggcattcaagagcccgaaagtgaggtgaacactgctgccaaggccattctgttatacctgcttcagggacgattgatgatgacagcattgacctggaacaagtttattgaatctctctgtcctgtcatcccaatactacagggctatgccgacacagaagatcctctgggtaactgcattctccttctaagcaaagcaagttctgacacagaagagatgcttccgtgtactacccgattaaagtccatgctgcgacttttgctagtgaaaaagccatcggtccgttcgctagcattaaagcttttagcattccatcttaccagtgaagaaggggctgatacaaagcgtcctctaatagacgccagagttctctccagagttactgatttattcattgggaagaaacctattgaactcagactggatgacagaagagagctggttattaagttggagactgttgaaaaggtatatgaaatcttcacctcagatgatgttgatctcgttttgagaaagtcagctgctgaacagttagctgtgattatgcaagatattaaaatgcatgctgtggtgaaaaagttatgcttaattgacaaaataattgagtatttaaatgaatgtgtgagtcaagatggcaaggttgtagaatgtttggtacaaccatgcctcacactcttgaggaaggttttatgtggtgatccagtcatgcgtgtttcgctctcgcaacagtcttctcttttgaccgtgttattcagagtttccttaatatttcatgaagattgtagtgtcgtgactgaagttggagcactattttgtcttctattatttgatgaagtatcgagaatggatatgtggtctgttaatccttccaataaaccttctttgccatcggtcttcagtttgcctgtttccgtttttagaaggtaccatctacctgttcatgtaattggacaccatgctgtgagtccttactccatagttttgcccttatctgctgattgtttggccttgaagccggtgtcagatatgctgagaatagcttggaacctgtcatggtatcatgggagtgataatctgttgaagcaaatgaactctgaaactaaaacgcaagaaattttagatgcattgaagttatctacagaggacatcctcactctgaagataacacacatggctagtgggctgcaggactgcctccattccattgttcaggctgcaacccacagggaagttagggctgctgtcaccaggatgagtttttatcttctgaatgacagattgtctttaaagggttgccctggtccatgtggggttaccttgaagtccttggcttggcacaccgcactaaacaggtttttacaggtgcttcctgcttgcactgaagatgagaaactgctaatagatatcatacattttttaaataaattaataaaggaacaaagaaaaaattcttcactagaacttctaaactggattctcgaattacttcttagacatagtgcaaacccactgttagacctcttggttctgacagagtcacaggcacgagaagaaacagatgatatccggactgctgtcaggcaacaacttcagaaagaactgattgctctttttgataccttgctgctcaatttcatggaagttactgacaggaaatgctcggaacttctttacgtttttcaaacgcagctggctctgaaactgctccagtgtctgaaagtgacggatgcgcctcatttctatggcctgccgtcccttgagcggaccttacgagggatggctaacctcactgcgtttccgggatggagctcacactctcctctcacaaagcctctagatatctgtgtgaagtacttgtcaggtctccttgaggtcattacttctttttatgtggagcgtggaggaaatgctatgtccttcatgggaaaaggtgttacaaagagcacaattctttgcttgcttcacttatcccatgagatgatggcccaggctgggagcttggagtggatgtcactttggttcttgcctttgggtagtcatagtgaagaacatattcctactcaacaaggattggcttggttgattccattatgggttgatcgggacccagaggtgagattcacttcactgggattaggatcagcactgaccacccttgaaacgggctgtgtggccttagcaaacagttgtcagaacatttccggtgggctctggggaactgtggtgaacattcttctggaccagtcagaatgtagtatggtgcgccgggaggcggcatttattcttcagaatctccttgtaattccaatgcctacagaaattataaaggattatacttggcagggtccctgtgttcatgatgaggactctggcctatcgctcattggaaaacctgcccttcaggctcttttatatcactgccatttttatgaacatttgaatcagatggtaaagcattgttacctaggacggtgtatgtttgatttgaatttttctgcttttgatagaaattcagaaagcaatgatttaaatggtttagatgactcattcaagttttggagggctccatctaggacaagtcaggatcgagatccaagttctctctccacctcagaaacaacggtggcaccttcattggggagtactgaatttcagccacttgtgcagtcaacaacacttctacctgaagcctcccatgaccagtttgtggctcaaggtcaccaggaaagtacatcaccacggccacctcatgattcatctctttctgctcccctgcccaaactgtgtgtttttgttactccatctcttctttcagcaatgtgcagcctcttggacaacctcttgacgattgctcccagagacactgcaaaggcttttcgacaagctcatctcatagaacttctctgtagcattgcagatgctaccctcatacagacatgtgtccaggaactcagagccctgctgccttcatcacctccagctgaacacactcaggctcaggtttcctttctcctggaatacctatcctctttgtccaggcttctgcagtcatgtttattggtggagcctgaccttgtgattcaggatgagcttgtgaaacctcttatcaccaatatcattggaattctcaccatatgtaccaaagatgtattagataaagagttaatatcagctttttatcacacatggacacatttatttaatcttctggccatgctcctgaggaaagctggtgccatcacactcccgtttgttaccgtggccctggccaagcactggacagcggcgattgatatgttctgcacatgtgcaggcttgtctgccacgtgtcctgccctgtatactgccagcttgcaattcctttctgttctcttgaccgaagaagcaaaagggcatctccaggctaagagcaaaacacatttatgctgtagtccaacagtggcttcacttcttgatgactctcaggaaaatcagaaatctctagaacaacttagtgatgtaatccttcagtgctatgaagggaaatcctccaaagatatcctgaaaagagtagctgcaaatgcattgatgtcactgctggctgtcagtagaagagcacagaaacatgctttgaaagccaatcttatagacaattgcatggagcagatgaaacacataaatgcacaactgaacctagattctctgaggcctgggaaagcagcattgaaaaaaaaggaggatggtgttattaaagagttaagcattgccatgcagctcctaagaaactgtctttatcaaaatgaggaatgtaaagaagcagctcttgaagctcaccttgtccctgtcttgcactctctctggccttggattttgatggatgattcattgatgcaaatttctctgcagctcctttgtgtctatactgcaaattttccaaatggttgcagttctctttgttggtcaagttgtggacaacaccctgttcaagctacacatagaggagccgtgagcaactctctgatgctgtgtatcctaaagttggcttcccagatgccactggagaacaccacggttcagcagatggtttttatgcttctttcaaacctggccttgtcgcatgactgtaaaggagtaattcagaagagtaacttcttacagaacttcctctctctagcattgccaaaaggaggaaataaacatctaagtaatctgactattctttggttgaagttactcctgaatatatcatctggagaagatgggcaacaaatgattctgaggcttgatggctgtctagacttactaacagagatgagcaaatacaagcacaagagcagccctttattgcctcttcttatctttcataatgtttgcttcagtcctgcaaataaacccaagatcctggctaatgaaaaagtcattactgtgcttgctgcctgtctggaaagtgagaatcaaaatgctcagaggattggagcagctgccctttgggctctgatttacaattatcagaaggcaaaaacagctttgaaaagcccatcagtaaaaagaagagtggatgaagcatactccttagcaaagaaaactttcccaaactcagaagcaaaccctctaaatgcctattatttgaaatgtcttgaaaacctcgtgcagctccttaattcttcctgagtgccatgggatgctacaccttgaagctgacagtcatcaacaggggagctaaagttgaagccagctgtgtgtagcagctgttacctgaagacgtgctacctctctacaaagtgttgatccccttctttcccatgagagagagaactggtgatactccaacaccgtccagttgtggcagctctccagaagtaatagcagctgacaactttctgtgccttttcctttctgttgaaaaggcatagaaagttctgggaacataaacatttttacccttttctatgccatttattttgtaaaaatcctatttaacagttatttaataaaacaatatttttagaaact

SEQ ID NO: 250645 - DNA, 4850 bp, Artificial Sequence
  derived and/or modified sequence
attaattgtggctggacgcagtggcgcggcagtttaattctccggcggctgcagattgacgggacgagatggtcctggcagggctcatcaggaaactcggtcatcagctggccgagatcagggagcgcgctctcaagagtattctctgcaagattgagcacaacttaatctgctacgctgatctcattcaggagaggcaactttttcttcatttgctggaatggttcaatttcccgtccgttccgatgaaggaagaggttctgaacctgttaagcagattggttaagtatcccccagcagtccaacatttggttgacgttggtgcagtagagttcttatctaagcttcggtctaatgtggagccaaatctgcaggctgaaattgatggcattctggatggactttttcttcttccttcggaagttcctgcactatcttctgcctcataccaaaccaatcaaactgaattgtcaaaaaaccctgaaatcttaacaggatattttccccaagacaaaagtaatttccagcagatggaagtgccgccacgaccagtggtaaatcagactgtgaagtgcttgaagttttctacatttccttggctacccctgaccaccacagacagacatgtcctctcctctaatgaaagctctttaagaagtagtaaccacactttaatctggaacacctgtgaactattgaaggatgttatcatgcaagattttcctgctgagattttccttcaaaggccaaaaattgttcagagccttttatctctgttgaaactggcctttggagatggaaagcatcgcctggcattacagtcggtgtcctgcctgcagcagctgtgcatgtatttaagaaacagacttaactttcaccgagatccaggttttttctccaataaacacgacacagtttcccaaaattcttctttgtcttattgtcatgaagcaagaggtactcatcattcccagaatccttccccaggaagcagcagccctcggccttctgtggttgggcgcacaggccagcgacccagaggagatggccaggactgggatgcagcgtcctctagtggaagtagtagtcatgctcatgtaaactccaggatatccgttcattcacctttggatatgggacacatagatctgccagagctggaaactgaagacacattggaactacaattccagcagctcagtcttccccagttttgtgtctccattctggaatcagctgttcctctcttaagaacaggtagcagacaagtgataataagagttctggaattgcttacagaggatatgacacttattggtgaagcaatttcaacagatatctgggatgacagcagcctttttggtatagatatgaaggagaaactactcctggtgttgggagcccttggagaaaccatgtgctaccataaaagtagtatcagtttggagcagccagaggtgatgcttgtgcaccacagaatggcctttatcagcatttccctgtttgcagttcgactgctacaaacgcttctccctgttgaaaaggcaagcgagtttttatcagagcctatgtcaacagcattatttctcctttctttggacatgcctatttctttggaatatccaaatattcatgaagctgttgtggcctatttggaacagctgaattctgaaaactacagtatttataaacgaactgcagaggccgtttattcaattgaatgcacctgtaacttcctgtctgatattgggaaagagggagagaagaatctcttagaattagtggagctggcagaccaagccttgcgtagcttttcctatcatcagcatttcccgctaataaaggaaatcatcagcatttgttcaaagatctggaaatctgctcaggccagtccattactacaaggagaaagtcagaaggtgcttctccatatgttgtctcacccattgccacgagtgaaagctgaaacttaccactgctgtctggaaatcacgaaggaatgtttaggtgtccataatgtcactaaacccgtgtcttcactttgcaatggaattcattttctacttcatccaaaagttctgtatgaaatctctgtatttggcattcaagagcccgaaagtgaggtgaacactgctgccaaggccattctgttatacctgcttcagggacgattgatgatgacagcattgacctggaacaagtttattgaatctctctgtcctgtcatcccaatactacagggctatgccgacacagaagatcctctgggtaactgcattctccttctaagcaaagcaagttctgacacagaagagatgcttccgtgtactacccgattaaagtccatgctgcgacttttgctagtgaaaaagccatcggtccgttcgctagcattaaagcttttagcattccatcttaccagtgaagaaggggctgatacaaagcgtcctctaatagacgccagagttctctccagagttactgatttattcattgggaagaaacctattgaactcagactggatgacagaagagagctggttattaagttggagactgttgaaaaggtatatgaaatcttcacctcagatgatgttgatctcgttttgagaaagtcagctgctgaacagttagctgtgattatgcaagatattaaaatgcatgctgtggtgaaaaagttatgcttaattgacaaaataattgagtatttaaatgaatgtgtgagtcaagatggcaaggttgtagaatgtttggtacaaccatgcctcacactcttgaggaaggttttatgtggtgatccagtcatgcgtgtttcgctctcgcaacagtcttctcttttgaccgtgttattcagagtttccttaatatttcatgaagattgtagtgtcgtgactgaagttggagcactattttgtcttctattatttgatgaagtatcgagaatggatatgtggtctgttaatccttccaataaaccttctttgccatcggtcttcagtttgcctgtttccgtttttagaaggtaccatctacctgttcatgtaattggacaccatgctgtgagtccttactccatagttttgcccttatctgctgattgtttggccttgaagccggtgtcagatatgctgagaatagcttggaacctgtcatggtatcatgggagtgataatctgttgaagcaaatgaactctgaaactaaaacgcaagaaattttagatgcattgaagttatctacagaggacatcctcactctgaagataacacacatggctagtgggctgcaggactgcctccattccattgttcaggctgcaacccacagggaagttagggctgctgtcaccaggatgagtttttatcttctgaatgacagattgtctttaaagggttgccctggtccatgtggggttaccttgaagtccttggcttggcacaccgcactaaacaggtttttacaggtgcttcctgcttgcactgaagatgagaaactgctaatagatatcatacattttttaaataaattaataaaggaacaaagaaaaaattcttcactagaacttctaaactggattctcgaattacttcttagacatagtgcaaacccactgttagacctcttggttctgacagagtcacaggcacgagaagaaacagatgatatccggactgctgtcaggcaacaacttcagaaagaactgattgctctttttgataccttgctgctcaatttcatggaagttactgacaggaaatgctcggaacttctttacgtttttcaaacgcagctggctctgaaactgctccagtgtctgaaagtgacggatgcgcctcatttctatggcctgccgtcccttgagcggaccttacgagggatggctaacctcactgcgtttccgggatggagctcacactctcctctcacaaagcctctagatatctgtgtgaagtacttgtcaggtctccttgaggtcattacttctttttatgtggagcgtggaggaaatgctatgtccttcatgggaaaaggtgttacaaagagcacaattctttgcttgcttcacttatcccatgagatgatggcccaggctgggagcttggagtggatgtcactttggttcttgcctttgggtagtcatagtgaagaacatattcctactcaacaaggattggcttggttgattccattatgggttgatcgggacccagaggtgagattcacttcactgggattaggatcagcactgaccacccttgaaacgggctgtgtggccttagcaaacagttgtcagaacatttccggtgggctctggggaactgtggtgaacattcttctggaccagtcagaatgtagtatggtgcgccgggaggcggcatttattcttcagaatctccttgtaattccaatgcctacagaaattataaaggattatacttggcagggtccctgtgttcatgatgaggactctggcctatcgctcattggaaaacctgcccttcaggctcttttatatcactgccatttttatgaacatttgaatcagatggtaaagcattgttacctaggacggtgtatgtttgatttgaatttttctgcttttgatagaaattcagaaagcaatgatttaaatggtttagatgactcattcaagttttggagggctccatctaggacaagtcaggatcgagatccaagttctctctccacctcagaaacaacggtggcaccttcattggggagtactgaatttcagccacttgtgcagtcaacaacacttctacctgaagcctcccatgaccagtttgtggctcaagggaatcgacactttggaacaaatatccaattttag

SEQ ID NO: 250646 - DNA, 7002 bp, Artificial Sequence
  derived and/or modified sequence
attaattgtggctggacgcagtggcgcggcagtttaattctccggcggctgcagattgacgggacgagatggtcctggcagggctcatcaggaaactcggtcatcagctggccgagatcagggagcgcgctctcaagagtattctctgcaagattgagcacaacttaatctgctacgctgatctcattcaggagaggcaactttttcttcatttgctggaatggttcaatttcccgtccgttccgatgaaggaagaggttctgaacctgttaagcagattggttaagtatcccccagcagtccaacatttggttgacgttggtgcagtagagttcttatctaagcttcggtctaatgtggagccaaatctgcaggctgaaattgatggcattctggatggactttttcttcttccttcggaagttcctgcactatcttctgcctcataccaaaccaatcaaactgaattgtcaaaaaaccctgaaatcttaacaggatattttccccaagacaaaagtaatttccagcagatggaagtgccgccacgaccagtggtaaatcagactgtgaagtgcttgaagttttctacatttccttggctacccctgaccaccacagacagacatgtcctctcctctaatgaaagctctttaagaagtagtaaccacactttaatctggaacacctgtgaactattgaaggatgttatcatgcaagattttcctgctgagattttccttcaaaggccaaaaattgttcagagccttttatctctgttgaaactggcctttggagatggaaagcatcgcctggcattacagtcggtgtcctgcctgcagcagctgtgcatgtatttaagaaacagacttaactttcaccgagatccaggttttttctccaataaacacgacacagtttcccaaaattcttctttgtcttattgtcatgaagcaagaggtactcatcattcccagaatccttccccaggaagcagcagccctcggccttctgtggttgggcgcacaggccagcgacccagaggagatggccaggactgggatgcagcgtcctctagtggaagtagtagtcatgctcatgtaaactccaggatatccgttcattcacctttggatatgggacacatagatctgccagagctggaaactgaagacacattggaactacaattccagcagctcagtcttccccagttttgtgtctccattctggaatcagctgttcctctcttaagaacaggtagcagacaagtgataataagagttctggaattgcttacagaggatatgacacttattggtgaagcaatttcaacagatatctgggatgacagcagcctttttggtatagatatgaaggagaaactactcctggtgttgggagcccttggagaaaccatgtgctaccataaaagtagtatcagtttggagcagccagaggtgatgcttgtgcaccacagaatggcctttatcagcatttccctgtttgcagttcgactgctacaaacgcttctccctgttgaaaaggcaagcgagtttttatcagagcctatgtcaacagcattatttctcctttctttggacatgcctatttctttggaatatccaaatattcatgaagctgttgtggcctatttggaacagctgaattctgaaaactacagtatttataaacgaactgcagaggccgtttattcaattgaatgcacctgtaacttcctgtctgatattgggaaagagggagagaagaatctcttagaattagtggagctggcagaccaagccttgcgtagcttttcctatcatcagcatttcccgctaataaaggaaatcatcagcatttgttcaaagatctggaaatctgctcaggccagtccattactacaaggagaaagtcagaaggtgcttctccatatgttgtctcacccattgccacgagtgaaagctgaaacttaccactgctgtctggaaatcacgaaggaatgtttaggtgtccataatgtcactaaacccgtgtcttcactttgcaatggaattcattttctacttcatccaaaagttctgtatgaaatctctgtatttggcattcaagagcccgaaagtgaggtgaacactgctgccaaggccattctgttatacctgcttcagggacgattgatgatgacagcattgacctggaacaagtttattgaatctctctgtcctgtcatcccaatactacagggctatgccgacacagaagatcctctgggtaactgcattctccttctaagcaaagcaagttctgacacagaagagatgcttccgtgtactacccgattaaagtccatgctgcgacttttgctagtgaaaaagccatcggtccgttcgctagcattaaagcttttagcattccatcttaccagtgaagaaggggctgatacaaagcgtcctctaatagacgccagagttctctccagagttactgatttattcattgggaagaaacctattgaactcagactggatgacagaagagagctggttattaagttggagactgttgaaaaggtatatgaaatcttcacctcagatgatgttgatctcgttttgagaaagtcagctgctgaacagttagctgtgattatgcaaggttgtagaatgtttggtacaaccatgcctcacactcttgaggaaggttttatgtggtgatccagtcatgcgtgtttcgctctcgcaacagtcttctcttttgaccgtgttattcagagtttccttaatatttcatgaagattgtagtgtcgtgactgaagttggagcactattttgtcttctattatttgatgaagtatcgagaatggatatgtggtctgttaatccttccaataaaccttctttgccatcggtcttcagtttgcctgtttccgtttttagaaggtaccatctacctgttcatgtaattggacaccatgctgtgagtccttactccatagttttgcccttatctgctgattgtttggccttgaagccggtgtcagatatgctgagaatagcttggaacctgtcatggtatcatgggagtgataatctgttgaagcaaatgaactctgaaactaaaacgcaagaaattttagatgcattgaagttatctacagaggacatcctcactctgaagataacacacatggctagtgggctgcaggactgcctccattccattgttcaggctgcaacccacagggaagttagggctgctgtcaccaggatgagtttttatcttctgaatgacagattgtctttaaagggttgccctggtccatgtggggttaccttgaagtccttggcttggcacaccgcactaaacaggtttttacaggtgcttcctgcttgcactgaagatgagaaactgctaatagatatcatacattttttaaataaattaataaaggaacaaagaaaaaattcttcactagaacttctaaactggattctcgaattacttcttagacatagtgcaaacccactgttagacctcttggttctgacagagtcacaggcacgagaagaaacagatgatatccggactgctgtcaggcaacaacttcagaaagaactgattgctctttttgataccttgctgctcaatttcatggaagttactgacaggaaatgctcggaacttctttacgtttttcaaacgcagctggctctgaaactgctccagtgtctgaaagtgacggatgcgcctcatttctatggcctgccgtcccttgagcggaccttacgagggatggctaacctcactgcgtttccgggatggagctcacactctcctctcacaaagcctctagatatctgtgtgaagtacttgtcaggtctccttgaggtcattacttctttttatgtggagcgtggaggaaatgctatgtccttcatgggaaaaggtgttacaaagagcacaattctttgcttgcttcacttatcccatgagatgatggcccaggctgggagcttggagtggatgtcactttggttcttgcctttgggtagtcatagtgaagaacatattcctactcaacaaggattggcttggttgattccattatgggttgatcgggacccagaggtgagattcacttcactgggattaggatcagcactgaccacccttgaaacgggctgtgtggccttagcaaacagttgtcagaacatttccggtgggctctggggaactgtggtgaacattcttctggaccagtcagaatgtagtatggtgcgccgggaggcggcatttattcttcagaatctccttgtaattccaatgcctacagaaattataaaggattatacttggcagggtccctgtgttcatgatgaggactctggcctatcgctcattggaaaacctgcccttcaggctcttttatatcactgccatttttatgaacatttgaatcagatggtaaagcattgttacctaggacggtgtatgtttgatttgaatttttctgcttttgatagaaattcagaaagcaatgatttaaatggtttagatgactcattcaagttttggagggctccatctaggacaagtcaggatcgagatccaagttctctctccacctcagaaacaacggtggcaccttcattggggagtactgaatttcagccacttgtgcagtcaacaacacttctacctgaagcctcccatgaccagtttgtggctcaaggtcaccaggaaagtacatcaccacggccacctcatgattcatctctttctgctcccctgcccaaactgtgtgtttttgttactccatctcttctttcagcaatgtgcagcctcttggacaacctcttgacgattgctcccagagacactgcaaaggcttttcgacaagctcatctcatagaacttctctgtagcattgcagatgctaccctcatacagacatgtgtccaggaactcagagccctgctgccttcatcacctccagctgaacacactcaggctcaggtttcctttctcctggaatacctatcctctttgtccaggcttctgcagtcatgtttattggtggagcctgaccttgtgattcaggatgagcttgtgaaacctcttatcaccaatatcattggaattctcaccatatgtaccaaagatgtattagataaagagttaatatcagctttttatcacacatggacacatttatttaatcttctggccatgctcctgaggaaagctggtgccatcacactcccgtttgttaccgtggccctggccaagcactggacagcggcgattgatatgttctgcacatgtgcaggcttgtctgccacgtgtcctgccctgtatactgccagcttgcaattcctttctgttctcttgaccgaagaagcaaaagggcatctccaggctaagagcaaaacacatttatgctgtagtccaacagtggcttcacttcttgatgactctcaggaaaatcagaaatctctagaacaacttagtgatgtaatccttcagtgctatgaagggaaatcctccaaagatatcctgaaaagagtagctgcaaatgcattgatgtcactgctggctgtcagtagaagagcacagaaacatgctttgaaagccaatcttatagacaattgcatggagcagatgaaacacataaatgcacaactgaacctagattctctgaggcctgggaaagcagcattgaaaaaaaaggaggatggtgttattaaagagttaagcattgccatgcagctcctaagaaactgtctttatcaaaatgaggaatgtaaagaagcagctcttgaagctcaccttgtccctgtcttgcactctctctggccttggattttgatggatgattcattgatgcaaatttctctgcagctcctttgtgtctatactgcaaattttccaaatggttgcagttctctttgttggtcaagttgtggacaacaccctgttcaagctacacatagaggagccgtgagcaactctctgatgctgtgtatcctaaagttggcttcccagatgccactggagaacaccacggttcagcagatggtttttatgcttctttcaaacctggccttgtcgcatgactgtaaaggagtaattcagaagagtaacttcttacagaacttcctctctctagcattgccaaaaggaggaaataaacatctaagtaatctgactattctttggttgaagttactcctgaatatatcatctggagaagatgggcaacaaatgattctgaggcttgatggctgtctagacttactaacagagatgagcaaatacaagcacaagagcagccctttattgcctcttcttatctttcataatgtttgcttcagtcctgcaaataaacccaagatcctggctaatgaaaaagtcattactgtgcttgctgcctgtctggaaagtgagaatcaaaatgctcagaggattggagcagctgccctttgggctctgatttacaattatcagaaggcaaaaacagctttgaaaagcccatcagtaaaaagaagagtggatgaagcatactccttagcaaagaaaactttcccaaactcagaagcaaaccctctaaatgcctattatttgaaatgtcttgaaaacctcgtgcagctccttaattcttcctgagtgccatgggatgctacaccttgaagctgacagtcatcaacaggggagctaaagttgaagccagctgtgtgtagcagctgttacctgaagacgtgctacctctctacaaagtgttgatccccttctttcccatgagagagagaactggtgatactccaacaccgtccagttgtggcagctctccagaagtaatagcagctgacaactttctgtgccttttcctttctgttgaaaaggcatagaaagttctgggaacataaacatttttacccttttctatgccatttattttgtaaaaatcctatttaacagttatttaataaaacaatatttttagaaact

SEQ ID NO: 250647 - protein, 64 aa, Artificial Sequence
  derived and/or modified sequence
MAAAAALRAPAQSSVTFEDVAVNFSLEEWSLLNEAQGCLYHDVMLETLTLISSLGCWLQVEDGA

SEQ ID NO: 250648 - protein, 99 aa, Artificial Sequence
  derived and/or modified sequence
MAAAAALRAPAQSSVTFEDVAVNFSLEEWSLLNEAQGCLYHDVMLETLTLISSLKGCTRQQFCNRSTLNKEDRVIYNLRRSPSCRFPLPGTGPHILYVS

SEQ ID NO: 250649 - protein, 518 aa, Artificial Sequence
  derived and/or modified sequence
MAAAALRPPAQGTVTFEDVAVNFSQEEWSLLSEAQRCLYHDVMLENLTLISSLGCWYGAKDETPSKQTLSIQQESPLRTHWTGVCTKKVHLWGMCGPLLGDILHQGTQHNQKLNGFGAYEKKLDDDANHHQDQKQHIGEKSYRSNAKGTSFVKNCKFHMSHEPFIFHEVGKDFLSSLRLLQQEDIHTSGKSNFETKHGIPLQGGKTHYICGESTIPFSNKHSLVLHQRLLPREGPYVCSDSGKFTSKSNSFNNHQGVRTGKRPYQCGQCDESFWYKAHLTEHQRVHTGERPYECGECDKSFSHKHSLVDHQRVHTGERPYECDECGKSFSHKRSLVHHQRVHTGERPYQCGECGKSFNHKCNLIQHQRVHTGERPFECTACGKLFRSNSHLKEHQRVHTGERPYECKECRKSFRYKSHLTEHQRVHTGERPYECRECGKCFHQKGSLIQHQQIHSGERPHECGECGKCFHQKGSLIRHQQIHSGERPHECGECGKCFRQKGNLIKHQRVHTGERHHEC

SEQ ID NO: 250650 - DNA, 1557 bp, Artificial Sequence
  derived and/or modified sequence
atggccgccgccgccctgagaccccccgcccagggcaccgtgaccttcgaggacgtggccgtgaacttcagccaggaggagtggagcctgctgagcgaggcccagagatgcctgtaccacgacgtgatgctggagaacctgaccctgatcagcagcctgggctgctggtacggcgccaaggacgagacccccagcaagcagaccctgagcatccagcaggagagccccctgagaacccactggaccggcgtgtgcaccaagaaggtgcacctgtggggcatgtgcggccccctgctgggcgacatcctgcaccagggcacccagcacaaccagaagctgaacggcttcggcgcctacgagaagaagctggacgacgacgccaaccaccaccaggaccagaagcagcacatcggcgagaagagctacagaagcaacgccaagggcaccagcttcgtgaagaactgcaagttccacatgagccacgagcccttcatcttccacgaggtgggcaaggacttcctgagcagcctgagactgctgcagcaggaggacatccacaccagcggcaagagcaacttcgagaccaagcacggcatccccctgcagggcggcaagacccactacatctgcggcgagagcaccatccccttcagcaacaagcacagcctggtgctgcaccagagactgctgcccagagagggcccctacgtgtgcagcgacagcggcaagttcaccagcaagagcaacagcttcaacaaccaccagggcgtgagaaccggcaagagaccctaccagtgcggccagtgcgacgagagcttctggtacaaggcccacctgaccgagcaccagagagtgcacaccggcgagagaccctacgagtgcggcgagtgcgacaagagcttcagccacaagcacagcctggtggaccaccagagagtgcacaccggcgagagaccctacgagtgcgacgagtgcggcaagagcttcagccacaagagaagcctggtgcaccaccagagagtgcacaccggcgagagaccctaccagtgcggcgagtgcggcaagagcttcaaccacaagtgcaacctgatccagcaccagagagtgcacaccggcgagagacccttcgagtgcaccgcctgcggcaagctgttcagaagcaacagccacctgaaggagcaccagagagtgcacaccggcgagagaccctacgagtgcaaggagtgcagaaagagcttcagatacaagagccacctgaccgagcaccagagagtgcacaccggcgagagaccctacgagtgcagagagtgcggcaagtgcttccaccagaagggcagcctgatccagcaccagcagatccacagcggcgagagaccccacgagtgcggcgagtgcggcaagtgcttccaccagaagggcagcctgatcagacaccagcagatccacagcggcgagagaccccacgagtgcggcgagtgcggcaagtgcttcagacagaagggcaacctgatcaagcaccagagagtgcacaccggcgagagacaccacgagtgctag

SEQ ID NO: 250651 - DNA, 1557 bp, Artificial Sequence
  derived and/or modified sequence
atggccgcggccgccttacggccacccgcccagggcacggttacattcgaggatgttgccgtgaactttagtcaagaagagtggagcctactgagtgaggctcaaagatgcctgtatcatgacgtcatgttggagaacttgactcttatcagctccctggggtgctggtatggtgcaaaggacgaaactccatcgaaacagacactgtccatccagcaggagtctcctctcaggactcactggactggagtttgcaccaaaaaggtgcatctgtggggcatgtgtggacctctcctgggggatattctgcatcagggcacccagcataaccagaagctgaatggctttggtgcctatgagaagaaactggacgacgacgcaaaccaccaccaagaccagaaacagcatatcggagaaaagagctatcgtagcaacgccaaaggtacttcgtttgttaagaattgcaaattccatatgagccacgaacccttcattttccatgaggtgggcaaagattttttgagttccctaagactgctgcagcaggaggacatacacacttctggaaagagtaacttcgaaacaaagcatggaatcccccttcagggggggaaaacacactatatctgcggtgaaagtacaataccctttagcaataaacattctctcgtccttcaccagaggctgctcccgagggaagggccttacgtctgctctgactctggaaagtttacgagcaaaagtaacagttttaataaccaccagggagttcgcaccggtaagcggccttaccagtgcgggcaatgcgatgaatccttttggtacaaagctcatcttaccgagcatcagcgcgtccacaccggagagcgcccttacgaatgcggagaatgcgacaagagcttttcacacaagcactcactggtggaccaccagagagtgcatacaggtgaaagaccatatgaatgcgatgagtgcggaaaatcgttctcgcataagcggagtctggtacaccatcagcgcgtgcacaccggcgagcgcccttaccagtgtggggagtgtggcaaatccttcaaccacaaatgcaatctgatacagcaccagcgggtacatacaggggagcgacccttcgagtgtaccgcttgcggtaagctgtttcgatccaacagtcatctgaaggaacaccagagagttcataccggcgagcgtccatatgagtgcaaggaatgtcggaagtctttcaggtacaagtcccacctgactgagcatcagagggtccacacgggcgaaagaccttatgaatgtagggaatgcggaaagtgttttcaccagaagggtagtctgattcaacatcagcaaatccattcaggtgagaggccgcacgagtgcggagagtgcggtaaatgcttccaccagaaagggagtctgatcaggcaccagcagattcattctggcgaacgaccccatgaatgtggggagtgtgggaagtgttttcgccagaaggggaacctgatcaagcaccagagggtccacacaggcgagcgacatcatgagtgctag

SEQ ID NO: 250652 - DNA, 1557 bp, Artificial Sequence
  derived and/or modified sequence
atggctgctgctgccctgcggcccccagcccagggcaccgtgacctttgaagatgtggccgtgaacttcagccaggaggagtggagcctgctgtctgaggcccagcgctgcctgtaccatgatgtgatgctggagaacctgaccctcatcagcagcctgggctgctggtatggagccaaggatgagacccccagcaagcagaccctgagcatccagcaggagagccccctgcggacccactggacaggagtgtgcaccaagaaggtgcacctgtggggcatgtgtggccccctgctgggggacatcctgcaccagggcacccagcacaaccagaagctgaatggatttggagcctatgagaagaagctggatgatgatgccaaccaccaccaggaccagaagcagcacatcggggagaagagctaccgcagcaatgccaagggcaccagctttgtgaagaactgcaagttccacatgagccatgagcccttcatcttccacgaggtgggcaaggacttcctgagcagcctgcggctgctgcagcaggaggacatccacaccagcggcaagagcaactttgagaccaagcacggcatccccctgcagggcggcaagacccactacatctgtggggagagcaccatccccttcagcaacaagcacagcctggtgctgcaccagaggctgctgccccgggagggcccctacgtgtgcagcgacagcggcaagttcaccagcaagagcaacagcttcaacaaccaccagggcgtgaggacaggcaagaggccctaccagtgtggccagtgtgatgagagcttctggtacaaggcccacctgacagagcaccagagggtgcacactggagagcggccctatgaatgtggggagtgtgacaagagcttcagccacaagcacagcctggtggaccaccagagggtgcacactggagagcggccctatgaatgtgatgaatgtgggaagagcttcagccacaagaggagcctggtgcaccaccagagggtgcacactggagagcggccctaccagtgtggggagtgtgggaagagcttcaaccacaagtgcaacctgatccagcaccagagggtgcacactggagagcggccctttgaatgtacagcctgtgggaagctgttccgcagcaacagccacctgaaggagcaccagagggtgcacactggagagcggccctatgagtgcaaggagtgcaggaagagcttccgctacaagagccacctgacagagcaccagagggtgcacactggagagcggccctatgaatgtcgggagtgtgggaagtgcttccaccagaagggcagcctcatccagcaccagcagatccacagcggggagcggccccatgaatgtggggagtgtgggaagtgcttccaccagaagggcagcctcatccgccaccagcagatccacagcggggagcggccccatgaatgtggggagtgtgggaagtgcttccggcagaagggcaacctgatcaagcaccagagggtgcacactggagagcggcaccatgaatgttag

SEQ ID NO: 250653 - DNA, 1557 bp, Artificial Sequence
  derived and/or modified sequence
atggccgccgccgccctgcggccccccgcccagggcaccgtgacctttgaagacgtggctgtgaacttctcgcaggaagaatggtcacttctgtccgaggcccaacgttgcctataccacgacgtgatgctggagaaccttacgctaataagctctctggggtgttggtacggggccaaggacgaaactccaagcaaacagactctaagcattcagcaggaaagtccattaaggacacattggactggtgtgtgcactaagaaagtgcatctgtggggcatgtgcggcccccttttgggagatatcttacaccagggcactcaacataatcaaaagcttaacgggttcggcgcctacgaaaaaaagttggacgacgatgccaaccaccatcaggaccagaaacaacacatcggggaaaagtcttataggtctaatgcaaaaggcacgtctttcgtgaaaaattgtaaattccacatgtcacacgagccattcatcttccacgaggtgggtaaagatttcctgtcaagcttacgactcctacagcaggaggatatccatactagtggcaaatccaattttgagacaaaacatggcatccctttacaggggggaaaaactcactatatctgcggagagagcaccattcccttctcaaacaagcactccttagtactccaccaaagactgctgcctagagagggtccttatgtgtgtagcgattcaggcaagtttacaagcaagtctaattctttcaacaatcaccaaggcgttcgcaccggaaaaaggccttatcagtgcggacagtgtgacgaatctttttggtacaaagcacatctgaccgaacatcagagggttcacaccggagagaggccatacgagtgcggtgagtgcgataaatccttctcccataagcacagcctcgtcgaccatcagcgagtgcataccggcgagcggccctatgaatgcgacgaatgtggaaagagcttcagtcataagagatccctcgttcaccaccagcgggtccacactggagagcggccttaccagtgcggagaatgtggaaagtcctttaaccacaagtgtaatctgatacagcaccagcgggtgcacaccggggaaagaccttttgagtgcacggcatgcggaaagcttttcaggtccaactcacacctgaaggagcaccagagagtgcacacaggagagcgcccgtacgagtgtaaggaatgtaggaaatcctttaggtataaaagccacctcacggagcaccaacgcgtgcacacaggtgaacgtccttatgagtgcagagaatgtgggaagtgctttcaccagaagggctcacttattcagcaccaacaaatccactccggagagagaccgcatgagtgcggtgaatgtggcaagtgttttcatcagaaagggagcctcatcagacatcagcagatccattccggtgaaaggccacacgaatgtggagagtgtggaaagtgttttagacagaaagggaatctgatcaagcatcagcgcgtccacaccggtgaacgccatcacgaatgctag

SEQ ID NO: 250654 - DNA, 1557 bp, Artificial Sequence
  derived and/or modified sequence
atggccgcagcagccctccgtcctccagctcagggaacggtgacatttgaggacgttgcagtgaacttcagccaagaagagtggagccttctcagcgaggctcagagatgcctgtaccacgacgtgatgctcgagaacttgacacttatctcttcactgggatgttggtacggggctaaagacgaaacgccaagtaaacagacgctgagtattcagcaggagtctcccctgagaacccactggaccggcgtgtgtaccaaaaaagtacatttgtggggaatgtgcggccctctcctgggggatattttgcatcaggggactcagcacaaccagaaactgaatgggttcggcgcttatgagaagaagctggatgacgacgcgaaccaccatcaggaccaaaaacagcatatcggggagaaatcttatcgcagcaacgccaaaggcacttcattcgtgaagaattgcaagttccatatgagccatgaaccctttatctttcacgaagttggcaaagacttcctcagctcacttcgtctcctccagcaggaagatatccatactagcggcaaaagcaacttcgagaccaagcacggcatcccactccagggcggtaagacacattacatctgcggagagtctactatccccttctccaataaacactccctggtccttcatcagagactgcttccacgagagggcccttatgtctgttcagactccgggaagttcacatcaaaatccaattcttttaataaccatcagggggttcgcaccggaaaacggccataccagtgtggtcagtgcgatgaatcgttttggtacaaagcacacttgaccgagcatcagcgtgtccatacaggggagcgaccctatgagtgtggcgagtgcgataaaagcttttctcacaaacatagtctggtagatcaccaacgtgttcacacgggggaacggccatatgagtgcgatgagtgcggaaagtccttctcacacaagaggagtctggtacatcatcagagagtgcatactggagagcgcccataccagtgcggggagtgcggcaagtcatttaaccacaagtgcaatcttatccaacaccagagggtccacacaggtgaacgcccatttgaatgcacagcctgtggcaaattattccgtagcaactcccacctaaaagaacaccagagagtgcatacaggtgagaggccctacgaatgcaaagaatgcagaaagtctttccgctacaagagccacctcaccgagcatcagagagtccacaccggggagcgaccctacgagtgcagggaatgtggtaaatgttttcatcaaaaaggttctctcatacaacatcaacagattcactccggcgaaagaccccatgaatgtggcgaatgcgggaaatgctttcaccagaagggtagcctgatcaggcaccagcaaatccattccggcgaacgcccacacgaatgtggcgagtgcggaaagtgtttccgccagaaagggaatctgattaagcatcaaagggtgcacaccggcgagagacaccatgagtgctag

SEQ ID NO: 250655 - DNA, 5292 bp, Artificial Sequence
  derived and/or modified sequence
acttccggcgtcctctactagtggccattttgattggtgttgggtgtattttccagtgagagaccgcggagtgttgggtcgtgtagaagtgactgaacccagaaggtggagacgagacgttgtcccgactgcacagaggctgctctgcagctccttaaaggcgctaggcgtgacccgcaccaaggccgggatcgggaccaccgtgcccgggtacctgcactgctcgccccctcctttcgaccccgctttccccacccagtcggatggcggcggccgcgctgaggcccccggctcagggcactgtgacctttgaagatgtggctgtgaacttttcccaggaggaatggagtctccttagtgaggctcagagatgcctttatcatgacgtgatgctggagaacctgacacttatatcttctctaggttgttggtatggagcaaaagacgagacaccttctaagcagaccctttctatacaacaggagtccccactcaggacacattggacaggtgtatgtaccaagaaggtccacctctggggaatgtgtggccctctcctgggagatatcttacaccagggaacacaacacaatcagaaattgaatgggtttggggcatatgaaaaaaaattggatgacgatgcaaaccatcatcaagaccagaagcagcacattggagagaaatcgtacagaagcaatgccaagggaacatcttttgtaaagaactgtaaattccatatgtcacatgagccatttatctttcatgaggttgggaaagactttttgtccagcttgagattactccaacaagaggacattcacacttcagggaagtcaaactttgaaactaagcatgggataccccttcagggtggaaaaactcattacatctgtggagagtccacaataccgtttagcaacaaacactcacttgtccttcaccagagacttctccctagagaaggaccttatgtatgcagtgattctgggaaattcactagcaaaagtaatagttttaataatcatcagggagttcgcactggaaaaagaccttatcagtgtggacaatgtgatgaatcattttggtataaggcccacctcactgaacaccagagagttcacactggagaaagaccttatgagtgtggagaatgtgataaatcttttagtcataagcacagtcttgttgaccatcagcgagttcacactggagaaagaccttatgaatgtgacgaatgtgggaaatcttttagccataagcgcagccttgttcaccaccagcgagttcacactggagaaagaccttatcagtgtggagaatgtgggaaatcgtttaatcacaagtgcaacctcattcagcatcagcgagttcacactggagaaagaccttttgagtgtacggcatgtgggaagttatttaggagcaactcccacctaaaggaacaccagagagttcacactggagaaagaccctatgagtgtaaagaatgtaggaaatcatttaggtacaagtcacacctcactgaacaccagagagttcacactggagaaaggccatatgagtgtagagaatgtgggaaatgttttcatcaaaagggcagtctcattcaacatcagcagatccactctggagaaaggccacatgagtgtggagaatgtgggaaatgttttcatcaaaagggcagtctcattcgacatcagcagattcactctggagaaaggccacatgagtgtggagaatgtggaaagtgttttcgtcaaaagggaaacctcattaaacatcaacgagttcacacgggagaaagacatcatgaatgttgaaaatttggcagatctgttggtaaaaagagcaccctcattcaacattcgtgagatcacactggaaagcacttatgagtatggagaatgtgcaaaatcatctagccaaaaggttggcctcattcaacaatagcaagatcacactggggaaaggctttctgagtgtagagaatgtatgaaatcctgtacatagaagttttgcctcaccaaataccagaagggtcacactggagaaagaccctatagttatggggaatttgggaaattacctaacaagaagtcccacctcactgaacactactgagttcacagttgagaaaggccatatgactgtaaggaatttgtaaaattatttagccagaagagctgcattactattcatcagataatttacaatggagaaaggccacataataatttctcacataataaatgtgagaaatcatttccgtacagctctgcgctccatgttcgtaagagttcacactggacaaagccttatgagagcagcgagtagaaaatcctttgtgggaaaactctggtttcattaaacacaggagagttcatgctagagaaaggcctcaacagtgtagcaaatatggaaagacattcactagaagctctgccctgcaagttcacactagagaaagcccttctcagtgaagtaaatttggaaaattgattagtcaaacctctatgctccttcaaaatcagagttcacactggatcaaggctttatggtgtgacaaatatggcacattctttatctaaatgtctaacatattatgcacagacaagctcctgctgtggaagtgccttttgagtgcagagcatttgcgagggcttcactcttctttcactggataccagaatgttgacaggagaaaaataacatagatgtgtgggaatattacttcttgtccagtgtaactgtgggagagagcccttatgaggacaccatcaacctatattgaatgtcatatgtccagtagctgcataaattccaggtatatgggagctgtattgcatttcttatcctgcgtatgtccttgccagatttatttcattcttaggtctctggcaaaagccatttcatctctaccacttggcaggtacctacagtgcatcactcatgcactccatcatattccagaaaaaaagttcaagttgtctcccattcagcagtggtatttttgagtagcctctgcactcgttcctttctcatttctctatgaagagttaggccatggacctgactcagttctggcctagagcagaagtgtccaatcttttggctttcctggtccacattggaagaagaattgtcttgtgccgcatatgaaatacattaacactaatgatagctgatgaacttttttaaaaaatcacacaaaaaccctcataatgttttaagaaagtttacaaatttgtgttgggctgcattcaaagctgtcctgagatacatgcggcccacaagctgcgggttggaccagcttggcctagagaatttttctgattacttgacaagatgggctgtctttcctaggaatctcatgattgtcatgattcttaaaatggaattttccagcctcttaactcaccaacccaagtacaagctgcctctcattgttctggtttctgctatgatgaagtccttatttaagcttccttcaatcttgggaattgtattgactgtattgtgtgaattgtatactcactgcattgtgtggcttagatacaacatggttctggtaccatgaaggattctggtaccatgaaagtttgttggggttactaaactgtgtgactcttagggaacagtatgaaggcagaatatagctctgcatttgtggcctagtttggatggctgcctaaggcctccaaataaagacttcagggctttgtgatctttatttttagatgaaatagtgcaataatatgtgttttcataaatcaacctgagtaggggacagttttagtgacacactttggtgcttctgagaacagcacaaaattattctcttgtttataatggatattgcattctgctcagtactggtgagggaaatctgttctcaagtcctacagtgcattcatgtgtcctgaagtccagaattctgtaggatagtgtcctacgttataagcctggagaaagaaatcataattctttaatttttatttttttagggaaatgatgtcactctgaaactcaggctggaatacactggcatggtcatacctcactgcggcctcaaactcctgggctcaagtgatcctcctgcctcagcctcccgagtacctgagattagcccaggtaatttaagaattttttatagagatagggttttgctattttaccctgactgatgttcaactcctggcctcaagtaatcctctagcatacgcccttgaaagcactaggattacaggtgtgagccaccatgcccagcccaaaaataatttttgtagaattagcatttctaggtagtgaagcagactgcaacagaatagttgggatatactttttttaaaaaggcatccacaatgattcagtcactatgtctgtgatggacaagcaggtacagaaattttcaggacctccataattatgaatctagtgtagcttaggtcattgtcagactaaatctaaaggttttgtggatttctgtagcctatctgggctgcataccaaaaagccatccctgaattagtaggaggaagaggatagggagaaaggaaatctcttagtccagtgatgtggcctttgcaaccagccagcattccaatttaatcaggtggaaatgatcttcctggctcataagtatttggtatcacacaggctaattgccccccttagggcgtgatgagagttaggagagtcaatgtaaaatcacataacctatttgtcaaaaataatgttaaatccagatagttctttcaaattaaatttttaaagctgtaataagactgggcatggtgactcatgcctgttatcccaacactttgggagtccagggtgggagtattgcttgaggtaagaagtttgagactagcctgggtcccatagtaagaccctgtctcttaaaaaataaatactatctttctctctggcctctccatgctccagacaatcactgaattacaatatttgcttaacagtagattaatgtcaattttctggaattttatatgactgatataacatgtttcctcttttcatacctgagtactctcctgagccctatttatttagatgttcttcttttttctttattattatttttatttcacatagcagggatgcatattttgacattcatcaatcatgatatatgagtagttcattctttttatcttagaatatgacatgctatggaaatcactgtatacgaattcatctgcttatggatatgttattgcttcttatttttgtctgttaggaataaaactgcttgttaagcacatttgaatgcaa

SEQ ID NO: 250656 - protein, 1518 aa, Artificial Sequence
  derived and/or modified sequence
MAAVGSGGYARNDAGEKLPSVMAGVPARRGQSSPPPAPPICLRRRTRLSTASEETVQNRVSLEKVLGITAQNSSGLTCDPGTGHVAYLAGCVVVILDPKENKQQHIFNTARKSLSALAFSPDGKYIVTGENGHRPAVRIWDVEEKNQVAEMLGHKYGVACVAFSPNMKHIVSMGYQHDMVLNVWDWKKDIVVASNKVSCRVIALSFSEDSSYFVTVGNRHVRFWFLEVSTETKVTSTVPLVGRSGILGELHNNIFCGVACGRGRMAGSTFCVSYSGLLCQFNEKRVLEKWINLKVSLSSCLCVSQELIFCGCTDGIVRIFQAHSLHYLANLPKPHYLGVDVAQGLEPSFLFHRKAEAVYPDTVALTFDPIHQWLSCVYKDHSIYIWDVKDINRVGKVWSELFHSSYVWNVEVYPEFEDQRACLPSGSFLTCSSDNTIRFWNLDSSPDSHWQKNIFSNTLLKVVYVENDIQHLQDMSHFPDRGSENGTPMDVKAGVRVMQVSPDGQHLASGDRSGNLRIHELHFMDELVKVEAHDAEVLCLEYSKPETGLTLLASASRDRLIHVLNVEKNYNLEQTLDDHSSSITAIKFAGNRDIQMISCGADKSIYFRSAQQGSDGLHFVRTHHVAEKTTLYDMDIDITQKYVAVACQDRNVRVYNTVNGKQKKCYKGSQGDEGSLLKVHVDPSGTFLATSCSDKSISVIDFYSGECIAKMFGHSEIITSMKFTYDCHHLITVSGDSCVFIWHLGPEITNCMKQHLLEIDHRQQQQHTNDKKRSGHPRQDTYVSTPSEIHSLSPGEQTEDDLEEECEPEEMLKTPSKDSLDPDPRCLLTNGKLPLWAKRLLGDDDVADGLAFHAKRSYQPHGRWAERAGQEPLKTILDAQDLDCYFTPMKPESLENSILDSLEPQSLASLLSESESPQEAGRGHPSFLPQQKESSEASELILYSLEAEVTVTGTDSQYCRKEVEAGPGDQQGDSYLRVSSDSPKDQSPPEDSGESEADLECSFAAIHSPAPPPDPAPRFATSLPHFPGCAGPTEDELSLPEGPSVPSSSLPQTPEQEKFLRHHFETLTESPCRALGDVEASEAEDHFFNPRLSISTQFLSSLQKASRFTHTFPPRATQCLVKSPEVKLMDRGGSQPRAGTGYASPDRTHVLAAGKAEETLEAWRPPPPCLTSLASCVPASSVLPTDRNLPTPTSAPTPGLAQGVHAPSTCSYMEATASSRARISRSISLGDSEGPIVATLAQPLRRPSSVGELASLGQELQAITTATTPSLDSEGQEPALRSWGNHEARANLRLTLSSACDGLLQPPVDTQPGVTVPAVSFPAPSPVEESALRLHGSAFRPSLPAPESPGLPAHPSNPQLPEARPGIPGGTASLLEPTSGALGLLQGSPARWSEPWVPVEALPPSPLELSRVGNILHRLQTTFQEALDLYRVLVSSGQVDTGQQQARTELVSTFLWIHSQLEAECLVGTSVAPAQALPSPGPPSPPTLYPLASPDLQALLEHYSELLVQAVRRKARGH

SEQ ID NO: 250657 - DNA, 4557 bp, Artificial Sequence
  derived and/or modified sequence
atggccgccgtgggcagcggcggctacgccagaaacgacgccggcgagaagctgcccagcgtgatggccggcgtgcccgccagaagaggccagagcagccccccccccgccccccccatctgcctgagaagaagaaccagactgagcaccgccagcgaggagaccgtgcagaacagagtgagcctggagaaggtgctgggcatcaccgcccagaacagcagcggcctgacctgcgaccccggcaccggccacgtggcctacctggccggctgcgtggtggtgatcctggaccccaaggagaacaagcagcagcacatcttcaacaccgccagaaagagcctgagcgccctggccttcagccccgacggcaagtacatcgtgaccggcgagaacggccacagacccgccgtgagaatctgggacgtggaggagaagaaccaggtggccgagatgctgggccacaagtacggcgtggcctgcgtggccttcagccccaacatgaagcacatcgtgagcatgggctaccagcacgacatggtgctgaacgtgtgggactggaagaaggacatcgtggtggccagcaacaaggtgagctgcagagtgatcgccctgagcttcagcgaggacagcagctacttcgtgaccgtgggcaacagacacgtgagattctggttcctggaggtgagcaccgagaccaaggtgaccagcaccgtgcccctggtgggcagaagcggcatcctgggcgagctgcacaacaacatcttctgcggcgtggcctgcggcagaggcagaatggccggcagcaccttctgcgtgagctacagcggcctgctgtgccagttcaacgagaagagagtgctggagaagtggatcaacctgaaggtgagcctgagcagctgcctgtgcgtgagccaggagctgatcttctgcggctgcaccgacggcatcgtgagaatcttccaggcccacagcctgcactacctggccaacctgcccaagccccactacctgggcgtggacgtggcccagggcctggagcccagcttcctgttccacagaaaggccgaggccgtgtaccccgacaccgtggccctgaccttcgaccccatccaccagtggctgagctgcgtgtacaaggaccacagcatctacatctgggacgtgaaggacatcaacagagtgggcaaggtgtggagcgagctgttccacagcagctacgtgtggaacgtggaggtgtaccccgagttcgaggaccagagagcctgcctgcccagcggcagcttcctgacctgcagcagcgacaacaccatcagattctggaacctggacagcagccccgacagccactggcagaagaacatcttcagcaacaccctgctgaaggtggtgtacgtggagaacgacatccagcacctgcaggacatgagccacttccccgacagaggcagcgagaacggcacccccatggacgtgaaggccggcgtgagagtgatgcaggtgagccccgacggccagcacctggccagcggcgacagaagcggcaacctgagaatccacgagctgcacttcatggacgagctggtgaaggtggaggcccacgacgccgaggtgctgtgcctggagtacagcaagcccgagaccggcctgaccctgctggccagcgccagcagagacagactgatccacgtgctgaacgtggagaagaactacaacctggagcagaccctggacgaccacagcagcagcatcaccgccatcaagttcgccggcaacagagacatccagatgatcagctgcggcgccgacaagagcatctacttcagaagcgcccagcagggcagcgacggcctgcacttcgtgagaacccaccacgtggccgagaagaccaccctgtacgacatggacatcgacatcacccagaagtacgtggccgtggcctgccaggacagaaacgtgagagtgtacaacaccgtgaacggcaagcagaagaagtgctacaagggcagccagggcgacgagggcagcctgctgaaggtgcacgtggaccccagcggcaccttcctggccaccagctgcagcgacaagagcatcagcgtgatcgacttctacagcggcgagtgcatcgccaagatgttcggccacagcgagatcatcaccagcatgaagttcacctacgactgccaccacctgatcaccgtgagcggcgacagctgcgtgttcatctggcacctgggccccgagatcaccaactgcatgaagcagcacctgctggagatcgaccacagacagcagcagcagcacaccaacgacaagaagagaagcggccaccccagacaggacacctacgtgagcacccccagcgagatccacagcctgagccccggcgagcagaccgaggacgacctggaggaggagtgcgagcccgaggagatgctgaagacccccagcaaggacagcctggaccccgaccccagatgcctgctgaccaacggcaagctgcccctgtgggccaagagactgctgggcgacgacgacgtggccgacggcctggccttccacgccaagagaagctaccagccccacggcagatgggccgagagagccggccaggagcccctgaagaccatcctggacgcccaggacctggactgctacttcacccccatgaagcccgagagcctggagaacagcatcctggacagcctggagccccagagcctggccagcctgctgagcgagagcgagagcccccaggaggccggcagaggccaccccagcttcctgccccagcagaaggagagcagcgaggccagcgagctgatcctgtacagcctggaggccgaggtgaccgtgaccggcaccgacagccagtactgcagaaaggaggtggaggccggccccggcgaccagcagggcgacagctacctgagagtgagcagcgacagccccaaggaccagagcccccccgaggacagcggcgagagcgaggccgacctggagtgcagcttcgccgccatccacagccccgcccccccccccgaccccgcccccagattcgccaccagcctgccccacttccccggctgcgccggccccaccgaggacgagctgagcctgcccgagggccccagcgtgcccagcagcagcctgccccagacccccgagcaggagaagttcctgagacaccacttcgagaccctgaccgagagcccctgcagagccctgggcgacgtggaggccagcgaggccgaggaccacttcttcaaccccagactgagcatcagcacccagttcctgagcagcctgcagaaggccagcagattcacccacaccttcccccccagagccacccagtgcctggtgaagagccccgaggtgaagctgatggacagaggcggcagccagcccagagccggcaccggctacgccagccccgacagaacccacgtgctggccgccggcaaggccgaggagaccctggaggcctggagacccccccccccctgcctgaccagcctggccagctgcgtgcccgccagcagcgtgctgcccaccgacagaaacctgcccacccccaccagcgcccccacccccggcctggcccagggcgtgcacgcccccagcacctgcagctacatggaggccaccgccagcagcagagccagaatcagcagaagcatcagcctgggcgacagcgagggccccatcgtggccaccctggcccagcccctgagaagacccagcagcgtgggcgagctggccagcctgggccaggagctgcaggccatcaccaccgccaccacccccagcctggacagcgagggccaggagcccgccctgagaagctggggcaaccacgaggccagagccaacctgagactgaccctgagcagcgcctgcgacggcctgctgcagccccccgtggacacccagcccggcgtgaccgtgcccgccgtgagcttccccgcccccagccccgtggaggagagcgccctgagactgcacggcagcgccttcagacccagcctgcccgcccccgagagccccggcctgcccgcccaccccagcaacccccagctgcccgaggccagacccggcatccccggcggcaccgccagcctgctggagcccaccagcggcgccctgggcctgctgcagggcagccccgccagatggagcgagccctgggtgcccgtggaggccctgccccccagccccctggagctgagcagagtgggcaacatcctgcacagactgcagaccaccttccaggaggccctggacctgtacagagtgctggtgagcagcggccaggtggacaccggccagcagcaggccagaaccgagctggtgagcaccttcctgtggatccacagccagctggaggccgagtgcctggtgggcaccagcgtggcccccgcccaggccctgcccagccccggcccccccagcccccccaccctgtaccccctggccagccccgacctgcaggccctgctggagcactacagcgagctgctggtgcaggccgtgagaagaaaggccagaggccactag

SEQ ID NO: 250658 - DNA, 4557 bp, Artificial Sequence
  derived and/or modified sequence
atggccgctgtgggatccggcggctacgcccgcaatgatgcgggggagaagctcccctctgttatggctggggtgcctgctagaagaggccagtcctctccaccccctgctcccccgatctgcctgaggagaagaacaagattgtccaccgcaagtgaagaaaccgtccagaatagggtgtctctggagaaagtcctgggtattacagcacagaactccagtgggctgacatgtgacccaggcactgggcatgtagcataccttgcaggttgcgtagtggttatcctagacccaaaggagaacaaacagcagcacattttcaatactgctaggaaatcactcagtgccctggccttcagtcctgacggcaaatatatcgtgaccggagagaacggacatcgccctgcagtgaggatttgggatgtggaggaaaaaaatcaagtggctgagatgctaggccacaaatatggtgtcgcttgcgtggcatttagcccaaatatgaaacacatcgtgtctatgggataccagcatgacatggtcctcaatgtttgggattggaagaaggatattgttgtcgctagtaataaggtaagttgccgcgtaatagccctatccttctcagaggatagcagttacttcgttaccgtgggcaacagacacgtgcgcttctggttcctagaagtgagtacagagactaaagtgacatccaccgtcccgttggtgggtcgatccggcatactgggtgaattgcacaacaacatcttttgtggagtcgcctgtggtcggggcagaatggcagggagcacattttgcgtgagttactccgggttgctctgtcaatttaacgagaaaagagtgctagaaaagtggattaaccttaaggtcagtctctcttcttgtctctgtgtttctcaggaactcatcttttgcggatgcaccgacggaattgtgcggattttccaagcacattccctccattacttggcaaacttgccaaaaccacattatctgggcgtggacgtggcgcaaggccttgaaccttctttcttgttccaccgcaaagcggaggccgtttatcccgacaccgtggcgctaacgtttgaccccatccaccagtggctctcctgcgtatacaaggatcacagcatctacatctgggacgtgaaggacattaacagagttggcaaagtatggagcgaactcttccacagtagctacgtttggaacgttgaggtctacccagagtttgaggaccagcgggcctgtcttcccagcggatcattcttaacttgcagcagcgataatactattagattctggaacttagacagttcgcctgactctcactggcagaaaaatattttttccaacaccctactcaaggtcgtctacgtcgagaacgatatacagcacctgcaagatatgtctcacttccctgataggggatccgagaacgggacccccatggacgtgaaggcaggcgtccgagtcatgcaggtgagccctgatggtcaacacctcgcctcaggcgatcgtagtggtaacttaaggatccacgagctgcactttatggatgagctcgtgaaggtggaagcgcatgacgcagaggttctctgcttggaatattctaaacccgaaactggcttaactctgctggctagcgccagccgggatcgcttgatccatgtgctaaatgtagagaaaaattataacttggagcagaccctggacgaccattcttcctctataacagctatcaaattcgcaggcaatcgagatatccagatgatatcatgtggagccgacaaaagcatttactttcgctcagcgcaacagggcagcgatggattgcacttcgtgcgaacccaccacgttgctgaaaaaacaaccctttatgatatggacatcgacattacacaaaagtacgtggccgtcgcgtgtcaggaccggaatgttcgggtgtacaacaccgtgaatggaaaacaaaagaagtgctacaagggcagccagggggacgagggttccctgctaaaggtgcacgttgatccatctggtacatttctcgctaccagctgcagcgacaagtccatctctgtgatcgatttctacagtggggagtgcatcgctaagatgttcggtcatagcgaaataatcacaagtatgaagtttacctacgattgtcaccatcttatcactgtcagtggtgattcttgtgtgttcatttggcatctggggcccgagattaccaactgcatgaaacagcacctgctggagatcgaccacagacagcagcagcagcataccaacgataagaaacgctctgggcacccgcggcaggatacttatgtatcaaccccctcggagatccatagcctctcacccggcgagcagactgaggacgatctggaagaagaatgtgagccggaggaaatgctgaagaccccaagtaaagatagcctcgaccccgaccctcgctgcctgcttaccaatggtaagctgccactatgggcaaagagactgctgggcgacgacgatgtggcggatggcctggcattccacgccaagaggtcataccagcctcacggtcgatgggcagagcgcgctgggcaagagccgctgaaaacaattcttgatgcccaggacttggactgctacttcacgccaatgaagcccgagtcactcgaaaactcaatcctggattcattggagcctcagtccctagcctctcttctcagtgaatctgaatcaccgcaggaagccggccggggccatcctagttttctgccccagcagaaagagtcctcagaagcctctgagctgattctgtactcactcgaggctgaagtcacggtcaccggcacggattcacagtattgtaggaaagaggtagaagcagggcctggagaccagcagggcgatagctacttgagagtcagcagtgactcccccaaggatcagagtccgcccgaagactcaggggagagcgaagccgacttggaatgcagcttcgctgctattcacagccctgcccctcctccggaccctgccccacgatttgctactagtctgccacattttcctgggtgtgctggacccactgaagacgaactttccctacctgagggtccttccgtgccttcctcttccctgccccagactcccgagcaagagaagtttctgaggcatcactttgaaacgctgacagagagcccttgtcgggccctgggcgatgtagaggcctccgaggcagaagatcacttcttcaatcctaggcttagcatttctactcaattcttaagctcgctgcagaaggcgtctcgtttcacgcacaccttccccccccgcgcaacccaatgcctggttaagagtccagaggtgaaactaatggatcgcggtggtagccagccccgcgcagggacaggctacgctagccccgacaggacccatgttttggctgccgggaaggcagaagagactttggaagcatggcggcccccaccgccctgtctgaccagtctcgcctcttgtgtccctgcctcaagtgtgctgcccacggacagaaacttgccaactcccacaagtgcccccacccccggattggcacagggtgtacacgccccctctacttgttcctacatggaggccacagcgagctctagggcccgcatcagcaggagtattagtctcggggactccgagggaccaattgtcgccaccttggcgcagcctctgcgtcgccccagtagcgtcggcgaactggcctctcttggccaggaactccaggccatcacaaccgcgactactcccagtttggactctgaggggcaagaacccgctctcaggagctggggcaatcacgaggccagagctaacttgaggttgacattgtctagcgcatgtgacgggctcctgcaaccccccgtagacacccagcctggcgttaccgtgccagcagtgagctttccagctccgtccccagtggaggagtctgctctgcgcctgcatggcagcgcttttcggcctagtctcccggcccctgaaagccccggcttacctgcacatcctagcaacccccagctgccagaagccagacctggcattccgggaggcacagcttcgttgttagagccgacatcaggagcgttggggctgctgcagggctcgccggcaagatggtcagagccatgggtccctgttgaagctctaccacccagccctctcgaactttcacgagtgggcaacatcttgcatagacttcagacaacttttcaggaggccctggacctttaccgagtgctggtgtcctccggccaagttgatactggtcagcagcaggcaagaactgagctcgtcagtacctttctgtggatccattcacagttagaagctgaatgtctggtaggtacatccgtggcgcccgcccaggccctaccctctccaggaccaccctccccacccactctctaccccctggcctcaccagatctgcaggcactcctcgaacattactcggaactactcgtgcaggccgtccgccggaaagcgagaggacactag

SEQ ID NO: 250659 - DNA, 4557 bp, Artificial Sequence
  derived and/or modified sequence
atggctgctgtgggcagcggcggctacgccagaaatgatgctggggagaagctgcccagcgtgatggccggcgtgcctgcccggcggggccagagcagccccccaccagccccacccatctgcctgcggcggaggacccggctgagcacagccagcgaggagaccgtgcagaacagagtgtccctggagaaggtgctgggcatcacagcccagaacagcagcggcctgacctgtgaccccggcaccggccacgtggcctacctggccggctgtgtggtggtgatcctggaccccaaggagaacaagcagcagcacatcttcaacacagccaggaagagcctgagcgccctggccttctccccagatggcaagtacatcgtgactggagaaaatggccacaggcctgctgtgcgcatctgggatgtggaggagaagaaccaggtggccgagatgctgggccacaagtatggagtggcctgtgtggccttcagccccaacatgaagcacatcgtgtccatgggctaccagcacgacatggtgctgaatgtgtgggactggaagaaggacatcgtggtggccagcaacaaggtgtcctgcagggtcatcgccctgtccttcagcgaggacagcagctactttgtgacagtgggcaacagacatgtgcgcttctggttcctggaggtgtccacagagaccaaggtgaccagcacagtgcccctggtgggccgcagcggcatcctgggggagctgcacaacaacatcttctgtggggtggcctgtggccggggccgcatggccggcagcaccttctgtgtgtcctacagcggcctgctgtgccagttcaatgagaagagggtgctggagaagtggatcaacctgaaggtgtccctgagcagctgcctgtgtgtgtcccaggagctgatcttctgtggctgcacagatggcatcgtgcgcatcttccaggcccacagcctgcactacctggccaacctgcccaagccccactacctgggcgtggatgtggcccagggcctggagcccagcttcctgttccacaggaaggccgaggccgtgtacccagacacagtggccctgacctttgaccccatccaccagtggctgagctgtgtgtacaaggaccacagcatctacatctgggatgtgaaggacatcaacagagtgggcaaggtgtggagcgagctgttccacagcagctatgtgtggaatgtggaggtgtacccagagtttgaggaccagagggcctgcctgcccagcggcagcttcctgacctgcagcagtgacaacaccatccgcttctggaacctggacagcagcccagacagccactggcagaagaacatcttcagcaacaccctgctgaaggtggtgtatgtggagaatgacatccagcacctgcaggacatgagccacttcccagaccggggctctgaaaatggcacccccatggatgtgaaggccggcgtgcgggtgatgcaggtgtccccagatggccagcacctggccagcggggacagaagtggcaacctgcgcatccacgagctgcacttcatggatgagctggtgaaggtggaggcccatgatgctgaggtgctgtgcctggagtacagcaagccagagaccggcctgaccctgctggccagcgccagccgggacaggctcatccacgtgctgaatgtggagaagaactacaacctggagcagaccctggatgaccacagcagcagcatcacagccatcaagtttgctggcaacagagacatccagatgatcagctgtggggctgacaagagcatctacttccgcagcgcccagcagggcagtgatggcctgcactttgtgaggacccaccacgtggccgagaagaccaccctgtatgacatggacatcgacatcacccagaagtatgtggccgtggcctgccaggacagaaatgtgcgggtgtacaacacagtgaatggcaagcagaagaagtgctacaagggcagccagggagatgagggcagcctgctgaaggtgcacgtggaccccagcggcaccttcctggccaccagctgcagcgacaagagcatcagcgtcatcgacttctacagcggggagtgcatcgccaagatgtttggccacagcgagatcatcacctccatgaagttcacctatgactgccaccacctgatcaccgtgtctggggacagctgtgtgttcatctggcacctgggccctgagatcaccaactgcatgaagcagcacctgctggagattgaccaccggcagcagcagcagcacaccaatgacaagaagaggagcggccacccccggcaggacacctacgtgtccaccccatctgagatccacagcctgagccctggagagcagacagaagatgacctggaggaggagtgtgagcctgaggagatgctgaagacccccagcaaggacagcctggaccctgacccccgctgcctgctgaccaacgggaagctgcccctgtgggccaagaggctgctgggagatgatgatgtggctgatggcctggccttccacgccaagaggagctaccagccccacggccgctgggccgagcgggccggccaggagcccctgaagaccatcctggatgcccaggacctggactgctacttcacccccatgaagccagagagcctggagaacagcatcctggacagcctggagccccagagcctggccagcctgctgtctgagagcgagagcccccaggaggccggccggggccaccccagcttcctgccccagcagaaggagagcagcgaggccagcgagctgatcctgtacagcctggaggccgaggtgacagtgactggaacagacagccagtactgcaggaaggaggtggaggccggccctggggaccagcagggcgacagctacctgcgggtgtccagtgacagccccaaggaccagagccccccagaggacagcggggagagcgaggccgacctggagtgcagctttgctgccatccacagccctgcccctcctccagaccctgcccccaggtttgccaccagcctgccccacttccctggctgtgccggccccacagaagatgagctgagcctgcctgagggccccagcgtgcccagcagcagcctgccccagaccccagagcaggagaagttcctgcggcaccactttgagaccctgacagagagcccctgccgggccctgggagatgtggaggccagcgaggccgaggaccacttcttcaacccccggctgagcatcagcacccagttcctgagcagcctgcagaaggccagccgcttcacccacaccttccccccccgggccacccagtgcctggtgaagagccctgaggtgaagctgatggaccggggcggcagccagccccgggccggcaccggctacgccagcccagacaggacccacgtgctggccgccggcaaggccgaggagaccctggaggcctggaggcctcctccaccctgcctgaccagcctggccagctgtgtgcctgccagctctgtgctgcccacagacaggaacctgcccacccccaccagcgcccccaccccaggcctggcccagggcgtgcacgcccccagcacctgcagctacatggaggccacagccagcagccgggcccgcatcagccgcagcatcagcctgggggacagcgagggccccatcgtggccaccctggcccagcccctgcggcggcccagctctgtgggggagctggccagcctgggccaggagctgcaggccatcaccacagccaccacccccagcctggacagcgagggccaggagcccgccctgcgctcctggggcaaccacgaggcccgggccaacctgcggctgaccctgagcagcgcctgtgatggcctgctgcagccccctgtggacacccagcccggggtgacagtgcctgctgtgtccttccctgcccccagccctgtggaggagagcgccctgcggctgcacggcagcgccttccggcccagcctgcctgcccctgagagccctggcctgcctgcccaccccagcaacccccagctgcctgaggcccggcccggcatccctgggggcacagccagcctgctggagcccaccagcggggccctgggcctgctgcagggcagccctgcccgctggagcgagccctgggtgcctgtggaggccctgccccccagccccctggagctgagccgggtgggcaacatcctgcaccggctgcagaccaccttccaggaggccctggacctgtacagagtgctggtgagcagcggccaggtggacaccggccagcagcaggccaggacagagctggtgtccaccttcctgtggatccacagccagctggaggccgagtgcctggtgggcacctctgtggccccagcccaggccctgcccagccctggcccccccagcccccccaccctgtaccccctggccagcccagacctgcaggccctgctggagcactacagcgagctgctggtgcaggccgtgcggaggaaggcccggggccactag

SEQ ID NO: 250660 - DNA, 4557 bp, Artificial Sequence
  derived and/or modified sequence
atggccgccgtgggcagcggcggctacgcccggaacgacgccggcgagaaactcccttcggtgatggccggcgttccagcccgtaggggacagagttccccaccaccagcccctccaatttgcctgcgtaggcgtacccgactgtcaactgcaagtgaggagactgtgcagaatagggtgtccctagagaaagtcctgggcattaccgcccaaaacagctcaggtctaacatgcgaccccggaaccggccatgtggcatacctagccgggtgtgtcgtggtgatactggaccctaaagaaaacaaacagcagcacattttcaacaccgcacgaaagtccttgagtgctttagctttttcacctgacgggaaatacatcgtgactggtgagaacgggcaccggccggcggtccgcatttgggatgtggaggagaagaaccaagtggcagagatgctgggtcacaaatatggcgttgcttgcgtggcattctcgccaaacatgaaacacatcgttagcatgggatatcagcacgacatggtgctcaacgtttgggactggaagaaggacattgtggtggcatcaaacaaggtgtcctgccgcgtgatagccctctcattttctgaggactccagttacttcgtaaccgtgggaaatcgacacgtccgattttggttcctcgaggtgtcgacggagacaaaggttaccagcaccgtgcccctagtcgggcggtctggaatacttggcgaactccacaataacatattttgtggcgtggcttgcggcagggggcgaatggcaggatcaaccttctgtgttagttattctggactgctttgccagtttaatgagaagcgagtgcttgaaaaatggattaatctaaaagtgagcctgtcctcttgcctgtgtgtcagccaggaactcatcttttgtggctgcacagatggaatagtccgaatatttcaggcacactctctccactacctggcaaatttgcccaagcctcactacttgggagtcgatgtagctcagggtttagagccaagtttcctcttccacaggaaggccgaagccgtgtaccccgatactgtcgctctaactttcgacccaattcaccagtggctgtcttgtgtgtacaaggatcactctatctatatctgggacgtgaaggatattaacagggtgggcaaggtgtggtctgagctctttcactctagttatgtgtggaacgtcgaggtctaccctgaatttgaggaccagcgcgcttgtctaccaagtggatcttttttaacctgtagctcagataacacaattaggttttggaacctcgactcttccccagatagccattggcaaaagaacatattctcaaatacactgctgaaagtcgtttacgtagagaatgatatacagcatcttcaggatatgagccattttccagatagaggaagcgagaacgggacaccgatggatgttaaggccggggtccgggtgatgcaagtttccccagatggacagcatctcgcttctggcgaccgcagcgggaacctcagaattcatgagctgcatttcatggacgagttggtaaaggtagaagcccatgatgcagaagtcctgtgtctagaatactctaaaccagagacaggtctcactttgttggcctctgcctcccgagacagactgattcatgtgctgaacgtggaaaaaaactataacctagaacaaactctggacgaccattcctcctccatcaccgctatcaagttcgcaggtaatagagatatccagatgatctcttgcggtgccgataagagcatctatttccggtctgctcagcagggatctgacggcctgcactttgtgcgtactcatcatgtggccgagaaaacaactctgtatgacatggatatcgatatcactcaaaagtacgttgccgtcgcttgtcaggacaggaatgtgcgcgtttacaacacagtgaacgggaaacaaaaaaaatgctataagggctcgcagggcgacgaaggaagtcttttaaaagtgcacgtggacccctctggcacatttctcgctacgagttgctctgacaagtccatcagcgtgattgatttttatagtggagagtgtatcgccaagatgtttggccactctgaaatcatcactagcatgaaattcacatacgactgtcatcacctaattacagtctcgggcgatagctgcgtgttcatctggcatctgggtcctgaaatcacaaactgtatgaaacagcacctgcttgagatcgaccatcgacagcagcaacagcatactaacgacaagaaacgcagtggccaccctcgccaggacacctatgtgtctaccccctcggagatccactctctttctcccggtgaacaaacagaggatgaccttgaagaagagtgtgaacccgaggaaatgctgaaaaccccatcaaaggattccctcgaccctgatccacggtgccttctcaccaacggaaaattgccgctctgggcaaagcgacttctgggggatgacgacgtcgctgatggactagcctttcacgctaaaaggtcatatcagcctcatggtagatgggctgagagagctggccaggagcccctgaaaacaattctcgatgcccaagacctcgactgctattttacaccaatgaagcccgaatcacttgaaaacagtatactggattccctggagccgcagagccttgcttccctgctttcagaaagcgaaagccctcaagaggcgggccggggccacccctcttttctgccccagcaaaaggagagttcggaagctagcgagctgatcctctatagtctggaagctgaagtgacggtaactgggaccgacagccagtactgccgcaaagaagtcgaggctggcccgggtgatcagcaaggcgacagttatcttcgagtgtcctctgattcccctaaggatcagtcccccccggaagactctggcgaaagtgaagccgatcttgagtgtagcttcgcagcaatccactcaccagcaccaccccccgatccggcccccaggttcgcaacaagcttaccacacttccccggctgtgccggccctacagaagacgaactcagcttgcccgagggaccatctgttccaagctcaagtctgcctcagacacctgaacaagaaaagtttctccggcatcattttgagacattgacggagtcgccgtgtagggccctaggcgacgtggaagctagtgaagcagaggatcatttcttcaatccacgcctttcaatatccacccaattcctttcctctctgcagaaagcttcccgcttcacccatacctttccaccccgcgcaactcagtgtctggtaaaatcgcccgaggtgaaacttatggataggggcgggtcccagcccagggccggtacaggatatgcttctccggataggacacacgtcctggccgctggcaaggctgaggaaacattggaggcatggagaccacccccgccatgcctcaccagcttggcctcttgtgtgcccgcatctagcgtgctgccaacagatcgtaacttgccaacccctacaagcgcgcccacccccggtctggcccagggagtccatgccccctctacctgctcttacatggaggccaccgcatcttcgcgcgctaggatttcgcggagcatctctctcggcgacagcgaaggacccatcgtggccacattagcccagccccttcgacgacctagctctgtcggggaattagcctccctgggccaggagttgcaggctattacgacagccacaacacccagtcttgacagcgaaggccaagaaccggctttaagatcttggggcaatcacgaggcaagagccaatttaaggctcactctgtcatctgcgtgtgatgggctccttcagccaccagtggacactcaaccaggcgtaacagtgccagccgtgtcctttcctgctccatccccagtggaagaaagtgcccttagattgcatggatccgcgtttagaccgtctctacccgctcccgaaagccccgggctgcctgcccaccctagtaatccgcagctgccggaggcacgtccaggtatccctggaggaaccgcatccctgctggagcccacatcgggcgctctgggcctactccagggctcacctgccaggtggtcggagccctgggtgccggtggaagccttgcctcccagccctctggaactgagccgggtgggaaatattctacaccgcttgcagacgacgtttcaggaggcacttgacctttatcgggtgctggtgtccagtggtcaagtcgacactggacagcagcaggctcggactgaactcgtgtcaacctttctgtggatccacagccagctcgaggctgaatgcctggttggcacctctgtggcaccagcacaggcactgccctctcccggcccccctagcccacctaccttatacccactcgcttctccggaccttcaggctttgttagagcactactcagagctgctggtgcaagccgttagacgcaaagccaggggccactag

SEQ ID NO: 250661 - DNA, 4557 bp, Artificial Sequence
  derived and/or modified sequence
atggccgctgtgggttccgggggatacgcacggaatgatgccggagaaaagctgccttccgtgatggctggcgtgccggctcgaagaggacagtcctcacccccaccagcgccacccatttgcctgcgacggaggaccagattgtctactgcatcggaagagacagtgcagaatagggtgagtctggagaaagtcctcggcataacagcacagaactccagtggcctgacttgcgaccccggaactggccatgtggcatatctggcaggatgtgtcgtggtgattctagatccgaaagagaataagcaacagcacatcttcaacaccgcgcgaaagtcgttatctgccttggctttctctcccgacgggaagtacatagtgactggagaaaatggccacaggcctgccgtgagaatttgggacgtggaggagaagaatcaagtcgctgagatgctggggcataagtatggagtcgcctgtgtggcgttctctcccaacatgaaacacatcgtgtctatggggtatcaacacgacatggttttgaacgtgtgggattggaagaaggacattgtggtagctagcaacaaggtctcgtgtagggtgatagcgctctccttctccgaagactcctcctacttcgtaaccgttggaaacagacatgtgcgattctggttcctcgaagtgtcgaccgagacgaaggttacctctaccgtgccactggttggtaggagcgggatcctcggagaactccacaataatatcttttgtggagtggcatgcgggagagggagaatggccggtagcaccttctgtgtctcatactcaggcttgttgtgccaatttaatgaaaaacgagttttagagaagtggataaacttaaaagtgagcctctcatcatgtttatgtgtatctcaggaactgatattttgtggttgcaccgatggtatagtccgtatcttccaggcccattccctgcactaccttgccaatctgcccaaaccccactacctgggagtggacgttgctcagggactcgagcccagctttctgtttcacaggaaggccgaggccgtctatcccgatactgttgctctcactttcgaccccatccaccagtggctttcgtgcgtgtacaaggatcatagcatctatatttgggatgtgaaagacatcaaccgcgtgggcaaggtctggagtgaattgtttcacagctcttacgtttggaatgtggaggtgtatccagaatttgaggatcagcgggcatgtctcccatctgggtcatttctgacctgctcttcagataatacaatcaggttctggaatctagactcatccccagactcgcattggcagaaaaacattttttctaacacgctgctgaaggttgtgtacgtggagaacgacatccaacacctgcaggatatgagccacttccctgatagagggagcgagaatggcactcctatggacgtgaaggccggagtgcgagtcatgcaggtgagtccagacggccaacacctggcctccggggatcggtctgggaatttaagaattcatgagttacactttatggatgagctagtgaaggtggaggcccacgacgcagaggtactgtgtcttgaatactccaagcctgaaacgggcctcactctgttagcctcagcctctcgagacagactgatccatgttctcaatgtcgaaaaaaattataatctggagcagacattagacgatcattcctcgtccattacggctatcaagtttgccggtaatagagacattcagatgatctcatgcggcgcagataaatcaatctactttagatctgcacagcagggaagcgatgggctgcacttcgtgcgtacgcaccatgtagcagagaaaacgaccttatatgacatggatatcgatattactcagaagtatgtggcagtcgcctgtcaggacagaaacgtacgggtctataataccgttaatggaaagcagaaaaagtgctacaaagggtcccagggggacgaaggctccttactcaaggtacatgtcgatccttccggcacattcctcgcgacatcctgctcagacaagagtatcagtgtgatcgacttctactcaggcgagtgcatagcaaaaatgtttgggcattcagagattatcacatccatgaaatttacttatgactgtcatcacctgatcactgtatctggagactcctgcgtgttcatttggcacttgggtccggagattacaaactgtatgaagcaacacttgctcgagattgaccaccgacagcagcaacagcatactaacgataagaaacggagcggccatcctagacaagacacctacgtgtccaccccttccgagatccactccctgtctccgggagaacagaccgaagatgatctcgaggaagagtgtgaacccgaagagatgctcaagaccccttccaaggactctctggatcctgatcccagatgtctgctgaccaacggaaagctccccttatgggccaagagactcttaggggatgacgatgtggctgacggactggctttccatgccaagcgctcctatcagcctcacggaagatgggcagaaagagctggccaggaaccactaaagaccatcttagacgcccaggacctggattgctattttacacctatgaaaccagagtctttagaaaacagcattctcgatagcttagaaccccagtctttggcctctcttctctccgagtccgagagtccacaggaagccggacggggacacccaagctttctgccccagcaaaaggagtcaagcgaggcttcagagctaatcctgtattcactggaggctgaagtaacagtgaccggaaccgattcccagtattgtcgcaaggaagtcgaagcaggacccggagaccagcagggtgattcctatctgagagtgagttctgacagtcctaaggaccagtctccgccagaagactccggggagtccgaagcagacttggaatgtagtttcgccgctattcactcaccagcacctccccctgacccagctcccaggttcgcgacaagcctcccacacttccccggatgcgccggtcctacagaagacgagttgtcgttgcccgaagggcctagcgttcccagtagctccctgccgcagacccccgagcaagaaaaatttctgaggcaccacttcgaaaccctgaccgaatctccatgtcgggctctaggagatgttgaggcaagcgaagctgaggatcacttcttcaacccgaggctgagtataagcacacagtttttgtctagcttgcagaaggcatcacgctttacacacacctttcctccaagagccactcagtgtcttgtaaaaagtcccgaggttaagttgatggatcgtggcggatctcagccacgcgctggaaccggatacgcgtcaccagatcgcacccacgtacttgcggctggtaaagccgaggagactctggaggcttggaggccgcctccaccctgtctcacaagtctggctagctgtgtaccggcttcttctgtcctccccacagaccgaaacctccccacccctaccagcgcaccaacccctggattagcccagggggtacatgccccaagtacatgctcctacatggaggcaacagctagctcaagggcacgaataagtaggagtattagcctgggagactctgagggacccattgtggcaactctggcacagccgctgcgccgtccatcttctgttggtgagttggcctctctggggcaggagctgcaggcaatcaccacagcgaccaccccctcattggatagtgagggacaggagccggcactgcggtcctgggggaatcacgaagcaagggccaacctgaggctgaccctttcgtccgcttgtgacggcctactgcagccgcctgtggacacgcagccaggggtcacggtgcctgctgtctccttccctgccccatctccagtggaggagagcgccctgcgccttcacggtagcgcctttcgaccatcactgcctgcacccgagtctccgggactcccagcccatccctctaatcctcagctgcccgaggctcgcccaggtataccaggagggactgcaagtctcctcgaaccaacgtctggggctctcggtctccttcagggctcaccggctaggtggagtgagccttgggtaccagtagaggctctcccaccatctccactggagctgtcacgcgtggggaacattctccacaggttacaaactactttccaggaagcgcttgacctgtatcgggtactcgtatcatcagggcaggtcgacaccggccagcagcaggccaggactgaactggtgtcgacgttcctctggatacactcacagctggaggctgagtgtctggtgggcacctcagtggcacccgcacaggctttacctagccccggaccaccttcccctcctactttatacccgctggcaagtcctgacctgcaggctctgctcgaacactactctgagctcttggtgcaggccgtgaggagaaaagctaggggacactag

SEQ ID NO: 250662 - DNA, 4557 bp, Artificial Sequence
  derived and/or modified sequence
atggcggccgtagggtccggaggctatgcgcggaacgatgcaggggagaagctgccctctgtcatggcgggagttccggcgcggaggggccagtcctccccgccccccgccccaccaatctgcctacggcggcggacgcgactctcgacggcctccgaggagacggtgcagaaccgggtgtcactcgagaaggtgcttggcatcacagcccagaacagcagtggcctaacctgtgaccccggcacaggccatgtggcctacctggcaggctgtgtggtggtgattttggaccccaaggagaacaagcagcagcacatctttaacaccgccaggaagtctctcagtgctctggccttctcccctgatgggaagtacatagtgacaggggagaatgggcataggcctgctgtgcgcatctgggatgtggaggagaagaatcaggtggcggagatgctaggccacaagtatggtgtggcgtgtgtggccttctcacccaatatgaagcacatcgtgtccatgggctaccaacatgacatggtgctcaacgtctgggactggaagaaagacatcgtagtggcctccaacaaggtatcttgtagagtcattgccctctccttctcagaggacagcagctattttgtcactgttgggaaccgccatgtgaggttctggttcttggaagtctccactgagacaaaggtgacgagcacagtgccccttgtagggcgctcgggcatcctgggcgagctgcacaacaacatcttctgtggtgtggcctgcggtcggggccggatggcgggcagtaccttctgtgtgtcctactcgggcctcctctgccagttcaatgagaagagggtgctggagaagtggatcaacctgaaggtctccctgtcttcctgcctctgtgtcagccaggagctcatcttctgtggctgcacagatgggatagtccgcatcttccaggcccatagcctgcactacctcgccaacctgcccaagccacactaccttggggtagacgtggcacagggcctggagcccagcttcctcttccacaggaaggcggaagcagtctacccagatacagtggcactgaccttcgaccccatccaccagtggctgtcctgcgtgtataaggaccacagcatctacatctgggatgtcaaggacatcaacagagtgggcaaggtgtggtcagagctcttccacagctcctacgtttggaacgtggaggtgtatcctgagtttgaagaccagagagcttgtttgccatcaggatcctttctgacttgttcttcagacaacaccattcgcttctggaacttggacagcagccctgattctcactggcagaaaaacatcttcagcaataccctgctgaaggtcgtgtacgtggagaatgacatccagcacctgcaggacatgtcacacttcccagaccgggggagcgagaatgggacacccatggacgtgaaagccggggtgcgggtcatgcaggtcagtcctgacggccagcatttggcttcaggcgaccgaagtggaaatctgaggatccacgagctgcacttcatggacgagctggtcaaggtggaggcccatgatgctgaggtgctgtgcctggagtactccaagccagagacggggctgaccttgctggcctcagccagtcgggaccggctgatccatgtgctgaacgtggagaagaactacaacctggagcagacgctggatgaccactcctcctccatcaccgccatcaagttcgctggcaacagagacatccagatgatcagctgtggggctgacaagagcatctactttcgcagtgcccagcagggttcggatggactacactttgtccgtacccaccacgtagcagagaaaaccaccttgtatgacatggacattgacatcacccagaagtacgtggccgtggcctgccaggaccgcaatgtgagagtctacaacactgtgaacgggaagcagaagaagtgctacaagggctcccagggtgacgaagggtccttgctgaaggtccatgtggacccctcaggcaccttcctggccaccagctgctctgacaaaagcatctcagtgattgacttttactcgggcgagtgcattgccaagatgtttggccattcagaaattattaccagcatgaagttcacctatgactgtcatcacttgatcacagtatctggagacagctgcgtgttcatctggcacctgggcccggagatcaccaactgcatgaagcagcacttgctggagattgaccaccggcagcagcagcagcacacaaatgacaagaagcggagtggccaccccaggcaggatacgtatgtgtccacacctagtgagattcactccctgagccctggagagcaaacagaggatgatctggaggaagagtgtgagccagaagagatgctgaagacaccatccaaagatagcttggatccagatcctcgttgcctgctaaccaacggcaagctgccactgtgggcaaagcggctgctaggggacgatgatgtggcagatggcttggccttccacgccaagcgcagctaccagccccacggccgctgggcagagcgggccggccaagagcccctcaagaccatcctggatgcccaggacctggattgctactttacccccatgaagcccgagagtctggagaactccattctggattcactggagccacagagcctggccagcctgctgagtgagtcagagagtccccaggaagctggccgcgggcacccctccttcctgccccagcagaaggaatcatctgaggccagtgagctcatcctctactctctggaggcagaagtgacagtcacagggacagacagccagtattgcaggaaggaggtggaggccgggcctggagaccagcagggcgactcctacctcagggtgtcctccgacagcccaaaggaccagagcccgcctgaggactcgggggagtcagaggccgacctggagtgcagcttcgcagccatccactccccagctccgcctcctgaccctgcccctcggtttgccacgtcgctgccccatttcccaggatgcgcaggtcccacagaagatgagctgtccctgcccgagggacccagcgtccccagcagctccctaccccagactccggagcaggagaagttcctccgccaccactttgagacactgactgagtccccctgcagagctctgggagacgtggaggcctctgaagctgaagaccacttcttcaacccacgcctgagtatctccacgcagttcctctcaagcctccagaaggcatccaggttcacccataccttccctccccgggcaacccagtgccttgtgaagtctccagaggtcaagctcatggaccgaggcggaagccagcccagagcaggtactggctacgcctccccagacaggacccacgtcctcgctgcagggaaggctgaagagaccctggaggcctggcgcccaccacctccctgccttacgagcctggcgtcctgtgtccctgcttcctccgtgctgcccacagacaggaatctcccaacgcccacatctgcacccaccccaggcctggctcagggtgtccatgccccctccacctgttcctacatggaggccactgccagctcccgtgccaggatatcacgcagcatctccctcggtgacagtgagggccctatcgtggccacactggcccagcccctccgtaggccatcgtccgttggggagctggcctccttgggccaggagcttcaggccatcaccaccgcgacaacacccagtttggacagtgagggccaagagcctgccctgcgttcctggggcaaccacgaggcccgggccaacctgagactgaccctgtcaagtgcctgtgatgggctcctgcagccccccgtggatacccagcctggcgtcaccgtccctgcagtgagcttcccagcccctagccctgtggaagagagcgccctgaggctccacggctctgcctttcgcccaagtctcccagctcctgagtcccctggccttcctgcccaccccagtaacccccagcttccagaggcccggcctggcatccctggcggcactgcctccctcctggagcccacctccggtgcacttggtctgttacagggcagccctgcccgctggagtgagccctgggtgccggttgaagccctgcccccatctccccttgagctgagcagggtggggaacatcttgcacaggctgcagaccaccttccaagaagccctcgacctttaccgtgtgttggtctccagtggccaggtggacaccgggcagcagcaggcacggactgagctggtctccaccttcctgtggatccacagccagctggaggctgaatgcctggtggggactagtgtggccccagcccaggctctgcccagcccaggacccccgtccccaccgacgctgtaccccctggccagcccagacctgcaggccctgctggaacactactcggagctgctggtgcaggccgtgcggaggaaggcacgggggcactga

SEQ ID NO: 250663 - protein, 370 aa, Artificial Sequence
  derived and/or modified sequence
MGAQPGEPQNTCSRIQTLFRRVKTLLIKAPPPPQPPPPPPSWNPGCTHVYGYAFGHMHDNNLEHLPSQQVLDTGEQLMVPVEVLEVDNKEALWKFLLSGAMAGAVSRTGTAPLDRAKVYMQVYSSKTNFTNLLGGLQSMVQEGGFRSLWRGNGINVLKIAPEYAIKFSVFEQCKNYFCGIQGSPPFQERLLAGSLAVAISQTLINPMEVLKTRLTLRRTGQYKGLLDCARQILQREGTRALYRGYLPNMLGIIPYACTDLAVYEMLQCFWVKSGRDMGDPSGLVSLSSVTLSTTCGQMASYPLTLVRTRMQAQDTVEGSNPTMRGVLQRILAQQGWLGLYRGMTPTLLKVLPAGGISYVVYEAMKKTLGI

SEQ ID NO: 250664 - protein, 242 aa, Artificial Sequence
  derived and/or modified sequence
MGAQPGEPQNTCSRIQTLFRRVKTLLIKAPPPPQPPPPPPSWNPGCTHVYGYAFGHMHDNNLEHLPSQQVLDTGEQLMVPVEVLEVDNKEALWKFLLSGAMAGAVSRTGTAPLDRAKVYMQLLGRLRQENRLNLGGGGCSEPRSPDRTPAWATESTPPRRTSPTCWGGYRAWSRRAASAPCGGATASTCSRLLLSMPSSSPYSSSARITSVEYKGPRPSRSVSLLAPWLWPSPRPSSTPWRC

SEQ ID NO: 250665 - DNA, 1113 bp, Artificial Sequence
  derived and/or modified sequence
atgggtgcccaaccaggcgagcctcagaacacctgcagtcggatacagacgctgttccgaagagtcaaaacattgctgattaaagccccacctcccccacaaccacccccccccccgccttcatggaaccctgggtgcacacacgtgtacggttacgcatttggccacatgcatgataacaacctggagcacctgcctagccagcaggtgcttgatacaggtgagcagctgatggtaccagtggaggtgctagaggtcgacaacaaggaagccttatggaaattcttattaagcggcgccatggctggcgcggtgagccgcacgggcacagcgccactcgaccgcgccaaagtttacatgcaggtgtattccagcaagactaacttcactaatctccttggcggattacaaagtatggtgcaggagggaggatttagaagtctgtggcgaggaaatggaatcaatgtcctaaaaattgcaccagagtacgccattaagttctccgtctttgagcaatgcaaaaactatttctgcgggatacaagggtcgccccccttccaagagaggctgctggcaggatctctggccgttgccatcagccagacactcatcaaccctatggaggtgcttaagactaggttgactttgcggcgtaccggacagtacaaaggtctgctcgattgcgcccgccagatacttcagagagagggcacaagagctctgtatcgcgggtatttgcctaatatgctgggcatcatcccatatgcctgtacagatctagcggtttacgagatgctgcagtgtttctgggtgaagagtggaagagatatgggagatcccagcggactggtctccctcagctccgtcaccctgtctacaacctgcgggcagatggcatcgtatccgctgactctggtacggactcgcatgcaggcccaggacaccgtggagggtagtaatccaactatgcgaggcgtcctccaaagaattctggctcaacagggctggttggggctgtaccgaggaatgaccccaacactgctcaaggtactacccgccgggggaatcagttatgtggtgtatgaggccatgaagaagacccttggtatctag

SEQ ID NO: 250666 - DNA, 729 bp, Artificial Sequence
  derived and/or modified sequence
atgggtgcccagccaggcgaaccccagaatacatgttcccggatccagacacttttcaggagagtgaaaactcttctgatcaaagctccccccccgccccaaccacccccaccaccgccttcttggaacccgggatgcacccacgtgtatggatacgctttcggccacatgcatgacaacaatctggaacatctgccctcccagcaggtgttggataccggagagcagcttatggtgcccgttgaagtgctcgaagtggacaacaaagaggctctgtggaaattcctcctgtcgggggccatggccggcgccgtgtcgcggaccgggacagcgccgctggatagagccaaagtgtatatgcaactgctcggtaggcttaggcaggaaaatcggttaaacctgggtggcggcgggtgttctgaaccccggtcacctgacagaacacctgcctgggccaccgagagcaccccgcctagacggacttcacctacgtgctggggcggatatcgggcctggtctcggagggctgctagtgcaccttgcggtggagccaccgctagcacctgctcccgcctccttctttccatgcctagcagttccccttactctagctcagcgagaattactagcgttgagtacaagggcccacggccatcacggagcgtcagcttgttggctccctggctttggccttcaccgcgccctagctctacaccctggaggtgttag

SEQ ID NO: 250667 - DNA, 1113 bp, Artificial Sequence
  derived and/or modified sequence
atgggcgcccagcctggagagccccagaacacctgcagccgcatccagaccctcttccggcgggtgaagaccctgctgatcaaggcccctcctccaccccagcccccacctcctcctccttcctggaaccctggctgcacccacgtgtatggctacgccttcggccacatgcatgacaacaacctggagcacctgcccagccagcaggtgctggacacaggagagcagctgatggtgcctgtggaggtgctggaggtggacaacaaggaggccctgtggaagttcctgctgagcggggccatggccggggctgtgtccaggactggaacagcccccctggaccgggccaaggtgtacatgcaggtgtacagcagcaagaccaacttcaccaacctgctgggcggcctgcagagcatggtgcaggagggcggcttccgcagcctgtggagaggaaatggcatcaacgtgctgaagatcgccccagaatatgccatcaagttctctgtgtttgagcagtgcaagaactacttctgtggcatccagggcagcccccccttccaggagcggctgctggccggcagcctggccgtggccatcagccagaccctcatcaaccccatggaggtgctgaagacccggctgaccctgcggaggacaggccagtacaagggcctgctggactgtgcccggcagatcctgcagcgggagggcacccgggccctgtaccggggctacctgcccaacatgctgggcatcatcccctatgcctgcacagacctggccgtgtatgagatgctgcagtgcttctgggtgaagagcggccgggacatgggagaccccagcggcctggtgtccctgagctctgtgaccctgagcaccacctgtggccagatggccagctaccccctgaccctggtgaggaccaggatgcaggcccaggacacagtggagggcagcaaccccaccatgagaggagtgctgcagaggatcctggcccagcagggctggctgggcctgtaccggggcatgacccccaccctgctgaaggtgctgcctgctgggggcatctcctatgtggtgtatgaggccatgaagaagaccctgggcatctag

SEQ ID NO: 250668 - DNA, 729 bp, Artificial Sequence
  derived and/or modified sequence
atgggcgcccagcctggagagccccagaacacctgcagccgcatccagaccctcttccggcgggtgaagaccctgctgatcaaggcccctcctccaccccagcccccacctcctcctccttcctggaaccctggctgcacccacgtgtatggctacgccttcggccacatgcatgacaacaacctggagcacctgcccagccagcaggtgctggacacaggagagcagctgatggtgcctgtggaggtgctggaggtggacaacaaggaggccctgtggaagttcctgctgagcggggccatggccggggctgtgtccaggactggaacagcccccctggaccgggccaaggtgtacatgcagctgctgggccgcctgcggcaggagaaccggctgaacctgggcggcggcggctgcagcgagcccaggagcccagacaggaccccagcctgggccacagagagcaccccacccaggaggaccagccccacctgctggggcggctaccgggcctggagccggcgggccgccagcgccccctgtggcggggccacagccagcacctgcagccggctgctgctgtccatgcccagcagcagcccctacagcagcagcgcccgcatcacctctgtggagtacaagggcccccggcccagccgctctgtgtccctgctggccccctggctgtggcccagcccccggcccagcagcaccccctggcgctgctag

SEQ ID NO: 250669 - DNA, 1113 bp, Artificial Sequence
  derived and/or modified sequence
atgggcgcccagcccggcgagccccagaacacctgcagccggatccaaaccctgtttcgacgggtcaagactctactcatcaaagctccccctcctccgcagcccccccccccgcccccaagctggaatcctggttgcacccatgtttacggctatgccttcggacacatgcacgataataatctcgagcatctgccttctcagcaggtgttggacaccggtgagcagctaatggtgcctgtagaggtactggaggtggataataaggaagccctttggaaattccttctgtcaggtgcgatggccggcgcagtctccaggaccggcactgcccctctggatcgggccaaagtgtacatgcaggtctatagctccaagaccaacttcacaaatctgctgggcgggcttcagtcgatggtgcaggaaggcgggttccgaagcctctggcgggggaacggtattaacgtgctcaaaatagcacccgagtatgccatcaagttttcggtgtttgagcagtgcaagaactacttctgcggcattcagggatcaccaccatttcaggaaagactcctggccggttctctcgccgtggccatcagtcagactttgataaaccctatggaagtactgaagacaaggctgacgttgcggcgtaccggacagtacaagggtctcctggattgcgcccgtcagatcctgcagcgggagggaactagagcactgtaccgaggttatctgccaaatatgttgggcataatcccatacgcctgtacagatctggcggtctacgaaatgctgcagtgtttttgggtaaagtcgggccgggacatgggagatccaagtgggctagtgtccttgtctagcgtgaccctgtccacaacctgtggccaaatggcttcttaccctctgactcttgtaagaacgcgcatgcaggcccaggacacagttgaaggctctaatcccaccatgcgtggcgtgctacagcggatactggcccagcagggctggctgggtctataccgcggcatgacccccacactccttaaggttctacctgctggcggcataagttatgtggtttatgaggccatgaaaaagaccttgggcatctag

SEQ ID NO: 250670 - DNA, 729 bp, Artificial Sequence
  derived and/or modified sequence
atgggcgcccagcccggcgagccccagaacacctgcagccggatccagactctctttcgcagagttaagacccttttaatcaaggctccgcccccccctcaacccccacctccgccccctagttggaatcctggatgtacccatgtgtacggctacgcgttcggacacatgcacgataacaacctagaacacttaccatctcagcaggtactcgacacaggagagcagctcatggtgcccgtcgaagtgctggaagtcgataacaaggaagccctgtggaagtttttgctgtctggggctatggctggggctgtcagtcggaccggcactgccccgctggatagagccaaggtctacatgcagttgctggggagattgagacaggagaatagactgaacctaggaggtgggggctgttccgagccgagaagccctgaccgaactcctgcttgggcaaccgaaagcactccccccagacgtacttccccgacgtgttggggcggctacagagcgtggagcagaagggctgcatctgccccatgtggaggcgcaactgcttccacttgcagccgactgctgctgtcgatgccgagttcatctccctactcctcatccgcgagaatcacgagcgtggagtataaaggaccgagacctagtcggtccgtgtcactgctcgccccgtggctgtggccttccccgcgaccctcatcaacgccttggcggtgttag

SEQ ID NO: 250671 - DNA, 1113 bp, Artificial Sequence
  derived and/or modified sequence
atgggcgctcagccaggggagccacaaaacacctgttctcggatacaaaccctgtttcgcagggtcaagaccttgctgatcaaggctcctccacctccccaaccacccccaccaccaccctcatggaaccctggatgcacccacgtatacggttacgcgttcggccatatgcacgacaataaccttgaacacctgccctcccagcaggtgctggataccggcgagcagctgatggttccggtagaggttctagaggtggataataaagaggccttgtggaagtttctcctgtctggtgcaatggccggagcagtgtcccgaactgggaccgcccctctcgaccgagcaaaagtttatatgcaggtctactcttctaagaccaactttactaacctcctgggaggtcttcaatccatggtccaggaggggggattcaggtctttatggagaggtaatggtatcaacgtgctcaaaattgctcctgaatatgcaattaagtttagtgtgtttgagcagtgcaaaaattacttctgcggaatccagggtagtcctccttttcaagagcgtttacttgctggatcactggccgtagccattagccagacactcattaatcctatggaggtgctgaaaactaggcttactctgaggagaacaggccaatataaggggctgcttgattgtgccagacaaattctccagcgggagggcacccgggctttataccgcggatacctcccaaacatgcttggcatcatcccctatgcctgcacagacctagccgtgtatgagatgctgcagtgcttctgggtcaaatctggtagggacatgggcgatcctagtggactggtttccctgagcagcgtcacactgtccactacttgcgggcagatggcgagttatcctctcaccttagtcaggacgaggatgcaggctcaggacaccgtggaggggtctaacccaactatgaggggtgtgctgcaaaggatcctagctcagcagggctggctgggcctatatcgcggaatgacacccacacttttgaaggtcctcccagctggtgggatctcttatgtcgtgtatgaggctatgaagaagactttagggatctag

SEQ ID NO: 250672 - DNA, 729 bp, Artificial Sequence
  derived and/or modified sequence
atgggagcacagcccggtgaaccccagaacacgtgctctcggattcagactctgtttaggagagtgaaaacattactgatcaaagctccaccgcctcctcaaccgcctcctccgcctcctagctggaatcctggatgtacccatgtgtatgggtacgcctttggccatatgcatgataataatctcgagcatctaccctcacagcaggttctcgacaccggagagcaacttatggttccagtggaggttctggaagttgacaataaggaggctctctggaaatttctgctttccggcgctatggccggagccgtcagcaggaccggaaccgctccactggaccgagcaaaagtgtacatgcaactgctaggcaggctgcggcaggagaatagattaaatctcggtggcggaggttgttccgagccccgttcacccgataggacccctgcctgggcgacggagagcaccccccctcgacgaactagcccaacatgttgggggggataccgggcatggagccggagagctgctagtgctccctgcggtggcgctactgctagcacatgttccagactgctgctgtctatgccgagctcttcaccttacagttcgtcagcccgaatcacttctgtggaatacaaggggcctcgtcccagcagatctgtatctctgctggccccatggctgtggccatccccccgaccatcgtctacaccctggcgatgctag

SEQ ID NO: 250673 - DNA, 1549 bp, Artificial Sequence
  derived and/or modified sequence
aatcctcccactagacactcccgcatggtagctggagcagcaaacaactgcttagggatttgaagccaggtgtcctaacttcctccatgggcgctcagcctggggaacctcagaacacttgctctaggatccagacactgtttaggagggtcaagaccttactcatcaaagccccgcctcccccccaacctccgcctccacccccatcctggaaccctggctgtacacacgtgtatgggtacgcgtttggccacatgcatgacaacaaccttgaacatctcccgtcacagcaggtactggacacaggagagcagctgatggtccccgtggaagtcctggaagtggataacaaggaggccttgtggaagtttctactctcaggagctatggccggggcggtgtctcgcacgggcacggcacctctggacagagccaaggtgtacatgcaggtctactcctccaagacgaacttcaccaacctgctgggggggctacagagcatggtccaggagggcggcttccgctccctgtggcggggcaacggcatcaacgtgctcaagattgctcctgagtatgccatcaagttctccgtattcgagcagtgcaagaattacttctgtggaatacaagggtccccgcccttccaggagcgtctccttgctggctccctggctgtggccatctcccagaccctcatcaaccccatggaggtgctgaagacgcggttgaccttgcgtcggacgggccagtacaaggggctgctggactgcgccaggcagatcttgcagcgagagggcacccgcgccctttaccgcggctacctgcccaatatgctcggcatcatcccctatgcctgcaccgacctggctgtctatgagatgctccagtgcttctgggtgaagtcaggcagggatatgggggaccccagtggcctggtcagtctgtcgtctgtgacgctatccacgacctgtggccagatggccagctacccactgactctggtgcgcaccaggatgcaggcccaagataccgtggagggctcaaatcccaccatgcgcggagtcctccagcggatcctggcccagcagggctggctagggctgtaccgaggcatgacccccacgctactgaaggtcttaccagcaggtggcatcagctatgtggtgtacgaagccatgaagaaaaccctgggcatataggctgtgagctggacgacacagcctaggcagaaatgggacaggaggacctgatgacccctggccccaaagagccctcgaggcctcaaggttcaggccctggggcagtttttggtggcaaaagcaggctgggggtgggggtggggctctgggtcagaagattcctgaagctggggttggtggtgggtggaggggggcagtgctgggtcagaaaactcctgggactccctccccagggtgcagcctgagacaagaaacgtggactccagtctggccccttgtgggtcgtcctggctccagggcgaaatggtgaacatgtcacacaacaaggaataaagagatggtttttgctg

SEQ ID NO: 250674 - DNA, 1113 bp, Artificial Sequence
  derived and/or modified sequence
atgggcgcccagcccggcgagccccagaacacctgcagcagaatccagaccctgttcagaagagtgaagaccctgctgatcaaggcccccccccccccccagccccccccccccccccccagctggaaccccggctgcacccacgtgtacggctacgccttcggccacatgcacgacaacaacctggagcacctgcccagccagcaggtgctggacaccggcgagcagctgatggtgcccgtggaggtgctggaggtggacaacaaggaggccctgtggaagttcctgctgagcggcgccatggccggcgccgtgagcagaaccggcaccgcccccctggacagagccaaggtgtacatgcaggtgtacagcagcaagaccaacttcaccaacctgctgggcggcctgcagagcatggtgcaggagggcggcttcagaagcctgtggagaggcaacggcatcaacgtgctgaagatcgcccccgagtacgccatcaagttcagcgtgttcgagcagtgcaagaactacttctgcggcatccagggcagcccccccttccaggagagactgctggccggcagcctggccgtggccatcagccagaccctgatcaaccccatggaggtgctgaagaccagactgaccctgagaagaaccggccagtacaagggcctgctggactgcgccagacagatcctgcagagagagggcaccagagccctgtacagaggctacctgcccaacatgctgggcatcatcccctacgcctgcaccgacctggccgtgtacgagatgctgcagtgcttctgggtgaagagcggcagagacatgggcgaccccagcggcctggtgagcctgagcagcgtgaccctgagcaccacctgcggccagatggccagctaccccctgaccctggtgagaaccagaatgcaggcccaggacaccgtggagggcagcaaccccaccatgagaggcgtgctgcagagaatcctggcccagcagggctggctgggcctgtacagaggcatgacccccaccctgctgaaggtgctgcccgccggcggcatcagctacgtggtgtacgaggccatgaagaagaccctgggcatctag

SEQ ID NO: 250675 - DNA, 729 bp, Artificial Sequence
  derived and/or modified sequence
atgggcgcccagcccggcgagccccagaacacctgcagcagaatccagaccctgttcagaagagtgaagaccctgctgatcaaggcccccccccccccccagccccccccccccccccccagctggaaccccggctgcacccacgtgtacggctacgccttcggccacatgcacgacaacaacctggagcacctgcccagccagcaggtgctggacaccggcgagcagctgatggtgcccgtggaggtgctggaggtggacaacaaggaggccctgtggaagttcctgctgagcggcgccatggccggcgccgtgagcagaaccggcaccgcccccctggacagagccaaggtgtacatgcagctgctgggcagactgagacaggagaacagactgaacctgggcggcggcggctgcagcgagcccagaagccccgacagaacccccgcctgggccaccgagagcaccccccccagaagaaccagccccacctgctggggcggctacagagcctggagcagaagagccgccagcgccccctgcggcggcgccaccgccagcacctgcagcagactgctgctgagcatgcccagcagcagcccctacagcagcagcgccagaatcaccagcgtggagtacaagggccccagacccagcagaagcgtgagcctgctggccccctggctgtggcccagccccagacccagcagcaccccctggagatgctag

SEQ ID NO: 250676 - protein, 400 aa, Artificial Sequence
  derived and/or modified sequence
MAWRRREASVGARGVLALALLALALCVPGARGRALEWFSAVVNIEYVDPQTNLTVWSVSESGRFGDSSPKEGAHGLVGVPWAPGGDLEGCAPDTRFFVPEPGGRGAAPWVALVARGGCTFKDKVLVAARRNASAVVLYNEERYGNITLPMSHAGTGNIVVIMISYPKGREILELVQKGIPVTMTIGVGTRHVQEFISGQSVVFVAIAFITMMIISLAWLIFYYIQRFLYTGSQIGSQSHRKETKKVIGQLLLHTVKHGEKGIDVDAENCAVCIENFKVKDIIRILPCKHIFHRICIDPWLLDHRTCPMCKLDVIKALGYWGEPGDVQEMPAPESPPGRDPAANLSLALPDDDGSDDSSPPSASPAESEPQCDPSFKGDAGENTALLEAGRSDSRHGGPIS

SEQ ID NO: 250677 - DNA, 1203 bp, Artificial Sequence
  derived and/or modified sequence
atggcctggagaagaagagaggccagcgtgggcgccagaggcgtgctggccctggccctgctggccctggccctgtgcgtgcccggcgccagaggcagagccctggagtggttcagcgccgtggtgaacatcgagtacgtggacccccagaccaacctgaccgtgtggagcgtgagcgagagcggcagattcggcgacagcagccccaaggagggcgcccacggcctggtgggcgtgccctgggcccccggcggcgacctggagggctgcgcccccgacaccagattcttcgtgcccgagcccggcggcagaggcgccgccccctgggtggccctggtggccagaggcggctgcaccttcaaggacaaggtgctggtggccgccagaagaaacgccagcgccgtggtgctgtacaacgaggagagatacggcaacatcaccctgcccatgagccacgccggcaccggcaacatcgtggtgatcatgatcagctaccccaagggcagagagatcctggagctggtgcagaagggcatccccgtgaccatgaccatcggcgtgggcaccagacacgtgcaggagttcatcagcggccagagcgtggtgttcgtggccatcgccttcatcaccatgatgatcatcagcctggcctggctgatcttctactacatccagagattcctgtacaccggcagccagatcggcagccagagccacagaaaggagaccaagaaggtgatcggccagctgctgctgcacaccgtgaagcacggcgagaagggcatcgacgtggacgccgagaactgcgccgtgtgcatcgagaacttcaaggtgaaggacatcatcagaatcctgccctgcaagcacatcttccacagaatctgcatcgacccctggctgctggaccacagaacctgccccatgtgcaagctggacgtgatcaaggccctgggctactggggcgagcccggcgacgtgcaggagatgcccgcccccgagagcccccccggcagagaccccgccgccaacctgagcctggccctgcccgacgacgacggcagcgacgacagcagcccccccagcgccagccccgccgagagcgagccccagtgcgaccccagcttcaagggcgacgccggcgagaacaccgccctgctggaggccggcagaagcgacagcagacacggcggccccatcagctag

SEQ ID NO: 250678 - DNA, 1203 bp, Artificial Sequence
  derived and/or modified sequence
atggcttggcgaagaagggaagcaagtgtgggggcccgcggcgttctcgcactagccctgctggccctggctctttgcgttcccggagccagaggtagggctcttgagtggttctctgccgtggtgaatatcgagtacgtagacccccagactaatctaactgtgtggtccgtatcagaaagtggaagatttggcgattcttctcccaaggagggggctcatggactcgtgggcgtgccctgggccccagggggagatttggagggctgcgcccctgatacaagattcttcgtacccgaacccggcggccgcggtgcagccccctgggtcgccctcgtggcacggggcggctgcacgtttaaggacaaagtccttgtagctgcccgccggaacgcctccgctgtcgtgctttacaacgaagagcggtatggcaatatcacactccccatgtctcatgccggcaccgggaacattgtggtgattatgatcagctaccctaaagggagggagattctggagctggtacagaagggaatcccagtgacaatgactataggggtcggtaccaggcatgttcaagaatttatctcagggcaatctgtggttttcgtcgccatagctttcattactatgatgattataagccttgcctggctgattttctattatatccaacgattcctgtacacagggtctcagataggctctcagagccaccggaaggaaactaaaaaggtcatcggacagctcctgttgcacacagtgaagcatggcgagaaaggaatcgacgtagatgctgagaattgtgcagtgtgtatcgaaaattttaaggtgaaagatataatccggattttaccctgcaagcatattttccacaggatatgcattgacccctggctgttggatcacagaacgtgccctatgtgcaagctggatgttattaaggccctaggctattggggggagcctggggacgtgcaggagatgcctgcgccagagagtcctccaggcagagacccagctgcaaacctgagtcttgcattgccggacgatgatggctcagacgattcaagcccgccttccgcctcacccgccgagtctgaaccccagtgtgatccctcctttaaaggagacgcgggggagaataccgccctactggaggcaggacgctcagattcccggcacggaggcccaatcagttag

SEQ ID NO: 250679 - DNA, 1203 bp, Artificial Sequence
  derived and/or modified sequence
atggcctggaggagaagagaggcctctgtgggcgcccggggcgtgctggccctggccctgctggccctggccctgtgtgtgcctggggcccggggccgggccctggagtggttctctgctgtggtgaacatcgagtatgtggacccccagaccaacctgactgtgtggagcgtgtctgagagcggccgctttggagacagcagccccaaggagggcgcccacggcctggtgggcgtgccctgggcccctggaggagacctggagggctgtgccccagacacccgcttctttgtgcctgagcccggcggccgcggggccgccccctgggtggccctggtggcccggggcggctgcaccttcaaggacaaggtgctggtggccgccaggagaaatgccagcgctgtggtgctgtacaatgaggagagatatggcaacatcaccctgcccatgagccatgctggcactggaaacatcgtggtgatcatgatctcctaccccaagggccgggagatcctggagctggtgcagaagggcatccctgtgaccatgaccatcggcgtgggcaccaggcatgtgcaggagttcatcagcggccagagcgtggtgtttgtggccatcgccttcatcaccatgatgatcatcagcctggcctggctgatcttctactacatccagcgcttcctgtacacaggcagccagatcggcagccagagccacaggaaggagaccaagaaggtgattggccagctgctgctgcacacagtgaagcatggagagaagggcattgatgtggatgctgagaactgtgctgtgtgcatcgagaacttcaaggtgaaggacatcatccgcatcctgccctgcaagcacatcttccaccgcatctgcatcgacccctggctgctggaccacaggacctgccccatgtgcaagctggatgtgatcaaggccctgggctactggggcgagcctggagatgtgcaggagatgcctgcccctgagagccccccaggccgggaccctgctgccaacctgagcctggccctgcctgatgatgatggcagtgatgacagcagccccccatctgccagccctgctgagagcgagccccagtgtgaccccagcttcaagggagatgctggagaaaatacagccctgctggaggccggccgcagtgacagcagacatggaggccccatctcctag

SEQ ID NO: 250680 - DNA, 1203 bp, Artificial Sequence
  derived and/or modified sequence
atggcctggcggcggcgggaggccagcgtgggcgcccggggcgtgttagcattggccctactggcactggcattatgtgtgcctggcgccagaggacgagctctagagtggttttctgctgtggtcaatattgaatacgtagatccacagactaatctcactgtgtggtctgttagcgagagcgggaggtttggcgattcatcaccaaaggaaggagctcatggtttagtcggggtgccctgggctcctgggggggatctcgagggttgtgcccctgacacccgctttttcgtcccagaaccaggcggccggggggccgccccctgggtggccctggtggcgagaggcggctgcacattcaaggataaagtcctggtggccgcccgccgcaatgcttccgccgtagtactctataacgaagaaaggtacggcaatatcactctgcccatgtcacacgcaggcaccgggaatattgttgtcatcatgatttcttatcctaaaggtagagaaatcttggaacttgtccagaaggggatccccgtaaccatgaccatcggcgtaggcacaagacatgtacaagaattcattagcggtcaaagcgtcgtgttcgtagccattgccttcattactatgatgattatttccctggcatggttgatattttactacatccagcggttcctgtacaccggaagtcaaatcggctcccaatcacatcgaaaggaaactaagaaggtaatcgggcagctcctgctacacaccgtgaagcatggcgagaaagggattgatgtggatgcagaaaattgcgcggtttgtatcgaaaattttaaagttaaagacattattaggattctgccttgcaagcatatctttcatcggatctgcatagacccctggctcttggaccatagaacctgtcccatgtgcaaactggacgttattaaggccctgggatattggggcgaacctggcgacgtccaggagatgccggctcccgagtctccgcccggcagagatcccgccgcaaatctcagcctcgccctgcctgacgacgacggctccgacgatagctcaccaccttctgcctcacctgccgagtctgaacctcagtgcgatcctagcttcaagggggacgccggcgagaatactgccctcctggaggcagggcgctctgactcgcgccacggaggacctatttcgtag

SEQ ID NO: 250681 - DNA, 1203 bp, Artificial Sequence
  derived and/or modified sequence
atggcgtggcgcaggcgcgaagcatccgtgggcgctcgtggagttcttgccctggccctgctcgctctggcactgtgtgttcctggtgcaagaggcagagccctggaatggttttccgcagtcgtcaatattgagtacgtggatccacaaaccaacctgacggtgtggtccgtgtcagagtccggtaggtttggcgactccagccctaaagagggcgcacacggcctggtgggtgttccctgggcccctgggggtgacctggagggctgcgctcctgacacccggttttttgtgccggaacctggaggccgaggggctgccccatgggtggctctagtggctaggggcggttgcactttcaaggacaaggtgttggtcgctgccaggcgcaatgccagcgcagttgtgctctacaatgaggaaagatacggtaacatcactctgcccatgtctcatgccggtactggcaatatcgtggtgattatgatctcttatcctaaaggtcgcgagattctggagctcgtgcagaagggtatcccagtcacaatgacgatcggtgtaggtacacggcatgtgcaagaatttatctcgggtcaaagtgtggttttcgtggctatcgcctttattacaatgatgatcatcagccttgcctggctgattttttactatattcagcggtttctgtacaccggcagccaaatcggctcacagtctcaccgcaaagagaccaagaaagtaatcggccaactgttgctgcacactgtgaagcacggcgaaaagggaatcgatgttgacgccgagaactgtgccgtgtgcattgagaatttcaaggttaaggacatcattcgtatcttgccctgcaaacacatcttccaccgtatctgcatcgatccttggcttctcgatcaccgcacatgccccatgtgcaagcttgacgtcatcaaggcattaggctactggggagagcccggagacgtccaagaaatgccagccccagagtcaccacccggtcgggatccagctgcgaacctgagcctcgccctacctgatgatgacgggtctgatgattcctcgcccccaagtgccagtccagcagagtctgaaccccaatgtgacccttcctttaagggtgacgctggggagaacactgcactgctcgaggccggtcgctcggattcccgacatggaggcccaatctcttag

SEQ ID NO: 250682 - DNA, 2458 bp, Artificial Sequence
  derived and/or modified sequence
cgcctcagtcttccagggcggcggtgggtgtccgcttctctctgctcttcgactgcaccgcactcgcgcgtgaccctgactccccctagtcagctcagcggtgctgccatggcgtggcggcggcgcgaagccagcgtcggggctcgcggcgtgttggctctggcgttgctcgccctggccctgtgcgtgcccggggcccggggccgggctctcgagtggttctcggccgtggtaaacatcgagtacgtggacccgcagaccaacctgacggtgtggagcgtctcggagagtggccgcttcggcgacagctcgcccaaggagggcgcgcatggcctggtgggcgtcccgtgggcgcccggcggagacctcgagggctgcgcgcccgacacgcgcttcttcgtgcccgagcccggcggccgaggggccgcgccctgggtcgccctggtggctcgtgggggctgcaccttcaaggacaaggtgctggtggcggcgcggaggaacgcctcggccgtcgtcctctacaatgaggagcgctacgggaacatcaccttgcccatgtctcacgcgggaacaggaaatatagtggtcattatgattagctatccaaaaggaagagaaattttggagctggtgcaaaaaggaattccagtaacgatgaccataggggttggcacccggcatgtacaggagttcatcagcggtcagtctgtggtgtttgtggccattgccttcatcaccatgatgattatctcgttagcctggctaatattttactatatacagcgtttcctatatactggctctcagattggaagtcagagccatagaaaagaaactaagaaagttattggccagcttctacttcatactgtaaagcatggagaaaagggaattgatgttgatgctgaaaattgtgcagtgtgtattgaaaatttcaaagtaaaggatattattagaattctgccatgcaagcatatttttcatagaatatgcattgacccatggcttttggatcaccgaacatgtccaatgtgtaaacttgatgtcatcaaagccctaggatattggggagagcctggggatgtacaggagatgcctgctccagaatctcctcctggaagggatccagctgcaaatttgagtctagctttaccagatgatgacggaagtgatgacagcagtccaccatcagcctcccctgctgaatctgagccacagtgtgatcccagctttaaaggagatgcaggagaaaatacggcattgctagaagccggcaggagtgactctcggcatggaggacccatctcctagcacacgtgcccactgaagtggcaccaacagaagtttggcttgaactaaaggacattttattttttttactttagcacataatttgtatatttgaaaataatgtatattattttacctattagattctgatttgatatacaaaggactaagatattttcttcttgaagagacttttcgattagtcctcatatatttatctactaaaatagagtgtttaccatgaacagtgtgttgcttcagactattacaaagacaactggggcaggtactctaatataaaggacaggtggtgtttctaaataattggctgctatggttctgtaaaaaccagttaattctatttttcaaggtttttggcaaagcacatcaatgttagactagttgaagtggaattgtataattcaattcgataattgatctcatgggctttccctggaggaaaggttttttttgttgttttttttttaagaacttgaaacttgtaaactgagatgtctgtagcttttttgcccatctgtagtgtatgtgaagatttcaaaacctgagagcactttttctttgtttagaattatgagaaaggcactagatgactttaggatttgcatttttccctttattgcctcatttcttgtgacgccttgttggggagggaaatctgtttattttttcctacaaataaaaagctaagattctatatcgcacatgagcattaagttcttcattgccttgttaaggaaaatgagtaggcagactcagaatctgttatattgatttcagttacaatttaatctttacaattaaaagggcgaaagatgtagaattttagtttttgttgttgactcgaaataaccagttttcttgattagagtttaagcagatttaataccatgaccttgcttaaccgtttcttcttttttacttgcttgctgttcttttgggtcaaaggagcaggctaatgcaaagcttttggagactgctaagtgttaaaaagtgattaaacacacactctgctattttttcacttcttggaggtagaagtcgagtatgaggcagttattttttagagtgtggaattatagtctttccttgctcctagttattctgtatatctttactttgtaggtaaaaataaatgtttatttaaaac

SEQ ID NO: 250683 - protein, 875 aa, Artificial Sequence
  derived and/or modified sequence
MQFQSLKEFYETEIPQKEQDDAKAKHCSDSAEKQWQLFLKKSFITQDLGLEFLNLINMAKENEILDVKNEVYLMKNTMENQKAEREELSLLRLAWQLKATESKPGKQQWAAFKEQLKKTSHNLKLLQEALMPVSALDLGGSLQFILDLRQKWNDMKPQFQQLNDEVQYIMKESEELTGRGAPVKEKSQQLKDLIHFHQKQKERIQDYEDILYKVVQFHQVKEELGRLIKSRELEFVEQPKELGDAHDVQIHLRCSQEKQARVDHLHRLALSLGVDIISSVQRPHCSNVSAKNLQQQLELLEEDSMKWRAKAEEYGRTLSRSVEYCAMRDEINELKDSFKDIKKKFNNLKFNYTKKNEKSRNLKALKYQIQQVDMYAEKMQALKRKMEKVSNKTSDSFLNYPSDKVNVLLEVMKDLQKHVDDFDKVVTDYKKNLDLTEHFQEVIEECHFWYEDASATVVRVGKYSTECKTKEAVKILHQQFNKFIAPSVPQQEERIQEATDLAQHLYGLEEGQKYIEKIVTKHKEVLESVTELCESLTELEEKLKQGDVLKMNPNLEDFHYDYIDLLKEPAKNKQTIFNEERNKGQVQVADLLGINGTGEERLPQDLKVSTDKEGGVQDLLLPEDMLSGEEYECVSPDDISLPPLPGSPESPLAPSDMEVEEPVSSSLSLHISSYGVQAGTSSPGDAQESVLPPPVAFADACNDKRETFSSHFERPYLQFKAEPPLTSRGFVEKSTALHRISAEHPESMMSEVHERALQQHPQAQGGLLETREKMHADNNFTKTQDRLHASSDAFSGLRFQSGTSRGYQRQMVPREEIKSTSAKSSVVSLADQAPNFSRLLSNVTVMEGSPVTLEVEVTGFPEPTLTWWVAYNDKP

SEQ ID NO: 250684 - protein, 894 aa, Artificial Sequence
  derived and/or modified sequence
RSQVLQTYVAFLKSSEEVEMQFQSLKEFYETEIPQKEQDDAKAKHCSDSAEKQWQLFLKKSFITQDLGLEFLNLINMAKENEILDVKNEVYLMKNTMENQKAEREELSLLRLAWQLKATESKPGKQQWAAFKEQLKKTSHNLKLLQEALMPVSALDLGGSLQFILDLRQKWNDMKPQFQQLNDEVQYIMKESEELTGRGAPVKEKSQQLKDLIHFHQKQKERIQDYEDILYKVVQFHQVKEELGRLIKSRELEFVEQPKELGDAHDVQIHLRCSQEKQARVDHLHRLALSLGVDIISSVQRPHCSNVSAKNLQQQLELLEEDSMKWRAKAEEYGRTLSRSVEYCAMRDEINELKDSFKDIKKKFNNLKFNYTKKNEKSRNLKALKYQIQQVDMYAEKMQALKRKMEKVSNKTSDSFLNYPSDKVNVLLEVMKDLQKHVDDFDKVVTDYKKNLDLTEHFQEVIEECHFWYEDASATVVRVGKYSTECKTKEAVKILHQQFNKFIAPSVPQQEERIQEATDLAQHLYGLEEGQKYIEKIVTKHKEVLESVTELCESLTELEEKLKQGDVLKMNPNLEDFHYDYIDLLKEPAKNKQTIFNEERNKGQVQVADLLGINGTGEERLPQDLKVSTDKEGGVQDLLLPEDMLSGEEYECVSPDDISLPPLPGSPESPLAPSDMEVEEPVSSSLSLHISSYGVQAGTSSPGDAQESVLPPPVAFADACNDKRETFSSHFERPYLQFKAEPPLTSRGFVEKSTALHRISAEHPESMMSEVHERALQQHPQAQGGLLETREKMHADNNFTKTQDRLHASSDAFSGLRFQSGTSRGYQRQMVPREEIKSTSAKSSVVSLADQAPNFSRLLSNVTVMEGSPVTLEVEVTGFPEPTLTWWVAYNDKP

SEQ ID NO: 250685 - protein, 1530 aa, Artificial Sequence
  derived and/or modified sequence
MSSQGSPSVALSTTTVSSVAVQAGDSKIVIAVIKCGKWVQLQLAESQPNLLEIGSSQDETKKLLHDHELLLAKLKALEDRVWELLQEADKTAEENKDQSQVYDAMAETLGEAWAALVSMLERRTELLRLTSEFFENALEFAIKIDQAEDFLQNTHEFESAESLKSLLQLHEHHTKELLERSLALLNKSQQLTDFIEKFKCEGPNVNPELTQGAHSSCLKVDRLLELLQDRRRQLDKYLKQQWQELSQVLQICQWDQQENQVTCWFQKTIRNLQEQSLGSSLSDNEDRIHKQEELIIKAKEWNSAVEKLKSEALRILLSKDYVEKEHLQLSHQKLSQLQEEFGQLMVERNTWLKKANEFFNSANKAFDVLGRVEAYLKLLKSEGLSLAVLAVRHEELHRKIKDCTTDALQKGQTLISQVDSCSSQVSGIHEMMGCIKRRVDHLTEQCSAHKEYALKKQQLTASVEGYLRKVEMSIQKISPVLSNAMDVGSTRSESEKILNKYLELDIQAKETSHELEAAAKTMMEKNEFVSDEMVSLSSKARWLAEELNLFGQSIDYRSQVLQTYVAFLKSSEEVEMQFQSLKEFYETEIPQKEQDDAKAKHCSDSAEKQWQLFLKKSFITQDLGLEFLNLINMAKENEILDVKNEVYLMKNTMENQKAEREELSLLRLAWQLKATESKPGKQQWAAFKEQLKKTSHNLKLLQEALMPVSALDLGGSLQFILDLRQKWNDMKPQFQQLNDEVQYIMKESEELTGRGAPVKEKSQQLKDLIHFHQKQKERIQDYEDILYKVVQFHQVKEELGRLIKSRELEFVEQPKELGDAHDVQIHLRCSQEKQARVDHLHRLALSLGVDIISSVQRPHCSNVSAKNLQQQLELLEEDSMKWRAKAEEYGRTLSRSVEYCAMRDEINELKDSFKDIKKKFNNLKFNYTKKNEKSRNLKALKYQIQQVDMYAEKMQALKRKMEKVSNKTSDSFLNYPSDKVNVLLEVMKDLQKHVDDFDKVVTDYKKNLDLTEHFQEVIEECHFWYEDASATVVRVGKYSTECKTKEAVKILHQQFNKFIAPSVPQQEERIQEATDLAQHLYGLEEGQKYIEKIVTKHKEVLESVTELCESLTELEEKLKQGDVLKMNPNLEDFHYDYIDLLKEPAKNKQTIFNEERNKGQVQVADLLGINGTGEERLPQDLKVSTDKEGGVQDLLLPEDMLSGEEYECVSPDDISLPPLPGSPESPLAPSDMEVEEPVSSSLSLHISSYGVQAGTSSPGDAQESVLPPPVAFADACNDKRETFSSHFERPYLQFKAEPPLTSRGFVEKSTALHRISAEHPESMMSEVHERALQQHPQAQGGLLETREKMHADNNFTKTQDRLHASSDAFSGLRFQSGTSRGYQRQMVPREEIKSTSAKSSVVSLADQAPNFSRLLSNVTVMEGSPVTLEVEVTGFPEPTLTWYKKGQKLSADGHLQVLHKETRHSVFIPKVCKADAGLYVARAQNSSGALSSNVILHVTGNCRLPITRVNWITLCVVYVSVSLMYWLLTQ

SEQ ID NO: 250686 - DNA, 2628 bp, Artificial Sequence
  derived and/or modified sequence
atgcagttccagagcctgaaggagttctacgagaccgagatcccccagaaggagcaggacgacgccaaggccaagcactgcagcgacagcgccgagaagcagtggcagctgttcctgaagaagagcttcatcacccaggacctgggcctggagttcctgaacctgatcaacatggccaaggagaacgagatcctggacgtgaagaacgaggtgtacctgatgaagaacaccatggagaaccagaaggccgagagagaggagctgagcctgctgagactggcctggcagctgaaggccaccgagagcaagcccggcaagcagcagtgggccgccttcaaggagcagctgaagaagaccagccacaacctgaagctgctgcaggaggccctgatgcccgtgagcgccctggacctgggcggcagcctgcagttcatcctggacctgagacagaagtggaacgacatgaagccccagttccagcagctgaacgacgaggtgcagtacatcatgaaggagagcgaggagctgaccggcagaggcgcccccgtgaaggagaagagccagcagctgaaggacctgatccacttccaccagaagcagaaggagagaatccaggactacgaggacatcctgtacaaggtggtgcagttccaccaggtgaaggaggagctgggcagactgatcaagagcagagagctggagttcgtggagcagcccaaggagctgggcgacgcccacgacgtgcagatccacctgagatgcagccaggagaagcaggccagagtggaccacctgcacagactggccctgagcctgggcgtggacatcatcagcagcgtgcagagaccccactgcagcaacgtgagcgccaagaacctgcagcagcagctggagctgctggaggaggacagcatgaagtggagagccaaggccgaggagtacggcagaaccctgagcagaagcgtggagtactgcgccatgagagacgagatcaacgagctgaaggacagcttcaaggacatcaagaagaagttcaacaacctgaagttcaactacaccaagaagaacgagaagagcagaaacctgaaggccctgaagtaccagatccagcaggtggacatgtacgccgagaagatgcaggccctgaagagaaagatggagaaggtgagcaacaagaccagcgacagcttcctgaactaccccagcgacaaggtgaacgtgctgctggaggtgatgaaggacctgcagaagcacgtggacgacttcgacaaggtggtgaccgactacaagaagaacctggacctgaccgagcacttccaggaggtgatcgaggagtgccacttctggtacgaggacgccagcgccaccgtggtgagagtgggcaagtacagcaccgagtgcaagaccaaggaggccgtgaagatcctgcaccagcagttcaacaagttcatcgcccccagcgtgccccagcaggaggagagaatccaggaggccaccgacctggcccagcacctgtacggcctggaggagggccagaagtacatcgagaagatcgtgaccaagcacaaggaggtgctggagagcgtgaccgagctgtgcgagagcctgaccgagctggaggagaagctgaagcagggcgacgtgctgaagatgaaccccaacctggaggacttccactacgactacatcgacctgctgaaggagcccgccaagaacaagcagaccatcttcaacgaggagagaaacaagggccaggtgcaggtggccgacctgctgggcatcaacggcaccggcgaggagagactgccccaggacctgaaggtgagcaccgacaaggagggcggcgtgcaggacctgctgctgcccgaggacatgctgagcggcgaggagtacgagtgcgtgagccccgacgacatcagcctgccccccctgcccggcagccccgagagccccctggcccccagcgacatggaggtggaggagcccgtgagcagcagcctgagcctgcacatcagcagctacggcgtgcaggccggcaccagcagccccggcgacgcccaggagagcgtgctgcccccccccgtggccttcgccgacgcctgcaacgacaagagagagaccttcagcagccacttcgagagaccctacctgcagttcaaggccgagccccccctgaccagcagaggcttcgtggagaagagcaccgccctgcacagaatcagcgccgagcaccccgagagcatgatgagcgaggtgcacgagagagccctgcagcagcacccccaggcccagggcggcctgctggagaccagagagaagatgcacgccgacaacaacttcaccaagacccaggacagactgcacgccagcagcgacgccttcagcggcctgagattccagagcggcaccagcagaggctaccagagacagatggtgcccagagaggagatcaagagcaccagcgccaagagcagcgtggtgagcctggccgaccaggcccccaacttcagcagactgctgagcaacgtgaccgtgatggagggcagccccgtgaccctggaggtggaggtgaccggcttccccgagcccaccctgacctggtgggtggcctacaacgacaagccctag

SEQ ID NO: 250687 - DNA, 2685 bp, Artificial Sequence
  derived and/or modified sequence
agaagccaggtgctgcagacctacgtggccttcctgaagagcagcgaggaggtggagatgcagttccagagcctgaaggagttctacgagaccgagatcccccagaaggagcaggacgacgccaaggccaagcactgcagcgacagcgccgagaagcagtggcagctgttcctgaagaagagcttcatcacccaggacctgggcctggagttcctgaacctgatcaacatggccaaggagaacgagatcctggacgtgaagaacgaggtgtacctgatgaagaacaccatggagaaccagaaggccgagagagaggagctgagcctgctgagactggcctggcagctgaaggccaccgagagcaagcccggcaagcagcagtgggccgccttcaaggagcagctgaagaagaccagccacaacctgaagctgctgcaggaggccctgatgcccgtgagcgccctggacctgggcggcagcctgcagttcatcctggacctgagacagaagtggaacgacatgaagccccagttccagcagctgaacgacgaggtgcagtacatcatgaaggagagcgaggagctgaccggcagaggcgcccccgtgaaggagaagagccagcagctgaaggacctgatccacttccaccagaagcagaaggagagaatccaggactacgaggacatcctgtacaaggtggtgcagttccaccaggtgaaggaggagctgggcagactgatcaagagcagagagctggagttcgtggagcagcccaaggagctgggcgacgcccacgacgtgcagatccacctgagatgcagccaggagaagcaggccagagtggaccacctgcacagactggccctgagcctgggcgtggacatcatcagcagcgtgcagagaccccactgcagcaacgtgagcgccaagaacctgcagcagcagctggagctgctggaggaggacagcatgaagtggagagccaaggccgaggagtacggcagaaccctgagcagaagcgtggagtactgcgccatgagagacgagatcaacgagctgaaggacagcttcaaggacatcaagaagaagttcaacaacctgaagttcaactacaccaagaagaacgagaagagcagaaacctgaaggccctgaagtaccagatccagcaggtggacatgtacgccgagaagatgcaggccctgaagagaaagatggagaaggtgagcaacaagaccagcgacagcttcctgaactaccccagcgacaaggtgaacgtgctgctggaggtgatgaaggacctgcagaagcacgtggacgacttcgacaaggtggtgaccgactacaagaagaacctggacctgaccgagcacttccaggaggtgatcgaggagtgccacttctggtacgaggacgccagcgccaccgtggtgagagtgggcaagtacagcaccgagtgcaagaccaaggaggccgtgaagatcctgcaccagcagttcaacaagttcatcgcccccagcgtgccccagcaggaggagagaatccaggaggccaccgacctggcccagcacctgtacggcctggaggagggccagaagtacatcgagaagatcgtgaccaagcacaaggaggtgctggagagcgtgaccgagctgtgcgagagcctgaccgagctggaggagaagctgaagcagggcgacgtgctgaagatgaaccccaacctggaggacttccactacgactacatcgacctgctgaaggagcccgccaagaacaagcagaccatcttcaacgaggagagaaacaagggccaggtgcaggtggccgacctgctgggcatcaacggcaccggcgaggagagactgccccaggacctgaaggtgagcaccgacaaggagggcggcgtgcaggacctgctgctgcccgaggacatgctgagcggcgaggagtacgagtgcgtgagccccgacgacatcagcctgccccccctgcccggcagccccgagagccccctggcccccagcgacatggaggtggaggagcccgtgagcagcagcctgagcctgcacatcagcagctacggcgtgcaggccggcaccagcagccccggcgacgcccaggagagcgtgctgcccccccccgtggccttcgccgacgcctgcaacgacaagagagagaccttcagcagccacttcgagagaccctacctgcagttcaaggccgagccccccctgaccagcagaggcttcgtggagaagagcaccgccctgcacagaatcagcgccgagcaccccgagagcatgatgagcgaggtgcacgagagagccctgcagcagcacccccaggcccagggcggcctgctggagaccagagagaagatgcacgccgacaacaacttcaccaagacccaggacagactgcacgccagcagcgacgccttcagcggcctgagattccagagcggcaccagcagaggctaccagagacagatggtgcccagagaggagatcaagagcaccagcgccaagagcagcgtggtgagcctggccgaccaggcccccaacttcagcagactgctgagcaacgtgaccgtgatggagggcagccccgtgaccctggaggtggaggtgaccggcttccccgagcccaccctgacctggtgggtggcctacaacgacaagccctag

SEQ ID NO: 250688 - DNA, 4593 bp, Artificial Sequence
  derived and/or modified sequence
atgagcagccagggcagccccagcgtggccctgagcaccaccaccgtgagcagcgtggccgtgcaggccggcgacagcaagatcgtgatcgccgtgatcaagtgcggcaagtgggtgcagctgcagctggccgagagccagcccaacctgctggagatcggcagcagccaggacgagaccaagaagctgctgcacgaccacgagctgctgctggccaagctgaaggccctggaggacagagtgtgggagctgctgcaggaggccgacaagaccgccgaggagaacaaggaccagagccaggtgtacgacgccatggccgagaccctgggcgaggcctgggccgccctggtgagcatgctggagagaagaaccgagctgctgagactgaccagcgagttcttcgagaacgccctggagttcgccatcaagatcgaccaggccgaggacttcctgcagaacacccacgagttcgagagcgccgagagcctgaagagcctgctgcagctgcacgagcaccacaccaaggagctgctggagagaagcctggccctgctgaacaagagccagcagctgaccgacttcatcgagaagttcaagtgcgagggccccaacgtgaaccccgagctgacccagggcgcccacagcagctgcctgaaggtggacagactgctggagctgctgcaggacagaagaagacagctggacaagtacctgaagcagcagtggcaggagctgagccaggtgctgcagatctgccagtgggaccagcaggagaaccaggtgacctgctggttccagaagaccatcagaaacctgcaggagcagagcctgggcagcagcctgagcgacaacgaggacagaatccacaagcaggaggagctgatcatcaaggccaaggagtggaacagcgccgtggagaagctgaagagcgaggccctgagaatcctgctgagcaaggactacgtggagaaggagcacctgcagctgagccaccagaagctgagccagctgcaggaggagttcggccagctgatggtggagagaaacacctggctgaagaaggccaacgagttcttcaacagcgccaacaaggccttcgacgtgctgggcagagtggaggcctacctgaagctgctgaagagcgagggcctgagcctggccgtgctggccgtgagacacgaggagctgcacagaaagatcaaggactgcaccaccgacgccctgcagaagggccagaccctgatcagccaggtggacagctgcagcagccaggtgagcggcatccacgagatgatgggctgcatcaagagaagagtggaccacctgaccgagcagtgcagcgcccacaaggagtacgccctgaagaagcagcagctgaccgccagcgtggagggctacctgagaaaggtggagatgagcatccagaagatcagccccgtgctgagcaacgccatggacgtgggcagcaccagaagcgagagcgagaagatcctgaacaagtacctggagctggacatccaggccaaggagaccagccacgagctggaggccgccgccaagaccatgatggagaagaacgagttcgtgagcgacgagatggtgagcctgagcagcaaggccagatggctggccgaggagctgaacctgttcggccagagcatcgactacagaagccaggtgctgcagacctacgtggccttcctgaagagcagcgaggaggtggagatgcagttccagagcctgaaggagttctacgagaccgagatcccccagaaggagcaggacgacgccaaggccaagcactgcagcgacagcgccgagaagcagtggcagctgttcctgaagaagagcttcatcacccaggacctgggcctggagttcctgaacctgatcaacatggccaaggagaacgagatcctggacgtgaagaacgaggtgtacctgatgaagaacaccatggagaaccagaaggccgagagagaggagctgagcctgctgagactggcctggcagctgaaggccaccgagagcaagcccggcaagcagcagtgggccgccttcaaggagcagctgaagaagaccagccacaacctgaagctgctgcaggaggccctgatgcccgtgagcgccctggacctgggcggcagcctgcagttcatcctggacctgagacagaagtggaacgacatgaagccccagttccagcagctgaacgacgaggtgcagtacatcatgaaggagagcgaggagctgaccggcagaggcgcccccgtgaaggagaagagccagcagctgaaggacctgatccacttccaccagaagcagaaggagagaatccaggactacgaggacatcctgtacaaggtggtgcagttccaccaggtgaaggaggagctgggcagactgatcaagagcagagagctggagttcgtggagcagcccaaggagctgggcgacgcccacgacgtgcagatccacctgagatgcagccaggagaagcaggccagagtggaccacctgcacagactggccctgagcctgggcgtggacatcatcagcagcgtgcagagaccccactgcagcaacgtgagcgccaagaacctgcagcagcagctggagctgctggaggaggacagcatgaagtggagagccaaggccgaggagtacggcagaaccctgagcagaagcgtggagtactgcgccatgagagacgagatcaacgagctgaaggacagcttcaaggacatcaagaagaagttcaacaacctgaagttcaactacaccaagaagaacgagaagagcagaaacctgaaggccctgaagtaccagatccagcaggtggacatgtacgccgagaagatgcaggccctgaagagaaagatggagaaggtgagcaacaagaccagcgacagcttcctgaactaccccagcgacaaggtgaacgtgctgctggaggtgatgaaggacctgcagaagcacgtggacgacttcgacaaggtggtgaccgactacaagaagaacctggacctgaccgagcacttccaggaggtgatcgaggagtgccacttctggtacgaggacgccagcgccaccgtggtgagagtgggcaagtacagcaccgagtgcaagaccaaggaggccgtgaagatcctgcaccagcagttcaacaagttcatcgcccccagcgtgccccagcaggaggagagaatccaggaggccaccgacctggcccagcacctgtacggcctggaggagggccagaagtacatcgagaagatcgtgaccaagcacaaggaggtgctggagagcgtgaccgagctgtgcgagagcctgaccgagctggaggagaagctgaagcagggcgacgtgctgaagatgaaccccaacctggaggacttccactacgactacatcgacctgctgaaggagcccgccaagaacaagcagaccatcttcaacgaggagagaaacaagggccaggtgcaggtggccgacctgctgggcatcaacggcaccggcgaggagagactgccccaggacctgaaggtgagcaccgacaaggagggcggcgtgcaggacctgctgctgcccgaggacatgctgagcggcgaggagtacgagtgcgtgagccccgacgacatcagcctgccccccctgcccggcagccccgagagccccctggcccccagcgacatggaggtggaggagcccgtgagcagcagcctgagcctgcacatcagcagctacggcgtgcaggccggcaccagcagccccggcgacgcccaggagagcgtgctgcccccccccgtggccttcgccgacgcctgcaacgacaagagagagaccttcagcagccacttcgagagaccctacctgcagttcaaggccgagccccccctgaccagcagaggcttcgtggagaagagcaccgccctgcacagaatcagcgccgagcaccccgagagcatgatgagcgaggtgcacgagagagccctgcagcagcacccccaggcccagggcggcctgctggagaccagagagaagatgcacgccgacaacaacttcaccaagacccaggacagactgcacgccagcagcgacgccttcagcggcctgagattccagagcggcaccagcagaggctaccagagacagatggtgcccagagaggagatcaagagcaccagcgccaagagcagcgtggtgagcctggccgaccaggcccccaacttcagcagactgctgagcaacgtgaccgtgatggagggcagccccgtgaccctggaggtggaggtgaccggcttccccgagcccaccctgacctggtacaagaagggccagaagctgagcgccgacggccacctgcaggtgctgcacaaggagaccagacacagcgtgttcatccccaaggtgtgcaaggccgacgccggcctgtacgtggccagagcccagaacagcagcggcgccctgagcagcaacgtgatcctgcacgtgaccggcaactgcagactgcccatcaccagagtgaactggatcaccctgtgcgtggtgtacgtgagcgtgagcctgatgtactggctgctgacccagtag

SEQ ID NO: 250689 - DNA, 3786 bp, Artificial Sequence
  derived and/or modified sequence
agatcgcaagtcctgcaaacttacgtggcatttctgaagtcatcagaggaggtagagatgcagtttcagagcttaaaagaattttatgaaaccgaaatccctcagaaggagcaggatgatgctaaagccaagcattgttctgactcggctgagaagcagtggcagctatttttaaagaagagttttataacacaagatctagggcttgagttccttaatttaataaatatggcaaaagagaacgagatattagatgtgaaaaatgaagtgtacctcatgaagaacaccatggaaaaccagaaagcagaacgggaagaacttagcctccttcggctggcatggcagcttaaagccacggaaagcaagcctggaaaacagcagtgggcggcattcaaagagcaacttaaaaagacttctcacaacttaaaacttcttcaggaagcacttatgcctgtgtctgcacttgacctcggagggagcctccagttcattttagatctacgacaaaaatggaatgacatgaagcctcagttccagcaattgaatgatgaggttcagtacattatgaaagaatcagaggagttaactggcagaggagcccctgtaaaagaaaagtctcaacaactgaaggaccttattcacttccatcaaaaacagaaagagagaatccaggattacgaggatatcctgtacaaggtggtccagttccatcaagtcaaggaagagctgggacgtctcatcaaatcaagagagctggagtttgtagagcagccgaaggaactgggtgatgcccatgatgtgcagattcacctccggtgctctcaggaaaagcaagcccgtgtagaccatctccacagactggccctttccttaggagtcgacatcatctcatcagtgcagcggcctcactgctctaatgtttctgcaaagaacctacagcagcagctggagctccttgaggaggacagcatgaagtggcgtgccaaagctgaggagtatggacggaccctgtcccgtagtgtggagtactgcgccatgagagacgagataaatgagctcaaagactcattcaaagatatcaaaaagaaattcaataatttgaagtttaattacactaagaaaaatgaaaaatctcggaatctgaaggcgcttaaatatcaaattcagcaagttgatatgtatgctgaaaaaatgcaggctttgaaaaggaaaatggaaaaagttagtaataaaacctctgattctttcttaaattatccaagtgataaagttaatgtccttttggaagtcatgaaggatttgcaaaaacatgtggatgactttgacaaagttgtgacagattacaagaagaatttggacctgactgagcatttccaggaggtgatagaagagtgtcatttttggtacgaagatgcaagtgccacagttgtaagagttggaaaatattccacagagtgcaagacaaaggaagctgtgaaaattctccaccagcagtttaataagtttattgcaccctcagtgccgcagcaagaagaaaggattcaggaggccactgaccttgctcagcacttatatggtttggaagaaggacagaaatatattgagaaaatagtgacaaaacacaaagaggttcttgaatctgtgactgaattatgtgagtccctcacagagctcgaagaaaaactgaagcagggagatgttttaaagatgaatccgaatttggaagacttccattatgattacattgacttgctaaaggaaccagcaaaaaataagcagacaatattcaatgaagaaaggaataaggggcaggtgcaggtggcagatcttttgggcatcaatggaacaggggaagagcgactaccacaagacctgaaggtgtccactgacaaggagggtggcgtccaggacctgctcctgcctgaagacatgctctcaggggaagaatatgagtgtgtctcacctgatgacatctccttgcctcctctcccaggaagccctgagtcccctcttgcaccatctgacatggaggtggaagagcctgtcagctcctccctcagccttcacataagcagctatggggtgcaggctgggaccagcagcccaggggatgcccaggaatctgttcttccaccacctgttgcctttgcggatgcatgcaatgataagagagaaacattttcaagtcattttgagaggccttacctccagttcaaagctgagcccccactaacctccagaggattcgtggaaaagagtactgccttacacagaatcagtgctgaacatccagagagcatgatgagtgaagtgcatgagagagctttacagcagcaccctcaggctcagggtggtttgctagaaacacgggagaaaatgcatgctgataataacttcactaaaacccaagataggctgcatgcttcctctgatgcattctcgggcctcaggtttcaatcaggcaccagcaggggctatcagaggcaaatggttcctcgagaagagattaaaagcacatcagcaaagagcagcgtggtcagcctagctgaccaggcacctaatttctccaggctcctgtctaatgtaactgtcatggaaggttctccagtgactttggaagttgaagtaacaggatttccagagcctacactgacatggtgggtagcctataatgacaagccataaatggaaacaaattcaatcacagagaaaaatcattctgtgagcactaactgaaaggtttagggctagctgattaatattctatgacactgcaactctgcatgattcaatctcacatcagacccctctcattttagtagcagcatagttaatacctttaagaaaaataaaaggtaaccatataaagtactaataatttaacaaatttccaaagcactgtaggttggttgtgcttgttttcttctgtgtttaacattccacatttctaaagattgtgggttgaaattattttttattgtctatttccatataagcatggcatctgcttgctttaactacctttatgcaattgaaaatataagaatttgtttttatttccctttactctcatttacctctttcatctttttcctctttccaacagagtcacacgtgtcatctttgtaacattttgttttactaggatttctttttacaaattttttcaatgtgagaggtggaatataaatatttctgtcacagttcctccaggtgacaggcaataaactcatttttgaaaggtagtataataactgagctgtaaacaatatgatttcactctggagacatcattattttttagcctctttttttcagtaaaagcaaactgtagaatactggttttggatcacctactattggtaacaaaagcagttctttctcaatatgtgggttacttttaaacatttagaaaattctcatccttaagtaaatttatttcaggacaaagttacaaatctgcaaaagccagtttatacttataaactaagattaagtaaaatagcatttattgatcacaatgtttcagtagatattaaatgatcagtttcagttattgtgtgtgcccattgatggtacttgaaatatgaaccagttatctaaggaacttatgagaaaactttggtttctcaaattatttaaaaaactgcacttgtgctatattagtgcagtcacttttgctttttgttttattgtctttactgttgcatgttttttacaaatcaagagtgtcatatttatgaattttaaagatatttaattcattattaaatctcagttcactcc

SEQ ID NO: 250690 - DNA, 3795 bp, Artificial Sequence
  derived and/or modified sequence
agatcgcaagtcctgcaaacttacgtggcatttctgaagtcatcagaggaggtagagatgcagtttcagagcttaaaagaattttatgaaaccgaaatccctcagaaggagcaggatgatgctaaagccaagcattgttctgactcggctgagaagcagtggcagctatttttaaagaagagttttataacacaagatctagggcttgagttccttaatttaataaatatggcaaaagagaacgagatattagatgtgaaaaatgaagtgtacctcatgaagaacaccatggaaaaccagaaagcagaacgggaagaacttagcctccttcggctggcatggcagcttaaagccacggaaagcaagcctggaaaacagcagtgggcggcattcaaagagcaacttaaaaagacttctcacaacttaaaacttcttcaggaagcacttatgcctgtgtctgcacttgacctcggagggagcctccagttcattttagatctacgacaaaaatggaatgacatgaagcctcagttccagcaattgaatgatgaggttcagtacattatgaaagaatcagaggagttaactggcagaggagcccctgtaaaagaaaagtctcaacaactgaaggaccttattcacttccatcaaaaacagaaagagagaatccaggattacgaggatatcctgtacaaggtggtccagttccatcaagtcaaggaagagctgggacgtctcatcaaatcaagagagctggagtttgtagagcagccgaaggaactgggtgatgcccatgatgtgcagattcacctccggtgctctcaggaaaagcaagcccgtgtagaccatctccacagactggccctttccttaggagtcgacatcatctcatcagtgcagcggcctcactgctctaatgtttctgcaaagaacctacagcagcagctggagctccttgaggaggacagcatgaagtggcgtgccaaagctgaggagtatggacggaccctgtcccgtagtgtggagtactgcgccatgagagacgagataaatgagctcaaagactcattcaaagatatcaaaaagaaattcaataatttgaagtttaattacactaagaaaaatgaaaaatctcggaatctgaaggcgcttaaatatcaaattcagcaagttgatatgtatgctgaaaaaatgcaggctttgaaaaggaaaatggaaaaagttagtaataaaacctctgattctttcttaaattatccaagtgataaagttaatgtccttttggaagtcatgaaggatttgcaaaaacatgtggatgactttgacaaagttgtgacagattacaagaagaatttggacctgactgagcatttccaggaggtgatagaagagtgtcatttttggtacgaagatgcaagtgccacagttgtaagagttggaaaatattccacagagtgcaagacaaaggaagctgtgaaaattctccaccagcagtttaataagtttattgcaccctcagtgccgcagcaagaagaaaggattcaggaggccactgaccttgctcagcacttatatggtttggaagaaggacagaaatatattgagaaaatagtgacaaaacacaaagaggttcttgaatctgtgactgaattatgtgagtccctcacagagctcgaagaaaaactgaagcagggagatgttttaaagatgaatccgaatttggaagacttccattatgattacattgacttgctaaaggaaccagcaaaaaataagcagacaatattcaatgaagaaaggaataaggggcaggtgcaggtggcagatcttttgggcatcaatggaacaggggaagagcgactaccacaagacctgaaggtgtccactgacaaggagggtggcgtccaggacctgctcctgcctgaagacatgctctcaggggaagaatatgagtgtgtctcacctgatgacatctccttgcctcctctcccaggaagccctgagtcccctcttgcaccatctgacatggaggtggaagagcctgtcagctcctccctcagccttcacataagcagctatggggtgcaggctgggaccagcagcccaggggatgcccaggaatctgttcttccaccacctgttgcctttgcggatgcatgcaatgataagagagaaacattttcaagtcattttgagaggccttacctccagttcaaagctgagcccccactaacctccagaggattcgtggaaaagagtactgccttacacagaatcagtgctgaacatccagagagcatgatgagtgaagtgcatgagagagctttacagcagcaccctcaggctcagggtggtttgctagaaacacgggagaaaatgcatgctgataataacttcactaaaacccaagataggctgcatgcttcctctgatgcattctcgggcctcaggtttcaatcaggcaccagcaggggctatcagaggcaaatggttcctcgagaagagattaaaagcacatcagcaaagagcagcgtggtcagcctagctgaccaggcacctaatttctccaggctcctgtctaatgtaactgtcatggaaggttctccagtgactttggaagttgaagtaacaggatttccagagcctacactgacatggtgggtagcctataatgacaagccataaatggaaacaaattcaatcacagagaaaaatcattctgtgagcactaactgaaaggtttagggctagctgattaatattctatgacactgcaactctgcatgattcaatctcacatcagacccctctcattttagtagcagcatagttaatacctttaagaaaaataaaaggtaaccatataaagtactaataatttaacaaatttccaaagcactgtaggttggttgtgcttgttttcttctgtgtttaacattccacatttctaaagattgtgggttgaaattattttttattgtctatttccatataagcatggcatctgcttgctttaactacctttatgcaattgaaaatataagaatttgtttttatttccctttactctcatttacctctttcatctttttcctctttccaacagagtcacacgtgtcatctttgtaacattttgttttactaggatttctttttacaaattttttcaatgtgagaggtggaatataaatatttctgtcacagttcctccaggtgacaggcaataaactcatttttgaaaggtagtataataactgagctgtaaacaatatgatttcactctggagacatcattattttttagcctctttttttcagtaaaagcaaactgtagaatactggttttggatcacctactattggtaacaaaagcagttctttctcaatatgtgggttacttttaaacatttagaaaattctcatccttaagtaaatttatttcaggacaaagttacaaatctgcaaaagccagtttatacttataaactaagattaagtaaaatagcatttattgatcacaatgtttcagtagatattaaatgatcagtttcagttattgtgtgtgcccattgatggtacttgaaatatgaaccagttatctaaggaacttatgagaaaactttggtttctcaaattatttaaaaaactgcacttgtgctatattagtgcagtcacttttgctttttgttttattgtctttactgttgcatgttttttacaaatcaagagtgtcatatttatgaattttaaagatatttaattcattattaaatctcagttcactccaaagaaaaa

SEQ ID NO: 250691 - DNA, 9127 bp, Artificial Sequence
  derived and/or modified sequence
agtgtgagctgagctctttccctgaatgaatccaagtaaccctggccttctgaaatgaccagcagacacacaactgtccagaggctgcccaaagtataaactctggttctaaagtaccatgtccagccaaggaagtcctagtgttgcgctttctacgacgacagtcagttcagttgctgtgcaggctggggactccaaaatcgttatagctgtcataaagtgtggcaaatgggtacaacttcaactggctgaatcacagcccaatcttctagaaattggcagcagtcaagatgaaaccaaaaaacttcttcatgatcatgaacttcttttggccaagctcaaggctttggaagatcgggtatgggaactcttgcaggaagcagacaagacagctgaagagaacaaggatcagagtcaggtctatgatgccatggccgagactctgggtgaagcatgggcagctctggtgtccatgcttgaaagaagaacagagctccttaggttgacttctgaattttttgaaaatgccttagagtttgctattaaaatagaccaagctgaagatttcctccagaatactcatgagtttgagagtgctgagtccttaaaatcacttcttcagcttcatgaacatcatactaaagaactcttggaacggtctttagcccttttaaacaaaagtcaacaactcactgacttcatagaaaaattcaagtgtgaaggacctaatgtgaatcctgagttgactcagggagctcatagcagctgtctgaaggttgaccgccttcttgaacttctacaagacaggagaagacaactagacaagtacttgaagcaacagtggcaagaattgagtcaagttctgcagatatgtcagtgggaccaacaagaaaaccaggttacttgttggtttcagaaaactataagaaatttacaggaacaaagtctaggttcatcactttcagacaatgaggatcgaattcataagcaagaggaactgataataaaagcaaaggaatggaattctgctgttgagaagctgaagagtgaggcactgagaattctgctgtcaaaggactacgtggagaaagaacacctccagctctctcaccagaaactcagtcagcttcaagaagaatttggtcaactcatggtggaaaggaatacctggttaaagaaggcgaatgaattttttaacagtgctaacaaggcatttgatgtacttggaagagttgaagcttaccttaagctccttaaatcagagggtttaagtctggctgttttggcagtgaggcatgaggaattacacagaaaaattaaagactgcacaactgatgctttgcaaaagggacaaaccttaatcagccaagtagactcctgcagctctcaggtgtccggcatccatgagatgatggggtgcattaagagacgagtggatcatctgaccgaacagtgttcagcgcacaaggaatatgctcttaagaaacaacaactaacagcctcagtggagggttacctacggaaggtggaaatgtcaattcagaaaatcagtccagtactttctaatgcaatggatgttggttctacccgttctgaatcagagaagattttgaataaatatctggaactagatatccaagctaaggagacatcacatgaattagaagcagctgcaaaaaccatgatggagaaaaatgaatttgtatctgatgaaatggtatcactttcctctaaagctagatggctagcagaagaattaaacctatttggccaaagcattgactatagatcgcaagtcctgcaaacttacgtggcatttctgaagtcatcagaggaggtagagatgcagtttcagagcttaaaagaattttatgaaaccgaaatccctcagaaggagcaggatgatgctaaagccaagcattgttctgactcggctgagaagcagtggcagctatttttaaagaagagttttataacacaagatctagggcttgagttccttaatttaataaatatggcaaaagagaacgagatattagatgtgaaaaatgaagtgtacctcatgaagaacaccatggaaaaccagaaagcagaacgggaagaacttagcctccttcggctggcatggcagcttaaagccacggaaagcaagcctggaaaacagcagtgggcggcattcaaagagcaacttaaaaagacttctcacaacttaaaacttcttcaggaagcacttatgcctgtgtctgcacttgacctcggagggagcctccagttcattttagatctacgacaaaaatggaatgacatgaagcctcagttccagcaattgaatgatgaggttcagtacattatgaaagaatcagaggagttaactggcagaggagcccctgtaaaagaaaagtctcaacaactgaaggaccttattcacttccatcaaaaacagaaagagagaatccaggattacgaggatatcctgtacaaggtggtccagttccatcaagtcaaggaagagctgggacgtctcatcaaatcaagagagctggagtttgtagagcagccgaaggaactgggtgatgcccatgatgtgcagattcacctccggtgctctcaggaaaagcaagcccgtgtagaccatctccacagactggccctttccttaggagtcgacatcatctcatcagtgcagcggcctcactgctctaatgtttctgcaaagaacctacagcagcagctggagctccttgaggaggacagcatgaagtggcgtgccaaagctgaggagtatggacggaccctgtcccgtagtgtggagtactgcgccatgagagacgagataaatgagctcaaagactcattcaaagatatcaaaaagaaattcaataatttgaagtttaattacactaagaaaaatgaaaaatctcggaatctgaaggcgcttaaatatcaaattcagcaagttgatatgtatgctgaaaaaatgcaggctttgaaaaggaaaatggaaaaagttagtaataaaacctctgattctttcttaaattatccaagtgataaagttaatgtccttttggaagtcatgaaggatttgcaaaaacatgtggatgactttgacaaagttgtgacagattacaagaagaatttggacctgactgagcatttccaggaggtgatagaagagtgtcatttttggtacgaagatgcaagtgccacagttgtaagagttggaaaatattccacagagtgcaagacaaaggaagctgtgaaaattctccaccagcagtttaataagtttattgcaccctcagtgccgcagcaagaagaaaggattcaggaggccactgaccttgctcagcacttatatggtttggaagaaggacagaaatatattgagaaaatagtgacaaaacacaaagaggttcttgaatctgtgactgaattatgtgagtccctcacagagctcgaagaaaaactgaagcagggagatgttttaaagatgaatccgaatttggaagacttccattatgattacattgacttgctaaaggaaccagcaaaaaataagcagacaatattcaatgaagaaaggaataaggggcaggtgcaggtggcagatcttttgggcatcaatggaacaggggaagagcgactaccacaagacctgaaggtgtccactgacaaggagggtggcgtccaggacctgctcctgcctgaagacatgctctcaggggaagaatatgagtgtgtctcacctgatgacatctccttgcctcctctcccaggaagccctgagtcccctcttgcaccatctgacatggaggtggaagagcctgtcagctcctccctcagccttcacataagcagctatggggtgcaggctgggaccagcagcccaggggatgcccaggaatctgttcttccaccacctgttgcctttgcggatgcatgcaatgataagagagaaacattttcaagtcattttgagaggccttacctccagttcaaagctgagcccccactaacctccagaggattcgtggaaaagagtactgccttacacagaatcagtgctgaacatccagagagcatgatgagtgaagtgcatgagagagctttacagcagcaccctcaggctcagggtggtttgctagaaacacgggagaaaatgcatgctgataataacttcactaaaacccaagataggctgcatgcttcctctgatgcattctcgggcctcaggtttcaatcaggcaccagcaggggctatcagaggcaaatggttcctcgagaagagattaaaagcacatcagcaaagagcagcgtggtcagcctagctgaccaggcacctaatttctccaggctcctgtctaatgtaactgtcatggaaggttctccagtgactttggaagttgaagtaacaggatttccagagcctacactgacatggtacaagaagggccagaaattgtctgcagatgggcacttacaggttttacacaaggagacaaggcattcggtgttcattccaaaggtatgcaaggcagacgcaggcctctatgtggctcgggcccaaaactctagcggcgctctctcttccaatgtcatcctccacgtgacaggtaactgcaggctgccaatcacaagagtaaactggataaccctgtgtgtcgtctatgttagtgtgtccctaatgtactggctcctcacacaataactgtggtgttggcaccaatggacatcattctcatgtgcctaaagaaaagtgccgccgtttatcttcctgcacctcctgcaaagcatctcccaccaagtgtatctccagtctgatcaccatacttgtttggctaataccactgctaggtgaaataatcaaattttctggagcgtttaatatatttgagaagcttggtaaattatctgtagtggataagaacagatttttgtactctagaaacagatgttttcaacataatatgcagcaaaattattctatgcctattccctcctaatttaagggcgtgcagatgaaggctgacatcggcatagaaatgtgctaaatttcaaatatggttgttcaataatatatttttaattgtattttaaaacatccctttgtagggaatatcagtagaactattgaattgatgttgtatttttgcattagctgtcctttaattttgctttccatgtcttgatcttgttaccgaaatgcattctgtgtaatttcaacgtagactacgttcctgagtctgatgatgtcattgtaaataatcattcctcatgttgctctcacgggtttgacattggaggatagatgtgccatcaactttaaatagagtttccatcttttgtcagctctgcatgtcatacagcaagatggaacacaggttgcaagaaagaaccaacgttattcctgacattctattgatgtgttttgagcagcaatgtgtaaccaggtgtttctgcttctaatcttgattctgctgatgaccatttttatactttatggcaaagcctcattgcctcagtttcctgtctggaaaatgagttcatcatctacctcttgggcaattgagagttttcattttgtgtcttttaaacatctggaaaatggaaaacactgagggctaaggataatgatattgtttaatgtaatttgtcatcagaccggcctcctgctcactatttctttttttttagatgctgtttttttagaatattaaattaaaggagtgctgttaatatgtaatcttcaactagttccatggaggaaagtgatgttttatgaattagagcttaaattcctatctaatttctgaagactgcattcttttcaaagacttgaaattaaactcaggaggatacattttgtttgttctagggggaaacgtaatagaatggtatgagatgaattctatccttttacaataattattactataatattgaagtattctatgcctttctgaaacactttattcagaaaagatcattttttggcttccttttaaaaataagcttgaagtagggaagcatttgcttcttagattttaaatgtagtcttattatgctgaggaaaatctttagttgaaagaataattcattacagatttttgatgaagggaagaaattaattatgttgctggaagactgtctacaaataatcaaaatatttaaatgtaatgtattcaagttgttattaaaaagttactgaatgttatctgaagatgtgaaatgtgtagtcaagtaaaaagttggcgtatactttcttgggctgcatatccaatttaattaaaaaattaaatctcagtttccttctaaattttgatagaactatattaaaagcttgtatacacagcattctaggaaatttctcttaactatcttttttttgttttttttgttttttttttttttttttgagaaagagtcttgctctcttgcccagtgcagtggtgccatcttggctcactgcaacctccacctccgggttcaagcaattctcctgcttcagcctcctgagtagctaggattacaggcatgcctacctaatatttacatttttagtagaaaccaggtttcaccatgttggccaggctgggcctcagcctcccaaagtgccaggattacaggtatgagccaccatagccggcctcttgtatcctttttgtccaatttcaaataatgtgtgaatcttgcctaactgctgttgcccacgttgaagctaaagagtaaaaacctattcatgaacaaagaaggcaggtgagacccggtaacaaactgtctctcttcccactttctctttcttattaatttggcaggatctcccttcccattttgtcaacatggttgaatttgtgtgttggggttgttagggcatgggaattcctggtttgctttctctattgcatgcttgttcatgttaactctttggggagcagaatgagatacatatgcatccatggttatgatggaaaaaagcatgcaaaatccatttttagagagagagagaaagagaaaggtgggggtgggggagcacaaagatcagaagagtactatgctgatattcaagatatagtacagatagctttctgtgtacctatccatctacctattcatctgggctattgattgactcccacagcagtaaagaataattacgcagttattcttctggttatgttttaatttcaaaaagttaagtgtgattttcctttttgctgggatttctgtcttgagcaaataattattcttatgaaagtatcaattgcagttactggttaaaaatgtaagacctaggaaatttaagtgttgtttctattttaaggtatatacataatttataaccatttacttctagagaaaatcctgaatggttagtaatatcaaaacattttcaacaagaaaactaaaatgaaaagaaagtttaaaaattacatgtgttacagctcttttagaatttgtctagcaggttttctggtgaaaattaaactcaagattttcaccagaaaacgttttaaaacttctaaactcttaaacaaattataaatacttgatactttgaagaactgcaaaacaaaatgtttttaagttttcataaggcaaaatcattgagttttccagctttgattttccaataaaaggatgtataaatatttggtggtagtttttcacactcaattccaagagaaatttactgtaggaatctgtacatttgaatctctgaatattctatgatatttaaaatatttgaacaagatgcagaaaattttttagctatattaatcaataatggtaacctctatcactcataatcaagacacatacttaaaatagatgactacaagacccttctaactgctttgctcaaatttaaatttcctcaagtagttcatagaccctttacaacctggcctcccctctctggcctcggtttgatcccctcctattacccccaacccctagtaaagtgacatttaacttcagggttttaacatatcatgctcttctctccagccctttcttcctataactctcttactatcttcaccaccctatcttcatgtgacttaactcttgcttatgttccagttctgctgagacacaacttcccctgggaagcctcctgacccatcaagtccagagtagatggtcctgccatgtgcactgtcagcacctgcactgcccagccacgcccctgaatatacacaaaggaatcgcaggtttgagcatcagtctcctctggctaggctgtaagaaccttatcagcaggattcatgacagccctgttgtcattgtattgccagtacctaagacacagtcacactcagtaaactcttttgaattgaattgttgccaaaggtaaacaaagataaacctagcttgtttttctcccctttttagagggaggagaggggaaatgtaaaaagacaaagatgattctcccttcttatagacaggagtcaatccgaatcaggccctaacaatgaagcactcatgaaaatctctcacctcatctgcaaaacttgtgtgagaaccctccagaccctctgggctagaccctgattgaaaatttgaatttaaaaatagatgctggctccacggactaaaataatagtaaggaggaaagaggaaaggtccaggattgttgttcctggatcaatattgttccaacattttaaagtgttccaacattttaaaacatatgtacttaggcataaatcatcatccggtatgaggaactggatgcctccactctctatgactaaatccaaactgtcaaaaccagaatttatgtacttctttagaacactacgtaaatgatcaatatttaattgtagctggggctcagtagtctgggctgtgaacagatcttatttgaaaccagtatttcatacaaacttgtaaatataaagaaagccaaatccaagaacttaagagtatttgaattccaaatgaagaaaggaaagaatatcttattttgttctgctttatgtttgtctttattcatgaccatttcttactaaaaatcaccatctgaagcttttgaaactcctgttgtatgcacagcattttaagtgcagccatgaaataagttagttgaaacaaaataaaatatctccttccagta

SEQ ID NO: 250692 - DNA, 2628 bp, Artificial Sequence
  derived and/or modified sequence
atgcagttccagagtctcaaggagttttatgagaccgagattcctcagaaggagcaggacgacgcgaaggcaaaacactgctccgatagtgccgagaaacagtggcagctttttctgaagaagtcttttattacacaagatctcggtttggagttcctcaacttgataaatatggctaaggagaatgagatcctggacgtgaaaaacgaggtatacttgatgaagaataccatggaaaaccaaaaggcagagcgcgaggagttgtcattgcttcgtttagcttggcaattgaaagctactgaatctaaaccaggaaagcagcagtgggctgccttcaaggaacaactaaagaagacctctcataacttgaaactacttcaggaggcactgatgccagtgagtgccttggatttggggggctcgctgcagttcatcctggacctgcgacagaaatggaacgatatgaagcctcaattccagcaactaaacgacgaagtacagtacatcatgaaagaatccgaggaactcacaggccgaggagcacctgtgaaggaaaaatcccagcagctcaaagatctgattcacttccaccagaagcagaaagagcgaatacaggactacgaggacatcctttacaaggtcgtgcaattccatcaggtcaaagaggaactggggaggctgatcaaatcacgggaactggaatttgtcgaacagccaaaggagctgggggacgctcatgatgtgcagattcacctcagatgcagccaagagaaacaagcgagagtggatcacctgcacaggttagccttgtcgctcggagttgacatcatttcctccgtgcaacggccgcactgtagtaatgtcagcgcaaagaatttgcaacagcagttagaacttctcgaagaagactcgatgaagtggagggcaaaggctgaggagtatggccggactctgagtaggtcggtggaatactgcgccatgagagatgagattaacgaattgaaggactcgttcaaagatatcaaaaaaaaatttaataaccttaagtttaattacactaagaaaaatgaaaaaagcaggaatttaaaggctctgaaatatcagatccaacaggtagacatgtatgccgagaagatgcaggcccttaagagaaagatggaaaaagtgtcgaataaaaccagtgattcattcctgaactacccctcagacaaggtcaatgtactgctggaggtcatgaaagacctacagaagcacgtggacgatttcgacaaagtcgtaacagactacaaaaagaatctggacctgactgagcactttcaggaggttattgaggagtgtcacttttggtatgaggacgctagtgccaccgttgtaagagtggggaagtacagtacggagtgtaagaccaaagaggcggtaaaaatattgcaccaacagttcaataagttcatcgctccttcggtgccccagcaggaggagcgaatacaggaggctacggaccttgcgcagcatctctatggcttggaggaaggtcagaagtacatagaaaagattgtcactaaacataaggaagttctggaaagcgtcactgagttgtgtgagtccctaacggagttggaagagaagttgaaacagggagatgtactgaagatgaatcccaacctcgaggactttcactatgattatatcgacttactaaaagagcccgcaaagaacaagcagactatttttaatgaggagcgtaataaggggcaggtacaggtggctgatcttcttggcattaatggaacgggggaagagcgtctcccacaagatcttaaggtctcgactgataaggaaggcggagtgcaggatctgctcctgcccgaagatatgttatcaggcgaagagtatgaatgtgtgtctcctgacgatatatcactgccccctttgcctggctctccggaaagtcccctggctcctagtgacatggaagtggaggagcccgtctcatcaagtctgagcttgcacattagtagctatggagttcaggcaggtacctctagtccaggagatgcgcaagaatccgtcttaccaccgcctgtggccttcgcggatgcctgcaatgacaagagagaaaccttttcaagccatttcgagaggccatacctgcaattcaaagctgagccacctctcaccagccggggatttgtagagaagagtactgcactgcatcgcatatccgctgagcacccagaatcaatgatgtcagaagtgcatgaacgggccctacaacagcaccctcaggcacagggcgggttgctcgagactcgcgaaaagatgcacgccgataacaatttcaccaagactcaagaccgcctccatgccagctctgacgccttttccggtttacgcttccagtccggaacctcccgcgggtaccaacgccagatggttccaagagaagagattaagtccacgagcgctaagagcagtgtggtgtcactcgccgatcaggcccctaacttcagtaggttactgtctaacgtaacagttatggaaggcagccccgtgaccctggaggttgaagtcacagggttccccgaacccactctaacatggtgggtggcctacaacgacaagccttag

SEQ ID NO: 250693 - DNA, 2685 bp, Artificial Sequence
  derived and/or modified sequence
aggtcccaggtgctacagacctacgtcgctttcctgaaatcttctgaagaggtcgaaatgcagtttcaaagtcttaaagagttctatgaaacagaaattccgcagaaggagcaggatgacgccaaagcgaaacattgctctgattccgccgagaagcagtggcagctctttctgaaaaaaagcttcattacacaggacctgggcctggaattcctcaatttgatcaacatggcaaaggaaaatgaaatactggatgtgaagaatgaggtttacctgatgaagaataccatggaaaaccagaaggcggagcgtgaggagctgtcactgctgaggcttgcatggcagctgaaggccaccgaatcaaagccgggtaaacagcaatgggcagcattcaaggagcagctaaaaaagacctcccacaacctaaaactgctccaggaagctctaatgccagtatcagctttagatcttggtggatcgctgcagttcatcctagacctgcggcagaaatggaatgacatgaagccccagtttcagcagctcaacgacgaagtccaatacattatgaaggagtcggaagaattgaccggtcgcggcgctcctgtgaaagaaaagagtcagcaacttaaggacttaatccatttccaccagaaacagaaggaaaggatccaggactacgaagacatactatacaaggtcgtccagttccatcaggtgaaagaggaattgggaaggctgatcaaatctagagagctggaattcgtcgagcagccgaaggaactcggggatgcccacgacgtgcaaatacacctgagatgttctcaggagaagcaagcccgtgtcgaccacttgcaccgcttagccctcagcttaggtgtcgacattatcagtagcgtgcagcggccacattgctccaatgtgtcggccaagaatcttcagcagcagctggagttgctggaagaagatagcatgaaatggcgcgctaaagcagaggagtacggcaggactttgagcagatccgtggagtactgtgccatgagagacgagattaacgaactcaaagatagtttcaaggatattaaaaaaaaattcaacaacctgaagttcaattataccaaaaagaatgaaaaatctcgcaacctaaaggccttaaaataccaaatacagcaggttgacatgtacgctgaaaaaatgcaggctttaaagcggaagatggagaaggtgagcaataagacatccgattcctttctcaattacccatcagacaaggtcaatgtgctcctggaagtcatgaaggacctgcagaagcatgtcgatgactttgataaggtggtaacggactacaaaaagaacttagatctaacggagcacttccaagaggtgattgaagagtgccacttctggtatgaggatgccagtgcaacggtggttagagttggcaaatactctactgaatgtaagaccaaggaagctgtgaaaatcctccatcagcagttcaataagttcatcgccccctccgtgccccaacaggaggaaaggattcaagaagccaccgatttagcccaacacctgtatggactggaagagggacagaaatacatagaaaagattgtgaccaaacacaaggaagtcctggagtccgtgaccgaactctgcgagtccctcacggagctggaagagaagctgaagcagggggacgtgctgaaaatgaatcctaatttagaggattttcactatgattacatcgacttgcttaaagagcccgccaagaacaagcaaacaatttttaacgaggagagaaacaaaggacaagtccaggttgccgacttacttgggattaatggcactggcgaggagagactcccacaggacttgaaggtctcaaccgataaggaaggtggggttcaggatttgttgctgcccgaggatatgcttagtggagaggagtacgagtgcgtttcccccgatgatatctcgctgccgccccttccaggctcaccagaaagccccctggcaccgtctgacatggaagtggaggaacccgtgtccagtagtctgtctctgcacatctctagctatggcgtacaggctggcacgtcttctccaggggatgcccaagagtccgttcttccaccacctgtggccttcgccgatgcttgcaatgacaaacgcgaaacattttcctcccacttcgagcggccatacttacagttcaaggcagaacccccactcaccagccgggggttcgtagagaaatccactgctctgcaccggattagcgctgaacatcccgagagtatgatgtcagaggtccacgaaagagctctgcagcagcacccacaggctcagggaggtttgttggagactagagaaaagatgcacgcagacaacaactttactaagacgcaggaccgcctgcacgcatcatctgacgcattcagcggcttaaggtttcagtctggtactagtcgaggatatcaacgacagatggttcctcgggaggagataaaaagcacctcagccaaaagctctgttgtttctctggccgaccaggctccaaatttttcccgattgctgtctaacgtgaccgtcatggagggctccccagtcaccctggaagtagaggtgaccgggtttccagaacccacactgacgtggtgggtggcctacaatgacaaaccatag

SEQ ID NO: 250694 - DNA, 4593 bp, Artificial Sequence
  derived and/or modified sequence
atgtcatcccagggtagcccctcggtcgcactgtctaccacaacggtttcatctgtggccgtgcaagccggggatagcaagatagttatagctgtgatcaaatgcggaaaatgggttcagcttcagctggcagaatcacaacctaacttactggaaattggtagttcccaggatgagacaaagaagctgctgcacgaccatgagttgttgttagctaaactaaaggccctggaagaccgtgtctgggagctgctccaagaggctgacaaaacagccgaggagaacaaagatcagtcccaggtttacgatgccatggcagaaaccctgggagaggcttgggctgcgctggtatccatgctggaaagaaggacagagctgctacgtttgacgtctgagtttttcgaaaatgccttagagttcgctatcaaaatcgaccaggcagaggatttcctgcagaatacacatgagtttgagagcgcagaatcactgaagagcctgctgcagctccacgagcaccacaccaaggagctccttgaacgcagcttagcgctcctgaataagtcccagcaacttacagactttattgagaagtttaagtgcgaagggcctaacgtgaatcctgagctgactcagggtgcccactcttcttgcctcaaggtggaccgcctgctggaactgctgcaggatcgcagaagacagttagataaatatctgaagcagcagtggcaagaactgtcccaggtgctccagatctgccaatgggatcagcaggagaaccaagtgacatgttggttccaaaaaaccattaggaatctgcaggaacagtcattgggttcttcgctgtccgacaacgaagatcgtattcacaaacaagaggaactaatcatcaaggccaaggagtggaactctgcagttgagaaattgaagagcgaagcactcagaatcttgctttcgaaagattacgtggagaaggagcatcttcagctttcccatcaaaaactatctcagctgcaggaagagttcggccagttgatggttgagaggaatacgtggctgaagaaggctaatgagtttttcaactcagcgaataaagcttttgacgtgttgggccgcgtcgaggcctacttgaaattgttaaagtctgaaggcctgagcctcgctgttttggcagtgagacacgaagagctgcaccgcaagatcaaagactgcaccaccgatgccttgcagaaggggcaaactcttatctcccaggtcgatagctgttccagccaagtgagcgggattcacgagatgatgggctgcataaagcgccgcgtagaccatctgaccgagcaatgttctgcacacaaggaatacgctttgaaaaaacaacagctaaccgcaagcgtagaaggatatctgcgaaaagttgaaatgtctatacagaagatctctcctgtcctgtcaaatgccatggacgtcggttccacgcggtctgaatcggaaaagatcctgaacaagtacctggaactcgatattcaggccaaggaaactagccacgagctggaagctgccgcaaagacaatgatggagaagaacgaattcgtctctgatgagatggtctctctgtcatccaaggcccggtggttggcggaagagctcaacctgtttggccagtctatcgactatagatcgcaagtcctacagacctacgtggctttcctgaaatctagtgaagaggtagaaatgcaattccagtccctgaaggaattttacgagaccgagattccgcagaaggagcaggacgatgccaaagcgaaacattgctcggattcagccgaaaaacagtggcagctttttctaaagaagtcctttatcacacaggatttaggcttggaattcttgaatctgataaacatggccaaggaaaacgagattttggatgtgaaaaacgaagtgtacctgatgaaaaataccatggagaatcagaaggctgagagagaagaattgtctctgcttcggttggcttggcaattaaaggccacagagagcaagcccggcaaacagcagtgggcagcatttaaggaacagttaaaaaaaacaagccataatctgaaattgctccaagaggctctcatgcctgtgagtgccctcgatttggggggctcccttcaattcatacttgacctcagacaaaaatggaatgatatgaaacctcaatttcagcagcttaatgatgaagtgcagtacatcatgaaagaaagcgaggagctaaccggccggggggccccagtgaaagagaagtctcagcagctcaaagacctcatccatttccaccaaaagcagaaggagagaatccaggattacgaggatattttatataaggtcgtccagtttcaccaggttaaagaagaactcggccgcttgattaagagcagggaattggagttcgtggaacagccaaaagagctgggagacgcccatgatgtccagattcacctgaggtgcagtcaggaaaaacaggcccgagtggatcatctgcaccgactagccttatctctcggggtagatattatcagttccgtccagcgtccgcactgctctaatgttagcgccaaaaatttacagcagcaactcgagttgcttgaggaggatagtatgaaatggagggctaaggccgaggagtacggtcgcaccctgagtaggagcgttgaatactgcgccatgcgggatgaaattaatgaactgaaagacagttttaaggatattaagaagaaatttaataacctgaaattcaattacaccaagaaaaacgaaaagtcacggaacctgaaagcgctgaaataccagatacagcaagtggatatgtatgcggagaagatgcaggcattgaagaggaagatggagaaagtttcaaacaagacttctgatagtttcctgaattatccaagcgataaagttaatgtactgctcgaggtgatgaaggacctgcagaagcacgtggatgactttgataaggtggtcacagactataagaagaacttggatttgacagagcactttcaggaagtcattgaggaatgccacttctggtacgaagacgcctctgctacagtcgtgcgggtgggtaagtacagtacagagtgcaagaccaaggaagcagtaaaaattcttcaccagcagtttaacaagtttatcgcgccatctgtgccacagcaagaggagcgtattcaagaagccaccgatttagctcagcatctctacggactggaggaagggcagaagtacatagagaagattgttactaagcacaaagaagtgcttgagagcgtgaccgaactttgcgagagccttactgagttagaggagaagctgaaacagggggatgttttgaaaatgaaccctaatctggaagatttccattacgactacattgacctcctcaaagaacccgcgaagaacaagcagacaattttcaacgaggagagaaataaaggccaagtgcaagttgccgatttgcttggaattaatgggaccggagaggaacgcctgcctcaagacctgaaagtctcgacggataaggaaggcggagtgcaggatttactattacctgaggacatgctgtctggtgaggagtacgaatgcgtcagtccagacgatatctccctgcccccactacccggcagccctgagtctcctctggccccaagcgatatggaagtggaagagcccgtttccagcagtctgtcactgcatatctctagttatggcgtgcaggccgggacctcctctcctggcgacgctcaggaatcggtgcttccgccaccggtagcgttcgcagacgcttgtaacgataagagagagaccttctcgtcgcacttcgaaagaccgtatttgcagttcaaagcagaacctcctctaaccagccgtggcttcgtcgagaaatccaccgcactacacaggatttccgctgagcaccccgaaagcatgatgtccgaggtgcacgagagggcactgcaacagcacccgcaggcacagggcgggcttttggagacgagggaaaaaatgcacgcagacaacaacttcactaaaacccaggaccggctccacgcgagctccgacgcattcagcggcctcaggtttcaatccggcacatcgcgtgggtatcagaggcagatggtgcctcgggaggaaatcaaaagcacatctgcgaagagcagcgtggtgtcattggccgaccaagctcctaattttagccggctgctcagcaatgtgactgttatggaggggagcccagtaactcttgaagtagaagtaactggctttcctgagcctaccctaacttggtacaaaaaaggacagaaactttcggcggacgggcacttgcaggtgcttcataaggagacgagacactccgtgtttatacccaaggtgtgcaaagctgatgcaggactttatgttgcaagggcacagaattcttcaggtgccctgagctcaaatgtgatactccacgtgaccggtaattgtaggttacctatcacccgggtgaactggattacactgtgcgtcgtgtacgtttcggtgagcttgatgtattggctgttgacccagtag

SEQ ID NO: 250695 - DNA, 2628 bp, Artificial Sequence
  derived and/or modified sequence
atgcagttccagagcctgaaggagttctatgaaacagagatcccccagaaggagcaggatgatgccaaggccaagcactgcagcgacagcgctgagaagcagtggcagctgttcctgaagaagagcttcatcacccaggacctgggcctggagttcctgaacctgatcaacatggccaaggaaaatgagatcctggatgtgaagaatgaggtgtacctgatgaagaacaccatggagaaccagaaggccgagcgggaggagctgagcctgctgcggctggcctggcagctgaaggccacagagagcaagccaggcaagcagcagtgggccgccttcaaggagcagctgaagaagaccagccacaacctgaagctgctgcaggaggccctgatgcctgtgtctgccctggacctgggcggcagcctgcagttcatcctggacctgcggcagaagtggaatgacatgaagccccagttccagcagctgaatgatgaggtgcagtacatcatgaaggagagcgaggagctgaccggccgcggggcccctgtgaaggagaagagccagcagctgaaggacctgatccacttccaccagaagcagaaggagcgcatccaggactatgaggacatcctgtacaaggtggtgcagttccaccaggtgaaggaggagctgggccgcctcatcaagagccgggagctggagtttgtggagcagcccaaggagctgggagatgcccatgatgtgcagatccacctgcgctgcagccaggagaagcaggcccgggtggaccacctgcaccggctggccctgagcctgggcgtggacatcatcagctctgtgcagaggccccactgcagcaatgtgtctgccaagaacctgcagcagcagctggagctgctggaggaggacagcatgaagtggagggccaaggccgaggagtatggccgcaccctgagccgctctgtggagtactgtgccatgagagatgagatcaatgagctgaaggacagcttcaaggacatcaagaagaagttcaacaacctgaagttcaactacaccaagaagaatgagaagagcaggaacctgaaggccctgaagtaccagatccagcaggtggacatgtatgcagagaagatgcaggccctgaagaggaagatggagaaggtgagcaacaagaccagtgacagcttcctgaactaccccagcgacaaggtgaatgtgctgctggaggtgatgaaggacctgcagaagcacgtggatgactttgacaaggtggtgacagactacaagaagaacctggacctgacagagcacttccaggaggtgattgaggagtgccacttctggtatgaagatgccagcgccaccgtggtgcgggtgggcaagtacagcacagagtgcaagaccaaggaggccgtgaagatcctgcaccagcagttcaacaagttcatcgcccccagcgtgccccagcaggaggagcgcatccaggaggccacagacctggcccagcacctgtatggcctggaggagggccagaagtacatcgagaagatcgtgaccaagcacaaggaggtgctggagagcgtgacagagctgtgtgagagcctgacagagctggaggagaagctgaagcagggagatgtgctgaagatgaaccccaacctggaggacttccactatgactacatcgacctgctgaaggagcccgccaagaacaagcagaccatcttcaatgaggagagaaataaaggccaggtgcaggtggccgacctgctgggcatcaatggaactggagaggagcggctgccccaggacctgaaggtgtccacagacaaggagggcggcgtgcaggacctgctgctgcctgaggacatgctgtctggagaggagtatgaatgtgtgtccccagatgacatcagcctgccccccctgcccggcagccctgagagccccctggcccccagcgacatggaggtggaggagcctgtgagcagcagcctgagcctgcacatcagcagctatggagtgcaggccggcaccagcagccctggagatgcccaggagagcgtgctgcccccacctgtggcctttgctgatgcctgcaatgacaagcgggagaccttcagcagccactttgagcggccctacctgcagttcaaggccgagccccccctgaccagccggggctttgtggagaagagcacagccctgcaccgcatctctgctgagcaccctgagagcatgatgtctgaggtgcatgagcgggccctgcagcagcacccccaggcccagggcggcctgctggagacccgggagaagatgcacgccgacaacaacttcaccaagacccaggaccggctgcacgccagcagtgatgccttcagcggcctgcgcttccagagcggcaccagccggggctaccagaggcagatggtgccccgggaggagatcaagagcaccagcgccaagagctctgtggtgtccctggccgaccaggcccccaacttcagccggctgctgagcaatgtgacagtgatggagggcagccctgtgaccctggaggtggaggtgacaggcttccctgagcccaccctgacctggtgggtggcctacaatgacaagccctag

SEQ ID NO: 250696 - DNA, 2685 bp, Artificial Sequence
  derived and/or modified sequence
cgcagccaggtgctgcagacctacgtggccttcctgaagagcagcgaggaggtggagatgcagttccagagcctgaaggagttctatgaaacagagatcccccagaaggagcaggatgatgccaaggccaagcactgcagcgacagcgctgagaagcagtggcagctgttcctgaagaagagcttcatcacccaggacctgggcctggagttcctgaacctgatcaacatggccaaggaaaatgagatcctggatgtgaagaatgaggtgtacctgatgaagaacaccatggagaaccagaaggccgagcgggaggagctgagcctgctgcggctggcctggcagctgaaggccacagagagcaagccaggcaagcagcagtgggccgccttcaaggagcagctgaagaagaccagccacaacctgaagctgctgcaggaggccctgatgcctgtgtctgccctggacctgggcggcagcctgcagttcatcctggacctgcggcagaagtggaatgacatgaagccccagttccagcagctgaatgatgaggtgcagtacatcatgaaggagagcgaggagctgaccggccgcggggcccctgtgaaggagaagagccagcagctgaaggacctgatccacttccaccagaagcagaaggagcgcatccaggactatgaggacatcctgtacaaggtggtgcagttccaccaggtgaaggaggagctgggccgcctcatcaagagccgggagctggagtttgtggagcagcccaaggagctgggagatgcccatgatgtgcagatccacctgcgctgcagccaggagaagcaggcccgggtggaccacctgcaccggctggccctgagcctgggcgtggacatcatcagctctgtgcagaggccccactgcagcaatgtgtctgccaagaacctgcagcagcagctggagctgctggaggaggacagcatgaagtggagggccaaggccgaggagtatggccgcaccctgagccgctctgtggagtactgtgccatgagagatgagatcaatgagctgaaggacagcttcaaggacatcaagaagaagttcaacaacctgaagttcaactacaccaagaagaatgagaagagcaggaacctgaaggccctgaagtaccagatccagcaggtggacatgtatgcagagaagatgcaggccctgaagaggaagatggagaaggtgagcaacaagaccagtgacagcttcctgaactaccccagcgacaaggtgaatgtgctgctggaggtgatgaaggacctgcagaagcacgtggatgactttgacaaggtggtgacagactacaagaagaacctggacctgacagagcacttccaggaggtgattgaggagtgccacttctggtatgaagatgccagcgccaccgtggtgcgggtgggcaagtacagcacagagtgcaagaccaaggaggccgtgaagatcctgcaccagcagttcaacaagttcatcgcccccagcgtgccccagcaggaggagcgcatccaggaggccacagacctggcccagcacctgtatggcctggaggagggccagaagtacatcgagaagatcgtgaccaagcacaaggaggtgctggagagcgtgacagagctgtgtgagagcctgacagagctggaggagaagctgaagcagggagatgtgctgaagatgaaccccaacctggaggacttccactatgactacatcgacctgctgaaggagcccgccaagaacaagcagaccatcttcaatgaggagaggaacaagggccaggtgcaggtggccgacctgctgggcatcaatggcaccggggaggagcggctgccccaggacctgaaggtgtccacagacaaggagggcggcgtgcaggacctgctgctgcctgaggacatgctgagcggggaggagtatgaatgtgtgtccccagatgacatcagcctgccccccctgcccggcagccctgagagccccctggcccccagcgacatggaggtggaggagcctgtgagcagcagcctgagcctgcacatcagcagctatggagtgcaggccggcaccagcagccctggagatgcccaggagagcgtgctgcccccacctgtggcctttgctgatgcctgcaatgacaagcgggagaccttcagcagccactttgagcggccctacctgcagttcaaggccgagccccccctgaccagccggggctttgtggagaagagcacagccctgcaccgcatctctgctgagcaccctgagagcatgatgtctgaggtgcatgagcgggccctgcagcagcacccccaggcccagggcggcctgctggagacccgggagaagatgcatgctgacaacaacttcaccaagacccaggaccggctgcacgccagcagtgatgccttcagcggcctgcgcttccagagcggcaccagccggggctaccagaggcagatggtgccccgggaggagatcaagagcaccagcgccaagagctctgtggtgtccctggccgaccaggcccccaacttcagccggctgctgagcaatgtgacagtgatggagggcagccctgtgaccctggaggtggaggtgacaggcttccctgagcccaccctgacctggtgggtggcctacaatgacaagccctag

SEQ ID NO: 250697 - DNA, 4593 bp, Artificial Sequence
  derived and/or modified sequence
atgagcagccagggcagccccagcgtggccctgagcaccaccaccgtgtcctctgtggccgtgcaggccggggacagcaagatcgtgattgctgtgatcaagtgtgggaagtgggtgcagctgcagctggccgagagccagcccaacctgctggagatcggcagcagccaggatgagaccaagaagctgctgcatgaccacgagctgctgctggccaagctgaaggccctggaggacagagtgtgggagctgctgcaggaggccgacaagacagctgaggagaacaaggaccagagccaggtgtatgatgccatggccgagaccctgggggaggcctgggccgccctggtgtccatgctggagaggagaacagagctgctgcggctgaccagcgagttctttgaaaatgccctggagtttgccatcaagattgaccaggccgaggacttcctgcagaacacccatgaatttgaatctgctgagagcctgaagagcctgctgcagctgcacgagcaccacaccaaggagctgctggagaggagcctggccctgctgaacaagagccagcagctgacagacttcatcgagaagttcaagtgtgagggccccaacgtgaaccctgagctgacccagggcgcccacagcagctgcctgaaggtggaccggctgctggagctgctgcaggacagaagacggcagctggacaagtacctgaagcagcagtggcaggagctgagccaggtgctgcagatctgccagtgggaccagcaggagaaccaggtgacctgctggttccagaagaccatccggaacctgcaggagcagagcctgggcagcagcctgagtgacaatgaagatcgcatccacaagcaggaggagctgatcatcaaggccaaggagtggaacagcgctgtggagaagctgaagtctgaggccctgcgcatcctgctgagcaaggactatgtggagaaggagcacctgcagctgagccaccagaagctgagccagctgcaggaggagtttggccagctgatggtggagaggaacacctggctgaagaaggccaatgagttcttcaacagcgccaacaaggcctttgatgtgctgggccgggtggaggcctacctgaagctgctgaagtctgagggcctgagcctggccgtgctggccgtgagacatgaggagctgcacaggaagatcaaggactgcaccacagatgccctgcagaagggccagaccctcatcagccaggtggacagctgcagcagccaggtgtctggcatccacgagatgatgggctgcatcaagagaagagtggaccacctgacagagcagtgcagcgcccacaaggagtatgccctgaagaagcagcagctgacagcctctgtggagggctacctgaggaaggtggagatgagcatccagaagatcagccctgtgctgagcaatgccatggatgtgggcagcaccaggtctgagagcgagaagatcctgaacaagtacctggagctggacatccaggccaaggagaccagccatgagctggaggccgccgccaagaccatgatggagaagaatgaatttgtgtctgatgagatggtgtccctgagcagcaaggcccgctggctggccgaggagctgaacctgtttggccagagcattgactaccgcagccaggtgctgcagacctacgtggccttcctgaagagcagcgaggaggtggagatgcagttccagagcctgaaggagttctatgaaacagagatcccccagaaggagcaggatgatgccaaggccaagcactgcagcgacagcgctgagaagcagtggcagctgttcctgaagaagagcttcatcacccaggacctgggcctggagttcctgaacctgatcaacatggccaaggaaaatgagatcctggatgtgaagaatgaggtgtacctgatgaagaacaccatggagaaccagaaggccgagcgggaggagctgagcctgctgcggctggcctggcagctgaaggccacagagagcaagccaggcaagcagcagtgggccgccttcaaggagcagctgaagaagaccagccacaacctgaagctgctgcaggaggccctgatgcctgtgtctgccctggacctgggcggcagcctgcagttcatcctggacctgcggcagaagtggaatgacatgaagccccagttccagcagctgaatgatgaggtgcagtacatcatgaaggagagcgaggagctgaccggccgcggggcccctgtgaaggagaagagccagcagctgaaggacctgatccacttccaccagaagcagaaggagcgcatccaggactatgaggacatcctgtacaaggtggtgcagttccaccaggtgaaggaggagctgggccgcctcatcaagagccgggagctggagtttgtggagcagcccaaggagctgggagatgcccatgatgtgcagatccacctgcgctgcagccaggagaagcaggcccgggtggaccacctgcaccggctggccctgagcctgggcgtggacatcatcagctctgtgcagaggccccactgcagcaatgtgtctgccaagaacctgcagcagcagctggagctgctggaggaggacagcatgaagtggagggccaaggccgaggagtatggccgcaccctgagccgctctgtggagtactgtgccatgagagatgagatcaatgagctgaaggacagcttcaaggacatcaagaagaagttcaacaacctgaagttcaactacaccaagaagaatgagaagagcaggaacctgaaggccctgaagtaccagatccagcaggtggacatgtatgcagagaagatgcaggccctgaagaggaagatggagaaggtgagcaacaagaccagtgacagcttcctgaactaccccagcgacaaggtgaatgtgctgctggaggtgatgaaggacctgcagaagcacgtggatgactttgacaaggtggtgacagactacaagaagaacctggacctgacagagcacttccaggaggtgattgaggagtgccacttctggtatgaagatgccagcgccaccgtggtgcgggtgggcaagtacagcacagagtgcaagaccaaggaggccgtgaagatcctgcaccagcagttcaacaagttcatcgcccccagcgtgccccagcaggaggagcgcatccaggaggccacagacctggcccagcacctgtatggcctggaggagggccagaagtacatcgagaagatcgtgaccaagcacaaggaggtgctggagagcgtgacagagctgtgtgagagcctgacagagctggaggagaagctgaagcagggagatgtgctgaagatgaaccccaacctggaggacttccactatgactacatcgacctgctgaaggagcccgccaagaacaagcagaccatcttcaatgaggagaggaacaagggccaggtgcaggtggccgacctgctgggcatcaatggcaccggggaggagcggctgccccaggacctgaaggtgtccacagacaaggagggcggcgtgcaggacctgctgctgcctgaggacatgctgagcggggaggagtatgaatgtgtgtccccagatgacatcagcctgccccccctgcccggcagccctgagagccccctggcccccagcgacatggaggtggaggagcctgtgagcagcagcctgagcctgcacatcagcagctatggagtgcaggccggcaccagcagccctggagatgcccaggagagcgtgctgcccccacctgtggcctttgctgatgcctgcaatgacaagcgggagaccttcagcagccactttgagcggccctacctgcagttcaaggccgagccccccctgaccagccggggctttgtggagaagagcacagccctgcaccgcatctctgctgagcaccctgagagcatgatgtctgaggtgcatgagcgggccctgcagcagcacccccaggcccagggcggcctgctggagacccgggagaagatgcatgctgacaacaacttcaccaagacccaggaccggctgcacgccagcagtgatgccttcagcggcctgcgcttccagagcggcaccagccggggctaccagaggcagatggtgccccgggaggagatcaagagcaccagcgccaagagctctgtggtgtccctggccgaccaggcccccaacttcagccggctgctgagcaatgtgacagtgatggagggcagccctgtgaccctggaggtggaggtgacaggcttccctgagcccaccctgacctggtacaagaagggccagaagctgtctgcagatggccacctgcaggtgctgcacaaggagaccaggcacagcgtcttcatccccaaggtgtgcaaggcagatgctggcctgtatgtggcccgggcccagaacagcagcggggccctgagcagcaatgtcatcctgcacgtgactggaaactgccgcctgcccatcaccagggtgaactggatcaccctgtgtgtggtgtatgtgtctgtgtccctgatgtactggctgctgacccagtag

SEQ ID NO: 250698 - DNA, 2628 bp, Artificial Sequence
  derived and/or modified sequence
atgcagttccagagcctgaaggagttctacgagaccgagatcccccagaaggagcaggacgacgccaaggctaagcactgcagcgacagtgccgaaaagcagtggcaacttttcttaaaaaaaagctttatcacccaggatcttggtcttgagttcctgaacctgattaatatggccaaagagaatgagatactcgatgtgaaaaacgaggtctacctgatgaagaacaccatggaaaatcagaaagcggagagggaggagctgtctctcctgaggctcgcctggcagctgaaggcaaccgagtcaaaacctggcaagcagcaatgggcggcgttcaaggaacagctgaaaaagacctcccacaacctgaaactcctgcaagaagcacttatgcctgtgtcagctctcgacctcggtggttctctgcagtttatcctggacctgcggcaaaaatggaatgacatgaagccccaattccagcagctcaatgacgaggtgcagtatataatgaaagaatccgaagagctcacaggccggggggccccagtaaaggagaaaagtcaacagctaaaggatctgatccattttcaccaaaaacagaaggagcggatacaagactatgaggacattctttataaagtggtccagtttcaccaagttaaggaagaattaggccgcctcattaaatcacgtgaactggaattcgtagaacaaccgaaagagctgggtgatgcacatgacgtacagattcacctgaggtgcagtcaggagaagcaggccagagtggaccaccttcaccggctggccctttctttgggagtcgatatcatctccagcgtacaacgaccacactgctcaaatgtctcagcaaagaacctccagcaacaactcgagctcttagaggaagattcaatgaagtggagagctaaagctgaggaatatggcagaaccctgtctcgctccgtggaatactgtgctatgagagatgagattaacgagctgaaagatagcttcaaggatataaagaagaaatttaacaacttaaagttcaactataccaaaaagaacgagaaatctagaaacttaaaagccctcaagtatcagattcagcaggtagacatgtatgccgaaaagatgcaggccctcaaacgaaagatggagaaagttagtaataagacatctgactcgtttctgaattatccctccgataaagtgaacgttctgctggaagtcatgaaggatctccagaagcacgttgatgatttcgataaggtagtgacggattacaagaaaaaccttgacctcacggaacattttcaggaggtgattgaagaatgccatttttggtatgaggacgctagcgctaccgtcgtcagggtcggaaagtactctacggaatgtaaaaccaaggaagcagtgaagattctgcaccaacagttcaacaagtttatcgccccatccgtcccacagcaggaagaacgcattcaagaggccacggatctggcccaacatttgtatgggctggaggaggggcagaaatatattgaaaaaattgtaacaaagcacaaggaagtcctggaatcggtgaccgagctctgtgagtcactgacagagttggaagagaaactcaagcagggagatgtattgaaaatgaatccaaatctcgaggattttcactatgattatattgatctgctcaaggaaccggctaaaaataagcaaacaatcttcaacgaagagcgcaacaagggtcaggtgcaagttgcagaccttctcggcatcaacgggactggagaggaacggctaccccaggacctgaaagtgagcacggacaaagaaggcggcgtgcaggacctgctcttacccgaggatatgctgtcaggggaggagtacgagtgcgtgtcacccgatgatatatcacttccgccccttcccggctctccagagagtcctctcgcacctagtgacatggaggttgaggagcctgttagttcctccctcagcttacacatctctagctatggggtgcaggccggcacgagcagccctggcgatgcccaagagagcgttttgcctcctcccgtggctttcgccgacgcatgcaatgacaagcgcgaaacgttttcatcccactttgagcggccgtatttgcagttcaaggcagagccacccttgacctcccgcgggtttgtggaaaaaagcactgcccttcaccggatatcagctgagcatcccgagtcaatgatgagcgaagtccatgagcgcgccctgcagcagcatccccaggcacaaggaggcttgctggagacacgggaaaagatgcacgcggacaataattttacaaagactcaagaccgcctccacgcatcctcagacgcctttagcggactgcgttttcaatcaggcacaagtagaggttatcagcgacagatggtgcctcgcgaggaaattaaaagcacgagcgccaaaagttctgttgtgagcttagcagaccaggctccaaacttttccaggctgctctcaaacgtcacggtgatggaagggagtcccgtaactctcgaggtcgaagtgacagggttccctgagcctacgttgacatggtgggtcgcctacaacgataagccatag

SEQ ID NO: 250699 - DNA, 2685 bp, Artificial Sequence
  derived and/or modified sequence
cggagccaggtgctgcagacctacgtggccttcctgaagagcagcgaagaggttgaaatgcagttccagagcctgaaagagttttacgagacggaaatccctcagaaagagcaggacgacgccaaggcaaaacactgctcagacagtgccgagaagcaatggcagctcttcctgaagaagtcatttataacccaggaccttggactcgagtttctaaacctcattaatatggcgaaagaaaacgagatcctggatgtaaagaacgaggtgtacctgatgaagaatactatggagaatcagaaggcggagcgggaagaactttccttacttaggctggcgtggcagctgaaggccaccgaatctaagccaggcaagcaacagtgggccgcattcaaggagcaactgaagaaaacatctcataaccttaaacttctgcaggaagcactgatgcctgtcagcgcccttgatctaggtgggagcctgcaatttatcttggacctgagacagaaatggaacgacatgaagccgcaatttcagcagcttaatgatgaagtgcagtacatcatgaaggaatctgaggagttgacgggaagaggggcacctgtgaaagaaaagagccagcaattgaaggaccttatccatttccaccagaagcagaaagagaggatacaagactacgaagatatcctgtacaaggttgttcagtttcaccaagtgaaagaggagctgggcaggctgatcaaatccagagagctcgaattcgtggagcaaccaaaagagctcggggatgcccacgacgtgcagatccatctgcgctgcagccaggagaaacaggcccgagtggatcatttgcatcggctcgcgctgagcctgggcgtggacataatatccagcgttcagaggccccactgcagtaacgtgagtgcgaaaaacctgcagcagcagcttgagttgttggaagaggatagcatgaaatggcgcgcaaaagcagaagagtacggacgtaccttatctaggagcgtggagtactgcgcaatgcgggatgaaatcaatgagctgaaggactcctttaaggacatcaagaaaaaatttaataatctgaaattcaattacactaaaaagaacgagaaatccagaaacctgaaggcactgaagtaccaaatccagcaggtggatatgtacgctgagaaaatgcaggccttaaaaaggaagatggagaaagtctcaaataagaccagtgattctttcctgaattatcctagtgacaaagtaaacgtcttgctggaggtcatgaaggatcttcagaaacacgttgacgacttcgacaaggtcgtaacagattataaaaagaatctggaccttacggaacactttcaggaagtcatcgaggagtgtcatttctggtacgaggacgcctcggcaactgtggtgagggtggggaagtattccactgaatgcaagacaaaagaagccgttaaaatcttgcaccaacagtttaataagtttatagcaccaagcgtgccacaacaagaggagcgcatccaggaagcgaccgatctggcacaacatctttacggcctggaggaaggccagaagtatatagaaaagatcgtgaccaaacataaggaggtgttggagagcgttaccgaattatgtgagtccctcaccgaattggaagagaaactcaaacagggggatgtccttaaaatgaatcccaacctggaagatttccattacgactacatcgacttgttaaaggagcccgctaagaataaacagacaattttcaacgaggagagaaacaaagggcaggtgcaggtggccgatctactggggatcaacggcaccggcgaggagagactcccacaagatctgaaagtctctacggataaggagggtggcgtccaagacctccttttacccgaagacatgctatccggagaggaatatgagtgtgtctctcctgacgatatcagtctgcctccgcttcccggatccccagaatcccccctggccccgagtgacatggaagtggaagagccggtgagttccagcttgagtctgcacatttcatcatatggcgttcaggccggcacctcctcacccggcgatgcgcaggaatcagtacttccaccaccagtggcttttgctgacgcgtgtaatgacaaaagggagacattcagtagccatttcgagaggccctatttacaatttaaggctgagccacctcttactagtagaggcttcgtcgaaaaatccacagccctgcatcgaatctccgcagagcaccctgagagcatgatgtcagaggtgcatgagcgggctttacaacaacaccctcaggctcaaggaggtttgttggagacaagagagaagatgcacgccgacaataatttcactaaaactcaggataggctgcatgcctccagtgacgccttttccgggctacgctttcaatcagggacatctcgaggctaccagcgtcaaatggtccctcgagaggaaatcaaatctacaagtgcaaagtccagtgtggtgagtctggctgaccaggcacccaacttctcaaggttgttgtcgaacgtcaccgtgatggaggggtcacccgttacactcgaggttgaagtcacaggctttccagagcctacactaacttggtgggtggcgtacaacgataaaccatag

SEQ ID NO: 250700 - DNA, 4593 bp, Artificial Sequence
  derived and/or modified sequence
atgagcagccagggcagccccagcgtggccctgagcaccaccaccgtgtccagcgtcgcagtgcaggcgggggatagcaagatcgttatagccgtgatcaaatgcggaaagtgggtgcagctgcagctggctgagtcacaacctaacttactggagataggaagctcccaagacgaaactaagaagctgctccatgaccacgaactgctgctcgctaaactaaaggccctagaggatagggtgtgggaattgctgcaggaggctgacaagactgccgaggaaaacaaggaccaaagccaagtgtacgacgcaatggcggagactcttggcgaggcctgggctgcgctagtgtcgatgttggagcgcaggaccgagcttctgagattgacctcagaatttttcgagaatgccctggaattcgccatcaaaatcgatcaggccgaagattttttgcagaatacccacgagtttgagtcagctgagtcgctgaagagcctgttgcagcttcacgaacaccatacgaaagagttgttggagcgatcccttgctctcctgaacaagagccaacagctgaccgattttatcgaaaagttcaagtgtgagggccccaacgtaaacccggagctgacccagggggctcacagctcttgtctgaaagtggaccggctgctcgagctgctgcaggataggaggcgccagctggataaataccttaagcagcaatggcaggagctgagccaggtgctccaaatctgtcagtgggatcagcaagagaaccaggtgacctgctggtttcagaagacaataagaaacctccaggagcaatctctcggcagctccctaagcgataacgaagaccggattcacaagcaggaggagttaatcattaaagcaaaagagtggaatagcgccgttgagaagctcaaatcagaggccctcagaattctgctgtccaaagattacgtggaaaaggaacacttgcaactgagccatcagaagctgtcccagctgcaagaggaatttggacagctgatggtggaacgcaatacttggctcaaaaaggccaatgagttttttaatagcgctaacaaagcgttcgatgtgctgggccgcgtggaggcttatcttaagctgctgaagtcagagggcctgtctttggcagtgcttgctgtcagacatgaggaattgcaccggaagattaaggattgcactacagatgccttgcagaaaggacaaaccttgatctcacaggtggatagctgctcttcccaggtttcaggaatccacgagatgatggggtgcatcaaacgccgcgtcgatcatctgaccgaacaatgcagtgctcacaaggagtacgcgctgaaaaagcagcagcttactgcatctgttgaaggatatctgcgtaaggtcgaaatgagcattcagaaaatttcccccgtcctgtccaatgccatggacgtggggtcgactagatccgaaagtgaaaaaattctgaacaagtatttggaactcgatatacaggccaaagaaacttctcatgagctggaagccgccgccaagacgatgatggaaaagaatgaattcgtctcagacgagatggtgagtctttcatccaaggccagatggttggctgaggagctcaatctatttggccagtctatcgactataggagccaagttctccagacatacgtagccttcctcaagtcctcagaagaggtcgagatgcaatttcagagtctgaaagagttttatgagaccgaaatcccacagaaagagcaggatgacgcaaaggctaagcattgctctgactccgcagaaaaacagtggcagctgtttctgaaaaaaagcttcattactcaggatctcggcctggagttcctgaacctgatcaacatggccaaagaaaacgaaatcctcgatgttaagaatgaggtgtatcttatgaagaataccatggagaaccagaaagcggaaagagaggaactatcccttctgcggctcgcctggcagcttaaggcgacagagagcaaacccgggaagcagcagtgggcagcattcaaggaacagctcaagaaaacatcgcacaatctgaagctcctgcaggaggccctgatgccagtcagtgcattggatttaggaggatcgctgcagtttatacttgaccttcgacagaagtggaatgatatgaagccccagtttcaacaacttaacgatgaggtacagtatattatgaaggagtctgaagaattgacaggtaggggtgctcccgtaaaggagaagagccaacagctgaaagatcttattcattttcaccaaaagcagaaggaaaggattcaggactacgaggacattttatacaaggtggtgcagtttcatcaggtcaaggaggaactaggaaggctcattaagagccgtgaactcgagtttgtcgagcagcctaaggagctcggggacgcccacgatgtccagattcaccttcgttgctcccaagaaaaacaagcccgcgtcgaccacttgcataggctagcactttctctcggcgtcgacatcatctcaagcgtacagcggccccactgttccaacgtttcagcgaaaaacttgcagcagcagctcgagctgctagaagaggactccatgaaatggcgcgctaaggctgaggaatatgggagaactctttcaaggagcgtggagtactgtgcaatgcgcgacgaaattaacgagctcaaggactcttttaaggatatcaagaagaaatttaataatctgaagtttaactacaccaaaaaaaacgaaaagagccgtaacctgaaggccctcaaataccagatccagcaagtggacatgtacgcagagaaaatgcaagctcttaagcgcaagatggagaaagtttcgaacaaaacaagcgactcgttcctgaattatccttcggacaaggtgaacgtgctgctagaggtgatgaaagacctgcagaagcacgtggacgactttgacaaggtcgttacagattataaaaagaatctggacctcacagaacacttccaggaggtaatagaggagtgtcatttttggtacgaggatgcgtcagccacagtggtacgagtggggaagtacagcactgagtgtaagaccaaagaagcagtgaaaattcttcaccagcagttcaataagttcatcgcaccaagtgtcccacagcaagaagagagaatccaggaggctactgacctggcccagcacctctacggactggaagaggggcaaaagtatatcgagaaaattgtaaccaagcacaaagaagtgttagagagcgtgaccgagttgtgcgaatcactgacagaacttgaggaaaagctgaagcagggagacgtccttaagatgaaccccaatctggaggactttcattacgactacattgatttgcttaaagagcctgctaagaacaagcagactatatttaacgaggaacgcaataaaggccaggtgcaggttgccgaccttctggggattaacggcaccggagaagagagactaccccaggatctaaaggtgagcaccgacaaggaaggaggagtgcaggatttactcctgccggaggacatgctttccggagaagagtatgaatgtgtgagtcctgacgatattagcttgcctccccttcccgggagccctgagagccccctggcgcccagtgacatggaagtggaagaaccagtgagttcgagtctgtctcttcacatttcatcctacggcgtccaggcagggacatctagccccggtgatgcccaggaaagcgtgctccccccacccgtggcttttgccgacgcatgtaacgacaagcgggaaaccttctccagtcatttcgagcggccatatctgcaattcaaggctgaacccccccttacaagccggggtttcgtcgagaaaagtacggccctacatcggatctcagctgaacatcctgagtcaatgatgagcgaggtccacgaacgggccctccagcagcatcctcaggcgcaaggtggcctactagagacgcgagaaaagatgcatgccgataataacttcaccaaaactcaggataggctgcatgccagcagtgatgccttttctggactcaggtttcagagcggaacatcccggggctaccagagacaaatggttcctcgcgaagagataaagtctaccagcgcaaagtccagcgtggtgtcactggctgaccaggcaccgaacttctcccggctcctgagcaatgtgactgtgatggaagggtctccagtcaccttggaggtggaggtgacgggttttcccgagcccacactgacgtggtataagaagggccagaaactctcagccgatggccacctccaggtactgcacaaggagacaaggcactcagtgtttataccaaaagtgtgcaaggctgacgctgggctgtacgtggccagagcccagaacagttcaggagccctgtcatctaacgtgatacttcacgtcacgggaaactgtcgtttgcccattacccgggttaattggatcaccctgtgtgtggtttatgtatccgtgtcacttatgtattggttgctgacacagtag

SEQ ID NO: 250701 - DNA, 2628 bp, Artificial Sequence
  derived and/or modified sequence
atgcaattccagtccctcaaggaattctacgaaaccgagataccacaaaaagaacaggacgacgcgaaagccaaacactgcagcgacagtgcagagaagcaatggcagttgttccttaaaaaatccttcattacgcaggacctaggtctggagtttttgaatcttatcaacatggccaaggagaacgagatcctggacgtaaagaatgaagtgtatctgatgaagaacacaatggaaaatcaaaaggccgagcgcgaggagctatcactcttgcgcttagcctggcagctgaaagcaacagagtctaaaccagggaagcaacagtgggctgcctttaaggagcagctgaaaaagacctctcacaacttgaaattgttgcaggaagccctgatgcctgtgtccgccttggaccttggagggagtttgcagtttatcctcgacctgcggcaaaaatggaatgacatgaagccccagttccaacaactgaacgatgaggttcagtatattatgaaggagtcagaggaattgacgggcaggggtgctcctgtgaaggaaaaatcccagcaactcaaggacttaattcactttcaccaaaagcagaaagagcgcattcaagactacgaggatatcttgtacaaggtcgtccagttccatcaggttaaggaagaactaggaaggctgatcaaatctcgggagcttgagttcgtggaacagcctaaagagttgggtgacgctcatgatgttcagatccacttgaggtgtagtcaggagaagcaggcacgcgtggaccacctgcaccggctggccctttcactgggggtggacatcattagttctgttcagaggcctcactgctccaatgtctccgctaaaaatctgcaacagcagctagagttactggaggaggacagcatgaagtggagagcaaaggcagaagagtacggaagaacattgtcccggtccgtcgagtactgtgctatgagagacgaaattaatgagctgaaggattcgttcaaggacataaaaaagaagttcaataacctgaagttcaattacactaagaagaacgagaagtcacgcaatctgaaagctctcaagtatcaaattcagcaagttgacatgtatgcagagaaaatgcaagcactcaagcggaagatggagaaggttagcaacaaaacaagtgactctttcctgaattacccttccgataaggtcaacgtactcctggaggtgatgaaagacttgcagaagcacgtagacgactttgacaaagtcgtcactgattataaaaaaaatctcgatctgacagaacacttccaagaggtgattgaggaatgccacttctggtatgaagatgcgtcagctacggtggtcagagtaggaaaatattctacagaatgcaagactaaagaagcagtgaaaatactccatcaacagtttaacaagtttattgcccctagcgtcccacaacaagaagaaaggatccaggaagcaactgatcttgcccagcatctgtatgggctagaagagggccagaagtatattgagaagatagtcacgaaacacaaggaggttcttgaaagtgtcaccgaactgtgtgaaagtttaactgagcttgaggaaaagctaaaacagggggacgtgttgaagatgaatcctaacctggaagacttccactacgattatatcgacctgctgaaggagcccgcaaaaaataagcagacaattttcaacgaggaacggaataaaggtcaggtccaagtggcggatctgctcggaataaacggtacaggggaggaaagacttccacaggacttgaaagtttctaccgacaaggaagggggagtacaggatttattactcccagaggatatgctgagcggggaggaatatgaatgtgtttcacctgatgacatctccttgccaccgctgcctggcagcccagaaagcccgctggcgccatctgacatggaagtcgaagagccagtgtcctcctctctgagcctgcacatttcctcttatggggttcaggctggtaccagttctcctggggatgcacaggaatccgttctaccgccacctgtcgcattcgcagacgcctgtaacgacaaacgggaaacctttagcagccatttcgagcgcccttatcttcagtttaaggccgagccacccctcactagcagagggtttgtggaaaaaagtaccgcactgcaccgtatcagcgctgagcatcccgagtctatgatgagcgaagtgcatgaacgagccctgcagcaacatccacaggctcaaggcggtcttctggagacgcgagaaaaaatgcatgccgataacaatttcacaaagacccaggacaggcttcacgccagctctgatgccttttcaggactgcgcttccagtccggaactagcagagggtatcagcgacagatggtccccagggaagaaattaagtcgactagcgccaaatctagtgtcgtgtccctcgctgaccaggcccctaattttagccgtcttctgtctaacgtcacagtgatggagggatctccagttacgctggaagtcgaggttaccggatttcccgagcctacactgacgtggtgggtggcatataacgacaagccttag

SEQ ID NO: 250702 - DNA, 2685 bp, Artificial Sequence
  derived and/or modified sequence
cgaagccaagtcctccagacatacgtggccttcctgaagtcaagtgaagaagtcgagatgcagtttcagagccttaaagagttttatgaaaccgagatccctcagaaggagcaagacgatgcgaaggcgaaacactgtagcgattccgccgaaaagcagtggcagctgttcctgaagaagtctttcatcacccaggatttgggcttggagtttttgaatttgattaacatggctaaagagaatgagattctagacgtgaaaaacgaagtatatttaatgaaaaataccatggagaaccagaaagccgaaagggaggaactgagccttctgcgtttggcctggcaacttaaagctactgaatccaagcctggaaagcagcaatgggccgctttcaaagaacagctgaaaaagacgagccataatctgaaactcctgcaggaagccctgatgcccgttagcgctctggaccttggtggatccctacagtttattctggacctaagacagaagtggaacgatatgaaaccccagttccagcagcttaacgacgaggtacagtacattatgaaagagtcggaggagttgactggtagaggagcccctgttaaagagaaaagccagcagctgaaggaccttatccactttcaccagaaacagaaagaacggatccaggattatgaagacattctgtacaaggtagttcagtttcaccaagttaaggaagaactgggccgactcataaagagccgggagctcgaattcgtcgagcaacccaaggagctgggcgacgcgcacgatgtgcagattcatcttcgttgttcgcaggagaaacaggcaagagtagatcacttacacaggctagccctgagcctaggggtagacatcatcagtagtgtgcagaggccacattgcagtaacgtgtccgccaagaacctgcagcagcagttggaactcctagaggaggactccatgaaatggcgggcaaaagccgaagagtatggcaggaccctctcacggtcagtggaatactgcgccatgcgggacgaaattaatgagctgaaggacagcttcaaagacatcaaaaaaaagtttaataaccttaagttcaactacaccaagaaaaacgagaaatcacggaatctgaaggcattaaagtatcaaatccagcaggttgatatgtatgccgaaaaaatgcaggccctgaaaagaaaaatggaaaaggtgtcaaataagaccagtgattctttcctcaactatcccagtgacaaggtgaatgtgctcctggaagtcatgaaggatctgcagaagcatgtagacgattttgacaaggtggtgaccgactacaaaaaaaacctcgatctgaccgagcactttcaggaagtcatcgaggagtgccatttttggtatgaggatgcttcagctacagtcgtccgagtgggtaagtatagcaccgagtgcaaaacgaaagaggcagtgaagattctccatcaacagtttaataagttcatcgccccatctgtgccccagcaagaagagcgaattcaagaggcaacagacctggctcagcacctctatggactcgaggagggtcagaagtacattgaaaagattgttacaaaacacaaggaggttctcgaaagcgtgacagagctgtgcgagtccctgacagagcttgaggagaagttaaagcaaggggatgtgctgaagatgaaccctaacctggaggactttcactatgattatattgatctattgaaagagccagcaaaaaacaaacaaacaatctttaacgaagagagaaacaagggtcaagtccaggtggctgaccttctggggatcaatgggaccggtgaagaaaggttaccccaagacctgaaggtgagcaccgataaggagggaggcgtgcaggacttgctgctcccagaggacatgttaagtggcgaggagtatgagtgcgtcagccctgacgacatttcactgccccctctacctggtagccctgagagtcccctcgccccaagtgatatggaggtcgaggaacctgtgagtagctctttaagcctccatatttcttcttacggcgtccaggctgggacatcctctccaggggacgcacaggaatcggtgttacccccaccagttgcttttgccgatgcatgcaacgacaagagagagaccttttcttcacattttgaaagaccatatttgcagtttaaggccgagcctccactgaccagccgcggtttcgtggagaaatcgactgctcttcatcggatcagtgctgaacaccccgagagtatgatgtccgaagtgcacgagcgggcactccagcagcacccccaggcccagggtgggttgctcgagacaagggaaaagatgcacgccgataacaactttacaaaaactcaagaccgcctccacgcctcctcagatgccttttcagggctgcggtttcagtctgggacctcacgaggataccagaggcagatggtgcctcgggaggagatcaagagtactagcgcgaagagcagtgtcgtctcactggccgatcaggccccaaatttttcccgcctcctcagtaatgtgaccgtgatggagggatccccggtgacactcgaagtagaagtgactgggttccctgagcctactctgacatggtgggtggcttataacgataagccgtag

SEQ ID NO: 250703 - DNA, 4592 bp, Artificial Sequence
  derived and/or modified sequence
atgtcatcccaggggtcccccagcgtggccctttctaccactactgtgtcttctgtggcagtgcaggctggcgacagcaaaattgtaatagcagttatcaaatgcggcaagtgggtccagctgcagttggctgaatctcagcctaatctcttggaaattggtagttctcaagacgagaccaaaaaactgctccacgaccacgaactgttactggccaaactcaaagctctcgaggacagagtgtgggagctcctccaggaggctgataagactgcggaggagaacaaggaccaatcccaggtctacgatgcaatggcagaaaccctcggggaagcttgggcagctctcgtaagcatgttggaacggcgaaccgagctgcttaggctgacctcagaattttttgagaatgcgctggaattcgccatcaaaattgaccaggctgaggactttctgcaaaacactcatgaattcgagtcagccgagtccctcaaatcgctcttgcagctccacgaacatcataccaaagagttgctggagagaagcctcgcgctgttaaataagtcccaacagctcaccgactttatcgagaagttcaagtgtgaggggcctaatgtgaaccccgaacttacgcaaggtgcccattcttcttgcctgaaggtggacaggctactggagctcctccaggaccgtagacggcagctcgataaatacttgaagcagcagtggcaggaattgagtcaggtgttgcagatatgccagtgggaccagcaagaaaaccaagttacatgctggtttcagaagactatcaggaacctccaggaacagtccctcggatccagcctgtccgacaacgaggacaggattcacaagcaggaagaactcattattaaagcgaaggaatggaacagcgccgtggaaaaattaaaaagtgaggcactgaggatcctgctgtcgaaggattacgtggaaaaagagcatctgcagctgtcccaccaaaagctctcccagttacaagaagagttcgggcagctgatggtggagcgcaatacgtggctgaaaaaagcaaacgagttcttcaattcagccaataaagctttcgatgtcttgggacgcgtggaggcatatctgaaacttcttaagtccgaaggactgtcactagccgtgctggcagtgcgtcacgaggaactgcaccggaaaattaaagattgtaccaccgacgccttgcaaaaaggtcagaccttgatttctcaagtggattcatgttcctcacaggtgtccggcatccatgaaatgatgggatgcattaaacggagagtagatcatctgactgagcaatgcagtgctcacaaggaatatgccttgaaaaagcaacagctgaccgcatcggttgaagggtatttacggaaggtggaaatgtctatccagaaaatttcacctgttctgagtaacgcgatggatgtggggtccacccgcagcgagtctgagaagattttaaacaaatatctggagcttgatatccaggcaaaagaaacatctcacgaactggaggcagccgctaagaccatgatggaaaagaacgagttcgtctcagatgagatggtgagcttgtctagtaaagcgcgttggctggccgaggagctgaacctattcgggcagtctattgactatcggagtcaagtccttcagacatatgtggcgtttttgaaatcctcagaagaggtggagatgcagttccagtctctgaaggagttctatgagacagagatcccccagaaggagcaggacgatgctaaggccaagcattgttcagacagcgccgagaaacagtggcaactgttcctgaagaagtctttcatcacacaagatcttggattggaatttctgaacctgattaacatggccaaagagaacgaaattctggacgtaaagaacgaggtgtaccttatgaaaaatacaatggagaaccagaaggcagagcgggaagagctatcactgttacggttggcctggcagttgaaggccaccgaaagcaagcccggtaagcaacagtgggccgcattcaaggagcagctcaaaaagacatcccacaacctgaagctgcttcaggaggcactgatgccagtgagcgcgttggatctggggggtagccttcagtttattcttgatctccggcagaaatggaacgacatgaaaccgcagttccagcagctcaacgatgaggtgcagtacatcatgaaggaaagtgaggagctgacaggcaggggcgcacctgtgaaggaaaagagtcagcagctgaaggatctcattcacttccaccagaaacagaaggagcggatccaggactacgaagacatactatacaaggttgttcaattccatcaagtgaaggaggaactcggccgtttaattaagtcacgcgagctggaatttgtagagcaacccaaggagcttggtgacgctcacgatgtccagattcatttgaggtgtagccaagaaaaacaagcgagagtagaccaccttcaccgcctggcattgagcctaggggttgatattataagttcagtgcagaggccgcattgctcaaatgtttcggccaaaaatctacagcaacagcttgaattgctggaagaggatagcatgaaatggagagcaaaagcagaggagtatggcagaacgctcagccgatctgtggaatactgcgcgatgcgcgatgagattaatgagctcaaagactcattcaaagacattaagaagaagttcaataatctgaagttcaactataccaagaaaaacgaaaagagccggaacctcaaggctttgaaataccagatacagcaggttgacatgtatgccgagaagatgcaggcattgaaacgaaaaatggagaaggtgtcaaacaagacttctgattcctttctaaactaccccagtgataaagtcaacgtgctgctggaagtgatgaaagacctccagaaacatgtcgatgattttgacaaggtggtaactgactacaagaagaacctcgaccttacagagcacttccaagaagtaattgaggaatgtcacttttggtatgaggacgcttccgccactgtggtgcgtgtggggaagtacagcactgaatgcaaaacaaaagaggcagtgaagattctgcatcagcagtttaacaagtttatcgcgccaagtgtgcctcagcaagaggagaggatccaggaagctactgatctggctcagcacctgtacggattagaagaggggcagaagtatattgagaagatagtgaccaagcacaaggaagtgctcgaatccgtgaccgaactgtgtgaatctctcacagagctcgaggaaaaactgaagcaaggggatgtgctcaaaatgaatcctaatctggaggattttcattacgactacatcgatctgctgaaggagcccgctaagaataagcagacaattttcaatgaggaaaggaacaaaggccaggtgcaagtggccgacctgctggggatcaacggcaccggggaggagcgcctgcctcaagatctgaaagtgtctactgataaggagggaggcgtgcaggatctgctgttgcctgaggacatgctgagtggggaggaatacgaatgcgtgagccctgacgatataagcttacctcctctgcccggaagccctgagtccccgctggcaccttccgacatggaagtcgaagaaccagttagcagctccctatctctgcatatcagctcttacggggttcaggccggtacctctagcccaggagacgcacaggaaagtgtgctgcctccacccgtggcctttgcagacgcctgcaatgataagagggagacctttagctctcactttgaaaggccctacctgcagttcaaggctgaaccacctctgacaagcaggggcttcgttgaaaagagcaccgcgctgcacaggatatcagcagaacaccctgaatcgatgatgtccgaggtccacgaacgcgcactccaacagcacccgcaggctcagggtggactccttgagaccagggaaaagatgcacgccgacaacaacttcaccaaaactcaagatcgactgcatgcaagcagtgacgccttctctgggctgcgctttcagagtggcaccagcaggggctaccagcgacagatggtacccagggaagaaatcaagtctacctcagctaagtcctctgtggtttctctggccgaccaggcgcctaactttagcagacttctcagcaatgtaaccgtaatggaggggtctccggtaacgttggaggtggaagtaacaggcttcccagagccaactctaacctggtataagaagggacagaaactctccgccgatggacatttgcaagtgcttcacaaggagacaagacacagcgtgtttatccctaaagtgtgtaaggctgacgcaggcctctatgtggcacgcgctcagaacagctcgggagccctgtcatcaaatgttattctccatgtcacaggaaactgccggctgcctataacacgagtgaattggattaccttatgcgtggtgtacgtcagcgtctccctcatgtattggctgctcactcaata

SEQ ID NO: 250704 - protein, 177 aa, Artificial Sequence
  derived and/or modified sequence
MDQPAVATASTSIREDLVGGESFITASKPAQKTSSFEREGWWRIALTDTPIPGTYHLKTFIEESLLNPVIATYNFKNEGRKKPPLVQRNNPVLNDLPQYMPPDFLDLLKKQVATYSFKDKPRPSPSTLVDKDQSLQLSPGQYNVLPAPVPKYASRSCVFRSTVQRFPTTYFIPVSIM

SEQ ID NO: 250705 - DNA, 1621 bp, Artificial Sequence
  derived and/or modified sequence
gagctcaggttcagcctagagagagaggaggccaccatggaccagccagccgtcgccaccgcttccacctcaataagggaagacctggtgggtggagaatcattcatcacagcttcgaaaccagcccaaaagacttcctcttttgaaagagaaggatggtggagaatagcattaacagatactcctatacctggcacttaccacttgaaaacttttattgaagaatccctattaaatccagtgatagcaacctacaattttaaaaacgaaggaaggaaaaagccacctcttgtgcaaagaaacaatccagtcctaaatgatcttccgcagtatatgcctcctgacttcctggacctgttaaagaagcaagtggctacttactcattcaaagacaaaccacggccaagccccagcacactagttgacaaagatcagtcacttcagctttctccggggcaatacaacgtgcttcctgcaccagttcccaaatatgcttccaggagctgtgtatttcgctcaacagttcaaagattcccaacaacctattttattcccgtaagtataatgtagacagttaactcatgatgaatttgatgtttaaaatacgctgtgctttctggagtggagcaaggtggccacatagaaccctccagtgatcgttccccctagcaggaacaccattatccacacaattatccacacaagaaaacacctctgtaagaaccaaaaagcaagtgtgggatcgcaataccaggttttaacattgtatcaaggaaagaggcactgaagagggtagggtagaaaagacagtcttgaattactgacactaccctcccccatcccctggcagcagccacgtggcatgaagagagaatctgcccttggggaagagggaatgccgtgacggggggactttgcacgggaacaccgtgctgcctgtaacagggaaagcaacacaggacagaattcagctagtgcccatggagggagcatttagaccagcactagccagccaggaattgcccatcccagccgttcgatactgagttccagctctccctaccactgtgggctgaagtgctctgaggtcctaaataagcttgaaaggcagtctcggccacaaggactgcagttcctgggcaagttcaggtgctctgctgggctcagaggcagtggacttagggtacacaagacctagtgagacaccagctggggcagccaaaggagtgcttgtagcagccatcccccagccccaggcagcacagcttgcagcttcaagagagaggccttccttttgcttgagaggaggagaggggagagtaaagaggacttgtcttgaatctggataccagctcagccacagcagaatagggcacctcaggcagagtcctgaggcccccataccaggccctagctcccagacaacatttctagacacatctctggctggaagagaatccactgccttaaagagaaggacccagttctggcaagattcatcacctactgactaaagagcccttgggcttcgaataaacaccagcagtggccagacaacactcactgcaggccttagccagtgctgtgctgcttcaggtgtgatccagcactttcccagcta

SEQ ID NO: 250706 - DNA, 534 bp, Artificial Sequence
  derived and/or modified sequence
atggaccagcccgccgtggccaccgccagcaccagcatcagagaggacctggtgggcggcgagagcttcatcaccgccagcaagcccgcccagaagaccagcagcttcgagagagagggctggtggagaatcgccctgaccgacacccccatccccggcacctaccacctgaagaccttcatcgaggagagcctgctgaaccccgtgatcgccacctacaacttcaagaacgagggcagaaagaagccccccctggtgcagagaaacaaccccgtgctgaacgacctgccccagtacatgccccccgacttcctggacctgctgaagaagcaggtggccacctacagcttcaaggacaagcccagacccagccccagcaccctggtggacaaggaccagagcctgcagctgagccccggccagtacaacgtgctgcccgcccccgtgcccaagtacgccagcagaagctgcgtgttcagaagcaccgtgcagagattccccaccacctacttcatccccgtgagcatcatgtag

SEQ ID NO: 250707 - DNA, 534 bp, Artificial Sequence
  derived and/or modified sequence
atggaccagcctgctgtggctacagcctcaacctctattagagaagacctggtgggaggtgagagtttcatcacggcttctaaacctgctcagaaaacatcctctttcgaacgagagggctggtggcgaatcgctctcaccgacacacctatcccaggcacttaccatcttaagacttttattgaggagagcctcctaaatccagtcattgccacgtacaactttaaaaatgagggcagaaagaagcctcctctcgtgcaacgaaataatccggtgctgaacgacctcccacagtatatgcctccagactttttagacctgctaaagaagcaagtcgctacatattccttcaaggacaagccccgtccaagcccctccactcttgtggataaagatcagtcactccaactgtcaccaggacaatataatgtcctgcccgctccggttccgaagtacgccagcagatcctgtgtatttcgcagcaccgtgcagagatttccaacgacatacttcattccagttagtataatgtag

SEQ ID NO: 250708 - DNA, 534 bp, Artificial Sequence
  derived and/or modified sequence
atggaccagcctgctgtggccacagccagcaccagcatccgggaggacctggtgggcggggagagcttcatcacagccagcaagccagcccagaagaccagcagctttgagcgggagggctggtggagaattgccctgacagacacccccatccctggcacctaccacctgaagaccttcatcgaggagagcctgctgaaccctgtgattgccacctacaacttcaagaatgaaggaaggaagaagccacccctggtgcagaggaacaaccctgtgctgaatgacctgccccagtacatgcccccagacttcctggacctgctgaagaagcaggtggccacctacagcttcaaggacaagccccggcccagccccagcaccctggtggacaaggaccagagcctgcagctgagccctggccagtacaacgtgctgcctgcccctgtgcccaagtatgccagccgcagctgtgtgttccgcagcacagtgcagcgcttccccaccacctacttcatccctgtgtccatcatgtag

SEQ ID NO: 250709 - DNA, 534 bp, Artificial Sequence
  derived and/or modified sequence
atggaccagcccgccgtggccaccgccagcaccagcatccgggaggatcttgtaggaggagaatcttttataaccgcatcaaagcccgcacagaaaacctcctcctttgaacgcgaaggctggtggcgtattgccctgaccgatacaccaatccccgggacttaccacctcaaaacctttatcgaggaatcccttctaaaccccgtgattgcgacatataactttaaaaacgaaggtaggaaaaaaccgccgctcgttcagaggaacaaccctgttctgaacgaccttccacaatacatgcctcctgactttctcgacctcctgaagaaacaggtggccacatactccttcaaggacaaacccagacccagcccatcaacgttggtggataaggatcaatccctccagttgtccccggggcagtataatgtgctgcccgcccctgtccccaagtatgcttcccggagttgcgtgttccggtccactgttcagcgatttcctaccacatatttcatccctgtctccattatgtag

SEQ ID NO: 250710 - DNA, 534 bp, Artificial Sequence
  derived and/or modified sequence
atggatcagcctgccgtggcaactgctagtaccagtatacgtgaagatctggtcggtggggaatcttttattacagcctccaagccggctcagaagactagcagctttgagagggagggatggtggaggattgctctgacagatacacccatacctggtacctatcacttgaagaccttcatcgaagagtctctcctgaatcccgtgatcgccacctacaactttaaaaacgagggacgcaagaaacctcccttagtgcagagaaacaaccccgtgctcaatgacctgcctcaatatatgcctcctgactttctggatctgctgaagaagcaggtcgctacttactcattcaaagataaacctagaccctctccttccacattagtggacaaggatcagtccctacagctaagcccaggacaatacaacgtgctcccagcacctgtacctaagtatgcctccaggagctgcgtcttcaggtccacagtgcaaaggttccctacgacttatttcattcctgttagcatcatgtag

SEQ ID NO: 250711 - protein, 645 aa, Artificial Sequence
  derived and/or modified sequence
MERQSRVMSEKDEYQFQHQGAVELLVFNFLLILTILTIWLFKNHRFRFLHETGGAMVYGLIMGLILRYATAPTDIESGTVYDCVKLTFSPSTLLVNITDQVYEYKYKREISQHNINPHQGNAILEKMTFDPEIFFNVLLPPIIFHAGYSLKKRHFFQNLGSILTYAFLGTAISCIVIGLIMYGFVKAMIHAGQLKNGDFHFTDCLFFGSLMSATDPVTVLAIFHELHVDPDLYTLLFGESVLNDAVAIVLTYSISIYSPKENPNAFDAAAFFQSVGNFLGIFAGSFAMGSAYAIITALLTKFTKLCEFPMLETGLFFLLSWSAFLSAEAAGLTGIVAVLFCGVTQAHYTYNNLSSDSKIRTKQLFEFMNFLAENVIFCYMGLALFTFQNHIFNALFILGAFLAIFVARACNIYPLSFLLNLGRKQKIPWNFQHMMMFSGLRGAIAFALAIRNTESQPKQMMFTTTLLLVFFTVWVFGGGTTPMLTWLQIRVGVDLDENLKEDPSSQHQEANNLDKNMTKAESARLFRMWYSFDHKYLKPILTHSGPPLTTTLPEWCGPISRLLTSPQAYGEQLKEDDVECIVNQDELAINYQEQASSPCSPPARLGLDQKASPQTPGKENIYEGDLGLGGYELKLEQTLGQSQLN

SEQ ID NO: 250712 - protein, 325 aa, Artificial Sequence
  derived and/or modified sequence
LRLQSSWEQMTFDPEIFFNVLLPPIIFHAGYSLKKRHFFQNLGSILTYAFLGTAISCIVIGLIMYGFVKAMIHAGQLKNGDFHFTDCLFFGSLMSATDPVTVLAIFHELHVDPDLYTLLFGESVLNDAVAIVLTYSISIYSPKENPNAFDAAAFFQSVGNFLGIFAGSFAMGSAYAIITALLTKFTKLCEFPMLETGLFFLLSWSAFLSAEAAGLTGIVAVLFCGVTQAHYTYNNLSSDSKIRTKQLFEFMNFLAENVIFCYMGLALFTFQNHIFNALFILGAFVSIFLARAHTELKNLLFFLASFLCYFSHRSKGLPMAGCALP

SEQ ID NO: 250713 - DNA, 1938 bp, Artificial Sequence
  derived and/or modified sequence
atggagagacagagcagagtgatgagcgagaaggacgagtaccagttccagcaccagggcgccgtggagctgctggtgttcaacttcctgctgatcctgaccatcctgaccatctggctgttcaagaaccacagattcagattcctgcacgagaccggcggcgccatggtgtacggcctgatcatgggcctgatcctgagatacgccaccgcccccaccgacatcgagagcggcaccgtgtacgactgcgtgaagctgaccttcagccccagcaccctgctggtgaacatcaccgaccaggtgtacgagtacaagtacaagagagagatcagccagcacaacatcaacccccaccagggcaacgccatcctggagaagatgaccttcgaccccgagatcttcttcaacgtgctgctgccccccatcatcttccacgccggctacagcctgaagaagagacacttcttccagaacctgggcagcatcctgacctacgccttcctgggcaccgccatcagctgcatcgtgatcggcctgatcatgtacggcttcgtgaaggccatgatccacgccggccagctgaagaacggcgacttccacttcaccgactgcctgttcttcggcagcctgatgagcgccaccgaccccgtgaccgtgctggccatcttccacgagctgcacgtggaccccgacctgtacaccctgctgttcggcgagagcgtgctgaacgacgccgtggccatcgtgctgacctacagcatcagcatctacagccccaaggagaaccccaacgccttcgacgccgccgccttcttccagagcgtgggcaacttcctgggcatcttcgccggcagcttcgccatgggcagcgcctacgccatcatcaccgccctgctgaccaagttcaccaagctgtgcgagttccccatgctggagaccggcctgttcttcctgctgagctggagcgccttcctgagcgccgaggccgccggcctgaccggcatcgtggccgtgctgttctgcggcgtgacccaggcccactacacctacaacaacctgagcagcgacagcaagatcagaaccaagcagctgttcgagttcatgaacttcctggccgagaacgtgatcttctgctacatgggcctggccctgttcaccttccagaaccacatcttcaacgccctgttcatcctgggcgccttcctggccatcttcgtggccagagcctgcaacatctaccccctgagcttcctgctgaacctgggcagaaagcagaagatcccctggaacttccagcacatgatgatgttcagcggcctgagaggcgccatcgccttcgccctggccatcagaaacaccgagagccagcccaagcagatgatgttcaccaccaccctgctgctggtgttcttcaccgtgtgggtgttcggcggcggcaccacccccatgctgacctggctgcagatcagagtgggcgtggacctggacgagaacctgaaggaggaccccagcagccagcaccaggaggccaacaacctggacaagaacatgaccaaggccgagagcgccagactgttcagaatgtggtacagcttcgaccacaagtacctgaagcccatcctgacccacagcggcccccccctgaccaccaccctgcccgagtggtgcggccccatcagcagactgctgaccagcccccaggcctacggcgagcagctgaaggaggacgacgtggagtgcatcgtgaaccaggacgagctggccatcaactaccaggagcaggccagcagcccctgcagcccccccgccagactgggcctggaccagaaggccagcccccagacccccggcaaggagaacatctacgagggcgacctgggcctgggcggctacgagctgaagctggagcagaccctgggccagagccagctgaactag

SEQ ID NO: 250714 - DNA, 978 bp, Artificial Sequence
  derived and/or modified sequence
ctgagactgcagagcagctgggagcagatgaccttcgaccccgagatcttcttcaacgtgctgctgccccccatcatcttccacgccggctacagcctgaagaagagacacttcttccagaacctgggcagcatcctgacctacgccttcctgggcaccgccatcagctgcatcgtgatcggcctgatcatgtacggcttcgtgaaggccatgatccacgccggccagctgaagaacggcgacttccacttcaccgactgcctgttcttcggcagcctgatgagcgccaccgaccccgtgaccgtgctggccatcttccacgagctgcacgtggaccccgacctgtacaccctgctgttcggcgagagcgtgctgaacgacgccgtggccatcgtgctgacctacagcatcagcatctacagccccaaggagaaccccaacgccttcgacgccgccgccttcttccagagcgtgggcaacttcctgggcatcttcgccggcagcttcgccatgggcagcgcctacgccatcatcaccgccctgctgaccaagttcaccaagctgtgcgagttccccatgctggagaccggcctgttcttcctgctgagctggagcgccttcctgagcgccgaggccgccggcctgaccggcatcgtggccgtgctgttctgcggcgtgacccaggcccactacacctacaacaacctgagcagcgacagcaagatcagaaccaagcagctgttcgagttcatgaacttcctggccgagaacgtgatcttctgctacatgggcctggccctgttcaccttccagaaccacatcttcaacgccctgttcatcctgggcgccttcgtgagcatcttcctggccagagcccacaccgagctgaagaacctgctgttcttcctggccagcttcctgtgctacttcagccacagaagcaagggcctgcccatggccggctgcgccctgccctag

SEQ ID NO: 250715 - DNA, 1938 bp, Artificial Sequence
  derived and/or modified sequence
atggaaaggcagagccgcgttatgagcgagaaggatgagtaccagttccagcaccagggcgcagtggaactgcttgttttcaacttcctgctgatattgacaatccttactatctggctctttaaaaaccaccgattcaggtttttgcatgagaccggaggtgccatggtgtacggactgatcatgggattaatcctgcgctacgccacggctcccaccgacatagaatccggcaccgtttatgactgtgtaaagctgaccttctcccctagtaccttgctcgtgaatataaccgaccaagtctacgagtataaatataagcgtgagatctcccagcataatataaaccctcatcagggcaatgcgattctggagaagatgactttcgacccagagatattctttaacgtactcttgccacccatcatctttcacgctggctacagcttaaagaaaagacatttcttccagaacctgggcagtattctaacttatgccttcctgggcacagccatctcctgcattgtcattggacttattatgtacggctttgtaaaagctatgattcatgccggccagttaaaaaatggcgatttccacttcaccgattgcttatttttcgggtctcttatgtcagcaaccgatcccgtgaccgtgcttgctatcttccacgagctgcacgtggatcctgacttatacacgctgttattcggcgaaagtgtgcttaatgatgcggtagctatcgtgttgacgtacagcatctctatttactcccctaaagaaaatccaaacgcatttgatgcggctgccttcttccagtccgtgggaaactttttaggcattttcgcaggctccttcgccatgggaagcgcctatgcgatcatcaccgccctgttgaccaaatttactaagttgtgtgagttccctatgttagaaacaggcttattttttctgctgtcctggtctgcatttttaagcgccgaggcggctggtctaacagggattgtcgcagtgctgttttgcggcgtgacccaagcccattacacctataataatttgtcatctgacagtaaaattcgcacaaagcagctgttcgagtttatgaacttcctggccgagaatgtaatcttctgctatatgggcctggccctcttcacctttcaaaatcacatcttcaatgccttgttcatcctgggcgcattcctggctatttttgtggccagagcctgtaatatttaccctttatccttcctgctaaacctagggaggaagcaaaaaatcccttggaattttcagcacatgatgatgttcagcggcctaagaggggccatcgcctttgccctggcaatccggaacaccgaaagtcagcccaaacagatgatgtttaccactacactgctgctggtgtttttcacagtttgggtctttggcggagggactacacccatgttgacatggctgcagatcagggtgggggtcgacttggatgagaacctgaaagaagatccatcttcccaacatcaagaagcaaataatctcgacaaaaatatgaccaaagcggagagtgcacggctgttcaggatgtggtactccttcgatcataagtatttaaagcccatccttacgcactccggccctccactcactacaaccctgccggagtggtgtggaccaatttctcgcctgttgacttcgccccaagcatatggcgagcagctgaaagaggatgacgtggagtgtattgtgaatcaggatgagctggctatcaattaccaggaacaagccagtagcccctgttctccaccagctagactgggccttgatcagaaagcttctccacaaacacccggtaaggagaatatctacgagggggatctgggccttggaggatacgaattgaaactcgaacagaccctcgggcagagccagttgaactag

SEQ ID NO: 250716 - DNA, 978 bp, Artificial Sequence
  derived and/or modified sequence
ctgcggctccaatcctcctgggagcaaatgacgtttgacccagaaattttctttaacgttctgcttcctcccatcatttttcatgctggatactctctcaagaagaggcatttcttccagaacctgggatccatcctcacttacgcattcctaggaaccgctatcagttgcatagtgattggcctgataatgtacggctttgtgaaagccatgatccacgcagggcagctgaagaacggcgactttcactttaccgactgccttttctttggatcccttatgtctgctacagacccagtgacagtgctagccatttttcacgaactccacgtggacccagatctctatacccttttgttcggagagtccgtgcttaatgacgctgtcgccatcgtgctcacatacagcatctccatctacagcccaaaagagaacccaaatgctttcgacgcagccgcattcttccaaagtgtcggcaattttctagggatcttcgcgggctccttcgccatgggatcagcctacgctattatcaccgctctgctcactaagttcaccaaactttgcgaatttcccatgttggaaaccgggcttttctttctactgagctggtctgcttttttgtctgccgaggccgccggtttgactggaattgtggctgtgttattttgtggcgtgactcaggcacactatacatacaacaatttaagctcggattctaaaatcaggaccaaacagctgtttgagttcatgaacttcctggccgaaaacgtgatattttgttatatgggcttggcgctgtttacttttcagaaccacatctttaacgctcttttcatcctcggagcattcgtcagcattttcctcgcaagggctcataccgaactgaagaatctacttttcttcttggcctcgtttctctgctacttttcccatagaagcaaaggcctcccgatggctggttgtgcgctcccttag

SEQ ID NO: 250717 - DNA, 1938 bp, Artificial Sequence
  derived and/or modified sequence
atggagcggcagagccgggtgatgtctgagaaggatgagtaccagttccagcaccagggcgctgtggagctgctggtgttcaacttcctgctgatcctgaccatcctgaccatctggctgttcaagaaccaccgcttccgcttcctgcacgagaccggcggggccatggtgtatggcctcatcatgggcctcatcctgcgctatgccacagcccccacagacattgaaagtggcaccgtgtatgactgtgtgaagctgaccttcagccccagcaccctgctggtgaacatcacagaccaggtgtatgagtacaagtacaagcgggagatcagccagcacaacatcaacccccaccagggcaatgccatcctggagaagatgacctttgatcctgagatcttcttcaacgtgctgctgccccccatcatcttccacgccggctacagcctgaagaagaggcacttcttccagaacctgggcagcatcctgacctacgccttcctgggcacagccatcagctgcatcgtgattggcctcatcatgtatggctttgtgaaggccatgattcatgctggccagctgaagaatggagacttccacttcacagactgcctcttcttcggcagcctgatgtctgccacagatcctgtgacagtgctggccatcttccacgagctgcacgtggaccctgacctgtacaccctgctgtttggagagagcgtgctgaatgatgctgtggccatcgtgctgacctacagcatcagcatctacagccccaaggagaaccccaatgcctttgatgctgctgccttcttccagagcgtgggcaacttcctgggcatctttgctggcagctttgccatgggcagcgcctatgccatcatcacagccctgctgaccaagttcaccaagctgtgtgagttccccatgctggagaccggcctcttcttcctgctgtcctggagcgccttcctgtctgctgaggccgccggcctgactggaattgtggccgtgctcttctgtggggtgacccaggcccactacacctacaacaacctgagcagtgacagcaagatccgcaccaagcagctgtttgagttcatgaacttcctggctgaaaatgtcatcttctgctacatgggcctggccctcttcaccttccagaaccacatcttcaatgccctcttcatcctgggcgccttcctggccatctttgtggcccgggcctgcaacatctaccccctgtccttcctgctgaacctgggcaggaagcagaagatcccctggaacttccagcacatgatgatgttcagcggcctgcggggggccatcgcctttgccctggccatccggaacacagagagccagcccaagcagatgatgttcaccaccaccctgctgctggtgttcttcaccgtgtgggtgtttggaggcggcaccacccccatgctgacctggctgcagatccgggtgggcgtggacctggatgagaacctgaaggaggaccccagcagccagcaccaggaggccaacaacctggacaagaacatgaccaaggccgagagcgcccggctcttcaggatgtggtacagctttgaccacaagtacctgaagcccatcctgacccacagcggcccccccctgaccaccaccctgcctgagtggtgtggccccatcagccggctgctgaccagcccccaggcctatggagagcagctgaaggaggatgatgtggagtgcatcgtgaaccaggatgagctggccatcaactaccaggagcaggccagcagcccctgcagccccccagcccggctgggcctggaccagaaggccagcccccagacccctgggaaggagaacatctatgaaggagacctgggcctgggcggctatgagctgaagctggagcagaccctgggccagagccagctgaactag

SEQ ID NO: 250718 - DNA, 978 bp, Artificial Sequence
  derived and/or modified sequence
ctgcggctgcagagctcctgggagcagatgacctttgatcctgagatcttcttcaacgtgctgctgccccccatcatcttccacgccggctacagcctgaagaagaggcacttcttccagaacctgggcagcatcctgacctacgccttcctgggcacagccatcagctgcatcgtcatcggcctcatcatgtatggctttgtgaaggccatgattcatgctggccagctgaagaatggagacttccacttcacagactgcctcttcttcggcagcctgatgtctgccacagatcctgtgacagtgctggccatcttccacgagctgcacgtggaccctgacctgtacaccctgctgtttggagagagcgtgctgaatgatgctgtggccatcgtgctgacctacagcatcagcatctacagccccaaggagaaccccaatgcctttgatgctgctgccttcttccagagcgtgggcaacttcctgggcatctttgctggcagctttgccatgggcagcgcctatgccatcatcacagccctgctgaccaagttcaccaagctgtgtgagttccccatgctggagaccggcctcttcttcctgctgtcctggagcgccttcctgtctgctgaggccgccggcctgaccggcatcgtggccgtgctcttctgtggggtgacccaggcccactacacctacaacaacctgagcagtgacagcaagatccgcaccaagcagctgtttgagttcatgaacttcctggccgagaatgtcatcttctgctacatgggcctggccctcttcaccttccagaaccacatcttcaatgccctcttcatcctgggcgcctttgtgtccatcttcctggcccgggcccacacagagctgaagaacctgctcttcttcctggccagcttcctgtgctacttcagccacaggagcaagggcctgcccatggccggctgtgccctgccctag

SEQ ID NO: 250719 - DNA, 1938 bp, Artificial Sequence
  derived and/or modified sequence
atggagcggcagagccgggtgatgagcgagaaggacgagtaccagttccagcatcagggtgcggtggagcttctggtgtttaacttcctgctaattttaaccatcctgaccatatggctgtttaagaaccatagatttcggttccttcacgagaccgggggggcaatggtttacggcctgatcatggggctcattttgcggtacgcaaccgcacctactgacatcgaaagcggtactgtgtacgattgcgtgaagctaaccttttcacccagcaccctgctggtcaatatcactgaccaggtatacgaatataaatataaaagggagatctcacagcacaatatcaacccacatcagggaaacgcaattcttgagaaaatgaccttcgaccccgagatcttctttaacgtcctgttgccccccattatctttcacgcagggtactcactgaagaaacgccacttttttcagaacctggggtctatccttacttatgcttttctcggaacagccataagctgtatcgtcatcggcctcataatgtatggattcgtaaaagcaatgattcacgcggggcagcttaagaacggcgatttccatttcactgactgtctctttttcgggagcttaatgagcgccactgatcccgttaccgtcttagccatcttccatgagctgcatgtcgacccagatctgtatacgctgctttttggcgaatccgtccttaacgacgcagtggcaatcgtactgacatatagcatcagcatctacagcccaaaagagaatccaaacgcatttgacgcagcggccttctttcagtctgtcggaaattttctagggatattcgctgggtcttttgcgatgggatcggcgtatgctatcattacagctttgttgacaaagttcacaaagctgtgtgaatttcctatgttagagacgggtctgttcttcctgctgtcgtggagtgcctttctttctgcagaggccgctgggctcacagggattgtggctgtcctgttttgtggtgttactcaggctcactacacctataataacctttcttcagacagcaagatacgaacaaagcaactcttcgagttcatgaacttcctggccgagaatgtgatattctgttacatgggactagcactattcacatttcagaatcatatcttcaacgctctgttcattctgggtgcgtttttagctatttttgtcgccagggcgtgcaacatctaccctctgagttttctcctgaatctgggcagaaagcaaaagataccatggaatttccagcacatgatgatgttctcaggcctacgcggggcaattgcatttgcacttgccatcagaaacacagagagccagccgaaacagatgatgtttaccacaactctcctgcttgtgttcttcaccgtgtgggtgtttgggggaggcacgacaccaatgttgacttggctgcagatcagagtgggggtggaccttgacgagaaccttaaggaagacccgtcatctcaacaccaggaggccaataaccttgacaagaacatgacgaaagccgagtcagctcgactgtttcgcatgtggtacagcttcgaccacaaatacctgaagcccatcctcactcatagcggtccaccacttaccaccacactcccagaatggtgcggaccgatatctcgcctccttacttcaccccaggcctatggagagcagctgaaggaagatgatgttgaatgcattgtgaaccaggacgagctcgcaattaattatcaggagcaggcctccagcccctgttctccacctgcccggctcggcttagatcaaaaggcctcaccacaaacccccggcaaagagaatatctacgaaggagatcttggcttggggggctacgaactgaagctcgagcagaccttgggacagtcccagctgaattag

SEQ ID NO: 250720 - DNA, 978 bp, Artificial Sequence
  derived and/or modified sequence
ctgcggctgcagagcagctgggagcagatgaccttcgaccccgagatcttctttaacgtgctgctaccacccatcatcttccatgcaggttactcccttaaaaaaagacatttttttcagaatttgggtagcatcctcacttacgcgtttcttggtacagcaatcagttgcatcgtgattggacttattatgtatgggtttgtcaaggcgatgatccacgccgggcaactgaagaatggcgattttcacttcaccgattgtctcttcttcggaagcttgatgtccgcaaccgatcccgttactgtactagccattttccacgagttgcacgttgatccggacctctatacactgcttttcggcgaaagcgttctgaatgatgctgttgccattgtactgacgtacagcatctcaatctattctcctaaagagaatcccaacgcctttgacgcagcagctttctttcagagtgtgggcaatttcttaggtatcttcgccggttctttcgcgatggggagcgcctatgccattattaccgcactgctgacgaagtttactaaactgtgcgaattccccatgctggaaacaggactgttcttcctgctgtcttggtctgcgttcctcagcgcggaggctgctggcctcacaggaatcgtggcagtgctgttttgcggcgttactcaggctcactatacctacaacaacctttcatctgatagcaagattcgaactaaacagctttttgagttcatgaactttctggctgaaaacgtcattttttgttacatgggactcgctctgttcacttttcagaaccacatttttaacgcgctgtttattcttggagccttcgtgtcaattttccttgctagagcccacactgaactaaagaacctactgttctttttggcttctttcctgtgttacttctctcatcggtcaaaaggattgccaatggcgggttgtgcgctgccgtag

SEQ ID NO: 250721 - DNA, 1938 bp, Artificial Sequence
  derived and/or modified sequence
atggaaaggcaatctcgagtgatgagtgaaaaggatgagtaccagttccagcatcagggtgctgtcgaactgctggtctttaattttctgctcatccttacgatcctgactatttggctgttcaaaaaccaccggtttcgatttttgcacgagactggcggagccatggtgtacggcttgatcatgggtctcatcctacgatatgctacagcgcctactgacatcgagagcggcacggtctacgattgtgttaagctgaccttttcaccaagtacactgcttgttaacatcaccgaccaggtttatgagtacaaatataaaagggaaattagccagcacaacattaacccccaccagggtaatgctatcttagaaaagatgactttcgaccctgagattttctttaacgtattactgcctccgattatcttccacgcaggatatagcctaaagaagcgtcacttttttcagaatttggggtccatactaacctatgcctttctagggactgccatcagttgcatagtgatcggtctgatcatgtacgggttcgttaaggcaatgatccacgccggacagttgaaaaatggtgactttcattttaccgattgtctgtttttcggctccttaatgagcgccacagatcccgtaactgttctcgccatttttcatgagcttcacgtcgacccagacctctacacgctactgtttggagaaagtgtcttgaacgatgccgttgctattgtgctgacttactctattagcatttacagccctaaggaaaacccgaatgccttcgatgctgctgccttttttcagtcagtgggaaatttcctgggaatatttgctggatctttcgccatgggtagtgcctacgcgattatcacagccctgctgacgaaattcaccaaactctgcgagtttcctatgttagaaactggtttattctttctgctaagctggtcagcgttcctgtccgccgaggcagccggactgactggaattgttgccgtgctgttttgtggagtcactcaagcccattacacctacaacaacctctcttctgatagcaagattcggaccaaacagttgtttgaattcatgaattttctggccgaaaatgttattttttgctatatggggctcgccctgttcactttccaaaatcacatattcaacgccctgtttatccttggcgcattcctagccatcttcgtggcgcgtgcttgcaacatctacccgcttagctttttgttaaacctgggacgcaagcaaaaaatcccatggaactttcagcatatgatgatgttcagtggacttaggggggctatcgcgtttgcccttgctattagaaatactgagagtcagcccaagcagatgatgttcaccacgactttgctgctcgtgtttttcactgtttgggtctttggcggtgggacaactccaatgctgacttggctgcaaataagggttggagtggatcttgatgagaatctgaaggaggatcctagcagccagcaccaggaggcgaacaacctggacaagaatatgacgaaagctgagtctgccagactcttcaggatgtggtacagcttcgaccataagtacctgaaacccatcctcacccactccggccctcctcttactacaacattgccggaatggtgtggccctatatctagattactcacctctccccaggcctatggagagcagctcaaagaagatgacgtggaatgcatcgtgaaccaggacgagctggctatcaattaccaggagcaggccagcagcccatgttcacccccagcgaggttggggctggatcagaaggcctcgcctcagactccaggaaaggaaaatatctacgagggcgacttgggactgggcggatacgaactgaagctagagcagacccttggacagtctcagctaaactag

SEQ ID NO: 250722 - DNA, 978 bp, Artificial Sequence
  derived and/or modified sequence
ctgcgcctgcagagttcctgggaacagatgacttttgacccagagattttttttaatgttttgctgcctcctataattttccatgccggttactccttaaagaaacgacacttctttcagaacctaggctccatccttacatacgcattcctggggaccgcaatttcgtgcatagtaatcggcctcatcatgtacgggtttgttaaggctatgatccatgcagggcagttgaagaatggggacttccatttcaccgattgccttttctttggttctctgatgtccgcgactgacccagtgacagtactggccatcttccacgaattacacgtcgacccagacctgtacactttgctgtttggcgagtccgttcttaatgacgctgttgctattgtactcacatatagtatttccatttattcacccaaggagaatcccaacgcctttgacgctgccgctttttttcagtcagtcgggaacttcctgggaatttttgcaggcagtttcgctatgggtagtgcctacgccatcattactgcattgttaaccaaattcacaaagctgtgcgagttccccatgctcgaaaccgggttattcttcctgctcagctggagtgctttcctgagtgcagaggccgcaggactgacaggcattgtggccgttctgttttgcggggttacccaggcccactatacctacaacaatctaagttccgacagcaaaatacggaccaagcaactcttcgaatttatgaattttctggccgagaatgttatcttttgctacatgggactggccctttttacgtttcagaatcacatattcaacgctctgttcatcctgggcgcattcgtttccatcttcttagcaagagcacatactgagctcaaaaaccttttattcttcttagcgtcattcctctgctactttagtcaccgctcaaaaggactcccaatggctggctgtgccctgccatag

SEQ ID NO: 250723 - DNA, 3627 bp, Artificial Sequence
  derived and/or modified sequence
aaaagagacagggctgctttaagagagaaacaggaagttgtaactagaagccatctgaatactaagccagggcagaatgcttgtgaagtagcaactaaagtggcagtgtttcttctgaaattctcaggcagtcagactgtcttaggcaaatcttgataaaatagcctttatccaggtttttatctaaggaatcccaagaagactggggaatggagagacagtcaagggttatgtcagaaaaggatgagtatcagtttcaacatcagggagcggtggagctgcttgtcttcaattttttgctcatccttaccattttgacaatctggttatttaaaaatcatcgattccgcttcttgcatgaaactggaggagcaatggtgtatggccttataatgggactaattttacgatatgctacagcaccaactgatattgaaagtggaactgtctatgactgtgtaaaactaactttcagtccatcaactctgctggttaatatcactgaccaagtttatgaatataaatacaaaagagaaataagtcagcacaacatcaatcctcatcaaggaaatgctatacttgaaaagatgacatttgatccagaaatcttcttcaatgttttactgccaccaattatatttcatgcaggatatagtctaaagaagagacacttttttcaaaacttaggatctattttaacgtatgccttcttgggaactgccatctcctgcatcgtcatagggttaattatgtatggttttgtgaaggctatgatacatgctggccagctgaaaaatggagactttcatttcactgactgtttattttttggttcactgatgtctgctacagatccagtgacagtgctggccattttccatgaactgcacgtcgaccctgacctgtacacactcttgtttggagagagtgtgttgaatgatgcagtggccatagtccttacatattctatatccatttacagtcccaaggagaatccaaatgcatttgatgccgcagcattcttccagtctgtggggaatttcctgggaatcttcgctggctcatttgcaatggggtctgcgtatgccatcatcacagcactgttgaccaaatttaccaagctgtgtgagttcccgatgctggaaaccggcctgtttttcctgctttcttggagtgccttcctgtctgccgaggctgccggcctaacagggatagttgctgttctcttctgtggagtcacacaagcacattatacctacaacaatctgtcttcggattccaaaataagaactaaacagttgtttgaatttatgaactttttggcggagaacgtcatcttctgttacatgggcctggcactgttcacgttccagaatcatatctttaatgctctttttatacttggagcctttctagcaatttttgttgccagagcctgcaacatatatcccctctccttcctcctgaatctaggccgaaaacagaagatcccctggaactttcagcacatgatgatgttttcaggtttgcgaggagcgatcgcatttgccttagctattcggaacacagaatctcagcccaaacaaatgatgtttaccactacgctgctcctcgtgttcttcactgtctgggtatttggaggaggaacaacccccatgttgacttggcttcagatcagagttggcgtggacctggatgaaaatctgaaggaggacccctcctcacaacaccaggaagcaaataacttggataaaaacatgacgaaagcagagagtgctcggctcttcagaatgtggtatagctttgaccacaagtatctgaaaccaattttaacccactctggtcctccgctgactacaacattacctgaatggtgtggtccgatttccaggctgcttaccagtcctcaagcctatggggaacagctaaaagaggatgatgtggaatgcattgtaaaccaggatgaactagccataaattaccaggagcaagcctcctcaccctgcagtcctcctgcaaggctaggtctggaccagaaagcttcaccccagacgccaggcaaggaaaacatttatgagggagacctcggcctgggaggctatgaactcaagcttgagcaaactttgggtcaatcccagttgaattaattggcatgaagagtacagatgtaatcacaagtaatgcaagactcactgaggaatacaagccaagctgatgaggcagtacaggggagaggctggaaaacatattaagagcataaattggagagaatcaaagccttgtcacatggatcctctggtgcctgaagaaatgagattttattatccctctctattatgcaaatgaatttagttttttgacagcagccattctgattactggattggctggggtggggatggaggtatcaggagtctagctgctggaggatgggacagctgtgctgggtcttcagggcatttctgctgcgaatgcggctctccaggcccttcacttctattctggattttattccctccattaaggagagtttaaaaataaaagaaagcttctgagagtaaacattttgctcctaagctgaagggaatgcccagctatttagtaagtgataagtttcttattttgaggacttgactcccatttgctctcagtgaccccagggcagagcccagagaagtgttccgtacccactgctgatggtttcccagagcccacactgagttgaagaacctattgttcttcttggcatccttcttatgctacttctcccatcgctcaaaggggttgcctatggctgggtgtgccctgccctaaatgcagcaccactttcaagcttagtaggaccattccaagaaaaccaggtttcttctccccataccacgttgtgcctgaagaacaagccttcccgtccttgcctgcatgtgagtcacttcttggctgtgcagcaggtccccccctccccgcgatatgctggagggtaggattctgcagcctgtgttgctctctacctggcagcagactgtgcaggagccccaacctgtcctccaattccagcattcacagctgatgagcagtgcaggagcagggcgagaggaacagagccaatgatgtgtgggttacactgaggagccaaggacagggcctcaggtctcccccttacaaggcgtggctcatggcctgcattccagagaccaacatgatagcttttaattcagctgcatgacctgtgccttttaagccataaagatacctcaagcctagcacctcttgaaatccagatgttcatattagactcgaaaaaataggctccaggcctaggtgcccaggctatgatgagtctgcttttgaaggaggtagggaatgacatcttccttggacccaaagcttaaaagtaatgtatgctttgctgaccactgtttgttaggccttaaacaacattcactgtggtggtatcaggcacactgctatgtgcatcaattatttttttgctttccaaacagaatctctggggcacaagttttacactcaagctaagtataactttgtcatttcaggtaaatatgacaagtggtggagcatgaagttttctaatttgacttaatcctaataaatttttgttacaaagta

SEQ ID NO: 250724 - DNA, 978 bp, Artificial Sequence
  derived and/or modified sequence
cttagactccagagtagctgggagcagatgacatttgatccagaaatcttcttcaatgttttactgccaccaattatatttcatgcaggatatagtctaaagaagagacacttttttcaaaacttaggatctattttaacgtatgccttcttgggaactgccatctcctgcatcgtcatagggttaattatgtatggttttgtgaaggctatgatacatgctggccagctgaaaaatggagactttcatttcactgactgtttattttttggttcactgatgtctgctacagatccagtgacagtgctggccattttccatgaactgcacgtcgaccctgacctgtacacactcttgtttggagagagtgtgttgaatgatgcagtggccatagtccttacatattctatatccatttacagtcccaaggagaatccaaatgcatttgatgccgcagcattcttccagtctgtggggaatttcctgggaatcttcgctggctcatttgcaatggggtctgcgtatgccatcatcacagcactgttgaccaaatttaccaagctgtgtgagttcccgatgctggaaaccggcctgtttttcctgctttcttggagtgccttcctgtctgccgaggctgccggcctaacagggatagttgctgttctcttctgtggagtcacacaagcacattatacctacaacaatctgtcttcggattccaaaataagaactaaacagttgtttgaatttatgaactttttggcggagaacgtcatcttctgttacatgggcctggcactgttcacgttccagaatcatatctttaatgctctttttatacttggagcctttgtatctatattcctagccagagcccacactgagttgaagaacctattgttcttcttggcatccttcttatgctacttctcccatcgctcaaaggggttgcctatggctgggtgtgccctgccctaa

SEQ ID NO: 250725 - protein, 443 aa, Artificial Sequence
  derived and/or modified sequence
MLMLFVFGVLLHEVSLSGQNEAPPNTHSIPGEPLYNYASIRLPEEHIPFFLHNNRHIATVCRKDSLCPYKKHLEKLKYCWGYEKSCKPEFRFGYPVCSYVDMGWTDTLESAEDIFWKQADFGYARERLEEMHVLCQPKETSDSSLVCSRYLQYCRATNLYLDLRNIKRNHDRFKEDFFQSGEIGGHCKLDIRTLTSEGQRKSPLQSWFAELQSYTQLNFRPIEDAKCDIVIEKPTYFMKLDAGVNMYHHFCDFINLYITQHVNNSFSTDVYIVMWDTDGKIRVTILARSTEYRKILNQNELVNALKTVSTFEVQIVDYKYRELGFLDQLRITHNTDIFIGMHGAGLTHLLFLPDWAAVFELYNCEDERCYLDLARLRGVHYITWRRQNKVFPQDKGHHPTLGEHPKFTNYSFDVEEFMYLVLQAADHVLQHPKWPFKKKHDEL

SEQ ID NO: 250726 - DNA, 1332 bp, Artificial Sequence
  derived and/or modified sequence
atgcttatgctgtttgtttttggtgtgctgctgcacgaagtcagtctgagcggacaaaatgaggcgccacctaacacacactccatccccggagagccgctgtacaattacgcctccatacgcctgcctgaggagcatatccccttcttcctacacaataatcgccatatagcaacggtttgtaggaaagattccctgtgtccttacaaaaagcaccttgagaagctaaagtattgttggggctacgagaaaagttgtaagcccgaattcagatttggatatcccgtttgctcctatgtcgacatgggttggacagataccctcgagagtgctgaagacatattctggaagcaggctgatttcggctacgcccgagagcgtcttgaggagatgcatgtgctgtgccaacccaaggagactagcgactcaagtctcgtgtgctctcgctatctgcagtactgcagagcaactaatctctacctggatttgcgcaatatcaagaggaaccatgatagatttaaagaagacttttttcaatctggcgaaatcggaggccactgtaagctcgatatcaggaccctgacctctgaaggccagcgcaagtcacctctccagagctggttcgccgagttacaatcctacacccagcttaattttcggcctatcgaagatgccaagtgtgacattgtcattgaaaagcctacttacttcatgaagttggatgccggtgttaacatgtaccatcacttttgtgatttcataaatctctatattacgcaacatgtaaacaacagcttctcaactgatgtgtatattgtcatgtgggacaccgatggcaaaattagggtgacaatccttgctcgaagtactgaatatcgaaaaatccttaaccagaacgagctcgtgaacgcgctcaagactgtgtctactttcgaagtgcaaattgtggactacaagtatcgagagttgggttttctggaccaactgaggatcacgcataacactgatatcttcattggaatgcatggtgccggacttacccacctactgtttctgcccgattgggctgccgtttttgaactgtataattgcgaggacgagagatgctaccttgacctggcgcgactgcgtggtgttcactacataacttggcgcagacagaacaaagtattccctcaggataaaggccaccaccccacactgggagagcatcctaagtttacgaactactcattcgacgtggaggagttcatgtacttagtactgcaagctgccgatcacgtgctccagcacccaaaatggcccttcaagaagaaacatgacgagctgtag

SEQ ID NO: 250727 - DNA, 1332 bp, Artificial Sequence
  derived and/or modified sequence
atgctaatgctgttcgttttcggcgtccttttgcacgaggtttcacttagcggccagaatgaggccccgccgaacacccattcgatcccaggagagcccttatacaactatgcgtcgatacgccttcctgaagaacacatccctttcttcctgcacaacaacaggcacattgctaccgtgtgtcgtaaagattcactgtgtccatataagaaacacctcgaaaaactgaagtattgctggggatacgaaaagagctgtaagccggagttccggtttggctaccctgtgtgctcctacgttgacatgggctggactgataccctagaatcggctgaggatattttctggaaacaagcagatttcgggtacgctagagagcgcctggaagagatgcatgtgctatgccaaccaaaagagacatccgactcttctcttgtgtgctcacgctacctgcagtactgtcgcgccacaaatctgtacctggatctaaggaatatcaagcgtaaccacgatcggttcaaggaggacttttttcaaagcggagagataggcgggcattgtaagttagatatcagaacactaacatcggaaggccaacgaaaaagccccctgcaatcctggttcgctgaattacagtcctacacacagctcaattttcgacccattgaggatgccaagtgtgatattgtcattgagaaacctacttatttcatgaagctggatgccggcgtcaatatgtaccaccatttctgtgattttatcaacttatacatcacacagcacgtgaataacagtttcagtacagacgtgtacattgtgatgtgggacacagatggcaaaattcgggttacaatcctcgctcggtctacggagtacagaaaaattctgaaccagaacgagctagtgaatgctttaaagacagtctcgacttttgaagtgcagatagtagattacaagtatcgagagctggggttcctggatcagcttcgtatcactcacaacacagacattttcatcgggatgcatggcgctgggctgacacacctgttgttccttccagactgggctgcagtctttgagctctacaattgcgaagacgaaaggtgttatcttgatcttgctagactcagaggggtgcactatatcacttggcggcggcaaaacaaggttttcccccaagacaaaggccatcatccaactctaggcgaacaccccaagtttacaaactattcctttgacgtggaggagtttatgtatttggtgctccaagcagctgatcacgtcctgcaacaccctaagtggccattcaaaaagaagcacgatgagctctag

SEQ ID NO: 250728 - DNA, 1332 bp, Artificial Sequence
  derived and/or modified sequence
atgttgatgttgtttgtgttcggcgtcctcctacatgaggtgtctctgtccggacagaacgaagcaccaccaaacacccactcaatacccggcgaaccactgtacaactatgcaagcatacgactacccgaggaacacatacctttctttctgcacaacaatagacacattgcaaccgtctgtcgcaaagactctttatgcccttataagaagcacttagagaagctgaagtattgctgggggtacgaaaagagctgcaagcctgagtttcggtttggctaccctgtttgttcttatgtagacatgggatggacagacacactcgagagcgctgaggatattttttggaaacaggccgacttcgggtacgccagagaacggctcgaagagatgcatgtgctatgtcagcctaaagaaaccagtgactcatctctggtatgctcacgatacttgcaatattgccgcgcaacaaacctgtacctggaccttcggaatattaaacgtaaccatgaccgatttaaagaggacttttttcaaagcggtgagattggcggtcactgcaagctggacatccgcactctaacttctgaaggccaaagaaagtcccctttacagtcttggtttgccgaactgcaaagctacactcagctcaacttccgcccaattgaggacgccaagtgtgatatcgtcattgagaaaccaacctacttcatgaagctggacgccggtgtcaatatgtaccatcatttctgcgatttcatcaatttgtatataacccagcacgttaacaattctttttcaaccgacgtctatatcgttatgtgggacacagacggaaagatacgagtgaccatcctcgcaaggtctacggagtacaggaagatactgaaccagaacgaactagtgaatgctttaaagacagtctcgacttttgaagtgcagatagtagattacaagtatcgagagctggggttcctggatcagcttcgtatcactcacaacacagacattttcatcgggatgcatggcgctgggctgacacacctgttgttccttccagactgggctgcagtctttgagctctacaattgcgaagacgaaaggtgttatcttgatcttgctagactcagaggggtgcactatatcacttggcggcggcaaaacaaggttttcccccaagacaaaggccatcatccaactttaggcgagcatccaaaattcacgaattatagttttgacgttgaggaattcatgtacctcgtgttacaggcagccgatcatgtacttcagcatcccaaatggcccttcaagaaaaagcacgacgagttatag

SEQ ID NO: 250729 - DNA, 4138 bp, Artificial Sequence
  derived and/or modified sequence
gccgtctcctccgcctcctcctcggtagttcacggctgccccggctccaggcctgtggaaatcgaatcaagggtttctggagtggagtgattccagctgctttgagctgaaggaaaagtagcctggccagtaaagcgtccgtgtgctggaggagtgcagccacccatcccggcgggccttgcaggacgaccgacaccaggaaggctttgtgccaggcccagcagccacccccagccgccttatgcaagtgggtacatgccctcgccagacgccagctttctgatctgcgtctttagattttttccatcgcctaagcgttacttctccactgatcggttttagagacctgaaacatcacagaagcttctgagtggttctgaagattcaagaggtttgcaggttgctatgttaatgttgtttgtctttggagtcttacttcatgaagtctcactgagtggtcagaatgaagctcctcctaatactcacagcattccaggcgaacctctgtataactatgccagcatccgcttgccagaggagcacattcccttctttttgcacaacaataggcatattgccactgtctgtaggaaagactctctttgtccatataagaaacacctagagaagctaaagtactgctggggttatgagaaatcctgcaaaccagagttcaggtttggttacccagtttgcagctatgtcgacatgggatggacggacactcttgagtcagctgaggacatattttggaaacaagctgactttggatatgccagagagaggctggaggagatgcatgtgctctgtcagcctaaggaaacgagtgactcaagtctggtgtgttcccgttatcttcagtactgcagagcaaccaatctctatcttgatttaagaaacatcaagagaaatcatgacagatttaaggaggactttttccagagtggtgaaattggagggcactgtaaacttgacatccgtacattgacgtctgaaggtcagcgcaaaagccctctgcagtcatggtttgctgagctacaaagctatactcagctcaacttcagacctatagaagatgctaaatgtgacattgtcattgaaaaaccaacatatttcatgaaattagatgcaggtgttaacatgtatcaccacttctgtgatttcatcaatctttatattactcagcacgttaataactcattcagtactgacgtgtacatcgtgatgtgggacaccgatggaaaaattcgagtcaccattcttgcacggagcacagaataccggaaaatccttaaccaaaatgagcttgtaaatgcactgaaaacagtatctacatttgaagtccagattgttgattacaagtatagagaacttgggtttttagatcaactaaggatcacacacaacacggacatatttattggaatgcatggagctggtctgacccatttacttttccttccagactgggctgctgtatttgaactgtacaactgtgaagatgaacgctgttacttagacttggccaggctgagaggcgttcactacatcacttggcgacggcagaacaaagtctttcctcaggataagggccaccatccaaccctgggggagcacccgaagttcaccaactactctttcgatgtagaagaatttatgtatcttgtccttcaggctgcagaccacgtattgcaacacccaaagtggccatttaagaagaaacatgatgagctataaatatgctgagtctgtttgcaaaaagagagtgtttaaacactccaacacccagacttagaattaaatcagtaaagcaatctgttatttcctatccccgaattaccttttctatgccaaaacataccttcaggatattgttatgtgttgtatagatgttaagtgtttcatgtggtttttgtgtcattgctatttatcaatagcaataattttgcactgaaaactttttatagttcaaaaattaagcatggactccccagtatactttaactttctttctttctttttttttttttggagacagagtctcactgtcacccaggctggagtgcagtggcatgatctcagtttatgcaacttctgcctccccaggttcaagcgattcttttgcctcagccacctgactagctgggattgcagcctgcaccaccacacctggctaaatttttgttgttgtcgttgagatacagtttcactctgtcacccaggctggagtgcagtggcatgatctcagctcactgcaacctctgccttctggattcaagtgattcttgtgccttagcctcccaagtagctgggattacaggcgtgcaccaccacgcccagttgatttttgtatttttgatagagacggagtttcaccatgttggccaggctggtctcgaactctgggttcaagaaatcctcccaccttgcctcccaaagtgctgggattacaggtgtgagccaccacgcatggccctgaactttctctttttaggaataccaaagttttcaactttttcagctttagaatttgtaaatatttttgtagaatatcatatgactgtaattccagagtgttccaacttgtttatgatatatttgggtaaatttacaactgttcttttatttgccataatctggttataacactgtttgtggtaggaaaggaaaacatgcaaaacatacacacacacacacacacacacacacacacgcagagttgtgattctcagtaccaagctataggaccatgttatagatcagcgtttagtcacctccaggttatatgcatcgagaacctgaataaatcatgccactatattaatttatattacatgtttcatatttaaatcatgttttcctaaaatgtagcaactacatgtgataaaagcaaattagaacattctgtaggactgtcttgcataccttctgtctggtttccactgattccttcttagccatggagagcatttgtgattaattaatttatatatgaaataatggtttccattttatgcgagtatttgtaactgcatataccagtgcgtgtgcgtctacctctgtcagcatgaaagtattccagtctttaatttcaaaaacttcaaattagcctcatgaagagaatttttccctgtgaaaagtaagaccaagaaaaaacaaactaaagacatgtgacttattcaatgaaagtgaaaaagaagctctaaaacagtgtcattgattaaaaagaatatctggaatgtagccccactctttgagtgggattcatttcttactgcttatgaactttcaatttagtagtcagaaaccatggatttattttactgcacaatgtgaagtttacattttattaacacttgagtagtctgatttagagactagttacttctattttttaaaataatggagtaacaaattacagaatagctaaataattttttaaaaatattttacagttgtaaaaaatatccatcagaaaaatgacacacaaaacaaaatatctggacctttacagaagacgtttgctgacccccactttaaaggattggaacagtcttctagaattgaggaatatttattaaaatacctgtaaagaaaatagtgaatcactgtagcaatggctttgattcagaccttaaaatcacataagaagaattacaacatgttatggatttttaagtggcaggtattgtaactgttttttgtgtgcaaaatactgagtaaccactgggaaaatatttcagatgaaagggatgacaaaagcatgttgcgctttgcatcagcaaggcattgacttctgaaaaaatgatctgaaaaaagtttcaccgtttgtcttcttacctcattttaagaagcatgtgaaaatgggatactatagactactgagaatttcagaaattgagaacaatttcataataaaacggctatatttgaagagagaatacattttatataaacaggaaaatacatttgacactttatggaattttatgagactttttgtgggaacagaaggtcttcaaattgtaaaatgtaaagattgctctttttattaagtctttaacagggatgtatttcattgtatgttttgggtatggctttggaataaatcattttatattttatttgaatatcagaa

SEQ ID NO: 250730 - DNA, 1332 bp, Artificial Sequence
  derived and/or modified sequence
atgctgatgctgttcgtgttcggcgtgctgctgcacgaggtgagcctgagcggccagaacgaggccccccccaacacccacagcatccccggcgagcccctgtacaactacgccagcatcagactgcccgaggagcacatccccttcttcctgcacaacaacagacacatcgccaccgtgtgcagaaaggacagcctgtgcccctacaagaagcacctggagaagctgaagtactgctggggctacgagaagagctgcaagcccgagttcagattcggctaccccgtgtgcagctacgtggacatgggctggaccgacaccctggagagcgccgaggacatcttctggaagcaggccgacttcggctacgccagagagagactggaggagatgcacgtgctgtgccagcccaaggagaccagcgacagcagcctggtgtgcagcagatacctgcagtactgcagagccaccaacctgtacctggacctgagaaacatcaagagaaaccacgacagattcaaggaggacttcttccagagcggcgagatcggcggccactgcaagctggacatcagaaccctgaccagcgagggccagagaaagagccccctgcagagctggttcgccgagctgcagagctacacccagctgaacttcagacccatcgaggacgccaagtgcgacatcgtgatcgagaagcccacctacttcatgaagctggacgccggcgtgaacatgtaccaccacttctgcgacttcatcaacctgtacatcacccagcacgtgaacaacagcttcagcaccgacgtgtacatcgtgatgtgggacaccgacggcaagatcagagtgaccatcctggccagaagcaccgagtacagaaagatcctgaaccagaacgagctggtgaacgccctgaagaccgtgagcaccttcgaggtgcagatcgtggactacaagtacagagagctgggcttcctggaccagctgagaatcacccacaacaccgacatcttcatcggcatgcacggcgccggcctgacccacctgctgttcctgcccgactgggccgccgtgttcgagctgtacaactgcgaggacgagagatgctacctggacctggccagactgagaggcgtgcactacatcacctggagaagacagaacaaggtgttcccccaggacaagggccaccaccccaccctgggcgagcaccccaagttcaccaactacagcttcgacgtggaggagttcatgtacctggtgctgcaggccgccgaccacgtgctgcagcaccccaagtggcccttcaagaagaagcacgacgagctgtag

SEQ ID NO: 250731 - DNA, 1332 bp, Artificial Sequence
  derived and/or modified sequence
atgctcatgctgtttgtttttggcgttctgctccatgaagtaagcttgtctggccagaatgaggcacctccaaacacgcacagcatccccggggagccactctacaattatgcctccatcagactacctgaggagcatatccccttcttcttacataacaacaggcatatcgctactgtgtgcagaaaggactccctatgtccatataaaaagcacctggagaagctgaaatactgctgggggtatgaaaagtcttgtaaaccagaatttaggtttgggtatccagtatgttcgtacgtggacatgggctggactgacactcttgaatccgcagaggacatcttctggaagcaggctgatttcggctacgcaagggaacgcctggaggagatgcatgtgctgtgccagcctaaggagacatccgacagctctctggtttgcagcaggtatctgcaatattgccgcgccaccaacctttatctcgacctgcgcaacatcaagaggaatcacgaccgcttcaaagaagactttttccagtcaggtgagatcgggggacattgtaaattggatatcagaactttgacttctgaaggccaacggaagtctccacttcagtcttggttcgctgagctgcagtcatatacacagcttaacttccggcctattgaggatgcaaagtgcgacattgttattgagaagcctacctacttcatgaagctagacgccggagttaacatgtaccaccatttttgtgacttcattaacctgtacattacccagcatgtcaataatagtttttccactgatgtttacattgtgatgtgggacaccgacgggaagataagagtgacgatcctggccaggagcactgaataccggaagattctgaaccaaaatgagctggtcaacgcgctcaaaacagtcagcacgtttgaggtacagatcgttgactacaaataccgagaactaggcttcctggaccagctgcggattacgcataacaccgatatcttcatcggcatgcacggagccggtctcacacatctcctgttcctgcctgattgggccgccgtcttcgagctatacaattgcgaggacgaaaggtgctatctggatctggccagactaaggggtgtccactacataacctggcgcaggcaaaataaggtgttccctcaggataaagggcaccacccaactctcggcgagcacccaaaatttaccaattattcctttgacgtggaggagttcatgtatctggtgttacaggcagcagatcatgtgcttcagcaccccaagtggcctttcaagaagaaacatgatgagttatag

SEQ ID NO: 250732 - DNA, 1332 bp, Artificial Sequence
  derived and/or modified sequence
atgctgatgctgtttgtgtttggagtgctgctgcacgaggtgtccctgagcggccagaatgaggccccacccaacacccacagcatccctggagagcccctgtacaactatgccagcatccggctgcctgaggagcacatccccttcttcctgcacaacaacagacacatcgccaccgtgtgcaggaaggacagcctgtgcccctacaagaagcacctggagaagctgaagtactgctggggctatgagaagagctgcaagccagagttccgcttcggctaccctgtgtgcagctatgtggacatgggctggacagacaccctggagagcgctgaggacatcttctggaagcaggccgactttggctacgcccgggagcggctggaggagatgcacgtgctgtgccagcccaaggagaccagtgacagcagcctggtgtgcagccgctacctgcagtactgccgggccaccaacctgtacctggacctgaggaacatcaagaggaaccacgaccgcttcaaggaggacttcttccagagcggggagattggaggccactgcaagctggacatccgcaccctgaccagcgagggccagaggaagagccccctgcagagctggtttgctgagctgcagagctacacccagctgaacttccggcccattgaagatgccaagtgtgacatcgtgattgagaagcccacctacttcatgaagctggatgctggggtgaacatgtaccaccacttctgtgacttcatcaacctgtacatcacccagcacgtgaacaacagcttcagcacagatgtgtacatcgtgatgtgggacacagatggcaagatccgggtgaccatcctggcccggagcacagagtacaggaagatcctgaaccagaatgagctggtgaatgccctgaagacagtgtccacctttgaggtgcagatcgtggactacaagtaccgggagctgggcttcctggaccagctgcgcatcacccacaacacagacatcttcatcggcatgcacggggccggcctgacccacctgctcttcctgcctgactgggccgctgtgtttgagctgtacaactgtgaagatgagcgctgctacctggacctggcccggctgcggggcgtgcactacatcacctggaggcggcagaacaaggtgttcccccaggacaagggccaccaccccaccctgggggagcaccccaagttcaccaactacagctttgatgtggaggagttcatgtacctggtgctgcaggccgctgaccacgtgctgcagcaccccaagtggcccttcaagaagaagcatgatgagctgtag

SEQ ID NO: 250733 - DNA, 1332 bp, Artificial Sequence
  derived and/or modified sequence
atgctgatgctgttcgtgttcggcgtgctgctgcacgaggtgagcctctcgggacagaacgaagctccaccaaacacacactccatcccgggggaacctctctataattacgcgtcaatccgtctaccggaagaacatatccccttctttttacataacaacaggcatattgccactgtctgccggaaggattcactttgtccgtacaaaaagcatttggagaagctcaagtactgctgggggtacgaaaaatcctgtaagcccgaatttagattcggctaccccgtgtgttcatatgtggacatgggttggactgatactctggaatcggccgaggatattttctggaagcaggctgatttcggctatgcacgggaaaggctggaggagatgcacgtgctatgtcaaccgaaagagaccagtgattcgtccttggtgtgttctcgatatctgcagtattgtcgggctacaaatctgtacctcgatctgcgaaacatcaaacggaaccatgaccgtttcaaagaagacttttttcagtccggcgaaatcggtggccattgcaagttagatattcgcaccctgacctccgagggacaacgcaaaagtccgttgcagtcctggtttgccgagctgcagtcttacacacaactcaacttccggcctatcgaggacgccaagtgtgatatcgtcatagagaagccaacttactttatgaaactagacgcaggcgtcaatatgtaccaccacttctgtgattttattaatctatatatcacacagcacgtgaataattctttcagcactgatgtctacatcgtcatgtgggatacggacggtaagatccgggtcacaatactggcccgtagcactgagtaccgcaagattctgaaccagaacgagttagtgaacgctctaaaaacagtatcgaccttcgaggtccagatcgtggactacaaataccgggagctgggattcctcgaccaattgcggattactcataacacagatatctttatcgggatgcacggagccggcttaactcatcttcttttcctgcctgactgggctgcggtcttcgagctgtacaattgcgaggatgaaaggtgttaccttgacctggccagactgagaggcgtccactatatcacatggcggcggcagaacaaagtgttcccccaggacaaaggccaccatccaacgctaggggagcacccaaaattcactaactactcgtttgatgtagaagagttcatgtatctagtgttacaggccgccgatcacgtgctgcagcatccaaaatggcctttcaagaagaagcacgacgagctctag

SEQ ID NO: 250734 - RNA, 1332 nt, Artificial Sequence
  derived and/or modified sequence
augcuaaugcuguucguuuucggcguccuuuugcacgagguuucacuuagcggccagaaugaggccccgccgaacacccauucgaucccaggagagcccuuauacaacuaugcgucgauacgccuuccugaagaacacaucccuuucuuccugcacaacaacaggcacauugcuaccgugugucguaaagauucacuguguccauauaagaaacaccucgaaaaacugaaguauugcuggggauacgaaaagagcuguaagccggaguuccgguuuggcuacccugugugcuccuacguugacaugggcuggacugauacccuagaaucggcugaggauauuuucuggaaacaagcagauuucggguacgcuagagagcgccuggaagagaugcaugugcuaugccaaccaaaagagacauccgacucuucucuugugugcucacgcuaccugcaguacugucgcgccacaaaucuguaccuggaucuaaggaauaucaagcguaaccacgaucgguucaaggaggacuuuuuucaaagcggagagauaggcgggcauuguaaguuagauaucagaacacuaacaucggaaggccaacgaaaaagcccccugcaauccugguucgcugaauuacaguccuacacacagcucaauuuucgacccauugaggaugccaagugugauauugucauugagaaaccuacuuauuucaugaagcuggaugccggcgucaauauguaccaccauuucugugauuuuaucaacuuauacaucacacagcacgugaauaacaguuucaguacagacguguacauugugaugugggacacagauggcaaaauucggguuacaauccucgcucggucuacggaguacagaaaaauucugaaccagaacgagcuagugaaugcuuuaaagacagucucgacuuuugaagugcagauaguagauuacaaguaucgagagcugggguuccuggaucagcuucguaucacucacaacacagacauuuucaucgggaugcauggcgcugggcugacacaccuguuguuccuuccagacugggcugcagucuuugagcucuacaauugcgaagacgaaagguguuaucuugaucuugcuagacucagaggggugcacuauaucacuuggcggcggcaaaacaagguuuucccccaagacaaaggccaucauccaacucuaggcgaacaccccaaguuuacaaacuauuccuuugacguggaggaguuuauguauuuggugcuccaagcagcugaucacguccugcaacacccuaaguggccauucaaaaagaagcacgaugagcucuag

SEQ ID NO: 250735 - RNA, 1332 nt, Artificial Sequence
  derived and/or modified sequence
auguugauguuguuuguguucggcguccuccuacaugaggugucucuguccggacagaacgaagcaccaccaaacacccacucaauacccggcgaaccacuguacaacuaugcaagcauacgacuacccgaggaacacauaccuuucuuucugcacaacaauagacacauugcaaccgucugucgcaaagacucuuuaugcccuuauaagaagcacuuagagaagcugaaguauugcuggggguacgaaaagagcugcaagccugaguuucgguuuggcuacccuguuuguucuuauguagacaugggauggacagacacacucgagagcgcugaggauauuuuuuggaaacaggccgacuucggguacgccagagaacggcucgaagagaugcaugugcuaugucagccuaaagaaaccagugacucaucucugguaugcucacgauacuugcaauauugccgcgcaacaaaccuguaccuggaccuucggaauauuaaacguaaccaugaccgauuuaaagaggacuuuuuucaaagcggugagauuggcggucacugcaagcuggacauccgcacucuaacuucugaaggccaaagaaaguccccuuuacagucuugguuugccgaacugcaaagcuacacucagcucaacuuccgcccaauugaggacgccaagugugauaucgucauugagaaaccaaccuacuucaugaagcuggacgccggugucaauauguaccaucauuucugcgauuucaucaauuuguauauaacccagcacguuaacaauucuuuuucaaccgacgucuauaucguuaugugggacacagacggaaagauacgagugaccauccucgcaaggucuacggaguacaggaagauacugaaccagaacgaacuagugaaugcuuuaaagacagucucgacuuuugaagugcagauaguagauuacaaguaucgagagcugggguuccuggaucagcuucguaucacucacaacacagacauuuucaucgggaugcauggcgcugggcugacacaccuguuguuccuuccagacugggcugcagucuuugagcucuacaauugcgaagacgaaagguguuaucuugaucuugcuagacucagaggggugcacuauaucacuuggcggcggcaaaacaagguuuucccccaagacaaaggccaucauccaacuuuaggcgagcauccaaaauucacgaauuauaguuuugacguugaggaauucauguaccucguguuacaggcagccgaucauguacuucagcaucccaaauggcccuucaagaaaaagcacgacgaguuauag

SEQ ID NO: 250736 - protein, 334 aa, Artificial Sequence
  derived and/or modified sequence
MKDSPFQVTKLYWLNEKWDFIASASDMAAEQGQILVIATAAVGGFTLLVILTLFFLITGRCQWYIKAKMKSEEKRRNHLQNGHLRFPGIKTYIDPDTYEDPSLAVHEFAKEIDPSRIRIERVIGAGEFGEVCSGRLKTPGKREIPVAIKTLKGGHMDRQRRDFLREASIMGQFDHPNIIRLEGVVTKRSFPAIGVEAFCPSFLRAGFLNSIQAPHPVPGGGSLPPRIPAGRPVMIVVEYMENGSLDSFLRKHDGHFTVIQLVGMLRGIASGMKYLSDMGYVHRDLAARNILVNSNLVCKVSDFGLSRVLEDDPEAAYTTTDLFQTLTLNLCYSA

SEQ ID NO: 250737 - DNA, 726 bp, Artificial Sequence
  derived and/or modified sequence
atggccgccgagcagggccagatcctggtgatcgccaccgccgccgtgggcggcttcaccctgctggtgatcctgaccctgttcttcctgatcaccggcagatgccagtggtacatcaaggccaagatgaagagcgaggagaagagaagaaaccacctgcagaacggccacctgagattccccggcatcaagacctacatcgaccccgacacctacgaggaccccagcctggccgtgcacgagttcgccaaggagatcgaccccagcagaatcagaatcgagagagtgatcggcgccggcgagttcggcgaggtgtgcagcggcagactgaagacccccggcaagagagagatccccgtggccatcaagaccctgaagggcggccacatggacagacagagaagagacttcctgagagaggccagcatcatgggccagttcgaccaccccaacatcatcagactggagggcgtggtgaccaagagaagcttccccgccatcggcgtggaggccttctgccccagcttcctgagagccggcttcctgaacagcatccaggccccccaccccgtgcccggcggcggcagcctgccccccagaatccccgccggcagacccgtgatgatcgtggtggagtacatggagaacggcagcctggacagcttcctgagactgtaccccaaggccgagtacaacggcaagcagtgcagcagatacagcatctag

SEQ ID NO: 250738 - DNA, 1005 bp, Artificial Sequence
  derived and/or modified sequence
atgaaggacagccccttccaggtgaccaagctgtactggctgaacgagaagtgggacttcatcgccagcgccagcgacatggccgccgagcagggccagatcctggtgatcgccaccgccgccgtgggcggcttcaccctgctggtgatcctgaccctgttcttcctgatcaccggcagatgccagtggtacatcaaggccaagatgaagagcgaggagaagagaagaaaccacctgcagaacggccacctgagattccccggcatcaagacctacatcgaccccgacacctacgaggaccccagcctggccgtgcacgagttcgccaaggagatcgaccccagcagaatcagaatcgagagagtgatcggcgccggcgagttcggcgaggtgtgcagcggcagactgaagacccccggcaagagagagatccccgtggccatcaagaccctgaagggcggccacatggacagacagagaagagacttcctgagagaggccagcatcatgggccagttcgaccaccccaacatcatcagactggagggcgtggtgaccaagagaagcttccccgccatcggcgtggaggccttctgccccagcttcctgagagccggcttcctgaacagcatccaggccccccaccccgtgcccggcggcggcagcctgccccccagaatccccgccggcagacccgtgatgatcgtggtggagtacatggagaacggcagcctggacagcttcctgagaaagcacgacggccacttcaccgtgatccagctggtgggcatgctgagaggcatcgccagcggcatgaagtacctgagcgacatgggctacgtgcacagagacctggccgccagaaacatcctggtgaacagcaacctggtgtgcaaggtgagcgacttcggcctgagcagagtgctggaggacgaccccgaggccgcctacaccaccaccgacctgttccagaccctgaccctgaacctgtgctacagcgcctag

SEQ ID NO: 250739 - DNA, 726 bp, Artificial Sequence
  derived and/or modified sequence
atggccgcagagcagggacagatcctggttattgccaccgccgcagtcggggggtttactcttctggtcattttaactcttttctttctcatcacaggtagatgccagtggtatattaaagctaagatgaagtccgaggagaaaagaagaaaccatctccagaacggccacctcaggttccctgggataaaaacttatattgaccccgacacttacgaggatccttcgttggctgtccatgaattcgcaaaggaaattgacccttccagaatacgaatagagagagtcattggcgcaggcgagttcggagaggtatgcagtggaaggctgaagacccccggtaagagggagattccagtggccatcaagaccctgaaaggtggccacatggaccgccagagacgagatttccttcgggaggcttcgattatggggcagtttgaccaccccaatattatacgcctggagggcgtagtgacaaagcgttctttcccagccatcggcgtggaagcgttttgcccctccttcttgcgggcaggcttcctcaactcgattcaggcaccgcatccggtccccggtggcggcagtctacccccgcgaatccctgccggcagaccggttatgatcgtcgtggagtacatggaaaacggctcactcgatagtttcttgcgactttaccccaaggcagaatataatggaaaacaatgcagtcgatatagtatctag

SEQ ID NO: 250740 - DNA, 1005 bp, Artificial Sequence
  derived and/or modified sequence
atgaaggacagtcccttccaggttaccaagctttactggttaaacgaaaagtgggatttcatagcaagtgcaagcgacatggctgccgagcaggggcagattctggtgatcgccaccgcagctgtgggcggcttcactctactcgtgatccttactcttttcttccttattacagggagatgccagtggtacattaaggcaaaaatgaaaagcgaggagaagcgccgcaatcaccttcagaacgggcacctgcggtttcccggcatcaaaacttatatcgacccagatacgtacgaggacccttcgctggccgtccatgagttcgctaaagagattgatcccagcagaattcgcatcgagcgagtgataggtgccggcgagttcggggaggtgtgttccggaaggttaaagacacctggtaagagagaaattcctgtagccataaagacattaaaggggggccacatggaccgacaacggagggatttcttaagggaggcttcgattatgggacagttcgatcaccccaacattatccggctggaaggagttgtcaccaagcgttcgtttccagctatcggtgtggaggccttctgtcccagcttcttgagagcaggttttctgaattctatccaggccccacatccagtgccaggtggaggctcattgcccccccgcataccggccgggagacctgtaatgatagtcgtagaatacatggaaaacgggtcattggactctttcctgaggaaacacgacgggcattttaccgttattcaacttgttggaatgctgcggggcatcgcgagtggaatgaaatatttgagcgatatgggatacgttcacagagacttggcagcacggaacattctggtgaattctaatttagtctgtaaggtctccgacttcggtctctccagggtgctggaggacgaccctgaggcagcgtataccacaactgacttgttccaaacactgaccctcaatctgtgctactccgcatag

SEQ ID NO: 250741 - DNA, 1582 bp, Artificial Sequence
  derived and/or modified sequence
acaaacaaaactacaatggaagaagaaaacgtcctcaactagacatctgccaaaaatatcatccagaatgccctggcaagttcacttccatttagtgaagtgagataatttggcaattcacgcaagagactgagaaccaagcctcaagccctgcctctgattctgcaggtatggaacatgagcagctgacctactcttccacaaggtccaaagcccccagtgtcatcatcacaggtcttaagccagccaccaaatatgtatttcacatccgagtgagaactgcgacaggatacagtggctacagtcagaaatttgaatttgaaacaggagatgaaagactctccatttcaagtgacaaaactgtactggcttaatgaaaagtgggactttattgcctcagcttctgacatggcagcagaacaaggacagattctcgtgatagccaccgccgctgttggcggattcactctcctcgtcatcctcactttattcttcttgatcactgggagatgtcagtggtacataaaagccaagatgaagtcagaagagaagagaagaaaccacttacagaatgggcatttgcgcttcccgggaattaaaacttacattgatccagatacatatgaagacccatccctagcagtccatgaatttgcaaaggagattgatccctcaagaattcgtattgagagagtcattggggcaggtgaatttggagaagtctgtagtgggcgtttgaagacaccagggaaaagagagatcccagttgccattaaaactttgaaaggtggccacatggatcggcaaagaagagattttctaagagaagctagtatcatgggccagtttgaccatccaaacatcattcgcctagaaggggttgtcaccaaaagatccttcccggccattggggtggaggcgttttgccccagcttcctgagggcagggtttttaaatagcatccaggccccgcatccagtgccagggggaggatctttgccccccaggattcctgctggcagaccagtaatgattgtggtggaatatatggagaatggatccctagactcctttttgcggaagcatgatggccacttcacagtcatccagttggtcggaatgctccgaggcattgcatcaggcatgaagtatctttctgatatgggttatgttcatcgagacctagcggctcggaatatactggtcaatagcaacttagtatgcaaagtttctgattttggtctctccagagtgctggaagatgatccagaagctgcttatacaacaactgacctcttccaaactctaacacttaacctctgctattctgcataaattctgagaaaagccaaattttctgtcggtctaagaagacatagcctacacccaactggagataattataaaaaataatgaagcagcatgaggggaaggtatttaatgtgtattttaaagttgggagagattctccttcacctaatttaggtgtttgtgaattggcttgactttttgaagttaatttttaagccttgaacatgtccaactttaagaactttaagaataaatattttaacacaagtga

SEQ ID NO: 250742 - DNA, 726 bp, Artificial Sequence
  derived and/or modified sequence
atggctgctgagcagggccagatcctggtgattgccacagctgctgtgggcggcttcaccctgctggtgatcctgaccctcttcttcctgatcaccggccgctgccagtggtacatcaaggccaagatgaagtctgaggagaagagaagaaaccacctgcagaatggccacctgcgcttccctggcatcaagacctacattgatcctgacacctatgaggaccccagcctggccgtgcatgaatttgccaaggagattgaccccagccgcatcagaattgagcgggtgattggagctggggagtttggagaggtgtgcagcggccgcctgaagaccccaggcaagcgggagatccctgtggccatcaagaccctgaagggcggccacatggaccggcagaggcgggacttcctgcgggaggccagcatcatgggccagtttgaccaccccaacatcatccggctggagggcgtggtgaccaagaggagcttccctgccatcggcgtggaggccttctgccccagcttcctgcgggccggcttcctgaacagcatccaggccccccaccctgtgcctgggggcggcagcctgcccccacgcatcccagctggccggcctgtgatgattgtggtggagtacatggagaatggcagcctggacagcttcctgcggctgtaccccaaggccgagtacaacgggaagcagtgcagccgctacagcatctag

SEQ ID NO: 250743 - DNA, 1005 bp, Artificial Sequence
  derived and/or modified sequence
atgaaggacagccccttccaggtgaccaagctgtactggctgaatgagaagtgggacttcatcgccagcgccagtgacatggctgctgagcagggccagatcctggtgattgccacagctgctgtgggcggcttcaccctgctggtgatcctgaccctcttcttcctgatcaccggccgctgccagtggtacatcaaggccaagatgaagtctgaggagaagagaagaaaccacctgcagaatggccacctgcgcttccctggcatcaagacctacattgatcctgacacctatgaggaccccagcctggccgtgcatgaatttgccaaggagattgaccccagccgcatcagaattgagcgggtgattggagctggggagtttggagaggtgtgcagcggccgcctgaagaccccaggcaagcgggagatccctgtggccatcaagaccctgaagggcggccacatggaccggcagaggcgggacttcctgcgggaggccagcatcatgggccagtttgaccaccccaacatcatccggctggagggcgtggtgaccaagaggagcttccctgccatcggcgtggaggccttctgccccagcttcctgcgggccggcttcctgaacagcatccaggccccccaccctgtgcctgggggcggcagcctgcccccacgcatcccagctggccggcctgtgatgattgtggtggagtacatggagaatggcagcctggacagcttcctgaggaagcatgatggccacttcaccgtcatccagctggtgggcatgctgcggggcatcgccagcggcatgaagtacctgagtgacatgggctacgtgcaccgggacctggccgccaggaacatcctggtgaacagcaacctggtgtgcaaggtgtctgactttggcctgagccgggtgctggaggatgatcctgaggccgcctacaccaccacagacctcttccagaccctgaccctgaacctgtgctacagcgcctag

SEQ ID NO: 250744 - DNA, 726 bp, Artificial Sequence
  derived and/or modified sequence
atggccgccgagcagggccagatcctggtgatcgccaccgccgccgtcggaggtttcacattgcttgtaattctcactctttttttccttatcaccggacggtgccagtggtatatcaaggcgaagatgaaatctgaggagaagagacggaaccatctccagaatgggcacttacggtttccggggatcaaaacttatatcgaccctgatacatacgaggaccccagtctcgccgtgcacgaattcgcaaaagagattgatccctccaggatcaggattgagcgggtcatcggagctggggagttcggtgaagtttgttctggaagactgaagaccccaggaaagagggaaattccagttgccattaagacgctcaagggtggtcacatggaccgacagaggagagattttctgcgagaggctagtatcatgggccagtttgatcaccccaatatcattcgattggaaggagtggtgaccaaacgctccttccccgccatcggagtggaggcgttttgccctagcttcttacgggcagggttcctgaattcgatccaggcgccacatcctgttccgggaggtgggtcgttgccgccacgcatccccgcagggaggccagttatgattgtagtggaatacatggaaaacgggtctttagattcgtttcttcgcctctaccccaaggctgagtataacggaaaacagtgtagcagatactcaatctag

SEQ ID NO: 250745 - DNA, 1005 bp, Artificial Sequence
  derived and/or modified sequence
atgaaggacagccccttccaggtgaccaagctgtactggctgaacgagaagtgggacttcatcgcatccgcatcagacatggccgccgagcagggccaaattttggtgatagccacagctgcagtggggggcttcactctgctggttattctcactctcttctttctgatcaccggtcggtgccagtggtatatcaaagccaagatgaagtctgaggagaagcgccgtaatcacctgcagaacggccatttgagattccccggaatcaagacatacatagaccccgacacctatgaagatccttctctagcagtacacgaattcgcgaaagaaatagaccccagccgtatcaggatcgagcgcgtgattggagcgggagagttcggggaagtgtgctcaggcagactcaagacacctgggaagcgggaaatccccgttgcaattaagacattgaaaggaggccacatggaccgccaaaggcgagactttctcagagaggcgtcaataatgggccagttcgaccacccgaatataatccgccttgagggcgtcgtaactaaaagatccttccctgcaatcggcgtggaggcattttgcccgtcctttctgcgtgccggttttctgaacagtattcaagctccacaccctgtgcccggtggcggaagcctcccaccccgcatcccagctggaagaccagtgatgatcgttgtcgaatatatggagaatgggtcgctagattcttttctcagaaagcatgacggccacttcacagtgattcagcttgtgggcatgttgcgagggattgcctcaggcatgaaatatctgtccgacatggggtatgtgcacagagacttggccgccaggaacatcttggtgaatagtaacttggtgtgtaaggtgtcagactttggactgagtcgggtactcgaagacgaccccgaggccgcctacacgaccaccgacctgttccagaccctcacactaaatctctgctactctgcctag

SEQ ID NO: 250746 - DNA, 726 bp, Artificial Sequence
  derived and/or modified sequence
atggccgcagagcaagggcagattctggtgattgcaaccgctgccgtggggggatttacccttctcgtgattctcacactctttttcctcattacaggcaggtgccaatggtacattaaagccaaaatgaaatcggaagaaaaacggcgaaaccatctgcagaacgggcatctaaggttccccggtattaagacgtatatcgatccagacacttatgaggatccctcactcgccgtgcacgagttcgctaaagagatcgatccgagtcgcataagaatagagcgggtgattggcgctggcgagtttggcgaagtgtgcagcggcaggctgaaaactcccggaaagagagaaataccagtcgccatcaagactctgaaaggagggcatatggaccggcaacgtcgggatttcctgcgcgaggccagcattatgggccagtttgaccatcccaatatcataagactggagggcgtggtaactaagcgctctttcccagccattggtgtcgaagccttctgcccatcctttcttagagctggcttcctgaactcaattcaagcaccacatccagtgcccggaggcggttctctccctccaagaatccccgcaggcaggcctgtcatgatcgtagtggaatatatggaaaacggctccctcgactcctttttaaggctgtatccaaaagctgagtacaacggcaaacagtgctctcgttacagcatctag

SEQ ID NO: 250747 - DNA, 1005 bp, Artificial Sequence
  derived and/or modified sequence
atgaaggattcccctttccaagtaaccaaactctattggctgaacgagaagtgggatttcattgccagcgcctctgacatggcagcagaacagggccagatcctcgttatagctacagcggcagtgggagggttcacgctcctagttattctcaccctcttctttttgatcacaggtcgttgccaatggtacatcaaagccaagatgaagtccgaggaaaaacgtcgaaatcacctgcaaaatggccacctgcgcttccccggaatcaagacctatattgaccctgatacgtacgaggacccaagtttggcggttcacgaatttgccaaagagattgaccctagccgaatcagaatcgagcgagtcataggggctggggaattcggggaggtgtgctcggggaggctgaagacgccgggaaaaagagagatccccgttgccatcaagaccctcaaggggggtcacatggatcgccaaaggcgcgattttctgcgcgaagcgtccatcatggggcagttcgaccatccaaatattatacggctcgaaggcgtcgttacgaaacggtccttccccgcaatcggagtcgaagctttttgtccttcctttctgagggccggatttcttaacagcatccaggccccacatcctgtaccaggtggagggtccctccccccaaggatccctgccggacgacccgtgatgatcgtggtggagtacatggaaaatggctcactggatagttttcttcggaagcatgatggacactttacagtgatccaactagttggaatgttgcgcggaattgcttccggcatgaagtatctgtcagatatgggctatgtccatagagacttagccgctagaaatatactggtcaatagtaatctggtatgtaaggtatctgatttcggcctgagcagggtgctggaggatgatcctgaggccgcatatacaaccacagatctttttcagaccctcaccttaaacctttgctattccgcgtag

SEQ ID NO: 250748 - protein, 504 aa, Artificial Sequence
  derived and/or modified sequence
MTEAALVEGQVKLRDGKKWKSRWLVLRKPSPVADCLLMLVYKDKSERIKGLRERSSLTLEDICGLEPGLPYEGLVHTLAIVCLSQAIMLGFDSHEAMCAWDARIRYALGEVHRFHVTVAPGTKLESGPATLHLCNDVLVLARDIPPAVTGQWKLSDLRRYGAVPSGFIFEGGTRCGYWAGVFFLSSAEGEQISFLFDCIVRGISPTKGPFGLRPVLPDPSPPGPSTVEERVAQEALETLQLEKRLSLLSHAGRPGSGGDDRSLSSSSSEASHLDVSASSRLTAWPEQSSSSASTSQEGPRPAAAQAAGEAMVGASRPPPKPLRPRQLQEVGRQSSSDSGIATGSHSSYSSSLSSYAGSSLDVWRATDELGSLLSLPAAGAPEPSLCTCLPGTVEYQVPTSLRAHYDTPRSLCLAPRDHSPPSQGSPGNSAARDSGGQTSAGCPSGWLGTRRRGLVMEAPQGSEATLPGPAPGEPWEAGGPHAGPPPAFFSACPVCGGLKVNPPP

SEQ ID NO: 250749 - DNA, 1515 bp, Artificial Sequence
  derived and/or modified sequence
atgaccgaagctgcactggtggagggacaggtaaagttgcgggatggaaagaagtggaaatctcggtggctggtgctaaggaagccctcccccgttgccgattgcctcctgatgctggtgtataaagataagtccgagagaattaaaggactgcgcgaacgctcgagcctgaccctggaggatatatgtggccttgaaccaggactcccctacgagggcctagtgcacaccctggctatcgtgtgcctttcacaggccatcatgctgggttttgacagtcacgaagccatgtgcgcttgggatgcacgaatacggtacgcactgggcgaagtgcatagatttcacgtgaccgtggcaccggggaccaagctcgaatctggtcccgcaaccctgcatctctgtaacgacgtattggtgctcgccagggacatccccccagctgtgaccggtcaatggaagttatcagatctgaggcggtacggggcggtgcccagcggcttcatcttcgagggcggtacacgctgcggctattgggcgggagtcttttttctttcgagcgcggagggggaacaaattagtttcttatttgactgtatagtcagggggatttcgccaacaaagggtcctttcggcctgaggccagtgctacctgatccttctcctccaggaccatcgaccgtcgaagagagagtagctcaggaggccttagagaccctccagctggagaagcgcctgtctcttctgagtcacgccggcaggcccggaagtggtggggatgaccgatccctgagctcaagttcttccgaggcatcccatctcgatgtgtctgcaagttcacgcctgacagcctggcctgaacagagttcgagtagcgcatccactagccaagagggaccccgccctgctgctgctcaggccgccggtgaggcaatggtgggtgccagcagaccaccacctaaaccactgcgccccagacagctgcaggaagttgggcggcagagttcttctgattccggaatcgcaacagggagccactcaagctactcatcatccttgtcaagctacgcgggcagctcactggacgtatggcgcgcaaccgatgagctcggctccttgttgagtctgccagcagctggagctccagagccgagcctgtgtacatgcttacctggaactgtggagtatcaagtccctacttccctgcgggcccactacgacactcctcgatccctgtgcctcgcaccaagagatcattccccaccttctcaggggagccccggcaactctgctgccagggactcgggcggccaaacttcagccggctgcccttctgggtggctgggtaccagacggcggggtctggttatggaggcccctcaaggctctgaagccactctgcctggacccgcgcccggcgagccctgggaagctgggggacctcatgcagggccacctcctgcctttttttcagcttgcccagtctgcgggggactcaaggtcaatccccccccctag

SEQ ID NO: 250750 - DNA, 1515 bp, Artificial Sequence
  derived and/or modified sequence
atgacagaggccgccctggtggagggccaggtgaagctgagagatggcaagaagtggaagagccgctggctggtgctgaggaagcccagccctgtggccgactgcctgctgatgctggtgtacaaggacaagtctgagcgcatcaagggcctgcgggagaggagcagcctgaccctggaggacatctgtggcctggagcccggcctgccctatgagggcctggtgcacaccctggccatcgtgtgcctgagccaggccatcatgctgggctttgacagccatgaggccatgtgtgcctgggatgcccgcatccgctatgccctgggggaggtgcaccgcttccacgtgacagtggcccctggcaccaagctggagagcggccctgccaccctgcacctgtgcaatgatgtgctggtgctggcccgggacatccccccagctgtgacaggccagtggaagctgagtgacctgcggcgctacggggctgtgcccagcggcttcatctttgaaggaggcacccgctgtggctactgggccggggtcttcttcctgagcagcgctgagggggagcagatctccttcctgtttgactgcatcgtgcggggcatcagccccaccaagggccccttcggcctgcggcctgtgctgcctgaccccagccccccaggccccagcacagtggaggagcgggtggcccaggaggccctggagaccctgcagctggagaagaggctgagcctgctgagccatgctggccggcccggcagcggaggagatgacaggagcctgagcagcagcagcagcgaggccagccacctggatgtgtctgccagcagccggctgacagcctggccagagcagagcagcagcagcgccagcaccagccaggagggccccaggcctgctgctgcccaggccgccggggaggccatggtgggcgccagccggcccccacccaagcccctgcggccccggcagctgcaggaggtgggccggcagagcagcagtgacagcggcatcgccaccggcagccacagcagctacagcagcagcctgagcagctatgccggcagcagcctggatgtgtggagggccacagatgagctgggcagcctgctgagcctgcctgctgctggggcccctgagcccagcctgtgcacctgcctgcccggcaccgtggagtaccaggtgcccaccagcctgcgggcccactatgacacccccaggagcctgtgcctggccccccgggaccacagcccccccagccagggcagccctggcaacagcgctgcccgggacagcggcggccagaccagcgctggctgccccagcggctggctgggcaccaggagaagaggcctggtgatggaggccccccagggcagcgaggccaccctgcccggccctgcccctggagagccctgggaggccggcggcccccacgccggccccccaccagccttcttcagcgcctgccctgtgtgtggcggcctgaaggtgaaccccccaccctag

SEQ ID NO: 250751 - DNA, 1515 bp, Artificial Sequence
  derived and/or modified sequence
atgaccgaggccgccctggtggagggccaggtgaagctgcgggacgggaagaaatggaaatcccggtggttagtcctgcgaaagccttctcctgtcgccgattgtttgctcatgcttgtttataaggacaagtcagagcgcattaaagggctacgcgaacgcagcagcctgacactcgaggatatctgcggcctagagcccggcctgccgtatgagggcttggtacacactctggccatcgtgtgtctgtcccaggccatcatgctgggcttcgactcacacgaggccatgtgtgcttgggatgctagaatcagatatgcattgggggaagtccataggttccatgtcaccgttgcaccggggacgaagctggaatcagggcctgctaccctacacttatgcaatgacgtgttggtcctagcaagagacatccccccagccgtgacgggccagtggaagttgtcagatctgaggcggtatggggccgttccctcggggtttatttttgagggcggtacccggtgcggatactgggccggagtttttttcctgtcatcggcagaaggagagcaaatatctttcctctttgattgtatcgtgcgaggtatctctcccactaagggtccctttgggcttcgccctgtactccctgaccccagcccaccaggtccttcaaccgttgaggagcgcgtcgcccaggaagccctggaaaccctacagctcgagaagcgactatccctcttgtcacacgccggccggcctggaagcggcggcgatgacagatcactgtcttctagcagctcagaagcctcacacttggatgtcagtgcctccagtcgcctgactgcttggcctgagcagtcttcaagttctgcttcaacatctcaagaggggccccgtcccgcggccgcccaggctgccggtgaggctatggtgggggcaagtcggccccctccaaaaccactgaggcctcgtcagctccaagaagtcggcagacaatctagttccgatagcggtatagcgacaggatcccacagctcttattcctctagtcttagctcttacgccggcagttccctggacgtgtggcgggcaacagatgagctgggctccctgctttcactgccggctgccggggcccccgagcccagcctgtgcacctgcttacccggaaccgtggagtaccaggtgcctacctctttaagggcacattatgatacacccagaagcctctgtctcgctcccagggaccattctcccccttcccaagggtccccaggaaacagtgctgcgcgggatagcggggggcagacgtccgccggatgcccgtctggctggctgggcaccaggaggaggggcctggtaatggaggctcctcaaggctccgaggccacccttccaggcccagccccaggcgaaccttgggaagcgggaggcccacacgcgggtccaccccctgcatttttttccgcctgtcctgtgtgtggtggcttaaaagttaacccacccccctag

SEQ ID NO: 250752 - DNA, 1515 bp, Artificial Sequence
  derived and/or modified sequence
atgactgaggcagctctggtcgagggccaggtgaagctgcgcgacgggaaaaagtggaagtctagatggctggtgctgagaaagccttcaccggtagcagactgtctattgatgctcgtgtataaggacaagagcgaaaggatcaagggccttagagaaagaagctctctcacactagaagatatctgcggtctggaacccggattgccctatgaggggctcgttcatactcttgccatcgtatgcctcagtcaggccatcatgctgggctttgacagccacgaagctatgtgcgcgtgggacgcgcgtatacggtatgccttgggcgaagttcaccgcttccacgttactgtggcgcctggcaccaagttagaatccggccctgcaacccttcatctgtgcaacgacgtcctggtattggccagggacatcccacccgcagtcactggtcaatggaagctgtccgatctgagacgctacggtgccgtgcccagtgggtttattttcgaaggagggacccggtgcggttattgggcaggggtttttttcttatccagtgccgagggggagcagataagttttctattcgattgcatcgtgagaggaatcagcccaactaaggggccttttgggctcaggcctgttttgccagatcccagcccccctggtccatccacagttgaagaaagagtcgctcaggaggccctggaaacactgcagttagaaaagcggctgagcctcctcagccacgctgggcgacccggaagcggcggtgatgacagaagtctgagctcgagctctagtgaggcctcacacctcgatgtgtccgcatcatcacgcttgaccgcatggcccgaacaatcctcaagctccgcgtctaccagtcaggaggggcctagaccagctgctgcccaggccgctggcgaagccatggtgggggcaagcaggccacccccaaagcccctgcggccacggcagctccaggaggtggggcgacagagctcctctgactccggaattgcaacagggagtcactccagttattcgtcctccctgtcctcctacgccggatcaagtctggacgtgtggcgagccactgacgagctggggtccctgctgtccttgccggcagccggtgcccctgaaccatcattgtgtacatgcctgcccggtacggtggaataccaagttcctacatcgctccgcgctcactatgataccccgcgatcactgtgcttggcaccgagggatcacagccctccatcccagggctcacctggtaactccgcagccagagactccgggggacagactagcgctgggtgtcctagtggttggctgggaaccaggagaagaggcctcgtgatggaagcaccgcagggtagcgaggccaccctgccgggacccgcacccggagagccatgggaggccggagggccacacgctggacctcccccagcatttttttctgcatgtccagtgtgcggagggctcaaggtgaaccccccaccctag

SEQ ID NO: 250753 - DNA, 1515 bp, Artificial Sequence
  derived and/or modified sequence
atgaccgaggccgccctggtggagggccaggtgaagctgagagacggcaagaagtggaagagcagatggctggtgctgagaaagcccagccccgtggccgactgcctgctgatgctggtgtacaaggacaagagcgagagaatcaagggcctgagagagagaagcagcctgaccctggaggacatctgcggcctggagcccggcctgccctacgagggcctggtgcacaccctggccatcgtgtgcctgagccaggccatcatgctgggcttcgacagccacgaggccatgtgcgcctgggacgccagaatcagatacgccctgggcgaggtgcacagattccacgtgaccgtggcccccggcaccaagctggagagcggccccgccaccctgcacctgtgcaacgacgtgctggtgctggccagagacatcccccccgccgtgaccggccagtggaagctgagcgacctgagaagatacggcgccgtgcccagcggcttcatcttcgagggcggcaccagatgcggctactgggccggcgtgttcttcctgagcagcgccgagggcgagcagatcagcttcctgttcgactgcatcgtgagaggcatcagccccaccaagggccccttcggcctgagacccgtgctgcccgaccccagcccccccggccccagcaccgtggaggagagagtggcccaggaggccctggagaccctgcagctggagaagagactgagcctgctgagccacgccggcagacccggcagcggcggcgacgacagaagcctgagcagcagcagcagcgaggccagccacctggacgtgagcgccagcagcagactgaccgcctggcccgagcagagcagcagcagcgccagcaccagccaggagggccccagacccgccgccgcccaggccgccggcgaggccatggtgggcgccagcagacccccccccaagcccctgagacccagacagctgcaggaggtgggcagacagagcagcagcgacagcggcatcgccaccggcagccacagcagctacagcagcagcctgagcagctacgccggcagcagcctggacgtgtggagagccaccgacgagctgggcagcctgctgagcctgcccgccgccggcgcccccgagcccagcctgtgcacctgcctgcccggcaccgtggagtaccaggtgcccaccagcctgagagcccactacgacacccccagaagcctgtgcctggcccccagagaccacagcccccccagccagggcagccccggcaacagcgccgccagagacagcggcggccagaccagcgccggctgccccagcggctggctgggcaccagaagaagaggcctggtgatggaggccccccagggcagcgaggccaccctgcccggccccgcccccggcgagccctgggaggccggcggcccccacgccggccccccccccgccttcttcagcgcctgccccgtgtgcggcggcctgaaggtgaacccccccccctag

SEQ ID NO: 250754 - DNA, 2562 bp, Artificial Sequence
  derived and/or modified sequence
attttgaaagtgaccctgggctggggcgccggggcgagcgcggcggcgcggaaccatgacagaagatgaccgaggcggcgctggtggagggccaggtcaagctgcgggacggcaagaagtggaagagtaggtggctggtgctgcggaagccgtcgcccgtggcagactgcctgctgatgctggtctacaaggacaagtcggagcgtatcaagggcctgcgggagcgcagcagcctgacgctagaggacatctgcgggctggagcccggcctgccctacgagggcttggtccacacgctggccattgtctgcctgtcccaggccatcatgctgggctttgacagccacgaggccatgtgtgcgtgggatgcccggatccgctatgcgctcggcgaggtgcataggttccatgtgacagtggctccaggcaccaagttggagagcggcccggctaccctgcacctctgcaatgatgtcctcgtcttggccagggacatccccccggctgtcacggggcagtggaagctgtctgacctccggcgctacggggccgtgccaagcggattcatctttgaaggcgggaccaggtgtgggtactgggctggcgtcttcttcctgtcctcggccgagggggagcagatcagcttcctgttcgactgcatcgtccgaggcatctcccccaccaagggcccctttgggctgcggccggttctaccagacccaagtcccccgggaccctcgactgtggaggagcgtgtggcccaggaagccctggaaaccctacagctggagaagcggctgagcctcctctcacatgcgggcaggccgggcagtggaggggatgaccgcagcctgtccagctcatcctcagaggccagtcacttggacgtcagcgccagcagccggctcaccgcatggccagagcaatcctcgtcgtcagccagcacgtcacaggaggggcctagaccagcagctgcccaggccgccggggaagccatggtgggtgcctcaaggccaccccccaagccgctgcgtccgcggcagctgcaggaggttggccgccagagctcctcggacagcggcatcgccactggcagccactcctcttactccagcagcctctcgtcctacgcgggcagcagcctggacgtgtggcgggccacagatgaactgggctcactgctcagcctgccagcagcgggggcccccgagcccagcctgtgcacctgcctgcccgggacagtcgagtaccaggtgcccacctccctgcgggcccactatgacacaccacgcagcctttgcctggctcctagagaccacagccccccctcacagggcagccccggcaacagtgcggccagggactcaggcggccagacgtccgccgggtgtccctctggctggctgggcacgagacggcggggcctggtgatggaggccccccagggcagcgaggccacactgcctggccctgcccctggcgagccctgggaagcaggcggcccccacgcggggccacccccggctttcttttcggcatgtccagtctgtggaggactcaaggtaaacccccctccttgagagccgcagatcccgccccgcggctgcaaaggggctgaatttgcccccagatggcagaggaagtggcgccagcctccttgcagactggtgctctgtgttctgtgggagggaccgggggtctcccggagaggggagctggagggcgcgccctgtggctgccaccggaggaaggggctgacttggggaggtgagttctggaaggcaggggctctgggtccggcaggtcggggtcaccagagccccaatgctcagctgcttcactccgtgtcccccacccctgaggatcaggtgagtgctgcacctctgttggctcgtgccttgcactggggtgccaagggctggaggccctgccgctggccttgtcctccttgggcctcacgcccccttcgggggtggccggttctccccatcacctctctggggcagtcacaccacctgttaagcatcaagctaccacagaggctccggccacctgggctccaccagcccagcccccctgggctccgtgtgcgctgggcctcatccccatctatgggaggaaactgaagctcaggaggctgtgtggcttgcggggtctctgggttctgggccccactgttccccagtgaagcccttgtgggaaggttccgggagcaggtggtgtcctcagagcagcctcgcctgctgaccccactgggagaggcgccgtgcctcgggcccctggtgggagctctgctggctcctgtctgaacctcctcgcagggccaaaggctggcttggcctgtgtttcccctggcccaggcctcagcccctgcgtcggaggtggggctgtgttgggcccattgtcccccgccctgggtggcttcctcttgcacagcctggagcctgccctgaccacagcccagcagctccctgtgaacacctctttgtcccttcactgtcagctgtttctaaacccagacactgtttgtaatagactggaaataaaatgttctttccttac

SEQ ID NO: 250755 - DNA, 2551 bp, Artificial Sequence
  derived and/or modified sequence
attttgaaagtgaccctgggctggggcgccggggcgagcgcggcggcgcggaaccatgacagaagatgaccgaggcggcgctggtggagggccaggtcaagctgcgggacggcaagaagtggaagagtaggtggctggtgctgcggaagccgtcgcccgtggcagactgcctgctgatgctggtctacaaggacaagtcggagcgtatcaagggcctgcgggagcgcagcagcctgacgctagaggacatctgcgggctggagcccggcctgccctacgagggcttggtccacacgctggccattgtctgcctgtcccaggccatcatgctgggctttgacagccacgaggccatgtgtgcgtgggatgcccggatccgctatgcgctcggcgaggtgcataggttccatgtgacagtggctccaggcaccaagttggagagcggcccggctaccctgcacctctgcaatgatgtcctcgtcttggccagggacatccccccggctgtcacggggcagtggaagctgtctgacctccggcgctacggggccgtgccaagcggattcatctttgaaggcgggaccaggggctggcgtcttcttcctgtcctcggccgagggggagcagatcagcttcctgttcgactgcatcgtccgaggcatctcccccaccaagggcccctttgggctgcggccggttctaccagacccaagtcccccgggaccctcgactgtggaggagcgtgtggcccaggaagccctggaaaccctacagctggagaagcggctgagcctcctctcacatgcgggcaggccgggcagtggaggggatgaccgcagcctgtccagctcatcctcagaggccagtcacttggacgtcagcgccagcagccggctcaccgcatggccagagcaatcctcgtcgtcagccagcacgtcacaggaggggcctagaccagcagctgcccaggccgccggggaagccatggtgggtgcctcaaggccaccccccaagccgctgcgtccgcggcagctgcaggaggttggccgccagagctcctcggacagcggcatcgccactggcagccactcctcttactccagcagcctctcgtcctacgcgggcagcagcctggacgtgtggcgggccacagatgaactgggctcactgctcagcctgccagcagcgggggcccccgagcccagcctgtgcacctgcctgcccgggacagtcgagtaccaggtgcccacctccctgcgggcccactatgacacaccacgcagcctttgcctggctcctagagaccacagccccccctcacagggcagccccggcaacagtgcggccagggactcaggcggccagacgtccgccgggtgtccctctggctggctgggcacgagacggcggggcctggtgatggaggccccccagggcagcgaggccacactgcctggccctgcccctggcgagccctgggaagcaggcggcccccacgcggggccacccccggctttcttttcggcatgtccagtctgtggaggactcaaggtaaacccccctccttgagagccgcagatcccgccccgcggctgcaaaggggctgaatttgcccccagatggcagaggaagtggcgccagcctccttgcagactggtgctctgtgttctgtgggagggaccgggggtctcccggagaggggagctggagggcgcgccctgtggctgccaccggaggaaggggctgacttggggaggtgagttctggaaggcaggggctctgggtccggcaggtcggggtcaccagagccccaatgctcagctgcttcactccgtgtcccccacccctgaggatcaggtgagtgctgcacctctgttggctcgtgccttgcactggggtgccaagggctggaggccctgccgctggccttgtcctccttgggcctcacgcccccttcgggggtggccggttctccccatcacctctctggggcagtcacaccacctgttaagcatcaagctaccacagaggctccggccacctgggctccaccagcccagcccccctgggctccgtgtgcgctgggcctcatccccatctatgggaggaaactgaagctcaggaggctgtgtggcttgcggggtctctgggttctgggccccactgttccccagtgaagcccttgtgggaaggttccgggagcaggtggtgtcctcagagcagcctcgcctgctgaccccactgggagaggcgccgtgcctcgggcccctggtgggagctctgctggctcctgtctgaacctcctcgcagggccaaaggctggcttggcctgtgtttcccctggcccaggcctcagcccctgcgtcggaggtggggctgtgttgggcccattgtcccccgccctgggtggcttcctcttgcacagcctggagcctgccctgaccacagcccagcagctccctgtgaacacctctttgtcccttcactgtcagctgtttctaaacccagacactgtttgtaatagactggaaataaaatgttctttccttac

SEQ ID NO: 250756 - DNA, 975 bp, Artificial Sequence
  derived and/or modified sequence
atggactgggacgacgagtacagccacaacagcttcgacctgcactgcctgctgaacagcttccccggcgacctggagttcgagcagatcttcagcgacatcgacgagaagatcgagcagaacgccgccagcatcaagcactgcatcaaggagatccagagcgagatcaacaagcagtgccccggcgtgcagctgcagaccaccaccgactgcttcgagtggctgaccaactacaactacagcaccagcgagagcagcttcatcagccacggcgacctgatcaagttcttcaagaccctgcaggacctgctgaagaacgagcagaaccaggaggagatgaccctggacctgctgtgggacctgagctgccacagcagcgtgagcttccccagcaccctgagcggcaccagcttccacttcctgagcagaaccagcctgcacagcgtggaggacaacagcagcatggacgtgaagagcatgtgggacgacatcagactgcacctgagaagattcctggtgagcaagctgcagagccacaacgagatcaacaacagccagcagaagatcctgctgaagaagcagtgcctgcagcagctgctgttcctgtaccccgagagcgaggtgatcatcaagtaccagaacatccagaacaagctgctggccaacctgctgtggaactgcttccccagctacaacagagacagcaacctggacgtgatcgcccacggctaccagagcaccatgctgaagctgtacagcgtgatcaaggaggacttcaacaccctgtgcgagatcctggcccccagcagcatggtgaagttcatcaaggagacctacctggacaccgtgaccgaggagatggccaagttcctggagaacttctgcgagctgcagttcagagagaacgccgtgagagtggtgaagaccagcaagagcagcagcaagcacagaggcgccgtgcacgccctgggctag

SEQ ID NO: 250757 - DNA, 975 bp, Artificial Sequence
  derived and/or modified sequence
atggattgggacgatgaatatagccacaactctttcgacctgcattgcctcctgaattcattcccaggcgacctggagtttgagcagatattcagtgatatcgacgagaaaatcgagcaaaatgccgcaagtataaaacattgtattaaagagatccagagcgaaataaacaagcagtgcccgggtgttcagttacagactaccacagactgtttcgagtggctcactaactacaactactctaccagtgaaagcagctttatctcccatggggatctcattaaatttttcaagaccctccaagatctgctcaagaacgagcagaaccaggaagaaatgactttagacttgctctgggacctgtcctgccactcctcagtgtctttccctagcacactttctgggacatcattccattttctcagtcgcaccagtctgcactctgtggaagacaattcgtccatggatgtgaagagcatgtgggatgacatccgcttgcatctgaggagatttctcgttagtaagttgcaaagccacaacgagatcaacaacagccaacagaaaattttgctgaagaaacagtgccttcagcagctccttttcctgtacccagagtctgaggtgatcattaagtatcaaaatatccaaaacaagctcctcgccaatctcctgtggaactgctttccctcgtataaccgggacagcaatctggatgtcatcgctcacgggtatcagtccaccatgctcaaattgtacagcgtcatcaaagaggatttcaatactctgtgcgagatcttagctccctcgtccatggtgaaattcatcaaagaaacctacctggatactgttactgaagaaatggctaagtttcttgagaacttctgcgaactccaatttcgggagaacgccgtgagggtcgtgaagacaagcaagtcctcatccaagcaccgaggcgccgtccatgccttgggctag

SEQ ID NO: 250758 - DNA, 975 bp, Artificial Sequence
  derived and/or modified sequence
atggactgggatgatgagtacagccacaacagctttgacctgcactgcctgctgaacagcttccctggggacctggagtttgagcagatcttcagtgacattgatgagaagattgagcagaatgctgccagcatcaagcactgcatcaaggagatccagagcgagatcaacaagcagtgccctggggtgcagctgcagaccaccacagactgctttgagtggctgaccaactacaactacagcaccagcgagagcagcttcatcagccacggggacctgatcaagttcttcaagaccctgcaggacctgctgaagaatgagcagaaccaggaggagatgaccctggacctgctgtgggacctgagctgccacagctctgtgtccttccccagcaccctgagcggcaccagcttccacttcctgagcaggaccagcctgcacagcgtggaggacaacagctccatggatgtgaagtccatgtgggatgacatccggctgcacctgcggcgcttcctggtgtccaagctgcagagccacaatgagatcaacaacagccagcagaagatcctgctgaagaagcagtgcctgcagcagctgctcttcctgtacccagagagcgaggtgatcatcaagtaccagaacatccagaacaagctgctggccaacctgctgtggaactgcttccccagctacaacagagacagcaacctggatgtgattgcccacggctaccagagcaccatgctgaagctgtacagcgtcatcaaggaggacttcaacaccctgtgtgagatcctggcccccagctccatggtgaagttcatcaaggagacctacctggacacagtgacagaggagatggccaagttcctggagaacttctgtgagctgcagttcagagaaaatgctgtgcgggtggtgaagaccagcaagagcagcagcaagcacagaggagctgtgcacgccctgggctag

SEQ ID NO: 250759 - DNA, 975 bp, Artificial Sequence
  derived and/or modified sequence
atggactgggacgacgagtacagccacaacagcttcgacctgcactgcctgctgaacagtttccctggtgacctggaattcgagcaaatcttttctgacatcgatgagaagatcgaacagaacgccgcgagcatcaaacattgcattaaggaaatccaatcagagataaacaaacagtgccccggggtgcagctgcagactactactgactgtttcgaatggttaaccaactataactatagcacttcagagagttccttcatttctcacggcgatctcatcaaattcttcaagacactacaagacctgttgaagaatgagcagaaccaggaagaaatgactttagatctgttatgggatctgtcctgtcactcttctgtctcgtttcccagtacactgtccggtacgtcatttcatttcctctcacgtacatccttacactctgtggaagacaattccagtatggacgtgaaatcgatgtgggacgacatccggctgcacttgaggagatttcttgtcagcaagctccagtcacataacgagataaataatagccagcaaaagattctgctgaaaaagcagtgcctacaacagcttctcttcctgtatccagaatccgaagtaatcattaaatatcaaaacatacagaacaaactgctggcaaacctgctctggaactgcttcccttcctataatagagacagcaatctagatgtcattgcacacggctatcagagtacaatgttgaaactctactcagttatcaaggaagatttcaatacgctgtgcgagatcctggctccctcctcgatggtgaagtttatcaaggaaacttatttggacacagtgaccgaagagatggccaagtttctagagaacttctgcgagctgcaatttagggaaaatgctgtgcgcgtagtcaaaacctcaaagtcctcttccaagcaccggggagcagtccacgctctgggttag

SEQ ID NO: 250760 - DNA, 975 bp, Artificial Sequence
  derived and/or modified sequence
atggactgggatgatgagtactcacacaactcttttgatcttcattgccttctgaactcttttcctggcgatttggaattcgaacagatcttttctgatattgacgaaaagatcgaacaaaacgccgctagcatcaaacactgcatcaaggagatccagtccgagattaataaacagtgccctggtgttcagttacagaccaccacagattgcttcgaatggctaacgaactataactattccactagtgaatcctccttcatctcacacggggacttgatcaagttctttaaaaccttgcaagacctcctgaagaacgagcagaatcaggaagaaatgacacttgaccttctgtgggacctgtcctgccacagttccgtgtctttcccatctacattgtctgggacaagtttccactttctatccaggaccagtctgcattcagtggaggataactcctctatggatgtcaagtctatgtgggacgacatacggctgcacctccgcagattcctggtcagtaaattacagagtcataacgagatcaataattcccagcagaagattctgctcaagaaacagtgcctgcaacagcttttattcttataccccgaaagcgaagtgatcattaagtaccagaacatccagaacaagttgctggcaaatctgctatggaattgctttccaagctacaacagagactccaatcttgacgtcatcgcacatggctatcaaagcacaatgcttaagctgtactccgtaatcaaagaagactttaataccctctgtgagatcttggcaccgtcttctatggtcaagtttatcaaggaaacatatctggacacggtgaccgaggagatggcgaaattcttggaaaacttctgcgagttgcaatttcgcgagaacgccgtgagagtggtgaagacgtccaaaagttccagcaaacacagaggggctgtgcacgctttaggctag

SEQ ID NO: 250761 - DNA, 2228 bp, Artificial Sequence
  derived and/or modified sequence
gcagagcttgagtctggccagcgggtcaggctcttgctagatcagcaccggaggtggaagactggtacattttacatactttgggaaaaaaaaacgttgctgaagttactagaaaagagacagttcttctgctgacaactcttcaggaaataattttctacctccttaggattcgaagaccagttcattcttagtgtcttctgaaataaaattagaatggattgggatgatgaatattctcataattcttttgacctacattgtttgttaaactcatttcctggagacttggagtttgagcagatcttcagtgacattgatgaaaagattgaacaaaatgctgcaagcataaaacattgcattaaagagatacagtccgaaattaacaaacaatgtccaggtgtgcagctgcaaacaacaactgactgctttgaatggctaactaactataattacagtacatctgaatcatctttcatttctcatggagacttgataaaatttttcaaaacactgcaagatttgttgaagaatgaacaaaatcaagaagaaatgacattggatttactttgggacctctcctgccacagcagcgtttcattcccatcaaccctaagtggaacatctttccatttcctctctaggacgtctcttcattctgttgaagataattcctctatggatgtcaagtctatgtgggatgatataagactgcatcttcgacgcttcttagtgagcaaattacaaagccataatgaaataaacaattcacagcaaaaaattttattgaaaaagcagtgcttacaacaactcttgtttctttatccagaatcagaagttataatcaaataccaaaacatacagaataaactgttggctaatcttctgtggaactgctttccttcttacaacagagattcaaatttagatgtaatagctcatggatatcaaagtacaatgcttaagttatactcagtaataaaagaggattttaacacactatgtgaaattttagctccatcttcaatggtgaaattcattaaagaaacttacctggatactgttacagaagaaatggcaaaatttcttgaaaatttttgtgagctgcagttcagagaaaatgctgttcgtgtggttaaaacaagcaagagctccagcaagcatagaggagcagtgcatgctttgggttagtgacatttaaaatttttgtttggtttaacttaagtcttttaatatgtttaattttctaagatgttttctatttggttaaatctcactgcaaacatgaaaattagaaaatgaatgtaatgaaattttgcagtatacatttctcatgcatttttttctataattgtagttataaaagtattttctttcttattaaattgttaaagatattggaaatataagccaaaaatactttaaataagagtttaatttctcttgattgcatatgacaaacagtatttgtgaaactgtgtgtatacacacatatatataaatgagtatatatgcttatacacatataagctcctttatctgtttattaaatatacgcatatatataagcacatatactcagttatatatatgtacatttagttatatacataacagaaaagtatgatttttaatccattgtatcttccaaagctaaagcattattaggtaaaaagaatttttgaaaatttgttgaaatttgcagtaaaattggatatttaaaagttgtaatattttagtcagtcaattctaataatgagcaactatgaaatactataattataaaattctgtattgtagttgattaggaaggtataacattttactatagctatttttaaagtttctctactattttttctataaggatgtatacaaataaaagatgatttgaaaatttctattttattcataagataaaggaaaaaaggaaagaagttattgtgatataataaacttttcttattgtggttgtactttcctaccagtggagaaaaatcagggtaaaaataggattatttctaaaattatcattagttatgcttttatataaaatctgaggtgtatttctgaataagttcataaactatatggcttaagtatttgaaaattattatttggtgaattatggatctttgaatttatgatcatctttttaaaattcctatagctcactatacttgtgcgtatcttcattaataaaatttcagttgaccaaattaatgtga

SEQ ID NO: 250762 - protein, 539 aa, Artificial Sequence
  derived and/or modified sequence
MVPGARGGGALARAAGRGLLALLLAVSAPLRLQAEELGDGCGHLVTYQDSGTMTSKNYPGTYPNHTVCEKTITVPKGKRLILRLGDLDIESQTCASDYLLFTSSSDQYGPYCGSMTVPKELLLNTSEVTVRFESGSHISGRGFLLTYASSDHPDLITCLERASHYLKTEYSKFCPAGCRDVAGDISGNMVDGYRDTSLLCKAAIHAGIIADELGGQISVLQRKGISRYEGILANGVLSRDGSLSDKRFLFTSNGCSRSLSFEPDGQIRASSSWQSVNESGDQVHWSPGQARLQDQGPSWASGDSSNNHKPREWLEIDLGEKKKITGIRTTGSTQSNFNFYVKSFVMNFKNNNSKWKTYKGIVNNEEKVFQGNSNFRDPVQNNFIPPIVARYVRVVPQTWHQRIALKVELIGCQITQGNDSLVWRKTSQSTSVSTKKEDETITRPIPSEETSTGINITTVAIPLVLLVVLVFAGMGIFAAFRKKKKKGSPYGSAEAQKTDCWKQIKYPFARHQSAEFTISYDNEKEMTQKLDLITSDMAG

SEQ ID NO: 250763 - DNA, 1620 bp, Artificial Sequence
  derived and/or modified sequence
atggtgcccggcgccagaggcggcggcgccctggccagagccgccggcagaggcctgctggccctgctgctggccgtgagcgcccccctgagactgcaggccgaggagctgggcgacggctgcggccacctggtgacctaccaggacagcggcaccatgaccagcaagaactaccccggcacctaccccaaccacaccgtgtgcgagaagaccatcaccgtgcccaagggcaagagactgatcctgagactgggcgacctggacatcgagagccagacctgcgccagcgactacctgctgttcaccagcagcagcgaccagtacggcccctactgcggcagcatgaccgtgcccaaggagctgctgctgaacaccagcgaggtgaccgtgagattcgagagcggcagccacatcagcggcagaggcttcctgctgacctacgccagcagcgaccaccccgacctgatcacctgcctggagagagccagccactacctgaagaccgagtacagcaagttctgccccgccggctgcagagacgtggccggcgacatcagcggcaacatggtggacggctacagagacaccagcctgctgtgcaaggccgccatccacgccggcatcatcgccgacgagctgggcggccagatcagcgtgctgcagagaaagggcatcagcagatacgagggcatcctggccaacggcgtgctgagcagagacggcagcctgagcgacaagagattcctgttcaccagcaacggctgcagcagaagcctgagcttcgagcccgacggccagatcagagccagcagcagctggcagagcgtgaacgagagcggcgaccaggtgcactggagccccggccaggccagactgcaggaccagggccccagctgggccagcggcgacagcagcaacaaccacaagcccagagagtggctggagatcgacctgggcgagaagaagaagatcaccggcatcagaaccaccggcagcacccagagcaacttcaacttctacgtgaagagcttcgtgatgaacttcaagaacaacaacagcaagtggaagacctacaagggcatcgtgaacaacgaggagaaggtgttccagggcaacagcaacttcagagaccccgtgcagaacaacttcatcccccccatcgtggccagatacgtgagagtggtgccccagacctggcaccagagaatcgccctgaaggtggagctgatcggctgccagatcacccagggcaacgacagcctggtgtggagaaagaccagccagagcaccagcgtgagcaccaagaaggaggacgagaccatcaccagacccatccccagcgaggagaccagcaccggcatcaacatcaccaccgtggccatccccctggtgctgctggtggtgctggtgttcgccggcatgggcatcttcgccgccttcagaaagaagaagaagaagggcagcccctacggcagcgccgaggcccagaagaccgactgctggaagcagatcaagtaccccttcgccagacaccagagcgccgagttcaccatcagctacgacaacgagaaggagatgacccagaagctggacctgatcaccagcgacatggccggctag

SEQ ID NO: 250764 - DNA, 618 bp, Artificial Sequence
  derived and/or modified sequence
atgaacttcaagaacaacaacagcaagtggaagacctacaagggcatcgtgaacaacgaggagaaggtgttccagggcaacagcaacttcagagaccccgtgcagaacaacttcatcccccccatcgtggccagatacgtgagagtggtgccccagacctggcaccagagaatcgccctgaaggtggagctgatcggctgccagatcacccagggcaacgacagcctggtgtggagaaagaccagccagagcaccagcgtgagcaccaagaaggaggacgagaccatcaccagacccatccccagcgaggagaccagcaccggcatcaacatcaccaccgtggccatccccctggtgctgctggtggtgctggtgttcgccggcatgggcatcttcgccgccttcagaaagaagaagaagaagggcagcccctacggcagcgccgaggcccagaagaccgactgctggaagcagatcaagtaccccttcgccagacaccagagcgccgagttcaccatcagctacgacaacgagaaggagatgacccagaagctggacctgatcaccagcgacatggccgccagccccgagcccgtgagcgagcccctgcccccctag

SEQ ID NO: 250765 - DNA, 1620 bp, Artificial Sequence
  derived and/or modified sequence
atggtgcccggggcccgcggagggggagccctggccagggccgcaggccgagggcttctggccttactcctcgccgtctctgccccactcagacttcaggccgaggagctgggagatggatgcggccacctcgtcacctaccaagatagcggcactatgacctccaaaaattatccaggtacttaccctaatcacaccgtctgcgagaagacgatcacagttccaaagggcaagagactgatcttgaggctcggagaccttgacatcgaatcccaaacttgcgccagcgactatctcctgttcacttcaagcagtgaccaatatggaccctattgcggctcaatgacagtgccaaaggagctcctcttgaacacaagcgaggtcacggtgcgattcgagtcgggttctcatatcagtggacgaggtttcctacttacctacgcatcatcagatcaccccgacctaattacttgccttgaaagagcctcccattacctcaaaacagagtattcaaagttctgtcctgctggctgtcgagacgtcgccggcgatatttcaggaaatatggtggacggatacagagacacatctctgttatgtaaggctgccattcacgccgggattattgctgatgaactggggggccaaatatcagtgctgcagcggaaagggatctcaagatatgaaggaatattggcgaatggtgttctgagccgagatggaagcctgtccgacaaaagattcctttttacatcaaacggatgctctcgctccctttcgtttgagcctgatgggcagatacgcgctagctcttcttggcagtccgttaatgaatccggggaccaagtgcactggagcccaggacaggcaaggttacaggatcaggggccatcctgggcgagtggggattcttctaataatcataaaccacgtgaatggctggagattgatctaggggaaaaaaaaaagataaccggtatccgaactaccggctctacacagtcaaattttaatttctatgtcaagtcctttgtcatgaatttcaagaacaacaacagtaagtggaaaacctataagggtattgtgaacaacgaggagaaggtctttcagggtaattcaaacttccgggaccctgttcagaataacttcatccctcctattgtcgccaggtacgtacgggtagtgccccagacctggcaccagcgcatcgctttgaaggtggagctaatcggctgtcagatcacccagggcaacgactccctggtgtggcgcaagactagtcagagtacaagtgtgtctaccaagaaggaggatgagaccattacacgccctatcccctcagaagagacatccaccgggattaacatcactacggttgctatccccctcgtgcttttggtggtcctggtgtttgctgggatgggaatttttgccgcatttcgcaaaaagaaaaaaaagggcagcccgtatggcagcgcagaggcacagaagactgactgttggaaacagatcaaatacccgttcgcgcggcatcagagcgccgagttcaccatatcttacgataatgagaaggagatgacacagaagctggatctgattaccagtgatatggccggatag

SEQ ID NO: 250766 - DNA, 618 bp, Artificial Sequence
  derived and/or modified sequence
atgaactttaagaataataacagtaaatggaagacctataaggggatagtgaacaacgaggagaaggtcttccaaggaaattccaattttcgcgacccagtgcagaacaattttattccacccatcgttgcaagatacgttcgggttgtaccccagacctggcatcaaaggatcgcattgaaagtcgaattgatcggctgccagattacacagggaaatgattctctggtgtggcgcaaaactagccagtcaacttcagtgagtactaaaaaagaggacgagaccataactaggccaatacccagtgaggagacgagtactggcatcaacatcaccactgttgcaattcccctggttctgctggtagtcctggtgtttgccgggatgggcatttttgcagctttcagaaaaaaaaaaaaaaaaggcagcccatatggatctgccgaagcccagaagaccgattgttggaagcaaattaaataccccttcgcccggcaccagagcgccgagttcacaattagttacgataatgaaaaagaaatgacccagaaactggacctaatcactagtgatatggccgcgagcccagagccggtgtccgagcctttgcctccctag

SEQ ID NO: 250767 - DNA, 1620 bp, Artificial Sequence
  derived and/or modified sequence
atggtgcctggggcccggggcggcggggccctggcccgggctgctggccggggcctgctggccctgctgctggccgtgtctgcccccctgcggctgcaggccgaggagctgggagatggctgcggccacctggtgacctaccaggacagcggcaccatgaccagcaagaactacccaggcacctaccccaaccacacagtgtgtgagaagaccatcaccgtgcccaagggcaagaggctcatcctgcggctgggggacctggacatcgagagccagacctgtgccagtgactacctgctcttcaccagcagcagtgaccagtatggcccctactgcggctccatgacagtgcccaaggagctgctgctgaacaccagcgaggtgacagtgcgctttgagagcggcagccacatcagcggccggggcttcctgctgacctacgccagcagtgaccacccagacctgatcacctgcctggagcgggccagccactacctgaagacagagtacagcaagttctgcccagctggctgcagagatgtggccggggacatcagcggcaacatggtggatggctacagagacaccagcctgctgtgcaaggccgccatccacgccggcatcatcgcagatgagctgggcggccagatctctgtgctgcagaggaagggcatcagccgctatgagggcatcctggccaacggggtgctgagcagagatggcagcctgagtgacaagcgcttcctgttcaccagcaatggctgcagccgcagcctgagctttgagccagatggccagatccgggccagcagctcctggcagagcgtgaatgaaagtggggaccaggtgcactggagccctggccaggcccggctgcaggaccagggccccagctgggccagcggggacagcagcaacaaccacaagccccgggagtggctggagattgacctgggggagaagaagaagatcaccggcatccgcaccaccggcagcacccagagcaacttcaacttctacgtgaagagctttgtgatgaacttcaagaacaacaacagcaagtggaagacctacaagggcatcgtgaacaatgaggagaaggtgttccagggcaacagcaacttccgggaccctgtgcagaacaacttcatcccccccatcgtggcccgctacgtgcgggtggtgccccagacctggcaccagagaattgccctgaaggtggagctgattggctgccagatcacccagggcaatgacagcctggtgtggaggaagaccagccagagcacctctgtgtccaccaagaaggaggatgagaccatcacccggcccatccccagcgaggagaccagcacaggcatcaacatcaccaccgtggccatccccctggtgctgctggtggtgctggtgtttgctggcatgggcatctttgctgccttcaggaagaagaagaagaagggcagcccctacggcagcgctgaggcccagaagacagactgctggaagcagatcaagtacccctttgcccggcaccagagcgctgagttcaccatctcctatgacaatgagaaggagatgacccagaagctggacctgatcaccagtgacatggccggctag

SEQ ID NO: 250768 - DNA, 618 bp, Artificial Sequence
  derived and/or modified sequence
atgaacttcaagaacaacaacagcaagtggaagacctacaagggcatcgtgaacaatgaggagaaggtgttccagggcaacagcaacttccgggaccctgtgcagaacaacttcatcccccccatcgtggcccgctacgtgcgggtggtgccccagacctggcaccagagaattgccctgaaggtggagctgattggctgccagatcacccagggcaatgacagcctggtgtggaggaagaccagccagagcacctctgtgtccaccaagaaggaggatgagaccatcacccggcccatccccagcgaggagaccagcacaggcatcaacatcaccaccgtggccatccccctggtgctgctggtggtgctggtgtttgctggcatgggcatctttgctgccttcaggaagaagaagaagaagggcagcccctacggcagcgctgaggcccagaagacagactgctggaagcagatcaagtacccctttgcccggcaccagagcgctgagttcaccatctcctatgacaatgagaaggagatgacccagaagctggacctgatcaccagtgacatggccgccagccctgagcctgtgtctgagcccctgcccccatag

SEQ ID NO: 250769 - DNA, 1620 bp, Artificial Sequence
  derived and/or modified sequence
atggtgcccggcgcccggggcggcggcgccctggcccgggccgccgggcgtggattactcgccctgttactggctgtttccgcccctctcagacttcaggccgaagaactgggagacggctgtggtcatctcgttacctaccaggactctgggaccatgacatctaagaattacccgggcacataccccaaccacaccgtgtgtgaaaagaccattaccgtccctaaaggcaaaaggctgatattgcgcctgggagacctagacatcgaaagccagacatgcgcatcagactacctgctgtttacttcatcgagcgatcaatatggaccttactgcgggagcatgaccgtacctaaagaactgctgctcaatacatccgaggtgactgtgaggttcgagtccggcagccatattagtggtcggggttttctcttgacttatgcatcatctgaccaccccgatctgatcacctgcctggaaagggccagtcattacctcaagaccgaatattccaagttttgtccggctgggtgtcgggatgtcgccggagatataagcggcaacatggtcgacgggtaccgggatacgtctctgctctgtaaggccgccatccacgccgggataatagcagacgaattgggagggcagatatctgtgctccagcggaaaggcattagccggtacgaagggatcttggccaacggcgtgttaagcagggatggcagtctgtcagataagaggtttctgttcaccagcaacggctgctcccgctcgctgtcctttgaacctgacgggcaaatacgggcgtcctcgagctggcagtcagtgaatgaatctggtgaccaagtgcactggtcccccggacaggcacgactacaggatcaggggccttcctgggcctccggcgacagctcgaacaaccacaagcctagggagtggctggagattgatctgggcgagaagaaaaagattacaggaatcagaacgacaggatccacccaatcaaacttcaatttttatgtcaaaagcttcgtgatgaactttaagaacaacaactctaagtggaagacctacaagggcatcgtaaataatgaagaaaaggtctttcaggggaacagtaactttagagaccctgtccagaataattttatcccccccattgtcgcaagatatgtacgagtggtgccacagacctggcaccagaggattgcacttaaggtggaactgattggttgtcagattactcagggaaatgactctctggtgtggagaaagactagccagtcaacgtccgtctctaccaagaaggaggatgaaaccattactcgacccattcctagcgaagaaacttctacaggaattaacattaccactgtggccatccccttggtgctgcttgtggtactggtcttcgcagggatgggcattttcgcggcattcagaaagaaaaagaagaaggggtcgccttatgggtcagccgaagcacagaaaacggactgctggaaacaaatcaagtaccccttcgcacgccatcagtccgccgagttcaccatcagctatgacaacgagaaagagatgactcagaagctcgatttgatcacctccgatatggcaggatag

SEQ ID NO: 250770 - DNA, 618 bp, Artificial Sequence
  derived and/or modified sequence
atgaacttcaagaacaacaacagcaagtggaagacctacaagggcatcgtgaacaacgaggagaaagttttccagggaaactcgaactttagggatccagtgcagaataattttatacccccgattgttgccaggtacgtgagagttgtgccacagacctggcaccagcggattgccctgaaagttgaactcatagggtgccagatcactcagggtaatgatagtctggtttggcggaagacttctcagagtacaagtgtgagcacaaagaaggaggacgaaacaatcacgcgacccatcccctcggaggaaaccagtacaggaatcaacattacaacggtggccatccctctcgttctgctggtagtcctggtgtttgcagggatgggtattttcgcagcattccgcaaaaagaagaagaaggggtccccttacgggagcgcggaggctcagaagacggactgttggaaacagattaaatatccctttgccaggcaccagagtgccgagttcacgataagctacgacaatgagaaagagatgacccagaagttggatttgattactagcgacatggccgcaagtccagaaccagtgtctgagcctctccccccctag

SEQ ID NO: 250771 - DNA, 1620 bp, Artificial Sequence
  derived and/or modified sequence
atggtacctggcgctcgcggtggtggggcactagcacgcgctgccggacggggacttctggcactgctgctcgccgttagcgctcccctgcgattacaagccgaagaactcggcgatggatgcgggcacctggtaacctaccaggactccgggacgatgacatccaagaattaccctgggacgtacccaaatcacactgtctgtgagaaaacgatcaccgtgccaaagggaaaaaggttgattttgcggctaggagatctggacattgagagtcagacctgtgcctctgattacctccttttcaccagttcctctgaccaatatggaccatactgtggctcaatgactgtccccaaggagctcttgctgaacaccagtgaggtcacagtgagattcgagagtggttcacatattagcgggaggggtttcctgctcacctatgcttctagcgaccaccccgatctgattacttgcctggagcgggcttcccactatcttaagaccgagtactctaaattttgcccggcaggatgtagagacgtcgctggagacatcagtgggaacatggttgatggataccgtgacacttccctcctgtgtaaggcagcaatccatgcaggaatcatcgccgatgagctcggaggacagattagcgttctgcagaggaaaggaatttcacgatatgaggggatcctcgccaatggagtcctgtctcgcgacggttctttgtctgacaaacggttcctgttcacatctaacggatgcagcagatccctgagctttgagcccgacggccagatccgggcaagcagctcttggcagtcagtaaatgagtcaggagatcaggtccattggtctcccggtcaggcacgcttgcaggaccaaggcccttcctgggcaagtggtgactcctccaataatcataagcctcgggagtggctagagatagatctgggggagaagaaaaagattactggcattcgtacaaccggctctacgcagagtaacttcaacttctatgtcaaatcttttgttatgaacttcaagaataacaacagtaaatggaagacatataagggcatagttaataacgaggagaaggttttccaaggaaatagtaactttagagatccagtccagaacaacttcattcctccaatcgtggcaagatacgtgcgcgtggtcccacaaacctggcaccaacgcatagctctaaaagtggagctgattgggtgccagatcacccaggggaatgatagtctcgtatggaggaaaacttctcaaagcacatctgtcagcaccaaaaaagaagacgagacaatcaccaggcccatccccagcgaagaaacaagcactggaatcaacatcacaaccgtcgccattccgttagtgctgttggtggttctggtgttcgccggaatgggcatattcgccgcattcagaaaaaagaaaaagaaagggtctccttacggctccgcagaagcccagaagacagactgctggaaacagattaagtatccattcgctaggcatcagagcgccgaattcacaatctcttatgacaacgagaaagaaatgacgcagaagctcgatctaataaccagcgacatggcaggctag

SEQ ID NO: 250772 - DNA, 618 bp, Artificial Sequence
  derived and/or modified sequence
atgaactttaaaaataataactcaaagtggaagacctataaggggatagtaaataatgaggagaaagtgttccaaggaaatagtaatttcagggacccggtgcagaacaattttataccccctattgtggcaagatacgtgagagtggtgccacagacctggcatcagcggatcgctctcaaagtcgagctgattgggtgtcagatcacccagggcaatgactccctggtgtggagaaagacctcccagtctacaagtgtgagcacaaagaaggaggacgagaccatcacaaggcccatcccttcagaagagacttccaccggcatcaacattaccactgtggccatcccacttgtgctgctggtggtcctggtattcgcgggaatgggcatcttcgcagcatttagaaaaaagaagaagaaagggtctccgtatggctccgcagaggcccaaaagacggactgctggaagcagatcaagtatccgttcgcccgtcaccagtcagccgagtttacaattagttatgacaatgagaaagaaatgacccagaaactggatttgatcacgtcagacatggcagccagccctgagccagtttcagaacctctacctccctag

SEQ ID NO: 250773 - DNA, 1314 bp, Artificial Sequence
  derived and/or modified sequence
atggtgcagatgatgcgtcagtttctttacagggttttgcctgaagacagttacaaggtaacgacaggaaagttgcacgtcagtcttactcgcctgacagatggtgagaacgtagttgtgtccgagtttacaagtaaagaagagttgattgaagctctgtattgctcctgcttcgtacccgtgtactgcggtctaataccgcctacatacaggggcgtccgctacatagatggaggcttcaccggaatgcagccctgcgcattctggactgacgccatcacgatatccactttctctggtcagcaggacatttgccctagggactgccccgccattttccacgattttcgaatgtttaattgttcttttcagttctctttggagaacatagctaggatgacccacgcactctttcccccagatctcgtgatcttgcacgattattattatcggggctatgaagatgcggtcctttatctgagaaggctgaatgctgtgtatttaaatagctcttccaaaagggtcatatttccaagagtggaggtttactgtcaaatagagctcgcgcttgggaatgaatgccccgagaggagccagccaagcctgagagctaggcaggctagccttgaaggcgccactcagccccacaaagagtgggtgcccaaaggcgacgggagagggtcgcacggccccccggtttcccagcccgtgcagacactggagttcacctgtgagagccccgtgagcgctccagtgagccccctggagcagccaccagcacagcctcttgctagttcaactcccctttccctgtcaggtatgccacccgtgagctttcccgcagtgcacaaaccccctagcagtacaccagggtcaagcctgccaacaccaccccccggcttatcgccgctgagtcctcaacagcaggtccagccttccggaagtccggcgagaagccttcatagccaggcccctacttctcctagaccatcactgggccccagcactgtcggggcaccgcagactctaccccgaagctcactttcagctttccccgcacagcccccggttgaagaattaggtcaagagcagcctcaggccgtggccctgttggtgtcttccaagcccaaatcagcagtgcctcttgtgcacgtcaaggagacggtgagcaagccctacgtgacagaaagccccgcagaggattcgaattgggtgaataaggtcttcaagaagaataaacagaagacgagtgggacgcggaaaggctttcccaggcactcaggtagcaaaaagccttcgagcaaggttcagtag

SEQ ID NO: 250774 - DNA, 1314 bp, Artificial Sequence
  derived and/or modified sequence
atggtgcagatgatgaggcagttcctgtacagagtgctgcctgaagattcctacaaggtgaccaccgggaagctgcacgtgtccctgacccggctgacagatggagaaaatgtggtggtgtctgagttcaccagcaaggaggagctgattgaggccctgtactgcagctgctttgtgcctgtgtactgcggcctcatcccccccacctaccggggcgtgcgctacattgatggcggcttcaccggcatgcagccctgtgccttctggacagatgccatcaccatcagcaccttcagcggccagcaggacatctgcccccgggactgcccagccatcttccatgacttcaggatgttcaactgcagcttccagttcagcctggagaacatcgccaggatgacccacgccctcttccccccagacctggtgatcctgcatgactactactaccggggctatgaagatgctgtgctgtacctgcggcggctgaatgctgtgtacctgaacagcagcagcaagagggtcatcttcccccgggtggaggtgtactgccagatcgagctggccctgggcaatgaatgtcctgagaggagccagcccagcctgcgggcccggcaggccagcctggagggcgccacccagccccacaaggagtgggtgcccaagggagatggccggggcagccacggcccccctgtgtcccagcctgtgcagaccctggagttcacctgtgagagccctgtgtctgcccctgtgagccccctggagcagcccccagcccagcccctggccagcagcacccccctgagcctgagcggcatgcctcctgtgtccttccctgctgtgcacaagccacccagcagcaccccaggcagcagcctgcccaccccacctcctggcctgagccccctgagcccccagcagcaggtgcagcccagcggcagccctgcccggagcctgcacagccaggcccccaccagcccccggcccagcctgggccccagcacagtgggcgccccccagaccctgcccaggagcagcctgagcgccttccctgcccagccccctgtggaggagctgggccaggagcagccccaggccgtggccctgctggtgagcagcaagcccaagtctgctgtgcccctggtgcacgtgaaggagaccgtgtccaagccctacgtgacagagagccctgctgaggacagcaactgggtgaacaaggtgttcaagaagaacaagcagaagaccagcggcaccaggaagggcttccccaggcacagcggcagcaagaagcccagcagcaaggtgcagtag

SEQ ID NO: 250775 - DNA, 1314 bp, Artificial Sequence
  derived and/or modified sequence
atggtgcagatgatgcggcagttcctgtaccgggtgctgcccgaggattcatacaaagtgaccactgggaaattacacgtgagcctcaccaggctcactgatggggaaaatgtcgtcgtctccgagtttaccagcaaagaagagctcatcgaggccctgtactgcagttgttttgtgcccgtttattgcggcctgataccgcccacttacagaggtgtgaggtatattgacggtgggttcacagggatgcaaccctgtgcgttctggacagacgccattacaatctccacttttagcggccaacaagatatctgcccccgagactgcccagcaatctttcatgacttcagaatgttcaactgtagcttccagttcagcctggagaacatagccaggatgacacatgcgcttttccctcccgatctggttatcctgcatgattattactacagggggtacgaggacgctgttctgtacctccgtagacttaacgcagtatacctgaactctagttctaagagggtgatctttcccagagtcgaagtgtattgccagattgagcttgcgctgggaaatgagtgccctgaaaggagccagcccagtcttcgggccagacaggccagcctggagggcgccacacagcctcataaggagtgggtccctaagggagatggtagagggtctcacggcccacccgtatcacagccagtgcagacactcgaatttacttgcgaatcgcccgtgagtgctccggtgtcgcccctcgaacagccgcccgcacaacctttagcttcatccacacccttaagtctgtctggaatgccccctgtgtcctttccagcagtccacaagcctcccagtagcactccagggtccagcctacccacgccaccaccgggactgtctccgctgagccctcagcagcaggttcaaccctctggatcccccgcccggagcctgcatagtcaagcccctacttccccccgcccttcgctgggcccatccaccgtcggtgctcctcagaccctcccgcggagctctctaagtgccttccccgcacaaccacctgttgaagagctgggacaggagcagcctcaggccgtagccctgctcgtgtcctccaagcccaagtcagctgtccctctggtccatgttaaggagaccgtgagcaaaccatacgtcactgagagcccagccgaggactccaactgggtgaacaaagtattcaagaagaacaaacagaaaacaagcgggacacgaaaaggtttcccccgacacagcggatccaagaagccatcctctaaagttcagtag

SEQ ID NO: 250776 - DNA, 1314 bp, Artificial Sequence
  derived and/or modified sequence
atggtccagatgatgagacaattcctgtatagagtcctgcctgaggattcatataaagttactaccgggaagctgcacgttagtttgacacgcttgaccgatggcgaaaatgttgtggtatccgagttcaccagcaaggaagaactgatcgaggctctgtattgcagctgttttgtgcctgtgtactgcgggctgatccccccaacctaccgtggcgtgagatacattgatggcggattcaccgggatgcaaccatgcgcattttggaccgatgccatcactatctcaactttctccgggcaacaggacatctgcccacgcgattgccccgctatcttccatgacttccggatgtttaattgtagttttcagtttagcttggagaatattgcgagaatgactcatgcgctgttcccgccagatctggtgatcctgcacgactactattatcgcggttatgaggatgctgtcctttacctgaggcgtttgaatgccgtataccttaacagctcctctaaaagggtgatttttcccagagtagaggtgtattgtcagattgagctggcccttggcaatgagtgtccagaacgtagtcagcctagcttacgcgctcggcaggccagcctggaaggcgctactcaaccacacaaggaatgggttccaaaaggcgatggccgaggtagccacggccctcctgtgtcgcagcctgtgcaaaccctggagtttacctgtgaatcacccgtcagcgcgcctgtgtctcccctggaacagccacctgcccaacccctggcatcctcaacaccactgtccctgtcaggcatgcctccagtttcttttccagccgtacacaaacccccatcatctacccctggctcttctctgcctacccctcctccgggattatctccgttgagcccccagcagcaggtgcagccctctggctctcctgcccgatcgctgcactcccaggctccaacaagcccccgtccgtcgctggggccatccacagtcggcgctcctcagaccctgcccaggtcctccttgagcgctttcccggcacagccaccagtggaagagctgggtcaggagcagcctcaggctgttgcactccttgtcagctccaagcctaaaagcgcagtacctctcgtacatgttaaggagaccgtgtcaaagccctacgtgaccgagtctccggcagaggactcaaattgggtgaacaaggtattcaagaaaaataaacaaaagacctccggcacacgtaagggtttccctagacactcagggtccaagaagccttctagcaaggtgcagtag

SEQ ID NO: 250777 - DNA, 1314 bp, Artificial Sequence
  derived and/or modified sequence
atggtgcagatgatgagacagttcctgtacagagtgctgcccgaggacagctacaaggtgaccaccggcaagctgcacgtgagcctgaccagactgaccgacggcgagaacgtggtggtgagcgagttcaccagcaaggaggagctgatcgaggccctgtactgcagctgcttcgtgcccgtgtactgcggcctgatcccccccacctacagaggcgtgagatacatcgacggcggcttcaccggcatgcagccctgcgccttctggaccgacgccatcaccatcagcaccttcagcggccagcaggacatctgccccagagactgccccgccatcttccacgacttcagaatgttcaactgcagcttccagttcagcctggagaacatcgccagaatgacccacgccctgttcccccccgacctggtgatcctgcacgactactactacagaggctacgaggacgccgtgctgtacctgagaagactgaacgccgtgtacctgaacagcagcagcaagagagtgatcttccccagagtggaggtgtactgccagatcgagctggccctgggcaacgagtgccccgagagaagccagcccagcctgagagccagacaggccagcctggagggcgccacccagccccacaaggagtgggtgcccaagggcgacggcagaggcagccacggcccccccgtgagccagcccgtgcagaccctggagttcacctgcgagagccccgtgagcgcccccgtgagccccctggagcagccccccgcccagcccctggccagcagcacccccctgagcctgagcggcatgccccccgtgagcttccccgccgtgcacaagccccccagcagcacccccggcagcagcctgcccacccccccccccggcctgagccccctgagcccccagcagcaggtgcagcccagcggcagccccgccagaagcctgcacagccaggcccccaccagccccagacccagcctgggccccagcaccgtgggcgccccccagaccctgcccagaagcagcctgagcgccttccccgcccagccccccgtggaggagctgggccaggagcagccccaggccgtggccctgctggtgagcagcaagcccaagagcgccgtgcccctggtgcacgtgaaggagaccgtgagcaagccctacgtgaccgagagccccgccgaggacagcaactgggtgaacaaggtgttcaagaagaacaagcagaagaccagcggcaccagaaagggcttccccagacacagcggcagcaagaagcccagcagcaaggtgcagtag

SEQ ID NO: 250778 - protein, 362 aa, Artificial Sequence
  derived and/or modified sequence
MMYEYADVNMLRLLETFLESAPQLVLQLYIMLQKNSAETLPCVSSVTSLMSLAWVLASYHKLLRDSRDDKKSMSYRGAIIQVFWRLFTISSRVISFALFASIFQLYFGIFVVVHWCAMAFWIIHGGTDFCMSKWEEILFNMVVGIVYIFCWFNVKEGRTRYRMFAYYTIVLTENAALTFLWYFYRDPETTDSYAVPALCCVFISFVAGIAMMLLYYGVLHPTGPRAKILASSCCAELLWGIPLPPDVEPMAPEIPGYRGTQVTPTRAVTEQQEDLTADTCLPVFQVRPMGPPTPLGRPYLPEGPLIKIDMPRKRYPAWDAHFVDRRLRRTINILQYVTPTAVGIRYRDGPLLYELLQYESSL

SEQ ID NO: 250779 - protein, 641 aa, Artificial Sequence
  derived and/or modified sequence
MAAKSDGGGVGVGFAQLHNLDEAVGSGGEEDGEPGGGGCGGGGDGSEPGESSSMHICHCCNTSSCYWGCRSACLRSLLGRKPRRSAAADGGDQPLQPPAAPGAGRQPPTPSAARPEPPPPQVERPWLDCLWIVLALLVFFGDVGTDLWLALDYYRKGDYVYFGLTLFFVLVPSLLVQSLSFRWFVQDYTGGGLGAVEGLTSRGPPMMGAGYVHGAARGGPGVRVSPTPGAQRLCRLSVWIWQSVIHLLQMGQVWRYIRTMYLGIQSQRRKEHQRRFYWAMMYEYADVNMLRLLETFLESAPQLVLQLYIMLQKNSAETLPCVSSVTSLMSLAWVLASYHKLLRDSRDDKKSMSYRGAIIQVFWRLFTISSRVISFALFASIFQLYFGIFVVVHWCAMAFWIIHGGTDFCMSKWEEILFNMVVGIVYIFCWFNVKEGRTRYRMFAYYTIVLTENAALTFLWYFYRDPETTDSYAVPALCCVFISFVAGIAMMLLYYGVLHPTGPRAKILASSCCAELLWGIPLPPDVEPMAPEIPGYRGTQVTPTRAVTEQQEDLTADTCLPVFQVRPMGPPTPLGRPYLPEGPLIKIDMPRKRYPAWDAHFVDRRLRRTINILQYVTPTAVGIRYRDGPLLYELLQYESSL

SEQ ID NO: 250780 - DNA, 1089 bp, Artificial Sequence
  derived and/or modified sequence
atgatgtacgagtacgccgacgtgaacatgctgagactgctggagaccttcctggagagcgccccccagctggtgctgcagctgtacatcatgctgcagaagaacagcgccgagaccctgccctgcgtgagcagcgtgaccagcctgatgagcctggcctgggtgctggccagctaccacaagctgctgagagacagcagagacgacaagaagagcatgagctacagaggcgccatcatccaggtgttctggagactgttcaccatcagcagcagagtgatcagcttcgccctgttcgccagcatcttccagctgtacttcggcatcttcgtggtggtgcactggtgcgccatggccttctggatcatccacggcggcaccgacttctgcatgagcaagtgggaggagatcctgttcaacatggtggtgggcatcgtgtacatcttctgctggttcaacgtgaaggagggcagaaccagatacagaatgttcgcctactacaccatcgtgctgaccgagaacgccgccctgaccttcctgtggtacttctacagagaccccgagaccaccgacagctacgccgtgcccgccctgtgctgcgtgttcatcagcttcgtggccggcatcgccatgatgctgctgtactacggcgtgctgcaccccaccggccccagagccaagatcctggccagcagctgctgcgccgagctgctgtggggcatccccctgccccccgacgtggagcccatggcccccgagatccccggctacagaggcacccaggtgacccccaccagagccgtgaccgagcagcaggaggacctgaccgccgacacctgcctgcccgtgttccaggtgagacccatgggcccccccacccccctgggcagaccctacctgcccgagggccccctgatcaagatcgacatgcccagaaagagataccccgcctgggacgcccacttcgtggacagaagactgagaagaaccatcaacatcctgcagtacgtgacccccaccgccgtgggcatcagatacagagacggccccctgctgtacgagctgctgcagtacgagagcagcctgtag

SEQ ID NO: 250781 - DNA, 1926 bp, Artificial Sequence
  derived and/or modified sequence
atggccgccaagagcgacggcggcggcgtgggcgtgggcttcgcccagctgcacaacctggacgaggccgtgggcagcggcggcgaggaggacggcgagcccggcggcggcggctgcggcggcggcggcgacggcagcgagcccggcgagagcagcagcatgcacatctgccactgctgcaacaccagcagctgctactggggctgcagaagcgcctgcctgagaagcctgctgggcagaaagcccagaagaagcgccgccgccgacggcggcgaccagcccctgcagccccccgccgcccccggcgccggcagacagccccccacccccagcgccgccagacccgagcccccccccccccaggtggagagaccctggctggactgcctgtggatcgtgctggccctgctggtgttcttcggcgacgtgggcaccgacctgtggctggccctggactactacagaaagggcgactacgtgtacttcggcctgaccctgttcttcgtgctggtgcccagcctgctggtgcagagcctgagcttcagatggttcgtgcaggactacaccggcggcggcctgggcgccgtggagggcctgaccagcagaggcccccccatgatgggcgccggctacgtgcacggcgccgccagaggcggccccggcgtgagagtgagccccacccccggcgcccagagactgtgcagactgagcgtgtggatctggcagagcgtgatccacctgctgcagatgggccaggtgtggagatacatcagaaccatgtacctgggcatccagagccagagaagaaaggagcaccagagaagattctactgggccatgatgtacgagtacgccgacgtgaacatgctgagactgctggagaccttcctggagagcgccccccagctggtgctgcagctgtacatcatgctgcagaagaacagcgccgagaccctgccctgcgtgagcagcgtgaccagcctgatgagcctggcctgggtgctggccagctaccacaagctgctgagagacagcagagacgacaagaagagcatgagctacagaggcgccatcatccaggtgttctggagactgttcaccatcagcagcagagtgatcagcttcgccctgttcgccagcatcttccagctgtacttcggcatcttcgtggtggtgcactggtgcgccatggccttctggatcatccacggcggcaccgacttctgcatgagcaagtgggaggagatcctgttcaacatggtggtgggcatcgtgtacatcttctgctggttcaacgtgaaggagggcagaaccagatacagaatgttcgcctactacaccatcgtgctgaccgagaacgccgccctgaccttcctgtggtacttctacagagaccccgagaccaccgacagctacgccgtgcccgccctgtgctgcgtgttcatcagcttcgtggccggcatcgccatgatgctgctgtactacggcgtgctgcaccccaccggccccagagccaagatcctggccagcagctgctgcgccgagctgctgtggggcatccccctgccccccgacgtggagcccatggcccccgagatccccggctacagaggcacccaggtgacccccaccagagccgtgaccgagcagcaggaggacctgaccgccgacacctgcctgcccgtgttccaggtgagacccatgggcccccccacccccctgggcagaccctacctgcccgagggccccctgatcaagatcgacatgcccagaaagagataccccgcctgggacgcccacttcgtggacagaagactgagaagaaccatcaacatcctgcagtacgtgacccccaccgccgtgggcatcagatacagagacggccccctgctgtacgagctgctgcagtacgagagcagcctgtag

SEQ ID NO: 250782 - DNA, 1089 bp, Artificial Sequence
  derived and/or modified sequence
atgatgtacgagtacgctgacgtgaatatgctgcgcctgctggagaccttcctagagagcgctccacagttggtgctccaactatacatcatgttacagaagaactccgcagaaacactgccttgcgtgagtagcgtaacatccctgatgtcccttgcgtgggtcctggcatcctaccacaagctgctacgagacagccgagatgataagaagtccatgtcatacagaggagccattatccaggttttttggagactttttacaatctcaagcagggtgatcagcttcgcgctgtttgcctcgatctttcaactgtattttgggatcttcgtggtggttcactggtgcgctatggccttctggattatccatggggggaccgacttctgtatgagcaagtgggaggagattttgttcaatatggtggtcggcattgtgtatattttttgttggttcaacgtcaaagaggggaggacacgctaccggatgttcgcctactacaccatcgttctcacagaaaatgccgccctaacatttctctggtatttttacagagaccccgagaccacagatagttatgccgtgccggccctgtgttgcgtcttcatcagcttcgtggccggaatcgccatgatgctgctttattatggcgtcttacatccaaccggaccccgggctaagatcctggctagtagttgctgtgccgagcttctgtggggaattccgttgccacccgatgtcgaaccaatggcgcccgaaattcccggttaccgaggaacccaggttacgcctacgagagccgttaccgaacaacaggaggacctgacggcggatacatgcctgccggtattccaggttcgaccaatgggtcctcctacacccctggggcgtccatacttacccgagggcccgctgataaaaatcgacatgccacgaaagcgctaccccgcatgggatgctcactttgtcgacagacggctacgtcgaactataaatatactccagtacgtgactccaaccgctgtgggaatacgctaccgcgatggacctttgctgtacgagctactgcaatatgagagcagcctgtag

SEQ ID NO: 250783 - DNA, 1926 bp, Artificial Sequence
  derived and/or modified sequence
atggccgctaaatctgacggcggtggagtgggagtgggatttgctcaactgcacaatctagacgaagccgtggggtccggcggcgaggaggatggtgagcccgggggaggagggtgtggtgggggcggtgacggatcagagcctggagagtcatcctccatgcacatctgtcactgctgcaataccagctcgtgctattgggggtgccggtccgcatgcctccgctccctgctcggtagaaagccacgtcggagcgccgctgcagatggcggggaccaacccttgcagcccccagccgcccccggagccggccgacagccccccacaccttcagccgcgaggcccgagccaccccccccacaggttgagcgcccctggctcgactgtctttggatcgtgcttgctctgcttgtgttttttggagacgttggcacagatctctggttggcactcgactactataggaagggtgattatgtgtactttgggctgaccctctttttcgtcctggttccaagccttctagtccaatctctgtcatttagatggttcgtgcaggactacaccggtggaggtctgggagcggtggaagggctaacatctcgggggccccctatgatgggcgccgggtatgtccacggggcagcccgcggtggccctggtgtcagggtgagtcccacgcctggcgcccaaagactctgtcgtctttcagtgtggatctggcagtccgtgattcacctgctgcagatggggcaggtgtggaggtacatccgtacgatgtatttgggcatccagtctcagcgacgaaaagaacatcagcggcggttttactgggcaatgatgtatgagtacgccgacgtgaacatgcttcgcctgctggagacttttctggaatccgcgccacaactcgtcctccagctgtatatcatgttgcagaaaaatagtgcagaaacactcccctgcgtttcctctgtaaccagtctcatgagtctagcttgggtgcttgcctcctatcacaaactccttagggattccagagacgataaaaagtctatgtcttacaggggcgcgataatacaggtcttctggcgcttgtttaccatatcgagcagggttatctcattcgcgctgttcgcgtcaatttttcagctgtatttcggaattttcgtggtcgtgcactggtgcgcaatggctttctggattatccatggcgggaccgatttctgcatgtccaagtgggaggaaattctatttaatatggtcgtgggcattgtctacatcttttgctggttcaacgttaaggaaggaaggactcgctataggatgttcgcctactatacaatcgtcctgacagaaaatgcggccctgactttcctgtggtacttctacagggacccagagacgacggactcttatgctgtgcctgctttatgttgcgtatttatctcctttgtcgcagggattgccatgatgttactgtattacggcgtgttgcacccaacggggccaagagctaaaatactggcaagttcttgttgcgctgaattgttgtggggaattcccctcccaccggacgtggagcctatggcccccgaaattcccggctataggggcacacaggtcacgccaacaagagcagtcactgaacagcaggaagacctgactgctgatacatgcctgcccgtctttcaggtgagacccatgggaccacctactcctctgggccgcccatacctcccagaggggcctctgatcaaaatcgacatgccacgaaaaaggtatccagcgtgggatgcccatttcgttgataggagactcagaagaaccatcaatatcctgcaatacgttaccccaactgccgtggggattcggtatcgggacggtcccttgctgtacgaattgctacaatacgaatcttctctttag

SEQ ID NO: 250784 - DNA, 1089 bp, Artificial Sequence
  derived and/or modified sequence
atgatgtatgaatatgcagatgtgaacatgctgcggctgctggagaccttcctggagagcgccccccagctggtgctgcagctgtacatcatgctgcagaagaacagcgctgagaccctgccctgtgtgtcctctgtgaccagcctgatgagcctggcctgggtgctggccagctaccacaagctgctgcgggacagcagagatgacaagaagtccatgagctacagaggagccatcatccaggtgttctggaggctcttcaccatcagcagcagggtcatcagctttgccctgtttgccagcatcttccagctgtacttcggcatctttgtggtggtgcactggtgtgccatggccttctggatcatccacggcggcacagacttctgcatgagcaagtgggaggagatcctcttcaacatggtggtgggcatcgtgtacatcttctgctggttcaacgtgaaggagggccgcacccgctacaggatgtttgcctactacaccatcgtgctgacagaaaatgctgccctgaccttcctgtggtacttctacagagatcctgagaccacagacagctatgctgtgcctgccctgtgctgcgtgttcatcagctttgtggccggcatcgccatgatgctgctgtactacggcgtgctgcaccccaccggcccccgggccaagatcctggccagcagctgctgtgccgagctgctgtggggcatccccctgcccccagatgtggagcccatggcccctgagatccctggctaccggggcacccaggtgacccccaccagggctgtgacagagcagcaggaggacctgacagctgacacctgcctgcccgtcttccaggtgcggcccatgggcccccccacccccctgggccggccctacctgcctgagggccccctcatcaagattgacatgcccaggaagcgctacccagcctgggatgcccactttgtggaccggcggctgcggaggaccatcaacatcctgcagtatgtgacccccacagctgtgggcatccgctacagagatggccccctgctgtatgagctgctgcagtatgagagcagcctgtag

SEQ ID NO: 250785 - DNA, 1926 bp, Artificial Sequence
  derived and/or modified sequence
atggccgccaagagtgatggcggcggcgtgggcgtgggctttgcccagctgcacaacctggatgaagctgtgggcagcggcggggaggaggatggagagcccggcggcggcggctgcggcggcggcggagatggcagcgagcccggggagagcagctccatgcacatctgccactgctgcaacaccagcagctgctactggggctgccgcagcgcctgcctgcggagcctgctgggcaggaagcccaggagatctgctgctgctgatggaggagaccagcccctgcagcccccagctgcccctggagctggccggcagccccccaccccatctgctgcccggcctgagcccccaccaccccaggtggagcggccctggctggactgcctgtggatcgtgctggccctgctggtgttctttggagatgtgggcacagacctgtggctggccctggactactacaggaagggggactatgtgtacttcggcctgaccctcttctttgtgctggtgcccagcctgctggtgcagagcctgtccttccgctggtttgtgcaggactacacaggaggcggcctgggcgctgtggagggcctgaccagccggggcccccccatgatgggcgccggctacgtgcatggagctgcccggggcggccctggggtgcgggtgagccccacccctggggcccagaggctgtgccgcctgtctgtgtggatctggcagagcgtcatccacctgctgcagatgggccaggtgtggagatacatccgcaccatgtacctgggcatccagagccagaggaggaaggagcaccagaggcgcttctactgggccatgatgtatgaatatgcagatgtgaacatgctgcggctgctggagaccttcctggagagcgccccccagctggtgctgcagctgtacatcatgctgcagaagaacagcgctgagaccctgccctgtgtgtcctctgtgaccagcctgatgagcctggcctgggtgctggccagctaccacaagctgctgcgggacagcagagatgacaagaagtccatgagctacagaggagccatcatccaggtgttctggaggctcttcaccatcagcagcagggtcatcagctttgccctgtttgccagcatcttccagctgtacttcggcatctttgtggtggtgcactggtgtgccatggccttctggatcatccatggaggaacagacttctgcatgagcaagtgggaggagatcctcttcaacatggtggtgggcatcgtgtacatcttctgctggttcaacgtgaaggagggccgcacccgctacaggatgtttgcctactacaccatcgtgctgacagaaaatgctgccctgaccttcctgtggtacttctacagagatcctgagaccacagacagctatgctgtgcctgccctgtgctgcgtgttcatcagctttgtggccggcatcgccatgatgctgctgtactatggagtgctgcaccccaccggcccccgggccaagatcctggccagcagctgctgtgccgagctgctgtggggcatccccctgcccccagatgtggagcccatggcccctgagatccctggctaccggggcacccaggtgacccccaccagggctgtgacagagcagcaggaggacctgacagctgacacctgcctgcctgtgttccaggtgcggcccatgggcccccccacccccctgggccggccctacctgcctgagggccccctcatcaagattgacatgcccaggaagcgctacccagcctgggatgcccactttgtggaccggcggctgcggaggaccatcaacatcctgcagtatgtgacccccacagctgtgggcatccgctacagagatggccccctgctgtatgagctgctgcagtatgagagcagcctgtag

SEQ ID NO: 250786 - DNA, 1089 bp, Artificial Sequence
  derived and/or modified sequence
atgatgtacgagtacgccgacgtgaacatgctgcggctgctggagacattcttagaaagtgcgcctcagctggtcctgcaactctatatcatgcttcaaaaaaacagcgcagaaacccttccctgtgtgagttcggtaacctcactgatgtccctggcatgggtgcttgcctcttaccataaattgctccgagactctagggatgataaaaaatcaatgtcctacagaggtgccattatccaggtattctggcgcttgttcacaatctccagccgggtgatttctttcgcactgttcgcatcaatcttccaactctattttggtatcttcgtggtggtgcactggtgtgccatggcattctggataattcatggtggtacggacttttgcatgtccaagtgggaggagatcttatttaatatggtggttggaattgtttacattttctgttggttcaatgtgaaggaagggcgtacacgatacaggatgtttgcatactacacgatcgtgctgactgaaaacgctgccctgacctttctatggtacttttatcgggacccagaaactaccgattcgtatgccgttcctgcactctgctgcgtgttcatcagtttcgtggccgggattgccatgatgcttttatactatggcgttcttcaccctactggtcccagggctaagattctcgccagctcgtgctgcgctgaactgctttggggcattcctctcccacctgatgtggagcccatggcgcctgagatcccgggatatcgcggcactcaggtgacacctactcgagccgtcacggagcaacaggaagatctgaccgccgacacctgcctaccagtatttcaggtgcgccctatgggtccccccactcctctgggcagaccatatttacccgaaggcccgttaatcaaaattgatatgcccagaaagcggtaccccgcttgggatgcccacttcgtcgaccgccgccttaggcgaactattaacattctgcagtatgttacccctacggccgtaggcataagatatcgcgacgggcctctcctttacgaactgctacagtacgaaagtagtctctag

SEQ ID NO: 250787 - DNA, 1926 bp, Artificial Sequence
  derived and/or modified sequence
atggccgccaagagcgacggcggcggcgtgggcgtgggcttcgcccagcttcacaacctggacgaagcagttggctctgggggagaggaagacggcgaacctggaggaggggggtgtggaggtgggggtgacgggtctgagcctggagaaagttcttctatgcacatttgccattgttgcaatacttcctcctgttactggggctgtagaagcgcctgcctgcggagtctcctgggccggaagccgagaaggagcgctgccgccgatggtggagatcagccccttcaacctcccgccgcgccgggtgctggtaggcagccccctacgccctccgccgcacgaccagagccgccaccacctcaggtggaacgcccttggctggattgcctctggatcgtgctggcactcctggtgtttttcggagatgtgggaactgacctgtggttggccctggactactaccgcaaaggtgattatgtttacttcgggttgacactgtttttcgtgctggtgccgtccctgctggtgcagtccttgtcatttcggtggttcgtgcaggactacaccgggggtggtttaggggccgtggaggggttaacatcaagaggaccccctatgatgggcgcagggtatgtacacggggccgcccgcggtggacctggagttcgggtctctcctaccccaggggctcaaagattgtgccgactgagcgtctggatctggcagagcgtgattcacctccttcagatgggccaggtgtggaggtatattagaaccatgtacctaggtatccagagtcagcgaaggaaggaacaccagcgacggttctactgggccatgatgtatgaatatgctgacgtaaatatgctcaggctgctagagacattcttagagagcgcacctcagctggtgctgcagctctatattatgctgcagaaaaattcagccgaaacgcttccctgcgtctcttccgtgacatccctcatgtctctcgcctgggtactggcctcttatcacaagctgctgcgagatagtcgggatgataaaaagagcatgtcatatcgcggagccatcatccaggtgttttggcgtctgtttacaattagcagtagggttatttcatttgctctctttgctagcatattccaactctacttcggcatcttcgtagtcgttcactggtgcgccatggcattctggatcatccacgggggaacagatttctgtatgtcaaaatgggaagagatcctttttaacatggtggtagggatcgtttacatcttttgctggttcaacgtcaaagaagggcggaccagatacaggatgtttgcttattacacaatcgtattaacagaaaacgctgccctcacatttttatggtatttctaccgtgatccagaaactaccgatagctacgcggttcccgcgctctgctgtgtatttatatcatttgtggccggaattgccatgatgctgctttactatggggtgcttcaccccacaggccccagagctaagatcctggccagtagttgttgtgccgaactgctctgggggataccactgcctcctgacgtggagccaatggcaccagaaatacctggttacagaggcacacaggtcactccaacacgggcggtgaccgaacagcaagaagatctgaccgccgatacgtgccttccagttttccaggtgagacccatgggaccccctacccccctgggccggccatatctgccagagggccccctcattaagatcgacatgccgcggaagcgttacccggcatgggacgctcactttgtggaccggcgtttgcgacgaaccataaacatcctgcaatacgtgaccccaactgccgtgggaattcggtaccgagatggtccacttctgtacgagctgttgcagtatgagagcagtctgtag

SEQ ID NO: 250788 - DNA, 1089 bp, Artificial Sequence
  derived and/or modified sequence
atgatgtacgaatatgccgatgtcaatatgctgcggctcctggagacatttctggagtctgcaccacagttggtcctccagctctacatcatgctacagaagaattctgcggagactctgccttgtgtctcttcagtgacctccttgatgagtctcgcctgggtcctcgcttcttaccacaagctgctgcgggattctcgggacgacaaaaaatctatgtcctaccgtggtgctataattcaggtattctggcgtctctttacgataagttcaagagtgataagttttgccctgttcgccagcatttttcagctgtatttcggtatttttgtcgtcgtacactggtgcgccatggccttttggataatccacgggggtaccgacttttgtatgagcaagtgggaggaaatcctgttcaacatggtagtgggcatcgtctatattttttgttggttcaatgtgaaagaaggtcgcacccgctacagaatgtttgcctattatacaatcgtgttaacagaaaacgcggcactgacattcctttggtatttctatcgtgatccggaaacaaccgacagttatgccgtgcccgctctatgttgcgtgtttatctctttcgtggcgggaatcgcaatgatgctcctctactatggcgttttgcatcctaccggcccacgagccaagatcctcgcctcatcatgctgcgccgagctactgtggggaattcccctcccaccagatgtggagcccatggcaccggaaattccaggctaccggggaacccaggtgacccctactcgcgcagtcactgaacaacaggaagatctaaccgccgacacatgtctgccagtcttccaggtcagacctatggggccacccacccctctgggtcgtccttacctgcctgagggcccactcattaagatcgatatgcctcgcaaacgttatccagcttgggatgctcacttcgtggaccgaagattacgaagaactattaacatcctacagtacgtgaccccgaccgccgtagggatacgctatagggacgggcctttgctgtacgaactgctgcaatacgagtcctctctctag

SEQ ID NO: 250789 - DNA, 1926 bp, Artificial Sequence
  derived and/or modified sequence
atggccgcaaaatcggatggcggaggtgtaggcgtgggattcgctcagcttcacaatcttgacgaggctgtgggttctgggggtgaagaagatggggagccaggcggtggcggatgcgggggaggcggagacggcagcgaaccgggagagtctagctcaatgcacatctgtcattgctgtaacacctcctcctgctattggggatgcagatcagcctgcctgaggtccttgctgggacggaaacctcggaggtcagctgccgctgatggcggagaccagcccttgcagccgccagcagcaccaggcgcaggcagacagccgcctaccccctcagccgcaagacccgagccgccaccacctcaggttgagcggccatggctggactgcttgtggattgtgttggcactgcttgttttcttcggcgacgtaggaactgatctatggctagccctggattactatcgaaaaggggattatgtctacttcggcctcacactgtttttcgtgctcgtgccgtccttgctcgttcagtcactttctttccgctggtttgtccaggactacacaggaggcggattgggggcagtcgagggcctcacttccagggggccacctatgatgggagcaggatatgtgcatggagcagcaagaggcggaccgggtgttcgggtaagcccgacaccaggggcacagcggctctgtcgcctgtcagtgtggatttggcagtcagttatccatctactccagatgggccaggtctggcgttacattaggacaatgtatctgggcatacagagtcagagacggaaggaacaccagaggcggttttattgggctatgatgtacgagtatgccgacgtcaatatgcttaggctcttagaaactttcctcgaaagcgccccacaactagtgttgcagctatacattatgttgcagaagaattccgctgaaacacttccctgcgtttcgagcgtcacgtccctcatgtccctagcctgggttttggccagctaccataagttgcttagagactctcgcgatgataaaaagagcatgtcctacaggggggctattatccaggtgttttggagattgttcaccatctcctccagggttattagcttcgctctctttgcctccatcttccaactttactttggcatcttcgtggtcgtgcactggtgtgcaatggccttctggatcattcacggcggtaccgatttttgcatgtccaagtgggaggaaattcttttcaatatggttgttgggattgtttatatcttttgctggttcaacgtgaaagaaggcagaacccggtacaggatgtttgcttactacacaattgtgctgaccgagaatgcagcactgacctttttgtggtacttctacagagatccagagactactgactcctatgctgttcccgcactgtgctgtgtatttatttcctttgttgccggaattgccatgatgctgttatactatggcgtgctgcatcccacaggaccaagagccaagatcctggcatcaagctgctgtgcagagttgctctggggcatacccttacctccggatgtggagccaatggctcccgagatccctgggtatagaggaacccaggtgacacccactcgtgcagtgaccgaacagcaggaagacttgaccgccgacacctgtttgccagtttttcaggtccggccaatgggtccccctaccccactcggaaggccatacctcccagaagggccactcatcaaaattgacatgcccaggaaacgctacccagcatgggatgcccatttcgttgatagaagactgcgacgcactatcaacatcctccagtatgttacacctacagccgtaggcatacgatatcgagacgggcctttactgtatgaattactgcaatacgagtcctccttgtag

SEQ ID NO: 250790 - DNA, 3053 bp, Artificial Sequence
  derived and/or modified sequence
gtctttttctcctgccttctcctggagatgaagagaactgcaaacactgtgtactgctgcacgcgggcctcccccaggccaacagaactgctgggtatatccgcaccatgtacctggggattcagagccagcggcggaaggaacaccagcgacgcttctactgggctatgatgtatgaatatgcagacgtcaacatgctgcgcctcctggagaccttcctggagagcgcgccccaactggtgctacagctctacatcatgctccagaagaacagcgccgagaccctgccctgtgtctcctctgtgacttccctgatgtccctggcttgggtgctagcctcctatcacaagctgctgcgggactccagggacgacaagaagagcatgagctacagaggggccatcatccaggtcttctggcgcctcttcaccatctcatcccgagtgatctcttttgccctctttgcttccatcttccagctctattttgggatcttcgtggtggttcactggtgcgccatggccttctggatcatccatggcggaacagacttctgcatgtccaagtgggaggagatcctcttcaacatggtggtagggatcgtgtacattttctgctggtttaacgtcaaggaagggcggactcgatatcgaatgtttgcatattatacgatagtcttgaccgagaatgctgccttgacgttcctttggtatttttacagagacccggagaccactgactcctatgcggtgccagcactgtgttgtgtctttattagctttgtggctgggatcgcaatgatgctcttatactatggcgtgctgcatcccacaggaccacgagctaagatccttgccagctcctgttgtgccgagctgctctggggcatccctttgccccccgatgttgagcccatggcgcctgagatccctgggtaccgggggacccaggttacgcccaccagagccgtaacggaacaacaggaggatctcacggctgacacttgcttgcctgttttccaagtgagacccatggggccccctaccccgttggggcgtccttacctcccagaagggcccctcattaagattgacatgccaagaaagcgatacccagcttgggatgctcattttgtagacaggaggctgagaaggactattaacattctacaatatgtcacccccaccgcagtaggcattcgatatcgagacggaccactcctctatgagttgctacagtatgagtcttcactctaagagcatcttgaccaagttgagaaggggaccttaagtttggtttgcggcaaacagcacttgcaagaaatataaccctcccttcccccaatacacagaaccaccgccaccaccaccaacaccgccacaccaacaccaccactacaaaaaaaaaagaattaataagtcacaaccccttcaaataagctttctttccagtcgctgtatgtatacaaagatattctctatgttttgtaagtaaaaacaaaaagaaaacctttcttttgttttttacacataagaaacagtattgaaaaatcccacgctatggttcatagggtggagaaggaggagttatctccactccaaaagaaaaaaaaaaagttttttaccttacaccaagtgtagatcatttatgggattggtgctgattgaaagaacaaaacaaaacaaaacaaacacaaacaaacaaaaaaccttcaactgccttatgcccttaggtgctgagtttcattaagtactgtcacgttttctcatgcaaaactctctggtgatttttgcaccagaagagggaaaattaaacaattaaatgaaacaaatctaaaagtgaaacaaaaaccaaccaacaaatacaacacaaagcaattattcttcctatctgattatttgtattgaagaaaacaaatttaccaaaagcaaaagcataaacccctccctcttttcagtttctccccctcctctcctgaccttctccccactttgcagagccttctaggagctcaagggctgtttgaaactcaaatggctggagaagctacttgaaggctgattatgtgccattttagcatttgcctagcaagaatcacattcgtttcccagtgaaaagcaaaccagaacaaaacaaaaagccaccgcaataattcggtaaggacaggatattctaaagcaaattaaaggagatttctgtacacatagtcagtaataataaaactcagcatagtagcaaaaagaacgacatcagtttaaaggcacaatacttaatcagtgactggcaacaacgattagttccatcattttaaggctgtgaatggtagacatttatcacatgtgatattgtgtaaagcctcttctgtttccatttggtgggaagccttaaattgatctggaaagaattcttcatttttcatttgtgcttttttaaaaaaaaaaataacacaaagaggaaaactagaatatatatatatatatacatatatataaaaagtcaaaattgtaataactgacccatttcaaagactgtttggtgcttctgtctttcaccattgtggttggctgaaaatcattcagctcacctggtgcatctgggttgaatgggaaattttgtgtgtgtagtatgtgtgtgtttgtgtgtgtatgtgtgtgtgtgcccatagcacacgtatatatgtgtgtgtccctgctgcaaagtcttgccagagatatacaaaactgatgtaagacgaacttggatcacggcttggttcagcagagcatgggggcgggggctctggagtggtggggaagtgatgctgcctgcccacgagccctggtttgggtggcaagactcacaccagcagcggactgcaggccttagaggccatgccatttgggtgaggatttgattccactgtttattttctcattgtatcaagttgaatttctgcaggtgttgcaagtatgttcaacgatttaaatttttttttatttttcaaagtattgttcctttaaagaatatttctgttctagggcatcgtttcaatcgcatcgtatctctacttgggc

SEQ ID NO: 250791 - DNA, 3382 bp, Artificial Sequence
  derived and/or modified sequence
acctccggagctgggaagagagtcaagatggcggcgaaatccgatggcggtggcgtgggggtgggcttcgctcagctgcacaacctggacgaggcggtgggcagcggcggcgaggaggacggggagcccgggggaggcggctgcggcggcggcggcgacggcagcgagcccggcgagagcagctcgatgcacatctgccactgctgcaacacctcctcgtgctactggggctgccgctccgcctgcctgcgctccctcctgggcaggaagccgcgccgcagcgccgccgccgacgggggggaccagccgctgcagcctcccgcggcccccggcgccggccgccaacccccgacgccctcggccgcgcggccggagccgccgccgccgcaggtggagcggccgtggctcgactgcctgtggatcgtgctggcgctgctggtgttcttcggggacgtgggcaccgacctgtggctggccctcgactactaccgcaagggggactacgtctacttcgggctgaccctcttcttcgtgctggtgccgtcgctgctggtgcagagcctgagcttccgctggttcgtgcaggactacacgggcggcgggctgggcgccgtggaggggctcaccagccggggcccccccatgatgggggccggctacgtccacggcgcggcccgcggtggcccaggcgtgagggtctcccccacgccgggggcgcagcgcctgtgtcgcctctccgtgtggatctggcagtcggtcatccacctgctgcagatggggcaggtgtggaggtatatccgcaccatgtacctggggattcagagccagcggcggaaggaacaccagcgacgcttctactgggctatgatgtatgaatatgcagacgtcaacatgctgcgcctcctggagaccttcctggagagcgcgccccaactggtgctacagctctacatcatgctccagaagaacagcgccgagaccctgccctgtgtctcctctgtgacttccctgatgtccctggcttgggtgctagcctcctatcacaagctgctgcgggactccagggacgacaagaagagcatgagctacagaggggccatcatccaggtcttctggcgcctcttcaccatctcatcccgagtgatctcttttgccctctttgcttccatcttccagctctattttgggatcttcgtggtggttcactggtgcgccatggccttctggatcatccatggcggaacagacttctgcatgtccaagtgggaggagatcctcttcaacatggtggtagggatcgtgtacattttctgctggtttaacgtcaaggaagggcggactcgatatcgaatgtttgcatattatacgatagtcttgaccgagaatgctgccttgacgttcctttggtatttttacagagacccggagaccactgactcctatgcggtgccagcactgtgttgtgtctttattagctttgtggctgggatcgcaatgatgctcttatactatggcgtgctgcatcccacaggaccacgagctaagatccttgccagctcctgttgtgccgagctgctctggggcatccctttgccccccgatgttgagcccatggcgcctgagatccctgggtaccgggggacccaggttacgcccaccagagccgtaacggaacaacaggaggatctcacggctgacacttgcttgcctgttttccaagtgagacccatggggccccctaccccgttggggcgtccttacctcccagaagggcccctcattaagattgacatgccaagaaagcgatacccagcttgggatgctcattttgtagacaggaggctgagaaggactattaacattctacaatatgtcacccccaccgcagtaggcattcgatatcgagacggaccactcctctatgagttgctacagtatgagtcttcactctaagagcatcttgaccaagttgagaaggggaccttaagtttggtttgcggcaaacagcacttgcaagaaatataaccctcccttcccccaatacacagaaccaccgccaccaccaccaacaccgccacaccaacaccaccactacaaaaaaaaaagaattaataagtcacaaccccttcaaataagctttctttccagtcgctgtatgtatacaaagatattctctatgttttgtaagtaaaaacaaaaagaaaacctttcttttgttttttacacataagaaacagtattgaaaaatcccacgctatggttcatagggtggagaaggaggagttatctccactccaaaagaaaaaaaaaaagttttttaccttacaccaagtgtagatcatttatgggattggtgctgattgaaagaacaaaacaaaacaaaacaaacacaaacaaacaaaaaaccttcaactgccttatgcccttaggtgctgagtttcattaagtactgtcacgttttctcatgcaaaactctctggtgatttttgcaccagaagagggaaaattaaacaattaaatgaaacaaatctaaaagtgaaacaaaaaccaaccaacaaatacaacacaaagcaattattcttcctatctgattatttgtattgaagaaaacaaatttaccaaaagcaaaagcataaacccctccctcttttcagtttctccccctcctctcctgaccttctccccactttgcagagccttctaggagctcaagggctgtttgaaactcaaatggctggagaagctacttgaaggctgattatgtgccattttagcatttgcctagcaagaatcacattcgtttcccagtgaaaagcaaaccagaacaaaacaaaaagccaccgcaataattcggtaaggacaggatattctaaagcaaattaaaggagatttctgtacacatagtcagtaataataaaactcagcatagtagcaaaaagaacgacatcagtttaaaggcacaatacttaatcagtgactggcaacaacgattagttccatcattttaaggctgtgaatggtagacatttatcacatgtgatattgtgtaaagcctcttctgtttccatttggtgggaagccttaaattgatctggaaagaattcttcatttttcatttgtgcttttttaaaaaaaaaaataacacaaagaggaaaactagaatatatatatatatatacatatatataaaaagtcaaaattgtaataactgacccatttcaaagactgtttggtgcttctgtctttcaccattgtggttggctgaaaatcattcagctcacctggtgcatctgggttgaatgggaaattttgtgtgtgtagtatgtgtgtgtttgtgtgtgtatgtgtgtgtgtgcccatagcacacgtatatatgtgtgtg

SEQ ID NO: 250792 - protein, 247 aa, Artificial Sequence
  derived and/or modified sequence
MPGRSSSNSGSTGFISFSGVESALSSLKNFQACINSGMDTASSVALDLVESQTEVSSEYSMDKAMVEFATLDRQLNHYVKAVQSTINHVKEERPEKIPDLKLLVEKKFLALQSKNSDADFQNNEKFVQFKQQLKELKKQCGLQADREADGTEGVDEDIIVTQSQTNFTCPITKEEMKKPVKNKVCGHTYEEDAIVRMIESRQKRKKKAYCPQIGCSHTDIRKSDLIQDEALRRAIENHNKKRHRHSE

SEQ ID NO: 250793 - protein, 193 aa, Artificial Sequence
  derived and/or modified sequence
MPGRSSSNSGSTGFISFSGVESALSSLKNFQACINSGMDTASSVALDLVESQTEVSSEYSMDKAMVEFATLDRQLNHYVKAVQSTINHVKEERPEKIPDLKLLVEKKFLALQSKNSDADFQNNEKFVQFKQQLKELKKQCGLQADREADGTEGVDEDIIVTQSQTNFTCPITKEEMKKPVKNKVCGHTYEEDA

SEQ ID NO: 250794 - protein, 45 aa, Artificial Sequence
  derived and/or modified sequence
MPGRSSSNSGSTGFISFSGVESALSSLKNFQACINSGMDTASSVA

SEQ ID NO: 250795 - protein, 139 aa, Artificial Sequence
  derived and/or modified sequence
MPGRSSSNSGSTGFISFSGVESALSSLKNFQACINSGMDTASSVALDLVESQTEVSSEYSMDKAMVEFATLDRQLNHYVKAVQSTINHVKEERPEKIPDLKLLVEKKFLALQSKNSDADFQNNEKFVQFKQQLKELKKQ

SEQ ID NO: 250796 - DNA, 744 bp, Artificial Sequence
  derived and/or modified sequence
atgccaggacgatcttcttccaatagcggctccacaggcttcatatcatttagtggtgtcgagtcagcgctatcatccctcaagaactttcaggcatgtatcaactcaggaatggacactgcatcttccgtcgccctggacttagttgagagccagactgaggtgagtagcgagtactctatggacaaggccatggtggagtttgcgacactcgataggcaactgaatcactacgtcaaggccgtacagtcgacaattaaccacgtgaaagaggagcgccccgagaagattcccgatctcaaattactggtggaaaagaagttcctggctttgcaatctaagaactctgacgccgacttccagaacaacgaaaaattcgtgcagtttaaacagcagctcaaggagctgaaaaagcagtgcggcttgcaggccgaccgcgaagcagatggaaccgagggggtggatgaagatattatcgtgacacaaagtcagactaacttcacttgccctattactaaggaggagatgaagaaacccgtcaaaaataaagtctgtggtcacacctatgaagaggacgccatagtcaggatgatagaatccagacagaagcgtaagaaaaaggcgtactgcccccaaattggctgttcccacacagatattaggaagtctgatttaattcaggacgaggcacttcgccgagcaatcgagaatcataataaaaaacgccacaggcatagcgagtag

SEQ ID NO: 250797 - DNA, 582 bp, Artificial Sequence
  derived and/or modified sequence
atgcctgggcgcagtagctcaaacagtgggagcactggatttatttctttcagcggtgtcgaatctgctctgagctctctgaaaaatttccaggcctgcatcaacagtggcatggacacagcgagtagcgtggctctagatctcgttgagtcccagacagaagtgtccagtgagtatagcatggacaaagctatggttgagttcgccaccctcgacagacagctcaaccattacgtaaaagccgtgcagagcacgatcaatcatgttaaagaggagcgccccgagaagatacccgatctgaaactgctcgtggaaaaaaagttcctggcccttcagagtaagaactccgacgcagactttcagaataatgagaagtttgtccagttcaaacagcaactaaaggagctcaagaaacagtgcggccttcaggctgaccgggaggcggacgggacggaaggagtggatgaggatataatagttacccagagtcagaccaatttcacttgcccaattaccaaagaggagatgaagaaaccggtcaagaataaagtatgcgggcatacatacgaggaagacgcctag

SEQ ID NO: 250798 - DNA, 138 bp, Artificial Sequence
  derived and/or modified sequence
atgccgggccgctctagttcgaatagtggctctaccggttttatctcattcagtggcgtggaatctgccttgtcgtcacttaagaattttcaggcttgtatcaactccggcatggatacagcctcctctgttgcatag

SEQ ID NO: 250799 - DNA, 744 bp, Artificial Sequence
  derived and/or modified sequence
atgcctggacggagctcctctaactccggttccacaggcttcatctccttctccggcgttgagtctgcattgagcagtctcaagaattttcaggcctgtatcaattccgggatggacacggctagcagtgtggcactggacttggtagagtcacagaccgaagtctctagcgagtactctatggataaagctatggtggagttcgcgacattggataggcaattgaatcactacgtgaaggcggtgcagagcactataaaccacgtaaaggaagagcggcccgaaaagattcctgacttgaagctcctcgtagaaaagaaattcctcgccttacagtctaaaaattccgatgccgatttccagaacaacgagaagtttgtgcagttcaagcaacagttaaaggagttgaaaaaacagtgcggccttcaggcggacagggaggctgacggcacagagggagtggacgaagatattattgtcacacaatcgcaaaccaactttacatgcccgataacgaaggaagaaatgaaaaagcccgttaaaaacaaggtgtgtggacacacgtacgaggaagacgccatcgttcgtatgatcgaaagtcgacagaaacgaaagaaaaaggcctattgtcctcaaatcggatgtagccacacagatattagaaaatctgatctgatccaagatgaagctctcagacgagctattgagaaccacaacaagaaacgccatcgccactccgagtag

SEQ ID NO: 250800 - DNA, 420 bp, Artificial Sequence
  derived and/or modified sequence
atgcctggtcgtagctcttcaaacagcggatccacagggtttattagttttagtggagttgaaagcgccttatcgtccctgaagaacttccaagcttgtattaactccggtatggatactgcctctagcgtagcccttgacctcgtagaaagccagactgaagtctccagcgaatacagcatggacaaggccatggtagagtttgccactttggacaggcagttgaaccactacgttaaggccgtccagtcgacaatcaaccatgttaaggaggaaagacccgagaagatacctgacttaaagttgctggtagaaaaaaagtttctggcactgcagtctaaaaactctgatgcagactttcaaaataacgaaaaatttgtacagttcaaacagcagctcaaagagctgaaaaagcagtag

SEQ ID NO: 250801 - DNA, 1195 bp, Artificial Sequence
  derived and/or modified sequence
gcccgctctcacttttcagcggcaggcgaagggggctgaggaaaggaggtgggtctaggcaggggaaattggggtgccaccagacggagacagcttggactaccagaatcaagcactcttttggaagagggtaatctctctccaaaaactgaggacacttaccttccccatatattgagtccagctgtgtttggtggcccaggtactaatttcaagatgccaggacgttccagttcaaattcaggttcaactggtttcatctccttcagtggtgtagagtctgctctctcctccttgaaaaacttccaagcctgtatcaactctggtatggacacagcttctagtgttgctttggatcttgtggaaagtcagactgaagtgagtagtgaatatagtatggacaaggcaatggttgaatttgctacattggatcggcaactaaaccattatgtaaaggctgttcaatctacaataaatcatgtgaaagaagaacgtccagaaaaaataccagatttaaaattattggtagagaagaaatttttggctttacagagcaagaattctgatgcagactttcaaaataatgaaaaatttgtacagtttaaacaacagctgaaagaactaaagaagcaatgtggtcttcaagctgacagagaagctgacggaacagaaggagtggatgaagatataattgtgacccaaagtcagaccaacttcacctgccccattacaaaggaggaaatgaagaagccagtgaaaaataaagtgtgtggccacacctatgaagaggacgccattgttcgcatgattgagtccaggcaaaagcggaagaaaaaggcctattgccctcaaattggctgtagccacacggatataagaaagtcagatcttatccaggatgaagcacttagaagggcaattgagaaccataacaagaaaagacatcgtcattccgagtaggaaaagccacctgcctgcagggacaccagcagcctacctcctaccccagctgtctgttgagagcagtgctgaccccagcagttagggactggctgcatagcatacttgttgggggtaaaacttgttgcttttatgtgtgcttgaaaacatttttcaaagttacacaacagaaatgcaatcatattgtttatttttaagtgttctataatgttaaataaaactttgatcatctgca

SEQ ID NO: 250802 - DNA, 841 bp, Artificial Sequence
  derived and/or modified sequence
gacgcaagagcccgctctcacttttcagcggcaggcgaagggggctgaggaaaggaggtgggtctaggcaggggaaattggggtgccaccagacggagacagcttggactaccaggcttttaagaactgtgctattgttgacttcttcacagaatcaagcactcttttggaagagggtaatctctctccaaaaactgaggacacttaccttccccatatattgagtccagctgtgtttggtggcccaggtactaatttcaagatgccaggacgttccagttcaaattcaggttcaactggtttcatctccttcagtggtgtagagtctgctctctcctccttgaaaaacttccaagcctgtatcaactctggtatggacacagcttctagtgttgctttggatcttgtggaaagtcagactgaagtgagtagtgaatatagtatggacaaggcaatggttgaatttgctacattggatcggcaactaaaccattatgtaaaggctgttcaatctacaataaatcatgtgaaagaagaacgtccagaaaaaataccagatttaaaattattggtagagaagaaatttttggctttacagagcaagaattctgatgcagactttcaaaataatgaaaaatttgtacagtttaaacaacagctgaaagaactaaagaagcaatgtggtcttcaagctgacagagaagctgacggaacagaaggagtggatgaagatataattgtgacccaaagtcagaccaacttcacctgccccattacaaaggaggaaatgaagaagccagtgaaaaataaagtgtgtggccacacctatgaagaggacgcc

SEQ ID NO: 250803 - DNA, 405 bp, Artificial Sequence
  derived and/or modified sequence
cttttcagcggcaggcgaagggggctgaggaaaggaggtgggtctaggcaggggaaattggggtgccaccagacggagacagcttggactaccagaattacagaagagcatgatcgtgttttccttggtcctctgcaaaagtgaagtttcactaaagtaataatcaagcactcttttggaagagggtaatctctctccaaaaactgaggacacttaccttccccatatattgagtccagctgtgtttggtggcccaggtactaatttcaagatgccaggacgttccagttcaaattcaggttcaactggtttcatctccttcagtggtgtagagtctgctctctcctccttgaaaaacttccaagcctgtatcaactctggtatggacacagcttctagtgttgc

SEQ ID NO: 250804 - DNA, 1037 bp, Artificial Sequence
  derived and/or modified sequence
agcggcaggcgaagggggctgaggaaaggaggtgggtctaggcaggggaaattggggtgccaccagacggagacagcttggactaccaggtactaatttcaagatgccaggacgttccagttcaaattcaggttcaactggtttcatctccttcagtggtgtagagtctgctctctcctccttgaaaaacttccaagcctgtatcaactctggtatggacacagcttctagtgttgctttggatcttgtggaaagtcagactgaagtgagtagtgaatatagtatggacaaggcaatggttgaatttgctacattggatcggcaactaaaccattatgtaaaggctgttcaatctacaataaatcatgtgaaagaagaacgtccagaaaaaataccagatttaaaattattggtagagaagaaatttttggctttacagagcaagaattctgatgcagactttcaaaataatgaaaaatttgtacagtttaaacaacagctgaaagaactaaagaagcaatgtggtcttcaagctgacagagaagctgacggaacagaaggagtggatgaagatataattgtgacccaaagtcagaccaacttcacctgccccattacaaaggaggaaatgaagaagccagtgaaaaataaagtgtgtggccacacctatgaagaggacgccattgttcgcatgattgagtccaggcaaaagcggaagaaaaaggcctattgccctcaaattggctgtagccacacggatataagaaagtcagatcttatccaggatgaagcacttagaagggcaattgagaaccataacaagaaaagacatcgtcattccgagtaggaaaagccacctgcctgcagggacaccagcagcctacctcctaccccagctgtctgttgagagcagtgctgaccccagcagttagggactggctgcatagcatacttgttgggggtaaaacttgttgcttttatgtgtgcttgaaaacatttttcaaagttacacaacagaaatgcaatcatattgttta

SEQ ID NO: 250805 - DNA, 787 bp, Artificial Sequence
  derived and/or modified sequence
agtttccacccctccctcaaggcggcggtcctcttctatccgcagtcccggacctggagcgggtcagaccccgacttccgcccctgactccccaggcggtcacatgaccgaagcggctgggagcagggaggggcatcatgtgaccactcgccggcgacggctgatgacgcaagagcccgctctcacttttcagcggcaggcgaagggggctgaggaaaggaggcttttaagaactgtgctattgttgacttcttcacagaatcaagcactcttttggaagagggtaatctctctccaaaaactgaggacacttaccttccccatatattgagtccagctgtgtttggtggcccaggtactaatttcaagatgccaggacgttccagttcaaattcaggttcaactggtttcatctccttcagtggtgtagagtctgctctctcctccttgaaaaacttccaagcctgtatcaactctggtatggacacagcttctagtgttgctttggatcttgtggaaagtcagactgaagtgagtagtgaatatagtatggacaaggcaatggttgaatttgctacattggatcggcaactaaaccattatgtaaaggctgttcaatctacaataaatcatgtgaaagaagaacgtccagaaaaaataccagatttaaaattattggtagagaagaaatttttggctttacagagcaagaattctgatgcagactttcaaaataatgaaaaatttgtacagtttaaacaacagctgaaagaactaaagaagcaat

SEQ ID NO: 250806 - DNA, 744 bp, Artificial Sequence
  derived and/or modified sequence
atgcctggccgcagcagcagcaacagcggcagcacaggcttcatctccttcagcggcgtggagagcgccctgagcagcctgaagaacttccaggcctgcatcaacagcggcatggacacagccagctctgtggccctggacctggtggagagccagacagaggtgtcctctgagtacagcatggacaaggccatggtggagtttgccaccctggaccggcagctgaaccactacgtgaaggctgtgcagagcaccatcaaccacgtgaaggaggagaggcctgagaagatcccagacctgaagctgctggtggagaagaagttcctggccctgcagagcaagaacagtgatgctgacttccagaacaatgagaagtttgtgcagttcaagcagcagctgaaggagctgaagaagcagtgtggcctgcaggccgaccgggaggctgatggaacagaaggagtggatgaggacatcatcgtgacccagagccagaccaacttcacctgccccatcaccaaggaggagatgaagaagcctgtgaagaacaaggtgtgtggccacacctatgaagaagatgccatcgtgaggatgattgagagccggcagaagaggaagaagaaggcctactgcccccagatcggctgcagccacacagacatcaggaagagtgacctgatccaggatgaggccctgcggcgggccatcgagaaccacaacaagaagaggcaccgccacagcgagtag

SEQ ID NO: 250807 - DNA, 582 bp, Artificial Sequence
  derived and/or modified sequence
atgcctggccgcagcagcagcaacagcggcagcacaggcttcatctccttcagcggcgtggagagcgccctgagcagcctgaagaacttccaggcctgcatcaacagcggcatggacacagccagctctgtggccctggacctggtggagagccagacagaggtgtcctctgagtacagcatggacaaggccatggtggagtttgccaccctggaccggcagctgaaccactacgtgaaggctgtgcagagcaccatcaaccacgtgaaggaggagaggcctgagaagatcccagacctgaagctgctggtggagaagaagttcctggccctgcagagcaagaacagtgatgctgacttccagaacaatgagaagtttgtgcagttcaagcagcagctgaaggagctgaagaagcagtgtggcctgcaggccgaccgggaggctgatggaacagaaggagtggatgaggacatcatcgtgacccagagccagaccaacttcacctgccccatcaccaaggaggagatgaagaagcctgtgaagaacaaggtgtgtggccacacctatgaagaagatgcctag

SEQ ID NO: 250808 - DNA, 138 bp, Artificial Sequence
  derived and/or modified sequence
atgcctggccgcagcagcagcaacagcggcagcacaggcttcatctccttcagcggcgtggagagcgccctgagcagcctgaagaacttccaggcctgcatcaacagcggcatggacacagccagctctgtggcctag

SEQ ID NO: 250809 - DNA, 420 bp, Artificial Sequence
  derived and/or modified sequence
atgcctggccgcagcagcagcaacagcggcagcacaggcttcatctccttcagcggcgtggagagcgccctgagcagcctgaagaacttccaggcctgcatcaacagcggcatggacacagccagctctgtggccctggacctggtggagagccagacagaggtgtcctctgagtacagcatggacaaggccatggtggagtttgccaccctggaccggcagctgaaccactacgtgaaggctgtgcagagcaccatcaaccacgtgaaggaggagaggcctgagaagatcccagacctgaagctgctggtggagaagaagttcctggccctgcagagcaagaacagtgatgctgacttccagaacaatgagaagtttgtgcagttcaagcagcagctgaaggagctgaagaagcagtag

SEQ ID NO: 250810 - DNA, 744 bp, Artificial Sequence
  derived and/or modified sequence
atgcccggccggagcagcagcaacagcggcagcaccggcttcatctcgtttagtggcgtcgagagcgcactcagttcactgaaaaactttcaggcatgtattaactccggcatggacaccgccagttctgtggccttagacctggtcgagagtcaaaccgaggtgtcctctgagtactcaatggataaagccatggtcgaattcgcaaccttagacagacagctcaaccactacgtcaaagccgtgcagtcaacgataaatcacgtgaaggaggagcggccagaaaaaattccggacttaaagctcctggtcgaaaagaagttcctggccctgcaaagcaagaatagtgatgcagacttccagaataatgaaaaatttgtccagtttaaacaacagctcaaggagctgaagaagcagtgcggcctgcaggcggacagggaagccgatgggactgagggggtggatgaagacattatcgtgacgcagtcacagaccaattttacctgccctatcactaaagaagaaatgaaaaaaccagtcaagaataaggtgtgtggacacacatatgaagaagacgccatcgtgaggatgatcgagagtcgacagaagcgcaagaaaaaggcttattgcccccagataggctgttcacacaccgacataagaaagtcagacctcatccaggatgaggcgctacggagggcaatagagaaccacaacaaaaagcggcaccgccactcagagtag

SEQ ID NO: 250811 - DNA, 582 bp, Artificial Sequence
  derived and/or modified sequence
atgcccggccggagcagcagcaacagcggcagcaccggcttcatctcattcagcggagtcgagtccgccttgagttccctcaaaaacttccaagcctgtattaacagcggtatggacacggcttcatcagtggcgctggaccttgttgaaagccagaccgaggtttcctccgagtactcaatggacaaggccatggtggagttcgccacactcgatcgtcagcttaaccattacgtaaaagcagtgcaaagcacaatcaaccatgtgaaagaagagcgtcccgagaaaattcccgacctcaagctcctagttgagaaaaaatttctggcacttcagtccaaaaacagcgatgctgatttccagaataacgaaaagtttgtgcaattcaagcagcagcttaaggagcttaagaagcagtgtggactgcaggctgacagagaggctgatggtaccgaaggggtggatgaggacataatagtgacacagtctcagaccaacttcacttgccctatcaccaaagaagagatgaagaagccagtgaaaaacaaagtctgcggtcacacctacgaggaagacgcttag

SEQ ID NO: 250812 - DNA, 138 bp, Artificial Sequence
  derived and/or modified sequence
atgcccggccggagcagcagcaacagcggcagcaccggcttcatcagcttttcaggtgtggaaagcgctctgagtagtctaaagaattttcaggcgtgtattaatagtggcatggatacagcatccagcgttgcctag

SEQ ID NO: 250813 - DNA, 744 bp, Artificial Sequence
  derived and/or modified sequence
atgcccggccggagcagcagcaacagcggcagcaccggcttcatcagcttctcaggcgtggagtctgccctttcctcactgaaaaactttcaggcatgtatcaatagtgggatggacaccgcatcatccgttgcgctggaccttgtcgagtcacagactgaagtctctagtgagtattcaatggataaggcaatggtcgaatttgcgactctggacagacagctgaatcactatgtgaaggcggtccagtctaccatcaatcatgtcaaagaggaacggcccgaaaaaatccctgatctaaaactcctcgtcgagaaaaagttcctagctttgcagagcaaaaacagcgatgccgattttcagaacaatgaaaagttcgttcagtttaaacaacagcttaaggagttaaagaagcagtgtgggctgcaagccgatcgtgaagccgatggcactgaaggcgtggacgaggatatcatcgtgacccagtcccagacgaattttacctgtcctatcaccaaggaagagatgaaaaaaccagtgaaaaataaggtttgcgggcacacatacgaggaggacgccatagtgcgcatgatcgaatcgagacaaaaaaggaaaaagaaagcctattgcccacagatcggctgttcacacaccgatataaggaagagcgatttaatccaggacgaggccctgaggcgggcaattgaaaaccacaataaaaaaaggcacaggcatagcgaatag

SEQ ID NO: 250814 - DNA, 420 bp, Artificial Sequence
  derived and/or modified sequence
atgcccggccggagcagcagcaacagcggcagcaccggcttcatctcattcagtggcgttgagagtgcactgtcatctctgaaaaattttcaggcgtgcattaactctggaatggacacagcatccagtgtggctctggacctggtggaatctcaaaccgaggtgtcttccgagtattcaatggacaaggcgatggttgaattcgccactctagaccgccagcttaaccactacgtcaaagcagtgcagagcaccattaaccacgtgaaggaagaacgaccagaaaaaatccctgacctgaagctcctcgtggagaagaaattccttgccctccagtcaaaaaatagtgatgcggatttccagaataatgaaaaatttgtacaattcaaacagcagctgaaagaattgaagaagcagtag

SEQ ID NO: 250815 - DNA, 744 bp, Artificial Sequence
  derived and/or modified sequence
atgcccggtcgcagctccagcaacagtgggagcaccggttttattagcttttccggcgtagagagcgccctctcttccctgaagaattttcaggcttgtattaacagcggcatggacacagcaagttccgtggccctggacttggtagagagccagacagaagtatccagtgaatatagtatggacaaggcaatggtggaattcgctacactcgaccgacagcttaatcattacgtgaaggccgtgcagtctacgattaatcatgtaaaggaggagcgtcccgaaaagatccccgaccttaagctgctggtggagaagaaatttctcgcattgcagagtaaaaattctgacgctgacttccagaacaacgagaaatttgtgcaatttaagcaacagctgaaagagctcaagaagcagtgtggtctacaggcagatcgagaagccgacggtacagaaggggtcgacgaagacatcatcgtgacccaaagccagacgaattttacctgtccaataaccaaggaagagatgaaaaaacctgtgaagaataaggtctgcgggcatacctacgaggaagacgccattgtcagaatgatagaaagccggcaaaaaaggaaaaagaaagcctattgtccacagataggctgcagccatacagacatccgaaagtccgaccttattcaagacgaagcgctacgaagggcaatcgaaaaccacaacaagaagaggcaccgtcattcggaatag

SEQ ID NO: 250816 - DNA, 582 bp, Artificial Sequence
  derived and/or modified sequence
atgcccggaaggtcgagtagcaactccggctctactggattcatctcattcagtggcgtcgagtctgctctcagcagtcttaagaattttcaggcatgtataaactccggaatggacaccgccagctctgtcgcacttgatttagtcgagagccaaacagaggtttcctctgagtactcaatggacaaagcaatggtcgaattcgctactcttgaccggcagctcaaccattacgtcaaggccgtccagagtacaattaaccatgttaaagaagagcggccagagaaaatcccagatctcaaactccttgttgaaaagaaatttctggcactgcagtcaaaaaacagtgacgctgattttcagaacaatgaaaagttcgtccagttcaaacaacaattgaaagaactgaagaaacaatgcggcttgcaggcggatcgggaggcagacggtactgagggcgtggacgaagacataatcgtgacccagagtcagactaattttacttgcccaattaccaaagaagaaatgaagaaaccagtaaagaacaaagtgtgtggccacacttatgaagaagacgcgtag

SEQ ID NO: 250817 - DNA, 138 bp, Artificial Sequence
  derived and/or modified sequence
atgccaggcaggtcaagctccaactctggaagtaccggtttcatcagctttagcggggtggagagtgctctgagctcgctgaaaaattttcaggcctgtatcaactcaggtatggacactgcctcaagcgtcgcctag

SEQ ID NO: 250818 - DNA, 744 bp, Artificial Sequence
  derived and/or modified sequence
atgccaggaagaagtagctcgaatagcgggtcaacggggttcattagcttttccggcgtggagtcggccctaagcagtttgaagaactttcaagcctgcataaatagtggcatggacaccgcatccagtgtggccctggacctcgtggagtcacagacagaggtgtcctccgaatactcgatggataaagctatggtggaatttgccacgctggatcggcagttaaatcattacgtgaaggccgttcagagcactattaatcatgttaaagaagagcggccagagaagattccagatttgaagcttcttgtcgaaaagaaattcctcgcgcttcagagcaaaaatagtgacgcggattttcagaataatgagaaattcgtccagttcaagcaacaattgaaggagctgaaaaagcagtgcggactgcaggcagacagagaggcagacggcactgagggggtagacgaggacatcatagtcacacagtcccagacgaattttacttgtcctataactaaggaagaaatgaaaaaacctgtcaagaacaaggtgtgcggacatacatacgaagaggacgccatagttcggatgatcgagtcccggcagaagcgaaagaagaaagcatattgccctcagattgggtgctcccatacagacattagaaaatcggatctgatccaggacgaggccctacgcagagccattgagaaccacaataaaaagcgccaccgtcactccgagtag

SEQ ID NO: 250819 - DNA, 420 bp, Artificial Sequence
  derived and/or modified sequence
atgcccggaaggagtagctccaactctggcagtactgggtttatcagcttttcaggggttgagagcgccctcagctcccttaagaatttccaggcctgtattaattctggaatggataccgcatcatctgtggccctggacttggtcgagagtcagactgaagtgtccagcgagtatagcatggataaggcaatggttgagtttgccaccctggaccggcagctgaatcactacgtgaaagctgttcagagcactataaatcacgtcaaggaggagcgcccagaaaaaattccggacttaaaattactggttgagaaaaaatttctcgctctccagtcaaaaaattctgacgctgattttcagaataatgaaaagtttgttcaattcaagcagcaactgaaggagctgaagaaacagtag

SEQ ID NO: 250820 - DNA, 744 bp, Artificial Sequence
  derived and/or modified sequence
atgcccggcagaagcagcagcaacagcggcagcaccggcttcatcagcttcagcggcgtggagagcgccctgagcagcctgaagaacttccaggcctgcatcaacagcggcatggacaccgccagcagcgtggccctggacctggtggagagccagaccgaggtgagcagcgagtacagcatggacaaggccatggtggagttcgccaccctggacagacagctgaaccactacgtgaaggccgtgcagagcaccatcaaccacgtgaaggaggagagacccgagaagatccccgacctgaagctgctggtggagaagaagttcctggccctgcagagcaagaacagcgacgccgacttccagaacaacgagaagttcgtgcagttcaagcagcagctgaaggagctgaagaagcagtgcggcctgcaggccgacagagaggccgacggcaccgagggcgtggacgaggacatcatcgtgacccagagccagaccaacttcacctgccccatcaccaaggaggagatgaagaagcccgtgaagaacaaggtgtgcggccacacctacgaggaggacgccatcgtgagaatgatcgagagcagacagaagagaaagaagaaggcctactgcccccagatcggctgcagccacaccgacatcagaaagagcgacctgatccaggacgaggccctgagaagagccatcgagaaccacaacaagaagagacacagacacagcgagtag

SEQ ID NO: 250821 - DNA, 582 bp, Artificial Sequence
  derived and/or modified sequence
atgcccggcagaagcagcagcaacagcggcagcaccggcttcatcagcttcagcggcgtggagagcgccctgagcagcctgaagaacttccaggcctgcatcaacagcggcatggacaccgccagcagcgtggccctggacctggtggagagccagaccgaggtgagcagcgagtacagcatggacaaggccatggtggagttcgccaccctggacagacagctgaaccactacgtgaaggccgtgcagagcaccatcaaccacgtgaaggaggagagacccgagaagatccccgacctgaagctgctggtggagaagaagttcctggccctgcagagcaagaacagcgacgccgacttccagaacaacgagaagttcgtgcagttcaagcagcagctgaaggagctgaagaagcagtgcggcctgcaggccgacagagaggccgacggcaccgagggcgtggacgaggacatcatcgtgacccagagccagaccaacttcacctgccccatcaccaaggaggagatgaagaagcccgtgaagaacaaggtgtgcggccacacctacgaggaggacgcctag

SEQ ID NO: 250822 - DNA, 138 bp, Artificial Sequence
  derived and/or modified sequence
atgcccggcagaagcagcagcaacagcggcagcaccggcttcatcagcttcagcggcgtggagagcgccctgagcagcctgaagaacttccaggcctgcatcaacagcggcatggacaccgccagcagcgtggcctag

SEQ ID NO: 250823 - DNA, 420 bp, Artificial Sequence
  derived and/or modified sequence
atgcccggcagaagcagcagcaacagcggcagcaccggcttcatcagcttcagcggcgtggagagcgccctgagcagcctgaagaacttccaggcctgcatcaacagcggcatggacaccgccagcagcgtggccctggacctggtggagagccagaccgaggtgagcagcgagtacagcatggacaaggccatggtggagttcgccaccctggacagacagctgaaccactacgtgaaggccgtgcagagcaccatcaaccacgtgaaggaggagagacccgagaagatccccgacctgaagctgctggtggagaagaagttcctggccctgcagagcaagaacagcgacgccgacttccagaacaacgagaagttcgtgcagttcaagcagcagctgaaggagctgaagaagcagtag

SEQ ID NO: 250824 - protein, 1176 aa, Artificial Sequence
  derived and/or modified sequence
MALARPGTPDPQALASVLLLLLWAPALSLLAGTVPSEPPSACASDPCAPGTECQATESGGYTCGPMEPRGCATQPCHHGALCVPQGPDPTGFRCYCVPGFQGPRCELDIDECASRPCHHGATCRNLADRYECHCPLGYAGVTCEMEVDECASAPCLHGGSCLDGVGSFRCVCAPGYGGTRCQLDLDECQSQPCAHGGTCHDLVNGFRCDCAGTGYEGTHCEREVLECASAPCEHNASCLEGLGSFRCLCWPGYSGELCEVDEDECASSPCQHGGRCLQRSDPALYGGVQAAFPGAFSFRHAAGFLCHCPPGFEGADCGVEVDECASRPCLNGGHCQDLPNGFQCHCPDGYAGPTCEEDVDECLSDPCLHGGTCSDTVAGYICRCPETWGGRDCSVQLTGCQGHTCPLAATCIPIFESGVHSYVCHCPPGTHGPFCGQNTTFSVMAGSPIQASVPAGGPLGLALRFRTTLPAGTLATRNDTKESLELALVAATLQATLWSYSTTVLVLRLPDLALNDGHWHQVEVVLHLATLELRLWHEGCPARLCVASGPVALASTASATPLPAGISSAQLGDATFAGCLQDVRVDGHLLLPEDLGENVLLGCERREQCRPLPCVHGGSCVDLWTHFRCDCARPHRGPTCADEIPAATFGLGGAPSSASFLLQELPGPNLTVSFLLRTRESAGLLLQFANDSAAGLTVFLSEGRIRAEVPGSPAVVLPGRWDDGLRHLVMLSFGPDQLQDLGQHVHVGGRLLAADSQPWGGPFRGCLQDLRLDGCHLPFFPLPLDNSSQPSELGGRQSWNLTAGCVSEDMCSPDPCFNGGTCLVTWNDFHCTCPANFTGPTCAQQLWCPGQPCLPPATCEEVPDGFVCVAEATFREGPPAAFSGHNASSGRLLGGLSLAFRTRDSEAWLLRAAAGALEGVWLAVRNGSLAGGVRGGHGLPGAVLPIPGPRVADGAWHRVRLAMERPAATTSRWLLWLDGAATPVALRGLASDLGFLQGPGAVRILLAENFTGCLGRVALGGLPLPLARPRPGAAPGAREHFASWPGTPAPILGCRGAPVCAPSPCLHDGACRDLFDAFACACGPGWEGPRCEAHVDPCHSAPCARGRCHTHPDGRFECRCPPGFGGPRCRWDGWAGGWAANAPWGYGGAEKSARSVDESLPFPGPHVLICDMRRTV

SEQ ID NO: 250825 - protein, 1285 aa, Artificial Sequence
  derived and/or modified sequence
MALARPGTPDPQALASVLLLLLWAPALSLLAGTVPSEPPSACASDPCAPGTECQATESGGYTCGPMEPRGCATQPCHHGALCVPQGPDPTGFRCYCVPGFQGPRCELDIDECASRPCHHGATCRNLADRYECHCPLGYAGVTCEMEVDECASAPCLHGGSCLDGVGSFRCVCAPGYGGTRCQLDLDECQSQPCAHGGTCHDLVNGFRCDCAGTGYEGTHCEREVLECASAPCEHNASCLEGLGSFRCLCWPGYSGELCEVDEDECASSPCQHGGRCLQRSDPALYGGVQAAFPGAFSFRHAAGFLCHCPPGFEGADCGVEVDECASRPCLNGGHCQDLPNGFQCHCPDGYAGPTCEEDVDECLSDPCLHGGTCSDTVAGYICRCPETWGGRDCSVQLTGCQGHTCPLAATCIPIFESGVHSYVCHCPPGTHGPFCGQNTTFSVMAGSPIQASVPAGGPLGLALRFRTTLPAGTLATRNDTKESLELALVAATLQATLWSYSTTVLVLRLPDLALNDGHWHQVEVVLHLATLELRLWHEGCPARLCVASGPVALASTASATPLPAGISSAQLGDATFAGCLQDVRVDGHLLLPEDLGENVLLGCERREQCRPLPCVHGGSCVDLWTHFRCDCARPHRGPTCADEIPAATFGLGGAPSSASFLLQELPGPNLTVSFLLRTRESAGLLLQFANDSAAGLTVFLSEGRIRAEVPGSPAVVLPGRWDDGLRHLVMLSFGPDQLQDLGQHVHVGGRLLAADSQPWGGPFRGCLQDLRLDGCHLPFFPLPLDNSSQPSELGGRQSWNLTAGCVSEDMCSPDPCFNGGTCLVTWNDFHCTCPANFTGPTCAQQLWCPGQPCLPPATCEEVPDGFVCVAEATFREGPPAAFSGHNASSGRLLGGLSLAFRTRDSEAWLLRAAAGALEGVWLAVRNGSLAGGVRGGHGLPGAVLPIPGPRVADGAWHRVRLAMERPAATTSRWLLWLDGAATPVALRGLASDLGFLQGPGAVRILLAENFTGCLGRVALGGLPLPLARPRPGAAPGAREHFASWPGTPAPILGCRGAPVCAPSPCLHDGACRDLFDAFACACGPGWEGPRCEAHVDPCHSAPCARGRCHTHPDGRFECRCPPGFGGPRCRLPVPSKECSLNVTCLDGSPCEGGSPAANCSCLEGLAGQRCQVPTLPCEANPCLNGGTCRAAGGVSECICNARFSGQFCEVAKGLPLPLPFPLLEVAVPAACACLLLLLLGLLSGILAARKRRQSEGTYSPSQQEVAGARLEMDSVLKVPPEERLI

SEQ ID NO: 250826 - DNA, 3531 bp, Artificial Sequence
  derived and/or modified sequence
atggccctcgcacgtcccggcacacctgacccccaggccctggcgtcggtactcttgctccttctgtgggccccggctctgagcctgctcgctggaaccgtgccaagcgagccaccttccgcatgcgcaagcgacccatgtgctcctggcaccgagtgtcaagctacagagtccggaggatacacctgtgggccgatggaaccaaggggatgtgctactcagccctgccaccacggggctctgtgcgtgccacagggccctgacccgaccgggttcagatgctattgcgtccctggattccagggcccccgatgcgagctggatatcgacgaatgcgcgagcaggccctgccatcacggggctacttgccgtaatcttgcagaccgatacgagtgtcattgccccctgggttacgcaggcgtcacctgcgaaatggaagtggacgagtgcgcctctgctccatgtctgcacggaggctcatgcttggatggagtcggatcattccggtgcgtctgcgcacccggctatgggggaacaaggtgccagctggatctcgacgaatgtcaatcacagccatgcgctcacggcggaacatgccatgacctggtcaatggttttcgctgcgattgcgccggcaccgggtacgagggaactcactgtgagcgcgaggtattggagtgtgcctcggccccctgtgagcataacgctagctgccttgagggtctgggctcatttagatgcctgtgctggccagggtacagtggggagttgtgtgaggttgacgaggacgagtgtgccagcagcccatgccagcacggcggacggtgtcttcagcggtcggacccagcactctacggaggggtccaagccgccttccctggcgcattctctttcagacatgctgccggttttttatgtcactgtccccctggattcgaaggcgccgactgtggagttgaggtcgacgaatgtgcatccaggccctgtctgaatggaggacactgtcaggatttgccgaacggattccaatgccactgccctgatgggtacgcaggtccgacctgtgaggaagatgttgatgagtgtctgtctgatccctgcctgcatggtggaacctgctccgatactgtggccggttacatttgtcgctgtcctgagacctggggaggcagggactgttccgtgcagctcactgggtgccagggtcatacttgcccccttgccgcaacgtgcattcctatctttgagtccggggtgcactcttatgtgtgccattgtccacctgggacacatggcccattctgtggccaaaacaccaccttttccgtgatggccggtagccccatacaggccagcgttccagctggcggacccttaggcctggcgctgcggttcaggactacccttcccgcgggtacattagctaccagaaatgatacaaaggagagccttgaacttgccttagtggccgccacactgcaggccacgctctggtcctacagcactacagttctggtgctgcggttgccagacttagccctgaatgacggtcattggcaccaagtcgaagttgtgctccatctcgccactttagagctccgcttgtggcacgaaggatgccccgctcgcctgtgcgttgcttccggccccgtggcccttgcctccaccgcttcagccactccgctccccgccggaatcagcagcgctcagctcggggatgcaaccttcgccgggtgcctgcaggacgtgagagtggatggccacttacttttaccagaggacctgggcgaaaacgtcctcctcggctgcgaaaggcgtgagcaatgccggcctctgccatgcgtgcatggagggtcctgcgtggacttgtggacccattttcggtgcgactgcgcacgcccccaccggggacccacttgtgcagacgaaataccagcagctacgtttgggttgggtggtgccccttcttcagcctcgttccttctgcaagagttaccgggcccaaatctgacggttagtttcctgctaagaacaagagagagtgccggccttctcctacaatttgcgaacgactctgccgcaggcctgaccgtgttcttatcagaaggtagaatcagggctgaagttcctgggagtcctgcggtcgttcttcccggtcgttgggacgatggactgagacatcttgtcatgcttagctttggcccagatcagctccaagatcttggccaacacgtacacgttgggggacgcctgttggcagccgactcccagccatggggtgggccatttagaggttgcctgcaagacttacggctggatggctgtcacctgccttttttccctctccccctagacaattcctctcagccctcggagctcgggggtcgtcagagttggaacctaactgctggctgcgtgtccgaggatatgtgtagtcctgatccttgttttaatggtgggacatgcttggtcacttggaacgacttccactgtacgtgcccggctaacttcaccggcccaacttgcgcccaacagctttggtgtccgggacaaccatgccttccccctgctacctgtgaggaagtacccgacgggttcgtgtgcgtggcagaggctacatttagagaaggaccacctgctgccttctctgggcataatgcctcctccggtcgcctcctgggagggctatccctggcgtttcgaacccgtgactcggaagcttggctgctccgggccgctgccggcgccctggaaggtgtgtggctagcggtcaggaatggttccttggctggcggcgtgaggggtggccatgggctgccgggtgccgtgctgccgattcccggcccaagagttgcggacggagcttggcaccgagtgaggctggccatggaacgtcctgccgccacaacaagtcggtggctgctatggttggacggcgctgcaacccctgtggctctgcggggtctcgccagtgatctcggttttttacagggacccggtgcagtgcggattctgttggcagaaaattttactggttgtctcggcagggtcgcattaggaggactgcctctccccctggcgcgcccgaggccaggagccgctccaggcgcccgggagcatttcgcctcctggcccggaaccccagctcccatcctcggatgtaggggcgccccagtgtgtgcaccgtctccctgtctccacgacggagcctgccgcgacctcttcgacgcctttgcgtgcgcatgcggacccggatgggaaggcccccgttgtgaagcccatgtcgacccgtgtcactccgccccctgcgccagaggcaggtgccacactcatccagacgggcgctttgaatgtagatgtccaccaggtttcggcggcccaaggtgtcggtgggacggttgggcaggcggctgggctgcaaacgccccatggggctacggcggtgcggagaagtctgctcgctcagtggatgaaagcttacccttccctggccctcatgtcctgatctgcgacatgaggcgcactgtgtag

SEQ ID NO: 250827 - DNA, 3858 bp, Artificial Sequence
  derived and/or modified sequence
atggctctggcccgtcctgggacccccgacccccaagcgctggcttccgttctccttttacttttgtgggctcccgccctctcactgctggctggcacagtgccctccgagcccccgagcgcatgcgctagtgatccctgtgcaccaggaactgagtgtcaggctacagaaagcggcggatatacgtgtggtccaatggagccaagaggttgtgcaacacagccctgtcaccatggggccttgtgtgtgccgcaaggccccgacccaaccggatttcggtgctactgcgtcccaggctttcaaggtccaagatgcgaacttgatatcgacgagtgtgcttcccgcccatgccaccacggagcaacctgccggaacttggccgatcgctatgagtgccattgtcccttgggctatgcgggagttacatgcgagatggaagttgacgagtgtgcatctgctccatgtctacatggcggctcatgcttagacggcgtgggcagctttcggtgtgtatgcgctccggggtacggggggacacggtgtcagctggacctggatgaatgtcagagccaaccttgcgcgcatggaggtacatgccacgacctggtcaatggattccgatgtgactgcgccggtactgggtacgaagggactcactgtgaacgcgaggtgttagaatgcgcaagcgctccttgtgaacacaatgctagttgcctggagggcctgggtagctttcgatgcttgtgctggccgggctactccggtgagctttgcgaagtggacgaggacgaatgcgcgtcttccccatgccagcatggcgggagatgcctgcagcgttccgaccctgccctgtacggaggtgtacaggcagcttttcccggtgccttctcttttaggcacgcagcaggattcctgtgtcactgcccccctgggttcgaaggagccgactgtggtgtcgaggtcgacgagtgcgcgtctagaccatgtctcaatggcggccattgtcaggatcttcccaacggatttcaatgccattgtcccgacggatatgccgggccaacctgtgaggaagatgttgacgagtgtctttccgatccctgcctgcacggagggacctgcagcgacacagtggccgggtacatttgcagatgtccagagacatggggaggtcgggattgctccgtccagctcaccgggtgtcaggggcatacctgtccccttgcagcaacatgcataccaatcttcgagtcaggagtccacagttacgtctgccactgccccccaggaactcatggaccattttgcggccagaatacgaccttctctgtgatggccggtagtcctattcaagcttcggtcccggccggggggccgctaggcctagccttgcggtttcgaacaactctgcccgccgggaccctggcaaccagaaacgacacaaaagaaagccttgagcttgccctcgtcgcggcaactctgcaagcgaccctctggagttatagtactaccgtactggtactccgactgccagacctggccttgaatgatggacattggcatcaggtggaggttgtgctccatctagcgactttggaacttcggttatggcacgaaggatgtccggccaggttgtgtgtggcatctggcccagttgccttggcgagcaccgctagcgctacacccctccccgccggaattagttccgcccagttaggagatgctacttttgcaggttgcctacaggacgtccgggtggatggccatctgctgctgcccgaggacctgggggagaatgtgctgctgggctgcgaaagacgcgaacaatgcaggccactgccttgcgtgcatggcggcagttgtgttgatttatggacgcacttccggtgcgactgcgcgagaccccatcgcggtccgacatgcgcagacgaaattcctgctgccaccttcgggttgggcggggcgccaagttccgcctcgtttttactgcaggagcttcccggccctaacctgaccgtgtcctttttactgcgtactcgtgagtctgcaggtctgctgctccagttcgctaacgatagcgccgccggtttgactgtctttctgtccgagggcagaatcagagccgaagttccaggtagcccagccgtagttctgcccggcagatgggacgacggcctccggcatctggtcatgctgtcatttgggcctgaccagctccaggatctggggcaacacgtccatgtgggaggccgtttacttgccgccgacagccagccctggggcggccccttccggggttgcctccaggatttaagactggatggctgccatctgcccttctttcctctgcctcttgacaattctagtcagccatctgagctgggaggccggcagtcctggaatctgaccgctgggtgtgtgtccgaggatatgtgtagccctgatccatgttttaatggcgggacttgtctcgttacctggaatgacttccactgtacctgtcccgcaaattttacaggcccaacctgcgcccaacagctctggtgtcctgggcagccgtgtctcccaccagccacgtgcgaagaagtgcctgatgggtttgtgtgcgtggcagaggccacctttcgagagggcccccctgccgctttctctggacataatgccagcagtggaagacttctgggcggactttccttggccttcagaacacgagactcagaagcctggctgcttcgcgccgccgcgggagctctggaaggggtctggctggcggttcgcaatggctctctcgccggaggagttaggggggggcacggcctgccaggagctgtgcttcctattccaggcccacgggtcgctgatggggcctggcatcgggttcgcctcgccatggaacggcctgctgcaacaaccagccgctggcttttgtggctggatggagccgccacacccgtggcactacgtggtctggcatctgacctcggctttttgcagggacccggcgctgtacggatcctactggcagaaaacttcaccggttgcctggggcgagttgcactgggagggcttcccttgccgctggcgcggcctagacccggtgcagcccccggtgcacgcgagcacttcgcttcttggccaggtacacctgcaccaattctaggctgtcgtggagctcccgtttgcgcccccagcccatgtctgcacgacggcgcatgcagagacctgttcgacgccttcgcttgtgcttgtggccccgggtgggagggccctcgctgcgaggcccatgtcgacccctgccacagtgccccttgtgcccgtggccgatgtcacacacatccagacggaaggttcgagtgccgatgcccccccgggtttggtggcccccggtgccgtttacccgtcccctccaaggaatgttccctgaatgtgacgtgtttggatggctcaccatgtgagggcgggtctcctgctgctaattgttcgtgcctcgaggggcttgctggtcagcgctgtcaggttcctaccctgccctgtgaggccaatccctgcctgaatggcggcacgtgtagagccgcaggtggtgtgtccgaatgcatctgtaatgcaagattctccgggcaattttgtgaagtggcaaagggactccctctcccactgccgttcccgctgctggaagtggccgtgccggctgcttgcgcatgtctgctgctgctactgttggggctgctatccggcatcttggcagccaggaagcggcggcaatccgagggcacctattcgccctcacaacaggaggttgcaggggctcgcctggagatggattcggttctcaaggtgccacccgaagaaaggttaatatag

SEQ ID NO: 250828 - DNA, 3531 bp, Artificial Sequence
  derived and/or modified sequence
atggccctggcccggcccggcaccccagacccccaggccctggcctctgtgctgctgctgctgctgtgggccccagccctgagcctgctggccggcaccgtgcccagcgagccccccagcgcctgtgccagtgacccctgtgcccctggaacagagtgccaggccacagagagcggcggctacacctgtggccccatggagccccggggctgtgccacccagccctgccaccacggggccctgtgtgtgccccagggccctgaccccaccggcttccgctgctactgtgtgcccggcttccagggcccccgctgtgagctggacattgatgaatgtgccagccggccctgccaccacggggccacctgcaggaacctggccgacagatatgagtgccactgccccctgggctacgccggcgtgacctgtgagatggaggtggatgaatgtgccagcgccccctgcctgcatggaggcagctgcctggatggagtgggcagcttccgctgtgtgtgtgcccctggctacggcggcacccgctgccagctggacctggatgagtgccagagccagccctgtgcccatggaggcacctgccacgacctggtgaatggcttccgctgtgactgtgccggcaccggctatgagggcacccactgtgagcgggaggtgctggagtgtgccagcgccccctgtgagcacaatgccagctgcctggagggcctgggcagcttccgctgcctgtgctggccaggctacagcggggagctgtgtgaggtggatgaagatgaatgtgccagcagcccctgccagcacggcggccgctgcctgcagaggagtgaccctgccctgtatggaggagtgcaggccgccttccctggggccttctccttcagacatgctgctggcttcctgtgccactgccccccaggctttgagggcgctgactgtggggtggaggtggatgaatgtgccagccggccctgcctgaatggaggccactgccaggacctgcccaacggcttccagtgccactgcccagatggctacgccggccccacctgtgaagaagatgtggatgaatgtctgagtgacccctgcctgcatggaggcacctgcagcgacacagtggccggctacatctgccgctgcccagagacctggggcggccgggactgcagcgtgcagctgaccggctgccagggccacacctgccccctggccgccacctgcatccccatctttgaaagtggagtgcacagctatgtgtgccactgccccccaggcacccacggccccttctgtggccagaacaccaccttctctgtgatggccggcagccccatccaggcctctgtgcctgctgggggccccctgggcctggccctgcgcttccgcaccaccctgcctgctggcaccctggccaccagaaatgacaccaaggagagcctggagctggccctggtggccgccaccctgcaggccaccctgtggagctacagcaccaccgtgctggtgctgcggctgcctgacctggccctgaatgatggccactggcaccaggtggaggtggtgctgcacctggccaccctggagctgcggctgtggcatgagggctgcccagcccggctgtgtgtggccagcggccctgtggccctggccagcacagccagcgccacccccctgcctgctggcatcagcagcgcccagctgggagatgccacctttgctggctgcctgcaggatgtgcgggtggatggccacctgctgctgcctgaggacctgggagaaaatgtgctgctgggctgtgaaagaagagagcagtgccggcccctgccctgtgtgcacggcggcagctgtgtggacctgtggacccacttccgctgtgactgtgcccggccccaccggggccccacctgtgctgatgagatcccagctgccaccttcggcctgggcggggcccccagcagcgccagcttcctgctgcaggagctgcccggccccaacctgactgtgtccttcctgctgcggacccgggagagcgctggcctgctgctgcagtttgccaatgacagcgctgctggcctgactgtgttcctgtctgagggccgcatccgggcagaggtgcccggcagccctgctgtggtgctgcccggccgctgggatgatggcctgcggcacctggtgatgctgagctttggaccagaccagctgcaggacctgggccagcacgtgcacgtgggcggccgcctgctggccgctgacagccagccctggggcggccccttccggggctgcctgcaggacctgcggctggatggctgccacctgcccttcttccccctgcccctggacaacagcagccagcccagcgagctgggcggccggcagagctggaacctgacagctggctgtgtgtctgaggacatgtgcagcccagacccctgcttcaacggcggcacctgcctggtgacctggaatgacttccactgcacctgcccagccaacttcaccggccccacctgtgcccagcagctgtggtgccccggccagccctgcctgcccccagccacctgtgaggaggtgcctgatggctttgtgtgtgtggccgaggccaccttccgggagggccccccagctgccttcagcggccacaatgccagcagcggccgcctgctgggcggcctgagcctggccttccgcacccgggacagcgaggcctggctgctgcgggctgctgctggggccctggagggcgtgtggctggccgtgagaaatggcagcctggccggcggcgtgcggggcggccacggcctgcccggggctgtgctgcccatccctggcccccgggtggctgatggagcctggcaccgggtgcggctggccatggagaggcctgctgccaccaccagccgctggctgctgtggctggatggagctgccacccctgtggccctgcggggcctggccagtgacctgggcttcctgcagggccctggagctgtgcgcatcctgctggccgagaacttcaccggctgcctgggccgggtggccctgggcggcctgcccctgcccctggcccggcccaggcctggagctgcccctggggcccgggagcactttgcctcctggccaggcaccccagcccccatcctgggctgccgcggggcccctgtgtgtgcccccagcccctgcctgcatgatggagcctgccgggacctgtttgatgcctttgcctgtgcctgtggccctggctgggagggcccccgctgtgaggcccacgtggacccctgccacagcgccccctgtgcccggggccgctgccacacccacccagatggccgctttgaatgtcgctgccccccaggctttggaggcccccgctgccgctgggatggctgggccggcggctgggccgccaatgccccctggggctacggcggcgctgagaagagcgcccggtctgtggatgagagcctgcccttccctggcccccacgtgctgatctgtgacatgagaagaacagtgtag

SEQ ID NO: 250829 - DNA, 3858 bp, Artificial Sequence
  derived and/or modified sequence
atggccctggcccggcccggcaccccagacccccaggccctggcctctgtgctgctgctgctgctgtgggccccagccctgagcctgctggccggcaccgtgcccagcgagccccccagcgcctgtgccagtgacccctgtgcccctggaacagagtgccaggccacagagagcggcggctacacctgtggccccatggagccccggggctgtgccacccagccctgccaccacggggccctgtgtgtgccccagggccctgaccccaccggcttccgctgctactgtgtgcccggcttccagggcccccgctgtgagctggacattgatgaatgtgccagccggccctgccaccacggggccacctgcaggaacctggccgacagatatgagtgccactgccccctgggctacgccggcgtgacctgtgagatggaggtggatgaatgtgccagcgccccctgcctgcatggaggcagctgcctggatggagtgggcagcttccgctgtgtgtgtgcccctggctacggcggcacccgctgccagctggacctggatgagtgccagagccagccctgtgcccatggaggcacctgccacgacctggtgaatggcttccgctgtgactgtgccggcaccggctatgagggcacccactgtgagcgggaggtgctggagtgtgccagcgccccctgtgagcacaatgccagctgcctggagggcctgggcagcttccgctgcctgtgctggccaggctacagcggggagctgtgtgaggtggatgaagatgaatgtgccagcagcccctgccagcacggcggccgctgcctgcagaggagtgaccctgccctgtatggaggagtgcaggccgccttccctggggccttctccttcagacatgctgctggcttcctgtgccactgccccccaggctttgagggcgctgactgtggggtggaggtggatgaatgtgccagccggccctgcctgaatggaggccactgccaggacctgcccaacggcttccagtgccactgcccagatggctacgccggccccacctgtgaagaagatgtggatgaatgtctgagtgacccctgcctgcatggaggcacctgcagcgacacagtggccggctacatctgccgctgcccagagacctggggcggccgggactgcagcgtgcagctgaccggctgccagggccacacctgccccctggccgccacctgcatccccatctttgaaagtggagtgcacagctatgtgtgccactgccccccaggcacccacggccccttctgtggccagaacaccaccttctctgtgatggccggcagccccatccaggcctctgtgcctgctgggggccccctgggcctggccctgcgcttccgcaccaccctgcctgctggcaccctggccaccagaaatgacaccaaggagagcctggagctggccctggtggccgccaccctgcaggccaccctgtggagctacagcaccaccgtgctggtgctgcggctgcctgacctggccctgaatgatggccactggcaccaggtggaggtggtgctgcacctggccaccctggagctgcggctgtggcatgagggctgcccagcccggctgtgtgtggccagcggccctgtggccctggccagcacagccagcgccacccccctgcctgctggcatcagcagcgcccagctgggagatgccacctttgctggctgcctgcaggatgtgcgggtggatggccacctgctgctgcctgaggacctgggagaaaatgtgctgctgggctgtgaaagaagagagcagtgccggcccctgccctgtgtgcacggcggcagctgtgtggacctgtggacccacttccgctgtgactgtgcccggccccaccggggccccacctgtgctgatgagatcccagctgccaccttcggcctgggcggggcccccagcagcgccagcttcctgctgcaggagctgcccggccccaacctgactgtgtccttcctgctgcggacccgggagagcgctggcctgctgctgcagtttgccaatgacagcgctgctggcctgactgtgttcctgtctgagggccgcatccgggcagaggtgcccggcagccctgctgtggtgctgcccggccgctgggatgatggcctgcggcacctggtgatgctgagctttggaccagaccagctgcaggacctgggccagcacgtgcacgtgggcggccgcctgctggccgctgacagccagccctggggcggccccttccggggctgcctgcaggacctgcggctggatggctgccacctgcccttcttccccctgcccctggacaacagcagccagcccagcgagctgggcggccggcagagctggaacctgacagctggctgtgtgtctgaggacatgtgcagcccagacccctgcttcaacggcggcacctgcctggtgacctggaatgacttccactgcacctgcccagccaacttcaccggccccacctgtgcccagcagctgtggtgccccggccagccctgcctgcccccagccacctgtgaggaggtgcctgatggctttgtgtgtgtggccgaggccaccttccgggagggccccccagctgccttcagcggccacaatgccagcagcggccgcctgctgggcggcctgagcctggccttccgcacccgggacagcgaggcctggctgctgcgggctgctgctggggccctggagggcgtgtggctggccgtgagaaatggcagcctggccggcggcgtgcggggcggccacggcctgcccggggctgtgctgcccatccctggcccccgggtggctgatggagcctggcaccgggtgcggctggccatggagaggcctgctgccaccaccagccgctggctgctgtggctggatggagctgccacccctgtggccctgcggggcctggccagtgacctgggcttcctgcagggccctggagctgtgcgcatcctgctggccgagaacttcaccggctgcctgggccgggtggccctgggcggcctgcccctgcccctggcccggcccaggcctggagctgcccctggggcccgggagcactttgcctcctggccaggcaccccagcccccatcctgggctgccgcggggcccctgtgtgtgcccccagcccctgcctgcatgatggagcctgccgggacctgtttgatgcctttgcctgtgcctgtggccctggctgggagggcccccgctgtgaggcccacgtggacccctgccacagcgccccctgtgcccggggccgctgccacacccacccagatggccgctttgaatgtcgctgccccccaggctttggaggcccccgctgccgcctgcctgtgcccagcaaagaatgttccctgaatgtgacctgcctggatggcagcccctgtgagggcggcagccctgctgccaactgcagctgcctggagggcctggccggccagcgctgccaggtgcccaccctgccctgtgaggccaacccctgcctgaatggaggcacctgcagagctgctggaggagtgtctgagtgcatctgcaatgcccgcttcagcggccagttctgtgaggtggccaagggcctgcccctgcccctgcccttccccctgctggaggtggccgtgcctgctgcctgtgcctgcctgctgctgctgctgctgggcctgctgagcggcatcctggccgccaggaagaggcggcagagcgagggcacctacagccccagccagcaggaggtggccggggcccggctggagatggacagcgtgctgaaggtgcccccagaggagcggctcatctag

SEQ ID NO: 250830 - DNA, 3531 bp, Artificial Sequence
  derived and/or modified sequence
atggccctggcccggcccggcacccccgacccccaggccctggcctcagtcctgttactcctgctctgggcacccgcgctctccctactggcgggaacagtaccatcagagccaccctctgcatgtgcttctgacccatgcgcccctggtacggagtgtcaagcaacagaatcaggtgggtatacctgcggaccaatggagcccagaggctgtgctacacagccatgccatcacggagccctctgcgtgcctcaggggcctgaccccaccggattcagatgttactgcgtccccggatttcagggaccccgatgtgagttggatatcgatgaatgcgcttcccgcccctgccaccacggggcaacctgccggaacctggctgacagatatgagtgccattgcccactgggatacgccggggttacatgtgagatggaagtcgacgagtgcgcatccgctccatgcttacacggtgggagctgtctggacggggtggggtcctttaggtgcgtgtgcgcgcctggatacggcggtacccgctgtcagctagaccttgacgagtgtcaatcccagccttgcgctcacgggggtacctgtcatgacctggtgaacggatttcgctgcgactgcgcaggtacgggctacgagggcactcactgtgagcgggaagttctagaatgtgctagcgctccctgtgagcacaatgcatcttgtctcgaaggtctgggctcttttcgctgtctgtgttggccagggtactctggtgagttatgcgaggtggacgaagatgagtgcgcctcttctccctgtcagcatggaggaagatgtctccagcgctcagacccggccctttacggcggggtgcaggccgcgttccctggcgctttctcttttcgacatgctgcaggcttcttgtgtcactgcccccccggctttgagggggctgattgtggcgtcgaagtagacgagtgtgccagccggccatgcctcaacggggggcattgccaggacctgccaaacggttttcagtgccactgcccagatgggtacgcgggccccacatgcgaagaggatgtggacgagtgtctctctgacccttgccttcacggcggaacttgctccgatactgtcgcaggctacatttgcaggtgcccagaaacatggggtggaagggattgctccgtgcagctgacaggctgccagggtcatacatgcccactggcagcgacatgcattcctattttcgaatccggggtacattcctatgtgtgccactgccctcccggcacacacggacctttctgcgggcagaatacaacgttcagcgttatggccgggagccctatccaggctagtgttccagctggcggaccgttggggctggccttgagattccgcacaacgcttccggcgggaaccctggctaccaggaatgatacgaaggagagcctcgaactcgccctcgtggccgcaacactgcaagcaaccctgtggagctattctacaaccgtcctagtcttaaggctgccagaccttgcactgaatgatggccactggcaccaggtggaagtggtgttacaccttgccacactggaactgcggctgtggcacgaaggctgccctgcccggctgtgtgtcgcctccggacccgtggctctagcaagcacagcgagcgccactccattgcctgccggcatcagcagtgcacagttaggcgatgccacattcgctgggtgcttacaggacgtccgggtcgatggccatctcttacttcctgaggatctcggcgagaacgtgctgctcggttgtgagaggcgtgagcagtgtcggcctttaccttgcgtccatggggggtcctgcgtggatctttggacccattttcggtgcgactgcgccagaccccataggggccctacatgtgcagacgagatccccgccgccaccttcggactggggggtgctccctcgtcagcttcctttttactccaagaattgcccgggccgaacttgaccgtctcgttcttattgagaacacgagagtccgctggattgctgttgcagtttgccaatgatagcgccgccggtctcactgtgttcctgagtgaggggagaatacgggcggaggtacccggttctccagcggttgtgctgccgggacggtgggatgacggcctacgtcaccttgtgatgctatcgtttggaccagatcagttgcaggacctggggcaacacgtgcatgtagggggaaggcttctggcagcagacagtcagccttgggggggccctttccgaggctgtcttcaggatctgcgtcttgatggatgtcatctgccgttctttcccctcccacttgataattcgagccaaccatcggaactgggaggcaggcaaagttggaatcttactgcaggctgtgtttccgaagatatgtgttcccccgacccctgctttaacggagggacgtgtctcgtgacctggaatgactttcactgcacttgcccagccaatttcacgggtcctacttgtgctcagcagctgtggtgccccggccagccctgtctgccacccgccacttgtgaggaggtccctgacggttttgtctgcgtcgcagaggccacattccgggaaggaccccccgccgcattcagcggacataatgcctcatcaggcagattgctgggaggtttgtcactcgccttcaggacacgggactcagaagcttggctgctccgggccgccgcaggcgcgctcgagggcgtatggctggcagtgcgaaacgggtccctcgccggaggcgtacgaggaggccacggcctgcctggtgccgtactccccataccgggcccccgcgtcgccgacggcgcttggcaccgagtgagactggctatggaaagacccgctgcaacaaccagccgctggctgctctggctggacggggctgcaacacccgtggctttacgaggtctcgcatccgatttgggttttttgcaggggccaggtgcagttcggatcttactggctgaaaactttacgggctgcctgggccgcgtggcactcgggggtctgcccctcccactggctaggcctcgtcctggagcagccccaggcgccagagaacattttgcctcctggcccggcacgccggcccccattctgggttgcagaggcgccccagtgtgtgctcccagcccttgcctgcacgacggggcctgccgagacctcttcgacgctttcgcatgcgcctgcggacccggatgggagggccccagatgcgaggcacatgtggatccttgtcacagcgcaccctgcgcacggggacggtgtcacacacacccagacggcagattcgagtgtagatgccctcccgggttcggtggcccaagatgcagatgggatggatgggctggtgggtgggctgccaacgctccgtggggctatgggggcgcggagaagtccgcccgttcggtggatgagagcctcccgttccccggaccacacgtcctgatctgcgatatgcggcgcaccgtgtag

SEQ ID NO: 250831 - DNA, 3858 bp, Artificial Sequence
  derived and/or modified sequence
atggccctggcccggcccggcacccccgacccccaggccctggccagcgtgctgctactcctgctctgggcacctgccctctcacttctcgctggaacagtcccttcagaaccaccttctgcatgcgcaagcgatccatgtgctccaggcacagaatgccaggccactgagtccggtggatacacttgcggtcccatggagccaaggggatgcgctactcagccttgtcaccatggcgcattatgtgtcccccaagggccagaccctaccggcttcagatgttattgcgttcccgggtttcaaggacctcggtgcgagctcgatatcgatgagtgcgcgtcgcgcccatgtcatcatggtgcaacttgcagaaacctggcggatagatatgaatgtcattgcccgttggggtacgccggcgttacgtgtgagatggaagtcgacgaatgcgcctccgccccgtgcctccacggaggctcttgcctggacggagttggctcttttagatgcgtctgcgcccctgggtacgggggtactcgctgccagctcgatctcgacgaatgtcaatcacaaccatgcgcccacggaggcacatgtcacgatttggtaaatgggttcagatgcgactgcgcagggaccggatacgagggcactcactgcgaaagagaagtcttggagtgtgcctctgccccgtgtgagcacaacgccagttgtctggagggcctcggctcctttaggtgcttgtgctggccgggctacagcggcgagctgtgcgaggtggatgaagatgagtgtgcttccagcccctgtcagcacggtggaaggtgtctacagcgaagcgatcccgccctttacgggggagtacaagccgcattccctggggccttcagctttaggcacgcagctggattcttgtgccactgtcctcccggcttcgagggagcagactgcggggtggaggtggatgagtgcgctagtcgaccctgtctgaacggcggccattgccaggacctgcctaacggcttccaatgtcactgtccagatggatatgcaggcccgacatgtgaggaggacgtcgatgaatgcctctccgacccttgtcttcacggagggacgtgctcagacacagttgccggatatatttgccgatgtcctgagacctgggggggccgcgactgtagcgttcagttaacagggtgccaggggcatacatgcccactggcagcaacctgtatacccatcttcgagtctggggttcattcctatgtgtgccactgtcctccaggaacccatggaccattttgcgggcaaaatactactttctcagtcatggctggaagtccgattcaggccagtgtgcctgctggcggccccctgggcctggctcttcgatttagaactacactccccgcgggcacactcgctactcgcaacgacacgaaagaatccctagaattggcactagtggcagctaccctgcaggccacactctggtcatacagtacaacagtgctggtcctcagactgcccgacctggcactcaatgacgggcactggcaccaggtagaggtggtactccacctggctactttggagctgcgcctctggcatgaggggtgccccgcaagattatgtgtggctagtgggcccgtcgcattggccagcaccgcatccgctactccactccccgctggcatctcctctgcccaactgggtgatgccaccttcgcagggtgtcttcaagatgttagggtagatgggcatctacttttgccggaagatctaggtgaaaatgtgctcttgggatgcgaacgccgggagcagtgtcgacctttaccttgcgtccatggcggaagctgcgtagacttgtggacacatttcagatgtgattgtgcaagaccccaccgggggccaacatgtgccgacgagattcccgccgccacattcggactggggggggcaccctcaagcgcatcgttcttattgcaggaattgcccggaccaaacttgacagtcagtttcctcttgcgcacacgcgagagcgccggcctactattacaatttgccaatgactccgcagcaggcctcacagtgttcctcagcgaagggcggattagagctgaggtcccaggttcacccgctgtcgtcctgcctgggcgctgggacgacggcttgcgacacctcgtgatgctcagctttggcccagatcagctccaggacctgggtcagcatgtccacgtcgggggcaggctattagccgccgacagtcagccatgggggggtcctttcagggggtgcctccaagacctcaggctggacgggtgccaccttccattcttccctttgccgctcgacaactcctctcaaccatccgagttaggcggtaggcaaagttggaatctgaccgccggttgcgtctcagaggacatgtgctcacccgatccatgtttcaatggggggacctgcctggtgacctggaacgacttccactgtacttgcccggctaattttaccggtccgacctgtgcccagcagctgtggtgcccaggccagccttgcctgcccccagccacttgtgaagaagttccggatggctttgtgtgtgttgccgaggcaactttccgcgagggtccacccgccgccttcagtggacacaacgccagttcaggacggcttcttggcgggctcagcttggccttccggacgagggactctgaagcctggctgcttcgggccgcggccggggcgctggagggggtctggctggccgttcgcaatggtagcttagccggaggagtacgtggaggacacggtctgcctggcgcggtattacctatccccggcccacgggtggctgacggcgcctggcatcgggtgcgccttgcaatggagaggcccgccgccaccacttcgaggtggttactgtggctggatggggctgcaaccccagtagctctccgggggctggctagcgaccttggttttttacaggggcctggcgccgtgcggatcctgcttgcagaaaacttcacaggatgtttgggacgagtggcccttggggggctgcctcttcctctggcccgcccgaggccaggagcagcccctggtgcccgtgagcacttcgcaagttggcctgggacaccagctcccattctgggttgcagaggggctcctgtgtgtgcacccagtccctgtctgcacgacggcgcatgtagagatctttttgatgccttcgcgtgcgcctgcggccctgggtgggagggccctaggtgtgaggcccatgtggacccgtgccacagtgctccttgtgcccgagggaggtgccacacccacccagacgggaggtttgaatgccgatgcccccctggatttggtggcccaaggtgtcgattacctgtgccaagcaaagaatgtagcctgaacgtgacctgcctggatggatccccatgtgaaggcggaagccctgccgctaactgctcttgcctggaaggcctcgcggggcagagatgtcaagttccaacgctgccgtgtgaggccaacccatgtctaaacggcgggacctgccgggctgcaggcggagtctccgagtgcatctgtaacgcacgtttttcgggccagttttgtgaggtggccaagggactgcccctccctctccctttcccattgctggaagtggctgtgcctgctgcatgcgcatgcctcctgcttcttctgctgggacttctgagcggcattctggcagctaggaagcgccgtcaaagtgagggcacttatagcccttcgcagcaggaagtggccggagcgcgcctggagatggacagtgtgttgaaggtgccccccgaagagcgcttgatctag

SEQ ID NO: 250832 - DNA, 3531 bp, Artificial Sequence
  derived and/or modified sequence
atggctcttgcaaggcccggtacaccagacccccaagcactcgccagcgtgttactgctcctgctctgggcccctgccttatcactactcgccggaacagtcccctcagagccaccgtctgcctgcgcgagcgatccctgcgctcccggaaccgagtgccaggccacagaatcaggcggttacacatgcggacctatggaacctcgtggctgcgcaactcagccgtgccaccacggtgcactctgcgtgccccaggggcctgatccaaccggattccggtgttattgcgtgcctggttttcagggcccaagatgtgaactggatattgacgaatgtgctagtaggccctgtcaccatggggcaacgtgtcgtaacctggctgatcgatatgaatgccactgccctttgggctatgctggcgtaacttgcgaaatggaggtcgacgagtgcgcctccgcaccttgcttacacggcggaagctgtctggatggcgtaggtagctttcgctgcgtgtgcgcacccggatatggtggaactcgctgccaactggatctagacgagtgtcagagtcagccctgcgcccacggcggtacatgtcacgacctggtgaatggattccgctgcgattgcgcagggacaggttatgagggcactcactgtgaacgggaggtccttgagtgtgcttctgctccatgtgagcataacgcctcatgcttagaagggctgggatccttccgatgcctgtgctggcccggatattcgggtgagctctgtgaggtcgacgaagatgagtgtgcgtccagtccttgtcagcacggagggcgttgcctacagagatctgatcctgcattgtacgggggagtgcaagctgccttcccaggagcgttttcctttaggcacgcggctggcttcctatgccattgtcctccgggttttgaaggggcagattgtggggtggaggtcgacgagtgcgccagcagaccctgccttaacggcggacactgccaggacctcccgaacggcttccaatgccattgccctgatgggtatgcgggacctacttgtgaggaggacgttgatgaatgtctgagtgacccctgtcttcacggcggaacctgtagtgatacggtggctggctacatttgtcggtgtcccgagacctgggggggtagagattgtagcgtacaactgaccggttgtcagggacacacctgtccgctagccgcaacctgcatccccatcttcgagtctggtgtgcacagctacgtatgccactgccctccgggaacccatggtcccttttgcggtcagaacactacattctctgtgatggcaggttcgcccatccaggcttctgtcccagccggaggcccattgggtctcgccctcaggtttcgcacaactctccccgctggaacgctggcaaccaggaacgatacaaaagagtctctcgagttggcactcgtcgccgctactctccaggcaaccctttggtcctatagcaccactgtgctggtactgaggctgccagacctggccctgaacgacgggcactggcaccaagtagaggtggtgttgcacctcgctacactcgaattgcgcttgtggcacgagggctgcccagcaagactatgtgtggctagtggacctgtcgccctggcgtcaacagctagcgccacccctctcccagctgggatatcatctgctcagcttggtgacgcgacattcgcaggatgtctgcaagacgtgagagttgatggacacctgttattaccagaagatcttggcgaaaacgtgttgctcgggtgtgagaggcgggagcaatgtaggccgttaccctgtgtccacggcggaagttgcgtcgacctgtggacgcactttcgctgcgattgtgccagacctcatcgcggtcctacatgcgcagatgagatccccgcagccactttcggtcttggtggcgcaccctcaagcgcttcattcctgctgcaagagctacccggtccgaacttgactgtcagtttcctgctgaggacccgcgaatccgcaggcttgcttcttcagttcgctaatgactctgctgctggactgactgtcttccttagtgaagggcgtatacgggcagaggtcccagggtctccagccgtggtgctcccaggcaggtgggacgacgggctgcggcacctcgtgatgctgtcctttggccctgatcagctccaggatttgggacagcatgtgcatgtgggcggtagactcttggccgcagactcccagccgtggggcggaccattccggggttgcctgcaagacctgcggctggacggctgccatctcccattcttccccctcccgctagacaacagcagccagcctagtgagctgggcggtcggcaatcctggaatctgacagccggttgtgtgtctgaggatatgtgcagccctgatccttgctttaatggtggcacatgcctcgtcacttggaatgatttccactgcacttgtcctgctaacttcaccggaccaacctgtgctcagcagttgtggtgccccggtcagccctgtttgcctcccgctacctgcgaagaggtacctgacggattcgtgtgcgttgcagaagccaccttcagagaaggtcccccagctgccttctccggccacaacgcctcaagcggccgtctccttggaggactctccctcgctttccgcacaagggattcggaggcctggctgttgagagctgccgctggggcactggagggcgtatggttggccgtgcggaacggatccctggcgggtggtgtgagaggtgggcacgggctgcccggagcagtcctaccgatcccgggacccagagttgccgacggcgcttggcacagagttcgcctggccatggagagacctgccgctaccacctctagatggttgctgtggctggatggtgcggctacgcccgttgccctgcgcggattggccagtgacttgggctttctgcagggtccaggagccgtacgtatacttttggccgaaaacttcacaggctgtctcggtcgcgtggccctgggtggcttgcctctaccgttggctagaccacgacccggtgccgctcccggtgccagagagcatttcgcaagttggccgggtacgccagctcctatactgggttgtaggggagcccctgtgtgcgctccgtctccatgcctgcacgatggggcttgtcgtgacctctttgatgctttcgcctgtgcctgcggccctgggtgggaaggcccacggtgcgaggcgcacgtcgacccctgtcactccgctccatgtgcgaggggcaggtgccacacccatccagatggacggttcgagtgtcgctgtccccctggttttggcggtcccaggtgtaggtgggatggctgggccggaggctgggccgctaacgccccttggggctatgggggagcggaaaagagcgcgagatcggtggatgagtctctgccatttcccggtccacacgtgctaatctgtgacatgcggaggactgtctag

SEQ ID NO: 250833 - DNA, 3858 bp, Artificial Sequence
  derived and/or modified sequence
atggctctggcccgtccgggtaccccagacccacaagctctcgcatcggtgcttttactgctgctgtgggctcctgccctaagcctgttggccggtacggtgcctagtgagcccccatctgcctgtgccagtgatccatgcgcgccaggtaccgagtgtcaggccactgagtccggcggttacacttgcgggccaatggaacccaggggttgtgcgacccagccttgccaccatggtgccctttgcgtgccacagggacctgacccaactgggtttagatgctactgcgtgccaggcttccagggcccacggtgcgaacttgacattgacgagtgtgcttccagaccatgccatcacggggcaacttgcagaaatctggccgatcggtacgagtgccactgtcccctcggttatgccggagtaacgtgcgaaatggaagtagatgaatgcgcatctgcaccttgcttgcatgggggaagctgtctggacggcgtagggtcttttaggtgcgtgtgcgcaccagggtatggcggaacacgatgccagctggacctcgacgagtgtcagagccagccatgcgctcatggtgggacctgtcacgaccttgtgaatgggttcagatgtgactgcgccggaacaggatacgaaggcacacattgcgagagagaagtgttggagtgcgcctctgctccgtgtgaacacaatgcttcgtgtcttgagggtctgggctctttccggtgcctatgctggcctgggtactctggtgagctttgtgaagtggacgaagatgagtgcgcctcatccccatgccagcacggcggtcggtgtctgcaacgctcggaccccgctctttatggtggtgttcaggccgcttttcctggggcattctcttttagacacgccgctggctttctgtgccactgtcctcccggattcgagggggctgattgcggtgtcgaagtggacgaatgcgcatctcgtccatgcttgaatggcggtcattgccaggacctgccaaatggatttcagtgtcactgtcctgatggttatgcagggcctacatgtgaagaagacgtcgacgaatgcttgagcgacccatgcctgcacggaggaacctgctctgatacggtagcgggatatatttgccgttgccctgaaacgtgggggggacgcgattgctctgtccagttgaccgggtgccagggccacacatgtcccctggcggcaacgtgcatcccaatctttgagtcaggggtgcacagctatgtgtgccactgtcctcctggcacccatggccctttctgtggccagaacacgacattctctgtcatggctgggtcccccatccaagcttctgtgcccgctggcggaccgctcggactcgcgttgaggttcaggaccaccctccctgcgggaactctggcaacgaggaatgatactaaggagtcacttgaactcgcactggtcgcagccacattgcaagcaacgctgtggagctactccactactgtcctggtgctgcggctgcctgatttggcccttaatgatggtcactggcaccaggtcgaagttgtgctccatttagcaaccctcgagctgcgactgtggcacgaagggtgcccagccaggctctgcgtggcttcaggtccagtcgccctcgcaagtacagcaagtgcgacccctcttcccgctgggattagcagcgcccagctgggggacgcaacttttgccggatgccttcaagacgttagggtcgacgggcacctgctcctccctgaagacctgggtgaaaatgtgttgctaggatgcgagcgccgtgaacagtgccggcctctcccctgcgttcacggtggatcttgtgttgatctgtggacccattttcgctgtgactgtgcacgccctcaccggggacccacctgcgccgatgagatccccgcagccacctttggactgggaggtgctccttcttctgccagtttcttgctacaggaacttcccggaccaaatttgactgtgtccttccttctcagaacacgcgaatcagcgggtctgttgctgcaattcgccaacgatagtgctgctggcctcactgtatttctgagcgaagggaggatccgcgctgaagtgccaggctcaccggctgtcgtactgcctgggagatgggatgatggcctgcggcacctggtcatgctgtccttcggaccggaccagctgcaggatctaggccagcatgtgcatgtgggcggtcggctgctggccgctgattcccagccctggggtggcccttttcgcggttgcttacaggacctgagactggatggttgtcacctgcccttcttccccttgccactcgacaactccagtcagccttcagagctggggggacgccagtcttggaacctgaccgctggctgcgtttcagaggacatgtgcagccctgacccttgtttcaatggcggtacatgccttgtgacttggaacgactttcattgcacctgtcccgcaaattttaccgggccaacctgtgcccagcagttgtggtgtcctgggcagccttgtctgcctccagccacctgtgaggaagtcccggatggctttgtgtgtgtagccgaagccactttccgggagggccctcccgctgcattcagcgggcacaatgctagctcaggaaggctgcttggcggtctctctctcgcattcaggacgcgtgatagcgaggcatggttgctcagggccgctgctggagccctcgagggggtctggttagctgtcagaaatggttcactggccggtggcgttagaggtgggcacgggctgcctggagctgtgctgcctatccctggtcccagggtagctgacggcgcatggcatcgggtccggctagctatggaacgaccagcagcaacaacatcaaggtggctcttgtggctggacggagcagcaacccctgtggcacttcggggtttagcctctgatctgggattcctgcaagggcctggcgctgttagaatcctgttagcggagaacttcaccggatgtctgggccgagtggcactagggggtctgcctttgcctctggcacgtcctaggcctggggcagcgcctggcgcaagggagcacttcgctagctggccaggcacccccgcacctatccttgggtgccgaggggcaccggtgtgtgctccatctccttgtctgcacgacggcgcatgccgtgacctgttcgacgcctttgcatgtgcttgcgggccaggctgggagggccctcggtgcgaagcacacgtagatccgtgccactccgcaccatgcgcgagagggaggtgtcacacccaccctgacgggaggttcgagtgtcgatgcccacctggttttggcggaccccgatgtagattacccgtgccatctaaggaatgctctctgaacgtgacttgcctggatgggtcgccgtgcgaaggtggaagccccgcagccaactgttcgtgcctcgagggcctggcgggacaacgatgccaggtgccgacacttccctgcgaagccaacccttgtctgaatggaggaacatgtcgggctgcaggaggggtgtctgagtgcatttgtaatgccaggtttagcgggcagttttgtgaggtcgctaagggtctgccattgcctctgccattccctctactggaagttgccgtgcccgcagcgtgtgcctgtctcttattgctgctgttggggctcttatccgggatcctcgccgcacggaaaaggcgccagtcggagggaacctatagcccttctcagcaggaagtcgctggtgcacgtctggaaatggattccgttttaaaggtgcctcccgaagagcgactcatttag

SEQ ID NO: 250834 - DNA, 3659 bp, Artificial Sequence
  derived and/or modified sequence
agtgctggttggagggacgaggggggtgcggagccagccaggccgccctcccgttctcacagcagccgagcagagcgcagagcgggctgccatggcgctggccaggcctgggaccccggacccccaggccctggcctctgtcctgctactgctgctctgggcccctgccctttccctcctggctgggacggtgccttcagagccccccagtgcctgtgcctcagacccgtgcgctccagggaccgagtgccaggctaccgagagtggtggctatacctgtgggcccatggagccccggggctgtgccacccagccatgccaccacggcgctctgtgtgtgccccagggtccagatcccaccggcttccgctgctactgcgtgccgggtttccagggcccacgctgcgagctggacatcgatgagtgtgcatcccggccgtgccaccatggggccacctgccgcaacctggccgatcgctacgagtgccattgcccccttggctatgcaggcgtgacctgcgagatggaggtggacgagtgcgcctcagcgccctgcctgcacgggggctcgtgcctggacggcgtgggctccttccgctgtgtgtgcgcgccaggctacgggggcacccgttgccagctggacctcgacgagtgccagagccagccgtgcgcacatgggggcacgtgccacgacctggtcaacgggttccggtgcgactgcgcgggcaccggctacgagggcacgcactgcgagcgggaggtgctggagtgcgcatcggcgccctgcgagcacaacgcgtcctgcctcgagggcctcgggagcttccgctgcctctgttggccaggctacagcggcgagctgtgcgaggtggacgaggacgagtgtgcatcgagcccctgccagcatgggggccgatgcctgcagcgctctgacccggccctctacgggggtgtccaggccgccttccctggcgccttcagcttccgccatgctgcgggtttcctgtgccactgccctcctggctttgagggagccgactgcggtgtggaggtggacgagtgtgcctcacggccatgcctcaacggaggccactgccaggacctgcccaatggcttccagtgtcactgcccagatggctacgcagggccgacatgtgaggaagatgtggatgaatgcctgtcggatccctgcctgcacggcggaacctgcagtgacactgtggcaggctatatctgcaggtgcccagagacctggggtgggcgcgactgttctgtgcagctcactggctgccagggccacacctgcccgctggctgccacctgcatccctatcttcgagtctggggtccacagttacgtctgccactgcccacctggtacccatggaccgttctgtggccagaataccaccttctctgtgatggctgggagccccattcaggcatcagtgccagctggtggccccctgggtctggcactgaggtttcgcaccacactgcccgctgggaccttggccactcgcaatgacaccaaggaaagcttggagctggcattggtggcagccacacttcaggccacactctggagctacagcaccactgtgcttgtcctgagactgccggacctggccctaaacgatggccattggcaccaggtggaggttgtgctccatctagcgaccctggagctacggctctggcatgagggctgccctgcccggctctgtgtggcctctggtcctgtggccctggcttccacggcttcggcaactccgctgcctgccgggatctcctctgcccagctgggggacgcgacctttgcaggctgcctccaggacgtgcgtgtggatggccacctcctgctgcctgaggatctcggtgagaacgtcctcctgggctgtgagcgccgagagcagtgccggcctctgccttgtgtccacggagggtcctgtgtggatctgtggactcatttccgttgcgactgtgcccggccccatagaggtcccacgtgcgctgatgagattcctgctgccacctttggcttgggaggcgccccaagctctgcctcctttctgctccaagagctgccaggtcccaacctcacagtgtctttccttctccgcactcgggagtccgctggcctgttgctccagtttgccaatgactccgcagctggcctaacagtattcctgagtgagggtcggatccgggctgaggtgccgggcagtcctgctgtagtgctccctgggcgctgggatgatgggctccgtcacctggtgatgctcagcttcgggcctgaccagctgcaggacctggggcagcacgtgcacgtgggtgggaggctccttgctgccgacagccagccctggggtgggcccttccgaggctgcctccaggacctgcgactcgatggctgccacctccccttctttcctctgccactggataactcaagccagcccagcgagctcggcggcaggcagtcctggaacctcactgcgggctgcgtctccgaggacatgtgcagtcctgacccctgtttcaatggtgggacttgcctcgtcacctggaatgacttccactgtacctgccctgccaatttcacggggcctacgtgtgcccagcagctgtggtgtcccggccagccctgtctcccacctgccacgtgtgaggaggtccctgatggctttgtgtgtgtggcggaggccacgttccgcgagggtccccccgccgcgttcagcgggcacaacgcgtcgtcagggcgcttgctcggcggcctgtcgctggcctttcgcacgcgcgactccgaggcctggctgctgcgtgccgcggcgggcgccctggaaggcgtgtggctggcggtgcgcaatggctcgctggcggggggcgtgcgcggaggccatggcctgcccggcgctgtgctgcccataccggggccgcgcgtggccgatggtgcctggcaccgcgtgcgtctggccatggagcgcccggcggccaccacctcgcgctggctgctgtggctggatggtgccgccaccccggtggcgctgcgcggcctggccagtgacctgggcttcctgcagggcccgggtgctgtgcgcatcctgctggctgagaacttcaccggctgcttgggccgcgtggcgctgggcggcctgcccctgcccttggcgcggccccggcccggcgcggcccctggcgcccgagagcacttcgcgtcttggcctgggacgccggccccgatcctcggctgccgcggcgcgcccgtgtgtgcgccctcgccctgtctgcacgacggtgcctgccgtgacctcttcgacgcctttgcctgcgcctgcggcccggggtgggaaggcccgcgctgcgaagcccacgtcgacccctgtcactccgccccctgcgcccgtggccgctgtcacacgcaccccgacggccgcttcgagtgccgctgcccgcctggcttcgggggcccgcgctgcaggtgggatggctgggcaggggggtgggctgcgaatgccccctggggctatggtggggcagagaagtctgccaggtctgtggatgagtcgcttcccttccctggtcctcatgtccttatctgtgacatgaggaggacagtttaatttgataaatttcctgataaaatacagatcaaaacac

SEQ ID NO: 250835 - DNA, 5550 bp, Artificial Sequence
  derived and/or modified sequence
catggcgctggccaggcctgggaccccggacccccaggccctggcctctgtcctgctactgctgctctgggcccctgccctttccctcctggctgggacggtgccttcagagccccccagtgcctgtgcctcagacccgtgcgctccagggaccgagtgccaggctaccgagagtggtggctatacctgtgggcccatggagccccggggctgtgccacccagccatgccaccacggcgctctgtgtgtgccccagggtccagatcccaccggcttccgctgctactgcgtgccgggtttccagggcccacgctgcgagctggacatcgatgagtgtgcatcccggccgtgccaccatggggccacctgccgcaacctggccgatcgctacgagtgccattgcccccttggctatgcaggcgtgacctgcgagatggaggtggacgagtgcgcctcagcgccctgcctgcacgggggctcgtgcctggacggcgtgggctccttccgctgtgtgtgcgcgccaggctacgggggcacccgttgccagctggacctcgacgagtgccagagccagccgtgcgcacatgggggcacgtgccacgacctggtcaacgggttccggtgcgactgcgcgggcaccggctacgagggcacgcactgcgagcgggaggtgctggagtgcgcatcggcgccctgcgagcacaacgcgtcctgcctcgagggcctcgggagcttccgctgcctctgttggccaggctacagcggcgagctgtgcgaggtggacgaggacgagtgtgcatcgagcccctgccagcatgggggccgatgcctgcagcgctctgacccggccctctacgggggtgtccaggccgccttccctggcgccttcagcttccgccatgctgcgggtttcctgtgccactgccctcctggctttgagggagccgactgcggtgtggaggtggacgagtgtgcctcacggccatgcctcaacggaggccactgccaggacctgcccaatggcttccagtgtcactgcccagatggctacgcagggccgacatgtgaggaagatgtggatgaatgcctgtcggatccctgcctgcacggcggaacctgcagtgacactgtggcaggctatatctgcaggtgcccagagacctggggtgggcgcgactgttctgtgcagctcactggctgccagggccacacctgcccgctggctgccacctgcatccctatcttcgagtctggggtccacagttacgtctgccactgcccacctggtacccatggaccgttctgtggccagaataccaccttctctgtgatggctgggagccccattcaggcatcagtgccagctggtggccccctgggtctggcactgaggtttcgcaccacactgcccgctgggaccttggccactcgcaatgacaccaaggaaagcttggagctggcattggtggcagccacacttcaggccacactctggagctacagcaccactgtgcttgtcctgagactgccggacctggccctaaacgatggccattggcaccaggtggaggttgtgctccatctagcgaccctggagctacggctctggcatgagggctgccctgcccggctctgtgtggcctctggtcctgtggccctggcttccacggcttcggcaactccgctgcctgccgggatctcctctgcccagctgggggacgcgacctttgcaggctgcctccaggacgtgcgtgtggatggccacctcctgctgcctgaggatctcggtgagaacgtcctcctgggctgtgagcgccgagagcagtgccggcctctgccttgtgtccacggagggtcctgtgtggatctgtggactcatttccgttgcgactgtgcccggccccatagaggtcccacgtgcgctgatgagattcctgctgccacctttggcttgggaggcgccccaagctctgcctcctttctgctccaagagctgccaggtcccaacctcacagtgtctttccttctccgcactcgggagtccgctggcctgttgctccagtttgccaatgactccgcagctggcctaacagtattcctgagtgagggtcggatccgggctgaggtgccgggcagtcctgctgtagtgctccctgggcgctgggatgatgggctccgtcacctggtgatgctcagcttcgggcctgaccagctgcaggacctggggcagcacgtgcacgtgggtgggaggctccttgctgccgacagccagccctggggtgggcccttccgaggctgcctccaggacctgcgactcgatggctgccacctccccttctttcctctgccactggataactcaagccagcccagcgagctcggcggcaggcagtcctggaacctcactgcgggctgcgtctccgaggacatgtgcagtcctgacccctgtttcaatggtgggacttgcctcgtcacctggaatgacttccactgtacctgccctgccaatttcacggggcctacgtgtgcccagcagctgtggtgtcccggccagccctgtctcccacctgccacgtgtgaggaggtccctgatggctttgtgtgtgtggcggaggccacgttccgcgagggtccccccgccgcgttcagcgggcacaacgcgtcgtcagggcgcttgctcggcggcctgtcgctggcctttcgcacgcgcgactccgaggcctggctgctgcgtgccgcggcgggcgccctggaaggcgtgtggctggcggtgcgcaatggctcgctggcggggggcgtgcgcggaggccatggcctgcccggcgctgtgctgcccataccggggccgcgcgtggccgatggtgcctggcaccgcgtgcgtctggccatggagcgcccggcggccaccacctcgcgctggctgctgtggctggatggtgccgccaccccggtggcgctgcgcggcctggccagtgacctgggcttcctgcagggcccgggtgctgtgcgcatcctgctggctgagaacttcaccggctgcttgggccgcgtggcgctgggcggcctgcccctgcccttggcgcggccccggcccggcgcggcccctggcgcccgagagcacttcgcgtcttggcctgggacgccggccccgatcctcggctgccgcggcgcgcccgtgtgtgcgccctcgccctgtctgcacgacggtgcctgccgtgacctcttcgacgcctttgcctgcgcctgcggcccggggtgggaaggcccgcgctgcgaagcccacgtcgacccctgtcactccgccccctgcgcccgtggccgctgtcacacgcaccccgacggccgcttcgagtgccgctgcccgcctggcttcgggggcccgcgctgcaggttgcctgtcccatccaaggagtgcagcctgaatgtcacctgcctcgatggcagcccatgtgagggtggctctcccgctgccaactgcagctgcctggagggtcttgctggccagaggtgtcaggtccccactctcccctgtgaagccaacccctgcttgaatgggggcacctgccgggcagctggaggggtgtctgaatgtatctgcaatgccagattctccggccagttctgtgaagtggcgaagggcctgcccctgccgctgccattcccactgctggaggtggccgtacctgcagcctgtgcctgcctcctcctcctcctcctgggcctcctttcagggatcctggcagcccgaaagcgccgccagtctgagggcacctacagcccaagccagcaggaggtggctggggcccggctggagatggacagtgtcctcaaggtgccaccggaggagagactcatctaggccagcctggctgctggcaccagcacctggaggtcctgaatggtttctacctggagacccaaggaagctgcttccagggctcgggacattgctacggaagtgtccccttggctggcagcctctgcctctgcctctgccccatcctggatggaggacgaggggagcaactcagggaaacagaggcctagagaggctgcggacttctccatcccaccctcggggttccgccttggcaggtgtacggctgtgcgtgggagggcacacgtgggttcacagtgtgttcaggagtgtgtgtatctggaggagtgtgtgtgtgagtgtgtacctgggcctgtgttagtctgcagatgctagtgtgagtgtgtcctgacatggctccagggcgtgtctgccgtgtttactgtgtgtctatgactgtgatgggtgtagctgatcccaggaggtggcggctgcgccatggggtcaaccattacagtcctagggcaggggcggcccaaggctgcatgttctccaggaggccaggccggggttgcccaggcacctccttccccgcctctgggggctgctcctgctgtggaggcagctgggaagtcagggaaggccactagcagaggctgagtgggcttctggctcctagaacaaatgtcccttcaggcaggtctgtctgccagaagccagagccagtcatgcgagggaaccacagacccacccgccccctcagccggagcagcccgagggagcagaggaggggctgcctggagcttcccaccctgctgtggtcatttgtcaaagggggaaggcacccactgcctacctcacagggctgttgtgaggatcagagaggacgacagtggggaaagaatctggaagtcttcaactgccgtctgatgggaaggaccgtctgggtgtccttctgggatgaggatgacagagcaacccttctcctgccctgaacccccccagctcacctgaccacctctggttctccagctccggtccttcctagcagcctggtgagctcactccttcccctgatgactggctgcctctacacagactcggcgagaggacttgaaggaagccctctgggttgtctgctgagtacaggggctcagtgaacactggcgctgcctctgagtcggggctgggcctgcagaggccgactcagaggagactctgctgcttgctcccagccccttccccggcgatgcccatcacactgtgacctcccatccctgaagggcacctgcctgagggcctggcctccttccagcttcatggacctggagatgtgccctttcatccttcctgcttcccaggccagtagatccgtttacacttttgggtcgacagtcagcttttccttttggttttggcgggtcccagaggcatgggtgtccagtccaatgtggggagccacgtgacaacgtgggggactgggacatgggactgggaagtcagcagacgctgggatagagagggccctgaacaccaggctcaggggcttgcttggtccttatcctgtaggaggtgggaccacctttccctgaactttctctacaacccttgggagcgtggggaggaggcggctggttccagggtcagtttactaagttagagatttggaaaacctgtgtcagctgtaactcctaggatattttatgtggaacctaacatgcagatgaaagctg

SEQ ID NO: 250836 - DNA, 3531 bp, Artificial Sequence
  derived and/or modified sequence
atggccctggccagacccggcacccccgacccccaggccctggccagcgtgctgctgctgctgctgtgggcccccgccctgagcctgctggccggcaccgtgcccagcgagccccccagcgcctgcgccagcgacccctgcgcccccggcaccgagtgccaggccaccgagagcggcggctacacctgcggccccatggagcccagaggctgcgccacccagccctgccaccacggcgccctgtgcgtgccccagggccccgaccccaccggcttcagatgctactgcgtgcccggcttccagggccccagatgcgagctggacatcgacgagtgcgccagcagaccctgccaccacggcgccacctgcagaaacctggccgacagatacgagtgccactgccccctgggctacgccggcgtgacctgcgagatggaggtggacgagtgcgccagcgccccctgcctgcacggcggcagctgcctggacggcgtgggcagcttcagatgcgtgtgcgcccccggctacggcggcaccagatgccagctggacctggacgagtgccagagccagccctgcgcccacggcggcacctgccacgacctggtgaacggcttcagatgcgactgcgccggcaccggctacgagggcacccactgcgagagagaggtgctggagtgcgccagcgccccctgcgagcacaacgccagctgcctggagggcctgggcagcttcagatgcctgtgctggcccggctacagcggcgagctgtgcgaggtggacgaggacgagtgcgccagcagcccctgccagcacggcggcagatgcctgcagagaagcgaccccgccctgtacggcggcgtgcaggccgccttccccggcgccttcagcttcagacacgccgccggcttcctgtgccactgcccccccggcttcgagggcgccgactgcggcgtggaggtggacgagtgcgccagcagaccctgcctgaacggcggccactgccaggacctgcccaacggcttccagtgccactgccccgacggctacgccggccccacctgcgaggaggacgtggacgagtgcctgagcgacccctgcctgcacggcggcacctgcagcgacaccgtggccggctacatctgcagatgccccgagacctggggcggcagagactgcagcgtgcagctgaccggctgccagggccacacctgccccctggccgccacctgcatccccatcttcgagagcggcgtgcacagctacgtgtgccactgcccccccggcacccacggccccttctgcggccagaacaccaccttcagcgtgatggccggcagccccatccaggccagcgtgcccgccggcggccccctgggcctggccctgagattcagaaccaccctgcccgccggcaccctggccaccagaaacgacaccaaggagagcctggagctggccctggtggccgccaccctgcaggccaccctgtggagctacagcaccaccgtgctggtgctgagactgcccgacctggccctgaacgacggccactggcaccaggtggaggtggtgctgcacctggccaccctggagctgagactgtggcacgagggctgccccgccagactgtgcgtggccagcggccccgtggccctggccagcaccgccagcgccacccccctgcccgccggcatcagcagcgcccagctgggcgacgccaccttcgccggctgcctgcaggacgtgagagtggacggccacctgctgctgcccgaggacctgggcgagaacgtgctgctgggctgcgagagaagagagcagtgcagacccctgccctgcgtgcacggcggcagctgcgtggacctgtggacccacttcagatgcgactgcgccagaccccacagaggccccacctgcgccgacgagatccccgccgccaccttcggcctgggcggcgcccccagcagcgccagcttcctgctgcaggagctgcccggccccaacctgaccgtgagcttcctgctgagaaccagagagagcgccggcctgctgctgcagttcgccaacgacagcgccgccggcctgaccgtgttcctgagcgagggcagaatcagagccgaggtgcccggcagccccgccgtggtgctgcccggcagatgggacgacggcctgagacacctggtgatgctgagcttcggccccgaccagctgcaggacctgggccagcacgtgcacgtgggcggcagactgctggccgccgacagccagccctggggcggccccttcagaggctgcctgcaggacctgagactggacggctgccacctgcccttcttccccctgcccctggacaacagcagccagcccagcgagctgggcggcagacagagctggaacctgaccgccggctgcgtgagcgaggacatgtgcagccccgacccctgcttcaacggcggcacctgcctggtgacctggaacgacttccactgcacctgccccgccaacttcaccggccccacctgcgcccagcagctgtggtgccccggccagccctgcctgccccccgccacctgcgaggaggtgcccgacggcttcgtgtgcgtggccgaggccaccttcagagagggcccccccgccgccttcagcggccacaacgccagcagcggcagactgctgggcggcctgagcctggccttcagaaccagagacagcgaggcctggctgctgagagccgccgccggcgccctggagggcgtgtggctggccgtgagaaacggcagcctggccggcggcgtgagaggcggccacggcctgcccggcgccgtgctgcccatccccggccccagagtggccgacggcgcctggcacagagtgagactggccatggagagacccgccgccaccaccagcagatggctgctgtggctggacggcgccgccacccccgtggccctgagaggcctggccagcgacctgggcttcctgcagggccccggcgccgtgagaatcctgctggccgagaacttcaccggctgcctgggcagagtggccctgggcggcctgcccctgcccctggccagacccagacccggcgccgcccccggcgccagagagcacttcgccagctggcccggcacccccgcccccatcctgggctgcagaggcgcccccgtgtgcgcccccagcccctgcctgcacgacggcgcctgcagagacctgttcgacgccttcgcctgcgcctgcggccccggctgggagggccccagatgcgaggcccacgtggacccctgccacagcgccccctgcgccagaggcagatgccacacccaccccgacggcagattcgagtgcagatgcccccccggcttcggcggccccagatgcagatgggacggctgggccggcggctgggccgccaacgccccctggggctacggcggcgccgagaagagcgccagaagcgtggacgagagcctgcccttccccggcccccacgtgctgatctgcgacatgagaagaaccgtgtag

SEQ ID NO: 250837 - DNA, 3858 bp, Artificial Sequence
  derived and/or modified sequence
atggccctggccagacccggcacccccgacccccaggccctggccagcgtgctgctgctgctgctgtgggcccccgccctgagcctgctggccggcaccgtgcccagcgagccccccagcgcctgcgccagcgacccctgcgcccccggcaccgagtgccaggccaccgagagcggcggctacacctgcggccccatggagcccagaggctgcgccacccagccctgccaccacggcgccctgtgcgtgccccagggccccgaccccaccggcttcagatgctactgcgtgcccggcttccagggccccagatgcgagctggacatcgacgagtgcgccagcagaccctgccaccacggcgccacctgcagaaacctggccgacagatacgagtgccactgccccctgggctacgccggcgtgacctgcgagatggaggtggacgagtgcgccagcgccccctgcctgcacggcggcagctgcctggacggcgtgggcagcttcagatgcgtgtgcgcccccggctacggcggcaccagatgccagctggacctggacgagtgccagagccagccctgcgcccacggcggcacctgccacgacctggtgaacggcttcagatgcgactgcgccggcaccggctacgagggcacccactgcgagagagaggtgctggagtgcgccagcgccccctgcgagcacaacgccagctgcctggagggcctgggcagcttcagatgcctgtgctggcccggctacagcggcgagctgtgcgaggtggacgaggacgagtgcgccagcagcccctgccagcacggcggcagatgcctgcagagaagcgaccccgccctgtacggcggcgtgcaggccgccttccccggcgccttcagcttcagacacgccgccggcttcctgtgccactgcccccccggcttcgagggcgccgactgcggcgtggaggtggacgagtgcgccagcagaccctgcctgaacggcggccactgccaggacctgcccaacggcttccagtgccactgccccgacggctacgccggccccacctgcgaggaggacgtggacgagtgcctgagcgacccctgcctgcacggcggcacctgcagcgacaccgtggccggctacatctgcagatgccccgagacctggggcggcagagactgcagcgtgcagctgaccggctgccagggccacacctgccccctggccgccacctgcatccccatcttcgagagcggcgtgcacagctacgtgtgccactgcccccccggcacccacggccccttctgcggccagaacaccaccttcagcgtgatggccggcagccccatccaggccagcgtgcccgccggcggccccctgggcctggccctgagattcagaaccaccctgcccgccggcaccctggccaccagaaacgacaccaaggagagcctggagctggccctggtggccgccaccctgcaggccaccctgtggagctacagcaccaccgtgctggtgctgagactgcccgacctggccctgaacgacggccactggcaccaggtggaggtggtgctgcacctggccaccctggagctgagactgtggcacgagggctgccccgccagactgtgcgtggccagcggccccgtggccctggccagcaccgccagcgccacccccctgcccgccggcatcagcagcgcccagctgggcgacgccaccttcgccggctgcctgcaggacgtgagagtggacggccacctgctgctgcccgaggacctgggcgagaacgtgctgctgggctgcgagagaagagagcagtgcagacccctgccctgcgtgcacggcggcagctgcgtggacctgtggacccacttcagatgcgactgcgccagaccccacagaggccccacctgcgccgacgagatccccgccgccaccttcggcctgggcggcgcccccagcagcgccagcttcctgctgcaggagctgcccggccccaacctgaccgtgagcttcctgctgagaaccagagagagcgccggcctgctgctgcagttcgccaacgacagcgccgccggcctgaccgtgttcctgagcgagggcagaatcagagccgaggtgcccggcagccccgccgtggtgctgcccggcagatgggacgacggcctgagacacctggtgatgctgagcttcggccccgaccagctgcaggacctgggccagcacgtgcacgtgggcggcagactgctggccgccgacagccagccctggggcggccccttcagaggctgcctgcaggacctgagactggacggctgccacctgcccttcttccccctgcccctggacaacagcagccagcccagcgagctgggcggcagacagagctggaacctgaccgccggctgcgtgagcgaggacatgtgcagccccgacccctgcttcaacggcggcacctgcctggtgacctggaacgacttccactgcacctgccccgccaacttcaccggccccacctgcgcccagcagctgtggtgccccggccagccctgcctgccccccgccacctgcgaggaggtgcccgacggcttcgtgtgcgtggccgaggccaccttcagagagggcccccccgccgccttcagcggccacaacgccagcagcggcagactgctgggcggcctgagcctggccttcagaaccagagacagcgaggcctggctgctgagagccgccgccggcgccctggagggcgtgtggctggccgtgagaaacggcagcctggccggcggcgtgagaggcggccacggcctgcccggcgccgtgctgcccatccccggccccagagtggccgacggcgcctggcacagagtgagactggccatggagagacccgccgccaccaccagcagatggctgctgtggctggacggcgccgccacccccgtggccctgagaggcctggccagcgacctgggcttcctgcagggccccggcgccgtgagaatcctgctggccgagaacttcaccggctgcctgggcagagtggccctgggcggcctgcccctgcccctggccagacccagacccggcgccgcccccggcgccagagagcacttcgccagctggcccggcacccccgcccccatcctgggctgcagaggcgcccccgtgtgcgcccccagcccctgcctgcacgacggcgcctgcagagacctgttcgacgccttcgcctgcgcctgcggccccggctgggagggccccagatgcgaggcccacgtggacccctgccacagcgccccctgcgccagaggcagatgccacacccaccccgacggcagattcgagtgcagatgcccccccggcttcggcggccccagatgcagactgcccgtgcccagcaaggagtgcagcctgaacgtgacctgcctggacggcagcccctgcgagggcggcagccccgccgccaactgcagctgcctggagggcctggccggccagagatgccaggtgcccaccctgccctgcgaggccaacccctgcctgaacggcggcacctgcagagccgccggcggcgtgagcgagtgcatctgcaacgccagattcagcggccagttctgcgaggtggccaagggcctgcccctgcccctgcccttccccctgctggaggtggccgtgcccgccgcctgcgcctgcctgctgctgctgctgctgggcctgctgagcggcatcctggccgccagaaagagaagacagagcgagggcacctacagccccagccagcaggaggtggccggcgccagactggagatggacagcgtgctgaaggtgccccccgaggagagactgatctag

SEQ ID NO: 250838 - protein, 629 aa, Artificial Sequence
  derived and/or modified sequence
MVRGARQPQQPRSRLAPRLTGTVEKPPRKRRSSIRGSGDSSHSQSQGERYQHFTEKTEFALKEIMSSGGAEDDIPQGERKTVTDFCYLLDKSKQLFNGLRDLPQYGQKQWQSYFGRTFDVYTKLWKFQQQHRQVLDNRYGLKRWQIGEIASKIGQLYYHYYLRTSETSYLNEAFSFYSAIRQRSYYSQVNKEDRPELVVKKLRYYARFIVVCLLLNKMDVVKDLVKELSDEIEDYTHRFNTEDQVEWNLVLQEVAAFIEADPVMVLNDDNTIVITSNRLAETGAPLLEQGMIVGQLSLADALIIGNCNNQVKFSELTVDMFRMLQALEREPMNLASQMNKPGMQESADKPTRRENPHKYLLYKPTFSQLYTFLAASFKELPANSVLLIYLSATGVFPTGRSDSEGPYDFGGVLTNSNRDIINGDAIHKRNQSHKEMHCLHPGDLYPFTRKPLFIIVDSSNSVAYKNFTNLFGQPLVCLLSPTAYPKALQDQSQRGSLFTLFLNNPLMAFLFVSGLSSMRRGLWEKCQEYLRKINRDIAQLLTHSRSIDQAFLQFFGDEFLRLLLTRFIFCSATMRMHKIFRETRNYPESYPQLPRDETVENPHLQKHILELASILDVRNVFFENTIDDY

SEQ ID NO: 250839 - DNA, 1890 bp, Artificial Sequence
  derived and/or modified sequence
atggtgagaggcgccagacagccccagcagcccagaagcagactggcccccagactgaccggcaccgtggagaagccccccagaaagagaagaagcagcatcagaggcagcggcgacagcagccacagccagagccagggcgagagataccagcacttcaccgagaagaccgagttcgccctgaaggagatcatgagcagcggcggcgccgaggacgacatcccccagggcgagagaaagaccgtgaccgacttctgctacctgctggacaagagcaagcagctgttcaacggcctgagagacctgccccagtacggccagaagcagtggcagagctacttcggcagaaccttcgacgtgtacaccaagctgtggaagttccagcagcagcacagacaggtgctggacaacagatacggcctgaagagatggcagatcggcgagatcgccagcaagatcggccagctgtactaccactactacctgagaaccagcgagaccagctacctgaacgaggccttcagcttctacagcgccatcagacagagaagctactacagccaggtgaacaaggaggacagacccgagctggtggtgaagaagctgagatactacgccagattcatcgtggtgtgcctgctgctgaacaagatggacgtggtgaaggacctggtgaaggagctgagcgacgagatcgaggactacacccacagattcaacaccgaggaccaggtggagtggaacctggtgctgcaggaggtggccgccttcatcgaggccgaccccgtgatggtgctgaacgacgacaacaccatcgtgatcaccagcaacagactggccgagaccggcgcccccctgctggagcagggcatgatcgtgggccagctgagcctggccgacgccctgatcatcggcaactgcaacaaccaggtgaagttcagcgagctgaccgtggacatgttcagaatgctgcaggccctggagagagagcccatgaacctggccagccagatgaacaagcccggcatgcaggagagcgccgacaagcccaccagaagagagaacccccacaagtacctgctgtacaagcccaccttcagccagctgtacaccttcctggccgccagcttcaaggagctgcccgccaacagcgtgctgctgatctacctgagcgccaccggcgtgttccccaccggcagaagcgacagcgagggcccctacgacttcggcggcgtgctgaccaacagcaacagagacatcatcaacggcgacgccatccacaagagaaaccagagccacaaggagatgcactgcctgcaccccggcgacctgtaccccttcaccagaaagcccctgttcatcatcgtggacagcagcaacagcgtggcctacaagaacttcaccaacctgttcggccagcccctggtgtgcctgctgagccccaccgcctaccccaaggccctgcaggaccagagccagagaggcagcctgttcaccctgttcctgaacaaccccctgatggccttcctgttcgtgagcggcctgagcagcatgagaagaggcctgtgggagaagtgccaggagtacctgagaaagatcaacagagacatcgcccagctgctgacccacagcagaagcatcgaccaggccttcctgcagttcttcggcgacgagttcctgagactgctgctgaccagattcatcttctgcagcgccaccatgagaatgcacaagatcttcagagagaccagaaactaccccgagagctacccccagctgcccagagacgagaccgtggagaacccccacctgcagaagcacatcctggagctggccagcatcctggacgtgagaaacgtgttcttcgagaacaccatcgacgactactag

SEQ ID NO: 250840 - DNA, 1890 bp, Artificial Sequence
  derived and/or modified sequence
atggtacgaggagcacgacaacctcaacaacccagatcacggttggctccccggcttaccggcactgtagaaaagccacctcggaaaaggcggagttcaattcgggggtctggggacagtagtcacagccagtcacagggagaacgataccagcactttaccgaaaagacagaatttgcgcttaaggaaatcatgtcctcaggaggggccgaagacgatatcccacagggagagcggaagaccgtgacagacttttgctatctactggataaatctaagcagttgtttaatggccttcgcgacctgccacagtatggacaaaagcagtggcagagctactttggacggactttcgatgtatatactaagctatggaaattccagcagcaacataggcaggtcttggataaccgctacggcctcaagcggtggcagatcggggagatcgcctccaaaatcggacagttatattaccattactacctccgcacttcagagactagctacctcaacgaggcttttagcttctactctgctattcgtcagaggtcctactactcccaagttaataaggaggaccgacccgaactcgtcgtgaagaaactgagatactatgctcgcttcattgttgtttgcctgttgcttaacaagatggacgtggtaaaagacctggttaaggaactgtctgatgagattgaagactatacacatcgtttcaacacagaggatcaggtagagtggaatctcgttctgcaagaggtggctgcgtttattgaggccgaccccgtgatggttctgaacgacgataatactattgtcatcactagcaaccggctagccgaaactggagccccattgctggagcagggtatgatagtgggccagcttagcctggctgacgccttgataattggaaactgtaataatcaggtcaagtttagcgagctcacagtggacatgttcaggatgttacaagccctcgagcgagaacccatgaacctcgcaagccagatgaacaagccaggtatgcaggaatctgcagacaagcccactaggagggaaaacccacacaagtacctgctgtataaaccaactttcagccagctgtatacctttttggctgcgtccttcaaggaactgcccgccaactccgtgctgctcatttacctgtcagccaccggagtatttccaacaggtcgatctgactctgaggggccttacgattttgggggagtcctaacgaactctaacagggacattatcaacggcgatgccatccacaaacgcaaccagtcccataaggaaatgcactgtctccatcctggggacctatatccctttactagaaaaccattgttcattatcgtagattcctctaatagcgtggcgtataagaacttcactaacctattcggccagcctttggtttgtctactcagtccgacagcctaccctaaagccctgcaggaccagagtcagagaggcagtcttttcacactctttctgaacaaccctctgatggccttcctcttcgtgtccggcttatccagcatgcgtcgaggcttgtgggagaaatgccaagagtacctgcgtaaaattaatcgggatatcgcccagttactcactcactctcgtagtatcgatcaagccttcctgcagtttttcggagacgagtttttgcgcctcttactgacaagatttatcttttgctcggctaccatgaggatgcacaaaatcttccgggagacaagaaattatcccgagtcttacccccagctgcctcgggacgagactgtggagaaccctcacttgcagaaacacatcttggagctcgcttcgatccttgacgtccgcaacgtgttcttcgaaaacaccattgatgactattag

SEQ ID NO: 250841 - DNA, 1890 bp, Artificial Sequence
  derived and/or modified sequence
atggtgcggggggcccggcagccccagcagcccaggagccggctggccccccggctgaccggcaccgtggagaagccacccaggaagaggaggagcagcatccggggcagcggggacagcagccacagccagagccagggcgagcgctaccagcacttcacagagaagacagaatttgccctgaaggagatcatgagcagtggaggagcagaagatgacatcccccagggcgagaggaagacagtgacagacttctgctacctgctggacaagagcaagcagctgttcaacggcctgcgggacctgccccagtatggccagaagcagtggcagagctacttcggccgcacctttgatgtgtacaccaagctgtggaagttccagcagcagcaccggcaggtgctggacaacagatatggcctgaagcgctggcagatcggggagatcgccagcaagattggccagctgtactaccactactacctgcggaccagcgagaccagctacctgaatgaggccttctccttctacagcgccatccggcagaggagctactacagccaggtgaacaaggaggacaggcctgagctggtggtgaagaagctgcgctactatgcccgcttcatcgtggtgtgcctgctgctgaacaagatggatgtggtgaaggacctggtgaaggagctgagtgatgaaattgaggactacacccaccgcttcaacacagaggaccaggtggagtggaacctggtgctgcaggaggtggccgccttcatcgaggccgaccctgtgatggtgctgaatgatgacaacaccatcgtcatcaccagcaaccggctggccgagaccggggcccccctgctggagcagggcatgattgtgggccagctgagcctggctgatgccctgatcatcggcaactgcaacaaccaggtgaagttcagcgagctgactgtggacatgttcaggatgctgcaggccctggagcgggagcccatgaacctggccagccagatgaacaagccaggcatgcaggagagcgctgacaagcccacccggcgggagaacccccacaagtacctgctgtacaagcccaccttcagccagctgtacaccttcctggccgccagcttcaaggagctgcctgccaacagcgtgctgctgatctacctgagcgccactggagtcttccccaccggccgcagtgacagcgagggcccctatgactttggaggagtgctgaccaacagcaacagagacatcatcaatggagatgccatccacaagaggaaccagagccacaaggagatgcactgcctgcaccctggggacctgtaccccttcaccaggaagcccctcttcatcatcgtggacagcagcaacagcgtggcctacaagaacttcaccaacctgtttggccagcccctggtgtgcctgctgagccccacagcctaccccaaggccctgcaggaccagagccagaggggcagcctcttcaccctcttcctgaacaaccccctgatggccttcctgtttgtgtctggcctgagctccatgagaagaggcctgtgggagaagtgccaggagtacctgaggaagatcaacagagacatcgcccagctgctgacccacagccgcagcattgaccaggccttcctgcagttctttggagatgagttcctgcggctgctgctgacccgcttcatcttctgcagcgccaccatgaggatgcacaagatcttccgggagaccaggaactacccagagagctacccccagctgcccagagatgagaccgtggagaacccccacctgcagaagcacatcctggagctggccagcatcctggatgtgagaaatgtgttctttgagaacaccattgatgactactag

SEQ ID NO: 250842 - DNA, 1890 bp, Artificial Sequence
  derived and/or modified sequence
atggtgcggggcgcccggcagccccagcagccccggagccggctggcaccgaggcttacgggaaccgttgagaaacctccccggaaaaggcgcagttctatcagggggagcggggacagctcccactctcaatctcaaggagaaagatatcaacactttacggaaaagacggagtttgcattgaaggagatcatgtcttctggaggggctgaagacgatataccacagggggagaggaagacggtgacagatttttgttatctgctggacaaatcaaagcagttatttaacggcctgcgagatttacctcaatatgggcagaaacagtggcaaagttatttcggtagaaccttcgatgtgtacaccaagttgtggaaattccagcagcagcatagacaggttcttgataaccggtatgggctgaaaagatggcagatcggagaaatagcctctaagattggacagctatattatcactattatctgaggacaagcgagactagttacctgaacgaagcatttagcttttatagcgctattagacaaagatcctactactctcaagtgaataaggaggaccgaccagagctggttgtaaagaagctgcgctactacgcgcgctttattgtggtgtgcctgttgctgaacaagatggatgttgtgaaagacctcgtgaaagaacttagtgatgagatcgaagactacacgcacagattcaataccgaagatcaggtggagtggaatcttgttttacaggaggtcgcagctttcattgaagctgatcctgtgatggttctgaatgatgataacacaattgtgataaccagcaaccgtctggccgagacaggcgcacccctactggagcagggtatgatcgtaggccagctgtcgctggccgatgccctaataatcggcaattgtaacaaccaggtgaaattcagtgagttaacagtggacatgttcaggatgctccaggctctggagcgcgaacctatgaacttagccagccagatgaataagcctggcatgcaagagagcgccgacaaacctacccgaagggaaaaccctcacaaatacttgctgtataagccaaccttttctcagctgtataccttcctcgccgcctcttttaaggaactacccgccaatagtgtgctgctcatttacctgagtgcaaccggggtgttccccaccggtcgatccgactctgagggaccttatgactttgggggggtcctcaccaactccaacagagacatcattaacggagacgctattcataaaaggaaccagagccataaagagatgcattgcctgcaccccggcgacctgtatccctttacccggaaaccccttttcattattgtggacagcagcaattcagtggcatacaaaaactttaccaatctatttggccagcctttagtgtgtcttctttctcctactgcttatccaaaggctctgcaggatcagtcacagcggggcagtctgttcacacttttcctcaataatcctctgatggctttcctcttcgtctcagggttgtcatctatgcggcgcggattatgggaaaaatgtcaagaatatttacgcaagattaatagagatattgctcagcttttaacacattcgcgcagcattgatcaggcattcctacagttctttggcgatgagttcctgaggctactcttgaccaggtttattttttgctcggcaacaatgaggatgcacaagatctttagggagactaggaattaccctgagtcttacccccagcttcccagggacgagaccgtggaaaaccctcatctacagaagcatattctcgaactggcaagcatattggacgtgcgcaatgtgttcttcgagaatactatcgatgattattag

SEQ ID NO: 250843 - DNA, 1890 bp, Artificial Sequence
  derived and/or modified sequence
atggtacgtggcgctcggcagccacaacaacccagaagccggctggcccctcgcctgacagggactgttgagaaacctccacgaaagcgcagatctagcatcagagggagtggagactcaagccatagccaaagtcaaggagagagatatcagcactttacggaaaagacagagttcgcgctgaaagagattatgtcctctgggggtgccgaagatgacatccctcagggtgagcgaaaaacagtgaccgatttttgctacctactagataagtcgaagcaactgttcaatggtctgcgagacctcccccagtatggccaaaagcagtggcagtcatactttgggaggacctttgacgtgtacactaaactgtggaaattccaacaacaacataggcaggttctcgacaatcgctatgggctcaagcgatggcagatcggcgagattgcgtcaaagattggccaattgtattatcactattatcttcggacttctgagacgtcttacctgaatgaagcatttagtttctactcagccatcaggcagaggagctattactcccaggtgaacaaggaggaccgtcctgagctggttgtgaaaaaattgaggtattacgctagattcatcgtagtgtgcttgctgcttaacaaaatggacgtggtgaaggatctggtgaaggagctcagtgatgagatcgaagactatacacatcgctttaacacggaagatcaggtggagtggaatctggtgctccaggaagtcgcagctttcatagaagctgatccggttatggtactgaacgacgacaatacaattgtcataaccagcaaccgactggctgagacaggggcaccactgctggagcagggcatgatcgtggggcagctaagccttgctgacgccctaataattgggaattgcaataatcaagtcaaattctccgagcttacagtggacatgtttaggatgctgcaggcactggagcgagagcccatgaatctcgccagccagatgaataagcctggcatgcaggaatcagcagataagcctacgaggagagagaatcctcacaaatatctgctttataaaccaacttttagtcaattatacacctttttggcagcaagctttaaggagctgcccgcaaacagcgtactccttatttatctgagtgcaactggggtcttccctacggggcgttctgattccgagggaccctacgatttcggaggcgttctgaccaacagtaatagggacataatcaacggggatgctatacataagcgcaatcagtctcacaaagagatgcactgtctgcaccccggtgatttgtaccccttcaccaggaagccacttttcatcatcgtcgactctagtaacagcgtcgcttataaaaattttacaaacctcttcgggcagcctctggtctgcctcctcagcccaactgcatacccaaaggcactgcaggaccaatcccagagaggatcactgtttacactcttcctgaacaacccgttgatggcctttcttttcgtatcaggcctctcctccatgcgaagggggctgtgggaaaagtgtcaggagtatctacggaagatcaacagggacatagcgcagctcctcactcacagtaggtctattgaccaggcttttctgcagtttttcggggatgagtttctcagacttctactaacgcgcttcatattctgctcggctaccatgagaatgcacaagatttttagggagaccagaaactacccagagtcctacccacagctccctcgcgacgagaccgtggagaatcctcacctgcagaagcatatcttggaacttgcctccatccttgacgttagaaacgtgttcttcgaaaacactatagacgactattag

SEQ ID NO: 250844 - DNA, 1968 bp, Artificial Sequence
  derived and/or modified sequence
agcttcccgagcgagccctgcggccgccggagcagctcccgcggcggagcaggagccggatggtcagaggagcccggcagccccagcagccgcggagtcgcctggcccccagactgactggcacagtggagaaaccgcctcgaaaacggagaagcagtatcagaggttctggtgatagcagtcattcacaatctcaaggggaaagatatcaacatttcactgaaaagactgaatttgctcttaaagaaatcatgtcctctggaggtgctgaagatgatatcccacagggagagaggaaaacagttacagatttttgttatcttctggataaatctaagcaactgttcaatgggttaagagatttgccacaatatggacagaagcagtggcagtcctattttggaagaacttttgatgtttacaccaaactctggaagttccagcagcagcatcgacaagtcttggataatcggtatggcttgaagcgctggcaaataggagaaattgcttccaagattgggcagctatactatcattattacttacgcacatcggaaaccagctatctgaatgaggctttttccttctattctgcaatcagacagagatcatattattctcaagtcaataaagaggacagacctgaattggtagttaagaagttacgatattatgcaagatttatagtagtttgtcttcttctcaacaaaatggatgttgtaaaggatctggtaaaggaattgtcagatgaaattgaagattatactcaccgatttaatactgaagatcaagtggaatggaacttggtgcttcaagaagtagcagctttcattgaggcggatcctgtaatggtattaaatgatgataataccattgttatcacatcgaatcgccttgctgaaacaggagccccattgctggaacagggcatgattgtgggacagttgtctctggctgacgcactcattattggtaattgtaataatcaggttaagttcagtgaactaactgttgacatgttccggatgttacaagctctggaaagggagccaatgaatttagcttcccagatgaataaaccaggaatgcaggaatcagctgacaagcctactagacgagaaaacccccacaagtatctgctctacaaaccaaccttcagccagctatataccttcttagcagcgtcttttaaggagctgcctgccaatagcgtgcttctgatttacctgtcggccactggcgttttccccacaggtcgttctgatagtgaaggtccttatgattttggaggtgtacttactaatagtaaccgggatattattaatggagatgccatccacaaacgaaatcagtcccacaaggaaatgcactgccttcatcccggggatctctatcctttcaccaggaagccactgttcatcattgtggattcgtctaatagtgttgcgtataagaatttcacaaacttgtttggacagccactagtctgcttgctttctcctacagcatatccaaaagctttacaagatcaatctcagcgaggtagcctcttcactctctttttgaacaatcctctaatggccttcctatttgtctctggattgtcaagcatgcgcagaggcctatgggaaaagtgtcaagaatatcttcgaaaaatcaaccgtgatattgcccagctactgactcattcacgttcaatagatcaggcatttctccagttttttggagatgaatttcttcgcttgctcctcacaagatttatcttttgttcagccaccatgaggatgcacaagatttttcgggaaacacgaaattatccagaatcatatccacaactgccaagggatgaaacagtggagaatcctcatctccagaagcacattttggaattagcatccattctggatgttcgaaacgtgttctttgagaataccattgatgactattaaaacaaaaaccctgttgtcg

SEQ ID NO: 250845 - protein, 841 aa, Artificial Sequence
  derived and/or modified sequence
MSAQSLPAATPPTQKPPRIIRPRPPSRSRAAQSPGPPHNGSSPQELPRNSNDAPTPMCTPIFWEPPAASLKPPALLPPSASRASLDSQTSPDSPSSTPTPSPVSRRSASPEPAPRSPVPPPKPSGSPCTPLLPMAGVLAQNGSASAPGTVRRLAGRFEGGAEGRAQDADAPEPGLQARADVNGEREAPLTGSGSQENGAPDAGLACPPCCPCVCHTTRPGLELRWVPVGGYEEVPRVPRRASPLRTSRSRPHPPSIGHPAVVLTSYRSTAERKLLPLLKPPKPTRVRQDATIFGDPPQPDLDLLSEDGIQTGDSPDEAPQNTPPATVEGREEEGLEVLKEQNWELPLQDEPLYQTYRAAVLSEELWGVGEDGSPSPANAGDAPTFPRPPGPRNTLWQELPAVQASGLLDTLSPQERRMQESLFEVVTSEASYLRSLRLLTDTFVLSQALRDTLTPRDHHTLFSNVQRVQGVSERFLATLLSRVRSSPHISDLCDVVHAHAVGPFSVYVDYVRNQQYQEETYSRLMDTNVRFSAELRRLQSLPKCERLPLPSFLLLPFQRITRLRMLLQNILRQTEEGSSRQENAQKALGAVSKIIERCSAEVGRMKQTEELIRLTQRLRFHKVKALPLVSWSRRLEFQGELTELGCRRGGVLFASRPRFTPLCLLLFSDLLLITQPKSGQRLQVLDYAHRSLVQAQQVPDPSGPPTFRLSLLSNHQGRPTHRLLQASSLSDMQRWLGAFPTPGPLPCSPDTIYEDCDCSQELCSESSAPAKTEGRSLESRAAPKHLHKTPEGWLKGLPGAFPAQLVCEVTGEHERRRHLRQNQRLLEAVGSSSGTPNAPPP

SEQ ID NO: 250846 - protein, 631 aa, Artificial Sequence
  derived and/or modified sequence
MAPLHKNYPETPMMHQPQCAPPSSGSPQLHPSSPLLFCPPQNGSASAPGTVRRLAGRFEGGAEGRAQDADAPEPGLQARADVNGEREAPLTGSGSQENGAPGDSPDEAPQNTPPATVEGREEEGLEVLKEQNWELPLQDEPLYQTYRAAVLSEELWGVGEDGSPSPANAGDAPTFPRPPGPRNTLWQELPAVQASGLLDTLSPQERRMQESLFEVVTSEASYLRSLRLLTDTFVLSQALRDTLTPRDHHTLFSNVQRVQGVSERFLATLLSRVRSSPHISDLCDVVHAHAVGPFSVYVDYVRNQQYQEETYSRLMDTNVRFSAELRRLQSLPKCERLPLPSFLLLPFQRITRLRMLLQNILRQTEEGSSRQENAQKALGAVSKIIERCSAEVGRMKQTEELIRLTQRLRFHKVKALPLVSWSRRLEFQGELTELGCRRGGVLFASRPRFTPLCLLLFSDLLLITQPKSGQRLQVLDYAHRSLVQAQQVPDPSGPPTFRLSLLSNHQGRPTHRLLQASSLSDMQRWLGAFPTPGPLPCSPDTIYEDCDCSQELCSESSAPAKTEGRSLESRAAPKHLHKTPEGWLKGLPGAFPAQLVCEVTGEHERRRHLRQNQRLLEAVGSSSGTPNAPPP

SEQ ID NO: 250847 - DNA, 2526 bp, Artificial Sequence
  derived and/or modified sequence
atgagcgcccagagcctgcccgccgccaccccccccacccagaagccccccagaatcatcagacccagaccccccagcagaagcagagccgcccagagccccggccccccccacaacggcagcagcccccaggagctgcccagaaacagcaacgacgcccccacccccatgtgcacccccatcttctgggagccccccgccgccagcctgaagccccccgccctgctgccccccagcgccagcagagccagcctggacagccagaccagccccgacagccccagcagcacccccacccccagccccgtgagcagaagaagcgccagccccgagcccgcccccagaagccccgtgcccccccccaagcccagcggcagcccctgcacccccctgctgcccatggccggcgtgctggcccagaacggcagcgccagcgcccccggcaccgtgagaagactggccggcagattcgagggcggcgccgagggcagagcccaggacgccgacgcccccgagcccggcctgcaggccagagccgacgtgaacggcgagagagaggcccccctgaccggcagcggcagccaggagaacggcgcccccgacgccggcctggcctgccccccctgctgcccctgcgtgtgccacaccaccagacccggcctggagctgagatgggtgcccgtgggcggctacgaggaggtgcccagagtgcccagaagagccagccccctgagaaccagcagaagcagaccccacccccccagcatcggccaccccgccgtggtgctgaccagctacagaagcaccgccgagagaaagctgctgcccctgctgaagccccccaagcccaccagagtgagacaggacgccaccatcttcggcgaccccccccagcccgacctggacctgctgagcgaggacggcatccagaccggcgacagccccgacgaggccccccagaacaccccccccgccaccgtggagggcagagaggaggagggcctggaggtgctgaaggagcagaactgggagctgcccctgcaggacgagcccctgtaccagacctacagagccgccgtgctgagcgaggagctgtggggcgtgggcgaggacggcagccccagccccgccaacgccggcgacgcccccaccttccccagaccccccggccccagaaacaccctgtggcaggagctgcccgccgtgcaggccagcggcctgctggacaccctgagcccccaggagagaagaatgcaggagagcctgttcgaggtggtgaccagcgaggccagctacctgagaagcctgagactgctgaccgacaccttcgtgctgagccaggccctgagagacaccctgacccccagagaccaccacaccctgttcagcaacgtgcagagagtgcagggcgtgagcgagagattcctggccaccctgctgagcagagtgagaagcagcccccacatcagcgacctgtgcgacgtggtgcacgcccacgccgtgggccccttcagcgtgtacgtggactacgtgagaaaccagcagtaccaggaggagacctacagcagactgatggacaccaacgtgagattcagcgccgagctgagaagactgcagagcctgcccaagtgcgagagactgcccctgcccagcttcctgctgctgcccttccagagaatcaccagactgagaatgctgctgcagaacatcctgagacagaccgaggagggcagcagcagacaggagaacgcccagaaggccctgggcgccgtgagcaagatcatcgagagatgcagcgccgaggtgggcagaatgaagcagaccgaggagctgatcagactgacccagagactgagattccacaaggtgaaggccctgcccctggtgagctggagcagaagactggagttccagggcgagctgaccgagctgggctgcagaagaggcggcgtgctgttcgccagcagacccagattcacccccctgtgcctgctgctgttcagcgacctgctgctgatcacccagcccaagagcggccagagactgcaggtgctggactacgcccacagaagcctggtgcaggcccagcaggtgcccgaccccagcggcccccccaccttcagactgagcctgctgagcaaccaccagggcagacccacccacagactgctgcaggccagcagcctgagcgacatgcagagatggctgggcgccttccccacccccggccccctgccctgcagccccgacaccatctacgaggactgcgactgcagccaggagctgtgcagcgagagcagcgcccccgccaagaccgagggcagaagcctggagagcagagccgcccccaagcacctgcacaagacccccgagggctggctgaagggcctgcccggcgccttccccgcccagctggtgtgcgaggtgaccggcgagcacgagagaagaagacacctgagacagaaccagagactgctggaggccgtgggcagcagcagcggcacccccaacgccccccccccctag

SEQ ID NO: 250848 - DNA, 1896 bp, Artificial Sequence
  derived and/or modified sequence
atggcccccctgcacaagaactaccccgagacccccatgatgcaccagccccagtgcgccccccccagcagcggcagcccccagctgcaccccagcagccccctgctgttctgccccccccagaacggcagcgccagcgcccccggcaccgtgagaagactggccggcagattcgagggcggcgccgagggcagagcccaggacgccgacgcccccgagcccggcctgcaggccagagccgacgtgaacggcgagagagaggcccccctgaccggcagcggcagccaggagaacggcgcccccggcgacagccccgacgaggccccccagaacaccccccccgccaccgtggagggcagagaggaggagggcctggaggtgctgaaggagcagaactgggagctgcccctgcaggacgagcccctgtaccagacctacagagccgccgtgctgagcgaggagctgtggggcgtgggcgaggacggcagccccagccccgccaacgccggcgacgcccccaccttccccagaccccccggccccagaaacaccctgtggcaggagctgcccgccgtgcaggccagcggcctgctggacaccctgagcccccaggagagaagaatgcaggagagcctgttcgaggtggtgaccagcgaggccagctacctgagaagcctgagactgctgaccgacaccttcgtgctgagccaggccctgagagacaccctgacccccagagaccaccacaccctgttcagcaacgtgcagagagtgcagggcgtgagcgagagattcctggccaccctgctgagcagagtgagaagcagcccccacatcagcgacctgtgcgacgtggtgcacgcccacgccgtgggccccttcagcgtgtacgtggactacgtgagaaaccagcagtaccaggaggagacctacagcagactgatggacaccaacgtgagattcagcgccgagctgagaagactgcagagcctgcccaagtgcgagagactgcccctgcccagcttcctgctgctgcccttccagagaatcaccagactgagaatgctgctgcagaacatcctgagacagaccgaggagggcagcagcagacaggagaacgcccagaaggccctgggcgccgtgagcaagatcatcgagagatgcagcgccgaggtgggcagaatgaagcagaccgaggagctgatcagactgacccagagactgagattccacaaggtgaaggccctgcccctggtgagctggagcagaagactggagttccagggcgagctgaccgagctgggctgcagaagaggcggcgtgctgttcgccagcagacccagattcacccccctgtgcctgctgctgttcagcgacctgctgctgatcacccagcccaagagcggccagagactgcaggtgctggactacgcccacagaagcctggtgcaggcccagcaggtgcccgaccccagcggcccccccaccttcagactgagcctgctgagcaaccaccagggcagacccacccacagactgctgcaggccagcagcctgagcgacatgcagagatggctgggcgccttccccacccccggccccctgccctgcagccccgacaccatctacgaggactgcgactgcagccaggagctgtgcagcgagagcagcgcccccgccaagaccgagggcagaagcctggagagcagagccgcccccaagcacctgcacaagacccccgagggctggctgaagggcctgcccggcgccttccccgcccagctggtgtgcgaggtgaccggcgagcacgagagaagaagacacctgagacagaaccagagactgctggaggccgtgggcagcagcagcggcacccccaacgccccccccccctag

SEQ ID NO: 250849 - DNA, 2526 bp, Artificial Sequence
  derived and/or modified sequence
atgagtgcccagtcgttgcccgccgcaacgcctcccacacagaaaccaccccgcattatccgcccacggcctccgagccgcagccgggctgcacagtcacccggcccaccacataatggctcatctccgcaagaactgccccgtaatagcaatgatgcccctacccctatgtgcactcctattttttgggagcctccagccgcatctctgaagcctcccgccctgctaccaccctctgcctctcgcgcctctctggatagccagacaagccccgacagcccttcgtccacacccacgccatcccccgtgagccgtcgctcagcgtcaccagagcctgcgccccgcagtccagtacccccccccaagcctagcggcagtccatgcacccctctcttacccatggctggtgtgttggcacaaaatggcagcgcctcagcacctgggactgttcgccggttggccggcagattcgaggggggggcagaaggtagggctcaagacgcggacgccccggagccaggcttgcaggcgagagctgacgtcaacggggaacgggaagcgcctttaactggaagcggctcccaggaaaacggcgctccagacgccggcctggcctgccctccatgttgcccctgcgtatgtcacactacgcgcccagggctcgaactgcgctgggttccagtggggggctacgaagaggtgcccagggtaccaaggcgcgcctcgcccctgcgaacatctcgcagcagaccccaccccccttcaatcggccatccagccgttgtgctcacatcctacagatccacggcggagcgtaagttgttgcctctgttaaagccacccaagccgactagagtgcgacaagatgccactatcttcggagacccaccacaaccagatctagacctcctaagcgaggacgggattcagaccggagactcacccgacgaggccccccagaacacaccccctgctactgtagagggccgcgaggaagaaggcctcgaagttttgaaggagcagaattgggagctgcctttgcaggatgaacctctgtaccaaacgtaccgagctgcggtgctgtcggaagagctatggggcgtgggcgaggacggatctccatccccagccaacgctggtgatgcccctacgttcccccgaccccctgggcctaggaacaccctctggcaggagctccccgctgtgcaggcatcaggcttactggacacattaagcccccaggaacgacgcatgcaggagtccctgttcgaggtagttacatcagaggcttcatatctgcgatctctcagactgctgaccgacacgttcgtgctttcacaggccttaagagatacactcactccccgggaccatcacacattattctccaatgtccaacgggtgcagggagtcagtgagcgcttcctcgctaccctgctgagcagggtgaggtctagcccccacatctctgatctctgtgacgtcgtgcatgcccacgccgtcgggccgttcagcgtttacgttgactatgtgcggaaccagcagtaccaagaagaaacatatagtaggctcatggatacaaacgtccggtttagcgctgaattgcgccgacttcaatcactgcccaaatgcgagcgcctgcccttacccagctttctgctgctgcctttccagcggattaccaggttacgaatgctgctccaaaatatcctccggcaaacagaggagggctcatctcgtcaggaaaatgcccagaaggccctgggcgccgtttccaaaatcatcgagagatgctctgcagaggtcggccgcatgaagcaaacagaagaactgatacgactgacccagagattgcgctttcacaaggtgaaagccctccctctagtgagctggtctagaaggctggaatttcagggtgagttaaccgagctcggctgccgccgaggaggcgtcttgttcgctagccggcccaggttcacacctctgtgcctgcttctcttctcagatctgctgctgattacgcagcctaagagcggccagcggcttcaggttctggactatgcccaccggagtcttgttcaggcacagcaagtgcccgatccttccgggcccccaaccttccggttgagtttgttgtctaaccatcaaggacgtcctactcacagactcctgcaggcaagctcactctctgacatgcaaaggtggctgggcgcattcccaactcccggaccgcttccctgttctccagataccatatatgaagactgcgattgttctcaagaactctgttccgagtcgtcagcaccagccaagactgagggtagatccctggagtccagggcagcccctaagcatcttcacaagacacctgagggctggctaaaaggcctgcccggcgctttccccgctcaattggtctgcgaagtcaccggcgaacatgagcggaggcgacacctacggcagaatcaacgcctcctggaggccgttggaagtagctccggaacaccgaatgccccacccccatag

SEQ ID NO: 250850 - DNA, 2526 bp, Artificial Sequence
  derived and/or modified sequence
atgtcagctcagagccttcccgcagctaccccccccactcagaagccgccgcgcatcattaggcctcgaccgccgagtaggtccagagccgcccagagccccggcccaccacacaacggcagctcgccacaggaactccccaggaacagcaacgatgcaccaaccccaatgtgtactcctatcttctgggagcctcccgccgccagtcttaaaccccccgcgttgctccctccctccgcttcaagggccagtctggattctcaaactagccctgattcaccctcttcaactcctaccccaagcccagtgagccggcggtcggcaagcccagagccggcccctcggtcccctgtccccccacctaaaccttccgggagcccttgcacaccacttctcccaatggccggcgtgctagctcagaacggaagtgcctctgcgcccggcaccgtgcgtcggctggcaggccgcttcgagggaggagccgaggggcgcgctcaggacgcagacgcaccagaacctggacttcaggctcgcgcggatgtcaatggcgaacgggaggccccgctgactggtagtggaagtcaggaaaatggcgccccggacgcagggctggcttgccccccctgctgcccctgcgtctgccatacaacacgtcctgggctggaactgaggtgggtccctgtcggcggatacgaagaggtccccagggtcccacgccgggcatcacccctgcggacaagccggtccaggcctcatcctcctagcatcggtcatcctgccgtagtgctgacctcttaccgcagcaccgccgaaagaaaactgctgcctttgctgaagccccccaaacccacccgagtgcgacaggatgcaaccattttcggggatcctccccagcccgacctggaccttctgtccgaggatggaatccagaccggggattccccagacgaggcgccccagaatacacctccagcgaccgttgaaggacgcgaagaagaaggactggaggttttaaaggaacagaactgggagctcccactgcaggacgagccactctaccagacatatcgagccgctgtgttatcagaagagctgtggggagtcggagaggacggtagccctagcccagcaaatgccggcgatgcccccacttttccacggcccccaggtcctaggaacactctgtggcaggagcttcccgcagtgcaagccagcggcttgctcgacaccctaagtccacaggagagaagaatgcaggaaagtttgttcgaggtcgtaacttccgaggcgtcttacctacgcagcctgcggctcctcactgatacattcgtcttgagtcaggcgcttcgggatacattgaccccgagagatcaccatacattgtttagcaacgttcagcgagtgcagggtgtcagtgagcgcttcttagccacccttttgtctagggtgcgctccagcccccatattagcgatctttgtgatgtagtgcatgcccacgccgtcggacccttttcagtgtacgtggattatgtcagaaaccagcagtaccaggaagaaacctacagccggctgatggacaccaatgtccgcttcagtgccgagctcaggcgtttgcaatcccttccaaagtgtgagagactccccctacctagcttcctgctgctgcctttccaacggatcactcggctccgaatgttactgcaaaacatacttaggcaaacagaagaggggtccagcagacaagaaaatgctcagaaagccctgggcgcagtgtctaagatcatcgagcgctgttcggccgaggttggccggatgaagcagacagaggaacttattcgtttgacacagagactgcgtttccataaagtcaaagctttacccctggtctcatggagccgtagactggaatttcagggagagttaactgagcttggctgccgtaggggtggtgttttgtttgcaagccggcctaggtttacccctctttgcctgttgctgttctcggatctcttgttaatcactcagcctaagagcggtcagaggctgcaggtcctggattatgcccacaggtccctggtgcaagctcagcaggtgcctgacccatcaggaccgcctacatttagactcagcctgctatccaatcatcagggtagaccaacgcatagacttctccaggcatcctccttgagcgacatgcagagatggttgggagcctttccaacacccgggccccttccctgtagcccagacactatctacgaggattgcgattgtagtcaggagctttgctctgagtcaagcgccccagcaaagacagaggggcggagcctggagagccgggcggctcctaagcacctgcacaagacccctgagggatggctgaagggcctgcccggagcgttccctgcccagctagtttgtgaagtgaccggggagcacgaacgccgtaggcatctaagacagaatcaaaggcttttggaggcagtggggtcttcaagcggaacaccaaatgcaccccccccctag

SEQ ID NO: 250851 - DNA, 1896 bp, Artificial Sequence
  derived and/or modified sequence
atggctccccttcacaaaaattatcccgagacccccatgatgcatcaaccccagtgtgccccccccagctccggatctcctcaactgcacccatcctcgcctctgctcttctgcccacctcagaacggatccgcctccgccccaggaactgtccggaggctcgctgggcgcttcgagggcggcgctgaggggagggcccaggacgctgacgcccctgagcccggcctccaagcgcgtgcagatgtgaacggagaacgggaagcccctctgaccgggtccggatctcaagagaacggggccccgggcgacagcccggacgaggcccctcagaatacccctccagcaacagttgagggcagagaggaagaagggctcgaagtgctgaaggaacagaattgggagctaccacttcaggacgaacctctctaccagacatatagggccgcggtgttgtctgaagaactgtggggtgtaggcgaagatggaagcccctcacccgcaaatgcaggcgatgcccccacctttccccggccgcctggcccccgtaatacattatggcaggagctgcccgctgtccaagcctcaggcctgcttgacaccctgagcccccaggagaggcggatgcaggaaagtttgtttgaggtggttacttcggaagcaagctatcttaggtcactgagacttctgacggacacatttgtccttagccaggccctaagagacacattaacaccaagagatcaccatacactctttagtaatgttcagagggttcagggcgtgtccgagaggttcctggcaaccctcctgagccgtgttcgttcttctccccacatctcggacctttgcgacgtcgtacacgcccatgcggttggaccctttagtgtgtacgtagactatgttaggaatcagcagtaccaggaggaaacctattcacgcctgatggataccaatgtgaggtttagtgccgagctccggaggttacagtcacttcccaaatgcgagcgcctccccctgccttctttcctgctacttccatttcagagaatcactcgtctacggatgttgctccagaacatcttgagacagaccgaggaaggcagtagcagacaggagaacgcacagaaggccctcggagccgtgtcaaaaattatcgaaagatgttccgccgaagtcggaagaatgaagcagactgaagaactaatccgactgactcagcggcttcgattccacaaggtcaaggccctacctctggtgagctggtcgagacgcctagagtttcaaggagaactcacagagctgggctgccgtcggggcggtgtgctgtttgcatcgaggccgcgctttactcctctgtgtcttttactgttcagtgacctgctgttgattacccaacctaagagcgggcagcggttacaggtgctagattatgcacaccggtccctggtgcaggcacagcaggtgcctgaccccagcggaccgcccacttttcggctttctctcctcagtaaccatcaggggagacccacccaccgactactgcaggcctcaagcctcagcgatatgcagcgttggctcggtgcttttccaacacccggtcctcttccttgtagtcctgacactatatatgaagactgcgattgtagccaggagctctgttcagaatcttctgcccctgcgaaaacagagggccgcagccttgagagtcgggctgcacccaagcacctgcacaagactcccgaaggatggctgaaaggcctacctggggccttccctgcccagctagtgtgcgaagttacaggcgaacacgaaagacgccggcatctgagacagaatcagcgtctccttgaagccgtggggagcagtagcggaactcctaacgcaccccccccctag

SEQ ID NO: 250852 - DNA, 2526 bp, Artificial Sequence
  derived and/or modified sequence
atgtctgcccagagcctgcctgctgccaccccacccacccagaagccaccccgcatcatccggccccggccccccagccgcagccgggccgcccagagccctggccccccccacaacggcagcagcccccaggagctgcccaggaacagcaatgatgcccccacccccatgtgcacccccatcttctgggagcccccagctgccagcctgaagcccccagccctgctgcccccatctgccagccgggccagcctggacagccagaccagcccagacagccccagcagcacccccacccccagccctgtgtccagaagaagtgccagccctgagcccgcccccaggagccctgtgcccccacccaagcccagcggcagcccctgcacccccctgctgcccatggccggcgtgctggcccagaatggaagtgccagcgcccctggcaccgtgcggcggctggccggccgctttgaaggaggagctgagggccgggcccaggatgctgatgcccctgagcccggcctgcaggcccgggcagatgtgaatggagagcgggaggcccccctgaccggcagcggcagccaggagaatggagccccagatgctggcctggcctgccccccctgctgcccctgtgtgtgccacaccaccaggcctggcctggagctgcgctgggtgcctgtgggcggctatgaggaggtgccccgggtgccccggcgggccagccccctgcggaccagccgcagccggccccaccccccatccatcggccaccctgctgtggtgctgaccagctaccgcagcacagctgagaggaagctgctgcccctgctgaagccacccaagcccaccagggtgcggcaggatgccaccatctttggagaccccccccagcctgacctggacctgctgtctgaagatggcatccagacaggagacagcccagatgaggccccccagaacaccccaccagccaccgtggagggccgggaggaggagggcctggaggtgctgaaggagcagaactgggagctgcccctgcaggatgagcccctgtaccagacctacagagctgctgtgctgtctgaggagctgtggggcgtgggggaggatggcagccccagccctgccaatgctggagatgcccccaccttcccccggcccccaggccccaggaacaccctgtggcaggagctgcctgctgtgcaggccagcggcctgctggacaccctgagcccccaggagaggaggatgcaggagagcctgtttgaggtggtgaccagcgaggccagctacctgcggagcctgcggctgctgacagacacctttgtgctgagccaggccctgcgggacaccctgaccccccgggaccaccacaccctcttcagcaatgtgcagagggtgcagggcgtgtctgagcgcttcctggccaccctgctgagccgggtgcgcagcagcccccacatcagtgacctgtgtgatgtggtgcacgcccatgctgtgggccccttctctgtgtatgtggactatgtgaggaaccagcagtaccaggaggagacctacagccggctgatggacaccaacgtgcgcttctctgctgagctgcggcggctgcagagcctgcccaagtgtgagcggctgcccctgcccagcttcctgctgctgcccttccagaggatcacccggctgaggatgctgctgcagaacatcctgcggcagacagaggagggcagcagccggcaggagaatgcccagaaggccctgggcgctgtgtccaagatcatcgagcgctgcagcgctgaggtgggccgcatgaagcagacagaggagctgatccggctgacccagaggctgcgcttccacaaggtgaaggccctgcccctggtgtcctggagccggcggctggagttccagggcgagctgacagagctgggctgcagaagaggaggagtgctgtttgccagccggccccgcttcacccccctgtgcctgctgctcttcagtgacctgctgctgatcacccagcccaagagcggccagaggctgcaggtgctggactatgcccacaggagcctggtgcaggcccagcaggtgcctgaccccagcggcccccccaccttccggctgagcctgctgagcaaccaccagggccggcccacccaccggctgctgcaggccagcagcctgagtgacatgcagcgctggctgggcgccttccccaccccaggccccctgccctgcagcccagacaccatctatgaggactgtgactgcagccaggagctgtgcagcgagagcagcgccccagccaagacagagggccgcagcctggagagcagagctgcccccaagcacctgcacaagaccccagagggctggctgaagggcctgcccggggccttccctgcccagctggtgtgtgaggtgactggagaacatgaaagaagaagacacctgcggcagaaccagaggctgctggaggccgtgggcagcagcagcggcaccccaaatgcccccccaccctag

SEQ ID NO: 250853 - DNA, 1896 bp, Artificial Sequence
  derived and/or modified sequence
atggcccccctgcacaagaactacccagagacccccatgatgcaccagccccagtgtgccccacccagcagcggcagcccccagctgcaccccagcagccccctgctcttctgccccccccagaatggcagcgccagcgcccctggcaccgtgcggcggctggccggccgctttgagggcggcgctgagggccgggcccaggatgctgatgcccctgagcccggcctgcaggcccgggcagatgtgaatggagagcgggaggcccccctgactggaagtggcagccaggagaatggagcccctggggacagcccagatgaggccccccagaacaccccaccagccaccgtggagggccgggaggaggagggcctggaggtgctgaaggagcagaactgggagctgcccctgcaggatgagcccctgtaccagacctacagagctgctgtgctgtctgaggagctgtggggcgtgggggaggatggcagccccagccctgccaatgctggagatgcccccaccttcccccggcccccaggccccaggaacaccctgtggcaggagctgcctgctgtgcaggccagcggcctgctggacaccctgagcccccaggagaggaggatgcaggagagcctgtttgaggtggtgaccagcgaggccagctacctgcggagcctgcggctgctgacagacacctttgtgctgagccaggccctgcgggacaccctgaccccccgggaccaccacaccctcttcagcaatgtgcagagggtgcagggcgtgtctgagcgcttcctggccaccctgctgagccgggtgcgcagcagcccccacatcagtgacctgtgtgatgtggtgcacgcccatgctgtgggccccttctctgtgtatgtggactatgtgaggaaccagcagtaccaggaggagacctacagccggctgatggacaccaacgtgcgcttctctgctgagctgcggcggctgcagagcctgcccaagtgtgagcggctgcccctgcccagcttcctgctgctgcccttccagaggatcacccggctgaggatgctgctgcagaacatcctgcggcagacagaggagggcagcagccggcaggagaatgcccagaaggccctgggcgctgtgtccaagatcatcgagcgctgcagcgctgaggtgggccgcatgaagcagacagaggagctgatccggctgacccagaggctgcgcttccacaaggtgaaggccctgcccctggtgtcctggagccggcggctggagttccagggcgagctgacagagctgggctgcagaagaggaggagtgctgtttgccagccggccccgcttcacccccctgtgcctgctgctcttcagtgacctgctgctgatcacccagcccaagagcggccagaggctgcaggtgctggactatgcccacaggagcctggtgcaggcccagcaggtgcctgaccccagcggcccccccaccttccggctgagcctgctgagcaaccaccagggccggcccacccaccggctgctgcaggccagcagcctgagtgacatgcagcgctggctgggcgccttccccaccccaggccccctgccctgcagcccagacaccatctatgaggactgtgactgcagccaggagctgtgcagcgagagcagcgccccagccaagacagagggccgcagcctggagagcagagctgcccccaagcacctgcacaagaccccagagggctggctgaagggcctgcccggggccttccctgcccagctggtgtgtgaggtgactggagaacatgaaagaagaagacacctgcggcagaaccagaggctgctggaggccgtgggcagcagcagcggcaccccaaatgcccccccaccctag

SEQ ID NO: 250854 - DNA, 2526 bp, Artificial Sequence
  derived and/or modified sequence
atgagcgcccagagcctgcccgccgccaccccccccacccagaagcctcctcgtatcattcgaccacgccctccctccaggtccagagccgcacagtccccgggccccccacacaacgggtcatcaccgcaggaattgcctcgtaatagcaatgacgctcccaccccgatgtgcaccccaatcttttgggagcctccagccgcctccctcaagcctcctgcattgttgcccccctccgcgtcccgcgcctccctggactcacagacttcccccgactccccatcctccaccccaactccctcccctgtatcccgcaggtcagcttcccctgaacctgccccccggtctccagtgcctccccctaagcccagcggctccccctgtacccccctgttgccgatggcaggcgttctggcccagaacggcagtgcatcagcccccggcactgtgaggaggctcgccggcagatttgaaggcggcgccgaggggagagcgcaggacgccgatgcgcccgagcccgggctgcaggctagggctgacgtcaacggggagcgtgaggcccctttaaccgggtcaggtagccaggagaacggcgccccagacgccggactggcctgtcctccctgttgtccgtgtgtgtgccacacgacgcgtcctgggttagagctgcggtgggtccccgtcggggggtacgaggaggtaccccgtgtccccaggagggcaagccctcttcggacatccaggagcaggccccacccgccctctatcggccatcccgcggtagtgctgacatcatatagaagcacagcagagcgaaagctcctgcctctgctgaaacctccaaaaccgacccgagtgcgacaggatgccacaattttcggtgatcctcctcaacctgacctggacctgctgtctgaagacggaatccagaccggcgatagtccagacgaagcccctcagaacactccccctgccactgtagaggggcgcgaagaggagggactggaggtactgaaggaacagaattgggaactccccctgcaggatgagccactttaccagacttaccgcgcagcggttttgagcgaggaattatggggggttggcgaagacgggagtcccagcccagccaatgccggagacgctccaacctttcctcggccgcccggcccgaggaatacactttggcaggagctgccggccgtgcaggccagcggactgctggacaccctctctccacaagagaggaggatgcaggagagcctatttgaagtggtgacttccgaagcttcctacttaaggtcgctgaggctgctcaccgacacatttgtcctgagccaagctttaagggacactctgactccgcgcgaccatcacaccctgttctcaaacgtccagcgcgtgcagggtgtctcagaacgtttcctggcaaccctcctgtctcgggtacggagcagccctcacatcagcgacttgtgtgacgttgtacacgcccacgccgttggcccctttagtgtttatgtcgactacgtgcgaaaccaacagtatcaggaagaaacctattcacggctgatggataccaatgtgagattctcggcagaactgcggaggcttcagtctctgccgaaatgcgaacgacttccccttcctagttttctgctgttacccttccagagaattacaaggctcaggatgctgctgcagaacatcctgcggcagacagaagaagggtcatccagacaggagaatgctcagaaagcacttggcgctgtatctaaaatcattgagaggtgcagtgctgaggtgggacggatgaagcagacggaagagttgattcgcctcacacagagacttagatttcacaaagtgaaggctctcccactcgttagttggtcccgaagactggagttccagggcgagttgactgaactgggatgcaggcgggggggcgtgcttttcgccagtagaccacgtttcacacctttgtgtctgcttcttttctctgatctgttgctcatcacccagccaaaatcagggcaacgtcttcaggtccttgactacgctcatcggtcactcgtccaagcccagcaggtgcccgatccgtcggggcctccgactttcagattgtctctattgtccaaccatcaaggccggcctactcataggctgctccaggcctctagcctcagcgatatgcagcgttggctgggtgcgttcccaactcccggacctctgccttgctctcctgatacaatctacgaagattgcgactgctcgcaggagctgtgcagtgaatcctctgctcccgctaaaactgagggccggtctctcgagagcagggcggcacctaaacatctgcataaaacccctgaggggtggctgaaggggctgccaggagcttttcctgcgcagctcgtttgtgaggtgactggagagcacgagcgcagaaggcacctgcgacagaaccagcggctgttagaggctgtcggctccagttccgggacacccaacgcgcccccaccctag

SEQ ID NO: 250855 - DNA, 2526 bp, Artificial Sequence
  derived and/or modified sequence
atgagcgcccagagcctgcccgccgccaccccccccacccagaagcctccacgaataattcgccccaggccaccatctagaagccgcgccgcacagagccccggtcccccccacaacggctcatctccccaagaactgccgcggaacagtaacgacgcacctacccccatgtgtaccccaatcttttgggagcctcccgccgcctcactgaaaccccctgccctgctccccccttctgcgagccgggcctccctcgacagccagacatcaccagactctccctcttctacacctactccttcacctgtaagccggcggtctgcttcaccggagcctgcgccccgatcgcctgtccccccgccaaagcccagtggctctccctgtactccgctcctcccaatggctggtgttttggcccaaaatggttccgcttccgcacccgggacagtccgtaggttggccggcagattcgaaggcggggccgagggacgcgcccaggatgccgacgcccctgagccaggcctgcaggcccgtgcggacgtgaacggggagcgggaagcgccccttaccggttcaggttcacaggaaaacggagcacccgatgcaggcctggcatgccctccctgctgtccttgcgtatgccacaccacacgccctggtcttgagctccggtgggtgccagtgggggggtatgaagaggtaccacgggtgccccgccgggcatcgcctctgaggacttcccgtagccgcccccaccctccatcaattggacaccccgccgtggtcctgacttcatacaggagcactgccgagcgcaagctgctgcctttactcaaacccccaaaacctacccgggtaagacaggatgcaactatctttggggatcctccccagccggacttagacttactctctgaggacggcatccagactggtgactcccccgatgaggcacctcagaatacacctcctgcaacggtggaagggagggaggaagagggcctggaagtgctgaaggagcagaactgggaattacctttgcaagatgaacctctgtaccagacctatagagcagctgtgttgagcgaggaactttggggggtgggtgaagacggaagtccttccccggcgaacgccggagatgcacccacctttcctagaccccctggtcctcgtaacaccctgtggcaggagttgccagctgtacaagcaagtggcttactggatactctttcgcctcaggagagaaggatgcaggagtcgctttttgaggtcgtcaccagtgaggcctcctacctgcgatcactgcggctcctgaccgatacatttgtgctgtcccaggctttgcgggatactttaactcctcgagatcatcatacgttgttttctaatgtgcagagggtgcagggcgtctccgagcgcttcctggcaactcttctttccagagtccgctccagccctcatatttcagatctgtgcgacgtcgtgcacgcgcatgcagttggaccatttagtgtttatgtcgactacgtccgcaatcagcagtatcaggaagagacttacagtaggctgatggacactaacgtgcggtttagtgccgagcttagaagattacagagtttacccaagtgtgaacggctgcctctgccctctttcctactcctgcctttccagcgcatcacaagactccggatgttgctgcaaaacattctcagacagaccgaagagggcagctctaggcaggagaatgcccagaaggcactaggagccgtgagcaagattattgagcggtgttctgccgaagtcggtagaatgaaacaaaccgaggagttaatccgacttacacagcggcttcgcttccacaaggtgaaagcattgcctctggtcagctggtcgcggcgtctagaatttcagggggagctcaccgagttaggatgcagacgtgggggagtgttgttcgcatctcgcccacggttcacaccgctctgcctgttactctttagcgatcttctgctgattacccaacctaagagtgggcagagactgcaagtcttagactatgcgcacaggtcacttgttcaagcccagcaggtcccggatccctcgggcccccctacgttcagattgtccctactgtctaatcaccaaggcagacctactcatcggctgctccaggccagcagtctttcggatatgcagaggtggctcggcgctttccctaccccaggaccactgccatgctcacccgacactatctatgaagactgcgattgctcccaggagctctgcagcgaaagttccgcccccgctaagaccgaggggagaagcctggaaagccgggcggccccaaagcacctacataagacccccgaaggctggctcaaggggctcccgggggcgttcccggctcagctggtctgtgaagtaacaggggagcacgaacgccgcagacacctcaggcagaatcagagactcctagaagccgtgggatcttcatccggcacccctaatgccccccccccttag

SEQ ID NO: 250856 - DNA, 1896 bp, Artificial Sequence
  derived and/or modified sequence
atggcccccctgcacaagaactaccccgagacccccatgatgcaccagccacagtgtgcccccccgtcttctggatccccacagctgcaccccagcagccctctcctcttctgtccaccccagaacggctcggcctctgccccaggaaccgtgcgcagattggctggcagattcgaaggaggcgctgaagggagagcccaagacgccgatgcccccgagccgggactccaggcccgcgctgacgtgaatggcgagcgggaagcacccttgacaggttcgggttcccaagaaaacggtgctcctggtgatagtcccgatgaagcaccacagaatacccctcctgccacagtggaaggaagagaggaggaaggtctcgaagtgttaaaagagcagaattgggaactgccacttcaggacgagccgctgtaccagacttatcgggcagcagtgctgtctgaagagttgtggggggtcggggaggacggcagcccttccccggctaacgcaggtgacgctcccacattccccagaccaccaggccctcggaacactctatggcaagagctcccggccgtgcaagcctctgggttgctcgataccctcagtcctcaggaaaggaggatgcaggaatccctgtttgaggtggtcacttccgaggcttcctatttacgaagcttacgtctcttgacagacactttcgtcctgagccaggccctgcgcgatacactgacccctcgcgatcatcacacactgttcagcaatgtacagagagttcaaggtgtctctgaaagattcctcgcaaccctgctctcgcgcgtgcgctccagcccacacatctcagatctttgtgatgtcgtgcatgcacatgccgtcggccctttctctgtgtacgtggactacgtcagaaaccagcagtaccaagaagaaacgtatagtagactgatggatactaatgttagattttcagcagagctgagacgcctgcagtctcttccgaaatgtgagcggctgcccctgcccagtttcctgcttctgccctttcagagaatcaccaggctcaggatgttgctgcagaatatcctgaggcagacggaggagggaagcagccggcaggagaatgcccagaaggccctaggcgccgtgtccaagatcattgagcgttgcagtgcggaggtgggccgtatgaagcagactgaagaacttattcgtcttactcaaaggctcaggttccacaaagtgaaggcgcttccactggtcagttggagtcgcagactggagtttcaaggcgagctgactgagttggggtgcaggaggggtggcgttctcttcgcctcccgtccacgcttcacccctctgtgcttgcttctgttctccgatctgctgctaatcacccaaccaaagagcggccagcggctccaggtgttggactacgcacatagaagcctggtacaggcacagcaagtgccggacccttccggcccacctacgtttcggctctcgttgctaagcaaccatcagggacgaccgactcatcgactccttcaggcctcttcattatccgatatgcagagatggctaggggcgttccctactcccgggccactgccttgtagtcccgacaccatctatgaagattgtgattgtagtcaggagctgtgcagtgaatcttctgcccccgctaagaccgaagggaggagtctggagtccagggcagcgcccaagcatctgcataagactcccgaaggttggctgaagggcctgcccggcgccttccccgcccagttggtatgcgaggtgacaggagagcacgaaaggcggagacatctccggcagaatcagcgcctcttagaagctgtggggtcttcttctggaacgccaaacgcccctccaccctag

SEQ ID NO: 250857 - DNA, 2526 bp, Artificial Sequence
  derived and/or modified sequence
atgagcgcccaaagcctccccgcagccactccaccaactcagaagccccctagaattatccggccacgacccccaagtagatctagggctgcacagtctccaggtccaccccacaatgggtctagcccccaagagttgccacggaacagcaatgatgcccctacccctatgtgtacacctattttttgggaaccacccgctgcgtcccttaaaccgcctgctctgttgcctccctctgcttctagagcttctcttgattctcaaacttcgcccgactccccttcaagcacgcccacgccaagcccagtcagcagacgaagtgcctctccggaacctgccccaaggagccccgtcccccctccaaagcctagtggctcgccctgtacacctcttctccccatggccggtgtgctggcacagaacggaagcgcttcagcaccagggacggtgcgcagactcgccggtcgcttcgaagggggagccgagggcagagctcaggacgccgacgccccagagcccggacttcaggcaagggctgatgtgaacggggagcgcgaggctcctttaaccgggagtggaagtcaggagaacggcgctcccgatgccggactggcttgtcccccttgctgtccgtgtgtatgccacaccacaaggcccggattggagcttaggtgggtgcccgtcggaggctatgaggaggtgcctcgagttccgaggcgagctagcccattgcggacctcccggagtcggccacaccccccttccatcggacaccccgctgtggttctgacaagctacagaagtacagccgagcgcaagctccttcccctgctcaagccacccaagccgacgcgggtccgccaagacgccacaatctttggagatcccccacagcctgatttagacctgctgtctgaagacggtattcagacaggtgattcccccgacgaggccccacagaacacccctccagcgacggttgaagggagagaggaggaaggcctcgaagtcctgaaggaacagaactgggagctcccattgcaggacgagccactataccagacctatcgagccgctgttttatccgaagaactttggggcgtgggggaagacgggtctccaagccctgcgaatgcaggggacgctcccacattccctaggccacccggacccaggaatactttgtggcaggagctcccagccgtgcaggcatccggattactggatacactctcgccccaggagagacgaatgcaggaatccctgttcgaggtggtaactagcgaagctagctacctgcggagcctgcggctgctgaccgacactttcgtacttagtcaggcactgagggacacccttacccctagagatcaccataccctatttagcaacgtacagcgtgtgcagggagtgtcagaacgatttctggcaacactgctcagccgcgtacggtcctccccacacatctccgatctgtgcgacgtcgtacacgctcatgccgtcgggcctttttctgtatacgttgactatgtgcggaatcagcagtaccaagaggaaacctacagccgccttatggataccaacgtccggttctcagctgagctgcgccgactgcagtccttgcccaagtgcgaacggctcccgcttcctagcttccttctgctgccatttcagaggatcacacgactgaggatgctactgcagaacattctgcgacaaactgaagagggctccagtcgtcaggagaacgcccagaaggccctcggcgctgtttcaaaaatcatcgagcggtgtagcgccgaggttgggcgtatgaaacaaacagaggaacttatccgcctaacccaaagacttcgctttcacaaggtgaaagctttaccacttgtttcttggtcgcggcgattagagtttcagggagagctcacagagcttggctgtcggaggggtggagtgctgtttgctagccggcctcggttcacccctctctgcctcttgctgttttccgatctgctgctaattacacaacccaagtccggtcagagattgcaggtcctggactatgcgcaccggtcactcgtgcaggctcagcaggtgcccgatccatcaggaccccctacatttcgtctatcattactttccaaccaccaaggtaggccgacccacaggctgttacaggccagcagtctttccgacatgcaaagatggctgggagccttccccacaccagggcctttgccatgttcgccggacaccatttacgaggactgcgactgcagtcaggagctctgctcagagagtagtgctcccgcaaagacagaaggcaggtctctcgagagtagagcggctcctaaacaccttcacaagacaccggagggttggctgaagggcctgcctggcgcttttcctgctcaattggtgtgcgaggtgaccggtgaacacgagaggcgcaggcatctccgacaaaatcaacggctactggaagccgtgggatcatcaagtggcacgcccaatgccccaccgccttag

SEQ ID NO: 250858 - DNA, 2526 bp, Artificial Sequence
  derived and/or modified sequence
atgtccgctcaatctcttccagccgcaacacctccaacccagaagccccctcgaattattcggcctaggccgccatcccgctccagggccgcacagagccccggacctccacataacgggtcaagcccccaggaactgcctcgtaatagtaacgacgctcccactcctatgtgcactccaatattctgggaaccccctgctgcctcactgaaaccgccagctctgctgcccccttccgcctcgagagcgtctttggattcacagacatcccccgactcaccaagttctactccaacaccctcccccgtttcccgtaggagtgcttctcctgaaccagccccaagaagtcctgtcccgccacccaagcccagcggatccccttgcactcccttactccccatggcgggagtactggcccagaatgggagcgcctccgctccagggacagtgagaagactggccggtagattcgagggaggggcagaagggagggcccaggatgcagacgccccagagcctgggctgcaggccagggctgacgtgaatggcgagcgggaggcgccattgaccgggagtggaagccaggagaatggcgctccagacgctggcttagcttgccccccatgttgcccctgtgtttgccacacaacaaggcccggattggagcttcgttgggtgcccgtcggagggtacgaggaagtcccgagggttccccgaagggcctctcctcttaggacctcacggtcccgccctcatcctccgtctatcggccaccctgctgtcgttctcacttcatatagatccacagcggagcgcaagctcctgccccttctcaagccccctaaaccgacacgggtacgccaggatgctaccatctttggtgaccccccacagcccgatctagacctgctcagcgaggacggaattcagaccggggattcacctgatgaagcaccccagaacaccccacccgcaacagtggaaggaagggaggaggagggacttgaggtgctgaaagaacagaattgggagctaccactgcaggatgaacctttatatcagacctatagagcagccgttctctctgaagaactctggggcgtcggcgaggatgggtcccctagccccgcaaatgccggagacgcccctacctttcctaggccccctgggcctaggaacaccctgtggcaggagctgcccgctgtgcaggcctccggcctcctagatacactgagcccacaagagaggcgaatgcaggagtcgctgttcgaggtggtgacttctgaggcgtcatatttaaggtcgctgagattgctgacagatacttttgtcctcagtcaagccttacgggatacactaacccctagggaccaccacactcttttttcgaatgtacagcgcgtccaaggggtgagtgagcgcttcctggccactctactgtcaagggttaggtctagccctcacatctctgacctgtgcgacgtggtgcatgcccacgccgttgggccatttagcgtatatgttgattatgtgcgcaatcagcagtaccaggaagagacatattccaggctcatggacacaaatgttcgcttttcagcggagctccgcaggctgcagagcctgcctaaatgtgagaggctgccattaccctcctttttactccttcccttccagagaatcacgaggctccgcatgctcctgcaaaacattctgagacaaactgaggagggcagcagcagacaggagaacgcccagaaagcgttgggcgcagtctccaaaattattgaacgttgttccgccgaggtcggacggatgaaacagacggaagagctaattcgcctgacacagcggttgcggttccacaaggtgaaagccctccccctggtgtcttggagtcgcaggctggaattccagggagaactgacagagcttggctgccgcagggggggagtgttgtttgcctcacgtcctcgattcacgcccctgtgtttgttgctgttcagtgacttgctattgattacccagcctaaatctggccagcgcctgcaggtgctcgactatgcacatagaagcctcgtgcaggcacaacaggtgccagatccctcaggccctcccacttttaggctgagcctgctgtctaaccaccagggcaggcccacccatagacttttacaggctagttctttaagcgatatgcagcggtggttgggcgcatttcctacccccggacccctcccctgttcgcccgatacaatctacgaggattgcgactgtagccaggagctgtgctccgaaagcagtgccccagctaaaactgagggccgtagtctcgaatcccgcgcagcacctaagcacctgcacaaaacaccagaaggttggctcaaaggtttgcctggcgcttttcctgctcagttggtgtgcgaagtcacaggcgagcatgaaagaaggagacacctgcgacaaaaccagcggcttctcgaagccgtgggtagtagctccggaacacccaatgctccacctccctag

SEQ ID NO: 250859 - DNA, 1896 bp, Artificial Sequence
  derived and/or modified sequence
atggccccactgcataagaactaccctgagacacctatgatgcatcagcctcaatgcgcccctccatcctctgggtctccccagcttcacccaagttctccacttttattttgtcccccacaaaacggatctgcctccgccccaggcaccgtcaggcggcttgctggtcgttttgaaggcggagcagagggtcgcgcacaagacgccgatgcacccgaaccaggactccaggctagggccgatgtgaacggagaacgggaagccccactaaccggcagcggatcccaggagaacggcgctccaggggatagcccagatgaggcaccacagaatacacccccagctaccgttgaaggcagagaggaggagggtcttgaggttttaaaagagcagaattgggaactgccgctgcaggatgagccactctaccagacctatagagcagctgtgttatctgaggagttgtggggagttggagaggatggctcccctagtccagcaaacgccggagacgcccctacttttccccgacctcccggtccgaggaatacactctggcaggagctgccagccgtgcaggcctccggactcctggacacgctcagtcctcaagaacggaggatgcaggagtccctgtttgaggtagtgacttccgaggcatcttacttgcggtcacttcggctgttaacagacacctttgtgttaagccaagctcttagagatacattgactcctcgagatcaccacactttatttagtaatgtccagcgggtccagggagtcagcgaacggttcctggcgaccctactgtcccgcgtgaggtcctctcctcatattagtgatctatgtgacgtggtccatgctcatgccgtggggccattctctgtatacgtggactacgtccgcaatcagcagtaccaggaggagacctattcgaggctgatggatacaaacgtgagatttagtgctgagctgagaaggctgcagagtcttccgaagtgcgaacgcctccccctaccaagctttctcctcctaccattccaacggataactcgtctgaggatgttactccaaaacattttacgccaaaccgaggaggggagttccaggcaggaaaacgctcagaaagctctaggagccgtgtctaagattatagagcggtgtagtgccgaggtcgggcgtatgaaacagactgaggaactgatccggctgacccagcgacttagattccataaggtcaaggctctgccactggtcagctggtcaaggcgtttagagttccaaggggaactcaccgagctaggttgcaggcggggaggagtgttgttcgcctccaggcccagatttacaccgctttgcctactgttattcagcgatctgctgctcattacccagcccaagagcggacagcgtcttcaggtcctggactacgcccacagatccctggttcaggcccagcaggtaccagatccctccgggccacccacctttagactttcactgctgagcaatcatcagggccgtccgacacacagactgctgcaagctagctccctgagcgacatgcagcggtggctgggggctttcccaacacctgggcctctgccatgtagtccggataccatttacgaggattgcgactgctcccaggagctgtgctcagagtcatcagctccggctaagaccgaagggcgtagcctggaaagtagggcagcccctaagcacctccacaaaacgcctgaaggttggctgaagggccttcctggggcatttccagctcagctcgtgtgcgaggtgactggcgaacacgaacgtaggagacatctcaggcagaatcagcggcttcttgaggcagtcggaagctcctctgggactcccaacgctccacccccatag

SEQ ID NO: 250860 - DNA, 4201 bp, Artificial Sequence
  derived and/or modified sequence
agaatcacaggaacacacacttggaaacctcagccctgcattcctcgctccaaggggcagacaggacaggctgaaaatagcaactggttccaaaaagataaaggggatgactccagcagagcacctcactcctttgaagagcacagaggaagatgtcagcccagtcccttcctgcagcaacaccccccacgcagaagccccctcggatcatccgcccccgccctccttctcgttccagggctgcccagtccccagggcctccccacaatggctcctctccacaagaactaccccgaaactccaatgatgcaccaaccccaatgtgcacccccatcttctgggagcccccagctgcatccctcaagccccctgctcttttgcccccctcagcttctagagccagcctcgactcccagacttccccagactcaccttccagcacccccacacctagtccagtgtcccggcgctccgcctccccagaacctgctccccggtctccagtccccccacccaagccgtctgggtcaccctgcacgcctctgctccccatggctggagtcctggctcagaatggctctgcctcagctcctggcactgtgcggaggctggctggcaggtttgaagggggtgctgaaggccgggctcaggatgcagatgccccggagccaggtctccaagcgagagcagatgtgaatggggagagagaagctcccctcaccgggagtgggtcccaggagaacggtgctccagatgctggcctggcctgccctccctgctgcccctgtgtctgccacaccacccggcctggcctggagctcagatgggtgcctgtggggggctatgaggaggtccccagggtcccccgtcgggcctccccgctgcggacctctcgctcccgcccccaccctccaagcatcggtcaccctgccgttgtcctcacatcctaccgctccactgctgagcgcaaactcctgccactcctcaagcctcccaaaccaactcgtgtcaggcaggatgccaccattttcggggaccccccacagccagatcttgatctgctttctgaagatggaatccaaacaggggacagtcctgatgaagctcctcagaatactcctccagcaactgtggaggggagggaagaggaggggctagaggtgctgaaggagcagaattgggagctgcccctgcaggatgaacctctgtaccagacctaccgagcagccgtgctgtcagaggagctgtggggggtgggtgaggatgggagtccttctccagcaaatgctggagatgcacccaccttcccacgaccccctggacctcgcaacaccctgtggcaggagcttccggctgtgcaagccagcggtcttctggataccctcagcccccaggagaggcgcatgcaggagagtcttttcgaggtggtgacgtccgaggcttcctacctgcgctccctgcggctgctgaccgacaccttcgtgctgagccaggcactccgggacacgctcaccccccgtgatcaccacacactcttctccaatgtgcagcgagtccagggagtcagcgagcggtttctagcaacgctcctgtcccgtgtgcgctcttccccccacatcagcgacttgtgtgatgtggtgcatgcccacgctgtggggcctttctcggtgtatgtggattatgtgcggaaccagcagtatcaggaggagacctacagccgcctcatggacaccaacgtgcgcttctccgccgagctgcgccggctgcagagcctccctaagtgtgagcggctcccgctgccgtccttcctgctactgcccttccagcgcatcacccggctgcgcatgctgctgcagaatatcctgcgccagacagaagaggggtccagccgtcaggagaatgcccagaaggccctgggtgctgtcagcaagatcatcgagcgttgcagcgctgaggtggggcgcatgaagcagactgaagagctgatccggctcacccaaaggctgcgcttccacaaagtcaaggccctgcccctggtctcctggtcacggcgcctggaattccagggagagctgactgagttagggtgccggagggggggcgtgctctttgcctcgcgcccccgcttcacccctctttgcctgctgctctttagcgacctgctgctcatcactcagcctaagagtgggcagcggttacaggttctggactatgcccatcgctccctggtccaggcccagcaggttccggatccatctggaccccctaccttccgcctctcccttctcagcaaccaccagggccgccccacccaccgactactccaagcttcttccctatcagacatgcagcgctggctgggagccttcccaaccccaggcccccttccctgctccccagacaccatctatgaggactgtgactgttcccaggaactgtgttcagagtcgtctgcacctgccaagactgaaggacggagtctggagtccagggctgcccccaaacacctgcacaagacccctgaaggttggctgaaggggcttcctggggccttccctgcccagctggtgtgtgaagtcacaggggaacacgaaaggaggaggcaccttcgccagaaccagaggcttctcgaggctgttggatcttcttcaggcacccccaatgcccccccaccctaatgcaggctgaggagggggcacatgttgggagacacctaccagtgtggcacggagagaacaaagcccattcatccattggattcactgtcagtggagatactacctctcgtggcaaccatagagatcgagcttcaggacagagcagccaatgaaaacggccgcctgaacccacagcaataagaatgaatgaggatgccttgaatgtgtggccaatggagacagaggcttagtgcagagcagccaatgggtactgagctggctgagcctatggccaatgagtattcctgctatgctcagggccaaggaagacaaatctaggtcatggcagttgaaaaagggcctcattggagataaagtcgtaggataaaattgggaacaggaatgagcaggaagccaatcagccaaagaaaatggtgatctggacccaagagaccagtagtcaccctgcttgtttctgcagcaatgactggtcctgtcttttgagtctgggaaatactagtttccattcctggatgcttcctgtgccctctcaagccagttcttctcttccagaagaattcagagtatgtgtctcagaaaatctgtgtgtgtacatgtgcatgtgtagatatgtgtgtatatgtatcaggaaaggcattctgctgactgtggtgtgtgtgtggtgattgtgctcctgacccacaaatgactgagtgctccatttcttcctttaccccccatttttcctattattcgctccaagaaagatgctaagtctgagctccagaagagactgtgctgggtgtggcttggcacccaggggatgagagccctgagctttgggtctcttggaggctagggttctgtggcagttgcagggcaatgttatggagcagccaacggcctggcagaggagcccaagggactgaagatggccagtagctgggtcctgaggcccctgaagtctgcagacccttctccttgccccaaacactggcctccataattcctgcctgcagatctcccaacttgaactataatccaccagccagcctcagccttgagctttggaaccacattagatcctgcatctgggtgaagaaacgggagctgtggaccacaggccagccagtgaacctcctgggctttcttgcctttgtcctgatcctctcacagaaacactgggccaaacagtggggagagattggagagcgggtgtggctgcccaaccccatccagagcatctgcttccagatgagccagtgcctcgcatgataccagaggaggcgagggacagagacagcaaggcagacagtggctggcaggggggcccaggcccgggacgaggcctccccttcagctcaggcacagcaacttgcccaggactgacactgtcaccctgactgcaggaggcacagggactccgggagactcagagggcgaagagcactggcatttggcatgtccatgacattggagactcccctagcagggtgcctgacgtgtggggaaccctcagtaaatagtggtgcatttgtattgag

SEQ ID NO: 250861 - DNA, 4094 bp, Artificial Sequence
  derived and/or modified sequence
aggggatgactccagcagagcacctcactcctttgaagagcacagaggaagatgtcagcccagtcccttcctgcagcaacaccccccacgcagaagccccctcggatcatccgcccccgccctccttctcgttccagggctgcccagtccccagggcctccccacaatggctcctctccacaagaactaccccgaaactccaatgatgcaccaaccccaatgtgcacccccatcttctgggagcccccagctgcatccctcaagccccctgctcttttgcccccctcagcttctagagccagcctcgactcccagacttccccagactcaccttccagcacccccacacctagtccagtgtcccggcgctccgcctccccagaacctgctccccggtctccagtccccccacccaagccgtctgggtcaccctgcacgcctctgctccccatggctggagtcctggctcagaatggctctgcctcagctcctggcactgtgcggaggctggctggcaggtttgaagggggtgctgaaggccgggctcaggatgcagatgccccggagccaggtctccaagcgagagcagatgtgaatggggagagagaagctcccctcaccgggagtgggtcccaggagaacggtgctccagatgctggcctggcctgccctccctgctgcccctgtgtctgccacaccacccggcctggcctggagctcagatgggtgcctgtggggggctatgaggaggtccccagggtcccccgtcgggcctccccgctgcggacctctcgctcccgcccccaccctccaagcatcggtcaccctgccgttgtcctcacatcctaccgctccactgctgagcgcaaactcctgccactcctcaagcctcccaaaccaactcgtgtcaggcaggatgccaccattttcggggaccccccacagccagatcttgatctgctttctgaagatggaatccaaacaggggacagtcctgatgaagctcctcagaatactcctccagcaactgtggaggggagggaagaggaggggctagaggtgctgaaggagcagaattgggagctgcccctgcaggatgaacctctgtaccagacctaccgagcagccgtgctgtcagaggagctgtggggggtgggtgaggatgggagtccttctccagcaaatgctggagatgcacccaccttcccacgaccccctggacctcgcaacaccctgtggcaggagcttccggctgtgcaagccagcggtcttctggataccctcagcccccaggagaggcgcatgcaggagagtcttttcgaggtggtgacgtccgaggcttcctacctgcgctccctgcggctgctgaccgacaccttcgtgctgagccaggcactccgggacacgctcaccccccgtgatcaccacacactcttctccaatgtgcagcgagtccagggagtcagcgagcggtttctagcaacgctcctgtcccgtgtgcgctcttccccccacatcagcgacttgtgtgatgtggtgcatgcccacgctgtggggcctttctcggtgtatgtggattatgtgcggaaccagcagtatcaggaggagacctacagccgcctcatggacaccaacgtgcgcttctccgccgagctgcgccggctgcagagcctccctaagtgtgagcggctcccgctgccgtccttcctgctactgcccttccagcgcatcacccggctgcgcatgctgctgcagaatatcctgcgccagacagaagaggggtccagccgtcaggagaatgcccagaaggccctgggtgctgtcagcaagatcatcgagcgttgcagcgctgaggtggggcgcatgaagcagactgaagagctgatccggctcacccaaaggctgcgcttccacaaagtcaaggccctgcccctggtctcctggtcacggcgcctggaattccagggagagctgactgagttagggtgccggagggggggcgtgctctttgcctcgcgcccccgcttcacccctctttgcctgctgctctttagcgacctgctgctcatcactcagcctaagagtgggcagcggttacaggttctggactatgcccatcgctccctggtccaggcccagcaggttccggatccatctggaccccctaccttccgcctctcccttctcagcaaccaccagggccgccccacccaccgactactccaagcttcttccctatcagacatgcagcgctggctgggagccttcccaaccccaggcccccttccctgctccccagacaccatctatgaggactgtgactgttcccaggaactgtgttcagagtcgtctgcacctgccaagactgaaggacggagtctggagtccagggctgcccccaaacacctgcacaagacccctgaaggttggctgaaggggcttcctggggccttccctgcccagctggtgtgtgaagtcacaggggaacacgaaaggaggaggcaccttcgccagaaccagaggcttctcgaggctgttggatcttcttcaggcacccccaatgcccccccaccctaatgcaggctgaggagggggcacatgttgggagacacctaccagtgtggcacggagagaacaaagcccattcatccattggattcactgtcagtggagatactacctctcgtggcaaccatagagatcgagcttcaggacagagcagccaatgaaaacggccgcctgaacccacagcaataagaatgaatgaggatgccttgaatgtgtggccaatggagacagaggcttagtgcagagcagccaatgggtactgagctggctgagcctatggccaatgagtattcctgctatgctcagggccaaggaagacaaatctaggtcatggcagttgaaaaagggcctcattggagataaagtcgtaggataaaattgggaacaggaatgagcaggaagccaatcagccaaagaaaatggtgatctggacccaagagaccagtagtcaccctgcttgtttctgcagcaatgactggtcctgtcttttgagtctgggaaatactagtttccattcctggatgcttcctgtgccctctcaagccagttcttctcttccagaagaattcagagtatgtgtctcagaaaatctgtgtgtgtacatgtgcatgtgtagatatgtgtgtatatgtatcaggaaaggcattctgctgactgtggtgtgtgtgtggtgattgtgctcctgacccacaaatgactgagtgctccatttcttcctttaccccccatttttcctattattcgctccaagaaagatgctaagtctgagctccagaagagactgtgctgggtgtggcttggcacccaggggatgagagccctgagctttgggtctcttggaggctagggttctgtggcagttgcagggcaatgttatggagcagccaacggcctggcagaggagcccaagggactgaagatggccagtagctgggtcctgaggcccctgaagtctgcagacccttctccttgccccaaacactggcctccataattcctgcctgcagatctcccaacttgaactataatccaccagccagcctcagccttgagctttggaaccacattagatcctgcatctgggtgaagaaacgggagctgtggaccacaggccagccagtgaacctcctgggctttcttgcctttgtcctgatcctctcacagaaacactgggccaaacagtggggagagattggagagcgggtgtggctgcccaaccccatccagagcatctgcttccagatgagccagtgcctcgcatgataccagaggaggcgagggacagagacagcaaggcagacagtggctggcaggggggcccaggcccgggacgaggcctccccttcagctcaggcacagcaacttgcccaggactgacactgtcaccctgactgcaggaggcacagggactccgggagactcagagggcgaagagcactggcatttggcatgtccatgacattggagactcccctagcagggtgcctgacgtgtggggaaccctcagtaaatagtggtgcatttgt

SEQ ID NO: 250862 - DNA, 2398 bp, Artificial Sequence
  derived and/or modified sequence
actcagccctgggaggtgactgagagtggaggggattcaagggggatgactccagcagagcacctcactcctttgaagagcacagaggaagatgtcagcccagtcccttcctgcagcaacaccccccacgcagaagccccctcggatcatccgcccccgccctccttctcgttccagggctgcccagtccccagggcctccccacaatggctcctctccacaagaactaccccgaaactccaatgatgcaccaaccccaatgtgcacccccatcttctgggagcccccagctgcatccctcaagccccctgctcttttgcccccctcagaatggctctgcctcagctcctggcactgtgcggaggctggctggcaggtttgaagggggtgctgaaggccgggctcaggatgcagatgccccggagccaggtctccaagcgagagcagatgtgaatggggagagagaagctcccctcaccgggagtgggtcccaggagaacggtgctccaggggacagtcctgatgaagctcctcagaatactcctccagcaactgtggaggggagggaagaggaggggctagaggtgctgaaggagcagaattgggagctgcccctgcaggatgaacctctgtaccagacctaccgagcagccgtgctgtcagaggagctgtggggggtgggtgaggatgggagtccttctccagcaaatgctggagatgcacccaccttcccacgaccccctggacctcgcaacaccctgtggcaggagcttccggctgtgcaagccagcggtcttctggataccctcagcccccaggagaggcgcatgcaggagagtcttttcgaggtggtgacgtccgaggcttcctacctgcgctccctgcggctgctgaccgacaccttcgtgctgagccaggcactccgggacacgctcaccccccgtgatcaccacacactcttctccaatgtgcagcgagtccagggagtcagcgagcggtttctagcaacgctcctgtcccgtgtgcgctcttccccccacatcagcgacttgtgtgatgtggtgcatgcccacgctgtggggcctttctcggtgtatgtggattatgtgcggaaccagcagtatcaggaggagacctacagccgcctcatggacaccaacgtgcgcttctccgccgagctgcgccggctgcagagcctccctaagtgtgagcggctcccgctgccgtccttcctgctactgcccttccagcgcatcacccggctgcgcatgctgctgcagaatatcctgcgccagacagaagaggggtccagccgtcaggagaatgcccagaaggccctgggtgctgtcagcaagatcatcgagcgttgcagcgctgaggtggggcgcatgaagcagactgaagagctgatccggctcacccaaaggctgcgcttccacaaagtcaaggccctgcccctggtctcctggtcacggcgcctggaattccagggagagctgactgagttagggtgccggagggggggcgtgctctttgcctcgcgcccccgcttcacccctctttgcctgctgctctttagcgacctgctgctcatcactcagcctaagagtgggcagcggttacaggttctggactatgcccatcgctccctggtccaggcccagcaggttccggatccatctggaccccctaccttccgcctctcccttctcagcaaccaccagggccgccccacccaccgactactccaagcttcttccctatcagacatgcagcgctggctgggagccttcccaaccccaggcccccttccctgctccccagacaccatctatgaggactgtgactgttcccaggaactgtgttcagagtcgtctgcacctgccaagactgaaggacggagtctggagtccagggctgcccccaaacacctgcacaagacccctgaaggttggctgaaggggcttcctggggccttccctgcccagctggtgtgtgaagtcacaggggaacacgaaaggaggaggcaccttcgccagaaccagaggcttctcgaggctgttggatcttcttcaggcacccccaatgcccccccaccctaatgcaggctgaggagggggcacatgttgggagacacctaccagtgtggcacggagagaacaaagcccattcatccattggattcactgtcagtggagatactacctctcgtggcaaccatagagatcgagcttcaggacagagcagccaatgaaaacggccgcctgaacccacagcaataagaatgaatgaggatgccttgaatgtgtggccaatggagacagaggcttagtgcagagcagccaatgggtactgagctggctgagcctatggccaatgagtattcctgctatgctca

SEQ ID NO: 250863 - protein, 1154 aa, Artificial Sequence
  derived and/or modified sequence
MGLLLMILASAVLGSFLTLLAQFFLLYRRQPEPPADEAARAGEGFRYIKPVPGLLLREYLYGGGRDEEPSGAAPEGGATPTAAPETPAPPTRETCYFLNATILFLFRELRDTALTRRWVTKKIKVEFEELLQTKTAGRLLEGLSLRDVFLGETVPFIKTIRLVRPVVPSATGEPDGPEGEALPAACPEELAFEAEVEYNGGFHLAIDVDLVFGKSAYLFVKLSRVVGRLRLVFTRVPFTHWFFSFVEDPLIDFEVRSQFEGRPMPQLTSIIVNQLKKIIKRKHTLPNYKIRFKPFFPYQTLQGFEEDEEHIHIQQWALTEGRLKVTLLECSRLLIFGSYDREANVHCTLELSSSVWEEKQRSSIKTVELIKGNLQSVGLTLRLVQSTDGYAGHVIIETVAPNSPAAIADLQRGDRLIAIGGVKITSTLQVLKLIKQAGDRVLVYYERPVGQSNQGAVLQDNFGQLEENFLSSSCQSGYEEEAAGLTVDTESRELDSEFEDLASDVRAQNEFKDEAQSLSHSPKRVPTTLSIKPLGAISPVLNRKLAVGSHPLPPKIQSKDGNKPPPLKTSEITDPAQVSKPTQGSAFKPPVPPRPQAKVPLPSADAPNQAEPDVLVEKPEKVVPPPLVDKSAEKQAKNVDAIDDAAAPKQFLAKQEVAKDVTSETSCPTKDSSDDRQTWESSEILYRNKLGKWTRTRASCLFDIEACHRYLNIALWCRDPFKLGGLICLGHVSLKLEDVALGCLATSNTEYLSKLRLEAPSPKAIVTRTALRNLSMQKGFNDKFCYGDITIHFKYLKEGESDHHVVTNVEKEKEPHLVEEVSVLPKEEQFVGQMGLTENKHSFQDTQFQNPTWCDYCKKKVWTKAASQCMFCAYVCHKKCQEKCLAETSVCGATDRRIDRTLKNLRLEGQETLLGLPPRVDAEASKSVNKTTGLTRHIINTSSRLLNLRQVSKTRLSEPGTDLVEPSPKHTPNTSDNEGSDTEVCGPNSPSKRGNSTGIKLVRKEGGLDDSVFIAVKEIGRDLYRGLPTEERIQKLEFMLDKLQNEIDQELEHNNSLVREEKETTDTRKKSLLSAALAKSGERLQALTLLMIHYRAGIEDIETLESLSLDQHSKKISKYTDDTEEDLDNEISQLIDSQPFSSISDDLFGPSESV

SEQ ID NO: 250864 - DNA, 3465 bp, Artificial Sequence
  derived and/or modified sequence
atgggtctgctcctgatgatcctggcctctgcggtgctgggatccttcctgaccctgctcgcacagtttttcttgttgtacaggcggcaacctgagccaccagctgacgaagctgccagagccggcgagggcttccggtatatcaagccagtgccggggttactgttacgcgagtatttatacggggggggcagggatgaggaaccaagcggagccgcaccggagggtggggccacccctaccgccgccccagagacaccagcaccccccactcgtgagacctgttacttcctcaatgctactattctgttcctgtttcgtgagctgcgcgacactgccctgaccagaaggtgggttacaaagaagatcaaggtggaattcgaagagcttctgcaaaccaaaactgcagggcggctcctggaggggttaagtctcagagacgtgtttcttggagagactgtgcctttcatcaagactatcagattagtgaggcctgtcgtgccatcagccactggcgagcccgacggacccgaaggggaggccctacccgcagcctgcccagaggaattagctttcgaggccgaagtcgaatacaacggcgggttccatttggctatcgacgttgacctcgtttttggaaaatccgcgtacctgttcgtgaaacttagccgggtggtgggccggctccggctggtctttacacgcgtgcccttcacacattggtttttttcattcgtcgaggaccctctaatcgattttgaggtgcgcagccaattcgaaggacgaccaatgccacagctcacaagcattattgtgaaccagctgaaaaagattataaagcgaaaacacaccctgcccaattataaaatccggtttaaacctttctttccttatcagaccctgcagggtttcgaagaggatgaagagcacatacatattcaacagtgggcgcttaccgaaggcagactgaaggtgacacttctggagtgctcccgactcctcatatttggaagctatgacagagaggctaatgtgcactgcacactggaactttcttcaagcgtgtgggaggaaaagcagcggagttctattaagaccgtggagctcattaagggtaacttgcagtcagtcggtctaacccttcgcctggtgcagagtacagatggatatgctggacacgtaattatcgagactgtagcccctaacagccctgctgctattgcggatctgcagcgtggcgataggttaattgcgattggaggtgtcaaaatcaccagcaccctgcaggtcttgaagctgataaagcaggccggggaccgagttctcgtctactacgaacggccagtaggccagtctaaccaaggcgcagtgcttcaggacaactttggacagcttgaggaaaattttttatcatcctcttgtcagtccggctacgaagaggaggcagccggcctgaccgtcgatacggaatccagagagctggactctgaatttgaggaccttgcgagtgacgtccgagcacagaatgagtttaaggatgaggcacagtctctgagtcattccccaaaacgagtgccaacaacgcttagtataaaaccattaggtgccatctcacctgtcctaaataggaagctggccgttggatcacatccacttccgccgaaaatccagagcaaggatggtaacaagccgcctccattgaaaacatctgaaattaccgacccagctcaggttagtaagcccactcagggctcagccttcaagcctcctgtaccaccccgaccacaggctaaggttccactgccgagcgcagatgccccaaatcaggccgagccagacgtgctagtggagaagccagagaaggtcgtacccccccccctggtggacaagagtgctgaaaaacaggctaagaatgtggacgcaatcgatgacgccgcagcccccaaacagttcctcgcaaaacaggaggtagctaaagatgtgacttctgaaacatcctgccctacaaaggacagtagcgacgaccgccagacctgggagtccagcgaaatcttataccggaataagctcggcaagtggaccaggacacgtgcctcctgcctgttcgatattgaggcttgtcacagatatctcaacatagccctgtggtgccgagacccgttcaagcttggcgggctcatctgtctgggccatgtatctctcaaactcgaagatgtggctttaggctgtctggctacctccaataccgaatacctgagtaagctgcgactcgaagctccctccccaaaggccatcgtcacccggacagccctccggaatctctcaatgcagaagggcttcaacgataagttctgctatggagatattaccatccacttcaaatacctcaaagagggcgaatctgaccaccatgttgtgacgaacgtcgagaaagaaaaggaaccccatttggtggaggaagtttctgttctgccaaaggaggagcagtttgtggggcaaatgggtctcactgaaaacaaacactctttccaggacacgcagtttcagaatcctacctggtgcgattactgcaaaaagaaagtgtggaccaaagccgcctctcaatgcatgttctgcgcatatgtatgccataagaagtgtcaggaaaaatgcttagccgagaccagcgtgtgcggcgccaccgaccgacggattgataggacactgaaaaatctccgcttagagggtcaggagacgctgcttggcctgccaccccgggtggatgccgaggcgagcaagagtgtgaataagacaacagggttaactcgacatattataaacacatcctccagactcctcaaccttcgccaggtctcaaagacacggctgtctgaaccaggaacagatctcgtggagccatctccgaaacacacccccaatacatcagacaacgagggctccgacaccgaagtttgcgggccaaactccccctctaaaaggggcaacagcactggcatcaaactcgtacggaaagagggtggattagacgactcagtgttcatcgctgtgaaggagatcggacgggatctgtacagagggttgcctaccgaagagcgtatccagaaacttgagttcatgctggacaagctacaaaatgagatcgaccaagagcttgaacacaacaatagccttgtgcgggaagagaaagagaccaccgatacccggaaaaagtctttactgtccgcagccttagcaaaatctggcgaaagactgcaagcgctaaccctgttgatgatccattaccgcgcaggcatcgaggatatcgagacactggaatcattgagtctggaccagcatagcaaaaagatttcaaaatatacagatgacactgaagaagacctggacaatgaaatctcccagctgattgatagccagccgttctcatctatctctgacgacctgtttggaccctcagagtccgtgtag

SEQ ID NO: 250865 - DNA, 3465 bp, Artificial Sequence
  derived and/or modified sequence
atgggcctgctgctgatgatcctggccagcgctgtgctgggcagcttcctgaccctgctggcccagttcttcctgctgtaccgccggcagcctgagcccccagcagatgaggccgcccgggccggggagggcttccgctacatcaagcctgtgcccggcctgctgctgcgggagtacctgtatggaggcggcagagatgaggagcccagcggggccgcccctgagggcggggccacccccacagctgcccctgagaccccagccccacccacccgggagacctgctacttcctgaatgccaccatcctcttcctgttccgggagctgcgggacacagccctgacccggcgctgggtgaccaagaagatcaaggtggagtttgaggagctgctgcagaccaagacagctggccgcctgctggagggcctgagcctgagagatgtgttcctgggggagaccgtgcccttcatcaagaccatccggctggtgcggcctgtggtgcccagcgccactggagagccagatggccctgagggggaggccctgcctgctgcctgcccagaggagctggcctttgaggccgaggtggagtacaatggaggcttccacctggccattgatgtggacctggtgtttgggaagagcgcctacctgtttgtgaagctgagccgggtggtgggccgcctgcggctggtgttcaccagggtgcccttcacccactggttcttctcctttgtggaggaccccctgattgactttgaggtgcgcagccagtttgagggccggcccatgccccagctgaccagcatcatcgtgaaccagctgaagaagatcatcaagaggaagcacaccctgcccaactacaagatccgcttcaagcccttcttcccctaccagaccctgcagggctttgaggaggatgaggagcacatccacatccagcagtgggccctgacagagggccgcctgaaggtgaccctgctggagtgcagccggctgctgatcttcggcagctatgaccgggaggccaacgtgcactgcaccctggagctgagcagctctgtgtgggaggagaagcagaggagcagcatcaagacagtggagctgatcaagggcaacctgcagagcgtgggcctgaccctgcggctggtgcagagcacagatggctacgccggccacgtgatcatcgagaccgtggcccccaacagccctgctgccatcgctgacctgcagagaggagaccggctgattgccatcggcggcgtgaagatcaccagcaccctgcaggtgctgaagctgatcaagcaggccggggacagagtgctggtgtactatgaaagacctgtgggccagagcaaccagggcgctgtgctgcaggacaactttggccagctggaggagaacttcctgagcagcagctgccagagcggctatgaggaggaggccgccggcctgactgtggacacagagagccgggagctggacagcgagtttgaggacctggccagtgatgtgcgggcccagaatgagttcaaggatgaggcccagagcctgagccacagccccaagagggtgcccaccaccctgagcatcaagcccctgggcgccatcagccctgtgctgaacaggaagctggccgtgggcagccaccccctgccccccaagatccagagcaaggatggcaacaagcccccacccctgaagaccagcgagatcacagatcctgcccaggtgtccaagcccacccagggcagcgccttcaagccccctgtgcccccccggccccaggccaaggtgcccctgcccagcgcagatgcccccaaccaggccgagccagatgtgctggtggagaagccagagaaggtggtgcccccacccctggtggacaagtctgctgagaagcaggccaagaatgtggatgccattgatgatgctgctgcccccaagcagttcctggccaagcaggaggtggccaaggatgtgaccagcgagaccagctgccccaccaaggacagcagtgatgaccggcagacctgggagagcagcgagatcctgtacagaaacaagctgggcaagtggaccaggacccgggccagctgcctgtttgacatcgaggcctgccaccgctacctgaacatcgccctgtggtgccgggaccccttcaagctgggcggcctcatctgcctgggccacgtgtccctgaagctggaggatgtggccctgggctgcctggccaccagcaacacagagtacctgagcaagctgcggctggaggcccccagccccaaggccatcgtgaccaggacagccctgaggaacctgtccatgcagaagggcttcaatgacaagttctgctacggggacatcaccatccacttcaagtacctgaaggagggggagagtgaccaccacgtggtgaccaacgtggagaaggagaaggagccccacctggtggaggaggtgtctgtgctgcccaaggaggagcagtttgtgggccagatgggcctgacagagaacaagcacagcttccaggacacccagttccagaaccccacctggtgtgactactgcaagaagaaggtgtggaccaaggccgccagccagtgcatgttctgtgcctacgtgtgccacaagaagtgccaggagaagtgcctggccgagacctctgtgtgtggggccacagacagaagaattgacaggaccctgaagaacctgcggctggagggccaggagaccctgctgggcctgcccccccgggtggatgctgaggccagcaagtctgtgaacaagaccaccggcctgaccaggcacatcatcaacaccagcagccggctgctgaacctgcggcaggtgtccaagacccggctgtctgagcctggaacagacctggtggagcccagccccaagcacacccccaacaccagtgacaatgaaggaagtgacacagaggtgtgtggccccaacagccccagcaagaggggcaacagcacaggcatcaagctggtgaggaaggagggcggcctggatgattctgtgttcatcgctgtgaaggagatcggccgggacctgtaccggggcctgcccacagaggagcgcatccagaagctggagttcatgctggacaagctgcagaatgaaattgaccaggagctggagcacaacaacagcctggtgcgggaggagaaggagaccacagacaccaggaagaagagcctgctgtctgctgccctggccaagagcggggagcggctgcaggccctgaccctgctgatgatccactaccgggccggcattgaagatattgagaccctggagagcctgagcctggaccagcacagcaagaagatcagcaagtacacagatgacacagaggaggacctggacaatgagatcagccagctgattgacagccagcccttcagcagcatcagtgatgacctgtttggccccagcgagagcgtgtag

SEQ ID NO: 250866 - DNA, 3465 bp, Artificial Sequence
  derived and/or modified sequence
atgggcctgctgctgatgatcctggccagcgccgtgctgggcagctttctgaccctgctcgctcagtttttcctgctgtacaggaggcagccggagccgcctgcggacgaggccgcccgagcgggcgaaggcttcagatacatcaaaccggttcccggtctgttgttaagggaatacctgtacggcggaggacgggatgaggaaccctctggcgccgcccctgaaggcggcgctaccccgactgcagctccagagactcctgctccgccgacccgcgaaacttgttatttcctaaacgcaacaatcctcttcctgttcagggagctgcgggatacggccctcactagaaggtgggttactaagaagattaaggtagagtttgaggaactcctacagactaagaccgcagggagactcttggagggcctgagcctgcgggacgtgttcttgggcgagactgtgcccttcatcaagaccattcggctcgttcgacctgtggtccctagcgccaccggggagccggatggtcctgagggggaggccttgcctgccgcttgcccagaagagcttgcctttgaagctgaggtcgagtacaacggcggattccatttggcaatcgacgtggacttggtcttcgggaaatccgcttacctctttgtgaagctgtctagagtggttggtaggctgcggcttgtctttacgcgggtacctttcacccattggtttttttcctttgtggaggatcctcttatcgattttgaagtcagatctcagttcgaggggagaccgatgcctcagctaacatccataatcgtgaaccagctcaagaaaatcattaagcggaagcatactttgccaaattataagattcggtttaaacccttctttccctaccagaccttgcaaggcttcgaggaggatgaagaacatattcacattcagcagtgggcactgacggaaggccgtctcaaagtgaccctgcttgaatgttctaggctactgattttcggatcttacgaccgtgaagccaacgtccactgtaccctcgaactgagcagttctgtgtgggaggaaaaacagaggtcctctatcaagacagttgaactgatcaaggggaacctgcagagcgtgggcctaactctacgactggtccagtccaccgatggttatgccgggcatgtcattatcgagaccgtcgcccctaattcacctgcggctattgcagatttgcagcggggcgacaggctaatcgccattggtggggttaaaattacttcgactctgcaggtgctgaaactgatcaagcaggccggtgacagagttctggtttattatgaacggcctgtgggacagtcgaatcagggcgccgtcctgcaagacaattttggacagctggaggagaactttctctctagttcctgccagtcaggctacgaggaggaggccgccggtttgaccgtcgacactgaatcgagagagctagattctgagttcgaagatctcgccagcgatgtgcgagcacaaaacgagtttaaggacgaggcacagtctctcagtcacagtcccaagcgggtaccaaccaccctcagtatcaagccgttaggcgctatttcccctgtacttaaccgaaagctcgctgttggttcacatcccctccctccaaagattcaatccaaggacgggaacaagcccccccctcttaagacttctgagatcaccgatcccgcccaggtctccaaacctacacagggcagtgctttcaagccacccgtgccgccaagaccccaggctaaggtgcccctgccaagtgctgacgctcctaaccaggccgaacccgatgtcctcgtcgagaagcccgagaaggtcgtcccaccaccgctcgttgataagtctgctgagaagcaggccaaaaatgtcgacgcaattgacgatgccgcagctcccaagcagttcctggcaaaacaagaggtggcaaaggatgttaccagcgagacgtcttgtcccactaaggacagcagcgatgaccgccagacctgggaatcatccgagattctctataggaataaactggggaaatggacacgcacgagagctagttgcctgtttgacattgaggcatgtcatagatacctcaatatcgcactgtggtgtagagatccatttaagctgggagggctgatttgtcttggacatgtaagcctgaaattggaagatgtcgctctgggatgcctcgctacaagcaatactgagtatctctctaagctgcgtctggaggctccttcacccaaagcgatagttactcgaactgccctccgcaacttgagtatgcagaaaggtttcaatgacaaattttgttatggagatataacaatccacttcaagtatttaaaggagggtgaaagtgatcaccacgtagtcacaaatgtagaaaaggagaaggaaccacaccttgttgaggaggtcagcgttcttccaaaggaggagcagtttgtgggccagatgggcttaacagaaaacaagcactcatttcaggacacgcagttccagaacccaacctggtgcgattattgcaaaaaaaaagtgtggactaaagccgcatcccaatgcatgttctgcgcctacgtatgccacaagaaatgccaggagaagtgcctcgccgaaacgtcagtgtgcggcgccacagaccgtcgaatagataggactcttaagaatttacggcttgagggacaggagactcttcttggcctccctcccagagttgatgccgaggcttctaagagcgtgaacaaaaccaccggcttgactaggcacatcattaatacctccagtaggctcctgaacctccggcaggtgtctaaaaccaggctgagtgagcctggtactgatctcgtggaaccttcccctaaacacacgcccaacaccagcgacaatgaaggctctgatactgaggtgtgcggccccaattctccttctaagcggggtaacagcactggaattaagctggtccgcaaggagggaggcctcgacgattccgtcttcattgcagtgaaggagatcggtcgagatctgtacaggggcctgcctaccgaggaaaggattcaaaagctggaattcatgcttgacaaactgcagaacgagattgaccaggaattagaacacaataatagtctggtgcgggaggagaaggaaacaacagatacacgcaaaaagtctctgctgagcgccgccctcgctaagtccggggagagactccaggccctgacattgctgatgatccactacagagccggcatcgaggatattgagacgcttgaaagcctttctctggaccagcacagcaagaagatctccaagtacaccgatgacactgaagaggacctggacaatgagatcagccagctgatcgactcccagccgttttcatccattagcgacgacctgtttggaccatcagagtctgtttag

SEQ ID NO: 250867 - DNA, 6484 bp, Artificial Sequence
  derived and/or modified sequence
ggtcccggccccgctgccgccgccgccacaccggcccttcgggagcgtctgaggaggcgcgggccgctgcgggctcgggcgccgcagcgcgccggcccgagcccctggacgaggcccacggagccgctcgccccgacccagccgcccgatgtcctcaaaatggaggcagcgggggcggcggcgtgaagaaagcggcgctgtgggcgcgggagtaggggcccgggcggaggcggtggcgggatggggctgctgctcatgatcctggcgtcggccgtgctgggttccttcctcacgctcctcgcccagttcttcctgctgtaccgcagacagcccgagccgccggcggacgaggccgcccgcgcgggcgagggcttccgctacatcaagccagtgccgggcctgctcctaagggagtacctttatggcggcggccgggatgaggagccctccggagcggcccctgagggcggcgcgacccccaccgcggcccccgagacccccgccccgccgacgcgggagacttgctacttcctcaacgccaccatcctattcctgttccgggagttgcgggacaccgcgctgacccgccgctgggtcaccaagaagatcaaggtggagttcgaggagctgctgcagaccaagacggccgggcgcctgctggaggggctgagcctgcgggacgtgttcctgggcgagacggtgcccttcatcaagaccatccggctcgtgcggccagtcgtgccctcggccaccggggagcccgatggccctgaaggggaggcgctgcccgccgcctgccccgaggagctggccttcgaggcggaggtggagtacaacgggggcttccacctggccatcgacgtggacctggtcttcggcaagtccgcctacttgtttgtcaagctgtcccgcgtggtgggaaggctgcgcttggtctttacgcgcgtgcccttcacccactggttcttctccttcgtggaagacccgctgatcgacttcgaggtgcgctcccagtttgaagggcggcccatgccccagctcacctccatcatcgtcaaccagctcaagaagatcatcaagcgcaagcacaccctaccgaattacaagatcaggtttaagccgttttttccataccagaccttgcaaggatttgaagaagatgaagagcatatccatatacaacaatgggcacttactgaaggccgtcttaaagttacgttgttagaatgtagcaggttactcatttttggatcctatgacagagaggcaaatgttcattgcacacttgagttaagcagtagtgtttgggaagaaaaacagaggagttctattaagacggttgaattaataaaaggaaatttacaaagtgttggacttacacttcgtcttgtccagtcaactgatgggtatgctgggcacgtcatcattgaaactgtggctccaaactcgcctgctgcaattgcagatcttcagcggggagatcgacttatcgccattggaggtgtgaaaatcacatcaacactgcaagtgttgaagcttatcaagcaggctggtgaccgagtcctggtgtactatgaaaggcctgttggccagagtaatcaaggtgcagtgctgcaagataactttggccagttggaagaaaactttttgtcaagctcatgccaatcgggttatgaagaggaagctgccgggttgacagtagatactgaaagtagagagctggattctgaatttgaagacttggcaagtgatgtcagagcacaaaatgagttcaaagatgaggcacaatcattaagtcatagtcccaaacgtgttccaacaacactttctattaaaccccttggagctatatcaccagttttaaaccgtaaattagctgtaggaagtcacccactaccaccgaaaattcagtccaaagatggaaataaacctccacccctaaaaacttctgagataacagacccagcacaagtgtcaaaaccaacccaaggatctgctttcaaaccacctgtgccaccacgaccacaagcgaaagttcctttgccttccgccgatgctccaaatcaggcagaaccagatgttctcgttgaaaagccagagaaggtggtgccacctcctcttgtagataaatctgctgaaaagcaagcaaaaaatgtggatgccatagacgatgcagctgcacctaagcaatttttagcaaagcaagaagtggccaaagatgtcacttcagaaacttcctgccctactaaggacagttcggacgaccgtcaaacatgggaatcatcagaaattctttatcgtaataagctaggaaaatggacaagaaccagagcatcctgtttgtttgacatagaagcctgtcacaggtacttaaacattgcattgtggtgcagggatcctttcaagttgggaggtctcatctgtttggggcatgttagtttaaaacttgaagatgtggctttaggatgcctagctacatcaaacacggaatacctttccaaattgagactggaagccccctcacctaaggctatagtcactagaaccgcactacgcaatctgagtatgcaaaagggattcaatgacaaattttgctatggtgacattactattcacttcaaatatttgaaagaaggagaatcagaccaccatgtagttactaacgtagaaaaagaaaaagaaccccatttggttgaagaagtttctgttctccctaaagaggagcaatttgttggacagatgggtttaacagaaaacaaacacagttttcaggatactcagttccagaacccaacatggtgtgactactgtaagaaaaaagtttggactaaagcagcttcccagtgtatgttttgtgcttatgtttgccataaaaaatgtcaagaaaagtgtctagctgagacttctgtttgtggagcaactgataggcgaatagacaggacactgaaaaaccttaggctggaaggacaggaaaccctcttaggcctgcctcctcgtgttgatgctgaagctagcaagtcagtcaataaaacaacaggtttgacaaggcatattatcaatactagttctcgtttattaaatttgcgtcaagtctctaaaactcgcctttctgaaccaggaaccgatctcgtagaaccttcaccaaaacacacacccaacacgtcagacaacgaaggcagtgacacggaggtctgtggtccaaacagtccttctaaacggggaaacagcacaggaataaagttagtgagaaaagagggtggtctggatgacagtgttttcattgcagttaaagaaattggtcgtgatctgtacaggggcttgcctacagaggaaaggatccagaaactagagttcatgttggataagctacagaatgaaattgatcaggagttggaacacaataattcccttgttagagaagaaaaagagacaactgatacaaggaaaaaatcacttctttctgctgccttagctaaatcaggtgaaaggctacaagctctaacacttcttatgattcactacagagcaggcattgaagatatagaaactttagaaagtctgtctttagaccagcactccaaaaaaataagcaagtacacagatgatacagaagaagaccttgataatgaaataagccaactaatagactctcagccattcagcagcatatcagatgacttatttggcccatccgagtctgtgtagcagacaggtctatttaagctttcaaatgaacagggtaaagttgcatctaaagtaccacagatacaaccatgtttaaatcctcgtatgcactctggcctgcttctccagttacttgcttgtgtaagaacaaaaatgagaaaggttgttttccagtaaaaacatgaccagcttactaattggttgttttggattgcatttatagctatgcttttttgggtttatactgggaatttatttttactaaattatttaacttttctaattatgtaattatgtaagctagcttttcatgtttatgtatgtatggtgtccccttgtgttatttttcttcctcttggtttttgaattagtgttaaatagaatactgtctagattcttaaaatattttcatttccatcatggttataacaaatttgctgcatgcccaaactgacaacagcaatcactgagggaacaggttttgaatctttcttttgtgttatgaagtttatcgtctctacttgcttgagatttttgttattttgggggtttgggggtgctttttgttttgtttttgccaaatgtaacatgaaagcagatgctgcagctttagtctgttatgctgatttagtaaaaaaaaattttttacatatattgcttgctttcgatgcttctgtgaaatttttttctaaagcttttgtgcagctgtatggtaaaaatatggtgattaatttgaagagcttacattgaaagacaatgtaataggaaataaatgtagattgcagttggtcaagaattttgtagagaggataacaagacttaattactgaaaaacagtaacatagcattttgaaatataatcttttaaaatattgatgctttccttttaaatggaaatttaaattttataattaaaagtttaaacatttatgataattttcctcatcagttctcccataggaaataaagcatgtgaaagggtatttaaagttttggaggactctttttaaaatgactgtgttgataactagtttgggctggttttgttttagaaaaaacattttcatgtaggagtattctgtgaaggaaaggaatcatgcaaaatatactttttgctttggcgtcttacagttgtaaaggaatggtgatcattctgaatacttctgtagtgagtattcattaagaaaagaatgacaaaaatagtattcatacataggaattgggaccagttctctgaaaatgaagatatactcacactgggtccattttacgggtcccagtaacatttgactgagggaaaacaagtaagctcgactgttgttggggtaccttaatggtttcggtctgttatatacctataaaatagacaagtatatgtttgtccctttgtaggtaactgctatgatgattgctatatagtgaaactgacatgagtttaaaactagatggagcagcttttattgctggcaggaaaaagcatggtgtaatattaaggactggggcccaggtctagactccaggactccataaaagagtttaagttcaagcccttccattaatgaactgtgtaagcataggcagttacaaaaggacccatctctaaaatgggaataataatactttacctccctcacagtattgttgtgagggaaacaatagcataactgcaaaagtgctttgaacagtaaaaagatatacaagtaaaaggcattatttatatgagtaagaaagacatttttgaggggagaaaagttattccactttaaaaatcaatagccaagtctcatgccttttgttactttagtaagcgaaaatttcaggtactaaatacctttcttagccaagtttataacaaaaacatctcagtatacttcattacttatttaagcgtgatgtcttttttttttttttttttttttttttttttttttttttttgagacagagtctcgctgtctcccaggctggagtgcagtggcatgatctcggctcactgcaagctccgcctcccaggttcacgccattctcctgcctcagcctccggagtagctgggagtacaggcgcggctaattttttgtatttttagtagagacggggtttcaccatgttagccaggatggtctcgatctcctgacctcgtgatccacctgcctcggcctcccaaagtgctgggattacaggcgtgagccaccacgcccggccacgtgatcttattttaaaagaacactgctatagaagaatttacacaccaaattccctgaaagctaaagtattgttccataacttacacttgaggcaatctgctcagtgtgtaaccactttataaaaaataacttaccattgataacctggaaggtggactacttgtaagtagctggtgtttattgattaaaccatggaagttttcatgatacccaagcatgttgctgaaactgatgcatttgaaagagctgttgaaataatgcaaaactttggttttataagaatctactcatgttttaaaagtatttaactctgtagaccacaattatagaaagctcagtaatgctgctaatgacatttgtaaactatatctgtaatgtagtgcaatatttttatatttcactgggagaggcagtagagacatcatagttgtactttagtgcaagtgggggaacactccaaatagcctagagtatagtaaggtacaaagcttcaatgaaaaaagctgtattatattacattactgatgtaatcttgctgccatgctatgtatcaatagctaaaaaataataataaagactaccacagaaaacaagaa

SEQ ID NO: 250868 - DNA, 3465 bp, Artificial Sequence
  derived and/or modified sequence
atgggactgctcttgatgatcctagcctcagccgtgttggggtcattcctgactctgctggctcagttttttttattatataggcggcagccggagccacctgcagatgaagctgctagggccggagagggattccggtacatcaaacctgtgcccggactgcttttgcgggagtatctgtacggaggcggtcgggatgaggagcccagcggtgccgctccagaaggtggggctacccccaccgccgctcccgagacaccagctccccctactcgcgaaacctgttacttcctgaatgcaaccattctcttcctgtttagagaacttagagacactgctcttactagacggtgggtcactaaaaagattaaggtggagttcgaggaacttctgcagaccaagacggcaggaagacttctcgagggactgagcctccgggacgtgtttttaggggagaccgtgccctttatcaagactatcaggttggtgcggcctgtagtccctagtgcaacgggcgagccggatggaccagagggtgaggccttacccgcagcttgccccgaggagctagcttttgaggccgaggtagagtacaatgggggtttccatctggcaatcgatgttgacttggtgttcggaaagtccgcctacttgttcgtaaaactgtctcgcgtcgtaggacgtttgaggctcgtctttaccagggtcccctttacacactggttcttctcatttgtagaagaccctctgattgacttcgaggtgaggtcacagttcgagggcagaccgatgccacaactgacaagcatcatcgtgaaccagttaaaaaaaattattaagaggaagcacacgctgccgaactataaaatcagatttaagcctttcttcccatatcagaccctgcagggattcgaggaagacgaggagcatattcacatccaacagtgggcgctgacagagggacgattaaaggtaacgctcctggagtgcagtcggctgttaatatttggtagctacgatcgtgaggcaaacgtgcactgcacacttgagctgtcatctagcgtttgggaggagaagcagcgcagcagtatcaaaacagtcgaacttatcaagggcaatttacagtccgtaggtcttaccctacgactggtccagtccactgatggatatgccggtcacgtgattatagaaaccgtcgccccaaactctccggctgccatcgcagatctccagcgaggggataggcttatcgctattggcggtgtgaagattacatccaccttacaagtgctgaagctgataaaacaggcgggtgacagggttctggtgtactatgaaaggccggtggggcagtctaaccagggcgctgtcctgcaggacaattttggccagctcgaggagaatttcctctcatcctcctgccagtccggctacgaggaggaggctgcgggtctgaccgtcgacacagaaagtagagagttggacagtgaatttgaagacctggctagtgatgtgcgcgctcagaatgaatttaaggatgaggctcaaagcctgtctcactcccccaagcgcgtgcctaccacactgagtatcaagcctctgggggctattagtcctgttctgaacagaaaacttgctgtgggcagtcaccccctgccgccaaaaatccagtctaaagacgggaataaaccacctcccctcaaaacatctgagattactgatcccgctcaagtgagcaaacccacacagggttcagccttcaagccccctgtaccgcctcgaccccaagcgaaagtacccctaccatccgccgatgcccctaaccaggcggagcccgacgtcttagtagagaaacccgagaaagttgtgcctccacctctcgtcgataagagcgctgagaagcaggccaaaaacgttgacgccatcgacgacgccgcagctcccaaacaatttctggctaaacaggaagttgcgaaggacgtgacgtcagaaaccagctgccccaccaaagatagctccgacgacaggcaaacatgggaaagcagcgagatcctgtatcgcaataaactaggaaaatggactcggaccagagccagctgtttatttgacatcgaggcttgccaccgctacctgaacatcgcattgtggtgtcgagatccatttaaacttggtgggcttatatgcttgggccacgtgtctttgaagctggaggatgtagctttggggtgtctggcaacttccaacaccgagtatctgtcaaagttaagactggaggcgccatctccaaaagccatagttacaagaacggctctgcgtaatttatctatgcaaaagggcttcaacgacaaattttgttacggcgatatcacaatccattttaagtacctcaaagagggagagtcagatcaccacgtcgttactaatgtggagaaggagaaggaaccacatctggtggaagaggtgtcggtgctcccaaaggaggaacaattcgtgggccagatgggactaactgaaaataagcattcgtttcaggacacccagtttcaaaatcctacctggtgcgactattgtaaaaaaaaagtttggaccaaagcagcctcacagtgtatgttctgtgcctatgtttgccataagaaatgtcaagagaagtgccttgctgagacgagcgtctgcggcgctaccgacagaaggattgacaggaccctgaaaaatctccgcttggagggacaggagacccttctgggtttacctcccagagtggatgccgaagcgtcaaaaagtgtgaacaagaccaccggcctgacccgtcacatcataaacacctcctctcgactgctgaacctcagacaagtttccaaaacccggctaagtgagccaggaactgatctggttgagccctcccctaagcatacacccaatacttcagataacgaaggcagcgatacagaagtgtgcggccctaactctccctccaagcggggaaatagcacgggcattaagctggttcgtaaggaggggggactcgatgactctgtgtttatagctgtgaaggaaatcgggagggacttataccgaggactccctaccgaggagagaatccagaaacttgagttcatgttggacaagttgcaaaacgagatcgatcaagaactcgaacacaataatagcctggtgcgagaagagaaggaaaccaccgacacccgaaagaagagcctcttaagtgcagctctggctaaatcaggcgagaggctgcaggctttaacactgctgatgatccattatagggctggcatcgaggacatcgagaccttagaaagcctttctctggaccagcatagtaagaagattagcaaatatactgacgacaccgaggaggacctggacaatgagatttcccaattgatcgattcccagcccttctcaagtatttctgacgacctttttggcccttcagagtccgtctag

SEQ ID NO: 250869 - DNA, 3465 bp, Artificial Sequence
  derived and/or modified sequence
atgggcctgctgctgatgatcctggccagcgccgtgctgggcagcttcctgaccctgctggcccagttcttcctgctgtacagaagacagcccgagccccccgccgacgaggccgccagagccggcgagggcttcagatacatcaagcccgtgcccggcctgctgctgagagagtacctgtacggcggcggcagagacgaggagcccagcggcgccgcccccgagggcggcgccacccccaccgccgcccccgagacccccgccccccccaccagagagacctgctacttcctgaacgccaccatcctgttcctgttcagagagctgagagacaccgccctgaccagaagatgggtgaccaagaagatcaaggtggagttcgaggagctgctgcagaccaagaccgccggcagactgctggagggcctgagcctgagagacgtgttcctgggcgagaccgtgcccttcatcaagaccatcagactggtgagacccgtggtgcccagcgccaccggcgagcccgacggccccgagggcgaggccctgcccgccgcctgccccgaggagctggccttcgaggccgaggtggagtacaacggcggcttccacctggccatcgacgtggacctggtgttcggcaagagcgcctacctgttcgtgaagctgagcagagtggtgggcagactgagactggtgttcaccagagtgcccttcacccactggttcttcagcttcgtggaggaccccctgatcgacttcgaggtgagaagccagttcgagggcagacccatgccccagctgaccagcatcatcgtgaaccagctgaagaagatcatcaagagaaagcacaccctgcccaactacaagatcagattcaagcccttcttcccctaccagaccctgcagggcttcgaggaggacgaggagcacatccacatccagcagtgggccctgaccgagggcagactgaaggtgaccctgctggagtgcagcagactgctgatcttcggcagctacgacagagaggccaacgtgcactgcaccctggagctgagcagcagcgtgtgggaggagaagcagagaagcagcatcaagaccgtggagctgatcaagggcaacctgcagagcgtgggcctgaccctgagactggtgcagagcaccgacggctacgccggccacgtgatcatcgagaccgtggcccccaacagccccgccgccatcgccgacctgcagagaggcgacagactgatcgccatcggcggcgtgaagatcaccagcaccctgcaggtgctgaagctgatcaagcaggccggcgacagagtgctggtgtactacgagagacccgtgggccagagcaaccagggcgccgtgctgcaggacaacttcggccagctggaggagaacttcctgagcagcagctgccagagcggctacgaggaggaggccgccggcctgaccgtggacaccgagagcagagagctggacagcgagttcgaggacctggccagcgacgtgagagcccagaacgagttcaaggacgaggcccagagcctgagccacagccccaagagagtgcccaccaccctgagcatcaagcccctgggcgccatcagccccgtgctgaacagaaagctggccgtgggcagccaccccctgccccccaagatccagagcaaggacggcaacaagcccccccccctgaagaccagcgagatcaccgaccccgcccaggtgagcaagcccacccagggcagcgccttcaagccccccgtgccccccagaccccaggccaaggtgcccctgcccagcgccgacgcccccaaccaggccgagcccgacgtgctggtggagaagcccgagaaggtggtgcccccccccctggtggacaagagcgccgagaagcaggccaagaacgtggacgccatcgacgacgccgccgcccccaagcagttcctggccaagcaggaggtggccaaggacgtgaccagcgagaccagctgccccaccaaggacagcagcgacgacagacagacctgggagagcagcgagatcctgtacagaaacaagctgggcaagtggaccagaaccagagccagctgcctgttcgacatcgaggcctgccacagatacctgaacatcgccctgtggtgcagagaccccttcaagctgggcggcctgatctgcctgggccacgtgagcctgaagctggaggacgtggccctgggctgcctggccaccagcaacaccgagtacctgagcaagctgagactggaggcccccagccccaaggccatcgtgaccagaaccgccctgagaaacctgagcatgcagaagggcttcaacgacaagttctgctacggcgacatcaccatccacttcaagtacctgaaggagggcgagagcgaccaccacgtggtgaccaacgtggagaaggagaaggagccccacctggtggaggaggtgagcgtgctgcccaaggaggagcagttcgtgggccagatgggcctgaccgagaacaagcacagcttccaggacacccagttccagaaccccacctggtgcgactactgcaagaagaaggtgtggaccaaggccgccagccagtgcatgttctgcgcctacgtgtgccacaagaagtgccaggagaagtgcctggccgagaccagcgtgtgcggcgccaccgacagaagaatcgacagaaccctgaagaacctgagactggagggccaggagaccctgctgggcctgccccccagagtggacgccgaggccagcaagagcgtgaacaagaccaccggcctgaccagacacatcatcaacaccagcagcagactgctgaacctgagacaggtgagcaagaccagactgagcgagcccggcaccgacctggtggagcccagccccaagcacacccccaacaccagcgacaacgagggcagcgacaccgaggtgtgcggccccaacagccccagcaagagaggcaacagcaccggcatcaagctggtgagaaaggagggcggcctggacgacagcgtgttcatcgccgtgaaggagatcggcagagacctgtacagaggcctgcccaccgaggagagaatccagaagctggagttcatgctggacaagctgcagaacgagatcgaccaggagctggagcacaacaacagcctggtgagagaggagaaggagaccaccgacaccagaaagaagagcctgctgagcgccgccctggccaagagcggcgagagactgcaggccctgaccctgctgatgatccactacagagccggcatcgaggacatcgagaccctggagagcctgagcctggaccagcacagcaagaagatcagcaagtacaccgacgacaccgaggaggacctggacaacgagatcagccagctgatcgacagccagcccttcagcagcatcagcgacgacctgttcggccccagcgagagcgtgtag

SEQ ID NO: 250870 - protein, 155 aa, Artificial Sequence
  derived and/or modified sequence
MATRNPPPQDYESDDDSYEVLDLTEYARRHQWWNRVFGHSSGPMVEKYSVATQIVMGGVTGWCAGFLFQKVGKLAATAVGGGFLLLQIASHSGYVQIDWKRVEKDVNKAKRQIKKRANKAAPEINNLIEEATEFIKQNIVISSGFVGGFLLGLAS

SEQ ID NO: 250871 - DNA, 468 bp, Artificial Sequence
  derived and/or modified sequence
atggccaccagaaacccccccccccaggactacgagagcgacgacgacagctacgaggtgctggacctgaccgagtacgccagaagacaccagtggtggaacagagtgttcggccacagcagcggccccatggtggagaagtacagcgtggccacccagatcgtgatgggcggcgtgaccggctggtgcgccggcttcctgttccagaaggtgggcaagctggccgccaccgccgtgggcggcggcttcctgctgctgcagatcgccagccacagcggctacgtgcagatcgactggaagagagtggagaaggacgtgaacaaggccaagagacagatcaagaagagagccaacaaggccgcccccgagatcaacaacctgatcgaggaggccaccgagttcatcaagcagaacatcgtgatcagcagcggcttcgtgggcggcttcctgctgggcctggccagctag

SEQ ID NO: 250872 - DNA, 468 bp, Artificial Sequence
  derived and/or modified sequence
atggccacacgcaaccctccaccgcaagactatgaaagcgatgacgacagctatgaagtgctcgatctgacagaatacgcccggaggcaccagtggtggaatcgagtgtttgggcactcttctggtccaatggtggagaaatattcagtggccacccaaatcgtgatgggtggggttacaggctggtgtgcaggcttcctcttccaaaaagtgggtaagctggccgccacagcggtcgggggtggcttcctcctgctccagattgcaagccactcaggatacgtccagatcgactggaagagggtggaaaaagatgtcaacaaggctaagagacagatcaagaagcgggcaaataaggcggcccctgagattaataatctgatcgaagaagctacagagtttattaaacagaatatcgtaatctcctccgggtttgtgggcggtttcctgctgggactggcctcttag

SEQ ID NO: 250873 - DNA, 468 bp, Artificial Sequence
  derived and/or modified sequence
atggccaccaggaaccccccaccccaggactatgaaagtgatgatgacagctatgaggtgctggacctgacagaatatgcccggcggcaccagtggtggaacagagtgtttggccacagcagcggccccatggtggagaagtacagcgtggccacccagatcgtgatgggcggcgtgacaggctggtgtgccggcttcctgttccagaaggtgggcaagctggccgccacagctgtgggcggcggcttcctgctgctgcagatcgccagccacagcggctacgtgcagattgactggaagagggtggagaaggatgtgaacaaggccaagaggcagatcaagaagagggccaacaaggccgcccctgagatcaacaacctgattgaggaggccacagagttcatcaagcagaacatcgtcatcagcagcggctttgtgggcggcttcctgctgggcctggccagctag

SEQ ID NO: 250874 - DNA, 1196 bp, Artificial Sequence
  derived and/or modified sequence
agaaggtcctgcgctgagagaagggggcggagacaggactacgcgcctggagtaggagaaggaggaaaaaagagaccatagacttccatcctggcctagagcggcccttaaagtgccagggagaggagggcgggtggggaccactccagaattggccgctggcggtatcatggcgacccggaacccccctccccaagactatgaaagtgatgacgactcttatgaagtgttggatttaactgagtatgcaagaagacaccagtggtggaatcgagtgtttggccacagttcgggacctatggtagaaaaatactcagtagctacccagattgtaatgggtggcgttactggctggtgtgcaggatttctgttccagaaagttggaaaacttgcagcaactgcagtaggtggtggctttcttcttcttcagattgctagtcatagtggctatgtgcagattgactggaagagagttgaaaaagatgtaaataaagcaaaaagacagattaagaaacgagcgaacaaagcagcacctgaaatcaacaatttaattgaagaagcaacagaatttatcaagcagaacattgtgatatccagtggatttgtgggaggctttttgctcggacttgcatcttaaggacatgaatattctcccataacggattcaactatgagaagagaagtggcagcaataaggcagtctctcaaaagtcatactgccagagtctctagggcaaggagaaacaactagctggacaatactcaattcacaacttagcattttgccatctgaagcttggcaaactagtatctgctgtaaaacaacctatatggtatgtgaaccgtagtattcctgagcaaaacgtggctttcatcgctttgtaaaaatttgcatctgtttagaaactagcctataaaatatcaccattggatgtagatatggagagaaaagaaatatgttgggtttattgcttagcgaaatattctctttttatttaaataaaatgttcttcattgtgttttatggtatgtgtccataatttaaaattcatgttatagtttcagtattaaggctgactttttttttttaagatatgtttgcaataagttaaaaaactgtaatacccttttgtggaaagctttagaaatgatataattattaaagatattaaacagactctgctgatgtaatatga

SEQ ID NO: 250875 - DNA, 468 bp, Artificial Sequence
  derived and/or modified sequence
atggccacccggaacccccccccccaggactacgagagcgacgacgattcatacgaggttcttgatttgaccgaatacgcccgcagacaccagtggtggaatcgggtctttggacacagctctggaccaatggttgagaaatattctgtggcaacacagatagttatggggggcgtcacagggtggtgtgcgggctttctgttccagaaagtggggaaactcgcggctacagcagtcgggggagggttcctgctcttgcaaatagcctcgcattcaggttatgtgcagatcgactggaagcgggtcgagaaagacgtgaacaaagcgaagcgccagatcaaaaagcgtgccaataaggcagcacctgagattaacaatctcattgaggaagccaccgagtttatcaagcagaacattgtgatctcctcgggatttgtgggaggctttcttttagggctggcatcttag

SEQ ID NO: 250876 - DNA, 468 bp, Artificial Sequence
  derived and/or modified sequence
atggccacgcgaaaccctccccctcaagactacgagtctgacgacgatagctatgaggtgctagaccttaccgagtacgcgagaagacaccagtggtggaacagggtgtttggacactcgtcaggcccaatggtggaaaaatactcagtggcaacccagatagtgatggggggagtgaccggctggtgtgcaggttttttgtttcaaaaagtagggaagctggcagcaactgcagttggcggtggctttcttttgcttcagatcgctagccatagtggctatgtgcagatcgactggaaacgcgtggagaaagacgtgaataaagcaaagcgtcagattaagaagcgggcaaataaagcagcacctgagatcaacaacctcatcgaggaggcgacagagtttatcaaacaaaacatcgttatcagcagcggcttcgttggaggtttcttactcgggctcgcatcctag

SEQ ID NO: 250877 - protein, 402 aa, Artificial Sequence
  derived and/or modified sequence
MASIIARVGNSRRLNAPLPPWAHSMLRSLGRSLGPIMASMADRNMKLFSGRVVPAQGEETFENWLTQVNGVLPDWNMSEEEKLKRLMKTLRGPAREVMRVLQATNPNLSVADFLRAMKLVFGESESSVTAHGKFFNTLQAQGEKASLYVIRLEVQLQNAIQAGIIAEKDANRTRLQQLLLGGELSRDLRLRLKDFLRMYANEQERLPNFLELIRMVREEEDWDDAFIKRKRPKRSESMVERAVSPVAFQGSPPIVIGSADCNVIEIDDTLDDSDEDVILVESQDPPLPSWGAPPLRDRARPQDEVLVIDSPHNSRAQFPSTSGGSGYKNNGPGEMRRARKRKHTIRCSYCGEEGHSKETCDNESDKAQVFENLIITLQELTHTEMERSRVAPGEYNDFSEPL

SEQ ID NO: 250878 - DNA, 1209 bp, Artificial Sequence
  derived and/or modified sequence
atggccagcatcatcgccagagtgggcaacagcagaagactgaacgcccccctgcccccctgggcccacagcatgctgagaagcctgggcagaagcctgggccccatcatggccagcatggccgacagaaacatgaagctgttcagcggcagagtggtgcccgcccagggcgaggagaccttcgagaactggctgacccaggtgaacggcgtgctgcccgactggaacatgagcgaggaggagaagctgaagagactgatgaagaccctgagaggccccgccagagaggtgatgagagtgctgcaggccaccaaccccaacctgagcgtggccgacttcctgagagccatgaagctggtgttcggcgagagcgagagcagcgtgaccgcccacggcaagttcttcaacaccctgcaggcccagggcgagaaggccagcctgtacgtgatcagactggaggtgcagctgcagaacgccatccaggccggcatcatcgccgagaaggacgccaacagaaccagactgcagcagctgctgctgggcggcgagctgagcagagacctgagactgagactgaaggacttcctgagaatgtacgccaacgagcaggagagactgcccaacttcctggagctgatcagaatggtgagagaggaggaggactgggacgacgccttcatcaagagaaagagacccaagagaagcgagagcatggtggagagagccgtgagccccgtggccttccagggcagcccccccatcgtgatcggcagcgccgactgcaacgtgatcgagatcgacgacaccctggacgacagcgacgaggacgtgatcctggtggagagccaggacccccccctgcccagctggggcgccccccccctgagagacagagccagaccccaggacgaggtgctggtgatcgacagcccccacaacagcagagcccagttccccagcaccagcggcggcagcggctacaagaacaacggccccggcgagatgagaagagccagaaagagaaagcacaccatcagatgcagctactgcggcgaggagggccacagcaaggagacctgcgacaacgagagcgacaaggcccaggtgttcgagaacctgatcatcaccctgcaggagctgacccacaccgagatggagagaagcagagtggcccccggcgagtacaacgacttcagcgagcccctgtag

SEQ ID NO: 250879 - DNA, 1209 bp, Artificial Sequence
  derived and/or modified sequence
atggcctccatcattgcaagagtgggcaatagccgaaggttgaacgcgcccctgccgccctgggcacacagtatgctgcgttcactgggtaggtccctaggacccattatggcgtcaatggccgacagaaatatgaaactgttctccgggcgcgtggtgcctgcgcaaggggaagaaacctttgaaaattggctgacccaggttaacggcgtgctccctgactggaatatgtcggaggaggaaaagctgaaaagattgatgaagacgcttcgcgggccagcccgtgaagtgatgcgggtcctacaagcaacaaacccgaacctcagtgtcgccgacttcttgcgagcaatgaaactggtatttggggagagtgagtccagtgtgactgcccatggtaagtttttcaatacactgcaagcccagggagaaaaggcaagcctctatgtaatcaggctggaggttcagctgcagaatgcaattcaggccgggattatagctgagaaggatgcgaacaggaccagattgcagcaactgcttctgggtggggagttgtctcgagatctgcggctgcgactgaaagatttcttacggatgtatgctaacgaacaggaaaggctgcccaattttttggagcttattcgcatggtgagggaagaggaggattgggacgatgccttcataaaacgaaaacggccaaagaggtccgagagtatggtggagagagcagtgagtcctgtggcgtttcaggggtcaccacccatcgtgatagggtccgccgactgcaatgtcatagagatcgacgacactctggacgattcagatgaggacgtgattttagttgagtcacaagacccgcccctgcccagctggggggctcctccacttagggaccgcgctcgccctcaggatgaagtgctggtgattgatagcccccacaactctcgggctcaatttccttccacttcaggaggcagcggatacaaaaacaatgggcctggggaaatgcgaagggcccggaaacgtaaacacacgattagatgtagttactgtggagaggagggccattccaaagagacttgcgacaacgagtccgacaaggcccaggtgtttgagaacctcattatcacactgcaggagctgacgcatacagaaatggagcgctccagggtggcccccggcgaatacaacgactttagtgagccactgtag

SEQ ID NO: 250880 - DNA, 1209 bp, Artificial Sequence
  derived and/or modified sequence
atggccagcatcatcgcccgggtgggcaacagccggcggctgaatgcccccctgcccccctgggcccacagcatgctgcggagcctgggccgcagcctgggccccatcatggcctccatggctgacaggaacatgaagctgttcagcggccgggtggtgcctgcccagggcgaggagacctttgagaactggctgacccaggtgaatggagtgctgcctgactggaacatgtctgaggaggagaagctgaagaggctgatgaagaccctgcggggccctgcccgggaggtgatgagggtgctgcaggccaccaaccccaacctgtctgtggccgacttcctgcgggccatgaagctggtgtttggagagagcgagagctctgtgacagcccacggcaagttcttcaacaccctgcaggcccagggcgagaaggccagcctgtatgtgatccggctggaggtgcagctgcagaatgccatccaggccggcatcatcgccgagaaggatgccaacagaacccggctgcagcagctgctgctgggcggggagctgagccgggacctgcggctgcggctgaaggacttcctgaggatgtatgccaatgagcaggagcggctgcccaacttcctggagctgatccgcatggtgcgggaggaggaggactgggatgatgccttcatcaagaggaagaggcccaagaggtctgagagcatggtggagagagctgtgtcccctgtggccttccagggcagcccccccatcgtcatcggcagcgctgactgcaacgtcatcgagattgatgacaccctggatgacagtgatgaagatgtgatcctggtggagagccaggacccccccctgcccagctggggcgccccacccctgcgggaccgggcccggccccaggatgaggtgctggtgattgacagcccccacaacagccgggcccagttccccagcaccagcggcggcagcggctacaagaacaacggccctggagagatgaggcgggccaggaagaggaagcacaccatccgctgcagctactgtggggaggagggccacagcaaggagacctgtgacaatgaaagtgacaaggcccaggtgtttgaaaatctcatcatcaccctgcaggagctgacccacacagagatggagaggagccgggtggcccctggagagtacaatgacttcagcgagcccctgtag

SEQ ID NO: 250881 - DNA, 1209 bp, Artificial Sequence
  derived and/or modified sequence
atggccagcatcatcgcccgggtgggcaacagccggcggctgaacgccccgctgccgccttgggctcatagtatgctgagaagtcttggaagaagtcttgggcctatcatggcatctatggcggaccgaaacatgaaactttttagcggtagggtcgtgcccgctcagggagaggagaccttcgaaaattggctcacccaggtgaatggggtactgccagactggaatatgtctgaggaggagaaactcaagaggctgatgaagacactgcgtggtccggcacgagaagttatgagagtcctgcaggcgactaaccccaacctgagtgtcgcggatttcctgcgggctatgaaactggtgttcggagaatcggagagctccgtgactgcccacgggaagttcttcaatactcttcaggcgcagggagaaaaagcttctctgtacgtgatcaggctggaggtacaactgcagaatgccatccaggctgggatcatcgctgaaaaggatgcgaacagaacaagactgcaacaactgctcctcggcggcgagttgtcgcgggacctcaggttgagactgaaggactttctccgcatgtatgccaatgagcaggaaagattaccaaacttcctcgaactgattcgaatggtccgggaggaggaggactgggatgacgccttcatcaaaaggaagcggccaaagcggtcagaaagcatggtggagagggctgttagcccggtcgcatttcaggggtcaccaccaatcgtaattgggagcgccgattgcaatgtaatcgaaattgacgatacgctcgacgactctgatgaagatgtcatcctagtggaaagtcaggatccaccactgccatcttggggtgcccccccgctgagggatagagcccggccacaggacgaggtgcttgtcatcgactctccgcataactctcgagctcagttcccatccacttctggcggatcaggctataagaacaacggcccaggtgagatgaggagagcacgcaaacgcaagcatactatacggtgttcctactgcggagaagagggacacagtaaggagacatgtgacaatgagtctgacaaagcccaagtgttcgagaatctcatcatcacactacaggaactgactcacacagagatggaaaggagtagggtggccccgggagaatataatgactttagcgagccactgtag

SEQ ID NO: 250882 - DNA, 1209 bp, Artificial Sequence
  derived and/or modified sequence
atggcatccatcatcgcgcgagttgggaacagtaggcgactaaacgcacctctgcctccctgggcgcatagcatgctgagatcactgggtaggtccctcggaccaatcatggccagcatggctgatcggaacatgaagcttttctccggccgagtggtccctgcccagggggaagagacgtttgagaattggctgacacaggttaatggagttctgcccgactggaacatgtcagaagaggagaaacttaaacggctcatgaagacgcttcggggaccagcacgggaggttatgcgggtgctccaggcaacgaaccccaatctcagtgtagccgattttttgcgcgcaatgaaattagtgttcggtgagtccgagtccagcgtcaccgcccacggcaaattcttcaacacattgcaagctcaaggcgaaaaagctagcctctacgtaatccggctggaagtccaattgcagaacgccatacaagcaggtataattgctgagaaagacgccaacagaacccgacttcagcagctgctgctggggggagagctgagcagggatctccggttgcgcctgaaagattttctcagaatgtatgctaacgagcaagagcgcctcccaaactttttagagcttatccgcatggttcgcgaggaagaagattgggatgatgccttcataaagcggaaaaggcctaaaaggagcgaaagtatggtggaaagagctgtatcacccgttgcttttcaaggctcccctccgatcgtcataggctccgccgactgtaacgtaatcgagatcgacgacacactcgacgactccgatgaggacgtcattctggtggaatcccaagatccacctcttccatcctggggggctcctcccctacgtgatagggccagaccccaggatgaagtcttagtgattgactcacctcacaattctagagcccaatttcccagcactagcggagggtccggatacaagaataacgggcctggagagatgagaagggctagaaagcggaagcacactattcggtgtagctactgcggcgaggagggtcactcaaaagagacatgcgacaatgagtcagacaaggcccaagtcttcgaaaatctgataatcactctgcaggagctcacgcataccgagatggagagatccagggtggcacccggagagtacaatgatttttctgaaccactgtag

SEQ ID NO: 250883 - DNA, 2231 bp, Artificial Sequence
  derived and/or modified sequence
agaggataaaagccgccgcggctgccttaggaacggcgctgcctcgtctctgctacccctggttgggcggccctgcgaagcagctccttcgggcagccccgggtcgcttagcggccaaggaggcttcagttctttgccgcctgcaaggcggagaccagaaggcggaatccacagctggcgacgcgggagcatctgctgtccaccagcggagcacaggccatcaaagccgcatctgaacttgaattctgtgcagctgattgcagagctggacccggatctgcgaccccctgtggacagaggttgaccgtaccccggagaggagctttctcacggagggcactggttgcagaggctggaagtgaaataaagacgcgctcttgtttcagagttcgtcccctgctgagataggaaggcagagccacctcctctcctctcccacctgcagattaagcttttctaaaaagcctaggcatcttcttatattcagataccctatcgtcgtcagtcatggctagcatcattgcacgtgtcggtaacagccggcggctgaatgcacccttgccgccttgggcccattccatgctgaggtccctggggagaagtctcggtcctataatggccagcatggcagacagaaacatgaagttgttctcggggagggtggtgccagcccaaggggaagaaacctttgaaaactggctgacccaagtcaatggcgtcctgccagattggaatatgtctgaggaggaaaagctcaagcgcttgatgaaaacccttaggggccctgcccgcgaggtcatgcgtgtgcttcaggcgaccaaccctaacctaagtgtggcagatttcttgcgagccatgaaattggtgtttggggagtctgaaagcagtgtgactgcccatggtaaattttttaacaccctacaagctcaaggggagaaagcctccctttatgtgatccgtttagaggtgcagctccagaacgctattcaggcaggcattatagctgagaaagatgcaaaccggactcgcttgcagcagctccttttaggcggtgagctgagtagggacctccgactcagacttaaggattttctcaggatgtatgcaaatgagcaggagcggcttcccaactttctggagttaatcagaatggtaagggaggaagaggattgggatgatgcttttattaaacggaagcgtccaaaaaggtctgagtcaatggtggagagggcagtcagccctgtggcatttcagggctccccaccgatagtgatcggcagtgctgactgcaatgtgatagagatagatgataccctcgacgactccgatgaggatgtgatcctggtggagtctcaggaccctccacttccatcctggggtgcccctcccctcagagacagggccagacctcaggatgaagtgctggtcattgattccccccacaattccagggctcagtttccttccaccagtggtggttctggctataagaataacggtcctggggagatgcgtagagccaggaagcgaaaacacacaatccgctgttcgtattgtggtgaggaaggccactcaaaagaaacctgtgacaacgagagtgacaaggcccaggtttttgagaatttgatcatcactctccaggagctgacccatactgagatggagaggtcaagagtggcccctggcgaatacaatgacttctctgagccactgtaagggaccacccccaggtttcagtgaacccttacctatattcagcatccagtagtgggaaaactggggtgggggtgggggtgggacttctaactgcatgaattaatccacaaagcggctatcttttggggtggagtagaaagggtcttggataccagcacattggagggagatagcctgacctctgtccttgctccttctccctgcagcctacgggtctgttttctgtgtgtgcccatttccttgacagctttattctttgtgaaagtggtataatttattgttaaatatttgaacaataaaaaaggtacaaaaagtgaagtacaaattacccaaatctctccacccttatataatcattgtcaaccctttgatgagtgatatttccctatacctatgtacccagatagatatatgcatagataaaagtgatgaaatataagtgctgttctatctgtattttttcaccaaacaatatatgttgtgagcttctatgtcaataaatatatatatcagca

SEQ ID NO: 250884 - protein, 244 aa, Artificial Sequence
  derived and/or modified sequence
MRWCLLLIWAQGLRQAPLASGMMTGTIETTGNISAEKGGSIILQCHLSSTTAQVTQVNWEQQDQLLAICNADLGWHISPSFKDRVAPGPGLGLTLQSLTVNDTGEYFCIYHTYPDGTYTGRIFLEVLESSVAEHGARFQIPLLGAMAATLVVICTAVIVVVALTRKKKALRIHSVEGDLRRKSAGQEEWSPSAPSPPGSCVQAEAAPAGLCGEQRGEDCAELHDYFNVLSYRSLGNCSFFTETG

SEQ ID NO: 250885 - protein, 311 aa, Artificial Sequence
  derived and/or modified sequence
MAFLVAHPMQFVYLLTTLCVFNMVFAKLGFSETVFSQRLSFTVLSAVGYFQWQKRPHLLPVGPLGRSMRWCLLLIWAQGLRQAPLASGMMTGTIETTGNISAEKGGSIILQCHLSSTTAQVTQVNWEQQDQLLAICNADLGWHISPSFKDRVAPGPGLGLTLQSLTVNDTGEYFCIYHTYPDGTYTGRIFLEVLESSVAEHGARFQIPLLGAMAATLVVICTAVIVVVALTRKKKALRIHSVEGDLRRKSAGQEEWSPSAPSPPGSCVQAEAAPAGLCGEQRGEDCAELHDYFNVLSYRSLGNCSFFTETG

SEQ ID NO: 250886 - DNA, 735 bp, Artificial Sequence
  derived and/or modified sequence
atgagatggtgcctgctgctgatctgggcccagggcctgagacaggcccccctggccagcggcatgatgaccggcaccatcgagaccaccggcaacatcagcgccgagaagggcggcagcatcatcctgcagtgccacctgagcagcaccaccgcccaggtgacccaggtgaactgggagcagcaggaccagctgctggccatctgcaacgccgacctgggctggcacatcagccccagcttcaaggacagagtggcccccggccccggcctgggcctgaccctgcagagcctgaccgtgaacgacaccggcgagtacttctgcatctaccacacctaccccgacggcacctacaccggcagaatcttcctggaggtgctggagagcagcgtggccgagcacggcgccagattccagatccccctgctgggcgccatggccgccaccctggtggtgatctgcaccgccgtgatcgtggtggtggccctgaccagaaagaagaaggccctgagaatccacagcgtggagggcgacctgagaagaaagagcgccggccaggaggagtggagccccagcgcccccagcccccccggcagctgcgtgcaggccgaggccgcccccgccggcctgtgcggcgagcagagaggcgaggactgcgccgagctgcacgactacttcaacgtgctgagctacagaagcctgggcaactgcagcttcttcaccgagaccggctag

SEQ ID NO: 250887 - DNA, 936 bp, Artificial Sequence
  derived and/or modified sequence
atggccttcctggtggcccaccccatgcagttcgtgtacctgctgaccaccctgtgcgtgttcaacatggtgttcgccaagctgggcttcagcgagaccgtgttcagccagagactgagcttcaccgtgctgagcgccgtgggctacttccagtggcagaagagaccccacctgctgcccgtgggccccctgggcagaagcatgagatggtgcctgctgctgatctgggcccagggcctgagacaggcccccctggccagcggcatgatgaccggcaccatcgagaccaccggcaacatcagcgccgagaagggcggcagcatcatcctgcagtgccacctgagcagcaccaccgcccaggtgacccaggtgaactgggagcagcaggaccagctgctggccatctgcaacgccgacctgggctggcacatcagccccagcttcaaggacagagtggcccccggccccggcctgggcctgaccctgcagagcctgaccgtgaacgacaccggcgagtacttctgcatctaccacacctaccccgacggcacctacaccggcagaatcttcctggaggtgctggagagcagcgtggccgagcacggcgccagattccagatccccctgctgggcgccatggccgccaccctggtggtgatctgcaccgccgtgatcgtggtggtggccctgaccagaaagaagaaggccctgagaatccacagcgtggagggcgacctgagaagaaagagcgccggccaggaggagtggagccccagcgcccccagcccccccggcagctgcgtgcaggccgaggccgcccccgccggcctgtgcggcgagcagagaggcgaggactgcgccgagctgcacgactacttcaacgtgctgagctacagaagcctgggcaactgcagcttcttcaccgagaccggctag

SEQ ID NO: 250888 - DNA, 735 bp, Artificial Sequence
  derived and/or modified sequence
atgagatggtgcctgctcttgatctgggcacagggattaaggcaagcccctctagccagcggcatgatgactggtaccattgagactaccggcaacatcagtgccgaaaagggcggctccataatcctgcaatgccatctgagtagcaccaccgcccaggtgacccaggtgaattgggagcagcaagatcagttgttggccatatgtaatgctgacctcggctggcacatttccccttcttttaaggaccgggttgccccgggccctgggctgggtctgacgctgcagagcctaacagtcaatgatacgggtgagtatttctgtatctaccacacatatccagatggcacatacacaggtaggatcttcttagaggttttggagagcagtgtggccgagcatggtgcccgtttccaaatcccactgctgggagccatggccgccaccctggtggtcatctgcacagccgtgatcgtcgttgtagccctaacaaggaagaaaaaagcattgcggattcattctgtggaaggagacctgcgtcgaaaaagcgccgggcaggaagaatggtccccctccgccccctccccaccagggtcatgcgtacaggcagaggccgctccagcaggactgtgcggcgagcagcgaggggaggactgcgccgaacttcacgactactttaacgttcttagttatcgcagcctgggcaactgcagtttttttactgagacaggttag

SEQ ID NO: 250889 - DNA, 936 bp, Artificial Sequence
  derived and/or modified sequence
atggctttcctagtcgctcatccaatgcagtttgtgtacctattgaccacgctgtgtgtctttaatatggtgtttgccaaattaggcttttccgagactgtattttctcagagactgtccttcaccgtgctgagcgcagtgggctacttccagtggcagaagcgcccgcacctcctccctgtagggccactcggtaggtctatgcgctggtgcctgctgctgatttgggcccaaggcctgcggcaagctcctttggcctctggcatgatgacaggcactattgaaaccaccggcaatatcagtgcagagaagggtggttcaatcatcctgcagtgccatctgtcctccactacggcccaggtaactcaagtgaactgggagcaacaggatcagcttctggccatttgcaacgctgatttgggatggcatatctctccaagcttcaaagacagagttgccccaggccccggactggggttaacgttacagtcattgacagtgaatgacacaggagagtacttctgtatataccacacgtatcctgacggcacgtacactggacgaatctttttggaagttctcgagtcatcagttgcagagcacggggccaggttccagatcccactgctgggcgctatggcagctacgttggtagttatctgcacagctgttattgtagtcgtggcattaacaagaaagaagaaagccttgagaatccattctgtggaaggggatctgaggagaaaaagtgccggccaagaagagtggagcccgtctgccccgagtccaccaggctcctgcgtgcaagccgaagcagcacccgctggactttgtggcgaacagagaggcgaggattgcgcggagttgcatgactacttcaacgtgctttcttatcgcagcctgggtaattgctcattcttcaccgagactgggtag

SEQ ID NO: 250890 - DNA, 735 bp, Artificial Sequence
  derived and/or modified sequence
atgcgctggtgtctcctgcttatttgggctcaaggactcaggcaggctccactggcctccgggatgatgactggtactattgaaaccactggcaatatctccgccgaaaaaggtggaagcataattttgcagtgccacctgagtagtacgacagcccaggttacccaagtgaattgggaacagcaggaccagctgctagcgatatgtaatgctgatctcggctggcatattagcccctcattcaaggaccgggtggcgcccggccccgggctagggttgaccctgcagtctctcactgtcaatgatacgggtgaatatttttgcatataccacacctacccagatggaacatatactggacgtatttttctggaggtgcttgaatcttccgtggctgagcacggggctagattccagatcccgcttctgggcgctatggctgccacccttgtggtgatttgcacagctgtgattgtggttgtcgcgttaacacggaaaaaaaaggccctacggatccactcagtggagggcgatctgcggcggaagtctgcggggcaggaggagtggtcacctagcgctcctagcccccccggcagttgcgtccaagccgaggccgccccagcaggtctatgtggcgagcagcggggcgaagattgtgcggaacttcacgactactttaatgttctcagttatagaagcctgggaaactgtagcttctttaccgaaacagggtag

SEQ ID NO: 250891 - DNA, 735 bp, Artificial Sequence
  derived and/or modified sequence
atgcgctggtgcctgctgctgatctgggcccagggcctgcggcaggcccccctggccagcggcatgatgacaggcaccatcgagaccaccggcaacatctctgctgagaagggcggcagcatcatcctgcagtgccacctgagcagcaccacagcccaggtgacccaggtgaactgggagcagcaggaccagctgctggccatctgcaatgctgacctgggctggcacatcagccccagcttcaaggacagagtggcccctggccctggcctgggcctgaccctgcagagcctgactgtgaatgacacaggagagtacttctgcatctaccacacctacccagatggcacctacacaggccgcatcttcctggaggtgctggagagctctgtggccgagcacggggcccgcttccagatccccctgctgggcgccatggccgccaccctggtggtgatctgcacagctgtgattgtggtggtggccctgaccaggaagaagaaggccctgcgcatccacagcgtggagggggacctgcggaggaagtctgctggccaggaggagtggagccccagcgcccccagccccccaggcagctgtgtgcaggccgaggccgccccagctggcctgtgtggggagcagagaggagaggactgtgccgagctgcatgactacttcaacgtgctgagctaccgcagcctgggcaactgcagcttcttcacagaaacaggatag

SEQ ID NO: 250892 - DNA, 936 bp, Artificial Sequence
  derived and/or modified sequence
atggccttcctggtggcccaccccatgcagtttgtgtacctgctgaccaccctgtgtgtgttcaacatggtgtttgccaagctgggcttcagcgagaccgtcttcagccagaggctgtccttcaccgtgctgtctgctgtgggctacttccagtggcagaagaggccccacctgctgcctgtgggccccctgggccgctccatgcgctggtgcctgctgctgatctgggcccagggcctgcggcaggcccccctggccagcggcatgatgacaggcaccatcgagaccactggaaacatctctgctgagaagggcggcagcatcatcctgcagtgccacctgagcagcaccacagcccaggtgacccaggtgaactgggagcagcaggaccagctgctggccatctgcaatgctgacctgggctggcacatcagccccagcttcaaggacagagtggcccctggccctggcctgggcctgaccctgcagagcctgactgtgaatgacaccggggagtacttctgcatctaccacacctacccagatggcacctacacaggccgcatcttcctggaggtgctggagagctctgtggccgagcacggggcccgcttccagatccccctgctgggcgccatggccgccaccctggtggtgatctgcacagctgtgattgtggtggtggccctgaccaggaagaagaaggccctgcgcatccacagcgtggagggggacctgcggaggaagtctgctggccaggaggagtggagccccagcgcccccagccccccaggcagctgtgtgcaggccgaggccgccccagctggcctgtgtggggagcagagaggagaggactgtgccgagctgcatgactacttcaacgtgctgagctaccgcagcctgggcaactgcagcttcttcacagagaccggctag

SEQ ID NO: 250893 - DNA, 735 bp, Artificial Sequence
  derived and/or modified sequence
atgcggtggtgcctgctgctgatctgggcccagggcctgcggcaggccccacttgcatccggcatgatgaccggcaccattgagacgaccgggaatatctccgctgagaaagggggttcaatcatactgcagtgtcacctctcctcaaccactgctcaggtgacacaggtgaattgggaacagcaagatcagctgttggctatctgtaacgcagacctgggatggcatatctccccatctttcaaagatagagtggctcctggacccggactcgggctcacactccaatctctgacagtcaatgacactggcgagtacttctgtatttaccacacgtatccagatggcacatacacaggccgaatttttctcgaggtgttagagagtagtgtggcagagcatggcgcgagattccagattcccctacttggagccatggcagctacgctggtggtgatctgcaccgccgtaatcgtggtcgtggcgcttaccaggaaaaagaaggccttacgcattcacagtgtggagggggacttgcggcggaaatctgccggccaggaggaatggagccccagtgccccaagtcccccagggtcgtgtgtccaggcagaggctgcacctgccggtctctgtggagagcaaaggggtgaggattgcgccgaactccatgactatttcaatgtgttatcctaccgatctctggggaattgttcttttttcacggagaccggatag

SEQ ID NO: 250894 - DNA, 936 bp, Artificial Sequence
  derived and/or modified sequence
atggccttcctggtggcccaccccatgcagttcgtgtacctgctgacaacactgtgcgtgttcaatatggtctttgccaaattaggattcagcgagacagttttttctcagcgactgtccttcactgtcttaagcgctgtcggctactttcagtggcagaaaaggccacatctactcccggtgggtcccctcggaagatctatgagatggtgccttctgctcatttgggcccagggactccgccaagcacctctggcctcaggaatgatgacaggcacaatcgaaactacgggcaatatctctgctgagaagggtggatcaattatactccaatgccacttaagctcaaccactgcccaggtgactcaggtgaattgggagcagcaggatcagctgcttgcgatatgtaacgcggatctgggatggcacatttctccatccttcaaggatcgagtggctccaggcccaggccttgggctgaccctacagtctctgacagtgaacgacaccggagaatacttctgtatttaccacacctatccggatggtacttacacaggccgaatattcttggaggtgctggaatccagcgtggctgaacacggtgcacggttccaaatcccacttctgggtgctatggcagcaaccttagtcgttatttgtacggctgtcatcgtggtcgtggccctgacccgcaaaaagaaagctctgcgaatccacagtgtggaaggggacttgagacggaagtccgcaggacaggaagagtggtcgcctagcgctccttccccccctggctcatgcgtgcaagccgaggcggcgccagcaggtctttgcggagagcagaggggcgaggactgtgccgaactgcatgactacttcaacgtgctgagctaccggtcccttggaaattgctcattctttaccgaaaccggctag

SEQ ID NO: 250895 - DNA, 735 bp, Artificial Sequence
  derived and/or modified sequence
atgcggtggtgcctgctgctgatctgggcccagggcctgcggcaggcccctctggcctcaggaatgatgacggggaccattgagacaaccgggaacatcagcgcagaaaagggcgggtctattatactgcagtgccacctgtctagtaccacagcccaggttacacaggtgaattgggagcagcaggaccagctgctggcaatttgcaacgccgatctggggtggcatatttccccctctttcaaagatcgggtggcccccggaccgggcttgggactaacacttcagtcgttgacagtgaacgatacaggcgagtatttctgcatctaccacacttacccagacggtacctataccggacgtatctttctcgaagtgctagagagtagcgtagccgagcacggcgcccgcttccagatccctctcctgggcgcgatggctgccaccctggtcgtcatctgcactgccgtaatcgtagttgtcgctcttacgaggaagaagaaagcattgcgaatccatagcgtggaaggtgaccttagacgtaaatcagccgggcaggaagagtggtctccctctgcaccaagccccccaggcagttgcgtccaggccgaagctgcacctgcaggcctttgtggtgaacaacgcggcgaagattgcgcagaactccacgattattttaacgtgctctcatatcgctctctcggtaactgctccttctttacagagactggatag

SEQ ID NO: 250896 - DNA, 735 bp, Artificial Sequence
  derived and/or modified sequence
atgcgatggtgcctcctcctcatttgggcgcagggactaagacaggcccctctcgcatcagggatgatgacagggacaattgagaccaccggtaatatttcagccgaaaaaggtgggagcatcattttacagtgccacctttccagcacaaccgcacaagttacgcaggtgaactgggaacagcaggaccaactgttggcaatttgcaatgccgatctgggctggcacatcagtccatcatttaaggaccgcgtggcgcctggacctggcctcgggttgacgctacagagccttacagttaacgacactggggaatatttctgcatctatcacacttaccctgatggcacatacaccgggcgtatcttccttgaggtgcttgagtccagcgtcgccgagcatggcgctagatttcagattcctctattgggagcgatggctgctactctcgttgttatctgtacagcggttattgtggtcgtggctttgactcgcaaaaagaaggccttgaggatccactctgttgaaggggatctgaggaggaagagcgccggtcaggaggaatggtccccctctgccccttcccccccagggagctgtgtgcaagctgaagcggcaccagccggtctgtgtggtgaacagcgaggggaagattgtgccgagctgcatgattatttcaacgtgttgtcttaccgatctctcggtaattgcagcttcttcactgaaaccgggtag

SEQ ID NO: 250897 - DNA, 936 bp, Artificial Sequence
  derived and/or modified sequence
atggcattcctggtcgcacacccgatgcagtttgtgtatcttctgaccactctgtgcgtgttcaatatggtgttcgcaaagctaggcttttcagagacagttttctcacaaagactttcattcactgtcctgagtgccgtcggatacttccagtggcagaagcgccctcacctgctgcctgtcgggccactgggcaggtctatgcggtggtgtctcttgctgatttgggcccagggattgagacaggccccactagcctcggggatgatgactgggacgatagaaaccaccgggaacataagcgctgagaaaggaggatcaataatactacagtgtcacctgagctccaccacggcacaggtgacgcaggtgaactgggaacaacaggaccagttactggccatttgtaacgccgatctgggctggcacattagcccctctttcaaggatcgggtggcgcctggcccaggcctgggtctgaccctgcagagcctgaccgtgaacgacactggagaatacttttgtatatatcacacataccctgacgggacttacaccggcaggatttttctggaagtgctcgagtccagcgtagcggaacatggtgctaggtttcagattcccctcttgggggctatggctgccacactcgtggtgatctgtaccgccgttatcgtggtagtggcgttgaccagaaagaagaaagcgctgaggattcattctgtcgagggggaccttcggagaaaatcggctggccaggaagagtggagccctagtgcccctagcccacctggcagttgtgttcaagctgaagcagcaccagcgggactgtgcggggagcagagaggcgaagactgtgctgaactccacgactactttaacgtcctgtcttaccgtagtttaggcaactgttcattctttacagagacgggatag

SEQ ID NO: 250898 - DNA, 735 bp, Artificial Sequence
  derived and/or modified sequence
atgaggtggtgcctcctgcttatctgggcgcaaggactccgccaagcaccactggccagtgggatgatgacgggcaccatagaaacgactggcaacatctccgccgaaaaaggtggctccattatactgcagtgtcacctgagctctacaactgcacaagtgactcaggttaattgggaacagcaggaccagctactggcaatttgtaatgccgatcttggatggcatataagcccctcattcaaggatagggtcgcacccggaccaggtctcggcctcacacttcagagcctgacagtcaatgacactggagagtacttttgtatttatcacacttaccccgacggcacctatactggcaggatctttttagaggtattggagtcctctgtggccgaacatggggcacgatttcagatccccttgctcggtgcaatggcagccacgctggtggtgatctgtaccgcagtgatcgtggtggtggccctgactcggaagaagaaggccctgcgcatccacagcgtagagggggatctgcggcgaaaaagtgctggccaggaggaatggagcccaagtgctccttcacctcctgggtcttgtgttcaggcagaagctgctccagcagggttgtgcggagagcagaggggtgaagattgtgccgagctgcacgactactttaatgtgctgtcgtatcggtctctcgggaattgtagtttcttcacagagacggggtag

SEQ ID NO: 250899 - DNA, 2967 bp, Artificial Sequence
  derived and/or modified sequence
cgtcctatctgcagtcggctactttcagtggcagaagaggccacatctgcttcctgtaggccctctgggcagaagcatgcgctggtgtctcctcctgatctgggcccaggggctgaggcaggctcccctcgcctcaggaatgatgacaggcacaatagaaacaacggggaacatttctgcagagaaaggtggctctatcatcttacaatgtcacctctcctccaccacggcacaagtgacccaggtcaactgggagcagcaggaccagcttctggccatttgtaatgctgacttggggtggcacatctccccatccttcaaggatcgagtggccccaggtcccggcctgggcctcaccctccagtcgctgaccgtgaacgatacaggggagtacttctgcatctatcacacctaccctgatgggacgtacactgggagaatcttcctggaggtcctagaaagctcagtggctgagcacggtgccaggttccagattccattgcttggagccatggccgcgacgctggtggtcatctgcacagcagtcatcgtggtggtcgcgttgactagaaagaagaaagccctcagaatccattctgtggaaggtgacctcaggagaaaatcagctggacaggaggaatggagccccagtgctccctcacccccaggaagctgtgtccaggcagaagctgcacctgctgggctctgtggagagcagcggggagaggactgtgccgagctgcatgactacttcaatgtcctgagttacagaagcctgggtaactgcagcttcttcacagagactggttagcaaccagaggcatcttctggaagatacacttttgtctttgctattatagatgaatatataagcagctgtactctccatcagtgctgcgtgtgtgtgtgtgtgtgtatgtgtgtgtgtgttcagttgagtgaataaatgtcatcctcttctccatcttcatttccttggccttttcgttctattccattttgcattatggcaggcctagggtgagtaacgtggatcttgatcataaatgcaaaattaaaaaatatcttgacctggttttaaatctggcagtttgagcagatcctatgtctctgagagacacattcctcataatggccagcattttgggctacaaggttttgtggttgatgatgaggatggcatgactgcagagccatcctcatctcattttttcacgtcattttcagtaactttcactcattcaaaggcaggttataagtaagtcctggtagcagcctctatggggagatttgagagtgactaaatcttggtatctgccctcaagaacttacagttaaatggggagacaatgttgtcatgaaaaggtattatagtaaggagagaaggagacatacacaggccttcaggaagagacgacagtttggggtgaggtagttggcataggcttatctgtgatgaagtggcctgggagcaccaaggggatgttgaggctagtctgggaggagcaggagttttgtctagggaacttgtaggaaattcttggagctgaaagtcccacaaagaaggccctggcaccaagggagtcagcaaacttcagattttattctctgggcaggcatttcaagtttccttttgctgtgacatactcatccattagacagcctgatacaggcctgtagcctcttccggccgtgtgtgctggggaagccccaggaaacgcacatgcccacacagggagccaagtcgtagcatttgggccttgatctaccttttctgcatcaatacactcttgagcctttgaaaaaagaacgtttcccactaaaaagaaaatgtggatttttaaaatagggactcttcctaggggaaaaaggggggctgggagtgatagagggtttaaaaaataaacaccttcaaactaacttcttcgaacccttttattcactccctgacgactttgtgctggggttggggtaactgaaccgcttatttctgtttaattgcattcaggctggatcttagaagacttttatccttccaccatctctctcagaggaatgagcggggaggttggatttactggtgactgattttctttcatgggccaaggaactgaaagagaatgtgaagcaaggttgtgtcttgcgcatggttaaaaataaagcattgtcctgcttcctaagacttagactggggttgacaattgttttagcaacaagacaattcaactatttctcctaggatttttattattattattttttcacttttctaccaaatgggttacataggaagaatgaactgaaatctgtccagagctccaagtcctttggaagaaagattagatgaacgtaaaaatgttgttgtttgctgtggcagtttacagcatttttcttgcaaaattagtgcaaatctgttggaaatagaacacaattcacaaattggaagtgaactaaaatgtaatgacgaaaagggagtagtgttttgatttggaggaggtgtatattcggcagaggttggactgagagttgggtgttatttaacataattatggtaattgggaaacatttataaacactattgggatggtgataaaatacaaaagggcctatagatgttagaaatgggtcaggttactgaaatgggattcaatttgaaaaaaatttttttaaatagaactcactgaactagattctcctctgagaaccagagaagaccatttcatagttggattcctggagacatgcgctatccaccacgtagccactttccacatgtggccatcaaccacttaagatggggttagtttaaatcaagatgtgctgttataattggtataagcataaaatcacactagattctggagatttaatatgaataataagaatactatttcagtagttttggtatattgtgtgtcaaaaatgataatattttggatgtattgggtgaaataaaatattaacatt

SEQ ID NO: 250900 - DNA, 3710 bp, Artificial Sequence
  derived and/or modified sequence
ggagcttggaggagagagcacgaccccctgctgctgccgcaggatgttgcccttgattctaggcagagacaggaggcatcagacagctgtgacagccatggagctcccctaccacttctgagccagagggaagactttggagaagcagaagcccaaagacactgctgggagattggtctgtgctctgggagaaccctaggttgtgtttcccgtgtacaagccaccgatcttgtggaaggtaccaccactcccagccccgcttggctgagggctgcgggccacaggttttcaggaccgtgcttgtggttggaggctgtggactcaagtgcggctggcccgggactttcacagggcgcagggcgggctaggggaaggcccagctgtgaactgataagggggttttacagtctaggccagcacttcttcccctttcacgggcaaacgtgacattctttttcagcacctgtactcacccagctgcatcaaggcggaccagacttgtccaactcacagccccaaaagtcagggcagaataaagcacagtggctgattttagcatttttaaaatagaaatgtgagtcagcacctgatggacctcacagatccctgctatgccacgagggctgctgactggccttaaaagctcagggtggcccggggagctctcagagcaggcctgcttctcacagctgagccgctcagtgctgggggctggtgttgagtgggtgggaaccagccaggttccccgtggagtctgtgcaggaggctctggagggtctggggtagattccctggggagagacttctgtcatttgctttcctccaaggcagcctcagggtctagctggcaagtggtcactttcctgcagaaacatgctatcctcctgttctatcagataaggagggcagaatgaagaggttgggtggaaccctggccttggagtctggagactaggattttactcttgacaaagcacattatatagatagggatattgtcctccaattttcctttcacttccttaattaatattgttatcaatactactgttgatgtattgaactcctgccatcttccaggcactgtgctgaacacttcaccaaacactagagaattaaatcctcacaaccctatgaaagaggtactcttattcctatatgcacatggggaaactgagccttcaggaggttgagaaagttttccaaggtcaccaaacaggatgactttggacccagtctgttaatcatccccctctagagcaccattgatcaaaatggacttgaccatattcctctttggactggttacttagcaaaaaacagaaaaattatttaacaattgtttaaaaccacctctaagtttctctggatatctcattatataagagaggtctcacctctttggctcccacccagctcaactatggaaacacaggctgtaaatttttatagcccaaatcctagtgtccaccactttctgtgctctagtcccactagctgctcttggccctgccactcctggctccccggccttagtgagtttgggaaacatccctccagttcaaccttggcaccttcccttggacacacattaggtattatttctccttcagctgaaggctttgtagctattgaaaggcaaggcatctcttgatgtgagccttgaaggacaggttgctttgggtaggcagagagaagctggtaaggcgtatattgtctaagggtctggaggtggggtataaggggtatacaagtcatagagttggggataggcagaacccagagaggggagaaaactggcctgagatagaagaccttgcaagggagaaggagggtaggagcctggatggtgtgaaatgctagaggtgcatggctggaatggagggggtggggcaccaggcttcagatgcttctgggtgcagatgcagattttcaggatgtacaacatggagcatccccaaggcaactgtgttgagagcctgcgaggcaggtgaatgtggatcttctaccccctctcctgactgagttcaccaaggaacaagctttgtaaactatttgaggctcccaggggctcacccttctttgcatttccagctctcatgaggtcattgtgcacaggaaagctctctcctctaatctcctctgatcctactgcaccagagaaatcaagccagaattcaataaagtctcagtccagataaacaagacaaaagaaataagattcgagtagaagatctccttcaagggaaagttgctgtgtttgtccaagacctttgtcccatccatgtatcatcccccaagtaaacacttcttgttcacctgttcattagatttcaagtgcagtccctggcctgtaagtccctacaatgataagcttctcttatcattgcacattcttcatcaggaggatgccagaggagctcagccaacagttcctcatcagtagcagattcttcagaatcttgggcactacacagatgcccttgagctctttgaataaaggctgatttttagaaaaaacattaagacagaacttaaaaacaatagattgactataatccaaagacgagtgtacctctaaccacaattttcatttatttttaaatgtttccttcatggcctttcttgtggctcaccctatgcagtttgtgtatttgttgacaactttatgtgtttttaatatggtttttgccaaacttggtttttccgagaccgtcttttctcagaggctcagttttaccgtcctatctgcagtcggctactttcagtggcagaagaggccacatctgcttcctgtaggccctctgggcagaagcatgcgctggtgtctcctcctgatctgggcccaggggctgaggcaggctcccctcgcctcaggaatgatgacaggcacaatagaaacaacggggaacatttctgcagagaaaggtggctctatcatcttacaatgtcacctctcctccaccacggcacaagtgacccaggtcaactgggagcagcaggaccagcttctggccatttgtaatgctgacttggggtggcacatctccccatccttcaaggatcgagtggccccaggtcccggcctgggcctcaccctccagtcgctgaccgtgaacgatacaggggagtacttctgcatctatcacacctaccctgatgggacgtacactgggagaatcttcctggaggtcctagaaagctcagtggctgagcacggtgccaggttccagattccattgcttggagccatggccgcgacgctggtggtcatctgcacagcagtcatcgtggtggtcgcgttgactagaaagaagaaagccctcagaatccattctgtggaaggtgacctcaggagaaaatcagctggacaggaggaatggagccccagtgctccctcacccccaggaagctgtgtccaggcagaagctgcacctgctgggctctgtggagagcagcggggagaggactgtgccgagctgcatgactacttcaatgtcctgagttacagaagcctgggtaactgcagcttcttcacagagactggttagcaaccagaggcatcttctggaagatacacttttgtctttgctattatagatgaatatataagcagctgtactctccatcagtgctgcgtgtgtgtgtgtgtgtgtatgtgtgtgtgtgttcagttgagtgaataaatgtcatcctcttctccatcttca

SEQ ID NO: 250901 - DNA, 3149 bp, Artificial Sequence
  derived and/or modified sequence
atgttgcccttgattctaggcagagacaggaggcatcagacagctgtgacagccatggagctcccctaccacttctgagccagagggaagactttggagaagcagaagcccaaagacactgctgggagattggtctgtgctctgggagaaccctaggttgtgtttcccgtgtacaagccaccgatcttgtggaagtcggctactttcagtggcagaagaggccacatctgcttcctgtaggccctctgggcagaagcatgcgctggtgtctcctcctgatctgggcccaggggctgaggcaggctcccctcgcctcaggaatgatgacaggcacaatagaaacaacggggaacatttctgcagagaaaggtggctctatcatcttacaatgtcacctctcctccaccacggcacaagtgacccaggtcaactgggagcagcaggaccagcttctggccatttgtaatgctgacttggggtggcacatctccccatccttcaaggatcgagtggccccaggtcccggcctgggcctcaccctccagtcgctgaccgtgaacgatacaggggagtacttctgcatctatcacacctaccctgatgggacgtacactgggagaatcttcctggaggtcctagaaagctcagtggctgagcacggtgccaggttccagattccattgcttggagccatggccgcgacgctggtggtcatctgcacagcagtcatcgtggtggtcgcgttgactagaaagaagaaagccctcagaatccattctgtggaaggtgacctcaggagaaaatcagctggacaggaggaatggagccccagtgctccctcacccccaggaagctgtgtccaggcagaagctgcacctgctgggctctgtggagagcagcggggagaggactgtgccgagctgcatgactacttcaatgtcctgagttacagaagcctgggtaactgcagcttcttcacagagactggttagcaaccagaggcatcttctggaagatacacttttgtctttgctattatagatgaatatataagcagctgtactctccatcagtgctgcgtgtgtgtgtgtgtgtgtatgtgtgtgtgtgttcagttgagtgaataaatgtcatcctcttctccatcttcatttccttggccttttcgttctattccattttgcattatggcaggcctagggtgagtaacgtggatcttgatcataaatgcaaaattaaaaaatatcttgacctggttttaaatctggcagtttgagcagatcctatgtctctgagagacacattcctcataatggccagcattttgggctacaaggttttgtggttgatgatgaggatggcatgactgcagagccatcctcatctcattttttcacgtcattttcagtaactttcactcattcaaaggcaggttataagtaagtcctggtagcagcctctatggggagatttgagagtgactaaatcttggtatctgccctcaagaacttacagttaaatggggagacaatgttgtcatgaaaaggtattatagtaaggagagaaggagacatacacaggccttcaggaagagacgacagtttggggtgaggtagttggcataggcttatctgtgatgaagtggcctgggagcaccaaggggatgttgaggctagtctgggaggagcaggagttttgtctagggaacttgtaggaaattcttggagctgaaagtcccacaaagaaggccctggcaccaagggagtcagcaaacttcagattttattctctgggcaggcatttcaagtttccttttgctgtgacatactcatccattagacagcctgatacaggcctgtagcctcttccggccgtgtgtgctggggaagccccaggaaacgcacatgcccacacagggagccaagtcgtagcatttgggccttgatctaccttttctgcatcaatacactcttgagcctttgaaaaaagaacgtttcccactaaaaagaaaatgtggatttttaaaatagggactcttcctaggggaaaaaggggggctgggagtgatagagggtttaaaaaataaacaccttcaaactaacttcttcgaacccttttattcactccctgacgactttgtgctggggttggggtaactgaaccgcttatttctgtttaattgcattcaggctggatcttagaagacttttatccttccaccatctctctcagaggaatgagcggggaggttggatttactggtgactgattttctttcatgggccaaggaactgaaagagaatgtgaagcaaggttgtgtcttgcgcatggttaaaaataaagcattgtcctgcttcctaagacttagactggggttgacaattgttttagcaacaagacaattcaactatttctcctaggatttttattattattattttttcacttttctaccaaatgggttacataggaagaatgaactgaaatctgtccagagctccaagtcctttggaagaaagattagatgaacgtaaaaatgttgttgtttgctgtggcagtttacagcatttttcttgcaaaattagtgcaaatctgttggaaatagaacacaattcacaaattggaagtgaactaaaatgtaatgacgaaaagggagtagtgttttgatttggaggaggtgtatattcggcagaggttggactgagagttgggtgttatttaacataattatggtaattgggaaacatttataaacactattgggatggtgataaaatacaaaagggcctatagatgttagaaatgggtcaggttactgaaatgggattcaatttgaaaaaaatttttttaaatagaactcactgaactagattctcctctgagaaccagagaagaccatttcatagttggattcctggagacatgcgctatccaccacgtagccactttccacatgtggccatcaaccacttaagatggggttagtttaaatcaagatgtgctgttataattggtataagcataaaatcacactagattctggagatttaatatgaataataagaatactatttcagtagttttggtatattgtgtgtcaaaaatgataatattttggatgtattgggtgaaataaaatattaacatta

SEQ ID NO: 250902 - protein, 990 aa, Artificial Sequence
  derived and/or modified sequence
MGPPSSSGFYVSRAVALLLAGLVAALLLALAVLAALYGHCERVPPSELPGLRDLEAESSPPLRQKPTPTPKPSSARELAVTTTPSNWRPPGPWDQLRLPPWLVPLHYDLELWPQLRPDELPAGSLPFTGRVNITVRCTVATSRLLLHSLFQDCERAEVRGPLSPGTGNATVGRVPVDDVWFALDTEYMVLELSEPLKPGSSYELQLSFSGLVKEDLREGLFLNVYTDQGERRALLASQLEPTFARYVFPCFDEPALKATFNITMIHHPSYVALSNMPKLGQSEKEDVNGSKWTVTTFSTTPHMPTYLVAFVICDYDHVNRTERGKEIRIWARKDAIANGSADFALNITGPIFSFLEDLFNISYSLPKTDIIALPSFDNHAMENWGLMIFDESGLLLEPKDQLTEKKTLISYVVSHEIGHQWFGNLVTMNWWNNIWLNEGFASYFEFEVINYFNPKLPRNEIFFSNILHNILREDHALVTRAVAMKVENFKTSEIQELFDIFTYSKGASMARMLSCFLNEHLFVSALKSYLKTFSYSNAEQDDLWRHFQMAIDDQSTVILPATIKNIMDSWTHQSGFPVITLNVSTGVMKQEPFYLENIKNRTLLTSNDTWIVPILWIKNGTTQPLVWLDQSSKVFPEMQVSDSDHDWVILNLNMTGYYRVNYDKLGWKKLNQQLEKDPKAIPVIHRLQLIDDAFSLSKNNYIEIETALELTKYLAEEDEIIVWHTVLVNLVTRDLVSEVNIYDIYSLLKRYLLKRLNLIWNIYSTIIRENVLALQDDYLALISLEKLFVTACWLGLEDCLQLSKELFAKWVDHPENEIPYPIKDVVLCYGIALGSDKEWDILLNTYTNTTNKEEKIQLAYAMSCSKDPWILNRYMEYAISTSPFTSNETNIIEVVASSEVGRYVAKDFLVNNWQAVSKRYGTQSLINLIYTIGRTVTTDLQIVELQQFFSNMLEEHQRIRVHANLQTIKNENLKNKKLSARIAAWLRRNT

SEQ ID NO: 250903 - protein, 979 aa, Artificial Sequence
  derived and/or modified sequence
MGPPSSSGFYVSRAVALLLAGLVAALLLALAVLAALYGHCERVPPSELPGLRDLEAESSPPLRQKPTPTPKPSSARELAVTTTPSNWRPPGPWDQLRLPPWLVPLHYDLELWPQLRPDELPAGSLPFTGRVNITVRCTVATSRLLLHSLFLSPGTGNATVGRVPVDDVWFALDTEYMVLELSEPLKPGSSYELQLSFSGLVKEDLREGLFLNVYTDQGERRALLASQLEPTFARYVFPCFDEPALKATFNITMIHHPSYVALSNMPKLGQSEKEDVNGSKWTVTTFSTTPHMPTYLVAFVICDYDHVNRTERGKEIRIWARKDAIANGSADFALNITGPIFSFLEDLFNISYSLPKTDIIALPSFDNHAMENWGLMIFDESGLLLEPKDQLTEKKTLISYVVSHEIGHQWFGNLVTMNWWNNIWLNEGFASYFEFEVINYFNPKLPRNEIFFSNILHNILREDHALVTRAVAMKVENFKTSEIQELFDIFTYSKGASMARMLSCFLNEHLFVSALKSYLKTFSYSNAEQDDLWRHFQMAIDDQSTVILPATIKNIMDSWTHQSGFPVITLNVSTGVMKQEPFYLENIKNRTLLTSNDTWIVPILWIKNGTTQPLVWLDQSSKVFPEMQVSDSDHDWVILNLNMTGYYRVNYDKLGWKKLNQQLEKDPKAIPVIHRLQLIDDAFSLSKNNYIEIETALELTKYLAEEDEIIVWHTVLVNLVTRDLVSEVNIYDIYSLLKRYLLKRLNLIWNIYSTIIRENVLALQDDYLALISLEKLFVTACWLGLEDCLQLSKELFAKWVDHPENEIPYPIKDVVLCYGIALGSDKEWDILLNTYTNTTNKEEKIQLAYAMSCSKDPWILNRYMEYAISTSPFTSNETNIIEVVASSEVGRYVAKDFLVNNWQAVSKRYGTQSLINLIYTIGRTVTTDLQIVELQQFFSNMLEEHQRIRVHANLQTIKNENLKNKKLSARIAAWLRRNT

SEQ ID NO: 250904 - DNA, 2973 bp, Artificial Sequence
  derived and/or modified sequence
atgggcccccccagcagcagcggcttctacgtgagcagagccgtggccctgctgctggccggcctggtggccgccctgctgctggccctggccgtgctggccgccctgtacggccactgcgagagagtgccccccagcgagctgcccggcctgagagacctggaggccgagagcagcccccccctgagacagaagcccacccccacccccaagcccagcagcgccagagagctggccgtgaccaccacccccagcaactggagaccccccggcccctgggaccagctgagactgcccccctggctggtgcccctgcactacgacctggagctgtggccccagctgagacccgacgagctgcccgccggcagcctgcccttcaccggcagagtgaacatcaccgtgagatgcaccgtggccaccagcagactgctgctgcacagcctgttccaggactgcgagagagccgaggtgagaggccccctgagccccggcaccggcaacgccaccgtgggcagagtgcccgtggacgacgtgtggttcgccctggacaccgagtacatggtgctggagctgagcgagcccctgaagcccggcagcagctacgagctgcagctgagcttcagcggcctggtgaaggaggacctgagagagggcctgttcctgaacgtgtacaccgaccagggcgagagaagagccctgctggccagccagctggagcccaccttcgccagatacgtgttcccctgcttcgacgagcccgccctgaaggccaccttcaacatcaccatgatccaccaccccagctacgtggccctgagcaacatgcccaagctgggccagagcgagaaggaggacgtgaacggcagcaagtggaccgtgaccaccttcagcaccaccccccacatgcccacctacctggtggccttcgtgatctgcgactacgaccacgtgaacagaaccgagagaggcaaggagatcagaatctgggccagaaaggacgccatcgccaacggcagcgccgacttcgccctgaacatcaccggccccatcttcagcttcctggaggacctgttcaacatcagctacagcctgcccaagaccgacatcatcgccctgcccagcttcgacaaccacgccatggagaactggggcctgatgatcttcgacgagagcggcctgctgctggagcccaaggaccagctgaccgagaagaagaccctgatcagctacgtggtgagccacgagatcggccaccagtggttcggcaacctggtgaccatgaactggtggaacaacatctggctgaacgagggcttcgccagctacttcgagttcgaggtgatcaactacttcaaccccaagctgcccagaaacgagatcttcttcagcaacatcctgcacaacatcctgagagaggaccacgccctggtgaccagagccgtggccatgaaggtggagaacttcaagaccagcgagatccaggagctgttcgacatcttcacctacagcaagggcgccagcatggccagaatgctgagctgcttcctgaacgagcacctgttcgtgagcgccctgaagagctacctgaagaccttcagctacagcaacgccgagcaggacgacctgtggagacacttccagatggccatcgacgaccagagcaccgtgatcctgcccgccaccatcaagaacatcatggacagctggacccaccagagcggcttccccgtgatcaccctgaacgtgagcaccggcgtgatgaagcaggagcccttctacctggagaacatcaagaacagaaccctgctgaccagcaacgacacctggatcgtgcccatcctgtggatcaagaacggcaccacccagcccctggtgtggctggaccagagcagcaaggtgttccccgagatgcaggtgagcgacagcgaccacgactgggtgatcctgaacctgaacatgaccggctactacagagtgaactacgacaagctgggctggaagaagctgaaccagcagctggagaaggaccccaaggccatccccgtgatccacagactgcagctgatcgacgacgccttcagcctgagcaagaacaactacatcgagatcgagaccgccctggagctgaccaagtacctggccgaggaggacgagatcatcgtgtggcacaccgtgctggtgaacctggtgaccagagacctggtgagcgaggtgaacatctacgacatctacagcctgctgaagagatacctgctgaagagactgaacctgatctggaacatctacagcaccatcatcagagagaacgtgctggccctgcaggacgactacctggccctgatcagcctggagaagctgttcgtgaccgcctgctggctgggcctggaggactgcctgcagctgagcaaggagctgttcgccaagtgggtggaccaccccgagaacgagatcccctaccccatcaaggacgtggtgctgtgctacggcatcgccctgggcagcgacaaggagtgggacatcctgctgaacacctacaccaacaccaccaacaaggaggagaagatccagctggcctacgccatgagctgcagcaaggacccctggatcctgaacagatacatggagtacgccatcagcaccagccccttcaccagcaacgagaccaacatcatcgaggtggtggccagcagcgaggtgggcagatacgtggccaaggacttcctggtgaacaactggcaggccgtgagcaagagatacggcacccagagcctgatcaacctgatctacaccatcggcagaaccgtgaccaccgacctgcagatcgtggagctgcagcagttcttcagcaacatgctggaggagcaccagagaatcagagtgcacgccaacctgcagaccatcaagaacgagaacctgaagaacaagaagctgagcgccagaatcgccgcctggctgagaagaaacacctag

SEQ ID NO: 250905 - DNA, 2940 bp, Artificial Sequence
  derived and/or modified sequence
atgggcccccccagcagcagcggcttctacgtgagcagagccgtggccctgctgctggccggcctggtggccgccctgctgctggccctggccgtgctggccgccctgtacggccactgcgagagagtgccccccagcgagctgcccggcctgagagacctggaggccgagagcagcccccccctgagacagaagcccacccccacccccaagcccagcagcgccagagagctggccgtgaccaccacccccagcaactggagaccccccggcccctgggaccagctgagactgcccccctggctggtgcccctgcactacgacctggagctgtggccccagctgagacccgacgagctgcccgccggcagcctgcccttcaccggcagagtgaacatcaccgtgagatgcaccgtggccaccagcagactgctgctgcacagcctgttcctgagccccggcaccggcaacgccaccgtgggcagagtgcccgtggacgacgtgtggttcgccctggacaccgagtacatggtgctggagctgagcgagcccctgaagcccggcagcagctacgagctgcagctgagcttcagcggcctggtgaaggaggacctgagagagggcctgttcctgaacgtgtacaccgaccagggcgagagaagagccctgctggccagccagctggagcccaccttcgccagatacgtgttcccctgcttcgacgagcccgccctgaaggccaccttcaacatcaccatgatccaccaccccagctacgtggccctgagcaacatgcccaagctgggccagagcgagaaggaggacgtgaacggcagcaagtggaccgtgaccaccttcagcaccaccccccacatgcccacctacctggtggccttcgtgatctgcgactacgaccacgtgaacagaaccgagagaggcaaggagatcagaatctgggccagaaaggacgccatcgccaacggcagcgccgacttcgccctgaacatcaccggccccatcttcagcttcctggaggacctgttcaacatcagctacagcctgcccaagaccgacatcatcgccctgcccagcttcgacaaccacgccatggagaactggggcctgatgatcttcgacgagagcggcctgctgctggagcccaaggaccagctgaccgagaagaagaccctgatcagctacgtggtgagccacgagatcggccaccagtggttcggcaacctggtgaccatgaactggtggaacaacatctggctgaacgagggcttcgccagctacttcgagttcgaggtgatcaactacttcaaccccaagctgcccagaaacgagatcttcttcagcaacatcctgcacaacatcctgagagaggaccacgccctggtgaccagagccgtggccatgaaggtggagaacttcaagaccagcgagatccaggagctgttcgacatcttcacctacagcaagggcgccagcatggccagaatgctgagctgcttcctgaacgagcacctgttcgtgagcgccctgaagagctacctgaagaccttcagctacagcaacgccgagcaggacgacctgtggagacacttccagatggccatcgacgaccagagcaccgtgatcctgcccgccaccatcaagaacatcatggacagctggacccaccagagcggcttccccgtgatcaccctgaacgtgagcaccggcgtgatgaagcaggagcccttctacctggagaacatcaagaacagaaccctgctgaccagcaacgacacctggatcgtgcccatcctgtggatcaagaacggcaccacccagcccctggtgtggctggaccagagcagcaaggtgttccccgagatgcaggtgagcgacagcgaccacgactgggtgatcctgaacctgaacatgaccggctactacagagtgaactacgacaagctgggctggaagaagctgaaccagcagctggagaaggaccccaaggccatccccgtgatccacagactgcagctgatcgacgacgccttcagcctgagcaagaacaactacatcgagatcgagaccgccctggagctgaccaagtacctggccgaggaggacgagatcatcgtgtggcacaccgtgctggtgaacctggtgaccagagacctggtgagcgaggtgaacatctacgacatctacagcctgctgaagagatacctgctgaagagactgaacctgatctggaacatctacagcaccatcatcagagagaacgtgctggccctgcaggacgactacctggccctgatcagcctggagaagctgttcgtgaccgcctgctggctgggcctggaggactgcctgcagctgagcaaggagctgttcgccaagtgggtggaccaccccgagaacgagatcccctaccccatcaaggacgtggtgctgtgctacggcatcgccctgggcagcgacaaggagtgggacatcctgctgaacacctacaccaacaccaccaacaaggaggagaagatccagctggcctacgccatgagctgcagcaaggacccctggatcctgaacagatacatggagtacgccatcagcaccagccccttcaccagcaacgagaccaacatcatcgaggtggtggccagcagcgaggtgggcagatacgtggccaaggacttcctggtgaacaactggcaggccgtgagcaagagatacggcacccagagcctgatcaacctgatctacaccatcggcagaaccgtgaccaccgacctgcagatcgtggagctgcagcagttcttcagcaacatgctggaggagcaccagagaatcagagtgcacgccaacctgcagaccatcaagaacgagaacctgaagaacaagaagctgagcgccagaatcgccgcctggctgagaagaaacacctag

SEQ ID NO: 250906 - DNA, 2973 bp, Artificial Sequence
  derived and/or modified sequence
atgggtcccccttccagctcaggcttctacgtgagtcgagccgtagcactgctgcttgcaggtctggtagcagctctcctcctggccttggccgtgctagccgccttatacgggcattgtgaacgcgtcccgccatcagagctcccaggtttgcgggacctggaagcggagagctccccaccgttgcgtcagaagccaacacccacgcctaagcctagctccgccagggaattggccgtgaccaccactcctagcaattggcggccgcccggaccctgggatcagttgaggctacccccctggttggtgcctctccactatgatctcgagctctggccccagctccgccctgatgaactccccgcaggttccttgccctttaccgggagggtcaacattactgtgcggtgcacagtggccacaagtagactgttactgcactccctctttcaagactgcgagagagcagaagtgcggggcccgttatctccgggcacaggcaatgctacagttggcagagtgcccgtggatgacgtatggtttgctctggataccgaatatatggtgctggaactgagcgagccacttaagccaggttcgagctacgaactacagttgagtttttccggtcttgttaaagaagacctgcgagaggggttgttcttaaatgtttacacagaccagggggagagacgggctctcctggctagccagctggagccaacctttgctcggtatgttttcccttgcttcgacgagccagcactaaaggcaacctttaacatcaccatgatccatcaccctagctatgtcgctctgagcaacatgccaaagttgggccagtctgagaaagaagacgtgaacggttccaagtggacagtcaccactttttcaacgacccctcacatgcccacatatctggtagctttcgtaatatgcgactacgatcacgtgaatcggacagaaagagggaaagagatacggatctgggcccggaaagatgccatcgctaacgggagcgccgatttcgctctgaatatcaccggcccaatcttcagttttctcgaggacctgtttaatatatcttatagccttccaaaaactgacatcatagcactgccaagctttgacaaccacgctatggaaaactgggggcttatgattttcgacgaatctggactattgctggagcctaaggatcagctgaccgagaaaaagacacttatttcttacgtggtttctcacgagattgggcaccagtggttcgggaacctagtaaccatgaactggtggaacaatatctggctgaacgaaggttttgcctcctattttgaatttgaggtgatcaactatttcaaccccaaattgcctaggaatgaaattttcttctcaaatattctccataatattctgcgcgaggatcacgctttagtgacccgcgctgttgctatgaaggttgaaaatttcaagaccagcgaaatacaggagctcttcgacatttttacatacagcaaaggtgcatctatggcccggatgctgtcgtgcttcctgaacgaacacctgttcgtgtcagccctcaagtcatatttaaaaaccttttcttactcaaatgcagagcaggacgacctctggcgccactttcagatggcaattgatgatcagtcgactgtgatccttcctgctactataaaaaatattatggactcctggacgcaccaaagcgggttcccagtgattactctgaatgtttcaacaggtgttatgaagcaggagcccttttatctggagaacatcaagaataggaccttactgactagcaacgacacttggatcgttccaattctgtggataaaaaacggcacaactcagcctctggtctggttagatcagagcagtaaagtcttcccagaaatgcaggtgtccgacagcgaccatgattgggtgattctgaatctgaacatgacaggctactatagggtgaactacgacaaactcggctggaagaagctcaatcagcaacttgaaaaagacccaaaagctatcccggtcatccacaggctgcagctgattgacgacgctttttcgctgagcaagaataactatatcgagatagagaccgccttagaacttacaaaatatctggccgaggaggacgagatcattgtctggcatacggtcctggttaacttggtcacgcgcgacttggtttccgaagtgaatatctatgatatctacagcttgctgaagcgatacctgctcaagcgcctcaacttgatttggaacatttacagtacgattattagagaaaacgtcctggctcttcaggatgattacctcgccttgatctcgctggaaaagctgtttgtgaccgcctgttggctggggctggaagactgcctgcaactgagcaaagaactctttgctaaatgggtcgatcatccagagaatgaaatcccctaccccatcaaagatgtagtgctctgctacggaattgccctcggcagcgacaaggaatgggatattctgctcaacacctataccaacactaccaataaggaagagaagatccagctggcgtacgccatgtcctgcagtaaggacccttggatcctaaatcggtacatggagtacgctataagcacaagccccttcaccagcaatgagactaacatcatcgaggttgtcgcaagtagcgaggtcggaagatacgtcgcaaaggatttcctggttaataactggcaagctgtgtctaagcggtacggaactcagtcccttataaacctgatatatactatcggccggaccgtgacaacagacctacagattgttgaactgcaacaatttttcagtaacatgctggaggagcaccagcggattcgagtgcacgccaacttgcagacaatcaagaacgagaatctgaaaaacaagaagctcagcgcgagaattgccgcatggcttcgcagaaatacctag

SEQ ID NO: 250907 - DNA, 2940 bp, Artificial Sequence
  derived and/or modified sequence
atggggcctccctcttcaagtgggttctatgtctctcgagctgtggcattgttgctggccggtttagttgccgcactgctgttagctctcgccgtgctagccgctctgtacggccattgtgaacgcgtgcctccttcagaactgcctggattgagggacctcgaggctgagtcaagccctcctctccgtcagaagcccacaccaaccccaaagcccagttccgcgagagaactagccgtaactaccacacctagtaattggcggccaccaggcccttgggaccagctgcggcttccaccttggcttgttccactacactacgatttggaactgtggccccaacttaggcccgacgagctgccagccggatcactccctttcacaggacgcgtcaacatcaccgttcgctgcactgtggccacttcccgcttattactgcactctctctttttgagcccaggaaccggcaacgccaccgtgggaagggtaccggtggacgatgtgtggttcgcattagatacagagtacatggtattggaactcagcgaacctctaaagccaggctccagctatgagctccagctgagttttagtggactagtgaaggaggatctcagagaaggcctattccttaacgtttatactgaccagggcgagaggagagctctccttgcaagccagctggaaccaacattcgctaggtacgtattcccatgttttgacgagccagccctgaaagccacatttaacatcactatgatccaccatccatcatatgtggccttaagtaatatgcccaagctggggcagtccgaaaaagaggacgtcaacggctccaagtggaccgtcacaacattttcaacaacacctcacatgccgacataccttgtggcattcgtgatctgtgattatgaccacgtgaacaggaccgaacgcggaaaagaaatcaggatctgggccaggaaagacgctatcgcgaatgggagcgcagatttcgccctcaatataacgggcccaatcttctcttttctagaggacctttttaacatctcttattccctcccaaagaccgacatcatcgcgctcccgtcctttgataaccacgctatggagaattgggggctcatgatctttgacgaatctggactcctcttggaacctaaagaccaactgaccgagaaaaaaactctaataagctacgtggtgtcgcacgaaattgggcaccaatggttcggcaatctggttaccatgaactggtggaacaacatatggctgaacgaaggctttgcctcctacttcgagttcgaggtcataaactacttcaaccccaaactgccaagaaacgagatcttcttctccaatattttgcataatattctcagggaggatcacgccctggtcacccgagccgtggctatgaaggtggagaactttaaaactagcgaaatccaagaactctttgacatatttacgtattccaagggggcttcgatggcacgcatgctctcctgctttctcaacgaacacctgtttgtttctgcgttgaaatcttacctcaagacttttagctattctaacgccgaacaggatgacctgtggcgccacttccagatggcaatcgacgatcagagtaccgtcatattgcccgctaccattaaaaatataatggattcttggacacatcagtccggcttccctgtgataacactgaatgtgagcactggggttatgaaacaggagccattttatctggagaacattaaaaacagaacactgctcacctccaacgatacatggattgtgccaatattgtggattaaaaacgggaccacacagccgttagtgtggctagaccagtccagcaaagttttccccgaaatgcaggtaagtgactcagaccatgactgggtaatcctgaacctcaatatgacaggttattatcgagtgaactatgacaaactcggatggaagaagcttaaccagcaactggaaaaagatccgaaggccattcccgtaattcacagacttcagttgatcgatgacgccttctcactgtcaaaaaataactatattgagatcgaaacagccctggagctgacaaagtatctcgccgaagaggacgaaattattgtgtggcatactgtactggtgaacctggtgacgcgagatctggttagtgaggtaaacatctatgatatctactcactgctgaagcgctacttgctgaagcgcttaaatctcatctggaatatatacagcaccatcatccgtgagaacgttctcgcactgcaggatgactacttggctctgatatcactggaaaaactgttcgtgactgcctgttggttagggttagaggactgcctgcagttgagcaaagagctgtttgcgaagtgggtggaccacccggaaaatgagatcccctatcctatcaaggacgttgtgttatgctatggcatcgctctgggttccgataaggaatgggatattctccttaacacgtacacaaacacaactaacaaggaggaaaaaattcagcttgcgtatgccatgtcttgctccaaggatccatggatcctgaataggtacatggaatacgcaatatccacttcaccctttacttcgaacgaaacaaacattatcgaagtggtggcgagctctgaagttggaaggtatgtggccaaagacttcctcgttaacaattggcaggcagtgtccaagaggtatggcactcagtcccttataaacctcatttacactatcgggaggaccgtaaccaccgacttgcaaatcgtcgaactccagcaattcttctcgaacatgcttgaagagcaccagaggattcgggtacatgccaacctgcagacgatcaaaaacgagaacctgaaaaacaaaaaactatccgccagaatagcagcctggcttcgccggaatacctag

SEQ ID NO: 250908 - DNA, 2973 bp, Artificial Sequence
  derived and/or modified sequence
atgggcccccccagcagcagcggcttctacgtgtccagagctgtggccctgctgctggccggcctggtggccgccctgctgctggccctggccgtgctggccgccctgtatggccactgtgagcgggtgccccccagcgagctgcccggcctgcgggacctggaggccgagagcagcccccccctgcggcagaagcccacccccacccccaagcccagcagcgcccgggagctggccgtgaccaccacccccagcaactggaggcctcctggcccctgggaccagctgcggctgcccccctggctggtgcccctgcactatgacctggagctgtggccccagctgcggccagatgagctgcctgctggcagcctgcccttcaccggccgggtgaacatcaccgtgcgctgcaccgtggccaccagccggctgctgctgcacagcctcttccaggactgtgagcgggcagaggtgcggggccccctgagccctggcactggaaatgccaccgtgggccgggtgcctgtggatgatgtgtggtttgccctggacacagagtacatggtgctggagctgtctgagcccctgaagccaggcagcagctatgagctgcagctgtccttcagcggcctggtgaaggaggacctgcgggagggcctcttcctgaatgtgtacacagaccagggcgagcggcgggccctgctggccagccagctggagcccacctttgcccgctacgtgttcccctgctttgatgagcccgccctgaaggccaccttcaacatcaccatgatccaccaccccagctatgtggccctgagcaacatgcccaagctgggccagagcgagaaggaggatgtgaatggcagcaagtggacagtgaccaccttcagcaccaccccccacatgcccacctacctggtggccttcgtcatctgtgactatgaccacgtgaacagaacagagcggggcaaggagatccgcatctgggccaggaaggatgccatcgccaacggcagcgctgactttgccctgaacatcaccggccccatcttctccttcctggaggacctcttcaacatctcctacagcctgcccaagacagacatcatcgccctgcccagctttgacaaccacgccatggagaactggggcctgatgatctttgatgagagcggcctgctgctggagcccaaggaccagctgacagagaagaagaccctcatctcctatgtggtgtcccatgaaattggccaccagtggtttggaaacctggtgaccatgaactggtggaacaacatctggctgaatgaaggatttgccagctactttgaatttgaggtgatcaactacttcaaccccaagctgcccagaaatgagatcttcttcagcaacatcctgcacaacatcctgagagaagatcatgccctggtgaccagggctgtggccatgaaggtggagaacttcaagaccagcgagatccaggagctgtttgacatcttcacctacagcaaaggagcctccatggccaggatgctgagctgcttcctgaatgagcacctgtttgtgtctgccctgaagagctacctgaagaccttctcctacagcaatgctgagcaggatgacctgtggaggcacttccagatggccattgatgaccagagcaccgtcatcctgcctgccaccatcaagaacatcatggacagctggacccaccagagcggcttccctgtgatcaccctgaatgtgtccactggagtgatgaagcaggagcccttctacctggagaacatcaagaacagaaccctgctgaccagcaatgacacctggatcgtgcccatcctgtggatcaagaatggcaccacccagcccctggtgtggctggaccagagcagcaaggtgtttcctgagatgcaggtgtctgacagcgaccatgactgggtgatcctgaacctgaacatgacaggctactacagagtgaactatgacaagctgggctggaagaagctgaaccagcagctggagaaggaccccaaggccatccctgtgatccaccggctgcagctgattgatgatgccttcagcctgagcaagaacaactacatcgagattgaaacagccctggagctgaccaagtacctggccgaggaggatgagatcatcgtgtggcacacagtgctggtgaacctggtgacccgggacctggtgtctgaggtgaacatctatgacatctacagcctgctgaagcgctacctgctgaagaggctgaacctgatctggaacatctacagcaccatcatcagagaaaatgtgctggccctgcaggatgactacctggccctgatcagcctggagaagctgtttgtgacagcctgctggctgggcctggaggactgcctgcagctgagcaaggagctgtttgccaagtgggtggaccacccagaaaatgagatcccctaccccatcaaggatgtggtgctgtgctatggaattgccctgggcagtgacaaggagtgggacatcctgctgaacacctacaccaacaccaccaacaaggaggagaagatccagctggcctatgccatgagctgcagcaaggacccctggatcctgaaccgctacatggagtatgccatcagcaccagccccttcaccagcaatgagaccaacatcatcgaggtggtggccagcagcgaggtgggccgctacgtggccaaggacttcctggtgaacaactggcaggccgtgtccaagagatatggcacccagagcctcatcaacctgatctacaccatcggccgcacagtgaccacagacctgcagatcgtggagctgcagcagttcttcagcaacatgctggaggagcaccagaggatccgggtgcacgccaacctgcagaccatcaagaatgaaaacctgaagaacaagaagctgagcgccagaattgctgcctggctgcggaggaacacctag

SEQ ID NO: 250909 - DNA, 2940 bp, Artificial Sequence
  derived and/or modified sequence
atgggcccccccagcagcagcggcttctacgtgtccagagctgtggccctgctgctggccggcctggtggccgccctgctgctggccctggccgtgctggccgccctgtatggccactgtgagcgggtgccccccagcgagctgcccggcctgcgggacctggaggccgagagcagcccccccctgcggcagaagcccacccccacccccaagcccagcagcgcccgggagctggccgtgaccaccacccccagcaactggaggcctcctggcccctgggaccagctgcggctgcccccctggctggtgcccctgcactatgacctggagctgtggccccagctgcggccagatgagctgcctgctggcagcctgcccttcaccggccgggtgaacatcaccgtgcgctgcaccgtggccaccagccggctgctgctgcacagcctcttcctgagccctggcactggaaatgccaccgtgggccgggtgcctgtggatgatgtgtggtttgccctggacacagagtacatggtgctggagctgtctgagcccctgaagccaggcagcagctatgagctgcagctgtccttcagcggcctggtgaaggaggacctgcgggagggcctcttcctgaatgtgtacacagaccagggcgagcggcgggccctgctggccagccagctggagcccacctttgcccgctacgtgttcccctgctttgatgagcccgccctgaaggccaccttcaacatcaccatgatccaccaccccagctatgtggccctgagcaacatgcccaagctgggccagagcgagaaggaggatgtgaatggcagcaagtggacagtgaccaccttcagcaccaccccccacatgcccacctacctggtggcctttgtgatctgtgactatgaccacgtgaacagaacagagcggggcaaggagatccgcatctgggccaggaaggatgccatcgccaatggatctgctgactttgccctgaacatcaccggccccatcttctccttcctggaggacctcttcaacatctcctacagcctgcccaagacagacatcatcgccctgcccagctttgacaaccacgccatggagaactggggcctgatgatctttgatgaaagtggcctgctgctggagcccaaggaccagctgacagagaagaagaccctcatctcctatgtggtgtcccatgagatcggccaccagtggtttggaaacctggtgaccatgaactggtggaacaacatctggctgaatgaaggatttgccagctactttgaatttgaagtcatcaactacttcaaccccaagctgcccagaaatgagatcttcttcagcaacatcctgcacaacatcctgcgggaggaccacgccctggtgaccagggctgtggccatgaaggtggagaacttcaagaccagcgagatccaggagctgtttgacatcttcacctacagcaagggggcctccatggccaggatgctgagctgcttcctgaatgagcacctgtttgtgtctgccctgaagagctacctgaagaccttctcctacagcaatgctgagcaggatgacctgtggaggcacttccagatggccattgatgaccagagcaccgtcatcctgcctgccaccatcaagaacatcatggacagctggacccaccagagcggcttccctgtgatcaccctgaatgtgtccactggagtgatgaagcaggagcccttctacctggagaacatcaagaacagaaccctgctgaccagcaatgacacctggatcgtgcccatcctgtggatcaagaatggcaccacccagcccctggtgtggctggaccagagcagcaaggtgtttcctgagatgcaggtgtctgacagcgaccatgactgggtgatcctgaacctgaacatgacaggctactacagagtgaactatgacaagctgggctggaagaagctgaaccagcagctggagaaggaccccaaggccatccctgtgatccaccggctgcagctgattgatgatgccttcagcctgagcaagaacaactacattgaaattgaaacagccctggagctgaccaagtacctggccgaggaggatgagatcatcgtgtggcacacagtgctggtgaacctggtgacccgggacctggtgtctgaggtgaacatctatgacatctacagcctgctgaagcgctacctgctgaagaggctgaacctgatctggaacatctacagcaccatcatccgggagaatgtgctggccctgcaggatgactacctggccctgatcagcctggagaagctgtttgtgacagcctgctggctgggcctggaggactgcctgcagctgagcaaggagctgtttgccaagtgggtggaccacccagaaaatgagatcccctaccccatcaaggatgtggtgctgtgctacggcatcgccctgggcagtgacaaggagtgggacatcctgctgaacacctacaccaacaccaccaacaaggaggagaagatccagctggcctatgccatgagctgcagcaaggacccctggatcctgaaccgctacatggagtatgccatcagcaccagccccttcaccagcaatgagaccaacatcatcgaggtggtggccagcagcgaggtgggccgctacgtggccaaggacttcctggtgaacaactggcaggccgtgtccaagagatatggcacccagagcctcatcaacctgatctacaccatcggccgcacagtgaccacagacctgcagatcgtggagctgcagcagttcttcagcaacatgctggaggagcaccagaggatccgggtgcacgccaacctgcagaccatcaagaatgaaaacctgaagaacaagaagctgagcgccagaattgctgcctggctgcggaggaacacctag

SEQ ID NO: 250910 - DNA, 4581 bp, Artificial Sequence
  derived and/or modified sequence
aggaggaagaggcacgatacaagagaggaggggcaggggtcgcagcactgaacaccctggccggggttttgacagctgccacagtctctgagctccagcctcgcgcctgaacccggtccctgccatggggcccccttccagctcaggcttctatgtgagccgcgcagtggccctgctgctggctgggctggtagccgccctcctgctggcgctggccgtactcgccgccttgtacggccactgcgagcgcgtcccaccgtcggagctgcctggactcagggacttggaagccgagtcttcccctcccctcaggcagaagccgacgccaaccccgaaacccagcagtgcacgcgagctagcggtgacgaccaccccgagcaactggcgacccccggggccctgggaccagctacgcctgccgccctggctcgtgccgctgcactacgatctggagctgtggccgcagctgaggcccgacgagcttccggccgggtctttgcccttcactggccgcgtgaacatcacggtgcgctgcacggtggccacctctcgactgctgctgcatagcctcttccaggactgcgagcgcgccgaggtgcggggacccctttccccgggcactgggaacgccacagtgggccgcgtgcccgtggacgacgtgtggttcgcgctggacacggaatacatggtgctggagctcagtgagcccctgaaacctggtagcagctacgagctgcagcttagcttctcgggcctggtgaaggaagacctcagggagggactcttcctcaacgtctacaccgaccagggcgagcgcagggccctgttagcgtcccagctggaaccaacatttgccaggtatgttttcccttgttttgatgagccagctctgaaggcaacttttaatattacaatgattcatcatccaagttatgtggccctttccaacatgccaaagctaggtcagtctgaaaaagaagatgtgaatggaagcaaatggactgttacaaccttttccactacgccccacatgccaacttacttagtcgcatttgttatatgtgactatgaccacgtcaacagaacagaaaggggcaaggagatacgcatctgggcccggaaagatgcaattgcaaatggaagtgcagactttgctttgaacatcacaggtcccatcttctcttttctggaggatttgtttaatatcagttactctcttccaaaaacagatataattgccttgcctagttttgacaaccatgcaatggaaaactggggactaatgatatttgatgaatcaggattgttgttggaaccaaaagatcaactgacagaaaaaaagactctgatctcctatgttgtctcccacgagattggacaccagtggtttggaaacttggttaccatgaattggtggaacaatatctggctcaacgagggttttgcatcttattttgagtttgaagtaattaactactttaatcctaaactcccaagaaatgagatctttttttctaacattttacataatatcctcagagaagatcacgccctggtgactagagctgtggccatgaaggtggaaaatttcaaaacaagtgaaatacaggaactctttgacatatttacttacagcaagggagcgtctatggcccggatgctttcttgtttcttgaatgagcatttatttgtcagtgcactcaagtcatatttgaagacattttcctactcaaacgctgagcaagatgatctatggaggcattttcaaatggccatagatgaccagagtacagttattttgccagcaacaataaaaaacataatggacagttggacacaccagagtggttttccagtgatcactttaaatgtgtctactggcgtcatgaaacaggagccattttatcttgaaaacattaaaaatcggactcttctaaccagcaatgacacatggattgtccctattctttggataaaaaatggaactacacaacctttagtctggctagatcaaagcagcaaagtattcccagaaatgcaagtttcagattctgaccatgactgggtgattttgaatttgaatatgactggatattatagagttaattatgataaattaggttggaagaaactaaatcaacaacttgaaaaggatcctaaggcgattcctgttattcacagactgcagttgattgatgatgccttttccttgtctaaaaacaattatattgagattgaaacagcacttgagttaaccaagtaccttgctgaagaagatgaaattatagtatggcatacagtcttggtaaacttggtaaccagggatcttgtttctgaggtgaacatctatgatatatactcattattaaagaggtacctattaaagagacttaatttaatatggaatatttattcaactataattcgtgaaaatgtgttggcattacaagatgactacttagctctaatatcactggaaaaactttttgtaactgcgtgttggttgggccttgaagactgccttcagctgtcaaaagaacttttcgcaaaatgggtggatcatccagaaaatgaaataccttatccaattaaagatgtggttttatgttatggcattgccttgggaagtgataaagagtgggacatcttgttaaatacttacactaatacaacaaacaaagaagaaaagattcaacttgcttatgcaatgagctgcagcaaagacccatggatacttaacagatatatggagtatgccatcagcacatctccattcacttctaatgaaacaaatataattgaggttgtggcttcatctgaagttggccggtatgtcgcaaaagacttcttagtcaacaactggcaagctgtgagtaaaaggtatggaacacaatcattgattaatctaatatatacaatagggagaaccgtaactacagatttacagattgtggagctgcagcagtttttcagtaacatgttggaggaacaccagaggatcagagttcatgccaacttacagacaataaagaatgaaaatctgaaaaacaagaagctaagtgccaggatagctgcgtggctaaggagaaacacatagcttgtggctatctttcagcactcctcttgcatattataatgtagtttgttcacagttttgtcttccaatactttgtgagtctggaaaaccacacattttatttgtatttcagtcacatttattactcagagtgccattcttctcatattgtcatgtttggccctgagggtgggtgattgctgacaattttgccaatgctgctgtatttctgggaaagatgtcacttcatgttgggttataatcccacagaatttactttaaatgtcacgtaaaaacaaattcacctaagatagtcttgcttattttgttgcgaaggccagtggaatataaaaatcaatggcattaatgaggagcacattctttgctgagggaaataacagtttttccaggccctagggtttatttagttcaacattgaagattgaaaagactaatgagaagataacatgacaatataaaaagacagaaactcaaaaagtatattcactagaagacagtggagccaaagaaaagcaagttgaaaaagaaagaggagacaatttaacgagccctaaaggcaagaagtgtgtcttctcctgcccatttctctctcccacagtacatcctgcattgaaccacgtgttgctggttactaaactttatggtgtcacaaaaagacaaatgattgtaggatccatggaagtgcacttaggcttgctgtggtggaggccatagtggagatgaaggctctgctctgaagctcttaattgtgtattcaccagtgggatggacaccctttcagcctaagcgtacgagtgaaaacaatgatgtcaaaagacaatagcaagtataggctactatttagggcaaaaggaatcttgaaatgaaagaaacagaactaaaaggctaactggagcataatccttacagttttgcactcaggggattaagtttgaaacatagtgtcttttggccaaattgaacctacttgtaatgtggaccaacttactttacacattttcatcagtcccaatgtatggaattagcttagttttctcatgcttgattaaaacaagacaactaaagctaatcattcctcttctagactttgtgtatatgatttaatcttttatttttatttttgtagaatgggggtaaaactacaaatctcctcctcagggtgatatttttaaagattaaggagtatgacatcaattaacagtctttaaagatgttacatacgctcaaagcaatgtgattaagactttttgcctatttcttgtataagttaaggcagccataaatgaaaatacaaaacaaacgtttgcttttgtatttgattcacaagaggattctccctgagtgtcaggggaggctgtgggacttcaccacgtggacaaacgaaagcacaggctactcagacttggccacaggtcataggtcagagaattttttcttcaaatgtagaaatgtaaattttcagcaataaaatatctgcatgccta

SEQ ID NO: 250911 - DNA, 4423 bp, Artificial Sequence
  derived and/or modified sequence
atggggcccccttccagctcaggcttctatgtgagccgcgcagtggccctgctgctggctgggctggtagccgccctcctgctggcgctggccgtactcgccgccttgtacggccactgcgagcgcgtcccaccgtcggagctgcctggactcagggacttggaagccgagtcttcccctcccctcaggcagaagccgacgccaaccccgaaacccagcagtgcacgcgagctagcggtgacgaccaccccgagcaactggcgacccccggggccctgggaccagctacgcctgccgccctggctcgtgccgctgcactacgatctggagctgtggccgcagctgaggcccgacgagcttccggccgggtctttgcccttcactggccgcgtgaacatcacggtgcgctgcacggtggccacctctcgactgctgctgcatagcctcttcctttccccgggcactgggaacgccacagtgggccgcgtgcccgtggacgacgtgtggttcgcgctggacacggaatacatggtgctggagctcagtgagcccctgaaacctggtagcagctacgagctgcagcttagcttctcgggcctggtgaaggaagacctcagggagggactcttcctcaacgtctacaccgaccagggcgagcgcagggccctgttagcgtcccagctggaaccaacatttgccaggtatgttttcccttgttttgatgagccagctctgaaggcaacttttaatattacaatgattcatcatccaagttatgtggccctttccaacatgccaaagctaggtcagtctgaaaaagaagatgtgaatggaagcaaatggactgttacaaccttttccactacgccccacatgccaacttacttagtcgcatttgttatatgtgactatgaccacgtcaacagaacagaaaggggcaaggagatacgcatctgggcccggaaagatgcaattgcaaatggaagtgcagactttgctttgaacatcacaggtcccatcttctcttttctggaggatttgtttaatatcagttactctcttccaaaaacagatataattgccttgcctagttttgacaaccatgcaatggaaaactggggactaatgatatttgatgaatcaggattgttgttggaaccaaaagatcaactgacagaaaaaaagactctgatctcctatgttgtctcccacgagattggacaccagtggtttggaaacttggttaccatgaattggtggaacaatatctggctcaacgagggttttgcatcttattttgagtttgaagtaattaactactttaatcctaaactcccaagaaatgagatctttttttctaacattttacataatatcctcagagaagatcacgccctggtgactagagctgtggccatgaaggtggaaaatttcaaaacaagtgaaatacaggaactctttgacatatttacttacagcaagggagcgtctatggcccggatgctttcttgtttcttgaatgagcatttatttgtcagtgcactcaagtcatatttgaagacattttcctactcaaacgctgagcaagatgatctatggaggcattttcaaatggccatagatgaccagagtacagttattttgccagcaacaataaaaaacataatggacagttggacacaccagagtggttttccagtgatcactttaaatgtgtctactggcgtcatgaaacaggagccattttatcttgaaaacattaaaaatcggactcttctaaccagcaatgacacatggattgtccctattctttggataaaaaatggaactacacaacctttagtctggctagatcaaagcagcaaagtattcccagaaatgcaagtttcagattctgaccatgactgggtgattttgaatttgaatatgactggatattatagagttaattatgataaattaggttggaagaaactaaatcaacaacttgaaaaggatcctaaggcgattcctgttattcacagactgcagttgattgatgatgccttttccttgtctaaaaacaattatattgagattgaaacagcacttgagttaaccaagtaccttgctgaagaagatgaaattatagtatggcatacagtcttggtaaacttggtaaccagggatcttgtttctgaggtgaacatctatgatatatactcattattaaagaggtacctattaaagagacttaatttaatatggaatatttattcaactataattcgtgaaaatgtgttggcattacaagatgactacttagctctaatatcactggaaaaactttttgtaactgcgtgttggttgggccttgaagactgccttcagctgtcaaaagaacttttcgcaaaatgggtggatcatccagaaaatgaaataccttatccaattaaagatgtggttttatgttatggcattgccttgggaagtgataaagagtgggacatcttgttaaatacttacactaatacaacaaacaaagaagaaaagattcaacttgcttatgcaatgagctgcagcaaagacccatggatacttaacagatatatggagtatgccatcagcacatctccattcacttctaatgaaacaaatataattgaggttgtggcttcatctgaagttggccggtatgtcgcaaaagacttcttagtcaacaactggcaagctgtgagtaaaaggtatggaacacaatcattgattaatctaatatatacaatagggagaaccgtaactacagatttacagattgtggagctgcagcagtttttcagtaacatgttggaggaacaccagaggatcagagttcatgccaacttacagacaataaagaatgaaaatctgaaaaacaagaagctaagtgccaggatagctgcgtggctaaggagaaacacatagcttgtggctatctttcagcactcctcttgcatattataatgtagtttgttcacagttttgtcttccaatactttgtgagtctggaaaaccacacattttatttgtatttcagtcacatttattactcagagtgccattcttctcatattgtcatgtttggccctgagggtgggtgattgctgacaattttgccaatgctgctgtatttctgggaaagatgtcacttcatgttgggttataatcccacagaatttactttaaatgtcacgtaaaaacaaattcacctaagatagtcttgcttattttgttgcgaaggccagtggaatataaaaatcaatggcattaatgaggagcacattctttgctgagggaaataacagtttttccaggccctagggtttatttagttcaacattgaagattgaaaagactaatgagaagataacatgacaatataaaaagacagaaactcaaaaagtatattcactagaagacagtggagccaaagaaaagcaagttgaaaaagaaagaggagacaatttaacgagccctaaaggcaagaagtgtgtcttctcctgcccatttctctctcccacagtacatcctgcattgaaccacgtgttgctggttactaaactttatggtgtcacaaaaagacaaatgattgtaggatccatggaagtgcacttaggcttgctgtggtggaggccatagtggagatgaaggctctgctctgaagctcttaattgtgtattcaccagtgggatggacaccctttcagcctaagcgtacgagtgaaaacaatgatgtcaaaagacaatagcaagtataggctactatttagggcaaaaggaatcttgaaatgaaagaaacagaactaaaaggctaactggagcataatccttacagttttgcactcaggggattaagtttgaaacatagtgtcttttggccaaattgaacctacttgtaatgtggaccaacttactttacacattttcatcagtcccaatgtatggaattagcttagttttctcatgcttgattaaaacaagacaactaaagctaatcattcctcttctagactttgtgtatatgatttaatcttttatttttatttttgtagaatgggggtaaaactacaaatctcctcctcagggtgatatttttaaagattaaggagtatgacatcaattaacagtctttaaagatgttacatacgctcaaagcaatgtgattaagactttttgcctatttcttgtataagttaaggcagccataaatgaaaatacaaaacaaacgtttgcttttgtatttgattcacaagaggattctccctgagtgtcaggggaggctgtgggacttcaccacgtggacaaacgaaagcacaggctactcagacttggccacaggtcataggtcagagaattttttcttcaaatgtagaaatgtaaattttcagcaataaaatatctgcatgcct

SEQ ID NO: 250912 - DNA, 2973 bp, Artificial Sequence
  derived and/or modified sequence
atgggcccccccagcagcagcggcttctacgtgagccgggccgtggcccttttgttagcaggtctcgtggccgcacttctcttagccctggctgtgctggccgctctgtacggacactgcgaacgagtgcctccctccgaactcccgggcctccgggatcttgaagcagagagctcccctcctctccggcagaaacctactcccacacccaaaccgagctctgctagagagctcgcggtcacaactaccccaagtaactggcgcccaccaggtccttgggatcaacttaggctgccaccatggctcgtgccactccactacgacctggaactttggccacagctgagacctgacgaactgccagcaggcagcctgccatttacggggagggtgaatatcaccgtgcgttgcactgtggcaacctcccgactgttattacacagcctgtttcaagattgcgagcgggcagaagtgcggggaccgttaagcccaggcacggggaacgcgacagtggggagagttcccgtggacgatgtatggttcgcactggatacggagtatatggtgctggaactgagcgaacctctgaagcccggtagctcctatgagttgcagctaagcttttctggtctagtgaaagaggacttacgggagggactcttcctgaatgtgtatactgatcagggtgaaaggagggccctgctagcatcccagttggagcctacatttgccagatatgtgttcccgtgcttcgacgagccagcgctgaaagctacattcaatataactatgatccaccacccgtcttatgtggctctcagcaacatgcccaaattgggtcagtcggagaaggaagatgtgaatggcagtaagtggacagtgactaccttttctaccacccctcacatgccaacctacttggtcgccttcgtaatctgcgactacgaccatgtgaatcggactgaacgaggcaaagaaatcaggatctgggcccggaaggacgccatcgcgaacggcagcgccgattttgcgcttaatatcaccggacctatattttcgtttttggaggatcttttcaacatctcatatagccttccaaaaaccgacatcatagcccttccaagtttcgataatcatgcgatggagaactggggtttgatgattttcgatgagagtggactactcctggagccaaaggatcaactgaccgagaagaaaactctcatctcctacgtggtttcacacgaaatcggccaccagtggttcgggaatctggtcaccatgaactggtggaacaacatctggctaaatgaagggttcgcctcctatttcgagttcgaagtgattaactatttcaacccaaaattgcccagaaatgagatctttttttccaacatcttacacaatatccttcgtgaagaccacgccctggtcacccgggccgtggctatgaaagtggaaaactttaagacctctgaaatacaagaactctttgacatcttcacctactccaagggggccagtatggctaggatgttaagttgttttctgaatgagcatctgtttgtgagtgccctgaaatcctacctcaagactttttcttactctaatgcagagcaggacgacctgtggaggcacttccagatggctattgacgaccagagtaccgtgatcctgcccgcgacgatcaaaaatattatggacagctggactcaccagtcaggctttccggtgatcaccctgaacgtctctacgggagtgatgaagcaggaacccttctatctagagaacattaagaataggaccttgctcacaagtaatgacacgtggattgtgcctattctctggatcaagaacgggacgacacaacctctggtttggctggaccaaagctcaaaagttttcccagagatgcaggtgtccgattccgaccacgattgggtcattcttaacttgaatatgacaggatactatcgggtcaattacgacaaactgggttggaaaaagctaaaccagcagcttgagaaggaccctaaagcaatccccgtcattcatagactccagctcatcgatgatgccttctccttgtctaagaataactacatcgaaattgaaacagccctggaattgaccaagtacctcgccgaggaggatgaaattatcgtatggcatacagtcctggttaacctggtgactcgcgacttggtctcagaggtgaacatatatgatatttacagcttgctcaagcgatatctcctgaaacgcttgaacctgatctggaatatctatagtacaataatcagggaaaacgtcctcgcactgcaagacgactacttagctctgatctccctggagaaattatttgtgacggcgtgctggctgggcttggaggactgtctgcagctcagtaaagagctgtttgctaagtgggtggaccacccggagaatgagataccctatccgataaaagacgtggtcctgtgctacggcatcgcactggggtcagataaggagtgggatatactcttaaacacttataccaacacaacaaacaaagaggaaaaaattcagctggcatatgccatgagctgcagtaaggacccatggatcctaaacaggtatatggaatacgccattagcacctcccctttcacttccaacgagactaacatcattgaggtggttgcaagcagtgaggttggccgctatgtggctaaagacttccttgtgaacaactggcaggccgtttccaaacgctatgggactcagagcttgatcaatcttatctataccatagggagaactgtgactaccgatctacagatagttgagctgcagcaatttttcagtaacatgctggaggagcatcagcggatccgtgtccacgccaatctgcaaacaataaaaaacgagaatttgaagaataagaagctgagtgctaggatagctgcatggcttcgccggaatacttag

SEQ ID NO: 250913 - DNA, 2940 bp, Artificial Sequence
  derived and/or modified sequence
atgggcccccccagcagcagcggcttctacgtgagccgggccgtggcacttttacttgccggtttagtggctgccctcttactggctctggccgtgcttgcagccctttatgggcactgtgagcgcgtgccaccctccgagttgcccgggctgagggaccttgaggccgagagcagtcctcccctgaggcagaagcccacccccacaccgaagccttcatcagctcgagagcttgccgttactacgaccccaagtaattggcgccccccaggcccgtgggatcagttgcgcttgccgccttggctggttccccttcactacgatctagagctatggccacagcttcgacccgacgagcttcctgctggctccctgccatttacaggaagagtgaatatcacagtgagatgtacagtggcaacgtcccgcctgttactccactcactattcttgagccccgggactggaaatgctacggtcgggcgggttccggtcgatgacgtatggtttgctctcgacacagaatatatggtgttggaattatctgagcctctcaaacccggtagttcctacgaactgcagcttagcttctcaggcctggtgaaagaggatttgcgggagggcttgtttctcaacgtatacacagatcagggcgaacggagggcactcctggctagccagctggagccaacattcgctaggtatgtcttcccttgtttcgatgaacctgccctcaaagccaccttcaatattacaatgattcatcatccctcttatgtagctttaagtaacatgcctaaactgggccagtccgaaaaggaggatgtcaatggcagtaagtggaccgtgaccacattctctacgacacctcacatgccaacctacctagtagcctttgtgatttgcgattacgatcacgtgaataggactgagcggggaaaggaaattagaatttgggctagaaaggatgctatcgcgaacggatctgcagatttcgcactgaacataactgggcctattttctcatttcttgaggatctgtttaacatctcctatagtctccccaaaaccgacatcatcgcactaccttccttcgacaatcacgcaatggagaactgggggctcatgatcttcgatgaatctggtcttctcctcgagcccaaggatcagcttaccgaaaagaagacactgatctcgtatgtcgtcagccacgaaattgggcatcagtggtttgggaacctggtgactatgaactggtggaacaatatttggcttaacgaaggcttcgcatcatacttcgagttcgaggttatcaactattttaatcccaagcttccacgtaacgagatttttttctccaatatactgcacaacatacttcgcgaagaccacgcgctggtgacaagagccgtggctatgaaggtcgagaactttaaaacatctgagatccaagaattgtttgatatctttacttactccaaaggcgcgtccatggcgcgtatgcttagttgctttctcaatgaacatttgttcgtcagcgctttaaaaagttacctgaaaactttttcatactcaaatgcggaacaggatgacctctggcgccactttcagatggcaattgacgatcagtctacagttatcctgccagctacaattaagaacattatggattcctggacccaccagtccggctttccagtgatcacgctaaatgtgtccacaggagtgatgaagcaggagccattctatctagagaatattaagaataggacccttctaacaagcaatgatacatggattgtccctatcttatggataaagaacggcactactcagcctctcgtctggttggaccagtcaagcaaagtattccctgagatgcaggtgtctgattccgaccacgattgggtgatcttgaatctcaatatgaccggctattaccgggtcaactacgacaagcttggctggaagaagctcaatcaacagctggagaaagaccccaaggccattcctgtcattcacaggctgcagctgatcgacgatgccttcagtctgtcgaagaacaactatatcgagattgaaacagccctcgagttgaccaaataccttgccgaggaagacgaaattattgtgtggcacacagtccttgtgaacctcgtcactagagacctggtgtccgaagtcaatatttatgacatctattccctgctgaagcgctatctcttaaagcgactgaatctgatatggaacatttactcaacaatcatcagggagaacgttctggcactccaggacgactaccttgccctgatcagtttggaaaaactcttcgtaacagcctgctggcttggcctggaagactgtcttcagctgtccaaagaactgttcgccaagtgggtggatcacccggagaatgaaattccgtatccaatcaaggatgtcgtgctgtgctacggcatcgcattagggtcagacaaggagtgggacatactgctgaatacttatacaaacaccaccaacaaagaggagaaaatccagttggcgtacgctatgtcatgctccaaggacccctggatcctaaatagatacatggagtacgctatatccaccagcccattcacatctaatgaaaccaacatcatcgaggtggtggcaagcagtgaagttggaagatacgtggcaaaggattttctggtgaataactggcaggcagtttctaagaggtacggcacccagtctctgattaacctcatttacacaatcgggcgcacagtgacgaccgacctccaaatcgtggagcttcagcagttcttctcaaatatgctggaagaacaccagcgcatcagagtgcacgctaatctgcagaccatcaagaacgagaacctgaaaaataagaagctgtccgccaggattgctgcctggctgagacgcaatacatag

SEQ ID NO: 250914 - DNA, 2973 bp, Artificial Sequence
  derived and/or modified sequence
atgggacctccctcatctagtggattttacgtctctcgggcagtggccttgctgctggctggcttggtggctgctctgttgctagccctcgctgtgctcgctgcactatacgggcattgtgagagggtgcctcccagcgagctcccagggctcagagaccttgaggctgaaagctctcctccactgcgacagaaacctactcccacccctaaaccgagcagcgctagggaactggctgttacaaccaccccctcaaactggaggcctccaggtccctgggaccagttgagactgcccccatggcttgtaccacttcattacgatctcgagctctggccccagcttaggcccgatgaactgccggcaggttccctaccattcaccggaagggtcaacatcaccgtgcggtgcactgtcgcaacatcacgactgctcctccactctctgttccaggattgtgagagagctgaagtcagaggtccattgagccctgggaccggaaacgcaaccgttgggagggtcccagtggatgacgtgtggtttgctttggacactgaatacatggtgcttgagctcagtgaaccgctcaagccaggaagctcctatgaactgcagctctcattctccggcctggtgaaggaggatcttagggagggacttttcctgaatgtgtacactgatcaaggcgagcggagagcccttctcgcatcccagctcgagccaactttcgcgcgttacgtctttccgtgctttgatgaacccgcactgaaagctactttcaatatcactatgatacaccacccgtcctatgtggctttgtccaacatgcctaaactgggacaatccgagaaggaggacgtgaatggcagtaagtggactgtgaccacattcagcacaactccacacatgcccacgtatctagtggcctttgttatttgcgattacgatcatgtcaaccgaaccgagcggggaaaggagattcgcatttgggcacggaaagacgctatagcaaatggttctgccgattttgctctcaatatcactggcccaatcttttcattcctggaagacctatttaacatcagttattccctgcctaagacggatattatagccctgcctagtttcgataatcatgctatggagaactggggcctcatgatctttgatgagtcgggactgttactcgagccaaaagatcagcttaccgaaaaaaagactctgatttcctacgtcgttagtcatgaaataggtcatcagtggttcggtaatttggtaaccatgaactggtggaacaacatctggctgaacgagggctttgccagttattttgagttcgaagttatcaattacttcaaccctaaactcccacggaatgagattttctttagtaacatcttgcataacatcctgcgagaggaccatgcacttgttacgcgcgcagtagctatgaaggttgagaattttaaaacaagtgaaattcaggagctgttcgatatctttacttatagtaaaggtgcgtccatggctagaatgctcagctgttttctaaatgagcacctgtttgttagtgcgctgaagtcttacctgaaaacattctcatactcaaatgccgagcaagacgacctttggaggcatttccaaatggcgatcgacgatcagagcacggtcattctgccagctactatcaaaaacattatggattcatggacccaccagtctgggtttccagtgatcactctaaatgtaagcacgggggtgatgaaacaggaacctttctatctggagaacattaagaatcggacccttctgactagtaacgatacttggatcgtcccaattctgtggatcaaaaacggcaccactcaaccactagtctggctggaccagagttcaaaggtcttccccgaaatgcaggtgtccgactccgaccatgactgggtcattctgaacctaaatatgacgggctattatcgcgtgaattacgataagctcggctggaaaaaactcaatcagcaacttgaaaaggatccaaaagccatccccgtaatccaccgcctgcagctgatagatgatgcgttttccctgtccaaaaataattatatcgaaatcgagaccgccctagagttgacaaagtacctggctgaggaggatgagatcattgtctggcacactgtgcttgtgaacctcgttacacgggaccttgtctcagaggtcaacatctacgacatatactccttgctgaaacgatatcttctcaaaaggttgaacctgatctggaatatctattccaccatcattcgggagaacgtcttggccctgcaggatgactatctcgcactcatcagtctggaaaaactattcgtgacagcttgctggttggggcttgaggactgccttcaactgtccaaggagctattcgccaaatgggtggaccaccccgaaaacgagatcccttacccgatcaaggatgtggtcctgtgttacgggatagccctaggttccgataaagaatgggatattctgctgaacacttacaccaacacgaccaacaaagaggaaaaaattcaactggcgtacgccatgtcgtgctctaaggatccctggattctcaatcggtatatggagtatgccatcagcaccagtcctttcacaagtaatgagacaaatatcatcgaggtcgtggcttcctctgaagttggcaggtacgttgccaaggacttcctagtgaataactggcaggccgtgagtaagagatacggtacacaatctttgattaatctaatatacactataggaagaaccgtaaccaccgacctgcagattgtggagctgcagcagttcttctctaatatgcttgaggaacatcaacgcattcgcgtgcacgcaaacctgcaaaccatcaaaaacgaaaatctcaaaaataagaaactatccgctcgcatagccgcatggctgcgtcgcaacacttag

SEQ ID NO: 250915 - DNA, 2940 bp, Artificial Sequence
  derived and/or modified sequence
atggggcctccaagctcctctgggttttatgtaagtagggccgtggcactcctccttgctggtttagtggcagccttgctgttggcactagccgtactggcagccctatacgggcactgtgagagagtgccacctagtgaactgccagggttgagagatctggaagcagaatccagtccccctctgagacagaaacctaccccaacgcccaagccttcctcagctagagaactcgccgtcaccacaacaccttctaactggcgcccacctggaccctgggaccagctgaggttgcccccttggttggttccactccactatgatctggaactctggccgcagcttcgtcctgatgaattaccggcaggctccttaccctttaccggccgagttaatatcacagtcagatgtactgtggccacatcacgtctcctgttgcattccctcttcctttcccccggtacaggtaacgccactgtgggtcgagtgcctgtcgatgacgtatggtttgctttggatacggagtacatggtgctggagttgagcgaaccgttgaagccgggtagttcgtacgagctgcaacttagctttagcgggttggtgaaggaggacctgcgcgaggggctgttcctgaatgtgtataccgaccagggcgagcgccgagcgcttctggccagccagttggagcccactttcgcccgatacgtatttccgtgctttgatgagcccgcacttaaggcaacgtttaatattaccatgattcaccatccaagttacgtggcactgtccaacatgcccaagctaggccagagtgagaaggaggacgtcaacggatctaagtggacagtaaccactttcagcaccaccccccacatgcctacttatttggtcgcctttgtgatctgcgattatgatcacgtgaacagaaccgagcggggaaaagagatacggatctgggcacgcaaagacgcgattgcaaatggaagcgctgactttgcgctgaatattacagggccaatctttagttttctggaggatctattcaacatcagctattcgttaccgaagacagatattatcgctcttccctcctttgataatcacgccatggaaaactggggcctcatgatttttgatgagtccggcctcctcctcgagcctaaggaccagttgaccgagaagaaaacgttgattagctacgtcgtgtcacatgagatcggccaccagtggttcggaaacctcgtcactatgaattggtggaacaatatttggctcaacgagggattcgcaagttatttcgagttcgaggtcatcaattactttaaccccaaactgccccgaaatgagatcttcttctcgaacatcctgcacaatattcttagagaggaccatgctcttgtgacaagggcagttgcaatgaaggtcgagaacttcaagacgagcgagatccaggaactgttcgatatctttacatactctaagggggcatcgatggccaggatgctttcctgttttcttaatgagcatctcttcgtgtctgcgctgaagtcttacttgaagacattcagctactctaatgcggagcaggatgatctatggagacactttcagatggctattgatgatcagagtactgtgattctgccggcaactataaagaatattatggactcttggacccaccagtccgggtttccagtgattactctcaacgtttctaccggagtaatgaagcaggagccattttaccttgaaaacatcaagaatagaacgctgctaacatccaacgatacatggattgtccccattttgtggattaaaaacggcactactcagccactcgtgtggctcgaccaaagcagtaaggtttttccagaaatgcaggtttccgatagcgatcacgactgggtgattcttaaccttaacatgaccgggtattatagggtcaattacgacaaactgggttggaaaaagctgaaccagcaactcgagaaggacccaaaggccatacccgtgatccatcgattgcagctgatagacgatgctttcagcctgagcaagaacaactatatagagattgagaccgctctggaactgacaaagtacctcgccgaggaggacgagatcatagtgtggcatacagtactggttaatctcgtgacaagagacctggtcagtgaagtcaatatatacgatatctatagcctcttgaaaagatacctgcttaaacggctgaacctcatctggaatatatacagtacaattatacgcgaaaacgtgctagcgctgcaagatgattacctggcccttatctcgttggagaagttgttcgtcactgcgtgttggctggggcttgaggattgtctgcaactctccaaggagctcttcgctaagtgggtagatcatcctgaaaatgagatcccctacccaatcaaagatgttgtcttgtgctacgggatcgcacttggatccgacaaggaatgggacattctcctcaatacttacacaaataccaccaacaaggaagagaagattcagctggcctacgcaatgagctgtagcaaggacccatggattttaaatagatacatggagtacgctatctccacctccccctttaccagcaacgagacaaacataatcgaggttgttgccagtagcgaggttggacgatatgtagccaaagactttctggtcaacaattggcaagctgtgtcaaaaaggtacgggacgcaatccctcatcaacttgatctacaccattgggcgtaccgtcactacagatcttcagattgtcgagttacaacagttcttctccaatatgcttgaggagcatcagaggataagagtgcacgccaatttacagactatcaaaaatgaaaacctgaagaataagaaactttctgccaggatcgcagcctggctccgtagaaacacgtag

SEQ ID NO: 250916 - protein, 142 aa, Artificial Sequence
  derived and/or modified sequence
MAAAAEGVLATRSDEPARDDAAVETAEEAKEPAEADITELCRDMFSKMATYLTGELTATSEDYKLLENMNKLTSLKYLEMKDIAINISRNLKDLNQKYAGLQPYLDQINVIEEQVAALEQAAYKLDAYSKKLEAKYKKLEKR

SEQ ID NO: 250917 - protein, 74 aa, Artificial Sequence
  derived and/or modified sequence
MNKLTSLKYLEMKDIAINISRNLKDLNQKYAGLQPYLDQINVIEEQVAALEQAAYKLDAYSKKLEAKYKKLEKR

SEQ ID NO: 250918 - protein, 99 aa, Artificial Sequence
  derived and/or modified sequence
MFSKMATYLTGELTATSEDYKLLENMNKLTSLKYLEMKDIAINISRNLKDLNQKYAGLQPYLDQINVIEEQVAALEQAAYKLDAYSKKLEAKYKKLEKR

SEQ ID NO: 250919 - DNA, 516 bp, Artificial Sequence
  derived and/or modified sequence
atggagaagagactgcaggaggcccagctgtacaaggaggagggcaaccagagatacagagagggcaagtacagagacgccgtgagcagataccacagagccctgctgcagctgagaggcctggaccccagcctgcccagccccctgcccaacctgggcccccagggccccgccctgacccccgagcaggagaacatcctgcacaccacccagaccgactgctacaacaacctggccgcctgcctgctgcagatggagcccgtgaactacgagagagtgagagagtacagccagaaggtgctggagagacagcccgacaacgccaaggccctgtacagagccggcgtggccttcttccacctgcaggactacgaccaggccagacactacctgctggccgccgtgaacagacagcccaaggacgccaacgtgagaagatacctgcagctgacccagagcgagctgagcagctaccacagaaaggagaagcagctgtacctgggcatgttcggctag

SEQ ID NO: 250920 - DNA, 423 bp, Artificial Sequence
  derived and/or modified sequence
atggagaagagactgcaggaggcccagctgtacaaggaggagggcaaccagagatacagagagggcaagtacagagacgccgtgagcagataccacagagccctgctgcagctgagaggcctggaccccagcctgcccagccccctgcccaacctgggcccccagggccccgccctgacccccgagcaggagaacatcctgcacaccacccagaccgactgctacaacaacctggccgcctgcctgctgcagatggagcccgtgaactacgagagagtgagagagtacagccagaaggtgctggagagacagcccgacaacgccaaggccctgtacagagccggcgtggccttcttccacctgcaggactacgaccaggccagacactacctgctggccgccgtgaacagacagcccaagtag

SEQ ID NO: 250921 - DNA, 516 bp, Artificial Sequence
  derived and/or modified sequence
atggagaagagactgcaggaagcccaactgtataaggaggaaggaaatcagcgctacagagagggaaagtatagagatgctgtcagcagatatcaccgggcattgcttcagctgagaggattggacccctctctgccatccccgcttccaaacctgggacctcagggcccggcactcactccagagcaggagaatattctccacactacgcagaccgattgctacaataatctggccgcttgtttgcttcaaatggagcctgtgaattatgaacgtgttagggagtactcccagaaagtgcttgagcggcaacctgataacgctaaggctttatatcgggctggggtggccttcttccatttgcaggattacgaccaggcacgacactatctgctcgcagccgttaacagacagccgaaggatgctaacgtgaggcggtacttacagctcacacaatctgaactctcttcttatcaccgaaaagaaaaacagctgtacttaggaatgttcgggtag

SEQ ID NO: 250922 - DNA, 423 bp, Artificial Sequence
  derived and/or modified sequence
atggaaaagaggctgcaagaagcccagctgtacaaggaggaaggcaaccagcggtaccgcgagggcaaataccgggatgccgtctccaggtatcacagggcattgctccagctgcgtggactcgatcctagtctgcccagtccattgcccaacttaggtcctcaggggccagctctgacacccgagcaggaaaatatactgcataccacccagacagactgctacaacaacctggcggcttgtcttcttcagatggaacctgtcaactatgaacgggtcagagagtatagccagaaggtgctggaaagacagcccgacaatgccaaggctctttatcgggctggagttgcgtttttccatctccaagactacgaccaggcgcgccactatctccttgccgccgtaaacagacagccaaagtag

SEQ ID NO: 250923 - DNA, 516 bp, Artificial Sequence
  derived and/or modified sequence
atggaaaaacgcctccaggaggctcagctgtataaggaagaagggaaccaacgctatagggaggggaagtacagggatgcagttagtcggtaccatagagccttgttgcagttgcgcggacttgatccatccctgccatcccctctgccaaatctcgggccccagggcccagctttgacaccggagcaggagaacattttgcatactacacagactgactgttataataatctggccgcatgcctccttcagatggagcccgtgaactacgaacgcgtaagagagtactctcagaaagtcctggaacggcagcccgacaacgccaaagccctttaccgggcaggagtcgccttttttcatctgcaggactacgaccaggcccggcattacctcctggcagctgtcaatagacagcctaaagacgccaacgttagacggtatcttcagctgactcagagcgaattatctagttaccacagaaaagagaagcagctttacctggggatgttcggttag

SEQ ID NO: 250924 - DNA, 516 bp, Artificial Sequence
  derived and/or modified sequence
atggagaagaggctgcaggaggcccagctgtacaaggaggagggcaaccagcgctaccgggagggcaagtacagagatgctgtgagccgctaccaccgggccctgctgcagctgcggggcctggaccccagcctgcccagccccctgcccaacctgggcccccagggccctgccctgaccccagagcaggagaacatcctgcacaccacccagacagactgctacaacaacctggccgcctgcctgctgcagatggagcctgtgaactatgaaagagtgcgggagtacagccagaaggtgctggagcggcagcctgacaatgccaaggccctgtaccgggccggcgtggccttcttccacctgcaggactatgaccaggcccggcactacctgctggccgctgtgaaccggcagcccaaggatgccaacgtgcggcgctacctgcagctgacccagagcgagctgagcagctaccacaggaaggagaagcagctgtacctgggcatgtttggatag

SEQ ID NO: 250925 - DNA, 423 bp, Artificial Sequence
  derived and/or modified sequence
atggagaagaggctgcaggaggcccagctgtacaaggaggagggcaaccagcgctaccgggagggcaagtacagagatgctgtgagccgctaccaccgggccctgctgcagctgcggggcctggaccccagcctgcccagccccctgcccaacctgggcccccagggccctgccctgaccccagagcaggagaacatcctgcacaccacccagacagactgctacaacaacctggccgcctgcctgctgcagatggagcctgtgaactatgaaagagtgcgggagtacagccagaaggtgctggagcggcagcctgacaatgccaaggccctgtaccgggccggcgtggccttcttccacctgcaggactatgaccaggcccggcactacctgctggccgctgtgaaccggcagcccaagtag

SEQ ID NO: 250926 - DNA, 516 bp, Artificial Sequence
  derived and/or modified sequence
atggagaagcggctgcaggaggcccagctgtacaaggaggagggcaatcagcgctaccgcgaaggcaaatacagagatgcagtttcccggtaccatagagccctcttacagctccgcggtctggacccttcgctgcccagcccgcttcccaatctcgggcctcaaggccccgcactcaccccagagcaggagaacatactacacaccacccagacagactgttataataatctcgctgcttgtctgctgcagatggagcccgtgaattatgaaagagtaagggagtattcccagaaggttctggagcgacagcccgataacgctaaagccctgtaccgagcaggggtcgctttctttcacctgcaagattacgaccaagcccggcattatctcctggccgctgtgaacagacagccaaaggatgctaacgtgaggcgatatttgcagcttacacagagcgagctctcctcttatcaccgcaaggaaaaacagctgtacctggggatgtttggttag

SEQ ID NO: 250927 - DNA, 423 bp, Artificial Sequence
  derived and/or modified sequence
atggagaagcggctgcaggaggcccagctgtacaaggaggagggcaaccagcgctatcgggaggggaaataccgggatgccgtgagcagatatcacagagctttactgcagctgcgtggcctcgacccctccttaccaagtcccctgcccaatttaggtcctcagggaccggccctcactcctgaacaggaaaatatcttgcacaccactcaaaccgattgctataataatttggctgcttgtttgttgcagatggagccggtcaattacgaaagggtccgtgagtactcacagaaggtgctggaacggcagccggataacgccaaggccctctacagagccggagtggcctttttccatctccaggactacgatcaggcccgtcattacttgctggccgcagttaatagacaacccaaatag

SEQ ID NO: 250928 - DNA, 516 bp, Artificial Sequence
  derived and/or modified sequence
atggagaagcggctgcaggaggcccagctgtacaaggaggagggcaatcagaggtaccgcgaagggaagtatcgggatgctgtgagccgttatcatagagccctgcttcagctgcgcggactggacccttcacttcccagccccctccccaacctcggaccacagggccctgctctcacccctgagcaggaaaacatcctccacaccactcaaacagactgctacaataatctggccgcatgcctccttcaaatggagcctgttaattacgagcgagttcgggaatacagccagaaggtgttagaacgccagcctgataatgcgaaggctctgtaccgggccggcgttgcctttttccatttacaagattacgaccaggcaaggcactacttgcttgcagccgtcaatcgtcagccaaaagatgcaaacgtccgcaggtacttacagctcacccagagtgagctttctagctatcatagaaaagagaaacagctgtatttaggaatgtttggttag
